United States Patent Application Publication US 2024/0327476 A1 - sequence listing, part 33

SEQ ID NO: 42070 - protein, 1744 aa, Homo sapiens
MRLLWGLIWASSFFTLSLQKPRLLLFSPSVVHLGVPLSVGVQLQDVPRGQVVKGSVFLRNPSRNNVPCSPKVDFTLSSERDFALLSLQVPLKDAKSCGLHQLLRGPEVQLVAHSPWLKDSLSRTTNIQGINLLFSSRRGHLFLQTDQPIYNPGQRVRYRVFALDQKMRPSTDTITVMVENSHGLRVRKKEVYMPSSIFQDDFVIPDISEPGTWKISARFSDGLESNSSTQFEVKKYVLPNFEVKITPGKPYILTVPGHLDEMQLDIQARYIYGKPVQGVAYVRFGLLDEDGKKTFFRGLESQTKLVNGQSHISLSKAEFQDALEKLNMGITDLQGLRLYVAAAIIEYPGGEMEEAELTSWYFVSSPFSLDLSKTKRHLVPGAPFLLQALVREMSGSPASGIPVKVSATVSSPGSVPEVQDIQQNTDGSGQVSIPIIIPQTISELQLSVSAGSPHPAIARLTVAAPPSGGPGFLSIERPDSRPPRVGDTLNLNLRAVGSGATFSHYYYMILSRGQIVFMNREPKRTLTSVSVFVDHHLAPSFYFVAFYYHGDHPVANSLRVDVQAGACEGKLELSVDGAKQYRNGESVKLHLETDSLALVALGALDTALYAAGSKSHKPLNMGKVFEAMNSYDLGCGPGGGDSALQVFQAAGLAFSDGDQWTLSRKRLSCPKEKTTRKKRNVNFQKAINEKLGQYASPTAKRCCQDGVTRLPMMRSCEQRAARVQQPDCREPFLSCCQFAESLRKKSRDKGQAGLQRALEILQEEDLIDEDDIPVRSFFPENWLWRVETVDRFQILTLWLPDSLTTWEIHGLSLSKTKGLCVATPVQLRVFREFHLHLRLPMSVRRFEQLELRPVLYNYLDKNLTVSVHVSPVEGLCLAGGGGLAQQVLVPAGSARPVAFSVVPTAAAAVSLKVVARGSFEFPVGDAVSKVLQIEKEGAIHREELVYELNPLDHRGRTLEIPGNSDPNMIPDGDFNSYVRVTASDPLDTLGSEGALSPGGVASLLRLPRGCGEQTMIYLAPTLAASRYLDKTEQWSTLPPETKDHAVDLIQKGYMRIQQFRKADGSYAAWLSRDSSTWLTAFVLKVLSLAQEQVGGSPEKLQETSNWLLSQQQADGSFQDPCPVLDRSMQGGLVGNDETVALTAFVTIALHHGLAVFQDEGAEPLKQRVEASISKANSFLGEKASAGLLGAHAAAITAYALTLTKAPVDLLGVAHNNLMAMAQETGDNLYWGSVTGSQSNAVSPTPAPRNPSDPMPQAPALWIETTAYALLHLLLHEGKAEMADQAAAWLTRQGSFQGGFRSTQDTVIALDALSAYWIASHTTEERGLNVTLSSTGRNGFKSHALQLNNRQIRGLEEELQFSLGSKINVKVGGNSKGTLKVLRTYNVLDMKNTTCQDLQIEVTVKGHVEYTMEANEDYEDYEYDELPAKDDPDAPLQPVTPLQLFEGRRNRRRREAPKVVEEQESRVHYTVCIWRNGKVGLSGMAIADVTLLSGFHALRADLEKLTSLSDRYVSHFETEGPHVLLYFDSVPTSRECVGFEAVQEVPVGLVQPASATLYDYYNPERRCSVFYGAPSKSRLLATLCSAEVCQCAEGKCPRQRRALERGLQDEDGYRMKFACYYPRVEYGFQVKVLREDSRAAFRLFETKITQVLHFTKDVKAAANQMRNFLVRASCRLRLEPGKEYLIMGLDGATYDLEGHPQYLLDSNSWIEEMPSERLCRSTRQRAACAQLNDFLQEYGTQGCQV

SEQ ID NO: 42071 - protein, 1744 aa, Homo sapiens
MRLLWGLIWASSFFTLSLQKPRLLLFSPSVVHLGVPLSVGVQLQDVPRGQVVKGSVFLRNPSRNNVPCSPKVDFTLSSERDFALLSLQVPLKDAKSCGLHQLLRGPEVQLVAHSPWLKDSLSRTTNIQGINLLFSSRRGHLFLQTDQPIYNPGQRVRYRVFALDQKMRPSTDTITVMVENSHGLRVRKKEVYMPSSIFQDDFVIPDISEPGTWKISARFSDGLESNSSTQFEVKKYVLPNFEVKITPGKPYILTVPGHLDEMQLDIQARYIYGKPVQGVAYVRFGLLDEDGKKTFFRGLESQTKLVNGQSHISLSKAEFQDALEKLNMGITDLQGLRLYVAAAIIESPGGEMEEAELTSWYFVSSPFSLDLSKTKRHLVPGAPFLLQALVREMSGSPASGIPVKVSATVSSPGSVPEVQDIQQNTDGSGQVSIPIIIPQTISELQLSVSAGSPHPAIARLTVAAPPSGGPGFLSIERPDSRPPRVGDTLNLNLRAVGSGATFSHYYYMILSRGQIVFMNREPKRTLTSVSVFVDHHLAPSFYFVAFYYHGDHPVANSLRVDVQAGACEGKLELSVDGAKQYRNGESVKLHLETDSLALVALGALDTALYAAGSKSHKPLNMGKVFEAMNSYDLGCGPGGGDSALQVFQAAGLAFSDGDQWTLSRKRLSCPKEKTTRKKRNVNFQKAINEKLGQYASPTAKRCCQDGVTRLPMMRSCEQRAARVQQPDCREPFLSCCQFAESLRKKSRDKGQAGLQRALEILQEEDLIDEDDIPVRSFFPENWLWRVETVDRFQILTLWLPDSLTTWEIHGLSLSKTKGLCVATPVQLRVFREFHLHLRLPMSVRRFEQLELRPVLYNYLDKNLTVSVHVSPVEGLCLAGGGGLAQQVLVPAGSARPVAFSVVPTAAAAVSLKVVARGSFEFPVGDAVSKVLQIEKEGAIHREELVYELNPLDHRGRTLEIPGNSDPNMIPDGDFNSYVRVTASDPLDTLGSEGALSPGGVASLLRLPRGCGEQTMIYLAPTLAASRYLDKTEQWSTLPPETKDHAVDLIQKGYMRIQQFRKADGSYAAWLSRDSSTWLTAFVLKVLSLAQEQVGGSPEKLQETSNWLLSQQQADGSFQDPCPVLDRSMQGGLVGNDETVALTAFVTIALHHGLAVFQDEGAEPLKQRVEASISKANSFLGEKASAGLLGAHAAAITAYALTLTKAPVDLLGVAHNNLMAMAQETGDNLYWGSVTGSQSNAVSPTPAPRNPSDPMPQAPALWIETTAYALLHLLLHEGKAEMADQASAWLTRQGSFQGGFRSTQDTVIALDALSAYWIASHTTEERGLNVTLSSTGRNGFKSHALQLNNRQIRGLEEELQFSLGSKINVKVGGNSKGTLKVLRTYNVLDMKNTTCQDLQIEVTVKGHVEYTMEANEDYEDYEYDELPAKDDPDAPLQPVTPLQLFEGRRNRRRREAPKVVEEQESRVHYTVCIWRNGKVGLSGMAIADVTLLSGFHALRADLEKLTSLSDRYVSHFETEGPHVLLYFDSVPTSRECVGFEAVQEVPVGLVQPASATLYDYYNPERRCSVFYGAPSKSRLLATLCSAEVCQCAEGKCPRQRRALERGLQDEDGYRMKFACYYPRVEYGFQVKVLREDSRAAFRLFETKITQVLHFTKDVKAAANQMRNFLVRASCRLRLEPGKEYLIMGLDGATYDLEGHPQYLLDSNSWIEEMPSERLCRSTRQRAACAQLNDFLQEYGTQGCQV

SEQ ID NO: 42072 - protein, 1698 aa, Homo sapiens
MRLLWGLIWASSFFTLSLQKPRLLLFSPSVVHLGVPLSVGVQLQDVPRGQVVKGSVFLRNPSRNNVPCSPKVDFTLSSERDFALLSLQVPLKDAKSCGLHQLLRGPEVQLVAHSPWLKDSLSRTTNIQGINLLFSSRRGHLFLQTDQPIYNPGQRVRYRVFALDQKMRPSTDTITVMVENSHGLRVRKKEVYMPSSIFQDDFVIPDISEPGTWKISARFSDGLESNSSTQFEVKKYVLPNFEVKITPGKPYILTVPGHLDEMQLDIQARYIYGKPVQGVAYVRFGLLDEDGKKTFFRGLESQTKLVNGQSHISLSKAEFQDALEKLNMGITDLQGLRLYVAAAIIESPGGEMEEAELTSWYFVSSPFSLDLSKTKRHLVPGAPFLLQALVREMSGSPASGIPVKVSATVSSPGSVPEVQDIQQNTDGSGQVSIPIIIPQTISELQLSVSAGSPHPAIARLTVAAPPSGGPGFLSIERPDSRPPRVGDTLNLNLRAVGSGATFSHYYYMILSRGQIVFMNREPKRTLTSVSVFVDHHLAPSFYFVAFYYHGDHPVANSLRVDVQAGACEGKLELSVDGAKQYRNGESVKLHLETDSLALVALGALDTALYAAGSKSHKPLNMGKVFEAMNSYDLGCGPGGGDSALQVFQAAGLAFSDGDQWTLSRKRLSCPKEKTTRKKRNVNFQKAINEKLGQYASPTAKRCCQDGVTRLPMMRSCEQRAARVQQPDCREPFLSCCQFAESLRKKSRDKGQAGLQRALEILQEEDLIDEDDIPVRSFFPENWLWRVETVDRFQILTLWLPDSLTTWEIHGLSLSKTKGLCVATPVQLRVFREFHLHLRLPMSVRRFEQLELRPVLYNYLDKNLTVSVHVSPVEGLCLAGGGGLAQQVLVPAGSARPVAFSVVPTAAAAVSLKVVARGSFEFPVGDAVSKVLQIEKEGAIHREELVYELNPLDHRGRTLEIPGNSDPNMIPDGDFNSYVRVTASDPLDTLGSEGALSPGGVASLLRLPRGCGEQTMIYLAPTLAASRYLDKTEQWSTLPPETKDHAVDLIQKGYMRIQQFRKADGSYAAWLSRDSSTWLTAFVLKVLSLAQEQVGGSPEKLQETSNWLLSQQQADGSFQDPCPVLDRSMQGGLVGNDETVALTAFVTIALHHGLAVFQDEGAEPLKQRVEASISKANSFLGEKASAGLLGAHAAAITAYALTLTKAPVDLLGVAHNNLMAMAQETGDNLYWGSVTGSQSNAVSPTPAPRNPSDPMPQAPALWIETTAYALLHLLLHEGKAEMADQASAWLTRQGSFQGGFRSTQDTVIALDALSAYWIASHTTEERGLNVTLSSTGRNGFKSHALQLNNRQIRGLEEELQFSLGSKINVKVGGNSKGTLKVLRTYNVLDMKNTTCQDLQIEVTVKGHVEYTMEANEDYEDYEYDELPAKDDPDAPLQPVTPLQLFEGRRNRRRREAPKLTSLSDRYVSHFETEGPHVLLYFDSVPTSRECVGFEAVQEVPVGLVQPASATLYDYYNPERRCSVFYGAPSKSRLLATLCSAEVCQCAEGKCPRQRRALERGLQDEDGYRMKFACYYPRVEYGFQVKVLREDSRAAFRLFETKITQVLHFTKDVKAAANQMRNFLVRASCRLRLEPGKEYLIMGLDGATYDLEGHPQYLLDSNSWIEEMPSERLCRSTRQRAACAQLNDFLQEYGTQGCQV

SEQ ID NO: 42073 - protein, 270 aa, Homo sapiens
MCPEDSLQVPLKDAKSCGLHQLLRGPEVQLVAHSPWLKDSLSRTTNIQGINLLFSSRRGHLFLQTDQPIYNPGQRVRYRVFALDQKMRPSTDTITVMVENSHGLRVRKKEVYMPSSIFQDDFVIPDISEPGTWKISARFSDGLESNSSTQFEVKKYVLPNFEVKITPGKPYILTVPGHLDEMQLDIQARYIYGKPVQGVAYVRFGLLDEDGKKTFFRGLESQTKLVNGQSHISLSKAEFQDALEKLNMGITDLQGLRLYVAAAIIESPGG

SEQ ID NO: 42074 - protein, 1698 aa, Homo sapiens
MRLLWGLIWASSFFTLSLQKPRLLLFSPSVVHLGVPLSVGVQLQDVPRGQVVKGSVFLRNPSRNNVPCSPKVDFTLSSERDFALLSLQVPLKDAKSCGLHQLLRGPEVQLVAHSPWLKDSLSRTTNIQGINLLFSSRRGHLFLQTDQPIYNPGQRVRYRVFALDQKMRPSTDTITVMVENSHGLRVRKKEVYMPSSIFQDDFVIPDISEPGTWKISARFSDGLESNSSTQFEVKKYVLPNFEVKITPGKPYILTVPGHLDEMQLDIQARYIYGKPVQGVAYVRFGLLDEDGKKTFFRGLESQTKLVNGQSHISLSKAEFQDALEKLNMGITDLQGLRLYVAAAIIEYPGGEMEEAELTSWYFVSSPFSLDLSKTKRHLVPGAPFLLQALVREMSGSPASGIPVKVSATVSSPGSVPEVQDIQQNTDGSGQVSIPIIIPQTISELQLSVSAGSPHPAIARLTVAAPPSGGPGFLSIEWPDSRPPRVGDTLNLNLRAVGSGATFSHYYYMILSRGQIVFMNREPKRTLTSVSVFVDHHLAPSFYFVAFYYHGDHPVANSLRVDVQAGACEGKLELSVDGAKQYRNGESVKLHLETDSLALVALGALDTALYAAGSKSHKPLNMGKVFEAMNSYDLGCGPGGGDSALQVFQAAGLAFSDGDQWTLSRKRLSCPKEKTTRKKRNVNFQKAINEKLGQYASPTAKRCCQDGVTRLPMMRSCEQRAARVQQPDCREPFLSCCQFAESLRKKSRDKGQAGLQRALEILQEEDLIDEDDIPVRSFFPENWLWRVETVDRFQILTLWLPDSLTTWEIHGLSLSKTKGLCVATPVQLRVFREFHLHLRLPMSVRRFEQLELRPVLYNYLDKNLTVSVHVSPVEGLCLAGGGGLAQQVLVPAGSARPVAFSVVPTAAAAVSLKVVARGSFEFPVGDAVSKVLQIEKEGAIHREELVYELNPLDHRGRTLEIPGNSDPNMIPDGDFNSYVRVTASDPLDTLGSEGALSPGGVASLLRLPRGCGEQTMIYLAPTLAASRYLDKTEQWSTLPPETKDHAVDLIQKGYMRIQQFRKADGSYAAWLSRDSSTWLTAFVLKVLSLAQEQVGGSPEKLQETSNWLLSQQQADGSFQDPCPVLDRSMQGGLVGNDETVALTAFVTIALHHGLAVFQDEGAEPLKQRVEASISKANSFLGEKASAGLLGAHAAAITAYALTLTKAPVDLLGVAHNNLMAMAQETGDNLYWGSVTGSQSNAVSPTPAPRNPSDPMPQAPALWIETTAYALLHLLLHEGKAEMADQAAAWLTRQGSFQGGFRSTQDTVIALDALSAYWIASHTTEERGLNVTLSSTGRNGFKSHALQLNNRQIRGLEEELQFSLGSKINVKVGGNSKGTLKVLRTYNVLDMKNTTCQDLQIEVTVKGHVEYTMEANEDYEDYEYDELPAKDDPDAPLQPVTPLQLFEGRRNRRRREAPKLTSLSDRYVSHFETEGPHVLLYFDSVPTSRECVGFEAVQEVPVGLVQPASATLYDYYNPERRCSVFYGAPSKSRLLATLCSAEVCQCAEGKCPRQRRALERGLQDEDGYRMKFACYYPRVEYGFQVKVLREDSRAAFRLFETKITQVLHFTKDVKAAANQMRNFLVRASCRLRLEPGKEYLIMGLDGATYDLEGHPQYLLDSNSWIEEMPSERLCRSTRQRAACAQLNDFLQEYGTQGCQV

SEQ ID NO: 42075 - protein, 511 aa, Homo sapiens
MAKGLSVQNDKHPGYQPALLLSPGAPLFADGPAYALLHLLLHEGKAEMADQAAAWLTRQGSFQGGFRSTQDTVIALDALSAYWIASHTTEERGLNVTLSSTGRNGFKSHALQLNNRQIRGLEEELQFSLGSKINVKVGGNSKGTLKVLRTYNVLDMKNTTCQDLQIEVTVKGHVEYTMEANEDYEDYEYDELPAKDDPDAPLQPVTPLQLFEGRRNRRRREAPKVVEEQESRVHYTVCIWRNGKVGLSGMAIADVTLLSGFHALRADLEKLTSLSDRYVSHFETEGPHVLLYFDSVPTSRECVGFEAVQEVPVGLVQPASATLYDYYNPERRCSVFYGAPSKSRLLATLCSAEVCQCAEGKCPRQRRALERGLQDEDGYRMKFACYYPRVEYGFQVKVLREDSRAAFRLFETKITQVLHFTKDVKAAANQMRNFLVRASCRLRLEPGKEYLIMGLDGATYDLEGHPQYLLDSNSWIEEMPSERLCRSTRQRAACAQLNDFLQEYGTQGCQV

SEQ ID NO: 42076 - protein, 1698 aa, Homo sapiens
MRLLWGLIWASSFFTLSLQKPRLLLFSPSVVHLGVPLSVGVQLQDVPRGQVVKGSVFLRNPSRNNVPCSPKVDFTLSSERDFALLSLQVPLKDAKSCGLHQLLRGPEVQLVAHSPWLKDSLSRTTNIQGINLLFSSRRGHLFLQTDQPIYNPGQRVRYRVFALDQKMRPSTDTITVMVENSHGLRVRKKEVYMPSSIFQDDFVIPDISEPGTWKISARFSDGLESNSSTQFEVKKYVLPNFEVKITPGKPYILTVPGHLDEMQLDIQARYIYGKPVQGVAYVRFGLLDEDGKKTFFRGLESQTKLVNGQSHISLSKAEFQDALEKLNMGITDLQGLRLYVAAAIIESPGGEMEEAELTSWYFVSSPFSLDLSKTKRHLVPGAPFLLQALVREMSGSPASGIPVKVSATVSSPGSVPEVQDIQQNTDGSGQVSIPIIIPQTISELQLSVSAGSPHPAIARLTVAAPPSGGPGFLSIERPDSRPPRVGDTLNLNLRAVGSGATFSHYYYMILSRGQIVFMNREPKRTLTSVSVFVDHHLAPSFYFVAFYYHGDHPVANSLRVDVQAGACEGKLELSVDGAKQYRNGESVKLHLETDSLALVALGALDTALYAAGSKSHKPLNMGKVFEAMNSYDLGCGPGGGDSALQVFQAAGLAFSDGDQWTLSRKRLSCPKEKTTRKKRNVNFQKAINEKLGQYASPTAKRCCQDGVTRLPMMRSCEQRAARVQQPDCREPFLSCCQFAESLRKKSRDKGQAGLQRALEILQEEDLIDEDDIPVRSFFPENWLWRVETVDRFQILTLWLPDSLTTWEIHGLSLSKTKGLCVATPVQLRVFREFHLHLRLPMSVRRFEQLELRPVLYNYLDKNLTVSVHVSPVEGLCLAGGGGLAQQVLVPAGSARPVAFSVVPTAAAAVSLKVVARGSFEFPVGDAVSKVLQIEKEGAIHREELVYELNPLDHRGRTLEIPGNSDPNMIPDGDFNSYVRVTASDPLDTLGSEGALSPGGVASLLRLPRGCGEQTMIYLAPTLAASRYLDKTEQWSTLPPETKDHAVDLIQKGYMRIQQFRKADGSYAAWLSRDSSTWLTAFVLKVLSLAQEQVGGSPEKLQETSNWLLSQQQADGSFQDPCPVLDRSMQGGLVGNDETVALTAFVTIALHHGLAVFQDEGAEPLKQRVEASISKASSFLGEKASAGLLGAHAAAITAYALTLTKAPVDLLGVAHNNLMAMAQETGDNLYWGSVTGSQSNAVSPTPAPRNPSDPMPQAPALWIETTAYALLHLLLHEGKAEMADQAAAWLTRQGSFQGGFRSTQDTVIALDALSAYWIASHTTEERGLNVTLSSTGRNGFKSHALQLNNRQIRGLEEELQFSLGSKINVKVGGNSKGTLKVLRTYNVLDMKNTTCQDLQIEVTVKGHVEYTMEANEDYEDYEYDELPAKDDPDAPLQPVTPLQLFEGRRNRRRREAPKLTSLSDRYVSHFETEGPHVLLYFDSVPTSRECVGFEAVQEVPVGLVQPASATLYDYYNPERRCSVFYGAPSKSRLLATLCSAEVCQCAEGKCPRQRRALERGLQDEDGYRMKFACYYPRVEYGFQVKVLREDSRAAFRLFETKITQVLHFTKDVKAAANQMRNFLVRASCRLRLEPGKEYLIMGLDGATYDLEGHPQYLLDSNSWIEEMPSERLCRSTRQRAACAQLNDFLQEYGTQGCQV

SEQ ID NO: 42077 - protein, 1698 aa, Homo sapiens [sequence omitted]

SEQ ID NO: 42078 - protein, 511 aa, Homo sapiens; identical to SEQ ID NO: 42075

SEQ ID NO: 42079 - protein, 270 aa, Homo sapiens
MCPEDSLQVPLKDAKSCGLHQLLRGPEVQLVAHSPWLKDSLSRTTNIQGINLLFSSRRGHLFLQTDQPIYNPGQRVRYRVFALDQKMRPSTDTITVMVENSHGLRVRKKEVYMPSSIFQDDFVIPDISEPGTWKISARFSDGLESNSSTQFEVKKYVLPNFEVKITPGKPYILTVPGHLDEMQLDIQARYIYGKPVQGVAYVRFGLLDEDGKKTFFRGLESQTKLVNGQSHISLSKAEFQDALEKLNMGITDLQGLRLYVAAAIIEYPGG

SEQ ID NO: 42080 - protein, 1744 aa, Homo sapiens
MRLLWGLIWASSFFTLSLQKPRLLLFSPSVVHLGVPLSVGVQLQDVPRGQVVKGSVFLRNPSRNNVPCSPKVDFTLSSERDFALLSLQVPLKDAKSCGLHQLLRGPEVQLVAHSPWLKDSLSRTTNIQGINLLFSSRRGHLFLQTDQPIYNPGQRVRYRVFALDQKMRPSTDTITVMVENSHGLRVRKKEVYMPSSIFQDDFVIPDISEPGTWKISARFSDGLESNSSTQFEVKKYVLPNFEVKITPGKPYILTVPGHLDEMQLDIQARYIYGKPVQGVAYVRFGLLDEDGKKTFFRGLESQTKLVNGQSHISLSKAEFQDALEKLNMGITDLQGLRLYVAAAIIESPGGEMEEAELTSWYFVSSPFSLDLSKTKRHLVPGAPFLLQALVREMSGSPASGIPVKVSATVSSPGSVPEVQDIQQNTDGSGQVSIPIIIPQTISELQLSVSAGSPHPAIARLTVAAPPSGGPGFLSIERPDSRPPRVGDTLNLNLRAVGSGATFSHYYYMILSRGQIVFMNREPKRTLTSVSVFVDHHLAPSFYFVAFYYHGDHPVANSLRVDVQAGACEGKLELSVDGAKQYRNGESVKLHLETDSLALVALGALDTALYAAGSKSHKPLNMGKVFEAMNSYDLGCGPGGGDSALQVFQAAGLAFSDGDQWTLSRKRLSCPKEKTTRKKRNVNFQKAINEKLGQYASPTAKRCCQDGVTRLPMMRSCEQRAARVQQPDCREPFLSCCQFAESLRKKSRDKGQAGLQRALEILQEEDLIDEDDIPVRSFFPENWLWRVETVDRFQILTLWLPDSLTTWEIHGLSLSKTKGLCVATPVQLRVFREFHLHLRLPMSVRRFEQLELRPVLYNYLDKNLTVSVHVSPVEGLCLAGGGGLAQQVLVPAGSARPVAFSVVPTAATAVSLKVVARGSFEFPVGDAVSKVLQIEKEGAIHREELVYELNPLDHRGRTLEIPGNSDPNMIPDGDFNSYVRVTASDPLDTLGSEGALSPGGVASLLRLPRGCGEQTMIYLAPTLAASRYLDKTEQWSTLPPETKDHAVDLIQKGYMRIQQFRKADGSYAAWLSRGSSTWLTAFVLKVLSLAQEQVGGSPEKLQETSNWLLSQQQADGSFQDLSPVIHRSMQGGLVGNDETVALTAFVTIALHHGLAVFQDEGAEPLKQRVEASISKASSFLGEKASAGLLGAHAAAITAYALTLTKAPADLRGVAHNNLMAMAQETGDNLYWGSVTGSQSNAVSPTPAPRNPSDPMPQAPALWIETTAYALLHLLLHEGKAEMADQAAAWLTRQGSFQGGFRSTQDTVIALDALSAYWIASHTTEERGLNVTLSSTGRNGFKSHALQLNNRQIRGLEEELQFSLGSKINVKVGGNSKGTLKVLRTYNVLDMKNTTCQDLQIEVTVKGHVEYTMEANEDYEDYEYDELPAKDDPDAPLQPVTPLQLFEGRRNRRRREAPKVVEEQESRVHYTVCIWRNGKVGLSGMAIADVTLLSGFHALRADLEKLTSLSDRYVSHFETEGPHVLLYFDSVPTSRECVGFEAVQEVPVGLVQPASATLYDYYNPERRCSVFYGAPSKSRLLATLCSAEVCQCAEGKCPRQRRALERGLQDEDGYRMKFACYYPRVEYGFQVKVLREDSRAAFRLFETKITQVLHFTKDVKAAANQMRNFLVRASCRLRLEPGKEYLIMGLDGATYDLEGHPQYLLDSNSWIEEMPSERLCRSTRQRAACAQLNDFLQEYGTQGCQV

SEQ ID NO: 42081 - protein, 1698 aa, Homo sapiens
MRLLWGLIWASSFFTLSLQKPRLLLFSPSVVHLGVPLSVGVQLQDVPRGQVVKGSVFLRNPSRNNVPCSPKVDFTLSSERDFALLSLQVPLKDAKSCGLHQLLRGPEVQLVAHSPWLKDSLSRTTNIQGINLLFSSRRGHLFLQTDQPIYNPGQRVRYRVFALDQKMRPSTDTITVMVENSHGLRVRKKEVYMPSSIFQDDFVIPDISEPGTWKISARFSDGLESNSSTQFEVKKYVLPNFEVKITPGKPYILTVPGHLDEMQLDIQARYIYGKPVQGVAYVRFGLLDEDGKKTFFRGLESQTKLVNGQSHISLSKAEFQDALEKLNMGITDLQGLRLYVAAAIIESPGGEMEEAELTSWYFVSSPFSLDLSKTKRHLVPGAPFLLQALVREMSGSPASGIPVKVSATVSSPGSVPEVQDIQQNTDGSGQVSIPIIIPQTISELQLSVSAGSPHPAIARLTVAAPPSGGPGFLSIERPDSRPPRVGDTLNLNLRAVGSGATFSHYYYMILSRGQIVFMNREPKRTLTSVSVFVDHHLAPSFYFVAFYYHGDHPVANSLRVDVQAGACEGKLELSVDGAKQYRNGESVKLHLETDSLALVALGALDTALYAAGSKSHKPLNMGKVFEAMNSYDLGCGPGGGDSALQVFQAAGLAFSDGDQWTLSRKRLSCPKEKTTRKKRNVNFQKAINEKLGQYASPTAKRCCQDGVTRLPMMRSCEQRAARVQQPDCREPFLSCCQFAESLRKKSRDKGQAGLQRALEILQEEDLIDEDDIPVRSFFPENWLWRVETVDRFQILTLWLPDSLTTWEIHGLSLSKTKGLCVATPVQLRVFREFHLHLRLPMSVRRFEQLELRPVLYNYLDKNLTVSVHVSPVEGLCLAGGGGLAQQVLVPAGSARPVAFSVVPTAATAVSLKVVARGSFEFPVGDAVSKVLQIEKEGAIHREELVYELNPLDHRGRTLEIPGNSDPNMIPDGDFNSYVRVTASDPLDTLGSEGALSPGGVASLLRLPRGCGEQTMIYLAPTLAASRYLDKTEQWSTLPPETKDHAVDLIQKGYMRIQQFRKADGSYAAWLSRGSSTWLTAFVLKVLSLAQEQVGGSPEKLQETSNWLLSQQQADGSFQDLSPVIHRSMQGGLVGNDETVALTAFVTIALHHGLAVFQDEGAEPLKQRVEASISKASSFLGEKASAGLLGAHAAAITAYALTLTKAPADLRGVAHNNLMAMAQETGDNLYWGSVTGSQSNAVSPTPAPRNPSDPMPQAPALWIETTAYALLHLLLHEGKAEMADQAAAWLTRQGSFQGGFRSTQDTVIALDALSAYWIASHTTEERGLNVTLSSTGRNGFKSHALQLNNRQIRGLEEELQFSLGSKINVKVGGNSKGTLKVLRTYNVLDMKNTTCQDLQIEVTVKGHVEYTMEANEDYEDYEYDELPAKDDPDAPLQPVTPLQLFEGRRNRRRREAPKLTSLSDRYVSHFETEGPHVLLYFDSVPTSRECVGFEAVQEVPVGLVQPASATLYDYYNPERRCSVFYGAPSKSRLLATLCSAEVCQCAEGKCPRQRRALERGLQDEDGYRMKFACYYPRVEYGFQVKVLREDSRAAFRLFETKITQVLHFTKDVKAAANQMRNFLVRASCRLRLEPGKEYLIMGLDGATYDLEGHPQYLLDSNSWIEEMPSERLCRSTRQRAACAQLNDFLQEYGTQGCQV

SEQ ID NO: 42082 - protein, 1744 aa, Homo sapiens; identical to SEQ ID NO: 42080

SEQ ID NO: 42083 - protein, 1744 aa, Homo sapiens [sequence omitted]

SEQ ID NO: 42084 - protein, 268 aa, Homo sapiens
MCPEDSLQVPLKDAKSCGLHQLLRGPEVQLVAHSPWLKDSLSRTTNIQGINLLFSSRRGHLFLQTDQPIYNPGQRVRYRVFALDQKMRPSTDTITVMVENSHGLRVRKKEVYMPSSIFQDDFVIPDISEPGTWKISARFSDGLESNSSTQFEVKKYVLPNFEVKITPGKPYILTVPGHLDEMQLDIQARYIYGKPVQGVAYVRFGLLDEDGKKTFFRGLESQTKLVNGQSHISLSKAEFQDALEKLNMGITDLQGLRLYVAAAIIESP

SEQ ID NO: 42085 - protein, 1698 aa, Homo sapiens
MRLLWGLIWASSFFTLSLQKPRLLLFSPSVVHLGVPLSVGVQLQDVPRGQVVKGSVFLRNPSRNNVPCSPKVDFTLSSERDFALLSLQVPLKDAKSCGLHQLLRGPEVQLVAHSPWLKDSLSRTTNIQGINLLFSSRRGHLFLQTDQPIYNPGQRVRYRVFALDQKMRPSTDTITVMVENSHGLRVRKKEVYMPSSIFQDDFVIPDISEPGTWKISARFSDGLESNSSTQFEVKKYVLPNFEVKITPGKPYILTVPGHLDEMQLDIQARYIYGKPVQGVAYVRFGLLDEDGKKTFFRGLESQTKLVNGQSHISLSKAEFQDALEKLNMGITDLQGLRLYVAAAIIESPGGEMEEAELTSWYFVSSPFSLDLSKTKRHLVPGAPFLLQALVREMSGSPASGIPVKVSATVSSPGSVPEVQDIQQNTDGSGQVSIPIIIPQTISELQLSVSAGSPHPAIARLTVAAPPSGGPGFLSIERPDSRPPRVGDTLNLNLRAVGSGATFSHYYYMILSRGQIVFMNREPKRTLTSVSVFVDHHLAPSFYFVAFYYHGDHPVANSLRVDVQAGACEGKLELSVDGAKQYRNGESVKLHLETDSLALVALGALDTALYAAGSKSHKPLNMGKVFEAMNSYDLGCGPGGGDSALQVFQAAGLAFSDGDQWTLSRKRLSCPKEKTTRKKRNVNFQKAINEKLGQYASPTAKRCCQDGVTRLPMMRSCEQRAARVQQPDCREPFLSCCQFAESLRKKSRDKGQAGLQRALEILQEEDLIDEDDIPVRSFFPENWLWRVETVDRFQILTLWLPDSLTTWEIHGLSLSKTKGLCVATPVQLRVFREFHLHLRLPMSVRRFEQLELRPVLYNYLDKNLTVSVHVSPVEGLCLAGGGGLAQQVLVPAGSARPVAFSVVPTAAAAVSLKVVARGSFEFPVGDAVSKVLQIEKEGAIHREELVYELNPLDHRGRTLEIPGNSDPNMIPDGDFNSYVRVTASDPLDTLGSEGALSPGGVASLLRLPRGCGEQTMIYLAPTLAASRYLDKTEQWSTLPPETKDHAVDLIQKGYMRIQQFRKADGSYAAWLSRGSSTWLTAFVLKVLSLAQEQVGGSPEKLQETSNWLLSQQQADGSFQDLSPVIHRSMQGGLVGNDETVALTAFVTIALHHGLAVFQDEGAEPLKQRVEASISKANSFLGEKASAGLLGAHAAAITAYALTLTKAPADLRGVAHNNLMAMAQETGDNLYWGSVTGSQSNAVSPTPAPRNPSDPMPQAPALWIETTAYALLHLLLHEGKAEMADQAAAWLTRQGSFQGGFRSTQDTVIALDALSAYWIASHTTEERGLNVTLSSTGRNGFKSHALQLNNRQIRGLEEELQFSLGSKINVKVGGNSKGTLKVLRTYNVLDMKNTTCQDLQIEVTVKGHVEYTMEANEDYEDYEYDELPAKDDPDAPLQPVTPLQLFEGRRNRRRREAPKLTSLSDRYVSHFETEGPHVLLYFDSVPTSRECVGFEAVQEVPVGLVQPASATLYDYYNPERRCSVFYGAPSKSRLLATLCSAEVCQCAEGKCPRQRRALERGLQDEDGYRMKFACYYPRVEYGFQVKVLREDSRAAFRLFETKITQVLHFTKDVKAAANQMRNFLVRASCRLRLEPGKEYLIMGLDGATYDLEGHPQYLLDSNSWIEEMPSERLCRSTRQRAACAQLNDFLQEYGTQGCQV

SEQ ID NO: 42086 - protein, 270 aa, Homo sapiens; identical to SEQ ID NO: 42073

SEQ ID NO: 42087 - protein, 1698 aa, Homo sapiens; identical to SEQ ID NO: 42081

SEQ ID NO: 42088 - protein, 511 aa, Homo sapiens; identical to SEQ ID NO: 42075

SEQ ID NO: 42089 - protein, 650 aa, Homo sapiens
MGSQCRGWHMCALGSQQQADGSFQDLSPVIHRSMQGGLVGNDETVALTAFVTIALHHGLAVFQDEGAEPLKQRVEASISKASSFLGEKASAGLLGAHAAAITAYALTLTKAPADLRGVAHNNLMAMAQETGDNLYWGSVTGSQSNAVSPTPAPRNPSDPMPQAPALWIETTAYALLHLLLHEGKAEMADQAAAWLTRQGSFQGGFRSTQDTVIALDALSAYWIASHTTEERGLNVTLSSTGRNGFKSHALQLNNRQIRGLEEELQFSLGSKINVKVGGNSKGTLKVLRTYNVLDMKNTTCQDLQIEVTVKGHVEYTMEANEDYEDYEYDELPAKDDPDAPLQPVTPLQLFEGRRNRRRREAPKVVEEQESRVHYTVCIWRNGKVGLSGMAIADVTLLSGFHALRADLEKLTSLSDRYVSHFETEGPHVLLYFDSVPTSRECVGFEAVQEVPVGLVQPASATLYDYYNPERRCSVFYGAPSKSRLLATLCSAEVCQCAEGKCPRQRRALERGLQDEDGYRMKFACYYPRVEYGFQVKVLREDSRAAFRLFETKITQVLHFTKDVKAAANQMRNFLVRASCRLRLEPGKEYLIMGLDGATYDLEGHPQYLLDSNSWIEEMPSERLCRSTRQRAACAQLNDFLQEYGTQGCQV

SEQ ID NO: 42090 - protein, 1676 aa, Homo sapiens
MGLLGILCFLIFLGKTWGQEQTYVISAPKIFRVGASENIVIQVYGYTEAFDATISIKSYPDKKFSYSSGHVHLSSENKFQNSAILTIQPKQLPGGQNPVSYVYLEVVSKHFSKSKRMPITYDNGFLFIHTDKPVYTPDQSVKVRVYSLNDDLKPAKRETVLTFIDPEGSEVDMVEEIDHIGIISFPDFKIPSNPRYGMWTIKAKYKEDFSTTGTAYFEVKEYVLPHFSVSIEPEYNFIGYKNFKNFEITIKARYFYNKVVTEADVYITFGIREDLKDDQKEMMQTAMQNTMLINGIAQVTFDSETAVKELSYYSLEDLNNKYLYIAVTVIESTGGFSEEAEIPGIKYVLSPYKLNLVATPLFLKPGIPYPIKVQVKDSLDQLVGGVPVTLNAQTIDVNQETSDLDPSKSVTRVDDGVASFVLNLPSGVTVLEFNVKTDAPDLPEENQAREGYRAIAYSSLSQSYLYIDWTDNHKALLVGEHLNIIVTPKSPYIDKITHYNYLILSKGKIIHFGTREKFSDASYQSINIPVTQNMVPSSRLLVYYIVTGEQTAELVSDSVWLNIEEKCGNQLQVHLSPDADAYSPGQTVSLNMATGMDSWVALAAVDSAVYGVQRGAKKPLERVFQFLEKSDLGCGAGGGLNNANVFHLAGLTFLTNANADDSQENDEPCKEILRPRRTLQKKIEEIAAKYKHSVVKKCCYDGACVNNDETCEQRAARISLGPRCIKAFTECCVVASQLRANISHKDMQLGRLHMKTLLPVSKPEIRSYFPESWLWEVHLVPRRKQLQFALPDSLTTWEIQGVGISNTGICVADTVKAKVFKDVFLEMNIPYSVVRGEQIQLKGTVYNYRTSGMQFCVKMSAVEGICTSESPVIDHQGTKSSKCVRQKVEGSSSHLVTFTVLPLEIGLHNINFSLETWFGKEILVKTLRVVPEGVKRESYSGVTLDPRGIYGTISRRKEFPYRIPLDLVPKTEIKRILSVKGLLVGEILSAVLSQEGINILTHLPKGSAEAELMSVVPVFYVFHYLETGNHWNIFHSDPLIEKQKLKKKLKEGMLSIMSYRNADYSYSVWKGGSASTWLTAFALRVLGQVNKYVEQNQNSICNSLLWLVENYQLDNGSFKENSQYQPIKLQGTLPVEARENSLYLTAFTVIGIRKAFDICPLVKIDTALIKADNFLLENTLPAQSTFTLAISAYALSLGDKTHPQFRSIVSALKREALVKGNPPIYRFWKDNLQHKDSSVPNTGTARMVETTAYALLTSLNLKDINYVNPVIKWLSEEQRYGGGFYSTQDTINAIEGLTEYSLLVKQLRLSMDIDVSYKHKGALHNYKMTDKNFLGRPVEVLLNDDLIVSTGFGSGLATVHVTTVVHKTSTSEEVCSFYLKIDTQDIEASHYRGYGNSDYKRIVACASYKPSREESSSGSSHAVMDISLPTGISANEEDLKALVEGVDQLFTDYQIKDGHVILQLNSIPSSDFLCVRFRIFELFEVGFLSPATFTVYEYHRPDKQCTMFYSTSNIKIQKVCEGAACKCVEADCGQMQEELDLTISAETRKQTACKPEIAYAYKVSITSITVENVFVKYKATLLDIYKTGEAVAEKDSEITFIKKVTCTNAELVKGRQYLIMGKEALQIKYNFSFRYIYPLDSLTWIEYWPRDTTCSSCQAFLANLDEFAEDIFLNGC

SEQ ID NO: 42091 - protein, 1105 aa, Homo sapiens
GRAGEVRALSSGAQRRGSHFVVLCRLPRGRARVVGASLSHAPLPLRYCWKGRGGVSRLFCSQRARMPGSLGREASGRAGPTGCGAFAFGLRCRYVISAPKIFRVGASENIVIQVYGYTEAFDATISIKSYPDKKFSYSSGHVHLSSENKFQNSAILTIQPKQLPGGQNPVSYVYLEVVSKHFSKSKRMPITYDNGFLFIHTDKPVYTPDQSVKVRVYSLNDDLKPAKRETVLTFIDPEGSEVDMVEEIDHIGIISFPDFKIPSNPRYGMWTIKAKYKEDFSTTGTAYFEVKEYVLPHFSVSIEPEYNFIGYKNFKNFEITIKARYFYNKVVTEADVYITFGIREDLKDDQKEMMQTAMQNTMLINGIAQVTFDSETAVKELSYYSLEDLNNKYLYIAVTVIESTGGFSEEAEIPGIKYVLSPYKLNLVATPLFLKPGIPYPIKVQVKDSLDQLVGGVPVTLNAQTIDVNQETSDLDPSKSVTRVDDGVASFVLNLPSGVTVLEFNVKTDAPDLPEENQAREGYRAIAYSSLSQSYLYIDWTDNHKALLVGEHLNIIVTPKSPYIDKITHYNYLILSKGKIIHFGTREKFSDASYQSINIPVTQNMVPSSRLLVYYIVTGEQTAELVSDSVWLNIEEKCGNQLQVHLSPDADAYSPGQTVSLNMATGMDSWVALAAVDSAVYGVQRGAKKPLERVFQFLEKSDLGCGAGGGLNNANVFHLAGLTFLTNANADDSQENDEPCKEILRPRRTLQKKIEEIAAKYKHSVVKKCCYDGACVNNDETCEQRAARISLGPRCIKAFTECCVVASQLRANISHKDMQLGRLHMKTLLPVSKPEIRSYFPESWLWEVHLVPRRKQLQFALPDSLTTWEIQGVGISNTGICVADTVKAKVFKDVFLEMNIPYSVVRGEQIQLKGTVYNYRTSGMQFCVKMSAVEGICTSESPVIDHQGTKSSKCVRQKVEGSSSHLVTFTVLPLEIGLHNINFSLETWFGKEILVKTLRVVPEGVKRESYSGVTLDPRGIYGTISRRKEFPYRIPLDLVPKTEIKRILSVKGLLVGEILSAVLSQEGINILTHLPKGSAEAELMSVVPVFYVFPGNRKSLEHFSF

SEQ ID NO: 42092 - protein, 934 aa, Homo sapiens
MARRSVLYFILLNALINKGQACFCDHYAWTQWTSCSKTCNSGTQSRHRQIVVDKYYQENFCEQICSKQETRECNWQRCPINCLLGDFGPWSDCDPCIEKQSKVRSVLRPSQFGGQPCTAPLVAFQPCIPSKLCKIEEADCKNKFRCDSGRCIARKLECNGENDCGDNSDERDCGRTKAVCTRKYNPIPSVQLMGNGFHFLAGEPRGEVLDNSFTGGICKTVKSSRTSNPYRVPANLENVGFEVQTAEDDLKTDFYKDLTSLGHNENQQGSFSSQGGSSFSVPIFYSSKRSENINHNSAFKQAIQASHKKDSSFIRIHKVMKVLNFTTKAKDLHLSDVFLKALNHLPLEYNSALYSRIFDDFGTHYFTSGSLGGVYDLLYQFSSEELKNSGLTEEEAKHCVRIETKKRVLFAKKTKVEHRCTTNKLSEKHEGSFIQGAEKSISLIRGGRSEYGAALAWEKGSSGLEEKTFSEWLESVKENPAVIDFELAPIVDLVRNIPCAVTKRNNLRKALQEYAAKFDPCQCAPCPNNGRPTLSGTECLCVCQSGTYGENCEKQSPDYKSNAVDGQWGCWSSWSTCDATYKRSRTRECNNPAPQRGGKRCEGEKRQEEDCTFSIMENNGQPCINDDEEMKEVDLPEIEADSGCPQPVPPENGFIRNEKQLYLVGEDVEISCLTGFETVGYQYFRCLPDGTWRQGDVECQRTECIKPVVQEVLTITPFQRLYRIGESIELTCPKGFVVAGPSRYTCQGNSWTPPISNSLTCEKDTLTKLKGHCQLGQKQSGSECICMSPEEDCSHHSEDLCVFDTDSNDYFTSPACKFLAEKCLNNQQLHFLHIGSCQDGRQLEWGLERTRLSSNSTKKESCGYDTCYDWEKCSASTSKCVCLLPPQCFKGGNQLYCVKMGSSTSEKTLNICEVGTIRCANRKMEILHPGKCLA

SEQ ID NO: 42093 - protein, 934 aa, Homo sapiens; identical to SEQ ID NO: 42092

SEQ ID NO: 42094 - protein, 843 aa, Homo sapiens
MKVISLFILVGFIGEFQSFSSASSPVNCQWDFYAPWSECNGCTKTQTRRRSVAVYGQYGGQPCVGNAFETQSCEPTRGCPTEEGCGERFRCFSGQCISKSLVCNGDSDCDEDSADEDRCEDSERRPSCDIDKPPPNIELTGNGYNELTGQFRNRVINTKSFGGQCRKVFSGDGKDFYRLSGNVLSYTFQVKINNDFNYEFYNSTWSYVKHTSTEHTSSSRKRSFFRSSSSSSRSYTSHTNEIHKGKSYQLLVVENTVEVAQFINNNPEFLQLAEPFWKELSHLPSLYDYSAYRRLIDQYGTHYLQSGSLGGEYRVLFYVDSEKLKQNDFNSVEEKKCKSSGWHFVVKFSSHGCKELENALKAASGTQNNVLRGEPFIRGGGAGFISGLSYLELDNPAGNKRRYSAWAESVTNLPQVIKQKLTPLYELVKEVPCASVKKLYLKWALEEYLDEFDPCHCRPCQNGGLATVEGTHCLCHCKPYTFGAACEQGVLVGNQAGGVDGGWSCWSSWSPCVQGKKTRSRECNNPPPSGGGRSCVGETTESTQCEDEELEHLRLLEPHCFPLSLVPTEFCPSPPALKDGFVQDEGTMFPVGKNVVYTCNEGYSLIGNPVARCGEDLRWLVGEMHCQKIACVLPVLMDGIQSHPQKPFYTVGEKVTVSCSGGMSLEGPSAFLCGSSLKWSPEMKNARCVQKENPLTQAVPKCQRWEKLQNSRCVCKMPYECGPSLDVCAQDERSKRILPLTVCKMHVLHCQGRNYTLTGRDSCTLPASAEKACGACPLWGKCDAESSKCVCREASECEEEGFSICVEVNGKEQTMSECEAGALRCRGQSISVTSIRPCAAETQ

SEQ ID NO: 42095 - protein, 486 aa, Homo sapiens
MKVISLFILVGFIGEFQSFSSASSPVNCQWDFYAPWSECNGCTKTQTRRRSVAVYGQYGGQPCVGNAFETQSCEPTRGCPTEEGCGERFRCFSGQCISKSLVCNGDSDCDEDSADEDRCEDSERRPSCDIDKPPPNIELTGNGYNELTGQFRNRVLFYVDSEKLKQNDFNSVEEKKCKSSGWHFVVKFSSHGCKELENALKAASGTQNNVLRGEPFIRGGGAGFISGLSYLELDNPAGNKRRYSAWAESVTNLPQVIKQKLTPLYELVKEVPCASVKKLYLKWALEEYLDEFDPCHCRPCQNGGLATVEGTHCLCHCKPYTFGAACEQGVLVGNQAGGVDGGWSCWSSWSPCVQGKKTRSRECNNPPPSGGGRSCVGETTESTQCEDEELEHLRLLEPHCFPLSLVPTEFCPSPPALKDGFVQDEGTMFPVGKNVVYTCNEGYSLIGNPVARCGEDLRWLVGEMHCQNGKISNWMKVNETLLVEHH

SEQ ID NO: 42096 - protein, 343 aa, Homo sapiens
MKVISLFILVGFIGEFQSFSSASSPVNCQWDFYAPWSECNGCTKTQTRRRSVAVYGQYGGQPCVGNAFETQSCEPTRGCPTEEGCGERFRCFSGQCISKSLVCNGDSDCDEDSADEDRCEDSERRPSCDIDKPPPNIELTGNGYNELTGQFRNRVINTKSFGGQCRKVFSGDGKDFYRLSGNVLSYTFQVKINNDFNYEFYNSTWSYVKHTSTEHTSSSRKRSFFRSSSSSSRSYTSHTNEIHKGKSYQLLVVENTVEVAQFINNNPEFLQLAEPFWKELSHLPSLYDYSAYRRLIDQYGTHYLQSGSLGGEYRVLFYVDSEKLKQNDFNSVEKKKKKKKKKK

SEQ ID NO: 42097 - protein, 584 aa, Homo sapiens
MFAVVFFILSLMTCQPGVTAQEKVNQRVRRAATPAAVTCQLSNWSEWTDCFPCQDKKYRHRSLLQPNKFGGTICSGDIWDQASCSSSTTCVRQAQCGQDFQCKETGRCLKRHLVCNGDQDCLDGSDEDDCEDVRAIDEDCSQYEPIPGSQKAALGYNILTQEDAQSVYDASYYGGQCETVYNGEWRELRYDSTCERLYYGDDEKYFRKPYNFLKYHFEALADTGISSEFYDNANDLLSKVKKDKSDSFGVTIGIGPAGSPLLVGVGVSHSQDTSFLNELNKYNEKKFIFTRIFTKVQTAHFKMRKDDIMLDEGMLQSLMELPDQYNYGMYAKFINDYGTHYITSGSMGGIYEYILVIDKAKMESLGITSRDITTCFGGSLGIQYEDKINVGGGLSGDHCKKFGGGKTERARKAMAVEDIISRVRGGSSGWSGGLAQNRSTITYRSWGRSLKYNPVVIDFEMQPIHEVLRHTSLGPLEAKRQNLRRALDQYLMEFNACRCGPCFNNGVPILEGTSCRCQCRLGSLGAACEQTQTEGAKADGSWSCWSSWSVCRAGIQERRRECDNPAPQNGGASCPGRKVQTQAC

SEQ ID NO: 42098 - protein, 591 aa, Homo sapiens
MKNSRTWAWRAPVELFLLCAALGCLSLPGSRGERPHSFGSNAVNKSFAKSRQMRSVDVTLMPIDCELSSWSSWTTCDPCQKKRYRYAYLLQPSQFHGEPCNFSDKEVEDCVTNRPCGSQVRCEGFVCAQTGRCVNRRLLCNGDNDCGDQSDEANCRRIYKKCQHEMDQYWGIGSLASGINLFTNSFEGPVLDHRYYAGGCSPHYILNTRFRKPYNVESYTPQTQGKYEFILKEYESYSDFERNVTEKMASKSGFSFGFKIPGIFELGISSQSDRGKHYIRRTKRFSHTKSVFLHARSDLEVAHYKLKPRSLMLHYEFLQRVKRLPLEYSYGEYRDLFRDFGTHYITEAVLGGIYEYTLVMNKEAMERGDYTLNNVHACAKNDFKIGGAIEEVYVSLGVSVGKCRGILNEIKDRNKRDTMVEDLVVLVRGGASEHITTLAYQELPTADLMQEWGDAVQYNPAIIKVKVEPLYELVTATDFAYSSTVRQNMKQALEEFQKEVSSCHCAPCQGNGVPVLKGSRCDCICPVGSQGLACEVSYRKNTPIDGKWNCWSNWSSCSGRRKTRQRQCNNPPPQNGGSPCSGPASETLDCS

SEQ ID NO: 42099 - protein, 529 aa, Homo sapiens
MDTCMTLAFTLSGRFFMLLSQYRYAYLLQPSQFHGEPCNFSDKEVEDCVTNRPCGSQVRCEGFVCAQTGRCVNRRLLCNGDNDCGDQSDEANCRRIYKKCQHEMDQYWGIGSLASGINLFTNSFEGPVLDHRYYAGGCSPHYILNTRFRKPYNVESYTPQTQGKYEFILKEYESYSDFERNVTEKMASKSGFSFGFKIPGIFELGISSQSDRGKHYIRRTKRFSHTKSVFLHARSDLEVAHYKLKPRSLMLHYEFLQRVKRLPLEYSYGEYRDLFRDFGTHYITEAVLGGIYEYTLVMNKEAMERGDYTLNNVHACAKNDFKIGGAIEEVYVSLGVSVGKCRGILNEIKDRNKRDTMVEDLVVLVRGGASEHITTLAYQELPTADLMQEWGDAVQYNPAIIKVKVEPLYELVTATDFAYSSTVRQNMKQALEEFQKEVSSCHCAPCQGNGVPVLKGSRCDCICPVGSQGLACEVSYRKNTPIDGKWNCWSNWSSCSGRRKTRQRQCNNPPPQNGGSPCSGPASETLDCS

SEQ ID NO: 42100 - protein, 539 aa, Homo sapiens
MRSVDVTLMPIDCELSSWSSWTTCDPCQKKRYRYAYLLQPSQFHGEPCNFSDKEVEDCVTNRPCGSQVRCEGFVCAQTGRCVNRRLLCNGDNDCGDQSDEANCRRIYKKCQHEMDQYWGIGSLASGINLFTNSFEGPVLDHRYYAGGCSPHYILNTRFRKPYNVESYTPQTQGKYEFILKEYESYSDFERNVTEKMASKSGFSFGFKIPGIFELGISSQSDRGKHYIRRTKRFSHTKSVFLHARSDLEVAHYKLKPRSLMLHYEFLQRVKRLPLEYSYGEYRDLFRDFGTHYITEAVLGGIYEYTLVMNKEAMERGDYTLNNVHACAKNDFKIGGAIEEVYVSLGVSVGKCRGILNEIKDRNKRDTMVEDLVVLVRGGASEHITTLAYQELPTADLMQEWGDAVQYNPAIIKVKVEPLYELVTATDFAYSSTVRQNMKQALEEFQKEVSSCHCAPCQGNGVPVLKGSRCDCICPVGSQGLACEVSYRKNTPIDGKWNCWSNWSSCSGRRKTRQRQCNNPPPQNGGSPCSGPASETLDCS

SEQ ID NO: 42101 - protein, 202 aa, Homo sapiens
MLPPGTATLLTLLLAAGSLGQKPQRPRRPASPISTIQPKANFDAQQFAGTWLLVAVGSACRFLQEQGHRAEATTLHVAPQGTAMAVSTFRKLDGICWQVRQLYGDTGVLGRFLLQARDARGAVHVVVAETDYQSFAVLYLERAGQLSVKLYARSLPVSDSVLSGFEQRVQEAHLTEDQIFYFPKYGFCEAADQFHVLDEVRR

SEQ ID NO: 42102 - protein, 164 aa, Homo sapiens
MLPPGTATLLTLLLAAGSLGQKPQRPRRPASPISTIQPKANFDAQQFAGTWLLVAVGSACRFLQEQGHRAEATTLHVAPQGTAMAVSTFRKLDGICWQVRQLYGDTGVLGRFLLQARDARGAVHVVVAETDYQSFAVLYLERAGQLSVKLYGAQGVVTDRPGVG

SEQ ID NO: 42103 - protein, 559 aa, Homo sapiens
MSACRSFAVAICILEISILTAQYTTSYDPELTESSGSASHIDCRMSPWSEWSQCDPCLRQMFRSRSIEVFGQFNGKRCTDAVGDRRQCVPTEPCEDAEDDCGNDFQCSTGRCIKMRLRCNGDNDCGDFSDEDDCESEPRPPCRDRVVEESELARTAGYGINILGMDPLSTPFDNEFYNGLCNRDRDGNTLTYYRRPWNVASLIYETKGEKNFRTEHYEEQIEAFKSIIQEKTSNFNAAISLKFTPTETNKAEQCCEETASSISLHGKGSFRFSYSKNETYQLFLSYSSKKEKMFLHVKGEIHLGRFVMRNRDVVLTTTFVDDIKALPTTYEKGEYFAFLETYGTHYSSSGSLGGLYELIYVLDKASMKRKGVELKDIKRCLGYHLDVSLAFSEISVGAEFNKDDCVKRGEGRAVNITSENLIDDVVSLIRGGTRKYAFELKEKLLRGTVIDVTDFVNWASSINDAPVLISQKLSPIYNLVPVKMKNAHLKKQNLERAIEDYINEFSVRKCHTCQNGGTVILMDGKCLCACPFKFEGIACEISKQKISEGLPALEFPNEK

SEQ ID NO: 42104 - protein, 589 aa, Homo sapiens
MGSNLSPQLCLMPFILGLLSGGVTTTPWSLAQPQGSCSLEGVEIKGGSFRLLQEGQALEYVCPSGFYPYPVQTRTCRSTGSWSTLKTQDQKTVRKAECRAIHCPRPHDFENGEYWPRSPYYNVSDEISFHCYDGYTLRGSANRTCQVNGRWSGQTAICDNGAGYCSNPGIPIGTRKVGSQYRLEDSVTYHCSRGLTLRGSQRRTCQEGGSWSGTEPSCQDSFMYDTPQEVAEAFLSSLTETIEGVDAEDGHGPGEQQKRKIVLDPSGSMNIYLVLDGSDSIGASNFTGAKKCLVNLIEKVASYGVKPRYGLVTYATYPKIWVKVSEADSSNADWVTKQLNEINYEDHKLKSGTNTKKALQAVYSMMSWPDDVPPEGWNRTRHVIILMTDGLHNMGGDPITVIDEIRDLLYIGKDRKNPREDYLDVYVFGVGPLVNQVNINALASKKDNEQHVFKVKDMENLEDVFYQMIDESQSLSLCGMVWEHRKGTDYHKQPWQAKISVIRPSKGHESCMGAVVSEYFVLTAAHCFTVDDKEHSIKVSVGGEKRDLEIEVVLFHPNYNINGKKEAGIPEFYDYDVALIKLKNKLKYG

SEQ ID NO: 42105 - protein, 589 aa, Homo sapiens; identical to SEQ ID NO: 42104

SEQ ID NO: 42106 - protein, 764 aa, Homo sapiens [sequence omitted]

SEQ ID NO: 42107 - protein, 764 aa, Homo sapiens
MGSNLSPQLCLMPFILGLLSGGVTTTPWSLARPQGSCSLEGVEIKGGSFRLLQEGQALEYVCPSGFYPYPVQTRTCRSTGSWSTLKTQDQKTVRKAECRAIHCPRPHDFENGEYWPRSPYYNVSDEISFHCYDGYTLRGSANRTCQVNGRWSGQTAICDNGAGYCSNPGIPIGTRKVGSQYRLEDSVTYHCSRGLTLRGSQRRTCQEGGSWSGTEPSCQDSFMYDTPQEVAEAFLSSLTETIEGVDAEDGHGPGEQQKRKIVLDPSGSMNIYLVLDGSDSIGASNFTGAKKCLVNLIEKVASYGVKPRYGLVTYATYPKIWVKVSEADSSNADWVTKQLNEINYEDHKLKSGTNTKKALQAVYSMMSWPDDVPPEGWNRTRHVIILMTDGLHNMGGDPITVIDEIRDLLYIGKDRKNPREDYLDVYVFGVGPLVNQVNINALASKKDNEQHVFKVKDMENLEDVFYQMIDESQSLSLCGMVWEHRKGTDYHKQPWQAKISVIRPSKGHESCMGAVVSEYFVLTAAHCFTVDDKEHSIKVSVGGEKRDLEIEVVLFHPNYNINGKKEAGIPEFYDYDVALIKLKNKLKYGQTIRPICLPCTEGTTRALRLPPTTTCQQQKEELLPAQDIKALFVSEEEKKLTRKEVYIKNGDKKGSCERDAQYAPGYDKVKDISEVVTPRFLCTGGVSPYADPNTCRGDSGGPLIVHKRSRFIQVGVISWGVVDVCKNQKRQKQVPAHARDFHINLFQVLPWLKEKLQDEDLGFL

SEQ ID NO: 42108 - protein, 764 aa, Homo sapiens; identical to SEQ ID NO: 42107

SEQ ID NO: 42109 - protein, 764 aa, Homo sapiens [sequence omitted]

SEQ ID NO: 42110 - protein, 764 aa, Homo sapiens; identical to SEQ ID NO: 42107

SEQ ID NO: 42111 - protein, 764 aa, Homo sapiens; identical to SEQ ID NO: 42107

SEQ ID NO: 42112 - protein, 764 aa, Homo sapiens; identical to SEQ ID NO: 42107

SEQ ID NO: 42113 - protein, 764 aa, Homo sapiens; identical to SEQ ID NO: 42107

SEQ ID NO: 42114 - protein, 764 aa, Homo sapiens; identical to SEQ ID NO: 42107

SEQ ID NO: 42115 - protein, 764 aa, Homo sapiens; identical to SEQ ID NO: 42107

SEQ ID NO: 42116 - protein, 764 aa, Homo sapiens; identical to SEQ ID NO: 42107

SEQ ID NO: 42117 - protein, 144 aa, Homo sapiens
MGSNLSPQLCLMPFILGLLSGGVTTTPWSLARPQGSCSLEGVEIKGGSFRLLQEGQALEYVCPSGFYPYPVQTRTCRSTGSWSTLKTQDQKTVRKAECRAIHCPRPHDFENGEYWPRSPYYNVSDEISFHCYDGYTLRGSANRT

SEQ ID NO: 42118 - protein, 1266 aa, Homo sapiens
MGPLMVLFCLLFLYPGLADSAPSCPQNVNISGGTFTLSHGWAPGSLLTYSCPQGLYPSPASRLCKSSGQWQTPGATRSLSKAVCKPGHCPNPGISLGAVRTGFRFGHGDKVRYRCSSNLVLTGSSERECQGNGVWSGTEPICRQPYSYDFPEDVAPALGTSFSHMLGATNPTQKTKDHENGTGTNTYAALNSVYLMMNNQMRLLGMETMAWQEIRHAIILLTDGKSNMGGSPKTAVDHIREILNINQKRNDYLDIYAIGVGKLDVDWRELNELGSKKDGERHAFILQDTKALHQVFEHMLDVSKLTDTICGVGNMSANASDQERTPWHVTIKPKSQETCRGALISDQWVLTAAHCFRDGNDHSLWRVNVGDPKSQWGKEFLIEKAVISPGFDVFAKKNQGILEFYGDDIALLKLAQKVKMSTHARPICLPCTMEANLALRRPQGSTCRDHENELLNKQSVPAHFVALNGSKLNINLKMGVEWTSCAEVVSQEKTMFPNLTDVREVVTDQFLCSGTQEDESPCKGVTTTPWSLARPQGSCSLEGVEIKGGSFRLLQEGQALEYVCPSGFYPYPVQTRTCRSTGSWSTLKTQDQKTVRKAECRAIHCPRPHDFENGEYWPRSPYYNVSDEISFHCYDGYTLRGSANRTCQVNGRWSGQTAICDNGAGYCSNPGIPIGTRKVGSQYRLEDSVTYHCSRGLTLRGSQRRTCQEGGSWSGTEPSCQDSFMYDTPQEVAEAFLSSLTETIEGVDAEDGHGPGEQQKRKIVLDPSGSMNIYLVLDGSDSIGASNFTGAKKCLVNLIEKVASYGVKPRYGLVTYATYPKIWVKVSEADSSNADWVTKQLNEINYEDHKLKSGTNTKKALQAVYSMMSWPDDVPPEGWNRTRHVIILMTDGLHNMGGDPITVIDEIRDLLYIGKDRKNPREDYLDVYVFGVGPLVNQVNINALASKKDNEQHVFKVKDMENLEDVFYQMIDESQSLSLCGMVWEHRKGTDYHKQPWQAKISVIRPSKGHESCMGAVVSEYFVLTAAHCFTVDDKEHSIKVSVGGEKRDLEIEVVLFHPNYNINGKKEAGIPEFYDYDVALIKLKNKLKYGQTIRPICLPCTEGTTRALRLPPTTTCQQQKEELLPAQDIKALFVSEEEKKLTRKEVYIKNGDKKGSCERDAQYAPGYDKVKDISEVVTPRFLCTGGVSPYADPNTCRGDSGGPLIVHKRSRFIQVGVISWGVVDVCKNQKRQKQVPAHARDFHINLFQVLPWLKEKLQDEDLGFL

SEQ ID NO: 42119 - protein, 1266 aa, Homo sapiens
MGPLMVLFCLLFLYPGLADSAPSCPQNVNISGGTFTLSHGWAPGSLLTYSCPQGLYPSPASRLCKSSGQWQTPGATRSLSKAVCKPGHCPNPGISLGAVRTGFRFGHGDKVRYRCSSNLVLTGSSERECQGNGVWSGTEPICRQPYSYDFPEDVAPALGTSFSHMLGATNPTQKTKDHENGTGTNTYAALNSVYLMMNNQMRLLGMETMAWQEIRHAIILLTDGKSNMGGSPKTAVDHIREILNINQKRNDYLDIYAIGVGKLDVDWRELNELGSKKDGERHAFILQDTKALHQVFEHMLDVSKLTDTICGVGNMSANASDQERTPWHVTIKPKSQETCRGALISDQWVLTAAHCFRDGNDHSLWRVNVGDPKSQWGKEFLIEKAVISPGFDVFAKKNQGILEFYGDDIALLKLAQKVKMSTHARPICLPCTMEANLALRRPQGSTCRDHENELLNKQSVPAHFVALNGSKLNINLKMGVEWTSCAEVVSQEKTMFPNLTDVREVVTDQFLCSGTQEDESPCKGVTTTPWSLARPQGSCSLEGVEIKGGSFRLLQEGQALEYVCPSGFYPYPVQTRTCRSTGSWSTLKTQDQKTVRKAECRAIHCPRPHDFENGEYWPRSPYYNVSDEISFHCYDGYTLRGSANRTCQVNGRWSGQTAICDNGAGYCSNPGIPIGTRKVGSQYRLEDSVTYHCSRGLTLRGSQRRTCQEGGSWSGTEPSCQDSFMYDTPQEVAEAFLSSLTETIEGVDAEDGHGPGEQQKRKIVLDPSGSMNIYLVLDGSDSIGASNFTGAKKCLVNLIEKVASYGVKPRYGLVTYATYPKIWVKVSEADSSNADWVTKQLNEINYEDHKLKSGTNTKKALQAVYSMMSWPDDVPPEGWNRTRHVIILMTDGLHNMGGDPITVIDEIRDLLYIGKDRKNPREDYLDVYVFGVGPLVNQVNINALASKKDNEQHVFKVKDMENLEDVFYQMIDESQSLSLCGMVWEHRKGTDYHKQPWQAKISVIRPSKGHESCMGAVVSEYFVLTAAHCFTVDDKEHSIKVSVGGEKRDLEIEVVLFHPNYNINGKEEAGIPEFYDYDVALIKLKNKLKYGQTIRPICLPCTEGTTRALRLPPTTTCQQQKEELLPAQDIKALFVSEEEKKLTRKEVYIKNGDKKGSCERDAQYAPGYDKVKDISEVVTPRFLCTGGVSPYADPNTCRGDSGGPLIVHKRSRFIQVGVISWGVVDVCKNQKRQKQVPAHARDFHINLFQVLPWLKEKLQDEDLGFL

SEQ ID NO: 42120 - protein, 1266 aa, Homo sapiens; identical to SEQ ID NO: 42118

SEQ ID NO: 42121 - protein, 1266 aa, Homo sapiens; identical to SEQ ID NO: 42118

SEQ ID NO: 42122 - protein, 1266 aa, Homo sapiens; identical to SEQ ID NO: 42118

SEQ ID NO: 42123 - protein, 1266 aa, Homo sapiens; identical to SEQ ID NO: 42118

SEQ ID NO: 42124 - protein, 253 aa, Homo sapiens
MHSWERLAVLVLLGAAACAAPPRGRILGGREAEAHARPYMASVQLNGAHLCGGVLVAEQWVLSAAHCLEDAADGKVQVLLGAHSLSQPEPSKRLYDVLRAVPHPDSQPDTIDHDLLLLQLSEKATLGPAVRPLPWQRVDRDVAPGTLCDVAGWGIVNHAGRRPDSLQHVLLPVLDRATCNRRTHHDGAITERLMCAESNRRDSCKGDSGGPLVCGGVLEGVVTSGSRVCGNRKKPGIYTRVASYAAWIDSVLA

SEQ ID NO: 42125 - protein, 330 aa, Homo sapiens
MWLLVSVILISRISSVGGEATFCDFPKINHGILYDEEKYKPFSQVPTGEVFYYSCEYNFVSPSKSFWTRITCTEEGWSPTPKCLRLCFFPFVENGHSESSGQTHLEGDTVQIICNTGYRLQNNENNISCVERGWSTPPKCRSTDTSCVNPPTVQNAHILSRQMSKYPSGERVRYECRSPYEMFGDEEVMCLNGNWTEPPQCKDSTGKCGPPPPIDNGDITSFPLSVYAPASSVEYQCQNLYQLEGNKRITCRNGQWSEPPKCLHPCVISREIMENYNIALRWTAKQKLYLRTGESAEFVCKRGYRLSSRSHTLRTTCWDGKLEYPTCAKR

SEQ ID NO: 42126 - protein, 270 aa, Homo sapiens
MWLLVSVILISRISSVGGEAMFCDFPKINHGILYDEEKYKPFSQVPTGEVFYYSCEYNFVSPSKSFWTRITCAEEGWSPTPKCLRLCFFPFVENGHSESSGQTHLEGDTVQIICNTGYRLQNNENNISCVERGWSTPPKCRSTISAEKCGPPPPIDNGDITSFLLSVYAPGSSVEYQCQNLYQLEGNNQITCRNGQWSEPPKCLDPCVISQEIMEKYNIKLKWTNQQKLYSRTGDIVEFVCKSGYHPTKSHSFRAMCQNGKLVYPSCEEK

SEQ ID NO: 42127 - protein, 270 aa, Homo sapiens; identical to SEQ ID NO: 42126

SEQ ID NO: 42128 - protein, 330 aa, Homo sapiens
MLLLINVILTLWVSCANGQVKPCDFPDIKHGGLFHENMRRPYFPVAVGKYYSYYCDEHFETPSGSYWDYIHCTQNGWSPAVPCLRKCYFPYLENGYNQNYGRKFVQGNSTEVACHPGYGLPKAQTTVTCTEKGWSPTPRCIRVRTCSKSDIEIENGFISESSSIYILNKEIQYKCKPGYATADGNSSGSITCLQNGWSAQPICINSSEKCGPPPPISNGDTTSFLLKVYVPQSRVEYQCQPYYELQGSNYVTCSNGEWSEPPRCIHPCIITEENMNKNNIKLKGRSDRKYYAKTGDTIEFMCKLGYNANTSILSFQAVCREGIVEYPRCE

SEQ ID NO: 42129 - protein, 195 aa, Homo sapiens
MLLLINVILTLWVSCANGQVKPCDFPDIKHGGLFHENMRRPYFPVAVGKYYSYYCDEHFETPSGSYWDYIHCTQNGWSPAVPCLRKCYFPYLENGYNQNYGRKFVQGNSTEVACHPGYGLPKAQTTVTCTEKGWSPTPRCIRVRTCSKSDIEIENGFISESSSIYILNKEIQYKCKPGYATADGNSSDMVFCISY

SEQ ID NO: 42130 - protein, 269 aa, Homo sapiens
MLLLINVILTLWVSCANGQVKPCDFPDIKHGGLFHENMRRPYFPVAVGKYYSYYCDEHFETPSGSYWDYIHCTQNGWSPAVPCLRKCYFPYLENGYNQNYGRKFVQGNSTEVACHPGYGLPKAQTTVTCTEKGWSPTPRCIRVNSSEKCGPPPPISNGDTTSFLLKVYVPQSRVEYQCQPYYELQGSNYVTCSNGEWSEPPRCIHPCIITEENMNKNNIKLKGRSDRKYYAKTGDTIEFMCKLGYNANTSILSFQAVCREGIVEYPRCE

SEQ ID NO: 42131 - protein, 331 aa, Homo sapiens
MLLLINVILTLWVSCANGQEVKPCDFPEIQHGGLYYKSLRRLYFPAAAGQSYSYYCDQNFVTPSGSYWDYIHCTQDGWSPTVPCLRTCSKSDIEIENGFISESSSIYILNKEIQYKCKPGYATADGNSSGSITCLQNGWSAQPICIKFCDMPVFENSRAKSNGMRFKLHDTLDYECYDGYEISYGNTTGSIVCGEDGWSHFPTCYNSSEKCGPPPPISNGDTTSFLLKVYVPQSRVEYQCQSYYELQGSNYVTCSNGEWSEPPRCIHPCIITEENMNKNNIQLKGKSDIKYYAKTGDTIEFMCKLGYNANTSVLSFQAVCREGIVEYPRCE

SEQ ID NO: 42132 - protein, 577 aa, Homo sapiens
MLLLINVILTLWVSCANGQVKPCDFPEIQHGGLYYKSLRRLYFPAAAGQSYSYYCDQNFVTPSGSYWDYIHCTQDGWSPTVPCLRTCSKSDVEIENGFISESSSIYILNEETQYNCKPGYATAEGNSSGSITCLQNGWSTQPICIKFCDMPVFENSRAKSNGMWFKLHDTLDYECYDGYESSYGNTTDSIVCGEDGWSHLPTCYNSSENCGPPPPISNGDTTSFPQKVYLPWSRVEYQCQSYYELQGSKYVTCSNGDWSEPPRCISMKPCEFPEIQHGHLYYENTRRPYFPVATGQSYSYYCDQNFVTPSGSYWDYIHCTQDGWLPTVPCLRTCSKSDIEIENGFISESSSIYILNKEIQYKCKPGYATADGNSSGSITCLQNGWSAQPICIKFCDMPVFENSRAKSNGMRFKLHDTLDYECYDGYEISYGNTTGSIVCGEDGWSHFPTCYNSSEKCGPPPPISNGDTTSFLLKVYVPQSRVEYQCQSYYELQGSNYVTCSNGEWSEPPRCIHPCIITEENMNKNNIQLKGKSDIKYYAKTGDTIEFMCKLGYNANTSVLSFQAVCREGIVEYPRCE

SEQ ID NO: 42133 - protein, 331 aa, Homo sapiens
MLLLINVILTLWVSCANGQAMKPCEFPEIQHGHLYYENTRRPYFPVATGQSYSYYCDQNFVTPSGSYWDYIHCTQDGWLPTVPCLRTCSKSDIEIENGFISESSSIYILNKEIQYKCKPGYATADGNSSGSITCLQNGWSAQPICIKFCDMPVFENSRAKSNGMRFKLHDTLDYECYDGYEISYGNTTGSIVCGEDGWSHFPTCYNSSEKCGPPPPISNGDTTSFLLKVYVPQSRVEYQCQSYYELQGSNYVTCSNGEWSEPPRCIHPCIITEENMNKNNIQLKGKSDIKYYAKTGDTIEFMCKLGYNANTSVLSFQAVCREGIVEYPRCE

SEQ ID NO: 42134 - protein, 331 aa, Homo sapiens
MLLLINVILTLWVSCANGQEVKPCDFPEIQHGGLYYKSLRRLYFPAAAGQSYSYYCDQNFVTPSGSYWDYIHCTQDGWLPTVPCLRTCSKSDIEIENGFISESSSIYILNKEIQYKCKPGYATADGNSSGSITCLQNGWSAQPICIKFCDMPVFENSRAKSNGMRFKLHDTLDYECYDGYEISYGNTTGSIVCGEDGWSHFPTCYNSSEKCGPPPPISNGDTTSFLLKVYVPQSRVEYQCQSYYELQGSNYVTCSNGEWSEPPRCIHPCIITEENMNKNNIQLKGKSDIKYYAKTGDTIEFMCKLGYNANTSVLSFQAVCREGIVEYPRCE

SEQ ID NO: 42135 - protein, 583 aa, Homo sapiens
MKLLHVFLLFLCFHLRFCKVTYTSQEDLVEKKCLAKKYTHLSCDKVFCQPWQRCIEGTCVCKLPYQCPKNGTAVCATNRRSFPTYCQQKSLECLHPGTKFLNNGTCTAEGKFSVSLKHGNTDSEGIVEVKLVDQDKTMFICKSSWSMREANVACLDLGFQQGADTQRRFKLSDLSINSTECLHVHCRGLETSLAECTFTKRRTMGYQDFADVVCYTQKADSPMDDFFQCVNGKYISQMKACDGINDCGDQSDELCCKACQGKGFHCKSGVCIPSQYQCNGEVDCITGEDEVGCAGFASVTQEETEILTADMDAERRRIKSLLPKLSCGVKNRMHIRRKRIVGGKRAQLGDLPWQVAIKDASGITCGGIYIGGCWILTAAHCLRASKTHRYQIWTTVVDWIHPDLKRIVIEYVDRIIFHENYNAGTYQNDIALIEMKKDGNKKDCELPRSIPACVPWSPYLFQPNDTCIVSGWGREKDNERVFSLQWGEVKLISNCSKFYGNRFYEKEMECAGTYDGSIDACKGDSGGPLVCMDANNVTYVWGVVSWGENCGKPEFPGVYTKVANYFDWISYHVGRPFISQYNV

SEQ ID NO: 42136 - protein, 591 aa, Homo sapiens
MKLLHVFLLFLCFHLRFCKVTYTSQEDLVEKKCLAKKYTHLSCDKVFCQPWQRCIEGTCVCKLPYQCPKNGTAVCATNRRSFPTYCQQKSLECLHPGTKFLNNGTCTAEGKFSVSLKHGNTDSEGIVEVKLVDQDKTMFICKSSWSMREANVACLDLGFQQGADTQRRFKLSDLSINSTECLHVHCRGLETSLAECTFTKRRTMGYQDFADVVCYTQKADSPMDDFFQCVNGKYISQMKACDGINDCGDQSDELCCKACQGKGFHCKSGVCIPSQYQCNGEVDCITGEDEVGCAAARHPTIQGFASVTQEETEILTADMDAERRRIKSLLPKLSCGVKNRMHIRRKRIVGGKRAQLGDLPWQVAIKDASGITCGGIYIGGCWILTAAHCLRASKTHRYQIWTTVVDWIHPDLKRIVIEYVDRIIFHENYNAGTYQNDIALIEMKKDGNKKDCELPRSIPACVPWSPYLFQPNDTCIVSGWGREKDNERVFSLQWGEVKLISNCSKFYGNRFYEKEMECAGTYDGSIDACKGDSGGPLVCMDANNVTYVWGVVSWGENCGKPEFPGVYTKVANYFDWISYHVGRPFISQYNV

SEQ ID NO: 42137 - protein, 576 aa, Homo sapiens
MKLLHVFLLFLCFHLRFCKVTYTSQEDLVEKKCLAKKYTHLSCDKVFCQPWQRCIEGTCVCKLPYQCPKNGTAVCATNRRSFPTYCQQKSLECLHPGTKFLNNGTCTAEGKFSVSLKHGNTDSEGIVEVKLVDQDKTMFICKSSWSMREANVACLDLGFQQGADTQRRFKLSDLSINSTECLHVHCRGLETSLAECTFTKRRTMGYQDFADVVCYTQKADSPMDDFFQCVNGKYISQMKACDGINDCGDQSDELCCKACQGKGFHCKSGVCIPSQYQCNGEVDCITGEDEVGCAEETEILTADMDAERRRIKSLLPKLSCGVKNRMHIRRKRIVGGKRAQLGDLPWQVAIKDASGITCGGIYIGGCWILTAAHCLRASKTHRYQIWTTVVDWIHPDLKRIVIEYVDRIIFHENYNAGTYQNDIALIEMKKDGNKKDCELPRSIPACVPWSPYLFQPNDTCIVSGWGREKDNERVFSLQWGEVKLISNCSKFYGNRFYEKEMECAGTYDGSIDACKGDSGGPLVCMDANNVTYVWGVVSWGENCGKPEFPGVYTKVANYFDWISYHVGRPFISQYNV

SEQ ID NO: 42138 - protein, 321 aa, Homo sapiens
QVTYTSQEDLVEKKCLAKKYTHLSCDKVFCQPWQRCIEGTCVCKLPYQCPKNGTAVCATNRRSFPTYCQQKSLECLHPGTKFLNNGTCTAEGKFSVSLKHGNTDSEGIVEVKLVDQDKTMFICKSSWSMREANVACLDLGFQQGADTQRRFKLSDLSINSTECLHVHCRGLETSLAECTFTKRRTMGYQDFADVVCYTQKADSPMDDFFQCVNGKYISQMKACDGINDCGDQSDELCCKACQGKGFHCKSGVCIPSQYQCNGEVDCITGEDEVGCAAFAELCIEETEILTADMDAERRRIKSLLPKLSCGVKNRMHIRRKR

SEQ ID NO: 42139 - protein, 377 aa, Homo sapiens
MKLLHVFLLFLCFHLRFCKVTYTSQEDLVEKKCLAKKYTHLSCDKVFCQPWQRCIEGTCVCKLPYQCPKNGTAVCATNRRSFPTYCQQKSLECLHPGTKFLNNGTCTAEGKFSVSLKHGNTDSEGIVEVKLVDQDKTMFICKSSWSMREANVACLDLGFQQGADTQRRFKLSDLSINSTECLHVHCRGLETSLAECTFTKRRTMGYQDFADVVCYTQKADSPMDDFFQCVNGKYISQMKACDGINDCGDQSDELCCKACQGKGFHCKSGVCIPSQYQCNGEVDCITGEDEVGCAGFASVTQEETEILTADMDAERRRIKSLLPKLSCGVKNRMHIRRKRIVGGKRAQLGKMKQISLDIFKGLHRVYAILEFCCIILK

SEQ ID NO: 42140 - protein, 134 aa, Homo sapiens
MEFVMKQALGGATKDMGKMLGGDEEKDPDAAKKEEERQEALRQAEEERKAKYAKMEAEREAVRQGIRDKYGIKKKEEREAEAQAAMEANSEGSLTRPKKAIPPGCGDEVEEEDESILDTVIKYLPGPLQDMLKK

SEQ ID NO: 42141 - protein, 134 aa, Homo sapiens
MDFVMKQALGGATKDMGKMLGGEEEKDPDAQKKEEERQEALRQQEEERKAKHARMEAEREKVRQQIRDKYGLKKKEEKEAEEKAALEQPCEGSLTRPKKAIPAGCGDEEEEEEESILDTVLKYLPGPLQDMFKK

SEQ ID NO: 42142 - protein, 134 aa, Homo sapiens; identical to SEQ ID NO: 42141

SEQ ID NO: 42143 - protein, 184 aa, Homo sapiens
MDFVMKQALGGATKDMGKMLGGEEEKDPDAQKKEEERQEALRQQEEERKAKHARMEAEREKVRQQIRDKYGLKKKEEKEAEEKAALRGRGGGGRGEHPGHGAQIPARAAAGHVQEVTRPPAPAYSTCYYFFLVLSFLFIRLSLNSEGENLSWPLPLFPGQGLLPLSSPSHLPSSQGIHLHPTPK

SEQ ID NO: 42144 - protein, 77 aa, Homo sapiens
MDFVMKQALGGATKDMGKMLGGEEEKDPDAQKKEEERQEALRQQEEERKAKHARMEAEREKVRQQIRDKYGLKKKEE

SEQ ID NO: 42145 - protein, 111 aa, Homo sapiens
MDFVMKQALGGATKDMGKMLGGEEEKDPDAQKKEEERQEALRQQEEERKAKHARMEAEREKVRQQIRDKYGLKKKEEKEAEEKAALEQPCEGSLTRPKKAIPAGCGDEEEE

SEQ ID NO: 42146 - protein, 119 aa, Homo sapiens
MDFVMKQALGGATKDMGKMLGGEEEKDPDAQKKEEERQEALRQQEEERKAKHARMEAEREKVRQQIRDKYGLKKKEEKEAEEKAALEQPCEGSLTRPKKAIPAGCGDEEEEEEESILDT

SEQ ID NO: 42147 - protein, 37 aa, Homo sapiens
MDFVMKQALGGATKDMGKMLGGEEEKDPDAQKKEEER

SEQ ID NO: 42148 - protein, 134 aa, Homo sapiens; identical to SEQ ID NO: 42141

SEQ ID NO: 42149 - protein, 6 aa, Homo sapiens
MDFVMK

SEQ ID NO: 42150 - protein, 980 aa, Homo sapiens
MATAATSPALKRLDLRDPAALFETHGAEEIRGLERQVRAEIEHKKEELRQMVGERYRDLIEAADTIGQMRRCAVGLVDAVKATDQYCARLRQAGSAAPRPPRAQQPQQPSQEKFYSMAAQIKLLLEIPEKIWSSMEASQCLHATQLYLLCCHLHSLLQLDSSSSRYSPVLSRFPILIRQVAAASHFRSTILHESKMLLKCQGVSDQAVAEALCSIMLLEESSPRQALTDFLLARKATIQKLLNQPHHGAGIKAQICSLVELLATTLKQAHALFYTLPEGLLPDPALPCGLLFSTLETITGQHPAGKGTGVLQEEMKLCSWFKHLPASIVEFQPTLRTLAHPISQEYLKDTLQKWIHMCNEDIKNGITNLLMYVKSMKGLAGIRDAMWELLTNESTNHSWDVLCRRLLEKPLLFWEDMMQQLFLDRLQTLTKEGFDSISSSSKELLVSALQELESSTSNSPSNKHIHFEYNMSLFLWSESPNDLPSDAAWVSVANRGQFASSGLSMKAQAISPCVQNFCSALDSKLKVKLDDLLAYLPSDDSSLPKDVSPTQAKSSAFDRYADAGTVQEMLRTQSVACIKHIVDCIRAELQSIEEGVQGQQDALNSAKLHSVLFMARLCQSLGELCPHLKQCILGKSESSEKPAREFRALRKQGKVKTQEIIPTQAKWQEVKEVLLQQSVMGYQVWSSAVVKVLIHGFTQSLLLDDAGSVLATATSWDELEIQEEAESGSSVTSKIRLPAQPSWYVQSFLFSLCQEINRVGGHALPKVTLQEMLKSCMVQVVAAYEKLSEEKQIKKEGAFPVTQNRALQLLYDLRYLNIVLTAKGDEVKSGRSKPDSRIEKVTDHLEALIDPFDLDVFTPHLNSNLHRLVQRTSVLFGLVTGTENQLAPRSSTFNSQEPHNILPLASSQIRFGLLPLSMTSTRKAKSTRNIETKAQVVPPARSTAGDPTVPGSLFRQLVSEEDNTSAPSLFKLGWLSSMTK

SEQ ID NO: 42151 - protein, 940 aa, Homo sapiens
MATAATSPALKRLDLRDPAALFETHGAEEIRGLERQVRAEIEHKKEELRQMVGERYRDLIEAADTIGQMRRCAVGLVDAVKATDQYCARLRQAGSAAPRPPRAQQPQQPSQEKFYSMAAQIKLLLEIPEKIWSSMEASQCLHATQLYLLCCHLHSLLQLDSSSSRYSPVLSRFPILIRQVAAASHFRSTILHESKMLLKCQGVSDQAVAEALCSIMLLEESSPRQALTDFLLARKATIQKLLNQPHHGAGIKAQICSLVELLATTLKQAHALFYTLPEGLLPDPALPCGLLFSTLETITGQHPAGKGTGVLQEEMKLCSWFKHLPASIVEFQPTLRTLAHPISQEYLKDTLQKWIHMCNEDIKNGITNLLMYVKSMKGLAGIRDAMWELLTNESTNHSWDVLCRRLLEKPLLFWEDMMQQLFLDRLQTLTKEGFDSISSSSKELLVSALQELESSTSNSPSNKHIHFEYNMSLFLWSESPNDLPSDAAWVSVANRGQFASSGLSMKAQAISPCVQNFCSALDSKLKVKLDDLLAYLPSDDSSLPKDVSPTQAKSSAFDRYADAGTVQEMLRTQSVACIKHIVDCIRAELQSIEEGVQGQQDALNSAKLHSVLFMARLCQSLGELCPHLKQCILGKSESSEKPAREFRALRKQGKVKTQEIIPTQAKWQEVKEVLLQQSVMGYQVWSSAVVKVLIHGFTQSLLLDDAGSVLATATSWDELEIQEEAESGSSVTSKIRLPAQPSWYVQSFLFSLCQEINRVGGHALPKVTLQEMLKSCMVQVVAAYEKLSEEKQIKKEGAFPVTQNRALQLLYDLRYLNIVLTAKGDEVKSGRSKPDSRIEKVTDHLEALIDPFDLDVFTPHLNSNLHRLVQRTSVLFGLVTGTENQLAPRSSTFNSQEPHNILPLASSQIRFGLLPLSMTSTRKAKSTRNIETKAQYDANC

SEQ ID NO: 42152 - protein, 737 aa, Homo sapiens
MEKSRMNLPKGPDTLCFDKDEFMKEDFDVDHFVSDCRKRVQLEELRDDLELYYKLLKTAMVELINKDYADFVNLSTNLVGMDKALNQLSVPLGQLREEVLSLRSSVSEGIRAVDERMSKQEDIRKKKMCVLRLIQVIRSVEKIEKILNSQSSKETSALEASSPLLTGQILERIATEFNQLQFHAVQSKGMPLLDKVRPRIAGITAMLQQSLEGLLLEGLQTSDVDIIRHCLRTYATIDKTRDAEALVGQVLVKPYIDEVIIEQFVESHPNGLQVMYNKLLEFVPHHCRLLREVTGGAISSEKGNTVPGYDFLVNSVWPQIVQGLEEKLPSLFNPGNPDAFHEKYTISMDFVRRLERQCGSQASVKRLRAHPAYHSFNKKWNLPVYFQIRFREIAGSLEAALTDVLEDAPAESPYCLLASHRTWSSLRRCWSDEMFLPLLVHRLWRLTLQILARYSVFVNELSLRPISNESPKEIKKPLVTGSKEPSITQGNTEDQGSGPSETKPVVSISRTQLVYVVADLDKLQEQLPELLEIIKPKLEMIGFKNFSSISALEDSQSSFSACVPSLSSKIIQDLSDSCFGFLKSALEVPRLYRRTNKEVPTTASSYVDSALKPLFQLQSGHKDKLKQAIIQQWLEGTLSESTHKYYETVSDVLNSVKKMEESLKRLKQARKTTPANPVGPSGGMSDDDKIRLQLALDVEYLGEQIQKLGLQASDIKSFSALAELVAAAKDQATAEQP

SEQ ID NO: 42153 - protein, 738 aa, Homo sapiens
MEKSRMNLPKGPDTLCFDKDEFMKEDFDVDHFVSDCRKRVQLEELRDDLELYYKLLKTAMVELINKDYADFVNLSTNLVGMDKALNQLSVPLGQLREEVLSLRSSVSEGIRAVDERMSKQEDIRKKKMCVLRLIQVIRSVEKIEKILNSQSSKETSALEASSPLLTGQILERIATEFNQLQFHAVQSKGMPLLDKVRPRIAGITAMLQQSLEGLLLEGLQTSDVDIIRHCLRTYATIDKTRDAEALVGQVLVKPYIDEVIIEQFVESHPNGLQVMYNKLLEFVPHHCRLLREVTGGAISSEKGNTVPGYDFLVNSVWPQIVQGLEEKLPSLFNPGNPDAFHEKYTISMDFVRRLERQCGSQASVKRLRAHPAYHSFNKKWNLPVYFQIRFREIAGSLEAALTDVLEDAPAESPYCLLASHRTWSSLRRCWSDEMFLPLLVHRLWRLTLQILARYSVFVNELSLRPISNESPKEIKKPLVTGSKEPSITQGNTEDQGSGPSETKPVVSISRTQLVYVVADLDKLQEQLPELLEIIKPKLEMIGFKNFSSISAALEDSQSSFSACVPSLSSKIIQDLSDSCFGFLKSALEVPRLYRRTNKEVPTTASSYVDSALKPLFQLQSGHKDKLKQAIIQQWLEGTLSESTHKYYETVSDVLNSVKKMEESLKRLKQARKTTPANPVGPSGGMSDDDKIRLQLALDVEYLGEQIQKLGLQASDIKSFSALAELVAAAKDQATAEQP

SEQ ID NO: 42154 - protein, 679 aa, Homo sapiens
MVELINKDYADFVNLSTNLVGMDKALNQLSVPLGQLREEVLSLRSSVSEGIRAVDERMSKQEDIRKKKMCVLRLIQVIRSVEKIEKILNSQSSKETSALEASSPLLTGQILERIATEFNQLQFHAVQSKGMPLLDKVRPRIAGITAMLQQSLEGLLLEGLQTSDVDIIRHCLRTYATIDKTRDAEALVGQVLVKPYIDEVIIEQFVESHPNGLQVMYNKLLEFVPHHCRLLREVTGGAISSEKGNTVPGYDFLVNSVWPQIVQGLEEKLPSLFNPGNPDAFHEKYTISMDFVRRLERQCGSQASVKRLRAHPAYHSFNKKWNLPVYFQIRFREIAGSLEAALTDVLEDAPAESPYCLLASHRTWSSLRRCWSDEMFLPLLVHRLWRLTLQILARYSVFVNELSLRPISNESPKEIKKPLVTGSKEPSITQGNTEDQGSGPSETKPVVSISRTQLVYVVADLDKLQEQLPELLEIIKPKLEMIGFKNFSSISAALEDSQSSFSACVPSLSSKIIQDLSDSCFGFLKSALEVPRLYRRTNKEVPTTASSYVDSALKPLFQLQSGHKDKLKQAIIQQWLEGTLSESTHKYYETVSDVLNSVKKMEESLKRLKQARKTTPANPVGPSGGMSDDDKIRLQLALDVEYLGEQIQKLGLQASDIKSFSALAELVAAAKDQATAEQP

SEQ ID NO: 42155 - protein, 622 aa, Homo sapiens
MSKQEDIRKKKMCVLRLIQVIRSVEKIEKILNSQSSKETSALEASSPLLTGQILERIATEFNQLQFHAVQSKGMPLLDKVRPRIAGITAMLQQSLEGLLLEGLQTSDVDIIRHCLRTYATIDKTRDAEALVGQVLVKPYIDEVIIEQFVESHPNGLQVMYNKLLEFVPHHCRLLREVTGGAISSEKGNTVPGYDFLVNSVWPQIVQGLEEKLPSLFNPGNPDAFHEKYTISMDFVRRLERQCGSQASVKRLRAHPAYHSFNKKWNLPVYFQIRFREIAGSLEAALTDVLEDAPAESPYCLLASHRTWSSLRRCWSDEMFLPLLVHRLWRLTLQILARYSVFVNELSLRPISNESPKEIKKPLVTGSKEPSITQGNTEDQGSGPSETKPVVSISRTQLVYVVADLDKLQEQLPELLEIIKPKLEMIGFKNFSSISAALEDSQSSFSACVPSLSSKIIQDLSDSCFGFLKSALEVPRLYRRTNKEVPTTASSYVDSALKPLFQLQSGHKDKLKQAIIQQWLEGTLSESTHKYYETVSDVLNSVKKMEESLKRLKQARKTTPANPVGPSGGMSDDDKIRLQLALDVEYLGEQIQKLGLQASDIKSFSALAELVAAAKDQATAEQP

SEQ ID NO: 42156 - protein, 427 aa, Homo sapiens
MGFAMEDTEDISQNHFGHLCIFKWGHWKKDLKYTISMDFVRRLERQCGSQASVKRLRAHPAYHSFNKKWNLPVYFQIRFREIAGSLEAALTDVLEDAPAESPYCLLASHRTWSSLRRCWSDEMFLPLLVHRLWRLTLQILARYSVFVNELSLRPISNESPKEIKKPLVTGSKEPSITQGNTEDQGSGPSETKPVVSISRTQLVYVVADLDKLQEQLPELLEIIKPKLEMIGFKNFSSISAALEDSQSSFSACVPSLSSKIIQDLSDSCFGFLKSALEVPRLYRRTNKEVPTTASSYVDSALKPLFQLQSGHKDKLKQAIIQQWLEGTLSESTHKYYETVSDVLNSVKKMEESLKRLKQARKTTPANPVGPSGGMSDDDKIRLQLALDVEYLGEQIQKLGLQASDIKSFSALAELVAAAKDQATAEQP

SEQ ID NO: 42157 - protein, 828 aa, Homo sapiens
MAEAALLLLPEAAAERDAREKLALWDRRPDTTAPLTDRQTDSVLELKAAAENLPVPAELPIEDLCSLTSQSLPIELTSVVPESTEDILLKGFTSLGMEEERIETAQQFFSWFAKLQTQMDQDEGTKYRQMRDYLSGFQEQCDAILNDVNSALQHLESLQKQYLFVSNKTGTLHEACEQLLKEQSELVDLAENIQQKLSYFNELETINTKLNSPTLSVNSDGFIPMLAKLDDCITYISSHPNFKDYPIYLLKFKQCLSKALHLMKTYTVNTLQTLTSQLLKRDPSSVPNADNAFTLFYVKFRAAAPKVRTLIEQIELRSEKIPEYQQLLNDIHQCYLDQRELLLGPSIACTVAELTSQNNRDHCALVRSGCAFMVHVCQDEHQLYNEFFTKPTSKLDELLEKLCVSLYDVFRPLIIHVIHLETLSELCGILKNEVLEDHVQNNAEQLGAFAAGVKQMLEDVQERLVYRTHIYIQTDITGYKPAPGDLAYPDKLVMMEQIAQSLKDEQKKVPSEASFSDVHLEEGESNSLTKSGSTESLNPRPQTTISPADLHGMWYPTVRRTLVCLSKLYRCIDRAVFQGLSQEALSACIQSLLGASESISKNKTQIDGQLFLIKHLLILREQIAPFHTEFTIKEISLDLKKTRDAAFKILNPMTVPRFFRLNSNNALIEFLLEGTPEIREHYLDSKKDVDRHLKSACEQFIQQQTKLFVEQLEEFMTKVSALKTMASQGGPKYTLSQQPWAQPAKVNDLAATAYKTIKTKLPVTLRSMSLYLSNKDTEFILFKPVRNNIQQVFQKFHALLKEEFSPEDIQIIACPSMEQLSLLLLVSK

SEQ ID NO: 42158 - protein, 789 aa, Homo sapiens
MGTKMADLDSPPKLSGVQQPSEGVGGGRCSEISAELIRSLTELQELEAVYERLCGEEKVVERELDALLEQQNTIESKMVTLHRMGPNLQLIEGDAKQLAGMITFTCNLAENVSSKVRQLDLAKNRLYQAIQRADDILDLKFCMDGVQTALRSEDYEQAAAHTHRYLCLDKSVIELSRQGKEGSMIDANLKLLQEAEQRLKAIVAEKFAIATKEGDLPQVERFFKIFPLLGLHEEGLRKFSEYLCKQVASKAEENLLMVLGTDMSDRRAAVIFADTLTLLFEGIARIVETHQPIVETYYGPGRLYTLIKYLQVECDRQVEKVVDKFIKQRDYHQQFRHVQNNLMRNSTTEKIEPRELDPILTEVTLMNARSELYLRFLKKRISSDFEVGDSMASEEVKQEHQKCLDKLLNNCLLSCTMQELIGLYVTMEEYFMRETVNKAVALDTYEKGQLTSSMVDDVFYIVKKCIGRALSSSSIDCLCAMINLATTELESDFRDVLCNKLRMGFPATTFQDIQRGVTSAVNIMHSSLQQGKFDTKGIESTDEAKMSFLVTLNNVEVCSENISTLKKTLESDCTKLFSQGIGGEQAQAKFDSCLSDLAAVSNKFRDLLQEGLTELNSTAIKPQVQPWINSFFSVSHNIEEEEFNDYEANDPWVQQFILNLEQQMAEFKASLSPVIYDSLTGLMTSLVAVELEKVVLKSTFNRLGGLQFDKELRSLIAYLTTVTTWTIRDKFARLSQMATILNLERVTEILDYWGPNSGPLTWRLTPAEVRQVLALRIDFRSEDIKRLRL

SEQ ID NO: 42159 - protein, 764 aa, Homo sapiens
MADLDSPPKLSGVQQPSEGVGGGRCSEISAELIRSLTELQELEAVYERLCGEEKVVERELDALLEQQNTIESKMVTLHRMGPNLQLIEGDAKQLAGMITFTCNLAENVSSKVRQLDLAKNRLYQAIQRADDILDLKFCMDGVQTALRSEDYEQAAAHTHRYLCLDKSVIELSRQGKEGSMIDANLKLLQEAEQRLKAIVAEKFAIATKEGDLPQVERFFKIFPLLGLHEEGLRKFSEYLCKQVASKAEENLLMVLGTDMSDRRAAVIFADTLTLLFEGIARIVETHQPIVETYYGPGRLYTLIKYLQVECDRQVEKVVDKFIKQRDYHQQFRHVQNNLMRNSTTEKIEPRELDPILTEVTLMNARSELYLRFLKKRISSDFEVGDSMASEEVKQEHQKCLDKLLNNCLLSCTMQELIGLYVTMEEYFMRETVNKAVALDTYEKGQLTSSMVDDVFYIVKKCIGRALSSSSIDCLCAMINLATTELESDFRDVLCNKLRMGFPATTFQDIQRGVTSAVNIMHSSLQQGKFDTKGIESTDEAKMSFLSDCTKLFSQGIGGEQAQAKFDSCLSDLAAVSNKFRDLLQEGLTELNSTAIKPQVQPWINSFFSVSHNIEEEEFNDYEANDPWVQQFILNLEQQMAEFKASLSPVIYDSLTGLMTSLVAVELEKVVLKSTFNRLGGLQFDKELRSLIAYLTTVTTWTIRDKFARLSQMATILNLERVTEILDYWGPNSGPLTWRLTPAEVRQVLALRIDFRSEDIKRLRL

SEQ ID NO: 42160 - protein, 337 aa, Homo sapiens
MADLDSPPKLSGVQQPSEGVGGGRCSEISAELIRSLTELQELEAVYERLCGEEKVVERELDALLEQQNTIESKMVTLHRMGPNLQLIEGDAKQLAGMITFTCNLAENVSSKVRQLDLAKNRLYQAIQRADDILDLKFCMDGVQTALRSEDYEQAAAHTHRYLCLDKSVIELSRQGKEGSMIDANLKLLQEAEQRLKAIVAEKFAIATKEGDLPQVERFFKIFPLLGLHEEGLRKFSEYLCKQVASKAEENLLMVLGTDMSDRRAAVIFADTLTLLFEGIARIVETHQPIVETYYGPGRLYTLIKYLQVECDRQVEKVVDKFIKQRDYHQQNFVFSFF

SEQ ID NO: 42161 - protein, 447 aa, Homo sapiens
MRNSTTEKIEPRELDPILTEVTLMNARSELYLRFLKKRISSDFEVGDSMASEEVKQEHQKCLDKLLNNCLLSCTMQELIGLYVTMEEYFMRETVNKAVALDTYEKGQLTSSMVDDVFYIVKKCIGRALSSSSIDCLCAMINLATTELESDFRDVLCNKLRMGFPATTFQDIQRGVTSAVNIMHSSLQQGKFDTKGIESTDEAKMSFLVTLNNVEVCSENISTLKKTLESDCTKLFSQGIGGEQAQAKFDSCLSDLAAVSNKFRDLLQEGLTELNSTAIKPQVQPWINSFFSVSHNIEEEEFNDYEANDPWVQQFILNLEQQMAEFKASLSPVIYDSLTGLMTSLVAVELEKVVLKSTFNRLGGLQFDKELRSLIAYLTTVTTWTIRDKFARLSQMATILNLERVTEILDYWGPNSGPLTWRLTPAEVRQVLALRIDFRSEDIKRLRL

SEQ ID NO: 42162 - protein, 860 aa, Homo sapiens
MGWVGGRRRDSASPPGRSRSAADDINPAPANMEGGGGSVAVAGLGARGSGAAAATVRELLQDGCYSDFLNEDFDVKTYTSQSIHQAVIAEQLAKLAQGISQLDRELHLQVVARHEDLLAQATGIESLEGVLQMMQTRIGALQGAVDRIKAKIVEPYNKIVARTAQLARLQVACDLLRRIIRILNLSKRLQGQLQGGSREITKAAQSLNELDYLSQGIDLSGIEVIENDLLFIARARLEVENQAKRLLEQGLETQNPTQVGTALQVFYNLGTLKDTITSVVDGYCATLEENINSALDIKVLTQPSQSAVRGGPGRSTMPTPGNTAALRASFWTNMEKLMDHIYAVCGQVQHLQKVLAKKRDPVSHICFIEEIVKDGQPEIFYTFWNSVTQALSSQFHMATNSSMFLKQAFEGEYPKLLRLYNDLWKRLQQYSQHIQGNFNASGTTDLYVDLQHMEDDAQDIFIPKKPDYDPEKALKDSLQPYEAAYLSKSLSRLFDPINLVFPPGGRNPPSSDELDGIIKTIASELNVAAVDTNLTLAVSKNVAKTIQLYSVKSEQLLSTQGDASQVIGPLTEGQRRNVAVVNSLYKLHQSVTKVVSSQSSFPLAAEQTIISALKAIHALMENAVQPLLTSVGDAIEAIIITMHQEDFSGSLSSSGKPDVPCSLYMKELQGFIARVMSDYFKHFECLDFVFDNTEAIAQRAVELFIRHASLIRPLGEGGKMRLAADFAQMELAVGPFCRRVSDLGKSYRMLRSFRPLLFQASEHVASSPALGDVIPFSIIIQFLFTRAPAELKSPFQRAEWSHTRFSQWLDDHPSEKDRLLLIRGALEAYVQSVRSREGKEFAPVYPIMVQLLQKAMSALQ

SEQ ID NO: 42163 - protein, 839 aa, Homo sapiens
MGWVGGRRRDSASPPGRSRSAADDINPAPANMEGGGGSVAVAGLGARGSGAAAATVRELLQDGCYSDFLNEDFDVKTYTSQSIHQAVIAEQLAKLAQGISQLDRELHLQVVARHEDLLAQATGIESLEGVLQMMQTRIGALQGAVDRIKAKIVEPYNKIVARTAQLARLQVACDLLRRIIRILNLSKRLQGQLQGGSREITKAAQSLNELDYLSQGIDLSGIEVIENDLLFIARARLEVENQAKRLLEQGLETQNPTQVGTALQVFYNLGTLKDTITSVVDGYCATLEENINSALDIKVLTQPSQSAVRGGPGRSTMPTPGNTAALRASFWTNMEKLMDHIYAVCGQVQHLQKVLAKKRDPVSHICFIEEIVKDGQPEIFYTFWNSVTQALSSQFHMATNSSMFLKQAFEGEYPKLLRLYNDLWKRLQQYSQHIQGNFNASGTTDLYVDLQHMEDDAQDIFIPKKPDYDPEKALKDSLQPYEAAYLSKSLSRLFDPINLVFPPGGRNPPSSDELDGIIKTIASELNVAAVDTNLTLAVSKNVAKTIQLYSVKSEQLLSTQGDASQVIGPLTEGQRRNVAVVNSLYKLHQSVTKAIHALMENAVQPLLTSVGDAIEAIIITMHQEDFSGSLSSSGKPDVPCSLYMKELQGFIARVMSDYFKHFECLDFVFDNTEAIAQRAVELFIRHASLIRPLGEGGKMRLAADFAQMELAVGPFCRRVSDLGKSYRMLRSFRPLLFQASEHVASSPALGDVIPFSIIIQFLFTRAPAELKSPFQRAEWSHTRFSQWLDDHPSEKDRLLLIRGALEAYVQSVRSREGKEFAPVYPIMVQLLQKAMSALQ

SEQ ID NO: 42164 - protein, 823 aa, Homo sapiens
MGWVGGRRRDSASPPGRSRSAADDINPAPANMEGGGGSVAVAGLGARGSGAAAATVRELLQDGCYSDFLNEDFDVKTYTSQSIHQAVIAEQLAKLAQGISQLDRELHLQVVARHEDLLAQATGIESLEGVLQMMQTRIGALQGAVDRIKAKIVEPYNKIVARTAQLARLQVACDLLRRIIRILNLSKRLQGQLQGGSREITKAAQSLNELDYLSQGIDLSGIEVIENDLLFIARARLEVENQAKRLLEQGLETQNPTQVGTALQVFYNLGTLKDTITSVVDGYCATLEENINSALDIKVLTQPSQSAVRGGPGRSTMPTPGNTAALRASFWTNMEKLMDHIYAVCGQVQHLQKVLAKKRDPVSHICFIEEIVKDGQPEIFYTFWNSVTQALSSQFHMATNSSMFLKQAFEGEYPKLLRLYNDLWKRLQQYSQHIQGNFNASGTTDLYVDLQHMEDDAQDIFIPKKPDYDPEKALKDSLQPYEAAYLSKSLSRLFDPINLVFPPGGRNPPSSDELDGIIKTIASELNVAAVDTNLTLAVSKNVAKTIQLYSVKSEQLLSTQGDASQVIGPLTEGQRRNVAVVNSLYKLHQSVTKVVSSQSSFPLAAEQTIISALKAIHALMENAVQPLLTSVGDAIEAIIITMHQEDFSGSLSSSGKPDVPCSLYMKELQGFIARVMSDYFKHFECLDFVFDNTEAIAQRAVELFIRHASLIRPLGEGGKMRLAADFAQMELAVGPFCRRVSDLGKSYRMLRSFRPLLFQASEHVASSPALGDVIPFSIIIQFLFTRAPAELKSPFQRAEWSHTRFSQWLDDHPSEKDRLLLIR

SEQ ID NO: 42165 - protein, 688 aa, Homo sapiens
MRGRFAHAQYSRCLRGPCLAEVAAGGGTRSAMAEGSGEVVAVSATGAANGLNNGAGGTSATTCNPLSRKLHKILETRLDNDKEMLEALKALSTFFVENSLRTRRNLRGDIERKSLAINEEFVSIFKEVKEELESISEDVQAMSNCCQDMTSRLQAAKEQTQDLIVKTTKLQSESQKLEIRAQVADAFLSKFQLTSDEMSLLRGTREGPITEDFFKALGRVKQIHNDVKVLLRTNQQTAGLEIMEQMALLQETAYERLYRWAQSECRTLTQESCDVSPVLTQAMEALQDRPVLYKYTLDEFGTARRSTVVRGFIDALTRGGPGGTPRPIEMHSHDPLRYVGDMLAWLHQATASEKEHLEALLKHVTTQGVEENIQEVVGHITEGVCRPLKVRIEQVIVAEPGAVLLYKISNLLKFYHHTISGIVGNSATALLTTIEEMHLLSKKIFFNSLSLHASKLMDKVELPPPDLGPSSALNQTLMLLREVLASHDSSVVPLDARQADFVQVLSCVLDPLLQMCTVSASNLGTADMATFMVNSLYMMKTTLALFEFTDRRLEMLQFQIEAHLDTLINEQASYVLTRVGLSYIYNTVQQHKPEQGSLANMPNLDSVTLKAAMVQFDRYLSAPDNLLIPQLNFLLSATVKEQIVKQSTELVCRAYGEVYAAVMNPINEYKDPENILHRSPQQVQTLLS

SEQ ID NO: 42166 - protein, 615 aa, Homo sapiens
MAEGSGEVVAVSATGAANGLNNGAGGTSATTCNPLSRKLHKILETRLDNDKEMLEALKALSTFFVENSLRTRRNLRGDIERKSLAINEEFVSIFKEVKEELESISEDVQAMSNCCQDMTSRLQAAKEQTQDLIVKTTKLQSESQKLEIRAQVADAFLSKFQLTSDEMSLLRGTREGPITEDFFKALGRVKQIHNDVKVLLRTNQQTAGLEIMEQMALLQETAYERLYRWAQSECRTLTQESCDVSPVLTQAMEALQDRPVLYKYTLDEFGTARRSTVVRGFIDALTRGGPGGTPRPIEMHSHDPLRYVGDMLAWLHQATASEKEHLEALLKHVTTQGVEENIQEVVGHITEGVCRPLKVRIEQVIVAEPGAVLLYKISNLLKFYHHTISGIVGNSATALLTTIEEMHLLSKKIFFNSLSLHASKLMDKVELPPPDLGPSSALNQTLMLLREVLASHDSSVVPLDARQADFVQVLSCVLDPLLQMCTVSASNLGTADMATFMVNSLYMMKTTLALFEFTDRRLEMLQFQIEAHLDTLINEQASYVLTRVGLSYIYNTVQQHKPEQGSLANMPNLDSVTLKAAMVQFDRYLSAPDNLLIPQLNFLLSATVKRPPNGP

SEQ ID NO: 42167 - protein, 657 aa, Homo sapiens
MAEGSGEVVAVSATGAANGLNNGAGGTSATTCNPLSRKLHKILETRLDNDKEMLEALKALSTFFVENSLRTRRNLRGDIERKSLAINEEFVSIFKEVKEELESISEDVQAMSNCCQDMTSRLQAAKEQTQDLIVKTTKLQSESQKLEIRAQVADAFLSKFQLTSDEMSLLRGTREGPITEDFFKALGRVKQIHNDVKVLLRTNQQTAGLEIMEQMALLQETAYERLYRWAQSECRTLTQESCDVSPVLTQAMEALQDRPVLYKYTLDEFGTARRSTVVRGFIDALTRGGPGGTPRPIEMHSHDPLRYVGDMLAWLHQATASEKEHLEALLKHVTTQGVEENIQEVVGHITEGVCRPLKVRIEQVIVAEPGAVLLYKISNLLKFYHHTISGIVGNSATALLTTIEEMHLLSKKIFFNSLSLHASKLMDKVELPPPDLGPSSALNQTLMLLREVLASHDSSVVPLDARQADFVQVLSCVLDPLLQMCTVSASNLGTADMATFMVNSLYMMKTTLALFEFTDRRLEMLQFQIEAHLDTLINEQASYVLTRVGLSYIYNTVQQHKPEQGSLANMPNLDSVTLKAAMVQFDRYLSAPDNLLIPQLNFLLSATVKEQIVKQSTELVCRAYGEVYAAVMNPINEYKDPENILHRSPQQVQTLLS

SEQ ID NO: 42168 - protein, 770 aa, Homo sapiens
MDFSKFLADDFDVKEWINAAFRAGSKEAASGKADGHAATLVMKLQLFIQEVNHAVEETSHQALQNMPKVLRDVEALKQEASFLKEQMILVKEDIKKFEQDTSQSMQVLVEIDQVKSRMQLAAESLQEADKWSTLSADIEETFKTQDIAVISAKLTGMQNSLMMLVDTPDYSEKCVHLEALKNRLEALASPQIVAAFTSQAVDQSKVFVKVFTEIDRMPQLLAYYYKCHKVQLLAAWQELCQSDLSLDRQLTGLYDALLGAWHTQIQWATQVFQKPHEVVMVLLIQTLGALMPSLPSCLSNGVERAGPEQELTRLLEFYDATAHFAKGLEMALLPHLHEHNLVKVTELVDAVYDPYKPYQLKYGDMEESNLLIQMSAVPLEHGEVIDCVQELSHSVNKLFGLASAAVDRCVRFTNGLGTCGLLSALKSLFAKYVSDFTSTLQSIRKKCKLDHIPPNSLFQEDWTAFQNSIRIIATCGELLRHCGDFEQQLANRILSTAGKYLSDSCSPRSLAGFQESILTDKKNSAKNPWQEYNYLQKDNPAEYASLMEILYTLKEKGSSNHNLLAAPRAALTRLNQQAHQLAFDSVFLRIKQQLLLISKMDSWNTAGIGETLTDELPAFSLTPLEYISNIGQYIMSLPLNLEPFVTQEDSALELALHAGKLPFPPEQGDELPELDNMADNWLGSIARATMQTYCDAILQIPELSPHSAKQLATDIDYLINVMDALGLQPSRTLQHIVTLLKTRPEDYRQVSKGLPRRLATTVATMRSVNY

SEQ ID NO: 42169 - protein, 612 aa, Homo sapiens
MATAATIPSVATATAAALGEVEDEGLLASLFRDRFPEAQWRERPDVGRYLRELSGSGLERLRREPERLAEERAQLLQQTRDLAFANYKTFIRGAECTERIHRLFGDVEASLGRLLDRLPSFQQSCRNFVKEAEEISSNRRMNSLTLNRHTEILEILEIPQLMDTCVRNSYYEEALELAAYVRRLERKYSSIPVIQGIVNEVRQSMQLMLSQLIQQLRTNIQLPACLRVIGYLRRMDVFTEAELRVKFLQARDAWLRSILTAIPNDDPYFHITKTIEASRVHLFDIITQYRAIFSDEDPLLPPAMGEHTVNESAIFHGWVLQKVSQFLQVLETDLYRGIGGHLDSLLGQCMYFGLSFSRVGADFRGQLAPVFQRVAISTFQKAIQETVEKFQEEMNSYMLISAPAILGTSNMPAAVPATQPGTLQPPMVLLDFPPLACFLNNILVAFNDLRLCCPVALAQDVTGALEDALAKVTKIILAFHRAEEAAFSSGEQELFVQFCTVFLEDLVPYLNRCLQVLFPPAQIAQTLGIPPTQLSKYGNLGHVNIGAIQEPLAFILPKRETLFTLDDQALGPELTAPAPEPPAEEPRLEPAGPACPEGGRAETQAEPPSVGP

SEQ ID NO: 42170 - protein, 299 aa, Homo sapiens [sequence omitted]

SEQ ID NO: 42171 - protein, 326 aa, Homo sapiens
MMAYMNPGPHYSVNALALSGPSVDLMHQAVPYPSPPLALDPPRRQRQERTVYTESQQKVLEFYFQKDQYPNYDQRLNLAEMLSLREQQLQVWFKNRRAKLARERRLQQQPQRVPGQRGRGARAAPLVPVAAASFPGGPEFPQGRGSWISPQPGPWGVLPAAEPKIYSLPRTWGGPECGTQEGLKAVPAPGPGPIPAPIPGPAQIPGPVPGPAPNLGPMSGPLSVSIPGPIPAPISCPGPIPDPVLGRTLMPGPGSLPTPAPGALWPQSPYASNLSPDTQLYPDFTKLLPLLDRFEESSLSTTTSQYKEEDGFVDKNHSVPRSLLDL

SEQ ID NO: 42172 - protein, 299 aa, Homo sapiens [sequence omitted]

SEQ ID NO: 42173 - protein, 299 aa, Homo sapiens [sequence omitted]

SEQ ID NO: 42174 - protein, 299 aa, Homo sapiens [sequence omitted]

SEQ ID NO: 42175 - protein, 1225 aa, Homo sapiens
MAAVLESLLREEVSVAAVVRWIARSTQGSEDNAGEAAALSSLRALRKEFVPFLLNFLREQSSRVLPQGPPTPAKTPGASAALPGRPGGPPRGSRGARSQLFPPTEAQSTAAEAPLARRGGRRRGPGPARERGGRGLEEGVSGESLPGAGGRRLRGSGSPSRPSLTLSDPPNLSNLEEFPPVGSVPPGPTETQLSCRRWVPRRLWGVSHSSSALRSGAPGCRTKPSRRINPTPVSEERSLSKPKTCFTSPPISCVPSSKQLQQSPTPTCPTPELGSPLPSRTGSLTDEPADPARVSSRQRLELVALVYSSCIAENLVPNLFLELFFVFQLLTARRMVTAKDSDPELSPAVLDSLESPLFQSIHDCVFFAVQVLECHFQVLSNLDKGTLKLLAENERLLCFSPALQGRLRAAYEGSVAKVSLVMPPSTQAVSFQPETDNRANFSSDRAFHTFKKQRDVFYEVLREWEDHHEEPGWDFEKGLGSRIRAMMGQLSAACSHSHFVRLFQKQLLQMCQSPGGAGGTVLGEAPDVLSMLGADKLGRLWRLQERLMAPQSSGGPCPPPTFPGCQGFFRDFILSASSFQFNQHLMDSLSLKIQELNGLALPQHEPNDEDGESDVDWQGERKQFAVVLLSLRLLAKFLGFVAFLPYRGPEPPPTGELQDSILALRSQVPPVLDVRTLLQRGLQARRAVLTVPWLVEFLSFADHVVPLLEYYRDIFTLLLRLHRSLVLSQESEGKMCFLNKLLLLAVLGWLFQIPTVPEDLFFLEEGPSYAFEVDTVAPEHGLDNAPVVDQQLLYTCCPYIGELRKLLASWVSGSSGRSGGFMRKITPTTTTSLGAQPSQTSQGLQAQLAQAFFHNQPPSLRRTVEFVAERIGSNCVKHIKATLVADLVRQAESLLQEQLVTQGEEGGDPAQLLEILCSQLCPHGAQALALGREFCQRKSPGAVRALLPEETPAAVLSSAENIAVGLATEKACAWLSANITALIRREVKAAVSRTLRAQGPEPAARGERRGCSRACEHHAPLPSHLISEIKDVLSLAVGPRDPDEGVSPEHLEQLLGQLGQTLRCRQFLCPPAEQHLAKCSVELASLLVADQIPILGPPAQYRLERGQARRLLHMLLSLWKEDFQGPVPLQLLLSPRNVGLLADTRPREWDLLLFLLRELVEKGLMGRMEIEACLGSLHQAQWPGDFAEELATLSNLFLAEPHLPEPQLRACELVQPNRGTVLAQS

SEQ ID NO: 42176 - protein, 1227 aa, Homo sapiens
MAAVLESLLREEVSVAAVVRWIARSTQGSEDNAGEAAALSSLRALRKEFVPFLLNFLREQSSRVLPQGPPTPAKTPGASAALPGRPGGPPRGSRGARSQLFPPTEAQSTAAEAPLARRGGRRRGPGPARERGGRGLEEGVSGESLPGAGGRRLRGSGSPSRPSLTLSDPPNLSNLEEFPPVGSVPPGPTGTKPSRRINPTPVSEERSLSKPKTCFTSPPISCVPSSQPSALDTSPWGLGLPPGCRSLQEEREMLRKERSKQLQQSPTPTCPTPELGSPLPSRTGSLTDEPADPARVSSRQRLELVALVYSSCIAENLVPNLFLELFFVFQLLTARRMVTAKDSDPELSPAVLDSLESPLFQSIHDCVFFAVQVLECHFQVLSNLDKGTLKLLAENERLLCFSPALQGRLRAAYEGSVAKVSLVMPPSTQAVSFQPETDNRANFSSDRAFHTFKKQRDVFYEVLREWEDHHEEPGWDFEKGLGSRIRAMMGQLSAACSHSHFVRLFQKQLLQMCQSPGGAGGTVLGEAPDVLSMLGADKLGRLWRLQERLMAPQSSGGPCPPPTFPGCQGFFRDFILSASSFQFNQHLMDSLSLKIQELNGLALPQHEPNDEDGESDVDWQGERKQFAVVLLSLRLLAKFLGFVAFLPYRGPEPPPTGELQDSILALRSQVPPVLDVRTLLQRGLQARRAVLTVPWLVEFLSFADHVVPLLEYYRDIFTLLLRLHRSLVLSQESEGKMCFLNKLLLLAVLGWLFQIPTVPEDLFFLEEGPSYAFEVDTVAPEHGLDNAPVVDQQLLYTCCPYIGELRKLLASWVSGSSGRSGGFMRKITPTTTTSLGAQPSQTSQGLQAQLAQAFFHNQPPSLRRTVEFVAERIGSNCVKHIKATLVADLVRQAESLLQEQLVTQGEEGGDPAQLLEILCSQLCPHGAQALALGREFCQRKSPGAVRALLPEETPAAVLSSAENIAVGLATEKACAWLSANITALIRREVKAAVSRTLRAQGPEPAARGERRGCSRACEHHAPLPSHLISEIKDVLSLAVGPRDPDEGVSPEHLEQLLGQLGQTLRCRQFLCPPAEQHLAKCSVELASLLVADQIPILGPPAQYRLERGQARRLLHMLLSLWKEDFQGPVPLQLLLSPRNVGLLADTRPREWDLLLFLLRELVEKGLMGRMEIEACLGSLHQAQWPGDFAEELATLSNLFLAEPHLPEPQLRACELVQPNRGTVLAQS

SEQ ID NO: 42177 - protein, 898 aa, Homo sapiens
MALIMEPVSKWSPSQVVDWMKGLDDCLQQYIKNFEREKISGDQLLRITHQELEDLGVSRIGHQELILEAVDLLCALNYGLETENLKTLSHKLNASAKNLQNFITGRRRSGHYDGRTSRKLPNDFLTSVVDLIGAAKSLLAWLDRSPFAAVTDYSVTRNNVIQLCLELTTIVQQDCTVYETENKILHVCKTLSGVCDHIISLSSDPLVSQSAHLEVIQLANIKPSEGLGMYIKSTYDGLHVITGTTENSPADRCKKIHAGDEVIQVNHQTVVGWQLKNLVNALREDPSGVILTLKKRPQSMLTSAPALLKNMRWKPLALQPLIPRSPTSSVATPSSTISTPTKRDSSALQDLYIPPPPAEPYIPRDEKGNLPCEDLRGHMVGKPVHKGSESPNSFLDQEYRKRFNIVEEDTVLYCYEYEKGRSSSQGRRESTPTYGKLRPISMPVEYNWVGDYEDPNKMKRDSRRENSLLRYMSNEKIAQEEYMFQRNSKKDTGKKSKKKGDKSNSPTHYSLLPSLQMDALRQDIMGTPVPETTLYHTFQQSSLQHKSKKKNKGPIAGKSKRRISCKDLGRGDCEGWLWKKKDAKSYFSQKWKKYWFVLKDASLYWYINEEDEKAEGFISLPEFKIDRASECRKKYAFKACHPKIKSFYFAAEHLDDMNRWLNRINMLTAGYAERERIKQEQDYWSESDKEEADTPSTPKQDSPPPPYDTYPRPPSMSCASPYVEAKHSRLSSTETSQSQSSHEEFRQEVTGSSAVSPIRKTASQRRSWQDLIETPLTSSGLHYLQTLPLEDSVFSDSAAISPEHRRQSTLPTQKCHLQDHYGPYPLAESERMQVLNGNGGKPRSFTLPRDSGFNHCCLNAPVSACDPQDDVQPPEVEEEEEEEEEEGEAAGENIGEKS

SEQ ID NO: 42178 - protein, 1034 aa, Homo sapiens
MALIMEPVSKWSPSQVVDWMKGLDDCLQQYIKNFEREKISGDQLLRITHQELEDLGVSRIGHQELILEAVDLLCALNYGLETENLKTLSHKLNASAKNLQNFITGRRRSGHYDGRTSRKLPNDFLTSVVDLIGAAKSLLAWLDRSPFAAVTDYSVTRNNVIQLCLELTTIVQQDCTVYETENKILHVCKTLSGVCDHIISLSSDPLVSQSAHLEVIQLANIKPSEGLGMYIKSTYDGLHVITGTTENSPADRCKKIHAGDEVIQVNHQTVVGWQLKNLVNALREDPSGVILTLKKRPQSMLTSAPALLKNMRWKPLALQPLIPRSPTSSVATPSSTISTPTKRDSSALQDLYIPPPPAEPYIPRDEKGNLPCEDLRGHMVGKPVHKGSESPNSFLDQEYRKRFNIVEEDTVLYCYEYEKGRSSSQGRRESTPTYGKLRPISMPVEYNWVGDYEDPNKMKRDSRRENSLLRYMSNEKIAQEEYMFQRNSKKDTGKKSKKKGDKSNSPTHYSLLPSLQMDALRQDIMGTPVPETTLYHTFQQSSLQHKSKKKNKGPIAGKSKRRISCKDLGRGDCEGWLWKKKDAKSYFSQKWKKYWFVLKDASLYWYINEEDEKAEGFISLPEFKIDRASECRKKYAFKACHPKIKSFYFAAEHLDDMNRWLNRINMLTAGYAERERIKQEQDYWSESDKEEADTPSTPKQDSPPPPYDTYPRPPSMSCASPYVEAKHSRLSSTETSQSQSSHEEFRQEVTGSSAVSPIRKTASQRRSWQDLIETPLTSSGLHYLQTLPLEDSVFSDSAAISPEHRRQSTLPTQKCHLQDHYGPYPLAESERMQVLNGNGGKPRSFTLPRDSGFNHCCLNAPVSACDPQDDVQPPEVEEEEEEEEEEGEAAGENIGEKSESREEKLGDSLQDLYRALEQASLSPLGEHRISTKMEYKLSFIKRCNDPVMNEKLHRLRILKSTLKAREGEVAIIDKVLDNPDLTSKEFQQWKQMYLDLFLDICQNTTSNDPLSISSEVDVITSSLAHTHSYIETHV

SEQ ID NO: 42179 - protein, 1004 aa, Homo sapiens
MALIMEPVSKWSPSQVVDWMKGLDDCLQQYIKNFEREKISGDQLLRITHQELEDLGVSRIGHQELILEAVDLLCALNYGLETENLKTLSHKLNASAKNLQNFITGRRRSGHYDGRTSRKLPNDFLTSVVDLIGAAKSLLAWLDRSPFAAVTDYSVTRNNVIQLCLELTTIVQQDCTVYETENKILHVCKTLSGVCDHIISLSSDPLVSQSAHLEVIQLANIKPSEGLGMYIKSTYDGLHVITGTTENSPADRCKKIHAGDEVIQVNHQTVVGWQLKNLVNALREDPSGVILTLKKRPQSMLTSAPALLKNMRWKPLALQPLIPRSPTSSVATPSSTISTPTKRDSSALQDLYIPPPPAEPYIPRDEKGNLPCEDLRGHMVGKPVHKGSESPNSFLDQEYRKRFNIVEEDTVLYCYEYEKGRSSSQGRRESTPTYENSLLRYMSNEKIAQEEYMFQRNSKKDTGKKSKKKGDKSNSPTHYSLLPSLQMDALRQDIMGTPVPETTLYHTFQQSSLQHKSKKKNKGPIAGKSKRRISCKDLGRGDCEGWLWKKKDAKSYFSQKWKKYWFVLKDASLYWYINEEDEKAEGFISLPEFKIDRASECRKKYAFKACHPKIKSFYFAAEHLDDMNRWLNRINMLTAGYAERERIKQEQDYWSESDKEEADTPSTPKQDSPPPPYDTYPRPPSMSCASPYVEAKHSRLSSTETSQSQSSHEEFRQEVTGSSAVSPIRKTASQRRSWQDLIETPLTSSGLHYLQTLPLEDSVFSDSAAISPEHRRQSTLPTQKCHLQDHYGPYPLAESERMQVLNGNGGKPRSFTLPRDSGFNHCCLNAPVSACDPQDDVQPPEVEEEEEEEEEEGEAAGENIGEKSESREEKLGDSLQDLYRALEQASLSPLGEHRISTKMEYKLSFIKRCNDPVMNEKLHRLRILKSTLKAREGEVAIIDKVLDNPDLTSKEFQQWKQMYLDLFLDICQNTTSNDPLSISSEVDVITSSLAHTHSYIETHV

SEQ ID NO: 42180 - protein, 849 aa, Homo sapiens
MALIMEPVSKWSPSQVVDWMKGLDDCLQQYIKNFEREKISGDQLLRITHQELEDLGVSRIGHQELILEAVDLLCALNYGLETENLKTLSHKLNASAKNLQNFITGRRRSGHYDGRTSRKLPNDFLTSVVDLIGAAKSLLAWLDRSPFAAVTDYSVTRNNVIQLCLELTTIVQQDCTVYETENKILHVCKTLSGVCDHIISLSSDPLVSQSAHLEVIQLANIKPSEGLGMYIKSTYDGLHVITGTTENSPADRCKKIHAGDEVIQVNHQTVPLIPRSPTSSVATPSSTISTPTKRDSSALQDLYIPPPPAEPYIPRDEKGNLPCEDLRGHMVGKPVHKGSESPNSFLDQEYRKRFNIVEEDTVLYCYEYEKGRSSSQGRRESTPTYGKLRPISMPVEYNWVGDYEDPNKMKRDSRRENSLLRYMSNEKIAQEEYMFQRNSKKDTGKKSKKKGDKSNSPTHYSLLPSLQMDALRQDIMGTPVPETTLYHTFQQSSLQHKSKKKNKGPIAGKSKRRISCKDLGRGDCEGWLWKKKDAKSYFSQKWKKYWFVLKDASLYWYINEEDEKAEGFISLPEFKIDRASECRKKYAFKACHPKIKSFYFAAEHLDDMNRWLNRINMLTAGYAERERIKQEQDYWSESDKEEADTPSTPKQDSPPPPYDTYPRPPSMSCASPYVEAKHSRLSSTETSQSQSSHEEFRQEVTGSSAVSPIRKTASQRRSWQDLIETPLTSSGLHYLQTLPLEDSVFSDSAAISPEHRRQSTLPTQKCHLQDHYGPYPLAESERMQVLNGNGGKPRSFTLPRDSGFNHCCLNAPVSACDPQDDVQPPEVEEEEEEEEEEGEAAGENIGEKS

SEQ ID NO: 42181 - protein, 137 aa, Homo sapiens
MDDSDTPTYYLQIEPQDGCHPGDSVERSVTCLPSASDENENQLDGDGHEHLTSSDSAMGKPQVSEQDSLNNNESCTLSCEVAAGENLQNTLCEASRDEQAFLGKDKKIPGKRSPRSKKGTAKKIPPDSRILFPGGGL

SEQ ID NO: 42182 - protein, 616 aa, Homo sapiens
MDDSDTPTYYLQIEPQDGCHPGDSVERSVTCLPSASDENENQLDGDGHEHLTSSDSAMGKPQVSEQDSLNNNESCTLSCEVAAGENLQNTLCEASRDEQAFLGKDKKIPGKRSPRSKKGTAKKIPPGLFSGDIAPLMQEKVLSAVTYAVDDEEAAEVNANEQPEAPKLVLQSLFSLIRGEVEQLDSRALPLCLHQIAESYFQEEDYEKAMKFIQLERLYHEQLLANLSAIQEQWETKWKTVQPHTVTALRNSEKGFNGEDFERLTKICATHQDPLLSKHKIAAVEKSQERKCSTQLLVSEDPKEGGATTKESESKTCLGTESSKESQHTVEPLGSSPCCHQMDVQTDSPSLSVTAGKDHMEELLCSAEATLALHTQSSETAGSPSGPDSSEDACEDDSRLQLAQTEACQDVARIEGIAEDPKVFLSSKSKTEPLISPGCDRIPPALISEGKYSQAQRKELRLPLRDASEALPTDQLENNELNELQQPDLTDSDGKSPQAQADSDGSENVLCGNNQISDLGILLPEVCMAPEEKGDKDDQLNKETEDYLNSLLEGCLKDTEDSLSYEDNQDDDSDLLQDLSPEEASYSLQENLPSDESCLSLDDLAKRIEIAEVNQR

SEQ ID NO: 42183 - protein, 725 aa, Homo sapiens
MDDSDTPTYYLQIEPQDGCHPGDSVERSVTCLPSASDENENQLDGDGHEHLTSSDSAMGKPQVSEQDSLNNNESCTLSCEVAAGENLQNTLCEASRDEQAFLGKDKKIPGKRSPRSKKGTAKKIPPGLFSGDIAPLMQEKVLSAVTYAVDDEEAAEVNANEQPEAPKLVLQSLFSLIRGEVEQLDSRALPLCLHQIAESYFQEEDYEKAMKFIQLERLYHEQLLANLSAIQEQWETKWKTVQPHTVTALRNSEKGFNGEDFERLTKICATHQDPLLSKHKIAAVEKSQERKCSTQLLVSEDPKEGGATTKESESKTCLGTESSKESQHTVEPLGSSPCCHQMDVQTDSPSLSVTAGKDHMEELLCSAEATLALHTQSSETAGSPSGPDSSEDACEDDSRLQLAQTEACQDVARIEGIAEDPKVFLSSKSKTEPLISPGCDRIPPALISEGKYSQAQRKELRLPLRDASEALPTDQLENNELNELQQPDLTDSDGKSPQAQADSDGSENVLCGNNQISDLGILLPEVCMAPEEKGDKDDQLNKETEDYLNSLLEGCLKDTEDSLSYEDNQDDDSDLLQDLSPEEASYSLQENLPSDESCLSLDDLAKRIEIAEVVPTEGLVSILKKRNDTVGDHPAQMQHKPSKRRVRFQEIDDSLDQDEVGGGSCILLVLLCIATVFLSVGGTALYCTFGDMESPVCTDFADNMDFYYTKLLQGVAELKHWIYLS

SEQ ID NO: 42184 - protein, 1018 aa, Homo sapiens
MKMWLLVSHLVIISITTCLAEFTWYRRYGHGVSEEDKGFGPIFEEQPINTIYPEESLEGKVSLNCRARASPFPVYKWRMNNGDVDLTSDRYSMVGGNLVINNPDKQKDAGIYYCLASNNYGMVRSTEATLSFGYLDPFPPEERPEVRVKEGKGMVLLCDPPYHFPDDLSYRWLLNEFPVFITMDKRRFVSQTNGNLYIANVEASDKGNYSCFVSSPSITKSVFSKFIPLIPIPERTTKPYPADIVVQFKDVYALMGQNVTLECFALGNPVPDIRWRKVLEPMPSTAEISTSGAVLKIFNIQLEDEGIYECEAENIRGKDKHQARIYVQAFPEWVEHINDTEVDIGSDLYWPCVATGKPIPTIRWLKNGYAYHKGELRLYDVTFENAGMYQCIAENTYGAIYANAELKILALAPTFEMNPMKKKILAAKGGRVIIECKPKAAPKPKFSWSKGTEWLVNSSRILIWEDGSLEINNITRNDGGIYTCFAENNRGKANSTGTLVITDPTRIILAPINADITVGENATMQCAASFDPALDLTFVWSFNGYVIDFNKENIHYQRNFMLDSNGELLIRNAQLKHAGRYTCTAQTIVDNSSASADLVVRGPPGPPGGLRIEDIRATSVALTWSRGSDNHSPISKYTIQTKTILSDDWKDAKTDPPIIEGNMEAARAVDLIPWMEYEFRVVATNTLGRGEPSIPSNRIKTDGAAPNVAPSDVGGGGGRNRELTITWAPLSREYHYGNNFGYIVAFKPFDGEEWKKVTVTNPDTGRYVHKDETMSPSTAFQVKVKAFNNKGDGPYSLVAVINSAQDAPSEAPTEVGVKVLSSSEISVHWEHVLEKIVESYQIRYWAAHDKEEAANRVQVTSQEYSARLENLLPDTQYFIEVGACNSAGCGPPSDMIEAFTKKAPPSQPPRIISSVRSGSRYIITWDHVVALSNESTVTGYKVLYRPDGQHDGKLYSTHKHSIEVPIPRDGEYVVEVRAHSDGGDGVVSQVKISGAPTLSPSLLGLLLPAFGILVYLEF

SEQ ID NO: 42185 - protein, 1007 aa, Homo sapiens
MKMWLLVSHLVIISITTCLAVSEEDKGFGPIFEEQPINTIYPEESLEGKVSLNCRARASPFPVYKWRMNNGDVDLTSDRYSMVGGNLVINNPDKQKDAGIYYCLASNNYGMVRSTEATLSFGYLDPFPPEERPEVRVKEGKGMVLLCDPPYHFPDDLSYRWLLNEFPVFITMDKRRFVSQTNGNLYIANVEASDKGNYSCFVSSPSITKSVFSKFIPLIPIPERTTKPYPADIVVQFKDVYALMGQNVTLECFALGNPVPDIRWRKVLEPMPSTAEISTSGAVLKIFNIQLEDEGIYECEAENIRGKDKHQARIYVQAFPEWVEHINDTEVDIGSDLYWPCVATGKPIPTIRWLKNGYAYHKGELRLYDVTFENAGMYQCIAENTYGAIYANAELKILALAPTFEMNPMKKKILAAKGGRVIIECKPKAAPKPKFSWSKGTEWLVNSSRILIWEDGSLEINNITRNDGGIYTCFAENNRGKANSTGTLVITDPTRIILAPINADITVGENATMQCAASFDPALDLTFVWSFNGYVIDFNKENIHYQRNFMLDSNGELLIRNAQLKHAGRYTCTAQTIVDNSSASADLVVRGPPGPPGGLRIEDIRATSVALTWSRGSDNHSPISKYTIQTKTILSDDWKDAKTDPPIIEGNMEAARAVDLIPWMEYEFRVVATNTLGRGEPSIPSNRIKTDGAAPNVAPSDVGGGGGRNRELTITWAPLSREYHYGNNFGYIVAFKPFDGEEWKKVTVTNPDTGRYVHKDETMSPSTAFQVKVKAFNNKGDGPYSLVAVINSAQDAPSEAPTEVGVKVLSSSEISVHWEHVLEKIVESYQIRYWAAHDKEEAANRVQVTSQEYSARLENLLPDTQYFIEVGACNSAGCGPPSDMIEAFTKKAPPSQPPRIISSVRSGSRYIITWDHVVALSNESTVTGYKVLYRPDGQHDGKLYSTHKHSIEVPIPRDGEYVVEVRAHSDGGDGVVSQVKISGAPTLSPSLLGLLLPAFGILVYLEF

SEQ ID NO: 42186 - protein, 627 aa, Homo sapiens
MKMWLLVSHLVIISITTCLAEFTWYRRYGHGVSEEDKGFGPIFEEQPINTIYPEESLEGKVSLNCRARASPFPVYKWRMNNGDVDLTSDRYSMVGGNLVINNPDKQKDAGIYYCLASNNYGMVRSTEATLSFGYLDPFPPEERPEVRVKEGKGMVLLCDPPYHFPDDLSYRWLLNEFPVFITMDKRRFVSQTNGNLYIANVEASDKGNYSCFVSSPSITKSVFSKFIPLIPIPERTTKPYPADIVVQFKDVYALMGQNVTLECFALGNPVPDIRWRKVLEPMPSTAEISTSGAVLKIFNIQLEDEGIYECEAENIRGKDKHQARIYVQAFPEWVEHINDTEVDIGSDLYWPCVATGKPIPTIRWLKNGYAYHKGELRLYDVTFENAGMYQCIAENTYGAIYANAELKILALAPTFEMNPMKKKILAAKGGRVIIECKPKAAPKPKFSWSKGTEWLVNSSRILIWEDGSLEINNITRNDGGIYTCFAENNRGKANSTGTLVITDPTRIILAPINADITVGENATMQCAASFDPALDLTFVWSFNGYVIDFNKENIHYQRNFMLDSNGELLIRNAQLKHAGRYTCTAQTIVDNSSASADLVVRGKNRKGGEKNMVDSFLPVCASLPPTW

SEQ ID NO: 42187 - protein, 627 aa, Homo sapiens; identical to SEQ ID NO: 42186

SEQ ID NO: 42188 - protein, 627 aa, Homo sapiens; identical to SEQ ID NO: 42186

SEQ ID NO: 42189 - protein, 85 aa, Homo sapiens
MKMWLLVSHLVIISITTCLAEFTWYRRYGHGVSEEDKGFGPIFEEQPINTIYPEESLEGKVSLNCRARASPFPVYKWRMNNGDVD

SEQ ID NO: 42190 - protein, 1018 aa, Homo sapiens; identical to SEQ ID NO: 42184

SEQ ID NO: 42191 - protein, 63 aa, Homo sapiens
MKMWLLVSHLVIISITTCLAEFTWYRRYGHGVSEEDKGFGPIFEEQPINTIYPEESLEGKVSL

SEQ ID NO: 42192 - protein, 90 aa, Homo sapiens
MKMWLLVSHLVIISITTCLAEFTWYRRYGHGVSEEDKGFGPIFEEQPINTIYPEESLEGKVSLNCRARASPFPVYKWRMNNGDVDLTSDR

SEQ ID NO: 42193 - protein, 73 aa, Homo sapiens
MKMWLLVSHLVIISITTCLAEFTWYRRYGHGVSEEDKGFGPIFEEQPINTIYPEESLEGKVSLNCRARASPFP

SEQ ID NO: 42194 - protein, 1040 aa, Homo sapiens
MGTATRRKPHLLLVAAVALVSSSAWSSALGSQTTFGPVFEDQPLSVLFPEESTEEQVLLACRARASPPATYRWKMNGTEMKLEPGSRHQLVGGNLVIMNPTKAQDAGVYQCLASNPVGTVVSREAILRFGFLQEFSKEERDPVKAHEGWGVMLPCNPPAHYPGLSYRWLLNEFPNFIPTDGRHFVSQTTGNLYIARTNASDLGNYSCLATSHMDFSTKSVFSKFAQLNLAAEDTRLFAPSIKARFPAETYALVGQQVTLECFAFGNPVPRIKWRKVDGSLSPQWTTAEPTLQIPSVSFEDEGTYECEAENSKGRDTVQGRIIVQAQPEWLKVISDTEADIGSNLRWGCAAAGKPRPTVRWLRNGEPLASQNRVEVLAGDLRFSKLSLEDSGMYQCVAENKHGTIYASAELAVQALAPDFRLNPVRRLIPAARGGEILIPCQPRAAPKAVVLWSKGTEILVNSSRVTVTPDGTLIIRNISRSDEGKYTCFAENFMGKANSTGILSVRDATKITLAPSSADINLGDNLTLQCHASHDPTMDLTFTWTLDDFPIDFDKPGGHYRRTNVKETIGDLTILNAQLRHGGKYTCMAQTVVDSASKEATVLVRGPPGPPGGVVVRDIGDTTIQLSWSRGFDNHSPIAKYTLQARTPPAGKWKQVRTNPANIEGNAETAQVLGLTPWMDYEFRVIASNILGTGEPSGPSSKIRTREAAPSVAPSGLSGGGGAPGELIVNWTPMSREYQNGDGFGYLLSFRRQGSTHWQTARVPGADAQYFVYSNESVRPYTPFEVKIRSYNRRGDGPESLTALVYSAEEEPRVAPTKVWAKGVSSSEMNVTWEPVQQDMNGILLGYEIRYWKAGDKEAAADRVRTAGLDTSARVSGLHPNTKYHVTVRAYNRAGTGPASPSANATTMKPPPRRPPGNISWTFSSSSLSIKWDPVVPFRNESAVTGYKMLYQNDLHLTPTLHLTGKNWIEIPVPEDIGHALVQIRTTGPGGDGIPAEVHIVRNGGTSMMVENMAVRPAPHPGTVISHSVAMLILIGSLEL

SEQ ID NO: 42195 - protein, 1028 aa, Homo sapiens
MMFPWKQLILLSFIGCLGGELLLQGPVFIKEPSNSIFPVGSEDKKITLHCEARGNPSPHYRWQLNGSDIDMSMEHRYKLNGGNLVVINPNRNWDTGTYQCFATNSLGTIVSREAKLQFAYLENFKTKMRSTVSVREGQGVVLLCGPPPHSGELSYAWIFNEYPSFVEEDSRRFVSQETGHLYISKVEPSDVGNYTCVVTSMVTNARVLGSPTPLVLRSDGVMGEYEPKIEVQFPETLPAAKGSTVKLECFALGNPIPQINWRRSDGLPFSSKIKLRKFSGVLEIPNFQQEDAGSYECIAENSRGKNVARGRLTYYAKPHWVQLIKDVEIAVEDSLYWECRASGKPKPSYRWLKNGAALVLEERTQIENGALTISNLSVTDSGMFQCIAENKHGLVYSSAELKVVASAPDFSKNPMKKLVQVQVGSLVSLDCKPRASPRALSSWKKGDVSVQEHERISLLNDGGLKIANVTKADAGTYTCMAENQFGKANGTTHLVVTEPTRITLAPSNMDVSVGESVILPCQVQHDPLLDIIFTWYFNGALADFKKDGSHFEKVGGSSSGDLMIRNIQLKHSGKYVCMVQTGVDSVSSAADLIVRGSPGPPENVKVDEITDTTAQLSWKEGKDNHSPVISYSIQARTPFSVGWQTVTTVPEVIDGKTHTATVVELNPWVEYEFRVVASNKIGGGEPSLPSEKVRTEEAVPEVPPSEVNGGGGSRSELVITWDPVPEELQNGEGFGYVVAFRPLGVTTWIQTVVTSPDTPRYVFRNESIVPYSPYEVKVGVYNNKGEGPFSPVTTVFSAEEEPTVAPSQVSANSLSSSEIEVSWNTIPWKLSNGHLLGYEVRYWNGGGKEESSSKMKVAGNETSARLRGLKSNLAYYTAVRAYNSAGAGPFSATVNVTTKKTPPSQPPGNVVWNATDTKVLLNWEQVKAMENESEVTGYKVFYRTSSQNNVQVLNTNKTSAELVLPIKEDYIIEVKATTDGGDGTSSEQIRIPRITSMDARGSTSAISNVHPMSSYMPIVLFLIVYVLW

SEQ ID NO: 42196 - protein, 807 aa, Homo sapiens
MGEYEPKIEVQFPETVPTAKGATVKLECFALGNPVPTIIWRRADGKPIARKARRHKSNGILEIPNFQQEDAGLYECVAENSRGKNVARGQLTFYAQPNWIQKINDIHVAMEENVFWECKANGRPKPTYKWLKNGEPLLTRDRIQIEQGTLNITIVNLSDAGMYQCLAENKHGVIFSNAELSVIAVGPDFSRTLLKRVTLVKVGGEVVIECKPKASPKPVYTWKKGRDILKENERITISEDGNLRIINVTKSDAGSYTCIATNHFGTASSTGNLVVKDPTRVMVPPSSMDVTVGESIVLPCQVTHDHSLDIVFTWSFNGHLIDFDRDGDHFERVGGQDSAGDLMIRNIQLKHAGKYVCMVQTSVDRLSAAADLIVRGPPGPPEAVTIDEITDTTAQLSWRPGPDNHSPITMYVIQARTPFSVGWQAVSTVPELIDGKTFTATVVGLNPWVEYEFRTVAANVIGIGEPSRPSEKRRTEEALPEVTPANVSGGGGSKSELVITWETVPEELQNGRGFGYVVAFRPYGKMIWMLTVLASADASRYVFRNESVHPFSPFEVKVGVFNNKGEGPFSPTTVVYSAEEEPTKPPASIFARSLSATDIEVFWASPLEKNRGRIQGYEVKYWRHEDKEENARKIRTVGNQTSTKITNLKGSVLYHLAVKAYNSAGTGPSSATVNVTTRKPPPSQPPGNIIWNSSDSKIILNWDQVKALDNESEVKGYKVLYRWNRQSSTSVIETNKTSVELSLPFDEDYIIEIKPFSDGGDGSSSEQIRIPKISNAYARGSGASTSNACTLSAISTIMISLTARSSL

SEQ ID NO: 42197 - protein, 698 aa, Homo sapiens
MEENVFWECKANGRPKPTYKWLKNGEPLLTRDRIQIEQGTLNITIVNLSDAGMYQCLAENKHGVIFSNAELSVIAVGPDFSRTLLKRVTLVKVGGEVVIECKPKASPKPVYTWKKGRDILKENERITISEDGNLRIINVTKSDAGSYTCIATNHFGTASSTGNLVVKDPTRVMVPPSSMDVTVGESIVLPCQVTHDHSLDIVFTWSFNGHLIDFDRDGDHFERVGGQDSAGDLMIRNIQLKHAGKYVCMVQTSVDRLSAAADLIVRGPPGPPEAVTIDEITDTTAQLSWRPGPDNHSPITMYVIQARTPFSVGWQAVSTVPELIDGKTFTATVVGLNPWVEYEFRTVAANVIGIGEPSRPSEKRRTEEALPEVTPANVSGGGGSKSELVITWETVPEELQNGRGFGYVVAFRPYGKMIWMLTVLASADASRYVFRNESVHPFSPFEVKVGVFNNKGEGPFSPTTVVYSAEEEPTKPPASIFARSLSATDIEVFWASPLEKNRGRIQGYEVKYWRHEDKEENARKIRTVGNQTSTKITNLKGSVLYHLAVKAYNSAGTGPSSATVNVTTRKPPPSQPPGNIIWNSSDSKIILNWDQVKALDNESEVKGYKVLYRWNRQSSTSVIETNKTSVELSLPFDEDYIIEIKPFSDGGDGSSSEQIRIPKISNAYARGSGASTSNACTLSAISTIMISLTARSSL

SEQ ID NO: 42198 - protein, 1026 aa, Homo sapiens
MRLPWELLVLQSFILCLADDSTLHGPIFIQEPSPVMFPLDSEEKKVKLNCEVKGNPKPHIRWKLNGTDVDTGMDFRYSVVEGSLLINNPNKTQDAGTYQCTATNSFGTIVSREAKLQFAYLDNFKTRTRSTVSVRRGQGMVLLCGPPPHSGELSYAWIFNEYPSYQDNRRFVSQETGNLYIAKVEKSDVGNYTCVVTNTVTNHKVLGPPTPLILRNDGVMGEYEPKIEVQFPETVPTAKGATVKLECFALGNPVPTIIWRRADGKPIARKARRHKSNGILEIPNFQQEDAGLYECVAENSRGKNVARGQLTFYAQPNWIQKINDIHVAMEENVFWECKANGRPKPTYKWLKNGEPLLTRDRIQIEQGTLNITIVNLSDAGMYQCLAENKHGVIFSNAELSVIAVGPDFSRTLLKRVTLVKVGGEVVIECKPKASPKPVYTWKKGRDILKENERITISEDGNLRIINVTKSDAGSYTCIATNHFGTASSTGNLVVKDPTRVMVPPSSMDVTVGESIVLPCQVTHDHSLDIVFTWSFNGHLIDFDRDGDHFERVGGQDSAGDLMIRNIQLKHAGKYVCMVQTSVDRLSAAADLIVRGPPGPPEAVTIDEITDTTAQLSWRPGPDNHSPITMYVIQARTPFSVGWQAVSTVPELIDGKTFTATVVGLNPWVEYEFRTVAANVIGIGEPSRPSEKRRTEEALPEVTPANVSGGGGSKSELVITWETVPEELQNGRGFGYVVAFRPYGKMIWMLTVLASADASRYVFRNESVHPFSPFEVKVGVFNNKGEGPFSPTTVVYSAEEEPTKPPASIFARSLSATDIEVFWASPLEKNRGRIQGYEVKYWRHEDKEENARKIRTVGNQTSTKITNLKGSVLYHLAVKAYNSAGTGPSSATVNVTTRKPPPSQPPGNIIWNSSDSKIILNWDQVKALDNESEVKGYKVLYRWNRQSSTSVIETNKTSVELSLPFDEDYIIEIKPFSDGGDGSSSEQIRIPKISNAYARGSGASTSNACTLSAISTIMISLTARSSL

SEQ ID NO: 42199 - protein, 1026 aa, Homo sapiens; identical to SEQ ID NO: 42198

SEQ ID NO: 42200 - protein, 116 aa, Homo sapiens
MRLPWELLVLQSFILCLADDSTLHGPIFIQEPSPVMFPLDSEEKKVKLNCEVKGNPKPHIRWKLNGTDVDTGMDFRYSVVEGSLLINNPNKTQDAGTYQCTATNSFGTIVSREAKL

SEQ ID NO: 42201 - protein, 1026 aa, Homo sapiens; identical to SEQ ID NO: 42198

SEQ ID NO: 42202 - protein, 698 aa, Homo sapiens; identical to SEQ ID NO: 42197

SEQ ID NO: 42203 - protein, 54 aa, Homo sapiens
MRLPWELLVLQSFILCLADDSTLHGPIFIQEPSPVMFPLDSEEKKVKLNCEVKG

SEQ ID NO: 42204 - protein, 1100 aa, Homo sapiens
MASSWKLMLFLSVTMCLSEYSKSLPGLSTSYAALLRIKKSSSSSLFGSKTRPRYSSPSLGTLSASSPSWLGAAQNYYSPINLYHSSDAFKQDESVDYGPVFVQEPDDIIFPTDSDEKKVALNCEVRGNPVPSYRWLRNGTEIDLESDYRYSLIDGTFIISNPSEAKDSGHYQCLATNTVGSILSREATLQFAYLGNFSGRTRSAVSVREGQGVVLMCSPPPHSPEIIYSWVFNEFPSFVAEDSRRFISQETGNLYISKVQTSDVGSYICLVKNTVTNARVLSPPTPLTLRNDGVMGEYEPKIEVHFPFTVTAAKGTTVKMECFALGNPVPTITWMKVNGYIPSKARLRKSQAVLEIPNVQLDDAGIYECRAENSRGKNSFRGQLQVYTYPHWVEKLNDTQLDSGSPLRWECKATGKPRPTYRWLKNGVPLSPQSRVEMVNGVLMIHNVNQSDAGMYQCLAENKYGAIYASAELKILASAPTFALNQLKKTIIVTKDQEVVIECKPQGSPKPTISWKKGDRAVRENKRIAILPDGSLRILNASKSDEGKYVCRGENVFGSAEIIASLSVKEPTRIELTPKRTELTVGESIVLNCKAIHDASLDVTFYWTLKGQPIDFEEEGGHFESIRAQASSADLMIRNILLMHAGRYGCRVQTTADSVSDEAELLVRGPPGPPGIVIVEEITESTATLSWSPAADNHSPISSYNLQARSPFSLGWQTVKTVPEIITGDMESAMAVDLNPWVEYEFRVVATNPIGTGDPSTPSRMIRTNEAVPKTAPTNVSGRSGRRHELVIAWEPVSEEFQNGEGFGYIVAFRPNGTRGWKEKMVTSSEASKFIYRDESVPPLTPFEVKVGVYNNKGDGPFSQIVVICSAEGEPSAAPTDVKATSVSVSEILVAWKHIKESLGRPQGFEVGYWKDMEQEDTAETVKTRGNESFVILTGLEGNTLYHFTVRAYNGAGYGPPSSEVSATTKKSPPSQAPSNLRWEQQGSQVSLGWEPVIPLANESEVVGYKVFYRQEGHSNSQVIETQKLQAVVPLPDAGVYIIEVRAYSEGGDGTASSQIRVPSYSGGKITSAQSTLHSLSTSSSSVTLLLALMIPSTSW

SEQ ID NO: 42205 - protein, 1026 aa, Homo sapiens
MASSWKLMLFLSVTMCLSESVDYGPVFVQEPDDIIFPTDSDEKKVALNCEVRGNPVPSYRWLRNGTEIDLESDYRYSLIDGTFIISNPSEAKDSGHYQCLATNTVGSILSREATLQFAYLGNFSGRTRSAVSVREGQGVVLMCSPPPHSPEIIYSWVFNEFPSFVAEDSRRFISQETGNLYISKVQTSDVGSYICLVKNTVTNARVLSPPTPLTLRNDGVMGEYEPKIEVHFPFTVTAAKGTTVKMECFALGNPVPTITWMKVNGYIPSKARLRKSQAVLEIPNVQLDDAGIYECRAENSRGKNSFRGQLQVYTYPHWVEKLNDTQLDSGSPLRWECKATGKPRPTYRWLKNGVPLSPQSRVEMVNGVLMIHNVNQSDAGMYQCLAENKYGAIYASAELKILASAPTFALNQLKKTIIVTKDQEVVIECKPQGSPKPTISWKKGDRAVRENKRIAILPDGSLRILNASKSDEGKYVCRGENVFGSAEIIASLSVKEPTRIELTPKRTELTVGESIVLNCKAIHDASLDVTFYWTLKGQPIDFEEEGGHFESIRAQASSADLMIRNILLMHAGRYGCRVQTTADSVSDEAELLVRGPPGPPGIVIVEEITESTATLSWSPAADNHSPISSYNLQARSPFSLGWQTVKTVPEIITGDMESAMAVDLNPWVEYEFRVVATNPIGTGDPSTPSRMIRTNEAVPKTAPTNVSGRSGRRHELVIAWEPVSEEFQNGEGFGYIVAFRPNGTRGWKEKMVTSSEASKFIYRDESVPPLTPFEVKVGVYNNKGDGPFSQIVVICSAEGEPSAAPTDVKATSVSVSEILVAWKHIKESLGRPQGFEVGYWKDMEQEDTAETVKTRGNESFVILTGLEGNTLYHFTVRAYNGAGYGPPSSEVSATTKKSPPSQAPSNLRWEQQGSQVSLGWEPVIPLANESEVVGYKVFYRQEGHSNSQVIETQKLQAVVPLPDAGVYIIEVRAYSEGGDGTASSQIRVPSYSGGKITSAQSTLHSLSTSSSSVTLLLALMIPSTSW

SEQ ID NO: 42206 - protein, 1100 aa, Homo sapiens; identical to SEQ ID NO: 42204

SEQ ID NO: 42207 - protein, 1100 aa, Homo sapiens; identical to SEQ ID NO: 42204

SEQ ID NO: 42208 - protein, 911 aa, Homo sapiens
MASSWKLMLFLSVTMCLSEYSKSLPGLSTSYAALLRIKKSSSSSLFGSKTRPRYSSPSLGTLSASSPSWLGAAQNYYSPINLYHSSDAFKQDESVDYGPVFVQEPDDIIFPTDSDEKKVALNCEVRGNPVPSYRWLRNGTEIDLESDYRYSLIDGTFIISNPSEAKDSGHYQCLATNTVGSILSREATLQFAYLGNFSGRTRSAVSVREGQGVVLMCSPPPHSPEIIYSWVFNEFPSFVAEDSRRFISQETGNLYISKVQTSDVGSYICLVKNTVTNARVLSPPTPLTLRNDGVMGEYEPKIEVHFPFTVTAAKGTTVKMECFALGNPVPTITWMKVNGYIPSKARLRKSQAVLEIPNVQLDDAGIYECRAENSRGKNSFRGQLQVYTYPHWVEKLNDTQLDSGSPLRWECKATGKPRPTYRWLKNGVPLSPQSRVEMVNGVLMIHNVNQSDAGMYQCLAENKYGAIYASAELKILASAPTFALNQLKKTIIVTKDQEVVIECKPQGSPKPTISWKKGDRAVRENKRIAILPDGSLRILNASKSDEGKYVCRGENVFGSAEIIASLSVKEPTRIELTPKRTELTVGESIVLNCKAIHDASLDVTFYWTLKGQPIDFEEEGGHFESIRAQASSADLMIRNILLMHAGRYGCRVQTTADSVSDEAELLVRGPPGPPGIVIVEEITESTATLSWSPAADNHSPISSYNLQARSPFSLGWQTVKTVPEIITGDMESAMAVDLNPWVEYEFRVVATNPIGTGDPSTPSRMIRTNEAVPKTAPTNVSGRSGRRHELVIAWEPVSEEFQNGEGFGYIVAFRPNGTRGWKEKMVTSSEASKFIYRDESVPPLTPFEVKVGVYNNKGDGPFSQIVVICSAEGEPSAAPTDVKATSVSVSEILVAWKHIKESLGRPQGFEV

SEQ ID NO: 42209 - protein, 1028 aa, Homo sapiens
MRLLWKLVILLPLINSSAGDGLLSRPIFTQEPHDVIFPLDLSKSEVILNCAANGYPSPHYRWKQNGTDIDFTMSYHYRLDGGSLAINSPHTDQDIGMYQCLATNLLGTILSRKAKLQFAYIEDFETKTRSTVSVREGQGVVLLCGPPPHFGDLSYAWTFNDNPLYVQEDNRRFVSQETGNLYIAKVEPSDVGNYTCFITNKEAQRSVQGPPTPLVQRTDGVMGEYEPKIEVRFPETIQAAKDSSVKLECFALGNPVPDISWRRLDGSPLPGKVKYSKSQAILEIPNFQQEDEGFYECIASNLRGRNLAKGQLIFYAPPEWEQKIQNTHLSIYDNLLWECKASGKPNPWYTWLKNGERLNPEERIQIENGTLIITMLNVSDSGVYQCAAENKYQIIYANAELRVLASAPDFSKSPVKKKSFVQVGGDIVIGCKPNAFPRAAISWKRGTETLRQSKRIFLLEDGSLKIYNITRSDAGSYTCIATNQFGTAKNTGSLIVKERTVITVPPSKMDVTVGESIVLPCQVSHDPSIEVVFVWFFNGDVIDLKKGVAHFERIGGESVGDLMIRNIQLHHSGKYLCTVQTTLESLSAVADIIVRGPPGPPEDVQVEDISSTTSQLSWRAGPDNNSPIQIFTIQTRTPFSVGWQAVATVPEILNGKTYNATVVGLSPWVEYEFRVVAGNSIGIGEPSEPSELLRTKASVPVVAPVNIHGGGGSRSELVITWESIPEELQNGEGFGYIIMFRPVGSTTWSKEKVSSVESSRFVYRNESIIPLSPFEVKVGVYNNEGEGSLSTVTIVYSGEDEPQLAPRGTSLQSFSASEMEVSWNAIAWNRNTGRVLGYEVLYWTDDSKESMIGKIRVSGNVTTKNITGLKANTIYFASVRAYNTAGTGPSSPPVNVTTKKSPPSQPPANIAWKLTNSKLCLNWEHVKTMENESEVLGYKILYRQNRQSKTHILETNNTSAELLVPFEEDYLIEIRTVSDGGDGSSSEEIRIPKMSSLSSRGIQFLEPSTHFLSIVIVIFHCFAIQPLI

SEQ ID NO: 42210 - protein, 1028 aa, Homo sapiens; identical to SEQ ID NO: 42209

SEQ ID NO: 42211 - protein, 956 aa, Homo sapiens
MSYHYRLDGGSLAINSPHTDQDIGMYQCLATNLLGTILSRKAKLQFAYIEDFETKTRSTVSVREGQGVVLLCGPPPHFGDLSYAWTFNDNPLYVQEDNRRFVSQETGNLYIAKVEPSDVGNYTCFITNKEAQRSVQGPPTPLVQRTDGVMGEYEPKIEVRFPETIQAAKDSSVKLECFALGNPVPDISWRRLDGSPLPGKVKYSKSQAILEIPNFQQEDEGFYECIASNLRGRNLAKGQLIFYAPPEWEQKIQNTHLSIYDNLLWECKASGKPNPWYTWLKNGERLNPEERIQIENGTLIITMLNVSDSGVYQCAAENKYQIIYANAELRVLASAPDFSKSPVKKKSFVQVGGDIVIGCKPNAFPRAAISWKRGTETLRQSKRIFLLEDGSLKIYNITRSDAGSYTCIATNQFGTAKNTGSLIVKERTVITVPPSKMDVTVGESIVLPCQVSHDPSIEVVFVWFFNGDVIDLKKGVAHFERIGGESVGDLMIRNIQLHHSGKYLCTVQTTLESLSAVADIIVRGPPGPPEDVQVEDISSTTSQLSWRAGPDNNSPIQIFTIQTRTPFSVGWQAVATVPEILNGKTYNATVVGLSPWVEYEFRVVAGNSIGIGEPSEPSELLRTKASVPVVAPVNIHGGGGSRSELVITWESIPEELQNGEGFGYIIMFRPVGSTTWSKEKVSSVESSRFVYRNESIIPLSPFEVKVGVYNNEGEGSLSTVTIVYSGEDEPQLAPRGTSLQSFSASEMEVSWNAIAWNRNTGRVLGYEVLYWTDDSKESMIGKIRVSGNVTTKNITGLKANTIYFASVRAYNTAGTGPSSPPVNVTTKKSPPSQPPANIAWKLTNSKLCLNWEHVKTMENESEVLGYKILYRQNRQSKTHILETNNTSAELLVPFEEDYLIEIRTVSDGGDGSSSEEIRIPKMSSLSSRGIQFLEPSTHFLSIVIVIFHCFAIQPLI

SEQ ID NO: 42212 - protein, 1331 aa, Homo sapiens
MQAAPRAGCGAALLLWIVSSCLCRAWTAPSTSQKCDEPLVSGLPHVAFSSSSSISGSYSPGYAKINKRGGAGGWSPSDSDHYQWLQVDFGNRKQISAIATQGRYSSSDWVTQYRMLYSDTGRNWKPYHQDGNIWAFPGNINSDGVVRHELQHPIIARYVRIVPLDWNGEGRIGLRIEVYGCSYWADVINFDGHVVLPYRFRNKKMKTLKDVIALNFKTSESEGVILHGEGQQGDYITLELKKAKLVLSLNLGSNQLGPIYGHTSVMTGSLLDDHHWHSVVIERQGRSINLTLDRSMQHFRTNGEFDYLDLDYEITFGGIPFSGKPSSSSRKNFKGCMESINYNGVNITDLARRKKLEPSNVGNLSFSCVEPYTVPVFFNATSYLEVPGRLNQDLFSVSFQFRTWNPNGLLVFSHFADNLGNVEIDLTESKVGVHINITQTKMSQIDISSGSGLNDGQWHEVRFLAKENFAILTIDGDEASAVRTNSPLQVKTGEKYFFGGFLNQMNNSSHSVLQPSFQGCMQLIQVDDQLVNLYEVAQRKPGSFANVSIDMCAIIDRCVPNHCEHGGKCSQTWDSFKCTCDETGYSGATCHNSIYEPSCEAYKHLGQTSNYYWIDPDGSGPLGPLKVYCNMTEDKVWTIVSHDLQMQTPVVGYNPEKYSVTQLVYSASMDQISAITDSAEYCEQYVSYFCKMSRLLNTPDGSPYTWWVGKANEKHYYWGGSGPGIQKCACGIERNCTDPKYYCNCDADYKQWRKDAGFLSYKDHLPVSQVVVGDTDRQGSEAKLSVGPLRCQGDRNYWNAASFPNPSSYLHFSTFQGETSADISFYFKTLTPWGVFLENMGKEDFIKLELKSATEVSFSFDVGNGPVEIVVRSPTPLNDDQWHRVTAERNVKQASLQVDRLPQQIRKAPTEGHTRLELYSQLFVGGAGGQQGFLGCIRSLRMNGVTLDLEERAKVTSGFISGCSGHCTSYGTNCENGGKCLERYHGYSCDCSNTAYDGTFCNKDVGAFFEEGMWLRYNFQAPATNARDSSSRVDNAPDQQNSHPDLAQEEIRFSFSTTKAPCILLYISSFTTDFLAVLVKPTGSLQIRYNLGGTREPYNIDVDHRNMANGQPHSVNITRHEKTIFLKLDHYPSVSYHLPSSSDTLFNSPKSLFLGKVIETGKIDQEIHKYNTPGFTGCLSRVQFNQIAPLKAALRQTNASAHVHIQGELVESNCGASPLTLSPMSSATDPWHLDHLDSASADFPYNPGQGQAIRNGVNRNSAIIGGVIAVVIFTILCTLVFLIRYMFRHKGTYHTNEAKGAESAESADAAIMNNDPNFTETIDESKKEWLI

SEQ ID NO: 42213 - protein, 390 aa, Homo sapiens
MNGVTLDLEERAKVTSGFISGCSGHCTSYGTNCENGGKCLERYHGYSCDCSNTAYDGTFCNKDVGAFFEEGMWLRYNFQAPATNARDSSSRVDNAPDQQNSHPDLAQEEIRFSFSTTKAPCILLYISSFTTDFLAVLVKPTGSLQIRYNLGGTREPYNIDVDHRNMANGQPHSVNITRHEKTIFLKLDHYPSVSYHLPSSSDTLFNSPKSLFLGKVIETGKIDQEIHKYNTPGFTGCLSRVQFNQIAPLKAALRQTNASAHVHIQGELVESNCGASPLTLSPMSSATDPWHLDHLDSASADFPYNPGQGQAIRNGVNRNSAIIGGVIAVVIFTILCTLVFLIRYMFRHKGTYHTNEAKGAESAESADAAIMNNDPNFTETIDESKKEWLI

SEQ ID NO: 42214 - protein, 450 aa, Homo sapiens
MSDMEDDFMCDDEEDYDLEYSEDSNSEPNVDLENQYYNSKALKEDDPKAALSSFQKVLELEGEKGEWGFKALKQMIKINFKLTNFPEMMNRYKQLLTYIRSAVTRNYSEKSINSILDYISTSKQNSDFLCQMDLLQEFYETTLEALKDAKNDRLWFKTNTKLGKLYLEREEYGKLQKILRQLHQSCQTDDGEDDLKKGTQLLEIYALEIQMYTAQKNNKKLKALYEQSLHIKSAIPHPLIMGVIRECGGKMHLREGEFEKAHTDFFEAFKNYDESGSPRRTTCLKYLVLANMLMKSGINPFDSQEAKPYKNDPEILAMTNLVSAYQNNDITEFEKILKTNHSNIMDDPFIREHIEELLRNIRTQVLIKLIKPYTRIHIPFISKELNIDVADVESLLVQCILDNTIHGRIDQVNQLLELDHQKRGGARYTALDKWTNQLNSLNQAVVSKLA

SEQ ID NO: 42215 - protein, 443 aa, Homo sapiens
MSDMEDDFMCDDEEDYDLEYSEDSNSEPNVDLENQYYNSKALKEDDPKAALSSFQKVLELEGEKGEWGFKALKQMIKINFKLTNFPEMMNRYKQLLTYIRSAVTRNYSEKSINSILDYISTSKQMDLLQEFYETTLEALKDAKNDRLWFKTNTKLGKLYLEREEYGKLQKILRQLHQSCQTDDGEDDLKKGTQLLEIYALEIQMYTAQKNNKKLKALYEQSLHIKSAIPHPLIMGVIRECGGKMHLREGEFEKAHTDFFEAFKNYDESGSPRRTTCLKYLVLANMLMKSGINPFDSQEAKPYKNDPEILAMTNLVSAYQNNDITEFEKILKTNHSNIMDDPFIREHIEELLRNIRTQVLIKLIKPYTRIHIPFISKELNIDVADVESLLVQCILDNTIHGRIDQVNQLLELDHQKRGGARYTALDKWTNQLNSLNQAVVSKLA

SEQ ID NO: 42216 - protein, 423 aa, Homo sapiens
MASALEQFVNSVRQLSAQGQMTQLCELINKSGELLAKNLSHLDTVLGALDVQEHSLGVLAVLFVKFSMPSVPDFETLFSQVQLFISTCNGEHIRYATDTFAGLCHQLTNALVERKQPLRGIGILKQAIDKMQMNTNQLTSIHADLCQLCLLAKCFKPALPYLDVDMMDICKENGAYDAKHFLCYYYYGGMIYTGLKNFERALYFYEQAITTPAMAVSHIMLESYKKYILVSLILLGKVQQLPKYTSQIVGRFIKPLSNAYHELAQVYSTNNPSELRNLVNKHSETFTRDNNMGLVKQCLSSLYKKNIQRLTKTFLTLSLQDMASRVQLSGPQEAEKYVLHMIEDGEIFASINQKDGMVSFHDNPEKYNNPAMLHNIDQEMLKCIELDERLKAMDQEITVNPQFVQKSMGSQEDDSGNKPSSYS

SEQ ID NO: 42217 - protein, 319 aa, Homo sapiens [sequence omitted]

SEQ ID NO: 42218 - protein, 277 aa, Homo sapiens
ASPFWVSWLYGSPLPAPPLPGGARSGTCAPILVLQNAAEALARQMTQLCELINKSGELLAKNLSHLDTVLGALDVQEHSLGVLAVLFVKFSMPSVPDFETLFSQVQLFISTCNGEHIRYATDTFAGLCHQLTNALVERKQPLRGIGILKQAIDKMQMNTNQLTSIHADLCQLCLLAKCFKPALPYLDVDMMDICKENGAYDAKHFLCYYYYGGMIYTGLKNFERALYFYEQAITTPAMAVSHIMLESYKKYILVSLILLGKVQQLPKYTSQIVGRFI

SEQ ID NO: 42219 - protein, 403 aa, Homo sapiens
MTQLCELINKSGELLAKNLSHLDTVLGALDVQEHSLGVLAVLFVKFSMPSVPDFETLFSQVQLFISTCNGEHIRYATDTFAGLCHQLTNALVERKQPLRGIGILKQAIDKMQMNTNQLTSIHADLCQLCLLAKCFKPALPYLDVDMMDICKENGAYDAKHFLCYYYYGGMIYTGLKNFERALYFYEQAITTPAMAVSHIMLESYKKYILVSLILLGKVQQLPKYTSQIVGRFIKPLSNAYHELAQVYSTNNPSELRNLVNKHSETFTRDNNMGLVKQCLSSLYKKNIQRLTKTFLTLSLQDMASRVQLSGPQEAEKYVLHMIEDGEIFASINQKDGMVSFHDNPEKYNNPAMLHNIDQEMLKCIELDERLKAMDQEITVNPQFVQKSMGSQEDDSGNKPSSYS

SEQ ID NO: 42220 - protein, 537 aa, Homo sapiens
MAAQCVTKVALNVSCANLLDKDIGSKSDPLCVLFLNTSGQQWYEVERTERIKNCLNPQFSKTFIIDYYFEVVQKLKFGVYDIDNKTIELSDDDFLGECECTLGQIVSSKKLTRPLVMKTGRPAGKGSITISAEEIKDNRVVLFEMEARKLDNKDLFGKSDPYLEFHKQTSDGNWLMVHRTEVVKNNLNPVWRPFKISLNSLCYGDMDKTIKVECYDYDNDGSHDLIGTFQTTMTKLKEASRSSPVEFECINEKKRQKKKSYKNSGVISVKQCEITVECTFLDYIMGGCQLNFTVGVDFTGSNGDPRSPDSLHYISPNGVNEYLTALWSVGLVIQDYDADKMFPAFGFGAQIPPQWQVSHEFPMNFNPSNPYCNGIQGIVEAYRSCLPQIKLYGPTNFSPIINHVARFAAAATQQQTASQYFVLLIITDGVITDLDETRQAIVNASRLPMSIIIVGVGGADFSAMEFLDGDGGSLRSPLGEVAIRDIVQFVPFRQFQNAPKEALAQCVLAEIPQQVVGYFNTYKLLPPKNPATKQQKQ

SEQ ID NO: 42221 - protein, 139 aa, Homo sapiens
MAAQCVTKVALNVSCANLLDKDIGSKSDPLCVLFLNTSGQQWYEVERTERIKNCLNPQFSKTFIIDYYFEVVQKLKFGVYDIDNKTIELSDDDFLGECECTLGQIVSSKKLTRPLVMKTGRPAGKGSITISAEEIKDNR

SEQ ID NO: 42222 - protein, 9 aa, Homo sapiens
MAAQCVTKV

SEQ ID NO: 42223 - protein, 537 aa, Homo sapiens; identical to SEQ ID NO: 42220

SEQ ID NO: 42224 - protein, 79 aa, Homo sapiens
MAAQCVTKVALNVSCANLLDKDIGSKSDPLCVLFLNTSGQQWYEVERTERIKNCLNPQFSKTFIIDYYFEVVQKLKFGV

SEQ ID NO: 42225 - protein, 135 aa, Homo sapiens
MAAQCVTKVALNVSCANLLDKDIGSKSDPLCVLFLNTSGQQWYEVERTERIKNCLNPQFSKTFIIDYYFEVVQKLKFGVYDIDNKTIELSDDDFLGECECTLGQIVSSKKLTRPLVMKTGRPAGKGSITISAEEI

SEQ ID NO: 42226 - protein, 234 aa, Homo sapiens
MAAQCVTKVALNVSCANLLDKDIGSKSDPLCVLFLNTSGQQWYEVERTERIKNCLNPQFSKTFIIDYYFEVVQKLKFGVYDIDNKTIELSDDDFLGECECTLGQIVSSKKLTRPLVMKTGRPAGKGSITISAEEIKDNRVVLFEMEARKLDNKDLFGKSDPYLEFHKQTSDGNWLMVHRTEVVKNNLNPVWRPFKISLNSLCYGDMDKTIKVECYDYDNDGSHDLIGTFQTTMT

SEQ ID NO: 42227 - protein, 153 aa, Homo sapiens
MAAQCVTKVALNVSCANLLDKDIGSKSDPLCVLFLNTSGQQWYEVERTERIKNCLNPQFSKTFIIDYYFEVVQKLKFGVYDIDNKTIELSDDDFLGECECTLGQIVSSKKLTRPLVMKTGRPAGKGSITISAEEIKDNRVVLFEMEARKLDNK

SEQ ID NO: 42228 - protein, 593 aa, Homo sapiens
MEQPEDMASLSEFDSLAGSIPATKVEITVSCRNLLDKDMFSKSDPLCVMYTQGMENKQWREFGRTEVIDNTLNPDFVRKFIVDYFFEEKQNLRFDLYDVDSKSPDLSKHDFLGQAFCTLGEIVGSPGSRLEKPLTIGAFSLNSRTGKPMPAVSNGGVPGKKCGTIILSAEELSNCRDVATMQFCANKLDKKDFFGKSDPFLVFYRSNEDGTFTICHKTEVMKNTLNPVWQTFSIPVRALCNGDYDRTIKVEVYDWDRDGSHDFIGEFTTSYRELARGQSQFNIYEVVNPKKKMKKKKYVNSGTVTLLSFAVESECTFLDYIKGGTQINFTVAIDFTASNGNPSQSTSLHYMSPYQLNAYALALTAVGEIIQHYDSDKMFPALGFGAKLPPDGRVSHEFPLNGNQENPSCCGIDGILEAYHRSLRTVQLYGPTNFAPVVTHVARNAAAVQDGSQYSVLLIITDGVISDMAQTKEAIVNAAKLPMSIIIVGVGQAEFDAMVELDGDDVRISSRGKLAERDIVQFVPFRDYVDRTGNHVLSMARLARDVLAEIPDQLVSYMKAQGIRPRPPPAAPTHSPSQSPARTPPASPLHTHI

SEQ ID NO: 42229 - protein, 301 aa, Homo sapiens
MKKKKYVNSGTVTLLSFAVESECTFLDYIKGGTQINFTVAIDFTASNGNPSQSTSLHYMSPYQLNAYALALTAVGEIIQHYDSDKMFPALGFGAKLPPDGRVSHEFPLNGNQENPSCCGIDGILEAYHRSLRTVQLYGPTNFAPVVTHVARNAAAVQDGSQYSVLLIITDGVISDMAQTKEAIVNAAKLPMSIIIVGVGQAEFDAMVELDGDDVRISSRGKLAERDIVQFVPFRDYVDRTGNHVLSMARLARDVLAEIPDQLVSYMKAQGIRPRPPPAAPTHSPSQSPARTPPASPLHTHI

SEQ ID NO: 42230 - protein, 557 aa, Homo sapiens
MSDPEMGWVPEPPTMTLGASRVELRVSCHGLLDRDTLTKPHPCVLLKLYSDEQWVEVERTEVLRSCSSPVFSRVLALEYFFEEKQPLQFHVFDAEDGATSPRNDTFLGSTECTLGQIVSQTKVTKPLLLKNGKTAGKSTITIVAEEVSGTNDYVQLTFRAYKLDNKDLFSKSDPFMEIYKTNEDQSDQLVWRTEVVKNNLNPSWEPFRLSLHSLCSCDVHRPLKFLVYDYDSSGKHDFIGEFTSTFQEMQEGTANPGQEMQWDCINPKYRDKKKNYKSSGTVVLAQCTVEKVHTFLDYIMGGCQISFTVAIDFTASNGDPRSSQSLHCLSPRQPNHYLQALRAVGGICQDYDSDKRFPAFGFGARIPPNFEVSHDFAINFDPENPECEEISGVIASYRRCLPQIQLYGPTNVAPIINRVAEPAQREQSTGQATKYSVLLVLTDGVVSDMAETRTAIVRASRLPMSIIIVGVGNADFSDMRLLDGDDGPLRCPRGVPAARDIVQFVPFRDFKDAAPSALAKCVLAEVPRQVVEYYASQGISPGAPRPCTLATTPSPSP

SEQ ID NO: 42231 - protein, 557 aa, Homo sapiens; identical to SEQ ID NO: 42230

SEQ ID NO: 42232 - protein, 612 aa, Homo sapiens
MAFKEHGKITSCCIPGPINSSRAGAGAGASGWSSKGVRARAREPERGAPDREPSDMSDPEMGWVPEPPTMTLGASRVELRVSCHGLLDRDTLTKPHPCVLLKLYSDEQWVEVERTEVLRSCSSPVFSRVLALEYFFEEKQPLQFHVFDAEDGATSPRNDTFLGSTECTLGQIVSQTKVTKPLLLKNGKTAGKSTITIVAEEVSGTNDYVQLTFRAYKLDNKDLFSKSDPFMEIYKTNEDQSDQLVWRTEVVKNNLNPSWEPFRLSLHSLCSCDVHRPLKFLVYDYDSSGKHDFIGEFTSTFQEMQEGTANPGQEMQWDCINPKYRDKKKNYKSSGTVVLAQCTVEKVHTFLDYIMGGCQISFTVAIDFTASNGDPRSSQSLHCLSPRQPNHYLQALRAVGGICQDYDSDKRFPAFGFGARIPPNFEVSHDFAINFDPENPECEEISGVIASYRRCLPQIQLYGPTNVAPIINRVAEPAQREQSTGQATKYSVLLVLTDGVVSDMAETRTAIVRASRLPMSIIIVGVGNADFSDMRLLDGDDGPLRCPRGVPAARDIVQFVPFRDFKDAAPSALAKCVLAEVPRQVVEYYASQGISPGAPRPCTLATTPSPSP

SEQ ID NO: 42233 - protein, 52 aa, Homo sapiens
MSDPEMGWVPEPPTMTLGASRVELRVSCHGLLDRDTLTKPHPCVLLKLYSDE

SEQ ID NO: 42234 - protein, 131 aa, Homo sapiens
MSDPEMGWVPEPPTMTLGASRVELRVSCHGLLDRDTLTKPHPCVLLKLYSDEQWVEVERTEVLRSCSSPVFSRVLALEYFFEEKQPLQFHVFDAEDGATSPRNDTFLGSTECTLGQIVSQTKVTKPLLLKN

SEQ ID NO: 42235 - protein, 226 aa, Homo sapiens
MSDPEMGWVPEPPTMTLGASRVELRVSCHGLLDRDTLTKPHPCVLLKLYSDEQWVEVERTEVLRSCSSPVFSRVLALEYFFEEKQPLQFHVFDAEDGATSPRNDTFLGSTECTLGQIVSQTKVTKPLLLKNGKTAGKSTITIVAEEVSGTNDYVQLTFRAYKLDNKDLFSKSDPFMEIYKTNEDQSDQLVWRTEVVKNNLNPSWEPFRLSLHSLCSCDVHRPLKFL

SEQ ID NO: 42236 - protein, 105 aa, Homo sapiens
MSDPEMGWVPEPPTMTLGASRVELRVSCHGLLDRDTLTKPHPCVLLKLYSDEQWVEVERTEVLRSCSSPVFSRVLALEYFFEEKQPLQFHVFDAEDGATSPRNDT

SEQ ID NO: 42237 - protein, 141 aa, Homo sapiens
MSDPEMGWVPEPPTMTLGASRVELRVSCHGLLDRDTLTKPHPCVLLKLYSDEQWVEVERTEVLRSCSSPVFSRVLALEYFFEEKQPLQFHVFDAEDGATSPRNDTFLGSTECTLGQIVSQTKVTKPLLLKNGKTAGKSTIT

SEQ ID NO: 42238 - protein, 149 aa, Homo sapiens
MSDPEMGWVPEPPTMTLGASRVELRVSCHGLLDRDTLTKPHPCVLLKLYSDEQWVEVERTEVLRSCSSPVFSRVLALEYFFEEKQPLQFHVFDAEDGATSPRNDTFLGSTECTLGQIVSQTKVTKPLLLKNGKTAGKSTITIVAEEVSG

SEQ ID NO: 42239 - protein, 633 aa, Homo sapiens
MSAGSERGAAATPGGLPAPCASKVELRLSCRHLLDRDPLTKSDPSVALLQQAQGQWVQVGRTEVVRSSLHPVFSKVFTVDYYFEEVQRLRFEVYDTHGPSGFSCQEDDFLGGMECTLGQPAQKWLLQVVMRVSVDVLGPAGHCAKHFLCCTESSHLARTGPSFLLRYDDLCLPWATAGAVRWWTCRGGHTQGWQIVAQKKVTRPLLLKFGRNAGKSTITVIAEDISGNNGYVELSFRARKLDDKDLFSKSDPFLELYRVNDDQGLQLVYRTEVVKNNLNPVWEAFKVSLSSLCSCEETRPLKCLVWDYDSRGKHDFIGEFSTTFEEMQKAFEEGQAQWDCVNPKYKQKRRSYKNSGVVVLADLKFHRVYSFLDYIMGGCQIHFTVAIDFTASNGDPRNSCSLHYINPYQPNEYLKALVSVGEICQDYDSDKRFSALGFGARIPPKYEVSHDFAINFNPEDDECEGIQGVVEAYQNCLPRVQLYGPTNVAPIISKVARVAAAEESTGKASQYYILLILTDGVVTDMADTREAIVRASRLPMSIIIVGVGNADFTDMQVLDGDDGVLRSPRGEPALRDIVQFVPFRELKNASPAALAKCVLAEVPKQVVEYYSHRGLPPRSLGVPAGEASPGCTP

SEQ ID NO: 42240 - protein, 558 aa, Homo sapiens
MSAGSERGAAATPGGLPAPCASKVELRLSCRHLLDRDPLTKSDPSVALLQQAQGQWVQVGRTEVVRSSLHPVFSKVFTVDYYFEEVQRLRFEVYDTHGPSGFSCQEDDFLGGMECTLGQIVAQKKVTRPLLLKFGRNAGKSTITVIAEDISGNNGYVELSFRARKLDDKDLFSKSDPFLELYRVNDDQGLQLVYRTEVVKNNLNPVWEAFKVSLSSLCSCEETRPLKCLVWDYDSRGKHDFIGEFSTTFEEMQKAFEEGQAQWDCVNPKYKQKRRSYKNSGVVVLADLKFHRVYSFLDYIMGGCQIHFTVAIDFTASNGDPRNSCSLHYINPYQPNEYLKALVSVGEICQDYDSDKRFSALGFGARIPPKYEVSHDFAINFNPEDDECEGIQGVVEAYQNCLPRVQLYGPTNVAPIISKVARVAAAEESTGKASQYYILLILTDGVVTDMADTREAIVRASRLPMSIIIVGVGNADFTDMQVLDGDDGVLRSPRGEPALRDIVQFVPFRELKNASPAALAKCVLAEVPKQVVEYYSHRGLPPRSLGVPAGEASPGCTP

SEQ ID NO: 42241 - protein, 274 aa, Homo sapiens
MASDSGNQGTLCTLEFAVQMTCQSCVDAVRKSLQGVAGVQDVEVHLEDQMVLVHTTLPSQEVQALLEGTGRQAVLKGMGSGQLQNLGAAVAILGGPGTVQGVVRFLQLTPERCLIEGTIDGLEPGLHGLHVHQYGDLTNNCNSCGNHFNPDGASHGGPQDSDRHRGDLGNVRADADGRAIFRMEDEQLKVWDVIGRSLIIDEGEDDLGRGGHPLSKITGNSGERLACGIIARSAGLFQNPKQICSCDGLTIWEERGRPIAGKGRKESAQPPAHL

SEQ ID NO: 42242 - protein, 454 aa, Homo sapiens
MALQLGRLSSGPCWLVARGGCGGPRAWSQCGGGGLRAWSQRSAAGRVCRPPGPAGTEQSRGLGHGSTSRGGPWVGTGLAAALAGLVGLATAAFGHVQRAEMLPKTSGTRATSLGRPEEEEDELAHRCSSFMAPPVTDLGELRRRPGDMKTKMELLILETQAQVCQALAQVDGGANFSVDRWERKEGGGGISCVLQDGCVFEKAGVSISVVHGNLSEEAAKQMRSRGKVLKTKDGKLPFCAMGVSSVIHPKNPHAPTIHFNYRYFEVEEADGNKQWWFGGGCDLTPTYLNQEDAVHFHRTLKEACDQHGPDLYPKFKKWCDDYFFIAHRGERRGIGGIFFDDLDSPSKEEVFRFVQSCARAVVPSYIPLVKKHCDDSFTPQEKLWQQLRRGRYVEFNLLYDRGTKFGLFTPGSRIESILMSLPLTARWEYMHSPSENSKEAEILEVLRHPRDWVR

SEQ ID NO: 42243 - protein, 363 aa, Homo sapiens
MASKSWLNFLTFLCGSAIGFLLCSQLFSILLGEKVDTQPNVLHNDPHARHSDDNGQNHLEGQMNFNADSSQHKDENTDIAENLYQKVRILCWVMTGPQNLEKKAKHVKATWAQRCNKVLFMSSEENKDFPAVGLKTKEGRDQLYWKTIKAFQYVHEHYLEDADWFLKADDDTYVILDNLRWLLSKYDPEEPIYFGRRFKPYVKQGYMSGGAGYVLSKEALKRFVDAFKTDKCTHSSSIEDLALGRCMEIMNVEAGDSRDTIGKETFHPFVPEHHLIKGYLPRTFWYWNYNYYPPVEGPGCCSDLAVSFHYVDSTTMYELEYLVYHLRPYGYLYRYQPTLPERILKEISQANKNEDTKVKLGNP

SEQ ID NO: 42244 - protein, 309 aa, Homo sapiens
MASKSWLNFLTFLCGSAIGFLLCSQLFSILLGEKVDTQPNVLHNDPHARHSDDNGQNHLEGQMNFNADSSQHKDENTDIAENLYQKVRILCWVMTGPQNLEKKAKHVKATWAQRCNKVLFMSSEENKDFPAVGLKTKEGRDQLYWKTIKAFQYVHEHYLEDADWFLKADDDTYVILDNLRWLLSKYDPEEPIYFGRRFKPYVKQGYMSGGAGYVLSKEALKRFVDAFKTDKCTHSSSIEDLALGRCMEIMNVEAGDSRDTIGKETFHPFVPEHHLIKGYLPRTFWYWNYNYYPPVEVSLEILLLCQYLD

SEQ ID NO: 42245 - protein, 100 aa, Homo sapiens
MASKSWLNFLTFLCGSAIGFLLCSQLFSILLGEKVDTQPNVLHNDPHARHSDDNGQNHLEGQMNFNADSSQHKDENTDIAENLYQKVRILCWVMTGPQNL

SEQ ID NO: 42246 - protein, 131 aa, Homo sapiens
MASKSWLNFLTFLCGSAIGFLLCSQLFSILLGEKVDTQPNVLHNDPHARHSDDNGQNHLEGQMNFNADSSQHKDENTDIAENLYQKVRILCWVMTGPQNLEKKAKHVKATWAQRCNKVLFMSSEENKDFPA

SEQ ID NO: 42247 - protein, 363 aa, Homo sapiens; identical to SEQ ID NO: 42243

SEQ ID NO: 42248 - protein, 182 aa, Homo sapiens
MPRVVPDQRSKFENEEFFRKLSRECEIKYTGFRDRPHEERQARFQNACRDGRSEIAFVATGTNLSLQFFPASWQGEQRQTPSREYVDLEREAGKVYLKAPMILNGVCVIWKGWIDLQRLDGMGCLEFDEERAQQEDALAQQAFEEARRRTREFEDRDRSHREEMEVRVSQLLAVTGKKTTRP

SEQ ID NO: 42249 - protein, 187 aa, Homo sapiens
MPRVVPDQRSKFENEEFFRKLSRECEIKYTGFRDRPHEERQARFQNACRDGRSEIAFVATGTNLSLQFFPASWQGEQRQTPSREYVDLEREAGKVYLKAPMILNGVCVIWKGWIDLQRLDGMGCLEFDEERAQQEDALAQQAFEEARRRTREFEDRDRSHREEMEARRQQDPSPGSNLGGGDDLKLR

SEQ ID NO: 42250 - protein, 595 aa, Homo sapiens
MVGVPGAAAFQLGPEKRVPAMPGSPVEVKIQSRSSPPTMPPLPPINPGGPRPVSFTPTALSNGINHSPPTLNGAPSPPQRFSNGPASSTSSALTNQQLPATCGARQLSKLKRFLTTLQQFGNDISPEIGEKVRTLVLALVNSTVTIEEFHCKLQEATNFPLRPFVIPFLKANLPLLQRELLHCARAAKQTPSQYLAQHEHLLLNTSIASPADSSELLMEVHGNGKRPSPERREENSFDRDTIAPEPPAKRVCTISPAPRHSPALTVPLMNPGGQFHPTPPPLQHYTLEDIATSHLYREPNKMLEHREVRDRHHSLGLNGGYQDELVDHRLTEREWADEWKHLDHALNCIMEMVEKTRRSMAVLRRCQESDREELNYWKRRYNENTELRKTGTELVSRQHSPGSADSLSNDSQREFNSRPGTGYVPVEFWKKTEEAVNKVKIQAMSEVQKAVAEAEQKAFEVIATERARMEQTIADVKRQAAEDAFLVINEQEESTENCWNCGRKASETCSGCNIARYCGSFCQHKDWERHHRLCGQNLHGQSPHGQGRPLLPVGRGSSARSADCSVPSPALDKTSATTSRSSTPASVTAIDTNGL

SEQ ID NO: 42251 - protein, 604 aa, Homo sapiens
MAKESGISLKEIQVLARQWKVGPEKRVPAMPGSPVEVKIQSRSSPPTMPPLPPINPGGPRPVSFTPTALSNGINHSPPTLNGAPSPPQRFSNGPASSTSSALTNQQLPATCGARQLSKLKRFLTTLQQFGNDISPEIGEKVRTLVLALVNSTVTIEEFHCKLQEATNFPLRPFVIPFLKANLPLLQRELLHCARAAKQTPSQYLAQHEHLLLNTSIASPADSSELLMEVHGNGKRPSPERREENSFDRDTIAPEPPAKRVCTISPAPRHSPALTVPLMNPGGQFHPTPPPLQHYTLEDIATSHLYREPNKMLEHREVRDRHHSLGLNGGYQDELVDHRLTEREWADEWKHLDHALNCIMEMVEKTRRSMAVLRRCQESDREELNYWKRRYNENTELRKTGTELVSRQHSPGSADSLSNDSQREFNSRPGTGYVPVEFWKKTEEAVNKVKIQAMSEVQKAVAEAEQKAFEVIATERARMEQTIADVKRQAAEDAFLVINEQEESTENCWNCGRKASETCSGCNIARYCGSFCQHKDWERHHRLCGQNLHGQSPHGQGRPLLPVGRGSSARSADCSVPSPALDKTSATTSRSSTPASVTAIDTNGL

SEQ ID NO: 42252 - protein, 604 aa, Homo sapiens; identical to SEQ ID NO: 42251

SEQ ID NO: 42253 - protein, 263 aa, Homo sapiens
MPGSPVEVKIQSRSSPPTMPPLPPINPGGPRPVSFTPTALSNGINHSPPTLNGAPSPPQRFSNGPASSTSSALTNQQLPATCGARQLSKLKRFLTTLQQFGNDISPEIGEKVRTLVLALVNSTVTIEEFHCKLQEATNFPLRPFVIPFLKANLPLLQRELLHCARAAKQTPSQYLAQHEHLLLNTSIASPADSSELLMEVHGNGKRPSPESCIIHLKSMGVASRHEYFSGTLQMPAHPVRNSTLENLWVDCSRSLRSTVLPFP

SEQ ID NO: 42254 - protein, 575 aa, Homo sapiens
MPGSPVEVKIQSRSSPPTMPPLPPINPGGPRPVSFTPTALSNGINHSPPTLNGAPSPPQRFSNGPASSTSSALTNQQLPATCGARQLSKLKRFLTTLQQFGNDISPEIGEKVRTLVLALVNSTVTIEEFHCKLQEATNFPLRPFVIPFLKANLPLLQRELLHCARAAKQTPSQYLAQHEHLLLNTSIASPADSSELLMEVHGNGKRPSPERREENSFDRDTIAPEPPAKRVCTISPAPRHSPALTVPLMNPGGQFHPTPPPLQHYTLEDIATSHLYREPNKMLEHREVRDRHHSLGLNGGYQDELVDHRLTEREWADEWKHLDHALNCIMEMVEKTRRSMAVLRRCQESDREELNYWKRRYNENTELRKTGTELVSRQHSPGSADSLSNDSQREFNSRPGTGYVPVEFWKKTEEAVNKVKIQAMSEVQKAVAEAEQKAFEVIATERARMEQTIADVKRQAAEDAFLVINEQEESTENCWNCGRKASETCSGCNIARYCGSFCQHKDWERHHRLCGQNLHGQSPHGQGRPLLPVGRGSSARSADCSVPSPALDKTSATTSRSSTPASVTAIDTNGL

SEQ ID NO: 42255 - protein, 378 aa, Homo sapiens
MEVHGNGKRPSPERREENSFDRDTIAPEPPAKRVCTISPAPRHSPALTVPLMNPGGQFHPTPPPLQHYTLEDIATSHLYREPNKMLEHREVRDRHHSLGLNGGYQDELVDHRLTEREWADEWKHLDHALNCIMEMVEKTRRSMAVLRRCQESDREELNYWKRRYNENTELRKTGTELVSRQHSPGSADSLSNDSQREFNSRPGTGYVPVEFWKKTEEAVNKVKIQAMSEVQKAVAEAEQKAFEVIATERARMEQTIADVKRQAAEDAFLVINEQEESTENCWNCGRKASETCSGCNIARYCGSFCQHKDWERHHRLCGQNLHGQSPHGQGRPLLPVGRGSSARSADCSVPSPALDKTSATTSRSSTPASVTAIDTNGL

SEQ ID NO: 42256 - protein, 181 aa, Homo sapiens
MVGVPGAAAFQLGPEKRVPAMPGSPVEVKIQSRSSPPTMPPLPPINPGGPRPVSFTPTALSNGINHSPPTLNGAPSPPQRFSNGPASSTSSALTNQQLPATCGARQLSKLKRFLTTLQQFGNDISPEIGEKVRTLVLALVNSTVTIEEFHCKLQEATNFPLRPFVIPFLKANLPLLQRELL

SEQ ID NO: 42257 - protein, 80 aa, Homo sapiens
MAKESGISLKEIQVLARQWKVGPEKRVPAMPGSPVEVKIQSRSSPPTMPPLPPINPGGPRPVSFTPTALSNGINHSPPTL

SEQ ID NO: 42258 - protein, 152 aa, Homo sapiens
MSEVQKAVAEAEQKAFEVIATERARMEQTIADVKRQAAEDAFLVINEQEESTENCWNCGRKASETCSGCNIARYCGSFCQHKDWERHHRLCGQNLHGQSPHGQGRPLLPVGRGSSARSADCSVPSPALDKTSATTSRSSTPASVTAIDTNGL

SEQ ID NO: 42259 - protein, 653 aa, Homo sapiens
MPASRLRDRAASSASGSTCGSMSQTHPVLESGLLASAGCSAPRGPRKGGPAPVDRKAKASAMPDSPAEVKTQPRSTPPSMPPPPPAASQGATRPPSFTPHTHREDGPATLPHGRFHGCLKWSMVCLLMNGSSHSPTAINGAPCTPNGFSNGPATSSTASLSTQHLPPACGARQLSKLKRFLTTLQQFGSDISPEIGERVRTLVLGLVNSTLTIEEFHSKLQEATNFPLRPFVIPFLKANLPLLQRELLHCARLAKQTPAQYLAQHEQLLLDASASSPIDSSELLLEVNENGKRRTPDRTKENGSDRDPLHPEHLSKRPCTLNPAQRYSPSNGPPQPTPPPHYRLEDIAMAHHFRDAYRHPDPRELRERHRPLVVPGSRQEEVIDHKLTEREWAEEWKHLNNLLNCIMDMVEKTRRSLTVLRRCQEADREELNHWARRYSDAEDTKKGPAPAAARPRSSSAGPEGPQLDVPREFLPRTLTGYVPEDIWRKAEEAVNEVKRQAMSELQKAVSDAERKAHELITTERAKMERALAEAKRQASEDALTVINQQEDSSESCWNCGRKASETCSGCNAARYCGSFCQHRDWEKHHHVCGQSLQGPTAVVADPVPGPPEAAHSLGPSLPVGAASPSEAGSAGPSRPGSPSPPGPLDTVPR

SEQ ID NO: 42260 - protein, 567 aa, Homo sapiens
MPDSPAEVKTQPRSTPPSMPPPPPAASQGATRPPSFTPHTLMNGSSHSPTAINGAPCTPNGFSNGPATSSTASLSTQHLPPACGARQLSKLKRFLTTLQQFGSDISPEIGERVRTLVLGLVNSTLTIEEFHSKLQEATNFPLRPFVIPFLKANLPLLQRELLHCARLAKQTPAQYLAQHEQLLLDASASSPIDSSELLLEVNENGKRRTPDRTKENGSDRDPLHPEHLSKRPCTLNPAQRYSPSNGPPQPTPPPHYRLEDIAMAHHFRDAYRHPDPRELRERHRPLVVPGSRQEEVIDHKLTEREWAEEWKHLNNLLNCIMDMVEKTRRSLTVLRRCQEADREELNHWARRYSDAEDTKKGPAPAAARPRSSSAGPEGPQLDVPREFLPRTLTGYVPEDIWRKAEEAVNEVKRQAMSELQKAVSDAERKAHELITTERAKMERALAEAKRQASEDALTVINQQEDSSESCWNCGRKASETCSGCNAARYCGSFCQHRDWEKHHHVCGQSLQGPTAVVADPVPGPPEAAHSLGPSLPVGAASPSEAGSAGPSRPGSPSPPGPLDTVPR

SEQ ID NO: 42261 - protein, 567 aa, Homo sapiens; identical to SEQ ID NO: 42260

SEQ ID NO: 42262 - protein, 615 aa, Homo sapiens
MPASRLRDRAASSASGSTCGSMSQTHPVLESGLLASAGCSAPRGPRKGGPAPVDRKAKASAMPDSPAEVKTQPRSTPPSMPPPPPAASQGATRPPSFTPHTLMNGSSHSPTAINGAPCTPNGFSNGPATSSTASLSTQHLPPACGARQLSKLKRFLTTLQQFGSDISPEIGERVRTLVLGLVNSTLTIEEFHSKLQEATNFPLRPFVIPFLKANLPLLQRELLHCARLAKQTPAQYLAQHEQLLLDASASSPIDSSELLLEVNENGKRRTPDRTKENGSDRDPLHPERYSPSNGPPQPTPPPHYRLEDIAMAHHFRDAYRHPDPRELRERHRPLVVPGSRQEEVIDHKLTEREWAEEWKHLNNLLNCIMDMVEKTRRSLTVLRRCQEADREELNHWARRYSDAEDTKKGPAPAAARPRSSSAGPEGPQLDVPREFLPRTLTGYVPEDIWRKAEEAVNEVKRQAMSELQKAVSDAERKAHELITTERAKMERALAEAKRQASEDALTVINQQEDSSESCWNCGRKASETCSGCNAARYCGSFCQHRDWEKHHHVCGQSLQGPTAVVADPVPGPPEAAHSLGPSLPVGAASPSEAGSAGPSRPGSPSPPGPLDTVPR

SEQ ID NO: 42263 - protein, 577 aa, Homo sapiens
MPASRLRDRAASSASGSTCGSMSQTHPVLESGLLASAGCSAPRGPRKGGPVMNGSSHSPTAINGAPCTPNGFSNGPATSSTASLSTQHLPPACGARQLSKLKRFLTTLQQFGSDISPEIGERVRTLVLGLVNSTLTIEEFHSKLQEATNFPLRPFVIPFLKANLPLLQRELLHCARLAKQTPAQYLAQHEQLLLDASASSPIDSSELLLEVNENGKRRTPDRTKENGSDRDPLHPEHLSKRPCTLNPAQRYSPSNGPPQPTPPPHYRLEDIAMAHHFRDAYRHPDPRELRERHRPLVVPGSRQEEVIDHKLTEREWAEEWKHLNNLLNCIMDMVEKTRRSLTVLRRCQEADREELNHWARRYSDAEDTKKGPAPAAARPRSSSAGPEGPQLDVPREFLPRTLTGYVPEDIWRKAEEAVNEVKRQAMSELQKAVSDAERKAHELITTERAKMERALAEAKRQASEDALTVINQQEDSSESCWNCGRKASETCSGCNAARYCGSFCQHRDWEKHHHVCGQSLQGPTAVVADPVPGPPEAAHSLGPSLPVGAASPSEAGSAGPSRPGSPSPPGPLDTVPR

SEQ ID NO: 42264 - protein, 112 aa, Homo sapiens
MSYPVTSQPQCATTSCYQTQLSDWHTGLTDCCNDMPVCLCGTFAPLCLACRISDDFGECCCAPYLPGGLHSIRTGMRERYHIQGSVGHDWAALTFCLPCALCQMARELKIRE

SEQ ID NO: 42265 - protein, 1048 aa, Homo sapiens
MNRFRVSKFRHTEARPPRRESWISDIRAGTAPSCRNHIKSSCSLIAFNSDRPGVLGIVPLQGQGEDKRRVAHLGCHSDLVTDLDFSPFDDFLLATGSADRTVKLWRLPGPGQALPSAPGVVLGPEDLPVEVLQFHPTSDGILVSAAGTTVKVWDAAKQQPLTELAAHGDLVQSAVWSRDGALVGTACKDKQLRIFDPRTKPRASQSTQAHENSRDSRLAWMGTWEHLVSTGFNQMREREVKLWDTRFFSSALASLTLDTSLGCLVPLLDPDSGLLVLAGKGERQLYCYEVVPQQPALSPVTQCVLESVLRGAALVPRQALAVMSCEVLRVLQLSDTAIVPIGYHVPRKAVEFHEDLFPDTAGCVPATDPHSWWAGDNQQVQKVSLNPACRPHPSFTSCLVPPAEPLPDTAQPAVMETPVGDADASEGFSSPPSSLTSPSTPSSLGPSLSSTSGIGTSPSLRSLQSLLGPSSKFRHAQGTVLHRDSHITNLKGLNLTTPGESDGFCANKLRVAVPLLSSGGQVAVLELRKPGRLPDTALPTLQNGAAVTDLAWDPFDPHRLAVAGEDARIRLWRVPAEGLEEVLTTPETVLTGHTEKICSLRFHPLAANVLASSSYDLTVRIWDLQAGADRLKLQGHQDQIFSLAWSPDGQQLATVCKDGRVRVYRPRSGPEPLQEGPGPKGGRGARIVWVCDGRCLLVSGFDSQSERQLLLYEAEALAGGPLAVLGLDVAPSTLLPSYDPDTGLVLLTGKGDTRVFLYELLPESPFFLECNSFTSPDPHKGLVLLPKTECDVREVELMRCLRLRQSSLEPVAFRLPRVRKEFFQDDVFPDTAVIWEPVLSAEAWLQGANGQPWLLSLQPPDMSPVSQAPREAPARRAPSSAQYLEEKSDQQKKEELLNAMVAKLGNREDPLPQDSFEGVDEDEWAKYLAQIIVMGVQVVGRAFARALRQEFAASRAAADARGRAGHRSAAASNLSGLSLQEAQQILNVSKLSPEEVQKNYEHLFKVNDKSVGGSFYLQSKVVRAKERLDEELKIQAQEDREKGQMPHT

SEQ ID NO: 42266 - protein, 925 aa, Homo sapiens
MNRFRVSKFRHTEARPPRRESWISDIRAGTAPSCRNHIKSSCSLIAFNSDRPGVLGIVPLQGQGEDKRRVAHLGCHSDLVTDLDFSPFDDFLLATGSADRTVKLWRLPGPGQALPSAPGVVLGPEDLPVEVLQFHPTSDGILVSAAGTTVKVWDAAKQQPLTELAAHGDLVQSAVWSRDGALVGTACKDKQLRIFDPRTKPRASQSTQAHENSRDSRLAWMGTWEHLVSTGFNQMREREVKLWDTRFFSSALASLTLDTSLGCLVPLLDPDSGLLVLAGKGERQLYCYEVVPQQPALSPVTQCVLESVLRGAALVPRQALAVMSCEVLRVLQLSDTAIVPIGYHVPRKAVEFHEDLFPDTAGCVPATDPHSWWAGDNQQVQKVSLNPACRPHPSFTSCLVPPAEPLPDTAQPAVMETPVGDADASEGFSSPPSSLTSPSTPSSLGPSLSSTSGIGTSPSLRSLQSLLGPSSKFRHAQGTVLHRDSHITNLKGLNLTTPGESDGFCANKLRVAVPLLSSGGQVAVLELRKPGRLPDTALPTLQNGAAVTDLAWDPFDPHRLAVAGEDARIRLWRVPAEGLEEVLTTPETVLTGHTEKICSLRFHPLAANVLASSSYDLTVRIWDLQAGADRLKLQGHQDQIFSLAWSPDGQQLATVCKDGRVRVYRPRSGPEPLQEGPGPKGGRGARIVWVCDGRCLLVSGFDSQSERQLLLYEAEALAGGPLAVLGLDVAPSTLLPSYDPDTGLVLLTGKGDTRVFLYELLPESPFFLECNSFTSPDPHKGLVLLPKTECDVREVELMRCLRLRQSSLEPVAFRLPRVRKEFFQDDVFPDTAVIWEPVLSAEAWLQGANGQPWLLSLQPPDMSPVSQAPREAPARRAPSSAQYLEEKSDQQKKEELLNAMVAKLGNREDPLPQDSFEGVDEDEWD

SEQ ID NO: 42267 - protein, 367 aa, Homo sapiens
MNRFRVSKFRHTEARPPRREDKQLRIFDPRTKPRASQSTQAHENSRDSRLAWMGTWEHLVSTGFNQMREREVKLWDTRFFSSALASLTLDTSLGCLVPLLDPDSGLLVLAGKGERQLYCYEVVPQQPALSPVTQCVLESVLRGAALVPRQALAVMSCEVLRVLQLSDTAIVPIGYHVPRKAVEFHEDLFPDTAGCVPATDPHSWWAGDNQQVQKVSLNPACRPHPSFTSCLVPPAEPLPDTAQPAVMETPVGDADASEGFSSPPSSLTSPSTPSSLGPSLSSTSGIGTSPSLRSLQSLLGPSSKFRHAQGTVLHRDSHITNLKGLNLTTPGESDGFCANKLRVAVPLLSSGGQVAVLEMREKRHREV

SEQ ID NO: 42268 - protein, 840 aa, Homo sapiens
MNRFRVSKFRHTEARPPRRESWISDIRAGTAPSCRNHIKSSCSLIAFNSDRPGVLGIVPLQGQGEDKRRVAHLGCHSELAAHGDLVQSAVWSRDGALVGTACKDKQLRIFDPRTKPRASQSTQAHENSRDSRLAWMGTWEHLVSTGFNQMREREVKLWDTRFFSSALASLTLDTSLGCLVPLLDPDSGLLVLAGKGERQLYCYEVVPQQPALSPVTQCVLESVLRGAALVPRQALAVMSCEVLRVLQLSDTAIVPIGYHVPRKAVEFHEDLFPDTAGCVPATDPHSWWAGDNQQVQKVSLNPACRPHPSFTSCLVPPAEPLPDTAQPAVMETPVGDADASEGFSSPPSSLTSPSTPSSLGPSLSSTSGIGTSPSLRSLQSLLGPSSKFRHAQGTVLHRDSHITNLKGLNLTTPGESDGFCANKLRVAVPLLSSGGQVAVLELRKPGRLPDTALPTLQNGAAVTDLAWDPFDPHRLAVAGEDARIRLWRVPAEGLEEVLTTPETVLTGHTEKICSLRFHPLAANVLASSSYDLTVRIWDLQAGADRLKLQGHQDQIFSLAWSPDGQQLATVCKDGRVRVYRPRSGPEPLQEGPGPKGGRGARIVWVCDGRCLLVSGFDSQSERQLLLYEAEALAGGPLAVLGLDVAPSTLLPSYDPDTGLVLLTGKGDTRVFLYELLPESPFFLECNSFTSPDPHKGLVLLPKTECDVREVELMRCLRLRQSSLEPVAFRLPRVRKEFFQDDVFPDTAVIWEPVLSAEAWLQGANGQPWLLSLQPPDMSPVSQAPREAPARRAPSSAQYLEEKSDQQKKEELLNAMVAKLGNREDPLPQDSFEGVDEDEWD

SEQ ID NO: 42269 - protein, 705 aa, Homo sapiens
MGTWEHLVSTGFNQMREREVKLWDTRFFSSALASLTLDTSLGCLVPLLDPDSGLLVLAGKGERQLYCYEVVPQQPALSPVTQCVLESVLRGAALVPRQALAVMSCEVLRVLQLSDTAIVPIGYHVPRKAVEFHEDLFPDTAGCVPATDPHSWWAGDNQQVQKVSLNPACRPHPSFTSCLVPPAEPLPDTAQPAVMETPVGDADASEGFSSPPSSLTSPSTPSSLGPSLSSTSGIGTSPSLRSLQSLLGPSSKFRHAQGTVLHRDSHITNLKGLNLTTPGESDGFCANKLRVAVPLLSSGGQVAVLELRKPGRLPDTALPTLQNGAAVTDLAWDPFDPHRLAVAGEDARIRLWRVPAEGLEEVLTTPETVLTGHTEKICSLRFHPLAANVLASSSYDLTVRIWDLQAGADRLKLQGHQDQIFSLAWSPDGQQLATVCKDGRVRVYRPRSGPEPLQEGPGPKGGRGARIVWVCDGRCLLVSGFDSQSERQLLLYEAEALAGGPLAVLGLDVAPSTLLPSYDPDTGLVLLTGKGDTRVFLYELLPESPFFLECNSFTSPDPHKGLVLLPKTECDVREVELMRCLRLRQSSLEPVAFRLPRVRKEFFQDDVFPDTAVIWEPVLSAEAWLQGANGQPWLLSLQPPDMSPVSQAPREAPARRAPSSAQYLEEKSDQQKKEELLNAMVAKLGNREDPLPQDSFEGVDEDEWD

SEQ ID NO: 42270 - protein, 461 aa, Homo sapiens
MSRQVVRSSKFRHVFGQPAKADQCYEDVRVSQTTWDSGFCAVNPKFVALICEASGGGAFLVLPLGKTGRVDKNAPTVCGHTAPVLDIAWCPHNDNVIASGSEDCTVMVWEIPDGGLMLPLREPVVTLEGHTKRVGIVAWHTTAQNVLLSAGCDNVIMVWDVGTGAAMLTLGPEVHPDTIYSVDWSRDGGLICTSCRDKRVRIIEPRKGTVVAEKDRPHEGTRPVRAVFVSEGKILTTGFSRMSERQVALWDTKHLEEPLSLQELDTSSGVLLPFFDPDTNIVYLCGKGDSSIRYFEITSEAPFLHYLSMFSSKESQRGMGYMPKRGLEVNKCEIARFYKLHERRCEPIAMTVPRKSDLFQEDLYPPTAGPDPALTAEEWLGGRDAGPLLISLKDGYVPPKSRELRVNRGLDTGRRRAAPEASGTPSSDAVSRLEEEMRKLQATVQELQKRLDRLEETVQAK

SEQ ID NO: 42271 - protein, 480 aa, Homo sapiens
MTVTKMSWRPQYRSSKFRNVYGKVANREHCFDGIPITKNVHDNHFCAVNTRFLAIVTESAGGGSFLVIPLEQTGRIEPNYPKVCGHQGNVLDIKWNPFIDNIIASCSEDTSVRIWEIPEGGLKRNMTEALLELHGHSRRVGLVEWHPTTNNILFSAGYDYKVLIWNLDVGEPVKMIDCHTDVILCMSFNTDGSLLTTTCKDKKLRVIEPRSGRVLQEANCKNHRVNRVVFLGNMKRLLTTGVSRWNTRQIALWDQEDLSMPLIEEEIDGLSGLLFPFYDADTHMLYLAGKGDGNIRYYEISTEKPYLSYLMEFRSPAPQKGLGVMPKHGLDVSACEVFRFYKLVTLKGLIEPISMIVPRRSDSYQEDIYPMTPGTEPALTPDEWLGGINRDPVLMSLKEGYKKSSKMVFKAPIKEKKSVVVNGIDLLENVPPRTENELLRMFFRQQDEIRRLKEELAQKDIRIRQLQLELKNLRNSPKNC

SEQ ID NO: 42272 - protein, 461 aa, Homo sapiens; identical to SEQ ID NO: 42270

SEQ ID NO: 42273 - protein, 489 aa, Homo sapiens
MSFRKVVRQSKFRHVFGQPVKNDQCYEDIRVSRVTWDSTFCAVNPKFLAVIVEASGGGAFLVLPLSKTGRIDKAYPTVCGHTGPVLDIDWCPHNDEVIASGSEDCTVMVWQIPENGLTSPLTEPVVVLEGHTKRVGIIAWHPTARNVLLSAGCDNVVLIWNVGTAEELYRLDSLHPDLIYNVSWNHNGSLFCSACKDKSVRIIDPRRGTLVAEREKAHEGARPMRAIFLADGKVFTTGFSRMSERQLALWDPENLEEPMALQELDSSNGALLPFYDPDTSVVYVCGKGDSSIRYFEITEEPPYIHFLNTFTSKEPQRGMGSMPKRGLEVSKCEIARFYKLHERKCEPIVMTVPRKSDLFQDDLYPDTAGPEAALEAEEWVSGRDADPILISLREAYVPSKQRDLKISRRNVLSDSRPAMAPGSSHLGAPASTTTAADATPSGSLARAGEAGKLEEVMQELRALRALVKEQGDRICRLEEQLGRMENGDA

SEQ ID NO: 42274 - protein, 287 aa, Homo sapiens
CFLLPRGRDPEPPEAGAAAPCAPGAPDMSFRKVVRQSKFRHVFGQPVKNDQCYEDIRVSRVTWDSTFCAVNPKFLAVIVEASGGGAFLVLPLSKTGRIDKAYPTVCGHTGPVLDIDWCPHNDEVIASGSEDCTVMVWQIPENGLTSPLTEPVVVLEGHTKRVGIIAWHPTARNVLLSAGCDNVVLIWNVGTAEELYRLDSLHPDLIYNVSWNHNGSLFCSACKDKSVRIIDPRRGTLVAEREKAHEGARPMRAIFLADGKVFTTGFSRMSERQLALWDPGVRRFCLA

SEQ ID NO: 42275 - protein, 489 aa, Homo sapiens; identical to SEQ ID NO: 42273

SEQ ID NO: 42276 - protein, 289 aa, Homo sapiens [sequence omitted]

SEQ ID NO: 42277 - protein, 183 aa, Homo sapiens
MSFRKVVRQSKFRHVFGQPVKNDQCYEDIRVSRVTWDSTFCAVNPKFLAVIVEASGGGAFLVLPLSKTGRIDKAYPTVCGHTGPVLDIDWCPHNDEVIASGSEDCTVMVWQIPENGLTSPLTEPVVVLEGHTKRVGIIAWHPTARNVLLSAGLHRPPFCAPPPHGPLHTSQQPLQGPHDKWES

SEQ ID NO: 42278 - protein, 474 aa, Homo sapiens
MRRVVRQSKFRHVFGQAVKNDQCYDDIRVSRVTWDSSFCAVNPRFVAIIIEASGGGAFLVLPLHKTGRIDKSYPTVCGHTGPVLDIDWCPHNDQVIASGSEDCTVMVWQIPENGLTLSLTEPVVILEGHSKRVGIVAWHPTARNVLLSAGCDNAIIIWNVGTGEALINLDDMHSDMIYNVSWNRNGSLICTASKDKKVRVIDPRKQEIVAEKEKAHEGARPMRAIFLADGNVFTTGFSRMSERQLALWNPKNMQEPIALHEMDTSNGVLLPFYDPDTSIIYLCGKGDSSIRYFEITDESPYVHYLNTFSSKEPQRGMGYMPKRGLDVNKCEIARFFKLHERKCEPIIMTVPRKSDLFQDDLYPDTAGPEAALEAEEWFEGKNADPILISLKHGYIPGKNRDLKVVKKNILDSKPTANKKCDLISIPKKTTDTASVQNEAKLDEILKEIKSIKDTICNQDERISKLEQQMAKIAA

SEQ ID NO: 42279 - protein, 527 aa, Homo sapiens
MYGPGSQLGKSGNNSWAKERGCSIACQGSLTSARLHAPSIGERPLSHMRWKDTMRRVVRQSKFRHVFGQAVKNDQCYDDIRVSRVTWDSSFCAVNPRFVAIIIEASGGGAFLVLPLHKTGRIDKSYPTVCGHTGPVLDIDWCPHNDQVIASGSEDCTVMVWQIPENGLTLSLTEPVVILEGHSKRVGIVAWHPTARNVLLSAGCDNAIIIWNVGTGEALINLDDMHSDMIYNVSWNRNGSLICTASKDKKVRVIDPRKQEIVAEKEKAHEGARPMRAIFLADGNVFTTGFSRMSERQLALWNPKNMQEPIALHEMDTSNGVLLPFYDPDTSIIYLCGKGDSSIRYFEITDESPYVHYLNTFSSKEPQRGMGYMPKRGLDVNKCEIARFFKLHERKCEPIIMTVPRKSDLFQDDLYPDTAGPEAALEAEEWFEGKNADPILISLKHGYIPGKNRDLKVVKKNILDSKPTANKKCDLISIPKKTTDTASVQNEAKLDEILKEIKSIKDTICNQDERISKLEQQMAKIAA

SEQ ID NO: 42280 - protein, 474 aa, Homo sapiens; identical to SEQ ID NO: 42278

SEQ ID NO: 42281 - protein, 162 aa, Homo sapiens
MRRVVRQSKFRHVFGQAVKNDQCYDDIRVSRVTWDSSFCAVNPRFVAIIIEASGGGAFLVLPLHKTGRIDKSYPTVCGHTGPVLDIDWCPHNDQVIASGSEDCTVMVWQIPENGLTLSLTEPVVILEGHSKRVGIVAWHPTARNVLLSAGCDNAIIIWNVGT

SEQ ID NO: 42282 - protein, 165 aa, Homo sapiens
SKEPQRGMGYMPKRGLDVNKCEIARFFKLHERKCEPIIMTVPRKSDLFQDDLYPDTAGPEAALEAEEWFEGKNADPILISLKHGYIPGKNRDLKVVKKNILDSKPTANKKCDLISIPKKTTDTASVQNEAKLDEILKEIKSIKDTICNQDERISKLEQQMAKIAA

SEQ ID NO: 42283 - protein, 181 aa, Homo sapiens
MRRVVRQSKFRHVFGQAVKNDQCYDDIRVSRVTWDSSFCAVNPRFVAIIIEASGGGAFLVLPLHKTGRIDKSYPTVCGHTGPVLDIDWCPHNDQVIASGSEDCTVMVWQIPENGLTLSLTEPVVILEGHSKRVGIVAWHPTARNVLLSAGCDNAIIIWNVGTGEALINLDDMHSDMIYNVS

SEQ ID NO: 42284 - protein, 480 aa, Homo sapiens
MRWKDTMRRVVRQSKFRHVFGQAVKNDQCYDDIRVSRVTWDSSFCAVNPRFVAIIIEASGGGAFLVLPLHKTGRIDKSYPTVCGHTGPVLDIDWCPHNDQVIASGSEDCTVMVWQIPENGLTLSLTEPVVILEGHSKRVGIVAWHPTARNVLLSAGCDNAIIIWNVGTGEALINLDDMHSDMIYNVSWNRNGSLICTASKDKKVRVIDPRKQEIVAEKEKAHEGARPMRAIFLADGNVFTTGFSRMSERQLALWNPKNMQEPIALHEMDTSNGVLLPFYDPDTSIIYLCGKGDSSIRYFEITDESPYVHYLNTFSSKEPQRGMGYMPKRGLDVNKCEIARFFKLHERKCEPIIMTVPRKSDLFQDDLYPDTAGPEAALEAEEWFEGKNADPILISLKHGYIPGKNRDLKVVKKNILDSKPTANKKCDLISIPKKTTDTASVQNEAKLDEILKEIKSIKDTICNQDERISKLEQQMAKIAA

SEQ ID NO: 42285 - protein, 169 aa, Homo sapiens
MRRVVRQSKFRHVFGQAVKNDQCYDDIRVSRVTWDSSFCAVNPRFVAIIIEASGGGAFLVLPLHKTGRIDKSYPTVCGHTGPVLDIDWCPHNDQVIASGSEDCTVMVWQIPENGLTLSLTEPVVILEGHSKRVGIVAWHPTARNVLLSAGCDNAIIIWNVGTGEALINL

SEQ ID NO: 42286 - protein, 151 aa, Homo sapiens
MRRVVRQSKFRHVFGQAVKNDQCYDDIRVSRVTWDSSFCAVNPRFVAIIIEASGGGAFLVLPLHKTGRIDKSYPTVCGHTGPVLDIDWCPHNDQVIASGSEDCTVMVWQIPENGLTLSLTEPVVILEGHSKRVGIVAWHPTARNVLLSAGG

SEQ ID NO: 42287 - protein, 163 aa, Homo sapiens
MRRVVRQSKFRHVFGQAVKNDQCYDDIRVSRVTWDSSFCAVNPRFVAIIIEASGGGAFLVLPLHKTGRIDKSYPTVCGHTGPVLDIDWCPHNDQVIASGSEDCTVMVWQIPENGLTLSLTEPVVILEGHSKRVGIVAWHPTARNVLLSAGCDNAIIIWNVGTG

SEQ ID NO: 42288 - protein, 525 aa, Homo sapiens
MSWHPQYRSSKFRHVFGKPASKENCYDSVPITRSVHDNHFCAVNPHFIAVVTECAGGGAFLVIPLHQTGKLDPHYPKVCGHRGNVLDVKWNPFDDFEIASCSEDATIKIWSIPKQLLTRNLTAYRKELVGHARRVGLVEWHPTAANILFSAGYDYKVMIWNLDTKESVITSPMSTISCHQDVILSMSFNTNGSLLATTCKDRKIRVIDPRAGTVLQEASYKGHRASKVLFLGNLKKLMSTGTSRWNNRQVALWDQDNLSVPLMEEDLDGSSGVLFPFYDADTSMLYVVGKGDGNIRYYEVSADKPHLSYLTEYRSYNPQKGIGVMPKRGLDVSSCEIFRFYKLITTKSLIEPISMIVPRRSESYQEDIYPPTAGAQPSLTAQEWLSGMNRDPILVSLRPGSELLRPHPLPAERPIFNSMAPASPRLLNQTEKLAAEDGWRSSSLLEEKMPRWAAEHRLEEKKTWLTNGFDVFECPPPKTENELLQMFYRQQEEIRRLRELLTQREVQAKQLELEIKNLRMGSEQL

SEQ ID NO: 42289 - protein, 525 aa, Homo sapiens; identical to SEQ ID NO: 42288

SEQ ID NO: 42290 - protein, 480 aa, Homo sapiens; identical to SEQ ID NO: 42271

SEQ ID NO: 42291 - protein, 475 aa, Homo sapiens
MSWRPQYRSSKFRNVYGKVANREHCFDGIPITKNVHDNHFCAVNTRFLAIVTESAGGGSFLVIPLEQTGRIEPNYPKVCGHQGNVLDIKWNPFIDNIIASCSEDTSVRIWEIPEGGLKRNMTEALLELHGHSRRVGLVEWHPTTNNILFSAGYDYKVLIWNLDVGEPVKMIDCHTDVILCMSFNTDGSLLTTTCKDKKLRVIEPRSGRVLQEANCKNHRVNRVVFLGNMKRLLTTGVSRWNTRQIALWDQEDLSMPLIEEEIDGLSGLLFPFYDADTHMLYLAGKGDGNIRYYEISTEKPYLSYLMEFRSPAPQKGLGVMPKHGLDVSACEVFRFYKLVTLKGLIEPISMIVPRRSDSYQEDIYPMTPGTEPALTPDEWLGGINRDPVLMSLKEGYKKSSKMVFKAPIKEKKSVVVNGIDLLENVPPRTENELLRMFFRQQDEIRRLKEELAQKDIRIRQLQLELKNLRNSPKNC

SEQ ID NO: 42292 - protein, 475 aa, Homo sapiens; identical to SEQ ID NO: 42291

SEQ ID NO: 42293 - protein, 1663 aa, Homo sapiens
MATDGASCEPDLSRAPEDAAGAAAEAAKKEFDVDTLSKSELRMLLSVMEGELEARDLVIEALRARRKEVFIQERYGRFNLNDPFLALQRDYEAGAGDKEKKPVCTNPLSILEAVMAHCKKMQERMSAQLAAAESRQKKLEMEKLQLQALEQEHKKLAARLEEERGKNKQVVLMLVKECKQLSGKVIEEAQKLEDVMAKLEEEKKKTNELEEELSAEKRRSTEMEAQMEKQLSEFDTEREQLRAKLNREEAHTTDLKEEIDKMRKMIEQLKRGSDSKPSLSLPRKTKDRRLVSISVGTEGTVTRSVACQTDLVTENADHMKKLPLTMPVKPSTGSPLVSANAKGSVCTSATMARPGIDRQASYGDLIGASVPAFPPPSANKIEENGPSTGSTPDPTSSTPPLPSNAAPPTAQTPGIAPQNSQAPPMHSLHSPCANTSLHPGLNPRIQAARFRFQGNANDPDQNGNTTQSPPSRDVSPTSRDNLVAKQLARNTVTQALSRFTSPQAGAPSRPGVPPTGDVGTHPPVGRTSLKTHGVARVDRGNPPPIPPKKPGLSQTPSPPHPQLKVIIDSSRASNTGAKVDNKTVASTPSSLPQGNRVINEENLPKSSSPQLPPKPSIDLTVAPAGCAVSALATSQVGAWPAATPGLNQPACSDSSLVIPTTIAFCSSINPVSASSCRPGASDSLLVTASGWSPSLTPLLMSGGPAPLAGRPTLLQQAAAQGNVTLLSMLLNEEGLDINYSCEDGHSALYSAAKNGHTDCVRLLLSAEAQVNAADKNGFTPLCAAAAQGHFECVELLISYDANINHAADGGQTPLYLACKNGNKECIKLLLEAGTNRSVKTTDGWTPVHAAVDTGNVDSLKLLMYHRIPAHGNSFNEEESESSVFDLDGGEESPEGISKPVVPADLINHANREGWTAAHIAASKGFKNCLEILCRHGGLEPERRDKCNRTVHDVATDDCKHLLENLNALKIPLRISVGEIEPSNYGSDDLECENTICALNIRKQTSWDDFSKAVSQALTNHFQAISSDGWWSLEDVTCNNTTDSNIGLSARSIRSITLGNVPWSVGQSFAQSPWDFMRKNKAEHITVLLSGPQEGCLSSVTYASMIPLQMMQNYLRLVEQYHNVIFHGPEGSLQDYIVHQLALCLKHRQMAAGFSCEIVRAEVDAGFSKEQLLDLFISSACLIPVKQSPSKKKIIIILENLEKSSLSELLRDFLAPLENRSTESPCTFQKGNGLSECYYFHENCFLMGTIAKACLQGSDLLVQQHFRWVQLRWDGEPMQGLLQRFLRRKVVNKFKGQAPSPCDPVCKIVDWALSVWRQLNSCLARLGTPEALLGPKYFLSCPVVPGHAQVTVKWMSKLWNGVIAPRVQEAILSRASVKRQPGFGQTTAKRHPSQGQQAVVKAALSILLNKAVLHGCPLPRAELDQHTADFKGGSFPLSIVSSYNTCNKKKGESGAWRKVNTSPRRKSGRFSLPTWNKPDLSTEGMKNKTISQLNCNRNASLSKQKSLENDLSLTLNLDQRLSLGSDDEADLVKELQSMCSSKSESDISKIADSRDDLRMFDSSGNNPVLSATINNLRMPVSQKEVSPLSSHQTTECSNSKSKTELGVSRVKSFLPVPRSKVTQCSQNTKRSSSSSNTRQIEINNNSKEVNWNLHKNEHLEKPNK

SEQ ID NO: 42294 - protein, 82 aa, Homo sapiens
MSATWTLSPEPLPPSTGPPVGAGLDAEQRTVFAFVLCLLVVLVLLMVRCVRILLDPYSRMPASSWTDHKEALERGQFDYALV

SEQ ID NO: 42295 - protein, 322 aa, Homo sapiens
MSPNFKLQCHFILIFLTALRGESRYLELREAADYDPFLLFSANLKRELAGEQPYRRALRCLDMLSLQGQFTFTADRPQLHCAAFFISEPEEFITIHYDQVSIDCQGGDFLKVFDGWILKGEKFPSSQDHPLPSAERYIDFCESGLSRRSIRSSQNVAMIFFRVHEPGNGFTLTIKTDPNLFPCNVISQTPNGKFTLVVPHQHRNCSFSIIYPVVIKISDLTLGHVNGLQLKKSSAGCEGIGDFVELLGGTGLDPSKMTPLADLCYPFHGPAQMKVGCDNTVVRMVSSGKHVNRVTFEYRQLEPYELENPNGNSIGEFCLSGL

SEQ ID NO: 42296 - protein, 240 aa, Homo sapiens
MSPEVHQSNVGWCRLVTAAYNYFHVTNFFWMFGEGCYLHTAIVLTYSTDRLRKWMFICIGWGVPFPIIVAWAIGKLYYDNEKCWFGKRPGVYTDYIYQGPMILVLLINFIFLFNIVRILMTKLRASTTSETIQYRKAVKATLVLLPLLGITYMLFFVNPGEDEVSRVVFIYFNSFLESFQGFFVSVFYCFLNSEVRSAIRKRWHRWQDKHSIRARVARAMSIPTSPTRVSFHSIKQSTAV

SEQ ID NO: 42297 - protein, 415 aa, Homo sapiens
MGGHPQLRLVKALLLLGLNPVSASLQDQHCESLSLASNISGLQCNASVDLIGTCWPRSPAGQLVVRPCPAFFYGVRYNTTNNGYRECLANGSWAARVNYSECQEILNEEKKSKVHYHVAVIINYLGHCISLVALLVAFVLFLRLRSIRCLRNIIHWNLISAFILRNATWFVVQLTMSPEVHQSNVGWCRLVTAAYNYFHVTNFFWMFGEGCYLHTAIVLTYSTDRLRKWMFICIGWGVPFPIIVAWAIGKLYYDNEKCWFGKRPGVYTDYIYQGPMILVLLINFIFLFNIVRILMTKLRASTTSETIQYRKAVKATLVLLPLLGITYMLFFVNPGEDEVSRVVFIYFNSFLESFQGFFVSVFYCFLNSEVRSAIRKRWHRWQDKHSIRARVARAMSIPTSPTRVSFHSIKQSTAV

SEQ ID NO: 42298 - protein, 285 aa, Homo sapiens
MVSATIPQKKSKVHYHVAVIINYLGHCISLVALLVAFVLFLRLRSIRCLRNIIHWNLISAFILRNATWFVVQLTMSPEVHQSNVGWCRLVTAAYNYFHVTNFFWMFGEGCYLHTAIVLTYSTDRLRKWMFICIGWGVPFPIIVAWAIGKLYYDNEKCWFGKRPGVYTDYIYQGPMILVLLINFIFLFNIVRILMTKLRASTTSETIQYRASLCLCSTVSSIVRSVLPSGRGGTGGRTSTRSVPEWPVPCPSPPPQPVSAFTASSSPQQSELAGHGAAPKELWLGG

SEQ ID NO: 42299 - protein, 401 aa, Homo sapiens
MGGHPQLRLVKALLLLGLNPVSASLQDQHCESLSLASNISGLQCNASVDLIGTCWPRSPAGQLVVRPCPAFFYGVRYNTTNNGYRECLANGSWAARVNYSECQEILNEEKKSKVHYHVAVIINYLGHCISLVALLVAFVLFLRLRSIRCLRNIIHWNLISAFILRNATWFVVQLTMSPEVHQSNVGWCRLVTAAYNYFHVTNFFWMFGEGCYLHTAIVLTYSTDRLRKWMFICIGWGVPFPIIVAWAIGKLYYDNEKCWFGKRPGVYTDYIYQGPMILVLLINFIFLFNIVRILMTKLRASTTSETIQYRKAVKATLVLLPLLGITYMLFFVNPGEDEVSRVVFIYFNSFLESFQVRSAIRKRWHRWQDKHSIRARVARAMSIPTSPTRVSFHSIKQSTAV

SEQ ID NO: 42300 - protein, 375 aa, Homo sapiens
MGGHPQLRLVKALLLLGLNPVSASLQDQHCESLSLASNISDNGYRECLANGSWAARVNYSECQEILNEEKKSKVHYHVAVIINYLGHCISLVALLVAFVLFLRLRSIRCLRNIIHWNLISAFILRNATWFVVQLTMSPEVHQSNVGWCRLVTAAYNYFHVTNFFWMFGEGCYLHTAIVLTYSTDRLRKWMFICIGWGVPFPIIVAWAIGKLYYDNEKCWFGKRPGVYTDYIYQGPMILVLLINFIFLFNIVRILMTKLRASTTSETIQYRKAVKATLVLLPLLGITYMLFFVNPGEDEVSRVVFIYFNSFLESFQGFFVSVFYCFLNSEVRSAIRKRWHRWQDKHSIRARVARAMSIPTSPTRVSFHSIKQSTAV

SEQ ID NO: 42301 - protein, 444 aa, Homo sapiens
MGGHPQLRLVKALLLLGLNPVSASLQDQHCESLSLASNISGLQCNASVDLIGTCWPRSPAGQLVVRPCPAFFYGVRYNTTNNGYRECLANGSWAARVNYSECQEILNEEKKSKVHYHVAVIINYLGHCISLVALLVAFVLFLRLRPGCTHWGDQADGALEVGAPWSGAPFQVRRSIRCLRNIIHWNLISAFILRNATWFVVQLTMSPEVHQSNVGWCRLVTAAYNYFHVTNFFWMFGEGCYLHTAIVLTYSTDRLRKWMFICIGWGVPFPIIVAWAIGKLYYDNEKCWFGKRPGVYTDYIYQGPMILVLLINFIFLFNIVRILMTKLRASTTSETIQYRKAVKATLVLLPLLGITYMLFFVNPGEDEVSRVVFIYFNSFLESFQGFFVSVFYCFLNSEVRSAIRKRWHRWQDKHSIRARVARAMSIPTSPTRVSFHSIKQSTAV

SEQ ID NO: 42302 - protein, 37 aa, Homo sapiens
VYTDYIYFNSFLESFQGFFVSVFYCFLNSEVRSAIRK

SEQ ID NO: 42303 - protein, 401 aa, Homo sapiens; identical to SEQ ID NO: 42299

SEQ ID NO: 42304 - protein, 397 aa, Homo sapiens
MGREPWPEDRDLGFPQLFCQGPYSYCNTTLDQIGTCWPRSAAGALVERPCPEYFNGVKYNTTRNAYRECLENGTWASKINYSQCEPILDDKQRKYDLHYRIALVVNYLGHCVSVAALVAAFLLFLALRSIRCLRNVIHWNLITTFILRNVMWFLLQLVDHEVHESNEVWCRCITTIFNYFVVTNFFWMFVEGCYLHTAIVMTYSTERLRKCLFLFIGWCIPFPIIVAWAIGKLYYENEQCWFGKEPGDLVDYIYQGPIILVLLINFVFLFNIVRILMTKLRASTTSETIQYRKAVKATLVLLPLLGITYMLFFVNPGEDDLSQIMFIYFNSFLQSFQGFFVSVFYCFFNGEVRSAVRKRWHRWQDHHSLRVPMARAMSIPTSPTRISFHSIKQTAAV

SEQ ID NO: 42305 - protein, 438 aa, Homo sapiens
MRGPSGPPGLLYVPHLLLCLLCLLPPPLQYAAGQSQMPKDQPLWALLEQYCHTIMTLTNLSGPYSYCNTTLDQIGTCWPRSAAGALVERPCPEYFNGVKYNTTRNAYRECLENGTWASKINYSQCEPILDDKQRKYDLHYRIALVVNYLGHCVSVAALVAAFLLFLALRSIRCLRNVIHWNLITTFILRNVMWFLLQLVDHEVHESNEVWCRCITTIFNYFVVTNFFWMFVEGCYLHTAIVMTYSTERLRKCLFLFIGWCIPFPIIVAWAIGKLYYENEQCWFGKEPGDLVDYIYQGPIILVLLINFVFLFNIVRILMTKLRASTTSETIQYRKAVKATLVLLPLLGITYMLFFVNPGEDDLSQIMFIYFNSFLQSFQGFFVSVFYCFFNGEVRSAVRKRWHRWQDHHSLRVPMARAMSIPTSPTRISFHSIKQTAAV

SEQ ID NO: 42306 - protein, 411 aa, Homo sapiens
MDAALLHSLLEANCSLALAEELLLDGWGPPLDPEGPYSYCNTTLDQIGTCWPRSAAGALVERPCPEYFNGVKYNTTRNAYRECLENGTWASKINYSQCEPILDDKQRKYDLHYRIALVVNYLGHCVSVAALVAAFLLFLALRSIRCLRNVIHWNLITTFILRNVMWFLLQLVDHEVHESNEVWCRCITTIFNYFVVTNFFWMFVEGCYLHTAIVMTYSTERLRKCLFLFIGWCIPFPIIVAWAIGKLYYENEQCWFGKEPGDLVDYIYQGPIILVLLINFVFLFNIVRILMTKLRASTTSETIQYRKAVKATLVLLPLLGITYMLFFVNPGEDDLSQIMFIYFNSFLQSFQGFFVSVFYCFFNGEVRSAVRKRWHRWQDHHSLRVPMARAMSIPTSPTRISFHSIKQTAAV

SEQ ID NO: 42307 - protein, 370 aa, Homo sapiens
MDAALLHSLLEANCSLALAEELLLDGWGPPLDPEGPYSYCNTTLDQIGTCWPRSAAGALVERPCPEYFNGVKYNTTRNAYRECLENGTWASKINYSQCEPILDDKQRKYDLHYRIALVVNYLGHCVSVAALVAAFLLFLALRSIRCLRNVIHWNLITTFILRNVMWFLLQLVDHEVHESNEVWCRCITTIFNYFVVTNFFWMFVEGCYLHTAIVMTYSTERLRKCLFLFIGWCIPFPIIVAWAIGKLYYENEQCWFGKEPGDLVDYIYQGPIILVLLINFVFLFNIVRILMTKLRASTTSETIQYRKAVKATLVLLPLLGITYMLFFVNPGEDDLSQIMFIYFNSFLQSFQGFFVSVFYCFFNGEGLEPV

SEQ ID NO: 42308 - protein, 155 aa, Homo sapiens
MYRHKNSWRLGLKYPPSSKEETQVPKTLISGLPGRKSSSRVGEKLQSAHKMPLSPGLLLLLLSGATATAALPLEGGPTGRDSEHMQEAAGIRKSSLLTFLAWWFEWTSQASAGPLIGEEAREVARRQEGAPPQQSARRDRMPCRNFFWKTFSSCK

SEQ ID NO: 42309 - protein, 105 aa, Homo sapiens
MPLSPGLLLLLLSGATATAALPLEGGPTGRDSEHMQEAAGIRKSSLLTFLAWWFEWTSQASAGPLIGEEAREVARRQEGAPPQQSARRDRMPCRNFFWKTFSSCK

SEQ ID NO: 42310 - protein, 443 aa, Homo sapiens
MAASPHTLSSRLLTGCVGGSVWYLERRTIQDSPHKFLHLLRNVNKQWITFQHFSFLKRMYVTQLNRSHNQQVRPKPEPVASPFLEKTSSGQAKAEIYEMRPLSPPSLSLSRKPNEKELIELEPDSVIEDSIDVGKETKEEKRWKEMKLQVYDLPGILARLSKIKLTALVVSTTAAGFALAPGPFDWPCFLLTSVGTGLASCAANSINQFFEVPFDSNMNRTKNRPLVRGQISPLLAVSFATCCAVPGVAILTLGVNPLTGALGLFNIFLYTCCYTPLKRISIANTWVGAVVGAIPPVMGWTAATGSLDAGAFLLGGILYSWQFPHFNALSWGLREDYSRGGYCMMSVTHPGLCRRVALRHCLALLVLSAAAPVLDITTWTFPIMALPINAYISYLGFRFYVDADRRSSRRLFFCSLWHLPLLLLLMLTCKRPSGGGDAGPPPS

SEQ ID NO: 42311 - protein, 132 aa, Homo sapiens
  VARIANT 1: note = MOD_RES - Any amino acid
XRNVNKQWITFQHFSFLKRMYVTQLNRSHNQQVRPKPEPVASPFLEKTSSGQAKAEIYEMRPLSPPSLSLSRKPNEKELIELEPDSVIEDSIDVGKETKEEKRWKEMKLQVYDLPGILARLSKIKLTGTLFF

SEQ ID NO: 42312 - protein, 251 aa, Homo sapiens
MICQEFWLDYPKSNSQFFEVPFDSNMNRTKNRPLVRGQISPLLAVSFATCCAVPGVAILTLGVNPLTGALGLFNIFLYTCCYTPLKRISIANTWVGAVVGAIPPVMGWTAATGSLDAGAFLLGGILYSWQFPHFNALSWGLREDYSRGGYCMMSVTHPGLCRRVALRHCLALLVLSAAAPVLDITTWTFPIMALPINAYISYLGFRFYVDADRRSSRRLFFCSLWHLPLLLLLMLTCKRPSGGGDAGPPPS

SEQ ID NO: 42313 - protein, 226 aa, Homo sapiens
MNRTKNRPLVRGQISPLLAVSFATCCAVPGVAILTLGVNPLTGALGLFNIFLYTCCYTPLKRISIANTWVGAVVGAIPPVMGWTAATGSLDAGAFLLGGILYSWQFPHFNALSWGLREDYSRGGYCMMSVTHPGLCRRVALRHCLALLVLSAAAPVLDITTWTFPIMALPINAYISYLGFRFYVDADRRSSRRLFFCSLWHLPLLLLLMLTCKRPSGGGDAGPPPS

SEQ ID NO: 42314 - protein, 276 aa, Homo sapiens
MGGLWRPGWRCVPFCGWRWIHPGSPTRAAERVEPFLRPEWSGTGGAERGLRWLGTWKRCSLRARHPALQPPRRPKSSNPFTRAQEEERRRQNKTTLTYVAAVAVGMLGASYAAVPLYRLYCQTTGLGGSAVAGHASDKIENMVPVKDRIIKISFNADVHASLQWNFRPQQTEIYVVPGETALAFYRAKNPTDKPVIGISTYNIVPFEAGQYFNKIQCFCFEEQRLNPQEEVDMPVFFYIDPEFAEDPRMIKVDLITLSYTFFEAKEGHKLPVPGYN

SEQ ID NO: 42315 - protein, 410 aa, Homo sapiens
MQRLLFPPLRALKGRQYLPLLAPRAAPRAQCDCIRRPLRPGQYSTISEVALQSGRGTVSLPSKAAERVVGRWLLVCSGTVAGAVILGGVTRLTESGLSMVDWHLIKEMKPPTSQEEWEAEFQRYQQFPEFKILNHDMTLTEFKFIWYMEYSHRMWGRLVGLVYILPAAYFWRKGWLSRGMKGRVLALCGLVCFQGLLGWYMVKSGLEEKSDSHDIPRVSQYRLAAHLGSALVLYCASLWTSLSLLLPPHKLPETHQLLQLRRFAHGTAGLVFLTALSGAFVAGLDAGLVYNSFPKMGESWIPEDLFTFSPILRNVFENPTMVQFDHRILGITSVTAITVLYFLSRRIPLPRRTKMAAVTLLALAYTQVGLGISTLLMYVPTPLAATHQSGSLALLTGALWLMNELRRVPK

SEQ ID NO: 42316 - protein, 388 aa, Homo sapiens
MQRLLFPPLRALKGRQYLPLLAPRAAPRAQCDCIRRPLRPGQYSTISEVALQSGRGTVSLPSKAAERVVGRWLLVCSGTVAGAVILGGVTRLTESGLSMVDWHLIKEMKPPTSQEEWEAEFQRYQQFPEFKILNHDMTLTEFKFIWYMEYSHRMWGRLVGLVYILPAAYFWRKGWLSRGMKGRVLALCGLVCFQGLLGWYMVKSGLEEKSDSHDIPRVSQYRLAAHLGSALVLYCASLWTSLSLLLPPHKLPETHQLLQLRRFAHGTAGLVFLTALSGAFVAGLDAGLVYNSFPKMGESWIPEDLFTFSPILRNVFENPTMVQFDHRILGITSVTAITVLYFLSRRIPLPRRTKMAAVTLLALAYTQGPVLFNFTFKISDLDEGIRNI

SEQ ID NO: 42317 - protein, 63 aa, Homo sapiens
MPGLVDSNPAPPESQEKKPLKPCCACPETKKARDACIIEKGEEHCGHLIEAHKECMRALGFKI

SEQ ID NO: 42318 - protein, 63 aa, Homo sapiens; identical to SEQ ID NO: 42317

SEQ ID NO: 42319 - protein, 98 aa, Homo sapiens
MPGLVDSNPAPPESQEKKPLKPCCACPETKKARDAWFRGRVSVDLSRSLVPGNDGERGERQASTTHSFLQIIIEKGEEHCGHLIEAHKECMRALGFKI

SEQ ID NO: 42320 - protein, 63 aa, Homo sapiens; identical to SEQ ID NO: 42317

SEQ ID NO: 42321 - protein, 365 aa, Homo sapiens
MALLLCFVLLCGVVDFARSLSITTPEEMIEKAKGETAYLPCKFTLSPEDQGPLDIEWLISPADNQKVDQVIILYSGDKIYDDYYPDLKGRVHFTSNDLKSGDASINVTNLQLSDIGTYQCKVKKAPGVANKKIHLVVLVKPSGARCYVDGSEEIGSDFKIKCEPKEGSLPLQYEWQKLSDSQKMPTSWLAEMTSSVISVKNASSEYSGTYSCTVRNRVGSDQCLLRLNVVPPSNKAGLIAGAIIGTLLALALIGLIIFCCRKKRREEKYEKEVHHDIREDVPPPKSRTSTARSYIGSNHSSLGSMSPSNMEGYSKTQYNQVPSEDFERTPQSPTLPPAKVAAPNLSRMGAIPVMIPAQSKDGSIV

SEQ ID NO: 42322 - protein, 324 aa, Homo sapiens
MALLLCFVLLCGVVDFARSLSITTPEEMIEKAKGETAYLPCKFTLSPEDQGPLDIEWLISPADNQKVDQVIILYSGDKIYDDYYPDLKGRVHFTSNDLKSGDASINVTNLQLSDIGTYQCKVKKAPGVANKKIHLVVLVKPSGARCYVDGSEEIGSDFKIKCEPKEGSLPLQYEWQKLSDSQKMPTSWLAASNKAGLIAGAIIGTLLALALIGLIIFCCRKKRREEKYEKEVHHDIREDVPPPKSRTSTARSYIGSNHSSLGSMSPSNMEGYSKTQYNQVPSEDFERTPQSPTLPPAKVAAPNLSRMGAIPVMIPAQSKDGSIV

SEQ ID NO: 42323 - protein, 200 aa, Homo sapiens
MALLLCFVLLCGVVDFARSLSITTPEEMIEKAKGETAYLPCKFTLSPEDQGPLDIEWLISPADNQKVDQVIILYSGDKIYDDYYPDLKGRVHFTSNDLKSGDASINVTNLQLSDIGTYQCKVKKAPGVANKKIHLVVLGKMCHLQRAVRPLPEATSAVIIHPWGPCLLPTWKDIPRLSITKYQVKTLNALLRVRLSHLLR

SEQ ID NO: 42324 - protein, 252 aa, Homo sapiens
MALLLCFVLLCGVVDFARSLSITTPEEMIEKAKGETAYLPCKFTLSPEDQGPLDIEWLISPADNQKVDQVIILYSGDKIYDDYYPDLKGRVHFTSNDLKSGDASINVTNLQLSDIGTYQCKVKKAPGVANKKIHLVVLVKPSGARCYVDGSEEIGSDFKIKCEPKEGSLPLQYEWQKLSDSQKMPTSWLAGKMCHLQRAVRPLPEATSAVIIHPWGPCLLPTWKDIPRLSITKYQVKTLNALLRVRLSHLLR

SEQ ID NO: 42325 - protein, 352 aa, Homo sapiens
MALLLCFVLLCGVVDFARSLSITTPEEMIEKAKGETAYLPCKFTLSPEDQGPLDIEWLISPADNQKVDQVIILYSGDKIYDDYYPDLKGRVHFTSNDLKSGDASINVTNLQLSDIGTYQCKVKKAPGVANKKIHLVVLVKPSGARCYVDGSEEIGSDFKIKCEPKEGSLPLQYEWQKLSDSQKMPTSWLAEMTSSVISVKNASSEYSGTYSCTVRNRVGSDQCLLRLNVVPPSNKAGLIAGAIIGTLLALALIGLIIFCCRKKRREEKYEKEVHHDIREDVPPPKSRTSTARSYIGSNHSSLGSMSPSNMEGYSKTQYNQVPSEDFERTPQSPTLPPAKFKYPYKTDGITVV

SEQ ID NO: 42326 - protein, 89 aa, Homo sapiens
MALLLCFVLLCGVVDFARSLSITTPEEMIEKAKGETAYLPCKFTLSPEDQGPLDIEWLISPADNQKVDQVGRCATSKEPYVHCQKLHRQ

SEQ ID NO: 42327 - protein, 299 aa, Homo sapiens
MEEFDSEDFSTSEEDEDYVPSGGEYSEDDVNELVKEDEVDGEEQTQKTQGKKRKAQSIPARKRRQGGLSLEEEEEEDANSESEGSSSEEEDDAAEQEKGIGSEDARKKKEDELWASFLNDVGPKSKVPPSTQVKKGEETEETSSSKLLVKAEELEKPKETEKVKITKVFDFAGEEVRVTKEVDATSKEAKSFFKQNEKEKPQANVPSALPSLPAGSGLKRSSGMSSLLGKIGAKKQKMSTLEKSKLDWESFKEEEGIGEELAIHNRGKEGYIERKAFLDRVDHRQFEIERDLRLSKMKP

SEQ ID NO: 42328 - protein, 224 aa, Homo sapiens
MEKLLCFLVLTSLSHAFGQTDMSRKAFVFPKESDTSYVSLKAPLTKPLKAFTVCLHFYTELSSTRGYSIFSYATKRQDNEILIFWSKDIGYSFTVGGSEILFEVPEVTVAPVHICTSWESASGIVEFWVDGKPRVRKSLKKGYTVGAEASIILGQEQDSFGGNFEGSQSLVGDIGNVNMWDFVLSPDEINTIYLGGPFSPNVLNWRALKYEVQGEVFTKPQLWP

SEQ ID NO: 42329 - protein, 102 aa, Homo sapiens
MEKLLCFLVLTSLSHAFGQTDMSRKAFVFPKESDTSYVSLKAPLTKPLKAFTVCLHFYTELSSTHEINTIYLGGPFSPNVLNWRALKYEVQGEVFTKPQLWP

SEQ ID NO: 42330 - protein, 102 aa, Homo sapiens; identical to SEQ ID NO: 42329

SEQ ID NO: 42331 - protein, 102 aa, Homo sapiens; identical to SEQ ID NO: 42329

SEQ ID NO: 42332 - protein, 91 aa, Homo sapiens
MEKLLCFLVLTSLSHAFGQTDMSRKAFVFPKESDTSYVSLKAPLTKPLKAFTVCLHFYTELSSTRGPNVLNWRALKYEVQGEVFTKPQLWP

SEQ ID NO: 42333 - protein, 46 aa, Homo sapiens
MWDFVLSPDEINTIYLGGPFSPNVLNWRALKYEVQGEVFTKPQLWP

SEQ ID NO: 42334 - protein, 381 aa, Homo sapiens
MPFSNSHNALKLRFPAEDEFPDLSAHNNHMAKVLTPELYAELRAKSTPSGFTLDDVIQTGVDNPGHPYIMTVGCVAGDEESYEVFKDLFDPIIEDRHGGYKPSDEHKTDLNPDNLQGGDDLDPNYVLSSRVRTGRSIRGFCLPPHCSRGERRAIEKLAVEALSSLDGDLAGRYYALKSMTEAEQQQLIDDHFLFDKPVSPLLLASGMARDWPDARGIWHNDNKTFLVWVNEEDHLRVISMQKGGNMKEVFTRFCTGLTQIETLFKSKDYEFMWNPHLGYILTCPSNLGTGLRAGVHIKLPNLGKHEKFSEVLKRLRLQKRGTGGVDTAAVGGVFDVSNADRLGFSEVELVQMVVDGVKLLIEMEQRLEQGQAIDDLMPAQK

SEQ ID NO: 42335 - protein, 346 aa, Homo sapiens
MPFSNSHNALKLRFPAEDEFPDLSAHNNHMAKVLTPELYAELRAKSTPSGFTLDDVIQTGVDNPGHPYIMTVGCVAGDEESYEVFKDLFDPIIEDRHGGYKPSDEHKTDLNPPRGAPRIEKLAVEALSSLDGDLAGRYYALKSMTEAEQQQLIDDHFLFDKPVSPLLLASGMARDWPDARGIWHNDNKTFLVWVNEEDHLRVISMQKGGNMKEVFTRFCTGLTQIETLFKSKDYEFMWNPHLGYILTCPSNLGTGLRAGVHIKLPNLGKHEKFSEVLKRLRLQKRGTGGVDTAAVGGVFDVSNADRLGFSEVELVQMVVDGVKLLIEMEQRLEQGQAIDDLMPAQK

SEQ ID NO: 42336 - protein, 217 aa, Homo sapiens
MPFSNSHNALKLRFPAEDEFPDLSAHNNHMAKVLTPELYAELRAKSTPSGFTLDDVIQTGVDNPGHPYIMTVGCVAGDEESYEVFKDLFDPIIEDRHGGYKPSDEHKTDLNPDNLQGGDDLDPNYVLSSRVRTGRSIRGFCLPPHCSRGERRAIEKLAVEALSSLDGDLAGRYYALKSMTEAEQQQLIDDHFLFDKPVSPLLLASGMARDWPDARGI

SEQ ID NO: 42337 - protein, 148 aa, Homo sapiens
MAGPFSRLLSARPGLRLLALAGAGSLAAGFLLRPEPVRAASERRRLYPPSAEYPDLRKHNNCMASHLTPAVYARLCDKTTPTGWTLDQCIQTGVDNPGHPFIKTVGMVAGDEETYEVFADLFDPVIQERHNGYDPRTMKHTTDLDASK

SEQ ID NO: 42338 - protein, 417 aa, Homo sapiens
MAGPFSRLLSARPGLRLLALAGAGSLAAGFLLRPEPVRAASERRRLYPPSAEYPDLRKHNNCMASHLTPAVYARLCDKTTPTGWTLDQCIQTGVDNPGHPFIKTVGMVAGDEETYEVFADLFDPVIQERHNGYDPRTMKHTTDLDASKIRSGYFDERYVLSSRVRTGRSIRGLSLPPACTRAERREVERVVVDALSGLKGDLAGRYYRLSEMTEAEQQQLIDDHFLFDKPVSPLLTAAGMARDWPDARGIWHNNEKSFLIWVNEEDHTRVISMEKGGNMKRVFERFCRGLKEVERLIQERGWEFMWNERLGYILTCPSNLGTGLRAGVHIKLPLLSKDSRFPKILENLRLQKRGTGGVDTAATGGVFDISNLDRLGKSEVELVQLVIDGVNYLIDCERRLERGQDIRIPTPVIHTKH

SEQ ID NO: 42339 - protein, 448 aa, Homo sapiens
MAGPFSRLLSARPGLRLLALAGAGSLAAGFLLRPEPVRAASERRRLYPPSQTWPTGQLPGNCTRSRRLCPPSMVTGYPLPSAEYPDLRKHNNCMASHLTPAVYARLCDKTTPTGWTLDQCIQTGVDNPGHPFIKTVGMVAGDEETYEVFADLFDPVIQERHNGYDPRTMKHTTDLDASKIRSGYFDERYVLSSRVRTGRSIRGLSLPPACTRAERREVERVVVDALSGLKGDLAGRYYRLSEMTEAEQQQLIDDHFLFDKPVSPLLTAAGMARDWPDARGIWHNNEKSFLIWVNEEDHTRVISMEKGGNMKRVFERFCRGLKEVERLIQERGWEFMWNERLGYILTCPSNLGTGLRAGVHIKLPLLSKDSRFPKILENLRLQKRGTGGVDTAATGGVFDISNLDRLGKSEVELVQLVIDGVNYLIDCERRLERGQDIRIPTPVIHTKH

SEQ ID NO: 42340 - protein, 417 aa, Homo sapiens; identical to SEQ ID NO: 42338

SEQ ID NO: 42341 - protein, 254 aa, Homo sapiens
MAGPFSRLLSARPGLRLLALAGAGSLAAGFLLRPEPVRAASERRRLYPPSAEYPDLRKHNNCMASHLTPAVYARLCDKTTPTGWTLDQCIQTGVDNPGHPFIKTVGMVAGDEETYEVFADLFDPVIRGLSLPPACTRAERREVERVVVDALSGLKGDLAGRYYRLSEMTEAEQQQLIDDHFLFDKPVSPLLTAAGMARDWPDARGIWHNNEKSFLIWVNEEDHTRVISMEKGGNMKRVFERFCRGLKEVVVGIK

SEQ ID NO: 42342 - protein, 417 aa, Homo sapiens; identical to SEQ ID NO: 42338

SEQ ID NO: 42343 - protein, 146 aa, Homo sapiens
MPVKVRTGRSIRGLSLPPACTRAERREVERVVVDALSGLKGDLAGRYYRLSEMTEAEQQQLIDDHFLFDKPVSPLLTAAGMARDWPDARGIWHNNEKSFLIWVNEEDHTRVISMEKGGNMKRVFERFCRGLKEVREDCVGELGGRT

SEQ ID NO: 42344 - protein, 168 aa, Homo sapiens
MKHTTDLDASKIRSGYFDERYVLSSRVRTGRSIRGLSLPPACTRAERREVERVVVDALSGLKGDLAGRYYRLSEMTEAEQQQLIDDHFLFDKPVSPLLTAAGMARDWPDARGIWHNNEKSFLIWVNEEDHTRVISMEKGGNMKRVFERFCRGLKEVREDYVGELGGRT

SEQ ID NO: 42345 - protein, 103 aa, Homo sapiens
MAGPFSRLLSARPGLRLLALAGAGSLAAGFLLRPEPVRAASERRRLYPPSAEYPDLRKHNNCMASHLTPAVYARLCDKTTPTGWTLDQCIQTGVDNPGHPFIK

SEQ ID NO: 42346 - protein, 129 aa, Homo sapiens
MAGPFSRLLSARPGLRLLALAGAGSLAAGFLLRPEPVRAASERRRLYPPSAEYPDLRKHNNCMASHLTPAVYARLCDKTTPTGWTLDQCIQTGVDNPGHPFIKTVGMVAGDEETYEVFADLFDPVIQER

SEQ ID NO: 42347 - protein, 338 aa, Homo sapiens
MAGPFSRLLSARPGLRLLALAGAGSLAAGFCSDRNLYELPVNDGGCIPREQSQTWPTGQLPGNCTRSRRLCPPSMVTGYPLPSAEYPDLRKHNNCMASHLTPAVYARLCDKTTPTGWTLDQCIQTGVDNPGHPFIKTVGMVAGDEETYEVFADLFDPVIQERHNGYDPRTMKHTTDLDASKIRSGYFDERYVLSSRVRTGRSIRGLSLPPACTRAERREVERVVVDALSGLKGDLAGRYYRLSEMTEAEQQQLIDDHFLFDKPVSPLLTAAGMARDWPDARGIWHNNEKSFLIWVNEEDHTRVISMEKGGNMKRVFERFCRGLKEVREDYVGELGGRT

SEQ ID NO: 42348 - protein, 417 aa, Homo sapiens; identical to SEQ ID NO: 42338

SEQ ID NO: 42349 - protein, 257 aa, Homo sapiens
MVTGYPLPSAEYPDLRKHNNCMASHLTPAVYARLCDKTTPTGWTLDQCIQTGVDNPGHPFIKTVGMVAGDEETYEVFADLFDPVIQERHNGYDPRTMKHTTDLDASKIRSGYFDERYVLSSRVRTGRSIRGLSLPPACTRAERREVERVVVDALSGLKGDLAGRYYRLSEMTEAEQQQLIDDHFLFDKPVSPLLTAAGMARDWPDARGIWHNNEKSFLIWVNEEDHTRVISMEKGGNMKRVFERFCRGLKEVVVGIK

SEQ ID NO: 42350 - protein, 241 aa, Homo sapiens
MAGPFSRLLSARPGLRLLALAGAGSLAAGFLLRPEPVRAASERRRLYPPSAEYPDLRKHNNCMASHLTPAVYARLCDKTTPTGWTLDQCIQTGVDNPGHPFIKTVGMVAGDEETYEVFADLFDPVIQERHNGYDPRTMKHTTDLDASKIRSGYFDERYVLSSRVRTGRSIRGLSLPPACTRAERREVERVVVDALSGLKGDLAGRYYRLSEMTEAEQQQLIDDHFLFDKPVSPLLTAAGMA

SEQ ID NO: 42351 - protein, 419 aa, Homo sapiens
MASIFSKLLTGRNASLLFATMGTSVLTTGYLLNRQKVCAEVREQPRLFPPSADYPDLRKHNNCMAECLTPAIYAKLRNKVTPNGYTLDQCIQTGVDNPGHPFIKTVGMVAGDEESYEVFADLFDPVIKLRHNGYDPRVMKHTTDLDASKITQGQFDEHYVLSSRVRTGRSIRGLSLPPACTRAERREVENVAITALEGLKGDLAGRYYKLSEMTEQDQQRLIDDHFLFDKPVSPLLTCAGMARDWPDARGIWHNYDKTFLIWINEEDHTRVISMEKGGNMKRVFERFCRGLKEVERLIQERGWEFMWNERLGYILTCPSNLGTGLRAGVHVRIPKLSKDPRFSKILENLRLQKRGTGGVDTAAVADVYDISNIDRIGRSEVELVQIVIDGVNYLVDCEKKLERGQDIKVPPPLPQFGKK

SEQ ID NO: 42352 - protein, 419 aa, Homo sapiens; identical to SEQ ID NO: 42351

SEQ ID NO: 42353 - protein, 419 aa, Homo sapiens; identical to SEQ ID NO: 42351

SEQ ID NO: 42354 - protein, 170 aa, Homo sapiens
MASIFSKLLTGRNASLLFATMGTSVLTTGYLLNRQKVCAEVREQPRLFPPSADYPDLRKHNNCMAECLTPAIYAKLRNKVTPNGYTLDQCIQTGVDNPGHPFIKTVGMVAGDEESYEVFADLFDPVIKLRHNGYDPRVMKHTTDLDASKITQGQFDEHYVLSSRVRTGRS

SEQ ID NO: 42355 - protein, 381 aa, Homo sapiens
MPFGNTHNKFKLNYKPEEEYPDLSKHNNHMAKVLTLELYKKLRDKETPSGFTVDDVIQTGVDNPGHPFIMTVGCVAGDEESYEVFKELFDPIISDRHGGYKPTDKHKTDLNHENLKGGDDLDPNYVLSSRVRTGRSIKGYTLPPHCSRGERRAVEKLSVEALNSLTGEFKGKYYPLKSMTEKEQQQLIDDHFLFDKPVSPLLLASGMARDWPDARGIWHNDNKSFLVWVNEEDHLRVISMEKGGNMKEVFRRFCVGLQKIEEIFKKAGHPFMWNQHLGYVLTCPSNLGTGLRGGVHVKLAHLSKHPKFEEILTRLRLQKRGTGGVDTAAVGSVFDVSNADRLGSSEVEQVQLVVDGVKLMVEMEKKLEKGQSIDDMIPAQK

SEQ ID NO: 42356 - protein, 2442 aa, Homo sapiens
MAENLLDGPPNPKRAKLSSPGFSANDSTDFGSLFDLENDLPDELIPNGGELGLLNSGNLVPDAASKHKQLSELLRGGSGSSINPGIGNVSASSPVQQGLGGQAQGQPNSANMASLSAMGKSPLSQGDSSAPSLPKQAASTSGPTPAASQALNPQAQKQVGLATSSPATSQTGPGICMNANFNQTHPGLLNSNSGHSLINQASQGQAQVMNGSLGAAGRGRGAGMPYPTPAMQGASSSVLAETLTQVSPQMTGHAGLNTAQAGGMAKMGITGNTSPFGQPFSQAGGQPMGATGVNPQLASKQSMVNSLPTFPTDIKNTSVTNVPNMSQMQTSVGIVPTQAIATGPTADPEKRKLIQQQLVLLLHAHKCQRREQANGEVRACSLPHCRTMKNVLNHMTHCQAGKACQVAHCASSRQIISHWKNCTRHDCPVCLPLKNASDKRNQQTILGSPASGIQNTIGSVGTGQQNATSLSNPNPIDPSSMQRAYAALGLPYMNQPQTQLQPQVPGQQPAQPQTHQQMRTLNPLGNNPMNIPAGGITTDQQPPNLISESALPTSLGATNPLMNDGSNSGNIGTLSTIPTAAPPSSTGVRKGWHEHVTQDLRSHLVHKLVQAIFPTPDPAALKDRRMENLVAYAKKVEGDMYESANSRDEYYHLLAEKIYKIQKELEEKRRSRLHKQGILGNQPALPAPGAQPPVIPQAQPVRPPNGPLSLPVNRMQVSQGMNSFNPMSLGNVQLPQAPMGPRAASPMNHSVQMNSMGSVPGMAISPSRMPQPPNMMGAHTNNMMAQAPAQSQFLPQNQFPSSSGAMSVGMGQPPAQTGVSQGQVPGAALPNPLNMLGPQASQLPCPPVTQSPLHPTPPPASTAAGMPSLQHTTPPGMTPPQPAAPTQPSTPVSSSGQTPTPTPGSVPSATQTQSTPTVQAAAQAQVTPQPQTPVQPPSVATPQSSQQQPTPVHAQPPGTPLSQAAASIDNRVPTPSSVASAETNSQQPGPDVPVLEMKTETQAEDTEPDPGESKGEPRSEMMEEDLQGASQVKEETDIAEQKSEPMEVDEKKPEVKVEVKEEEESSSNGTASQSTSPSQPRKKIFKPEELRQALMPTLEALYRQDPESLPFRQPVDPQLLGIPDYFDIVKNPMDLSTIKRKLDTGQYQEPWQYVDDVWLMFNNAWLYNRKTSRVYKFCSKLAEVFEQEIDPVMQSLGYCCGRKYEFSPQTLCCYGKQLCTIPRDAAYYSYQNRYHFCEKCFTEIQGENVTLGDDPSQPQTTISKDQFEKKKNDTLDPEPFVDCKECGRKMHQICVLHYDIIWPSGFVCDNCLKKTGRPRKENKFSAKRLQTTRLGNHLEDRVNKFLRRQNHPEAGEVFVRVVASSDKTVEVKPGMKSRFVDSGEMSESFPYRTKALFAFEEIDGVDVCFFGMHVQEYGSDCPPPNTRRVYISYLDSIHFFRPRCLRTAVYHEILIGYLEYVKKLGYVTGHIWACPPSEGDDYIFHCHPPDQKIPKPKRLQEWYKKMLDKAFAERIIHDYKDIFKQATEDRLTSAKELPYFEGDFWPNVLEESIKELEQEEEERKKEESTAASETTEGSQGDSKNAKKKNNKKTNKNKSSISRANKKKPSMPNVSNDLSQKLYATMEKHKEVFFVIHLHAGPVINTLPPIVDPDPLLSCDLMDGRDAFLTLARDKHWEFSSLRRSKWSTLCMLVELHTQGQDRFVYTCNECKHHVETRWHCTVCEDYDLCINCYNTKSHAHKMVKWGLGLDDEGSSQGEPQSKSPQESRRLSIQRCIQSLVHACQCRNANCSLPSCQKMKRVVQHTKGCKRKTNGGCPVCKQLIALCCYHAKHCQENKCPVPFCLNIKHKLRQQQIQHRLQQAQLMRRRMATMNTRNVPQQSLPSPTSAPPGTPTQQPSTPQTPQPPAQPQPSPVSMSPAGFPSVARTQPPTTVSTGKPTSQVPAPPPPAQPPPAAVEAARQIEREAQQQQHLYRVNINNSMPPGRTGMGTPGSQMAPVSLNVPRPNQVSGPVMPSMPPGQWQQAPLPQQQPMPGLPRPVISMQAQAAVAGPRMPSVQPPRSISPSALQDLLRTLKSPSSPQQQQQVLNILKSNPQLMAAFIKQRTAKYVANQPGMQPQPGLQSQPGMQPQPGMHQQPSLQNLNAMQAGVPRPGVPPQQQAMGGLNPQGQALNIMNPGHNPNMASMNPQYREMLRRQLLQQQQQQQQQQQQQQQQQQGSAGMAGGMAGHGQFQQPQGPGGYPPAMQQQQRMQQHLPLQGSSMGQMAAQMGQLGQMGQPGLGADSTPNIQQALQQRILQQQQMKQQIGSPGQPNPMSPQQHMLSGQPQASHLPGQQIATSLSNQVRSPAPVQSPRPQSQPPHSSPSPRIQPQPSPHHVSPQTGSPHPGLAVTMASSIDQGHLGNPEQSAMLPQLNTPSRSALSSELSLVGDTTGDTLEKFVEGL

SEQ ID NO: 42357 - protein, 977 aa, Homo sapiens
MHVQEYGSDCPPPNTRRVYISYLDSIHFFRPRCLRTAVYHEILIGYLEYVKKLGYVTGHIWACPPSEGDDYIFHCHPPDQKIPKPKRLQEWYKKMLDKAFAERIIHDYKDIFKQATEDRLTSAKELPYFEGDFWPNVLEESIKELEQEEEERKKEESTAASETTEVFFVIHLHAGPVINTLPPIVDPDPLLSCDLMDGRDAFLTLARDKHWEFSSLRRSKWSTLCMLVELHTQGQDRFVYTCNECKHHVETRWHCTVCEDYDLCINCYNTKSHAHKMVKWGLGLDDEGSSQGEPQSKSPQESRRLSIQRCIQSLVHACQCRNANCSLPSCQKMKRVVQHTKGCKRKTNGGCPVCKQLIALCCYHAKHCQENKCPVPFCLNIKHKLRQQQIQHRLQQAQLMRRRMATMNTRNVPQQSLPSPTSAPPGTPTQQPSTPQTPQPPAQPQPSPVSMSPAGFPSVARTQPPTTVSTGKPTSQVPAPPPPAQPPPAAVEAARQIEREAQQQQHLYRVNINNSMPPGRTGMGTPGSQMAPVSLNVPRPNQVSGPVMPSMPPGQWQQAPLPQQQPMPGLPRPVISMQAQAAVAGPRMPSVQPPRSISPSALQDLLRTLKSPSSPQQQQQVLNILKSNPQLMAAFIKQRTAKYVANQPGMQPQPGLQSQPGMQPQPGMHQQPSLQNLNAMQAGVPRPGVPPQQQAMGGLNPQGQALNIMNPGHNPNMASMNPQYREMLRRQLLQQQQQQQQQQQQQQQQQQGSAGMAGGMAGHGQFQQPQGPGGYPPAMQQQQRMQQHLPLQGSSMGQMAAQMGQLGQMGQPGLGADSTPNIQQALQQRILQQQQMKQQIGSPGQPNPMSPQQHMLSGQPQASHLPGQQIATSLSNQVRSPAPVQSPRPQSQPPHSSPSPRIQPQPSPHHVSPQTGSPHPGLAVTMASSIDQGHLGNPEQSAMLPQLNTPSRSALSSELSLVGDTTGDTLEKFVEGL

SEQ ID NO: 42358 - protein, 2404 aa, Homo sapiens
MAENLLDGPPNPKRAKLSSPGFSANDSTDFGSLFDLENDLPDELIPNGGELGLLNSGNLVPDAASKHKQLSELLRGGSGSSINPGIGNVSASSPVQQGLGGQAQGQPNSANMASLSAMGKSPLSQGDSSAPSLPKQAASTSGPTPAASQALNPQAQKQVGLATSSPATSQTGPGICMNANFNQTHPGLLNSNSGHSLINQASQGQAQVMNGSLGAAGRGRGAGMPYPTPAMQGASSSVLAETLTQVSPQMTGHAGLNTAQAGGMAKMGITGNTSPFGQPFSQAGGQPMGATGVNPQLASKQSMVNSLPTFPTDIKNTSVTNVPNMSQMQTSVGIVPTQAIATGPTADPEKRKLIQQQLVLLLHAHKCQRREQANGEVRACSLPHCRTMKNVLNHMTHCQAGKACQAILGSPASGIQNTIGSVGTGQQNATSLSNPNPIDPSSMQRAYAALGLPYMNQPQTQLQPQVPGQQPAQPQTHQQMRTLNPLGNNPMNIPAGGITTDQQPPNLISESALPTSLGATNPLMNDGSNSGNIGTLSTIPTAAPPSSTGVRKGWHEHVTQDLRSHLVHKLVQAIFPTPDPAALKDRRMENLVAYAKKVEGDMYESANSRDEYYHLLAEKIYKIQKELEEKRRSRLHKQGILGNQPALPAPGAQPPVIPQAQPVRPPNGPLSLPVNRMQVSQGMNSFNPMSLGNVQLPQAPMGPRAASPMNHSVQMNSMGSVPGMAISPSRMPQPPNMMGAHTNNMMAQAPAQSQFLPQNQFPSSSGAMSVGMGQPPAQTGVSQGQVPGAALPNPLNMLGPQASQLPCPPVTQSPLHPTPPPASTAAGMPSLQHTTPPGMTPPQPAAPTQPSTPVSSSGQTPTPTPGSVPSATQTQSTPTVQAAAQAQVTPQPQTPVQPPSVATPQSSQQQPTPVHAQPPGTPLSQAAASIDNRVPTPSSVASAETNSQQPGPDVPVLEMKTETQAEDTEPDPGESKGEPRSEMMEEDLQGASQVKEETDIAEQKSEPMEVDEKKPEVKVEVKEEEESSSNGTASQSTSPSQPRKKIFKPEELRQALMPTLEALYRQDPESLPFRQPVDPQLLGIPDYFDIVKNPMDLSTIKRKLDTGQYQEPWQYVDDVWLMFNNAWLYNRKTSRVYKFCSKLAEVFEQEIDPVMQSLGYCCGRKYEFSPQTLCCYGKQLCTIPRDAAYYSYQNRYHFCEKCFTEIQGENVTLGDDPSQPQTTISKDQFEKKKNDTLDPEPFVDCKECGRKMHQICVLHYDIIWPSGFVCDNCLKKTGRPRKENKFSAKRLQTTRLGNHLEDRVNKFLRRQNHPEAGEVFVRVVASSDKTVEVKPGMKSRFVDSGEMSESFPYRTKALFAFEEIDGVDVCFFGMHVQEYGSDCPPPNTRRVYISYLDSIHFFRPRCLRTAVYHEILIGYLEYVKKLGYVTGHIWACPPSEGDDYIFHCHPPDQKIPKPKRLQEWYKKMLDKAFAERIIHDYKDIFKQATEDRLTSAKELPYFEGDFWPNVLEESIKELEQEEEERKKEESTAASETTEGSQGDSKNAKKKNNKKTNKNKSSISRANKKKPSMPNVSNDLSQKLYATMEKHKEVFFVIHLHAGPVINTLPPIVDPDPLLSCDLMDGRDAFLTLARDKHWEFSSLRRSKWSTLCMLVELHTQGQDRFVYTCNECKHHVETRWHCTVCEDYDLCINCYNTKSHAHKMVKWGLGLDDEGSSQGEPQSKSPQESRRLSIQRCIQSLVHACQCRNANCSLPSCQKMKRVVQHTKGCKRKTNGGCPVCKQLIALCCYHAKHCQENKCPVPFCLNIKHKLRQQQIQHRLQQAQLMRRRMATMNTRNVPQQSLPSPTSAPPGTPTQQPSTPQTPQPPAQPQPSPVSMSPAGFPSVARTQPPTTVSTGKPTSQVPAPPPPAQPPPAAVEAARQIEREAQQQQHLYRVNINNSMPPGRTGMGTPGSQMAPVSLNVPRPNQVSGPVMPSMPPGQWQQAPLPQQQPMPGLPRPVISMQAQAAVAGPRMPSVQPPRSISPSALQDLLRTLKSPSSPQQQQQVLNILKSNPQLMAAFIKQRTAKYVANQPGMQPQPGLQSQPGMQPQPGMHQQPSLQNLNAMQAGVPRPGVPPQQQAMGGLNPQGQALNIMNPGHNPNMASMNPQYREMLRRQLLQQQQQQQQQQQQQQQQQQGSAGMAGGMAGHGQFQQPQGPGGYPPAMQQQQRMQQHLPLQGSSMGQMAAQMGQLGQMGQPGLGADSTPNIQQALQQRILQQQQMKQQIGSPGQPNPMSPQQHMLSGQPQASHLPGQQIATSLSNQVRSPAPVQSPRPQSQPPHSSPSPRIQPQPSPHHVSPQTGSPHPGLAVTMASSIDQGHLGNPEQSAMLPQLNTPSRSALSSELSLVGDTTGDTLEKFVEGL

SEQ ID NO: 42359 - protein, 2472 aa, Homo sapiens
LRGAVAVAEIWPPPPPPGLRPPSPSAPARPLAARARSSPSQPAGPPTPVRALAGPAARARGCFREQVKMAENLLDGPPNPKRAKLSSPGFSANDSTDFGSLFDLENDLPDELIPNGGELGLLNSGNLVPDAASKHKQLSELLRGGSGSSINPGIGNVSASSPVQQGLGGQAQGQPNSANMASLSAMGKSPLSQGDSSAPSLPKQAASTSGPTPAASQALNPQAQKQVGLATSSPATSQTGPGICMNANFNQTHPGLLNSNSGHSLINQASQGQAQVMNGSLGAAGRGRGAGMPYPTPAMQGASSSVLAETLTQVSPQMTGHAGLNTAQAGGMAKMGITGNTSPFGQPFSQAGGQPMGATGVNPQLASKQSMVNSLPTFPTDIKNTSVTNVPNMSQMQTSVGIVPTQAIATGPTADPEKRKLIQQQLVLLLHAHKCQRREQANGEVRACSLPHCRTMKNVLNHMTHCQAGKACQAILGSPASGIQNTIGSVGTGQQNATSLSNPNPIDPSSMQRAYAALGLPYMNQPQTQLQPQVPGQQPAQPQTHQQMRTLNPLGNNPMNIPAGGITTDQQPPNLISESALPTSLGATNPLMNDGSNSGNIGTLSTIPTAAPPSSTGVRKGWHEHVTQDLRSHLVHKLVQAIFPTPDPAALKDRRMENLVAYAKKVEGDMYESANSRDEYYHLLAEKIYKIQKELEEKRRSRLHKQGILGNQPALPAPGAQPPVIPQAQPVRPPNGPLSLPVNRMQVSQGMNSFNPMSLGNVQLPQAPMGPRAASPMNHSVQMNSMGSVPGMAISPSRMPQPPNMMGAHTNNMMAQAPAQSQFLPQNQFPSSSGAMSVGMGQPPAQTGVSQGQVPGAALPNPLNMLGPQASQLPCPPVTQSPLHPTPPPASTAAGMPSLQHTTPPGMTPPQPAAPTQPSTPVSSSGQTPTPTPGSVPSATQTQSTPTVQAAAQAQVTPQPQTPVQPPSVATPQSSQQQPTPVHAQPPGTPLSQAAASIDNRVPTPSSVASAETNSQQPGPDVPVLEMKTETQAEDTEPDPGESKGEPRSEMMEEDLQGASQVKEETDIAEQKSEPMEVDEKKPEVKVEVKEEEESSSNGTASQSTSPSQPRKKIFKPEELRQALMPTLEALYRQDPESLPFRQPVDPQLLGIPDYFDIVKNPMDLSTIKRKLDTGQYQEPWQYVDDVWLMFNNAWLYNRKTSRVYKFCSKLAEVFEQEIDPVMQSLGYCCGRKYEFSPQTLCCYGKQLCTIPRDAAYYSYQNRYHFCEKCFTEIQGENVTLGDDPSQPQTTISKDQFEKKKNDTLDPEPFVDCKECGRKMHQICVLHYDIIWPSGFVCDNCLKKTGRPRKENKFSAKRLQTTRLGNHLEDRVNKFLRRQNHPEAGEVFVRVVASSDKTVEVKPGMKSRFVDSGEMSESFPYRTKALFAFEEIDGVDVCFFGMHVQEYGSDCPPPNTRRVYISYLDSIHFFRPRCLRTAVYHEILIGYLEYVKKLGYVTGHIWACPPSEGDDYIFHCHPPDQKIPKPKRLQEWYKKMLDKAFAERIIHDYKDIFKQATEDRLTSAKELPYFEGDFWPNVLEESIKELEQEEEERKKEESTAASETTEGSQGDSKNAKKKNNKKTNKNKSSISRANKKKPSMPNVSNDLSQKLYATMEKHKEVFFVIHLHAGPVINTLPPIVDPDPLLSCDLMDGRDAFLTLARDKHWEFSSLRRSKWSTLCMLVELHTQGQDRFVYTCNECKHHVETRWHCTVCEDYDLCINCYNTKSHAHKMVKWGLGLDDEGSSQGEPQSKSPQESRRLSIQRCIQSLVHACQCRNANCSLPSCQKMKRVVQHTKGCKRKTNGGCPVCKQLIALCCYHAKHCQENKCPVPFCLNIKHKLRQQQIQHRLQQAQLMRRRMATMNTRNVPQQSLPSPTSAPPGTPTQQPSTPQTPQPPAQPQPSPVSMSPAGFPSVARTQPPTTVSTGKPTSQVPAPPPPAQPPPAAVEAARQIEREAQQQQHLYRVNINNSMPPGRTGMGTPGSQMAPVSLNVPRPNQVSGPVMPSMPPGQWQQAPLPQQQPMPGLPRPVISMQAQAAVAGPRMPSVQPPRSISPSALQDLLRTLKSPSSPQQQQQVLNILKSNPQLMAAFIKQRTAKYVANQPGMQPQPGLQSQPGMQPQPGMHQQPSLQNLNAMQAGVPRPGVPPQQQAMGGLNPQGQALNIMNPGHNPNMASMNPQYREMLRRQLLQQQQQQQQQQQQQQQQQQGSAGMAGGMAGHGQFQQPQGPGGYPPAMQQQQRMQQHLPLQGSSMGQMAAQMGQLGQMGQPGLGADSTPNIQQALQQRILQQQQMKQQIGSPGQPNPMSPQQHMLSGQPQASHLPGQQIATSLSNQVRSPAPVQSPRPQSQPPHSSPSPRIQPQPSPHHVSPQTGSPHPGLAVTMASSIDQGHLGNPEQSAMLPQLNTPSRSALSSELSLVGDTTGDTLEKFVEGL

SEQ ID NO: 42360 - protein, 593 aa, Homo sapiens
MATSNNPRKFSEKIALHNQKQAEETAAFEEVMKDLSLTRAARLQLQKSQYLQLGPSRGQYYGGSLPNVNQIGSGTMDLPFQTPFQSSGLDTSRTTRHHGLVDRVYRERGRLGSPHRRPLSVDKHGRQADSCPYGTMYLSPPADTSWRRTNSDSALHQSTMTPTQPESFSSGSQDVHQKRVLLLTVPGMEETTSEADKNLSKQAWDTKKTGSRPKSCEVPGINIFPSADQENTTALIPATHNTGGSLPDLTNIHFPSPLPTPLDPEEPTFPALSSSSSTGNLAANLTHLGIGGAGQGMSTPGSSPQHRPAGVSPLSLSTEARRQQASPTLSPLSPITQAVAMDALSLEQQLPYAFFTQAGSQQPPPQPQPPPPPPPASQQPPPPPPPQAPVRLPPGGPLLPSASLTRGPQPPPLAVTVPSSLPQSPPENPGQPSMGIDIASAPALQQYRTSAGSPANQSPTSPVSNQGFSPGSSPQLEQFNMMENAISSSSLYSPGSTLNYSQAAMMGLTGSHGSLPDSQQLGYASHSGIPNIILTVTGESPPSLSKELTSHRGHLPDGPPVSGHAGTLPLSRPDGASPARGRPCSVPRQRPSL

SEQ ID NO: 42361 - protein, 634 aa, Homo sapiens
MATSNNPRKFSEKIALHNQKQAEETAAFEEVMKDLSLTRAARLQLQKSQYLQLGPSRGQYYGGSLPNVNQIGSGTMDLPFQTPFQSSGLDTSRTTRHHGLVDRVYRERGRLGSPHRRPLSVDKHGRQADSCPYGTMYLSPPADTSWRRTNSDSALHQSTMTPTQPESFSSGSQDVHQKRVLLLTVPGMEETTSEADKNLSKQAWDTKKTGSRPKSCEVPGINIFPSADQENTTALIPATHNTGGSLPDLTNIHFPSPLPTPLDPEEPTFPALSSSSSTGNLAANLTHLGIGGAGQGMSTPGSSPQHRPAGVSPLSLSTEARRQQASPTLSPLSPITQAVAMDALSLEQQLPYAFFTQAGSQQPPPQPQPPPPPPPASQQPPPPPPPQAPVRLPPGGPLLPSASLTRGPQPPPLAVTVPSSLPQSPPENPGQPSMGIDIASAPALQQYRTSAGSPANQSPTSPVSNQGFSPGSSPQHTSTLGSVFGDAYYEQQMAARQANALSHQLEQFNMMENAISSSSLYSPGSTLNYSQAAMMGLTGSHGSLPDSQQLGYASHSGIPNIILTVTGESPPSLSKELTSSLAGVGDVSFDSDSQFPLDELKIDPLTLDGLHMLNDPDMVLADPATEDTFRMDRL

SEQ ID NO: 42362 - protein, 650 aa, Homo sapiens
MATSNNPRKFSEKIALHNQKQAEETAAFEEVMKDLSLTRAARLQLQKSQYLQLGPSRGQYYGGSLPNVNQIGSGTMDLPFQPSGFLGEALAAAPVSLTPFQSSGLDTSRTTRHHGLVDRVYRERGRLGSPHRRPLSVDKHGRQADSCPYGTMYLSPPADTSWRRTNSDSALHQSTMTPTQPESFSSGSQDVHQKRVLLLTVPGMEETTSEADKNLSKQAWDTKKTGSRPKSCEVPGINIFPSADQENTTALIPATHNTGGSLPDLTNIHFPSPLPTPLDPEEPTFPALSSSSSTGNLAANLTHLGIGGAGQGMSTPGSSPQHRPAGVSPLSLSTEARRQQASPTLSPLSPITQAVAMDALSLEQQLPYAFFTQAGSQQPPPQPQPPPPPPPASQQPPPPPPPQAPVRLPPGGPLLPSASLTRGPQPPPLAVTVPSSLPQSPPENPGQPSMGIDIASAPALQQYRTSAGSPANQSPTSPVSNQGFSPGSSPQHTSTLGSVFGDAYYEQQMAARQANALSHQLEQFNMMENAISSSSLYSPGSTLNYSQAAMMGLTGSHGSLPDSQQLGYASHSGIPNIILTVTGESPPSLSKELTSSLAGVGDVSFDSDSQFPLDELKIDPLTLDGLHMLNDPDMVLADPATEDTFRMDRL

SEQ ID NO: 42363 - protein, 693 aa, Homo sapiens
MATSGANGPGSATASASNPRKFSEKIALQKQRQAEETAAFEEVMMDIGSTRLQAQKLRLAYTRSSHYGGSLPNVNQIGSGLAEFQSPLHSPLDSSRSTRHHGLVERVQRDPRRMVSPLRRYTRHIDSSPYSPAYLSPPPESSWRRTMAWGNFPAEKGQLFRLPSALNRTSSDSALHTSVMNPSPQDTYPGPTPPSILPSRRGGILDGEMDPKVPAIEENLLDDKHLLKPWDAKKLSSSSSRPRSCEVPGINIFPSPDQPANVPVLPPAMNTGGSLPDLTNLHFPPPLPTPLDPEETAYPSLSGGNSTSNLTHTMTHLGISRGMGLGPGYDAPGLHSPLSHPSLQSSLSNPNLQASLSSPQPQLQGSHSHPSLPASSLARHVLPTTSLGHPSLSAPALSSSSSSSSTSSPVLGAPSYPASTPGASPHHRRVPLSPLSLLAGPADARRSQQQLPKQFSPTMSPTLSSITQGVPLDTSKLSTDQRLPPYPYSSPSLVLPTQPHTPKSLQQPGLPSQSCSVQSSGGQPPGRQSHYGTPYPPGPSGHGQQSYHRPMSDFNLGNLEQFSMESPSASLVLDPPGFSEGPGFLGGEGPMGGPQDPHTFNHQNLTHCSRHGSGPNIILTGDSSPGFSKEIAAALAGVPGFEVSAAGLELGLGLEDELRMEPLGLEGLNMLSDPCALLPDPAVEESFRSDRLQ

SEQ ID NO: 42364 - protein, 619 aa, Homo sapiens
MAASPGSGSANPRKFSEKIALHTQRQAEETRAFEQLMTDLTLSRVQFQKLQQLRLTQYHGGSLPNVSQLRSSASEFQPSFHQADNVRGTRHHGLVERPSRNRFHPLHRRSGDKPGRQFDGSAFGANYSSQPLDESWPRQQPPWKDEKHPGFRLTSALNRTNSDSALHTSALSTKPQDPYGGGGQSAWPAPYMGFCDGENNGHGEVASFPGPLKEENLLNVPKPLPKQLWETKEIQSLSGRPRSCDVGGGNAFPHNGQNLGLSPFLGTLNTGGSLPDLTNLHYSTPLPASLDTTDHHFGSMSVGNSVNNIPAAMTHLGIRSSSGLQSSRSNPSIQATLNKTVLSSSLNNHPQTSVPNASALHPSLRLFSLSNPSLSTTNLSGPSRRRQPPVSPLTLSPGPEAHQGFSRQLSSTSPLAPYPTSQMVSSDRSQLSFLPTEAQAQVSPPPPYPAPQELTQPLLQQPRAPEAPAQQPQAASSLPQSDFQLLPAQGSSLTNFFPDVGFDQQSMRPGPAFPQQVPLVQQGSRELQDSFHLRPSPYSNCGSLPNTILPEDSSTSLFKDLNSALAGLPEVSLNVDTPFPLEEELQIEPLSLDGLNMLSDSSMGLLDPSVEETFRADRL

SEQ ID NO: 42365 - protein, 618 aa, Homo sapiens
MAASPGSGSANPRKFSEKIALHTQRQAEETRAFEQLMTDLTLSRVQFQKLQQLRLTQYHGGSLPNVSQLRSSASEFQPSFHQADNVRGTRHHGLVERPSRNRFHPLHRRSGDKPGRQFDGSAFGANYSSQPLDESWPRQQPPWKDEKHPGFRLTSALNRTNSDSALHTSALSTKPQDPYGGGGQSAWPAPYMGFCDGENNGHGEVASFPGPLKEENLLNVPKPLPKQLWETKEIQSLSGRPRSCDVGGGNAFPHNGQNLGLSPFLGTLNTGGSLPDLTNLHYSTPLPASLDTTDHHFGSMSVGNSVNNIPAAMTHLGIRSSSGLQSSRSNPSIQATLNKTVLSSSLNNHPQTSVPNASALHPSLRLFSLSNPSLSTTNLSGPSRRRQPPVSPLTLSPGPEAHQGFSRQLSSTSPLAPYPTSQMVSSDRSQLSFLPTEAQAQVSPPPPYPAPQELTQPLLQQPRAPEAPAQQPQAASSLPQSDFQLLPAQGSSLTNFFPDVGFDQQSMRPGPAFPQQVPLVQQGSRELQDSFHLRPSPYSNCGSLPNTILPDSSTSLFKDLNSALAGLPEVSLNVDTPFPLEEELQIEPLSLDGLNMLSDSSMGLLDPSVEETFRADRL

SEQ ID NO: 42366 - protein, 582 aa, Homo sapiens
MTDLTLSRVQFQKLQQLRLTQYHGGSLPNVSQLRSSASEFQPSFHQADNVRGTRHHGLVERPSRNRFHPLHRRSGDKPGRQFDGSAFGANYSSQPLDESWPRQQPPWKDEKHPGFRLTSALNRTNSDSALHTSALSTKPQDPYGGGGQSAWPAPYMGFCDGENNGHGEVASFPGPLKEENLLNVPKPLPKQLWETKEIQSLSGRPRSCDVGGGNAFPHNGQNLGLSPFLGTLNTGGSLPDLTNLHYSTPLPASLDTTDHHFGSMSVGNSVNNIPAAMTHLGIRSSSGLQSSRSNPSIQATLNKTVLSSSLNNHPQTSVPNASALHPSLRLFSLSNPSLSTTNLSGPSRRRQPPVSPLTLSPGPEAHQGFSRQLSSTSPLAPYPTSQMVSSDRSQLSFLPTEAQAQVSPPPPYPAPQELTQPLLQQPRAPEAPAQQPQAASSLPQSDFQLLPAQGSSLTNFFPDVGFDQQSMRPGPAFPQQVPLVQQGSRELQDSFHLRPSPYSNCGSLPNTILPDSSTSLFKDLNSALAGLPEVSLNVDTPFPLEEELQIEPLSLDGLNMLSDSSMGLLDPSVEETFRADRL

SEQ ID NO: 42367 - protein, 223 aa, Homo sapiens
MTWRHHVRLLFTVSLALQIINLGNSYQREKHNGGREEVTKVATQKHRQSPLNWTSSHFGEVTGSAEGWGPEEPLPYSRAFGEGASARPRCCRNGGTCVLGSFCVCPAHFTGRYCEHDQRRSECGALEHGAWTLRACHLCRCIFGALHCLPLQTPDRCDPKDFLASHAHGPSAGGAPSLLLLLPCALLHRLLRPDAPAHPRSLVPSVLQRERRPCGRPGLGHRL

SEQ ID NO: 42368 - protein, 836 aa, Homo sapiens
MTATVENLTFQKDTLGNAVDKNRRHGSTEPLVLAWSSQFRRLTWGCALDALHRSPCVAASQHGVTHLIRSSRTPHSTRCRKEDAQPGHHGNGAASVTAQARGQRSVLQVPLPVPRSCLFSESFVVSVSSQSRFLASVPGTGVQRSTAADMAASTAAGKQRIPKVAKVKNKAPAEVQITAEQLLREAKERELELLPPPPQQKITDEEELNDYKLRKRKTFEDNIRKNRTVISNWIKYAQWEESLKEIQRARSIYERALDVDYRNITLWLKYAEMEMKNRQVNHARNIWDRAITTLPRVNQFWYKYTYMEEMLGNVAGARQVFERWMEWQPEEQAWHSYINFELRYKEVDRARTIYERFVLVHPDVKNWIKYARFEEKHAYFAHARKVYERAVEFFGDEHMDEHLYVAFAKFEENQKEFERVRVIYKYALDRISKQDAQELFKNYTIFEKKFGDRRGIEDIIVSKRRFQYEEEVKANPHNYDAWFDYLRLVESDAEAEAVREVYERAIANVPPIQEKRHWKRYIYLWINYALYEELEAKDPERTRQVYQASLELIPHKKFTFAKMWILYAQFEIRQKNLSLARRALGTSIGKCPKNKLFKVYIELELQLREFDRCRKLYEKFLEFGPENCTSWIKFAELETILGDIDRARAIYELAISQPRLDMPEVLWKSYIDFEIEQEETERTRNLYRRLLQRTQHVKVWISFAQFELSSGKEGSLTKCRQIYEEANKTMRNCEEKEERLMLLESWRSFEEEFGTASDKERVDKLMPEKVKKRRKVQTDDGSDAGWEEYFDYIFPEDAANQPNLKLLAMAKLWKKQQQEKEDAEHHPDEDVDESES

SEQ ID NO: 42369 - protein, 848 aa, Homo sapiens
MTATVENLTFQKDTLGNAVDKNTSRLELRSYSLAGRHGSTEPLVLAWSSQFRRLTWGCALDALHRSPCVAASQHGVTHLIRSSRTPHSTRCRKEDAQPGHHGNGAASVTAQARGQRSVLQVPLPVPRSCLFSESFVVSVSSQSRFLASVPGTGVQRSTAADMAASTAAGKQRIPKVAKVKNKAPAEVQITAEQLLREAKERELELLPPPPQQKITDEEELNDYKLRKRKTFEDNIRKNRTVISNWIKYAQWEESLKEIQRARSIYERALDVDYRNITLWLKYAEMEMKNRQVNHARNIWDRAITTLPRVNQFWYKYTYMEEMLGNVAGARQVFERWMEWQPEEQAWHSYINFELRYKEVDRARTIYERFVLVHPDVKNWIKYARFEEKHAYFAHARKVYERAVEFFGDEHMDEHLYVAFAKFEENQKEFERVRVIYKYALDRISKQDAQELFKNYTIFEKKFGDRRGIEDIIVSKRRFQYEEEVKANPHNYDAWFDYLRLVESDAEAEAVREVYERAIANVPPIQEKRHWKRYIYLWINYALYEELEAKDPERTRQVYQASLELIPHKKFTFAKMWILYAQFEIRQKNLSLARRALGTSIGKCPKNKLFKVYIELELQLREFDRCRKLYEKFLEFGPENCTSWIKFAELETILGDIDRARAIYELAISQPRLDMPEVLWKSYIDFEIEQEETERTRNLYRRLLQRTQHVKVWISFAQFELSSGKEGSLTKCRQIYEEANKTMRNCEEKEERLMLLESWRSFEEEFGTASDKERVDKLMPEKVKKRRKVQTDDGSDAGWEEYFDYIFPEDAANQPNLKLLAMAKLWKKQQQEKEDAEHHPDEDVDESES

SEQ ID NO: 42370 - protein, 2341 aa, Homo sapiens
MKNIYCLIPKLVNFATLGCLWISVVQCTVLNSCLKSCVTNLGQQLDLGTPHNLSEPCIQGCHFWNSVDQKNCALKCNDTYATVCERESCEVGCSSAEGAYEEEVLENADLPTAPFASSIGSHNMTLRWKSANFSGVKYIIQWKYAQLLGSWTYTKTVSRPSYVVKPLHPFTEYIFRVVWIFTAQLQLYSPPSPSYRTHPHGVPETAPLIRNIESSSPDTVEVSWDPPQFPGGPILGYNLRLISKNQKLDAGTQRTSFQFYSTLPNTIYRFSIAAVNEVGEGPEAESSITTSSSAVQQEEQWLFLSRKTSLRKRSLKHLVDEAHCLRLDAIYHNITGISVDVHQQIVYFSEGTLIWAKKAANMSDVSDLRIFYRGSGLISSISIDWLYQRMYFIMDELVCVCDLENCSNIEEITPPSISAPQKIVADSYNGYVFYLLRDGIYRADLPVPSGRCAEAVRIVESCTLKDFAIKPQAKRIIYFNDTAQVFMSTFLDGSASHLILPRIPFADVKSFACENNDFLVTDGKVIFQQDALSFNEFIVGCDLSHIEEFGFGNLVIFGSSSQLHPLPGRPQELSVLFGSHQALVQWKPPALAIGASPSAWQNWTYEVKVSTQDPPEVTHIFLNISGTMLNVPELQSAMKYKVSVRASSPKRPGPWSEPSVGTTLVPASEPPFIMAVKEDGLWSKPLNSFGPGEFLSSDIGNVSDMDWYNNSLYYSDTKGDVFVWLLNGTDISENYHLPSIAGAGALAFEWLGHFLYWAGKTYVIQRQSVLTGHTDIVTHVKLLVNDMVVDSVGGYLYWTTLYSVESTRLNGESSLVLQTQPWFSGKKVIALTLDLSDGLLYWLVQDSQCIHLYTAVLRGQSTGDTTITEFAAWSTSEISQNALMYYSGRLFWINGFRIITTQEIGQKTSVSVLEPARFNQFTIIQTSLKPLPGNFSFTPKVIPDSVQESSFRIEGNASSFQILWNGPPAVDWGVVFYSVEFSAHSKFLASEQHSLPVFTVEGLEPYALFNLSVTPYTYWGKGPKTSLSLRAPETVPSAPENPRIFILPSGKCCNKNEVVVEFRWNKPKHENGVLTKFEIFYNISNQSITNKTCEDWIAVNVTPSVMSFQLEGMSPRCFIAFQVRAFTSKGPGPYADVVKSTTSEINPFPHLITLLGNKIVFLDMDQNQVVWTFSAERVISAVCYTADNEMGYYAEGDSLFLLHLHNRSSSELFQDSLVFDITVITIDWISRHLYFALKESQNGMQVFDVDLEHKVKYPREVKIHNRNSTIISFSVYPLLSRLYWTEVSNFGYQMFYYSIISHTLHRILQPTATNQQNKRNQCSCNVTEFELSGAMAIDTSNLEKPLIYFAKAQEIWAMDLEGCQCWRVITVPAMLGKTLVSLTVDGDLIYWIITAKDSTQIYQAKKGNGAIVSQVKALRSRHILAYSSVMQPFPDKAFLSLASDTVEPTILNATNTSLTIRLPLAKTNLTWYGITSPTPTYLVYYAEVNDRKNSSDLKYRILEFQDSIALIEDLQPFSTYMIQIAVKNYYSDPLEHLPPGKEIWGKTKNGVPEAVQLINTTVRSDTSLIISWRESHKPNGPKESVRYQLAISHLALIPETPLRQSEFPNGRLTLLVTRLSGGNIYVLKVLACHSEEMWCTESHPVTVEMFNTPEKPYSLVPENTSLQFNWKAPLNVNLIRFWVELQKWKYNEFYHVKTSCSQGPAYVCNITNLQPYTSYNVRVVVVYKTGENSTSLPESFKTKAGVPNKPGIPKLLEGSKNSIQWEKAEDNGCRITYYILEIRKSTSNNLQNQNLRWKMTFNGSCSSVCTWKSKNLKGIFQFRVVAANNLGFGEYSGISENIILVGDDFWIPETSFILTIIVGIFLVVTIPLTFVWHRRLKNQKSAKEGVTVLINEDKELAELRGLAAGVGLANACYAIHTLPTQEEIENLPAFPREKLTLRLLLGSGAFGEVYEGTAVDILGVGSGEIKVAVKTLKKGSTDQEKIEFLKEAHLMSKFNHPNILKQLGVCLLNEPQYIILELMEGGDLLTYLRKARMATFYGPLLTLVDLVDLCVDISKGCVYLERMHFIHRDLAARNCLVSVKDYTSPRIVKIGDFGLARDIYKNDYYRKRGEGLLPVRWMAPESLMDGIFTTQSDVWSFGILIWEILTLGHQPYPAHSNLDVLNYVQTGGRLEPPRNCPDDLWNLMTQCWAQEPDQRPTFHRIQDQLQLFRNFFLNSIYKSRDEANNSGVINESFEGEDGDVICLNSDDIMPVALMETKNREGLNYMVLATECGQGEEKSEGPLGSQESESCGLRKEEKEPHADKDFCQEKQVAYCPSGKPEGLNYACLTHSGYGDGSD

SEQ ID NO: 42371 - protein, 2347 aa, Homo sapiens
MKNIYCLIPKLVNFATLGCLWISVVQCTVLNSCLKSCVTNLGQQLDLGTPHNLSEPCIQGCHFWNSVDQKNCALKCRESCEVGCSSAEGAYEEEVLENADLPTAPFASSIGSHNMTLRWKSANFSGVKYIIQWKYAQLLGSWTYTKTVSRPSYVVKPLHPFTEYIFRVVWIFTAQLQLYSPPSPSYRTHPHGVPETAPLIRNIESSSPDTVEVSWDPPQFPGGPILGYNLRLISKNQKLDAGTQRTSFQFYSTLPNTIYRFSIAAVNEVGEGPEAESSITTSSSAVQQEEQWLFLSRKTSLRKRSLKHLVDEAHCLRLDAIYHNITGISVDVHQQIVYFSEGTLIWAKKAANMSDVSDLRIFYRGSGLISSISIDWLYQRMYFIMDELVCVCDLENCSNIEEITPPSISAPQKIVADSYNGYVFYLLRDGIYRADLPVPSGRCAEAVRIVESCTLKDFAIKPQAKRIIYFNDTAQVFMSTFLDGSASHLILPRIPFADVKSFACENNDFLVTDGKVIFQQDALSFNEFIVGCDLSHIEEFGFGNLVIFGSSSQLHPLPGRPQELSVLFGSHQALVQWKPPALAIGANVILISDIIELFELGPSAWQNWTYEVKVSTQDPPEVTHIFLNISGTMLNVPELQSAMKYKVSVRASSPKRPGPWSEPSVGTTLVPASEPPFIMAVKEDGLWSKPLNSFGPGEFLSSDIGNVSDMDWYNNSLYYSDTKGDVFVWLLNGTDISENYHLPSIAGAGALAFEWLGHFLYWAGKTYVIQRQSVLTGHTDIVTHVKLLVNDMVVDSVGGYLYWTTLYSVESTRLNGESSLVLQTQPWFSGKKVIALTLDLSDGLLYWLVQDSQCIHLYTAVLRGQSTGDTTITEFAAWSTSEISQNALMYYSGRLFWINGFRIITTQEIGQKTSVSVLEPARFNQFTIIQTSLKPLPGNFSFTPKVIPDSVQESSFRIEGNASSFQILWNGPPAVDWGVVFYSVEFSAHSKFLASEQHSLPVFTVEGLEPYALFNLSVTPYTYWGKGPKTSLSLRAPETVPSAPENPRIFILPSGKCCNKNEVVVEFRWNKPKHENGVLTKFEIFYNISNQSITNKTCEDWIAVNVTPSVMSFQLEGMSPRCFIAFQVRAFTSKGPGPYADVVKSTTSEINPFPHLITLLGNKIVFLDMDQNQVVWTFSAERVISAVCYTADNEMGYYAEGDSLFLLHLHNRSSSELFQDSLVFDITVITIDWISRHLYFALKESQNGMQVFDVDLEHKVKYPREVKIHNRNSTIISFSVYPLLSRLYWTEVSNFGYQMFYYSIISHTLHRILQPTATNQQNKRNQCSCNVTEFELSGAMAIDTSNLEKPLIYFAKAQEIWAMDLEGCQCWRVITVPAMLAGKTLVSLTVDGDLIYWIITAKDSTQIYQAKKGNGAIVSQVKALRSRHILAYSSVMQPFPDKAFLSLASDTVEPTILNATNTSLTIRLPLAKTNLTWYGITSPTPTYLVYYAEVNDRKNSSDLKYRILEFQDSIALIEDLQPFSTYMIQIAVKNYYSDPLEHLPPGKEIWGKTKNGVPEAVQLINTTVRSDTSLIISWRESHKPNGPKESVRYQLAISHLALIPETPLRQSEFPNGRLTLLVTRLSGGNIYVLKVLACHSEEMWCTESHPVTVEMFNTPEKPYSLVPENTSLQFNWKAPLNVNLIRFWVELQKWKYNEFYHVKTSCSQGPAYVCNITNLQPYTSYNVRVVVVYKTGENSTSLPESFKTKAGVPNKPGIPKLLEGSKNSIQWEKAEDNGCRITYYILEIRKSTSNNLQNQNLRWKMTFNGSCSSVCTWKSKNLKGIFQFRVVAANNLGFGEYSGISENIILVGDDFWIPETSFILTIIVGIFLVVTIPLTFVWHRRLKNQKSAKEGVTVLINEDKELAELRGLAAGVGLANACYAIHTLPTQEEIENLPAFPREKLTLRLLLGSGAFGEVYEGTAVDILGVGSGEIKVAVKTLKKGSTDQEKIEFLKEAHLMSKFNHPNILKQLGVCLLNEPQYIILELMEGGDLLTYLRKARMATFYGPLLTLVDLVDLCVDISKGCVYLERMHFIHRDLAARNCLVSVKDYTSPRIVKIGDFGLARDIYKNDYYRKRGEGLLPVRWMAPESLMDGIFTTQSDVWSFGILIWEILTLGHQPYPAHSNLDVLNYVQTGGRLEPPRNCPDDLWNLMTQCWAQEPDQRPTFHRIQDQLQLFRNFFLNSIYKSRDEANNSGVINESFEGEDGDVICLNSDDIMPVALMETKNREGLNYMVLATECGQGEEKSEGPLGSQESESCGLRKEEKEPHADKDFCQEKQVAYCPSGKPEGLNYACLTHSGYGDGSD

SEQ ID NO: 42372 - protein, 97 aa, Homo sapiens
WKYNEFYHVKTSCSQGPAYVCNITNLQPYTSYNVRVVVVYKTGENSTSLPESFKTKAGVPNKPGIPKLLEGSKNSIQWEKAEDNGCRITYYILEIRD

SEQ ID NO: 42373 - protein, 674 aa, Homo sapiens
MTSNGVALLNFYNMPSTPSFVGCLQDIKIDWNHITLENISSGSSLNVKAGCVRKDWCESQPCQSRGRCINLWLSYQCDCHRPYEGPNCLREYVAGRFGQDDSTGYVIFTLDESYGDTISLSMFVRTLQPSGLLLALENSTYQYIRVWLERGRLAMLTPNSPKLVVKFVLNDGNVHLISLKIKPYKIELYQSSQNLGFISASTWKIEKGDVIYIGGLPDKQETELNGGFFKGCIQDVRLNNQNLEFFPNPTNNASLNPVLVNVTQGCAGDNSCKSNPCHNGGVCHSRWDDFSCSCPALTSGKACEEVQWCGFSPCPHGAQCQPVLQGFECIANAVFNGQSGQILFRSNGNITRELTNITFGFRTRDANVIILHAEKEPEFLNISIQDSRLFFQLQSGNSFYMLSLTSLQSVNDGTWHEVTLSMTDPLSQTSRWQMEVDNETPFVTSTIATGSLNFLKDNTDIYVGDRAIDNIKGLQGCLSTIEIGGIYLSYFENVHGFINKPQEEQFLKISTNSVVTGCLQLNVCNSNPCLHGGNCEDIYSSYHCSCPLGWSGKHCELNIDECFSNPCIHGNCSDRVAAYHCTCEPGYTGVNCEVDIDNCQSHQCANGATCISHTNGYSCLCFGNFTGKFCRQSRLPSTVCGNEKTNLTCYNGGNCTEFQTELKCMCRPGFTGEW

SEQ ID NO: 42374 - protein, 1406 aa, Homo sapiens
MALKNINYLLIFYLSFSLLIYIKNSFCNKNNTRCLSNSCQNNSTCKDFSKDNDCSCSDTANNLDKDCDNMKDPCFSNPCQGSATCVNTPGERSFLCKCPPGYSGTICETTIGSCGKNSCQHGGICHQDPIYPVCICPAGYAGRFCEIDHDECASSPCQNGAVCQDGIDGYSCFCVPGYQGRHCDLEVDECASDPCKNEATCLNEIGRYTCICPHNYSGVNCELEIDECWSQPCLNGATCQDALGAYFCDCAPGFLGDHCELNTDECASQPCLHGGLCVDGENRYSCNCTGSGFTGTHCETLMPLCWSKPCHNNATCEDSVDNYTCHCWPGYTGAQCEIDLNECNSNPCQSNGECVELSSEKQYGRITGLPSSFSYHEASGYVCICQPGFTGIHCEEDVNECSSNPCQNGGTCENLPGNYTCHCPFDNLSRTFYGGRDCSDILLGCTHQQCLNNGTCIPHFQDGQHGFSCLCPSGYTGSLCEIATTLSFEGDGFLWVKSGSVTTKGSVCNIALRFQTVQPMALLLFRSNRDVFVKLELLSGYIHLSIQVNNQSKVLLFISHNTSDGEWHFVEVIFAEAVTLTLIDDSCKEKCIAKAPTPLESDQSICAFQNSFLGGLPVGMTSNGVALLNFYNMPSTPSFVGCLQDIKIDWNHITLENISSGSSLNVKAGCVRKDWCESQPCQSRGRCINLWLSYQCDCHRPYEGPNCLREYVAGRFGQDDSTGYVIFTLDESYGDTISLSMFVRTLQPSGLLLALENSTYQYIRVWLERGRLAMLTPNSPKLVVKFVLNDGNVHLISLKIKPYKIELYQSSQNLGFISASTWKIEKGDVIYIGGLPDKQETELNGGFFKGCIQDVRLNNQNLEFFPNPTNNASLNPVLVNVTQGCAGDNSCKSNPCHNGGVCHSRWDDFSCSCPALTSGKACEEVQWCGFSPCPHGAQCQPVLQGFECIANAVFNGQSGQILFRSNGNITRELTNITFGFRTRDANVIILHAEKEPEFLNISIQDSRLFFQLQSGNSFYMLSLTSLQSVNDGTWHEVTLSMTDPLSQTSRWQMEVDNETPFVTSTIATGSLNFLKDNTDIYVGDRAIDNIKGLQGCLSTIEIGGIYLSYFENVHGFINKPQEEQFLKISTNSVVTGCLQLNVCNSNPCLHGGNCEDIYSSYHCSCPLGWSGKHCELNIDECFSNPCIHGNCSDRVAAYHCTCEPGYTGVNCEVDIDNCQSHQCANGATCISHTNGYSCLCFGNFTGKFCRQSRLPSTVCGNEKTNLTCYNGGNCTEFQTELKCMCRPGFTGEWCEKDIDECASDPCVNGGLCQDLLNKFQCLCDVAFAGERCEVDLADDLISDIFTTIGSVTVALLLILLLAIVASVVTSNKRATQGTYSPSRQEKEGSRVEMWNLMPPPAMERLI

SEQ ID NO: 42375 - protein, 941 aa, Homo sapiens
MIRNSLCQPSRCLDGYLFFNRKMFGARTHGFHILMAMLIGIHCEEDVNECSSNPCQNGGTCENLPGNYTCHCPFDNLSRTFYGGRDCSDILLGCTHQQCLNNGTCIPHFQDGQHGFSCLCPSGYTGSLCEIATTLSFEGDGFLWVKSGSVTTKGSVCNIALRFQTVQPMALLLFRSNRDVFVKLELLSGYIHLSIQVNNQSKVLLFISHNTSDGEWHFVEVIFAEAVTLTLIDDSCKEKCIAKAPTPLESDQSICAFQNSFLGGLPVGMTSNGVALLNFYNMPSTPSFVGCLQDIKIDWNHITLENISSGSSLNVKAGCVRKDWCESQPCQSRGRCINLWLSYQCDCHRPYEGPNCLREYVAGRFGQDDSTGYVIFTLDESYGDTISLSMFVRTLQPSGLLLALENSTYQYIRVWLERGRLAMLTPNSPKLVVKFVLNDGNVHLISLKIKPYKIELYQSSQNLGFISASTWKIEKGDVIYIGGLPDKQETELNGGFFKGCIQDVRLNNQNLEFFPNPTNNASLNPVLVNVTQGCAGDNSCKSNPCHNGGVCHSRWDDFSCSCPALTSGKACEEVQWCGFSPCPHGAQCQPVLQGFECIANAVFNGQSGQILFRSNGNITRELTNITFGFRTRDANVIILHAEKEPEFLNISIQDSRLFFQLQSGNSFYMLSLTSLQSVNDGTWHEVTLSMTDPLSQTSRWQMEVDNETPFVTSTIATGSLNFLKDNTDIYVGDRAIDNIKGLQGCLSTIEIGGIYLSYFENVHGFINKPQEEQFLKISTNSVVTGCLQLNVCNSNPCLHGGNCEDIYSSYHCSCPLGWSGKHCELNIDECFSNPCIHGNCSDRVAAYHCTCEPGYTGVNCEVDIDNCQSHQCANGATCISHTNGYSCLCFGNFTGKFCRQSRLPSTVCGNEKTNLTCYNGGNCTEFQTELKCMCRPGFTGE

SEQ ID NO: 42376 - protein, 42 aa, Homo sapiens
EKDIDECASDPCVNGGLCQDLLNKFQCLCDVAFAGERCEVDY

SEQ ID NO: 42377 - protein, 1382 aa, Homo sapiens
MKDPCFSNPCQGSATCVNTPGERSFLCKCPPGYSGTICETTIGSCGKNSCQHGGICHQDPIYPVCICPAGYAGRFCEIDHDECASSPCQNGAVCQDGIDGYSCFCVPGYQGRHCDLEVDECASDPCKNEATCLNEIGRYTCICPHNYSGVNCELEIDECWSQPCLNGATCQDALGAYFCDCAPGFLGDHCELNTDECASQPCLHGGLCVDGENRYSCNCTGSGFTGTHCETLMPLCWSKPCHNNATCEDSVDNYTCHCWPGYTGAQCEIDLNECNSNPCQSNGECVELSSEKQYGRITGLPSSFSYHEASGYVCICQPGFTGIHCEEDVNECSSNPCQNGGTCENLPGNYTCHCPFDNLSRTFYGGRDCSDILLGCTHQQCLNNGTCIPHFQDGQHGFSCLCPSGYTGSLCEIATTLSFEGDGFLWVKSGSVTTKGSVCNIALRFQTVQPMALLLFRSNRDVFVKLELLSGYIHLSIQVNNQSKVLLFISHNTSDGEWHFVEVIFAEAVTLTLIDDSCKEKCIAKAPTPLESDQSICAFQNSFLGGLPVGMTSNGVALLNFYNMPSTPSFVGCLQDIKIDWNHITLENISSGSSLNVKAGCVRKDWCESQPCQSRGRCINLWLSYQCDCHRPYEGPNCLREYVAGRFGQDDSTGYVIFTLDESYGDTISLSMFVRTLQPSGLLLALENSTYQYIRVWLERGRLAMLTPNSPKLVVKFVLNDGNVHLISLKIKPYKIELYQSSQNLGFISASTWKIEKGDVIYIGGLPDKQETELNGGFFKGCIQDVRLNNQNLEFFPNPTNNASLNPVLVNVTQGCAGDNSCKRQTNVGRALTELGSRGPKYQVSLFRFCVGSWATGNTFFLSSIKPGSNPCHNGGVCHSRWDDFSCSCPALTSGKACEEVQWCGFSPCPHGAQCQPVLQGFECIANAVFNGQSGQILFRSNGNITRELTNITFGFRTRDANVIILHAEKEPEFLNISIQDSRLFFQLQSGNSFYMLSLTSLQSVNDGTWHEVTLSMTDPLSQTSRWQMEVDNETPFVTSTIATGSLNFLKDNTDIYVGDRAIDNIKGLQGCLSTIEIGGIYLSYFENVHGFINKPQEEQFLKISTNSVVTGCLQLNVCNSNPCLHGGNCEDIYSSYHCSCPLGWSGKHCELNIDECFSNPCIHGNCSDRVAAYHCTCEPGYTGVNCEVDIDNCQSHQCANGATCISHTNGYSCLCFGNFTGKFCRQSRLPSTVCGNEKTNLTCYNGGNCTEFQTELKCMCRPGFTGEWCEKDIDECASDPCVNGGLCQDLLNKFQCLCDVAFAGERCEVDLADDLISDIFTTIGSVTVALLLILLLAIVASVVTSNKRATQGTYSPSRQEKEGSRVEMWNLMPPPAMERLI

SEQ ID NO: 42378 - protein, 870 aa, Homo sapiens
MALKNINYLLIFYLSFSLLIYIKNSFCNKNNTRCLSNSCQNNSTCKDFSKDNDCSCSDTANNLDKDCDNMKDPCFSNPCQGSATCVNTPGERSFLCKCPPGYSGTICETTIGSCGKNSCQHGGICHQDPIYPVCICPAGYAGRFCEIDHDECASSPCQNGAVCQDGIDGYSCFCVPGYQGRHCDLEVDECASDPCKNEATCLNEIGRYTCICPHNYSGVNCELEIDECWSQPCLNGATCQDALGAYFCDCAPGFLGDHCELNTDECASQPCLHGGLCVDGENRYSCNCTGSGFTGTHCETLMPLCWSKPCHNNATCEDSVDNYTCHCWPGYTGAQCEIDLNECNSNPCQSNGECVELSSEKQYGRITGLPSSFSYHEASGYVCICQPGFTGIHCEEDVNECSSNPCQNGGTCENLPGNYTCHCPFDNLSRTFYGGRDCSDILLGCTHQQCLNNGTCIPHFQDGQHGFSCLCPSGYTGSLCEIATTLSFEGDGFLWVKSGSVTTKGSVCNIALRFQTVQPMALLLFRSNRDVFVKLELLSGYIHLSIQVNNQSKVLLFISHNTSDGEWHFVEVIFAEAVTLTLIDDSCKEKCIAKAPTPLESDQSICAFQNSFLGGLPVGMTSNGVALLNFYNMPSTPSFVGCLQDIKIDWNHITLENISSGSSLNVKAGCVRKDWCESQPCQSRGRCINLWLSYQCDCHRPYEGPNCLRGKFCRQSRLPSTVCGNEKTNLTCYNGGNCTEFQTELKCMCRPGFTGEWCEKDIDECASDPCVNGGLCQDLLNKFQCLCDVAFAGERCEVDLADDLISDIFTTIGSVTVALLLILLLAIVASVVTSNKRATQGTYSPSRQEKEGSRVEMWNLMPPPAMERLI

SEQ ID NO: 42379 - protein, 293 aa, Homo sapiens
MPLCWSKPCHNNATCEDSVDNYTCHCWPGYTGAQCEIDLNECNSNPCQSNGECVELSSEKQYGRITGLPSSFSYHEASGYVCICQPGFTGIHCEEDVNECSSNPCQNGGTCENLPGNYTCHCPFDNLSRTFYGGRDCSDILLGCTHQQCLNNGTCIPHFQDGQHGFSCLCPSGYTGSLCEIATTLSFEGDGFLWVKSGSVTTKGSVCNIALRFQTVQPMALLLFRSNRDVFVKLELLSGYIHLSIQVNNQSKVLLFISHNTSDGEWHFVEAVSKTLKLIGITLPWRTSRLAHH

SEQ ID NO: 42380 - protein, 887 aa, Homo sapiens
MALLLFRSNRDVFVKLELLSGYIHLSIQVNNQSKVLLFISHNTSDGEWHFVEVIFAEAVTLTLIDDSCKEKCIAKAPTPLESDQSICAFQNSFLGGLPVGMTSNGVALLNFYNMPSTPSFVGCLQDIKIDWNHITLENISSGSSLNVKAGCVRKDWCESQPCQSRGRCINLWLSYQCDCHRPYEGPNCLREYVAGRFGQDDSTGYVIFTLDESYGDTISLSMFVRTLQPSGLLLALENSTYQYIRVWLERGRLAMLTPNSPKLVVKFVLNDGNVHLISLKIKPYKIELYQSSQNLGFISASTWKIEKGDVIYIGGLPDKQETELNGGFFKGCIQDVRLNNQNLEFFPNPTNNASLNPVLVNVTQGCAGDNSCKSNPCHNGGVCHSRWDDFSCSCPALTSGKACEEVQWCGFSPCPHGAQCQPVLQGFECIANAVFNGQSGQILFRSNGNITRELTNITFGFRTRDANVIILHAEKEPEFLNISIQDSRLFFQLQSGNSFYMLSLTSLQSVNDGTWHEVTLSMTDPLSQTSRWQMEVDNETPFVTSTIATGSLNFLKDNTDIYVGDRAIDNIKGLQGCLSTIEIGGIYLSYFENVHGFINKPQEEQFLKISTNSVVTGCLQLNVCNSNPCLHGGNCEDIYSSYHCSCPLGWSGKHCELNIDECFSNPCIHGNCSDRVAAYHCTCEPGYTGVNCEVDIDNCQSHQCANGATCISHTNGYSCLCFGNFTGKFCRQSRLPSTVCGNEKTNLTCYNGGNCTEFQTELKCMCRPGFTGEWCEKDIDECASDPCVNGGLCQDLLNKFQCLCDVAFAGERCEVDLADDLISDIFTTIGSVTVALLLILLLAIVASVVTSNKRATQGTYSPSRQEKEGSRVEMWNLMPPPAMERLI

SEQ ID NO: 42381 - protein, 1294 aa, Homo sapiens
MALKNINYLLIFYLSFSLLIYIKNSFCNKNNTRCLSNSCQNNSTCKDFSKDNDCSCSDTANNLDKDCDNMKDPCFSNPCQGSATCVNTPGERSFLCKCPPGYSGTICETTIGSCGKNSCQHGGICHQDPIYPVCICPAGYAGRFCEIDHDECASSPCQNGAVCQDGIDGYSCFCVPGYQGRHCDLEVDECASDPCKNEATCLNEIGRYTCICPHNYSGYTGAQCEIDLNECNSNPCQSNGECVELSSEKQYGRITGLPSSFSYHEASGYVCICQPGFTGIHCEEDVNECSSNPCQNGGTCENLPGNYTCHCPFDNLSRTFYGGRDCSDILLGCTHQQCLNNGTCIPHFQDGQHGFSCLCPSGYTGSLCEIATTLSFEGDGFLWVKSGSVTTKGSVCNIALRFQTVQPMALLLFRSNRDVFVKLELLSGYIHLSIQVNNQSKVLLFISHNTSDGEWHFVEVIFAEAVTLTLIDDSCKEKCIAKAPTPLESDQSICAFQNSFLGGLPVGMTSNGVALLNFYNMPSTPSFVGCLQDIKIDWNHITLENISSGSSLNVKAGCVRKDWCESQPCQSRGRCINLWLSYQCDCHRPYEGPNCLREYVAGRFGQDDSTGYVIFTLDESYGDTISLSMFVRTLQPSGLLLALENSTYQYIRVWLERGRLAMLTPNSPKLVVKFVLNDGNVHLISLKIKPYKIELYQSSQNLGFISASTWKIEKGDVIYIGGLPDKQETELNGGFFKGCIQDVRLNNQNLEFFPNPTNNASLNPVLVNVTQGCAGDNSCKSNPCHNGGVCHSRWDDFSCSCPALTSGKACEEVQWCGFSPCPHGAQCQPVLQGFECIANAVFNGQSGQILFRSNGNITRELTNITFGFRTRDANVIILHAEKEPEFLNISIQDSRLFFQLQSGNSFYMLSLTSLQSVNDGTWHEVTLSMTDPLSQTSRWQMEVDNETPFVTSTIATGSLNFLKDNTDIYVGDRAIDNIKGLQGCLSTIEIGGIYLSYFENVHGFINKPQEEQFLKISTNSVVTGCLQLNVCNSNPCLHGGNCEDIYSSYHCSCPLGWSGKHCELNIDECFSNPCIHGNCSDRVAAYHCTCEPGYTGVNCEVDIDNCQSHQCANGATCISHTNGYSCLCFGNFTGKFCRQSRLPSTVCGNEKTNLTCYNGGNCTEFQTELKCMCRPGFTGEWCEKDIDECASDPCVNGGLCQDLLNKFQCLCDVAFAGERCEVDLADDLISDIFTTIGSVTVALLLILLLAIVASVVTSNKRATQGTYSPSRQEKEGSRVEMWNLMPPPAMERLI

SEQ ID NO: 42382 - protein, 1176 aa, Homo sapiens
MALARPGTPDPQALASVLLLLLWAPALSLLAGTVPSEPPSACASDPCAPGTECQATESGGYTCGPMEPRGCATQPCHHGALCVPQGPDPTGFRCYCVPGFQGPRCELDIDECASRPCHHGATCRNLADRYECHCPLGYAGVTCEMEVDECASAPCLHGGSCLDGVGSFRCVCAPGYGGTRCQLDLDECQSQPCAHGGTCHDLVNGFRCDCAGTGYEGTHCEREVLECASAPCEHNASCLEGLGSFRCLCWPGYSGELCEVDEDECASSPCQHGGRCLQRSDPALYGGVQAAFPGAFSFRHAAGFLCHCPPGFEGADCGVEVDECASRPCLNGGHCQDLPNGFQCHCPDGYAGPTCEEDVDECLSDPCLHGGTCSDTVAGYICRCPETWGGRDCSVQLTGCQGHTCPLAATCIPIFESGVHSYVCHCPPGTHGPFCGQNTTFSVMAGSPIQASVPAGGPLGLALRFRTTLPAGTLATRNDTKESLELALVAATLQATLWSYSTTVLVLRLPDLALNDGHWHQVEVVLHLATLELRLWHEGCPARLCVASGPVALASTASATPLPAGISSAQLGDATFAGCLQDVRVDGHLLLPEDLGENVLLGCERREQCRPLPCVHGGSCVDLWTHFRCDCARPHRGPTCADEIPAATFGLGGAPSSASFLLQELPGPNLTVSFLLRTRESAGLLLQFANDSAAGLTVFLSEGRIRAEVPGSPAVVLPGRWDDGLRHLVMLSFGPDQLQDLGQHVHVGGRLLAADSQPWGGPFRGCLQDLRLDGCHLPFFPLPLDNSSQPSELGGRQSWNLTAGCVSEDMCSPDPCFNGGTCLVTWNDFHCTCPANFTGPTCAQQLWCPGQPCLPPATCEEVPDGFVCVAEATFREGPPAAFSGHNASSGRLLGGLSLAFRTRDSEAWLLRAAAGALEGVWLAVRNGSLAGGVRGGHGLPGAVLPIPGPRVADGAWHRVRLAMERPAATTSRWLLWLDGAATPVALRGLASDLGFLQGPGAVRILLAENFTGCLGRVALGGLPLPLARPRPGAAPGAREHFASWPGTPAPILGCRGAPVCAPSPCLHDGACRDLFDAFACACGPGWEGPRCEAHVDPCHSAPCARGRCHTHPDGRFECRCPPGFGGPRCRWDGWAGGWAANAPWGYGGAEKSARSVDESLPFPGPHVLICDMRRTV

SEQ ID NO: 42383 - protein, 953 aa, Homo sapiens
MAMEPGALWTFLGHLWLLAGPTCEEDVDECLSDPCLHGGTCSDTVAGYICRCPETWGGRDCSVQLTGCQGHTCPLAATCIPIFESGVHSYVCHCPPGTHGPFCGQNTTFSVMAGSPIQASVPAGGPLGLALRFRTTLPAGTLATRNDTKESLELALVAATLQATLWSYSTTVLVLRLPDLALNDGHWHQVEVVLHLATLELRLWHEGCPARLCVASGPVALASTASATPLPAGISSAQLGDATFAGCLQDVRVDGHLLLPEDLGENVLLGCERREQCRPLPCVHGGSCVDLWTHFRCDCARPHRGPTCADEIPAATFGLGGAPSSASFLLQELPGPNLTVSFLLRTRESAGLLLQFANDSAAGLTVFLSEGRIRAEVPGSPAVVLPGRWDDGLRHLVMLSFGPDQLQDLGQHVHVGGRLLAADSQPWGGPFRGCLQDLRLDGCHLPFFPLPLDNSSQPSELGGRQSWNLTAGCVSEDMCSPDPCFNGGTCLVTWNDFHCTCPANFTGPTCAQQLWCPGQPCLPPATCEEVPDGFVCVAEATFREGPPAAFSGHNASSGRLLGGLSLAFRTRDSEAWLLRAAAGALEGVWLAVRNGSLAGGVRGGHGLPGAVLPIPGPRVADGAWHRVRLAMERPAATTSRWLLWLDGAATPVALRGLASDLGFLQGPGAVRILLAENFTGCLGRVALGGLPLPLARPRPGAAPGAREHFASWPGTPAPILGCRGAPVCAPSPCLHDGACRDLFDAFACACGPGWEGPRCEAHVDPCHSAPCARGRCHTHPDGRFECRCPPGFGGPRCRLPVPSKECSLNVTCLDGSPCEGGSPAANCSCLEGLAGQRCQVPTLPCEANPCLNGGTCRAAGGVSECICNARFSGQFCEVAKGLPLPLPFPLLEVAVPAACACLLLLLLGLLSGILAARKRRQSEGTYSPSQQEVAGARLEMDSVLKVPPEERLI

SEQ ID NO: 42384 - protein, 1285 aa, Homo sapiens
MALARPGTPDPQALASVLLLLLWAPALSLLAGTVPSEPPSACASDPCAPGTECQATESGGYTCGPMEPRGCATQPCHHGALCVPQGPDPTGFRCYCVPGFQGPRCELDIDECASRPCHHGATCRNLADRYECHCPLGYAGVTCEMEVDECASAPCLHGGSCLDGVGSFRCVCAPGYGGTRCQLDLDECQSQPCAHGGTCHDLVNGFRCDCAGTGYEGTHCEREVLECASAPCEHNASCLEGLGSFRCLCWPGYSGELCEVDEDECASSPCQHGGRCLQRSDPALYGGVQAAFPGAFSFRHAAGFLCHCPPGFEGADCGVEVDECASRPCLNGGHCQDLPNGFQCHCPDGYAGPTCEEDVDECLSDPCLHGGTCSDTVAGYICRCPETWGGRDCSVQLTGCQGHTCPLAATCIPIFESGVHSYVCHCPPGTHGPFCGQNTTFSVMAGSPIQASVPAGGPLGLALRFRTTLPAGTLATRNDTKESLELALVAATLQATLWSYSTTVLVLRLPDLALNDGHWHQVEVVLHLATLELRLWHEGCPARLCVASGPVALASTASATPLPAGISSAQLGDATFAGCLQDVRVDGHLLLPEDLGENVLLGCERREQCRPLPCVHGGSCVDLWTHFRCDCARPHRGPTCADEIPAATFGLGGAPSSASFLLQELPGPNLTVSFLLRTRESAGLLLQFANDSAAGLTVFLSEGRIRAEVPGSPAVVLPGRWDDGLRHLVMLSFGPDQLQDLGQHVHVGGRLLAADSQPWGGPFRGCLQDLRLDGCHLPFFPLPLDNSSQPSELGGRQSWNLTAGCVSEDMCSPDPCFNGGTCLVTWNDFHCTCPANFTGPTCAQQLWCPGQPCLPPATCEEVPDGFVCVAEATFREGPPAAFSGHNASSGRLLGGLSLAFRTRDSEAWLLRAAAGALEGVWLAVRNGSLAGGVRGGHGLPGAVLPIPGPRVADGAWHRVRLAMERPAATTSRWLLWLDGAATPVALRGLASDLGFLQGPGAVRILLAENFTGCLGRVALGGLPLPLARPRPGAAPGAREHFASWPGTPAPILGCRGAPVCAPSPCLHDGACRDLFDAFACACGPGWEGPRCEAHVDPCHSAPCARGRCHTHPDGRFECRCPPGFGGPRCRLPVPSKECSLNVTCLDGSPCEGGSPAANCSCLEGLAGQRCQVPTLPCEANPCLNGGTCRAAGGVSECICNARFSGQFCEVAKGLPLPLPFPLLEVAVPAACACLLLLLLGLLSGILAARKRRQSEGTYSPSQQEVAGARLEMDSVLKVPPEERLI

SEQ ID NO: 42385 - protein, 120 aa, Homo sapiens
MANPGLGLLLALGLPFLLARWGRAWGQIQTTSANENSTVLPSSTSSSSDGNLRPEAITAIIVVFSLLAALLLAVGLALLVRKLREKRQTEGTYRPSSEEQVGARVPPTPNLKLPPEERLI

SEQ ID NO: 42386 - protein, 123 aa, Homo sapiens
MANPGLGLLLALGLPFLLARWGRAWGQIQTTSANENSTVLPSSTSSSSDGNLRPEAITAIIVVFSLLAALLLAVGLALLVRKLREKRQTEGTYRPSSEEQFSHAAEARAPQDSKETVQGCLPI

SEQ ID NO: 42387 - protein, 120 aa, Homo sapiens; identical to SEQ ID NO: 42385

SEQ ID NO: 42388 - protein, 532 aa, Homo sapiens
MPAPPGRTHTWFLLQSLEDLDTSLRKLNSRLFVVRGQPADVFPRLFKEWGVTRLTFEYDSEPFGKERDAAIMKMAKEAGVEVVTENSHTLYDLDRIIELNGQKPPLTYKRFQAIISRMELPKKPVGLVTSQQMESCRAEIQENHDETYGVPSLEELGFPTEGLGPAVWQGGETEALARLDKHLERKAWVANYERPRMNANSLLASPTGLSPYLRFGCLSCRLFYYRLWDLYKKVKRNSTPPLSLFGQLLWREFFYTAATNNPRFDRMEGNPICIQIPWDRNPEALAKWAEGKTGFPWIDAIMTQLRQEGWIHHLARHAVACFLTRGDLWVSWESGVRVFDELLLDADFSVNAGSWMWLSCSAFFQQFFHCYCPVGFGRRTDPSGDYIRRYLPKLKAFPSRYIYEPWNAPESIQKAAKCIIGVDYPRPIVNHAETSRLNIERMKQIYQQLSRYRGLCLLASVPSCVEDLSHPVAEPSSSQAGSMSSAGPRPLPSGPASPKRKLEAAEEPPGEELSKRARVAELPTPELPSKDA

SEQ ID NO: 42389 - protein, 614 aa, Homo sapiens
MGGVHVAYRGGAGVAGAVWTVMAATVATAAAVAPAPAPGTDSASSVHWFRKGLRLHDNPALLAAVRGARCVRCVYILDPWFAASSSVGINRWRFLLQSLEDLDTSLRKLNSRLFVVRGQPADVFPRLFKEWGVTRLTFEYDSEPFGKERDAAIMKMAKEAGVEVVTENSHTLYDLDRIIELNGQKPPLTYKRFQAIISRMELPKKPVGLVTSQQMESCRAEIQENHDETYGVPSLEELGFPTEGLGPAVWQGGETEALARLDKHLERKAWVANYERPRMNANSLLASPTGLSPYLRFGCLSCRLFYYRLWDLYKKVKRNSTPPLSLFGQLLWREFFYTAATNNPRFDRMEGNPICIQIPWDRNPEALAKWAEGKTGFPWIDAIMTQLRQEGWIHHLARHAVACFLTRGDLWVSWESGVRVFDELLLDADFSVNAGSWMWLSCSAFFQQFFHCYCPVGFGRRTDPSGDYIRRYLPKLKAFPSRYIYEPWNAPESIQKAAKCIIGVDYPRPIVNHAETSRLNIERMKQIYQQLSRYRGLCLLASVPSCVEDLSHPVAEPSSSQAGSMSSAGPRPLPSGPASPKRKLEAAEEPPGEELSKRARVAELPTPELPSKDA

SEQ ID NO: 42390 - protein, 173 aa, Homo sapiens
MDVTIQHPWFKRTLGPFYPSRLFDQFFGEGLFEYDLLPFLSSTISPYYRQSLFRTVLDSGISEVRSDRDKFVIFLDVKHFSPEDLTVKVQDDFVEIHGKHNERQDDHGYISREFHRRYRLPSNVDQSALSCSLSADGMLTFCGPKIQTGLDATHAERAIPVSREEKPTSAPSS

SEQ ID NO: 42391 - protein, 175 aa, Homo sapiens
MDIAIHHPWIRRPFFPFHSPSRLFDQFFGEHLLESDLFPTSTSLSPFYLRPPSFLRAPSWFDTGLSEMRLEKDRFSVNLDVKHFSPEELKVKVLGDVIEVHGKHEERQDEHGFISREFHRKYRIPADVDPLTITSSLSSDGVLTVNGPRKQVSGPERTIPITREEKPAVTAAPKK

SEQ ID NO: 42392 - protein, 175 aa, Homo sapiens; identical to SEQ ID NO: 42391

SEQ ID NO: 42393 - protein, 174 aa, Homo sapiens
MDIAIHHPWIRRPFFPFHSPSRLFDQFFGEHLLESDLFPTSTSLSPFYLRPPSFLRAPSWFDTGLSEMRLEKDRFSVNLDVKHFSPEELKVKVLGDVIEVHGKHEERQDEHGFISREFHRKYRIPADVDPLTITSSLSSDGVLTVNGPRKQVSGPERTIPITREEKPAVTAAPK

SEQ ID NO: 42394 - protein, 175 aa, Homo sapiens; identical to SEQ ID NO: 42391

SEQ ID NO: 42395 - protein, 77 aa, Homo sapiens
MDIAIHHPWIRRPFFPFHSPSRLFDQFFGEHLLESDLFPTSTSLSPFYLRPPSFLRAPSWFDTGLSEMRLEKDRFSV

SEQ ID NO: 42396 - protein, 130 aa, Homo sapiens
MDIAIHHPWIRRPFFPFHSPSRLFDQFFGEHLLESDLFPTSTSLSPFYLRPPSFLRAPSWFDTGLSEMRLEKDRFSVNLDVKHFSPEELKVKVLGDVIEVHGKHEERQDEHGFISREFHRKYRIPADVDP

SEQ ID NO: 42397 - protein, 175 aa, Homo sapiens; identical to SEQ ID NO: 42391

SEQ ID NO: 42398 - protein, 175 aa, Homo sapiens; identical to SEQ ID NO: 42391

SEQ ID NO: 42399 - protein, 69 aa, Homo sapiens
MDIAIHHPWIRRPFFPFHSPSRLFDQFFGEHLLESDLFPTSTSLSPFYLRPPSFLRAPSWFDTGLSEMR

SEQ ID NO: 42400 - protein, 215 aa, Homo sapiens
METQAEQQELETLPTTKMAQTNPTPGSLGPWKITIYDQENFQGKRMEFTSSCPNVSERSFDNVRSLKVESGAWIGYEHTSFCGQQFILERGEYPRWDAWSGSNAYHIERLMSFRPICSANHKESKMTIFEKENFIGRQWEISDDYPSLQAMGWFNNEVGSMKIQSGAWVCYQYPGYRGYQYILECDHHGGDYKHWREWGSHAQTSQIQSIRRIQQ

SEQ ID NO: 42401 - protein, 197 aa, Homo sapiens
MSSAPAPGPAPASLTLWDEEDFQGRRCRLLSDCANVCERGGLPRVRSVKVENGVWVAFEYPDFQGQQFILEKGDYPRWSAWSGSSSHNSNQLLSFRPVLCANHNDSRVTLFEGDNFQGCKFDLVDDYPSLPSMGWASKDVGSLKVSSGAWVAYQYPGYRGYQYVLERDRHSGEFCTYGELGTQAHTGQLQSIRRVQH

SEQ ID NO: 42402 - protein, 197 aa, Homo sapiens; identical to SEQ ID NO: 42401

SEQ ID NO: 42403 - protein, 129 aa, Homo sapiens
MSSAPAPGPAPASLTLWDEEDFQGRRCRLLSDCANVCERGGLPRVRSVKVENGVWVAFEYPDFQGQQFILEKGDYPRWSAWSGSSSHNSNQLLSFRPVLCANHNDSRVTLFEGDNFQGCKFDLVDDYPS

SEQ ID NO: 42404 - protein, 196 aa, Homo sapiens
MTLQCTKSAGPWKMVVWDEDGFQGRRHEFTAECPSVLELGFETVRSLKVLSGAWVGFEHAGFQGQQYILERGEYPSWDAWGGNTAYPAERLTSFRPAACANHRDSRLTIFEQENFLGKKGELSDDYPSLQAMGWEGNEVGSFHVHSGAWVCSQFPGYRGFQYVLECDHHSGDYKHFREWGSHAPTFQVQSIRRIQQ

SEQ ID NO: 42405 - protein, 252 aa, Homo sapiens
MSQAAKASASATVAVNPGPDTKGKGAPPAGTSPSPGTTLAPTTVPITSAKAAELPPGNYRLVVFELENFQGRRAEFSGECSNLADRGFDRVRSIIVSAGPWVAFEQSNFRGEMFILEKGEYPRWNTWSSSYRSDRLMSFRPIKMDAQEHKISLFEGANFKGNTIEIQGDDAPSLWVYGFSDRVGSVKVSSGTWVGYQYPGYRGYQYLLEPGDFRHWNEWGAFQPQMQSLRRLRDKQWHLEGSFPVLATEPPK

SEQ ID NO: 42406 - protein, 205 aa, Homo sapiens
MASDHQTQAGKPQSLNPKIIIFEQENFQGHSHELNGPCPNLKETGVEKAGSVLVQAGPWVGYEQANCKGEQFVFEKGEYPRWDSWTSSRRTDSLSSLRPIKVDSQEHKIILYENPNFTGKKMEIIDDDVPSFHAHGYQEKVSSVRVQSGTWVGYQYPGYRGLQYLLEKGDYKDSSDFGAPHPQVQSVRRIRDMQWHQRGAFHPSN

SEQ ID NO: 42407 - protein, 211 aa, Homo sapiens
MAEQHGAPEQAAAGKSHGDLGGSYKVILYELENFQGKRCELSAECPSLTDSLLEKVGSIQVESGPWLAFESRAFRGEQFVLEKGDYPRWDAWSNSRDSDSLLSLRPLNIDSPHHKLHLFENPAFSGRKMEIVDDDVPSLWAHGFQDRVASVRAINGTWVGYEFPGYRGRQYVFERGEYRHWNEWDASQPQLQSVRRIRDQKWHKRGRFPSS

SEQ ID NO: 42408 - protein, 174 aa, Homo sapiens
MGKITFYEDRDFQGRCYNCISDCPNLRVYFSRCNSIRVDSGCWMLYERPNYQGHQYFLRRGKYPDYQHWMGLSDSVQSCRIIPHTSSHKLRLYERDDYRGLMSELTDDCACVPELFRLPEIYSLHVLEGCWVLYEMPNYRGRQYLLRPGDYRRYHDWGGADAKVGSLRRVTDLY

SEQ ID NO: 42409 - protein, 175 aa, Homo sapiens
MGKITFYEDRAFQGRSYECTTDCPNLQPYFSRCNSIRVESGCWMIYERPNYQGHQYFLRRGEYPDYQQWMGLSDSIRSCCLIPPHSGAYRMKIYDRDELRGQMSELTDDCISVQDRFHLTEIHSLNVLEGSWILYEMPNYRGRQYLLRPGEYRRFLDWGAPNAKVGSLRRVMDLY

SEQ ID NO: 42410 - protein, 174 aa, Homo sapiens
MGKITFYEDRAFQGRSYETTTDCPNLQPYFSRCNSIRVESGCWMLYERPNYQGQQYLLRRGEYPDYQQWMGLSDSIRSCCLIPQTVSHRLRLYEREDHKGLMMELSEDCPSIQDRFHLSEIRSLHVLEGCWVLYELPNYRGRQYLLRPQEYRRCQDWGAMDAKAGSLRRVVDLY

SEQ ID NO: 42411 - protein, 174 aa, Homo sapiens
MGKITLYEDRGFQGRHYECSSDHPNLQPYLSRCNSARVDSGCWMLYEQPNYSGLQYFLRRGDYADHQQWMGLSDSVRSCRLIPHSGSHRIRLYEREDYRGQMIEFTEDCSCLQDRFRFNEIHSLNVLEGSWVLYELSNYRGRQYLLMPGDYRRYQDWGATNARVGSLRRVIDFS

SEQ ID NO: 42412 - protein, 178 aa, Homo sapiens
MSKTGTKITFYEDKNFQGRRYDCDCDCADFHTYLSRCNSIKVEGGTWAVYERPNFAGYMYILPQGEYPEYQRWMGLNDRLSSCRAVHLPSGGQYKIQIFEKGDFSGQMYETTEDCPSIMEQFHMREIHSCKVLEGVWIFYELPNYRGRQYLLDKKEYRKPIDWGAASPAVQSFRRIVE

SEQ ID NO: 42413 - protein, 178 aa, Homo sapiens; identical to SEQ ID NO: 42412

SEQ ID NO: 42414 - protein, 319 aa, Homo sapiens
MASSAAGCVVIVGSGVIGRSWAMLFASGGFQVKLYDIEQQQIRNALENIRKEMKLLEQAGSLKGSLSVEEQLSLISGCPNIQEAVEGAMHIQECVPEDLELKKKIFAQLDSIIDDRVILSSSTSCLMPSKLFAGLVHVKQCIVAHPVNPPYYIPLVELVPHPETAPTTVDRTHALMKKIGQCPMRVQKEVAGFVLNRLQYAIISEAWRLVEEGIVSPSDLDLVMSEGLGMRYAFIGPLETMHLNAEGMLSYCDRYSEGIKHVLQTFGPIPEFSRATAEKVNQDMCMKVPDDPEHLAARRQWRDECLMRLAKLKSQVQPQ

SEQ ID NO: 42415 - protein, 314 aa, Homo sapiens
MSRVPAFLSAAEVEEHLRSSSLLIPPLETALANFSSGPEGGVMQPVRTVVPVTKHRGYLGVMPAYSAAEDALTTKLVTFYEDRGITSVVPSHQATVLLFEPSNGTLLAVMDGNVITAKRTAAVSAIATKFLKPPSSEVLCILGAGVQAYSHYEIFTEQFSFKEVRIWNRTKENAEKFADTVQGEVRVCSSVQEAVAGADVIITVTLATEPILFGEWVKPGAHINAVGASRPDWRELDDELMKEAVLYVDSQEAALKESGDVLLSGAEIFAELGEVIKGVKPAHCEKTTVFKSLGMAVEDTVAAKLIYDSWSSGK

SEQ ID NO: 42416 - protein, 314 aa, Homo sapiens; identical to SEQ ID NO: 42415

SEQ ID NO: 42417 - protein, 272 aa, Homo sapiens
MQPVRTVVPVTKHRGYLGVMPAYSAAEDALTTKLVTFYEDRGITSVVPSHQATVLLFEPSNGTLLAVMDGNVITAKRTAAVSAIATKFLKPPSSEVLCILGAGVQAYSHYEIFTEQFSFKEVRIWNRTKENAEKFADTVQGEVRVCSSVQEAVAGADVIITVTLATEPILFGEWVKPGAHINAVGASRPDWRELDDELMKEAVLYVDSQEAALKESGDVLLSGAEIFAELGEVIKGVKPAHCEKTTVFKSLGMAVEDTVAAKLIYDSWSSGK

SEQ ID NO: 42418 - protein, 314 aa, Homo sapiens; identical to SEQ ID NO: 42415

SEQ ID NO: 42419 - protein, 329 aa, Homo sapiens
MATGQKLMRAVRVFEFGGPEVLKLRSDIAVPIPKDHQVLIKVHACGVNPVETYIRSGTYSRKPLLPYTPGSDVAGVIEAVGDNASAFKKGDRVFTSSTISGGYAEYALAADHTVYKLPEKLDFKQGAAIGIPYFTAYRALIHSACVKAGESVLVHGASGGVGLAACQIARAYGLKILGTAGTEEGQKIVLQNGAHEVFNHREVNYIDKIKKYVGEKGIDIIIEMLANVNLSKDLSLLSHGGRVIVVGSRGTIEINPRDTMAKESSIIGVTLFSSTKEEFQQYAAALQAGMEIGWLKPVIGSQYPLEKVAEAHENIIHGSGATGKMILLL

SEQ ID NO: 42420 - protein, 243 aa, Homo sapiens
MATGQKLMRAVRVFEFGGPEVLKLRSDIAVPIPKDHQVLIKVHACGVNPVETYIRSGTYSRKPLLPYTPGSDVAGVIEAVGDNASAFKKGDRVFTSSTISGGYAEYALAADHTVYKLPEKLDFKQGAAIGIPYFTAYRALIHSACVKAGESVLVHGASGGVGLAACQIARAYGLKILGTAGTEEGQKIVLQNGAHEVFNHREVNYIDKIKKYVGEKGIDIIIEMLANVNLSKDLSLLSHGGRV

SEQ ID NO: 42421 - protein, 295 aa, Homo sapiens
MATGQKLMRAVRVFEFGGPEVLKLRSDIAVPIPKDHQVLIKVHACGVNPVETYIRSGTYSRKPLLPYTPGSDVAGVIEAVGDNASAFKKGDRVFTSSTISGGYAEYALAADHTVYKLPEKLDFKQGAAIGIPYFTAYRALIHSACVKAGESVLVHGASGGVGLAACQIARAYGLKILGTAGTEEGQKIVLQNGAHEVFNHREVNYIDKIKVVGSRGTIEINPRDTMAKESSIIGVTLFSSTKEEFQQYAAALQAGMEIGWLKPVIGSQYPLEKVAEAHENIIHGSGATGKMILLL

SEQ ID NO: 42422 - protein, 192 aa, Homo sapiens
MHLLSSACVKAGESVLVHGASGGVGLAACQIARAYGLKILGTAGTEEGQKIVLQNGAHEVFNHREVNYIDKIKKYVGEKGIDIIIEMLANVNLSKDLSLLSHGGRVIVVGSRGTIEINPRDTMAKESSIIGVTLFSSTKEEFQQYAAALQAGMEIGWLKPVIGSQYPLEKVAEAHENIIHGSGATGKMILLL

SEQ ID NO: 42423 - protein, 329 aa, Homo sapiens; identical to SEQ ID NO: 42419

SEQ ID NO: 42424 - protein, 206 aa, Homo sapiens
MATGQKLMRAVRVFEFGGPEVLKLRSDIAVPIPKDHQVLIKVHACGVNPVETYIRSGTYSRKPLLPYTPGSDVAGVIEAVGDNASAFKKGDRVFTSSTISGGYAEYALAADHTVYKLPEKLDFKQGAAIGIPYFTAYRALIHSACVKAGESVLVHGASGGVGLAACQIARAYGLKILGTAGTEEGQKIVLQNGAHEVFNHREVNYI

SEQ ID NO: 42425 - protein, 349 aa, Homo sapiens
MKGLYFQQSSTDEEITFVFQEKEDLPVTEDNFVKLQVKACALSQINTKLLAEMKMKKDLFPVGREIAGIVLDVGSKVSFFQPDDEVVGILPLDSEDPGLCEVVRVHEHYLVHKPEKVTWTEAAGSIRDGVRAYTALHYLSHLSPGKSVLIMDGASAFGTIAIQLAHHRGAKVISTACSLEDKQCLERFRPPIARVIDVSNGKVHVAESCLEETGGLGVDIVLDAGVRLYSKDDEPAVKLQLLPHKHDIITLLGVGGHWVTTEENLQLDPPDSHCLFLKGATLAFLNDEVWNLSNVQQGKYLCILKDVMEKLSTGVFRPQLDEPIPLYEAKVSMEAVQKNQGRKKQVVQF

SEQ ID NO: 42426 - protein, 181 aa, Homo sapiens
MKGLYFQQSSTDEEITFVFQEKEDLPVTEDNFVKLQVKACALSQINTKLLAEMKMKKDLFPVGREIAGIVLDVGSKVSFFQPDDEVVGILPLDSEDPGLCEVVRVHEHYLVHKPEKVTWTEAAGSIRDGVRAYTALHYLSHLSPGKSVLIMDGASAFGTIAIQLAHHRGAKVISTACSLED

SEQ ID NO: 42427 - protein, 19 aa, Homo sapiens
MKGLYFQQSSTDEEITFVF

SEQ ID NO: 42428 - protein, 198 aa, Homo sapiens
MKGLYFQQSSTDEEITFVFQEKEDLPVTEDNFVKLQVKACALSQINTKLLAEMKMKKDLFPVGREIAGIVLDVGSKVSFFQPDDEVVGILPLDSEDPGLCEVVRVHEHYLVHKPEKVTWTEAAGSIRDGVRAYTALHYLSHLSPGKSVLIMDGASAFGTIAIQLAHHRGAKVISTACSLEDKQCLERFRPPIENSTIA

SEQ ID NO: 42429 - protein, 971 aa, Homo sapiens
MELSDANLQTLTEYLKKTLDPDPAIRRPAEKFLESVEGNQNYPLLLLTLLEKSQDNVIKVCASVTFKNYIKRNWRIVEDEPNKICEADRVAIKANIVHLMLSSPEQIQKQLSDAISIIGREDFPQKWPDLLTEMVNRFQSGDFHVINGVLRTAHSLFKRYRHEFKSNELWTEIKLVLDAFALPLTNLFKATIELCSTHANDASALRILFSSLILISKLFYSLNFQDLPEFFEDNMETWMNNFHTLLTLDNKLLQTDDEEEAGLLELLKSQICDNAALYAQKYDEEFQRYLPRFVTAIWNLLVTTGQEVKYDLLVSNAIQFLASVCERPHYKNLFEDQNTLTSICEKVIVPNMEFRAADEEAFEDNSEEYIRRDLEGSDIDTRRRAACDLVRGLCKFFEGPVTGIFSGYVNSMLQEYAKNPSVNWKHKDAAIYLVTSLASKAQTQKHGITQANELVNLTEFFVNHILPDLKSANVNEFPVLKADGIKYIMIFRNQVPKEHLLVSIPLLINHLQAESIVVHTYAAHALERLFTMRGPNNATLFTAAEIAPFVEILLTNLFKALTLPGSSENEYIMKAIMRSFSLLQEAIIPYIPTLITQLTQKLLAVSKNPSKPHFNHYMFEAICLSIRITCKANPAAVVNFEEALFLVFTEILQNDVQEFIPYVFQVMSLLLETHKNDIPSSYMALFPHLLQPVLWERTGNIPALVRLLQAFLERGSNTIASAAADKIPGLLGVFQKLIASKANDHQGFYLLNSIIEHMPPESVDQYRKQIFILLFQRLQNSKTTKFIKSFLVFINLYCIKYGALALQEIFDGIQPKMFGMVLEKIIIPEIQKVSGNVEKKICAVGITKLLTECPPMMDTEYTKLWTPLLQSLIGLFELPEDDTIPDEEHFIDIEDTPGYQTAFSQLAFAGKKEHDPVGQMVNNPKIHLAQSLHKLSTACPGRVPSMVSTSLNAEALQYLQGYLQAASVTLL

SEQ ID NO: 42430 - protein, 915 aa, Homo sapiens
MELSDANLQTLTEYLKKTLDPDPAIRRPAEKFLESVEGNQNYPLLLLTLLEKSQDNVIKVCASVTFKNYIKRNWRIVEDEPNKICEADRVAIKANIVHLMLSSPEQIQKQLSDAISIIGREDFPQKWPDLLTEMVNRFQSGDFHVINGVLRTAHSLFKRYRHEFKSNELWTEIKLVLDAFALPLTNLFKATIELCSTHANDASALRILFSSLILISKLFYSLNFQDLPEFFEDNMETWMNNFHTLLTLDNKLLQTDLVSNAIQFLASVCERPHYKNLFEDQNTLTSICEKVIVPNMEFRAADEEAFEDNSEEYIRRDLEGSDIDTRRRAACDLVRGLCKFFEGPVTGIFSGYVNSMLQEYAKNPSVNWKHKDAAIYLVTSLASKAQTQKHGITQANELVNLTEFFVNHILPDLKSANVNEFPVLKADGIKYIMIFRNQVPKEHLLVSIPLLINHLQAESIVVHTYAAHALERLFTMRGPNNATLFTAAEIAPFVEILLTNLFKALTLPGSSENEYIMKAIMRSFSLLQEAIIPYIPTLITQLTQKLLAVSKNPSKPHFNHYMFEAICLSIRITCKANPAAVVNFEEALFLVFTEILQNDVQEFIPYVFQVMSLLLETHKNDIPSSYMALFPHLLQPVLWERTGNIPALVRLLQAFLERGSNTIASAAADKIPGLLGVFQKLIASKANDHQGFYLLNSIIEHMPPESVDQYRKQIFILLFQRLQNSKTTKFIKSFLVFINLYCIKYGALALQEIFDGIQPKMFGMVLEKIIIPEIQKVSGNVEKKICAVGITKLLTECPPMMDTEYTKLWTPLLQSLIGLFELPEDDTIPDEEHFIDIEDTPGYQTAFSQLAFAGKKEHDPVGQMVNNPKIHLAQSLHKLSTACPGRVPSMVSTSLNAEALQYLQGYLQAASVTLL

SEQ ID NO: 42431 - protein, 569 aa, Homo sapiens
METWMNNFHTLLTLDNKLLQTDDEEEAGLLELLKSQICDNAALYAQKYDEEFQRYLPRFVTAIWNLLVTTGQEVKYDLLVSNAIQFLASVCERPHYKNLFEDQNTLTSICEKSIVVHTYAAHALERLFTMRGPNNATLFTAAEIAPFVEILLTNLFKALTLPGSSENEYIMKAIMRSFSLLQEAIIPYIPTLITQLTQKLLAVSKNPSKPHFNHYMFEAICLSIRITCKANPAAVVNFEEALFLVFTEILQNDVQEFIPYVFQVMSLLLETHKNDIPSSYMALFPHLLQPVLWERTGNIPALVRLLQAFLERGSNTIASAAADKIPGLLGVFQKLIASKANDHQGFYLLNSIIEHMPPESVDQYRKQIFILLFQRLQNSKTTKFIKSFLVFINLYCIKYGALALQEIFDGIQPKMFGMVLEKIIIPEIQKVSGNVEKKICAVGITKLLTECPPMMDTEYTKLWTPLLQSLIGLFELPEDDTIPDEEHFIDIEDTPGYQTAFSQLAFAGKKEHDPVGQMVNNPKIHLAQSLHKLSTACPGRVPSMVSTSLNAEALQYLQGYLQAASVTLL

SEQ ID NO: 42432 - protein, 754 aa, Homo sapiens
MLSNLNFQDLPEFFEDNMETWMNNFHTLLTLDNKLLQTDDEEEAGLLELLKSQICDNAALYAQKYDEEFQRYLPRFVTAIWNLLVTTGQEVKYDLLVSNAIQFLASVCERPHYKNLFEDQNTLTSICEKVIVPNMEFRAADEEAFEDNSEEYIRRDLEGSDIDTRRRAACDLVRGLCKFFEGPVTGIFSGYVNSMLQEYAKNPSVNWKHKDAAIYLVTSLASKAQTQKHGITQANELVNLTEFFVNHILPDLKSANVNEFPVLKADGIKYIMIFRNQVPKEHLLVSIPLLINHLQAESIVVHTYAAHALERLFTMRGPNNATLFTAAEIAPFVEILLTNLFKALTLPGSSENEYIMKAIMRSFSLLQEAIIPYIPTLITQLTQKLLAVSKNPSKPHFNHYMFEAICLSIRITCKANPAAVVNFEEALFLVFTEILQNDVQEFIPYVFQVMSLLLETHKNDIPSSYMALFPHLLQPVLWERTGNIPALVRLLQAFLERGSNTIASAAADKIPGLLGVFQKLIASKANDHQGFYLLNSIIEHMPPESVDQYRKQIFILLFQRLQNSKTTKFIKSFLVFINLYCIKYGALALQEIFDGIQPKMFGMVLEKIIIPEIQKVSGNVEKKICAVGITKLLTECPPMMDTEYTKLWTPLLQSLIGLFELPEDDTIPDEEHFIDIEDTPGYQTAFSQLAFAGKKEHDPVGQMVNNPKIHLAQSLHKLSTACPGRVPSMVSTSLNAEALQYLQGYLQAASVTLL

SEQ ID NO: 42433 - protein, 450 aa, Homo sapiens
MSAIQAAWPSGTECIAKYNFHGTAEQDLPFCKGDVLTIVAVTKDPNWYKAKNKVGREGIIPANYVQKREGVKAGTKLSLMPWFHGKITREQAERLLYPPETGLFLVRESTNYPGDYTLCVSCDGKVEHYRIMYHASKLSIDEEVYFENLMQLVEHYTSDADGLCTRLIKPKVMEGTVAAQDEFYRSGWALNMKELKLLQTIGKGEFGDVMLGDYRGNKVAVKCIKNDATAQAFLAEASVMTQLRHSNLVQLLGVIVEEKGGLYIVTEYMAKGSLVDYLRSRGRSVLGGDCLLKFSLDVCEAMEYLEGNNFVHRDLAARNVLVSEDNVAKVSDFGLTKEASSTQDTGKLPVKWTAPEALREKKFSTKSDVWSFGILLWEIYSFGRVPYPRIPLKDVVPRVEKGYKMDAPDGCPPAVYEVMKNCWHLDAAMRPSFLQLREQLEHIKTHELHL

SEQ ID NO: 42434 - protein, 450 aa, Homo sapiens; identical to SEQ ID NO: 42433

SEQ ID NO: 42435 - protein, 450 aa, Homo sapiens; identical to SEQ ID NO: 42433

SEQ ID NO: 42436 - protein, 399 aa, Homo sapiens
MSAIQAAWPSGTECIAKYNFHGTAEQDLPFCKGDVLTIVAVTKDPNWYKAKNKVGREGIIPANYVQKREGVKAGTKLSLMPWFHGKLSIDEEVYFENLMQLVEHYTSDADGLCTRLIKPKVMEGTVAAQDEFYRSGWALNMKELKLLQTIGKGEFGDVMLGDYRGNKVAVKCIKNDATAQAFLAEASVMTQLRHSNLVQLLGVIVEEKGGLYIVTEYMAKGSLVDYLRSRGRSVLGGDCLLKFSLDVCEAMEYLEGNNFVHRDLAARNVLVSEDNVAKVSDFGLTKEASSTQDTGKLPVKWTAPEALREKKFSTKSDVWSFGILLWEIYSFGRVPYPRIPLKDVVPRVEKGYKMDAPDGCPPAVYEVMKNCWHLDAAMRPSFLQLREQLEHIKTHELHL

SEQ ID NO: 42437 - protein, 260 aa, Homo sapiens
MVAAPWATQEQEEGRGIQPGDRGDQKSAASQKPRSRGILHSLFCCVCRDDGEALPAHSGAPLLVEENGAIPKTPVQYLLPEAKAQDSDKICVVIDLDETLVHSSFKPVNNADFIIPVEIDGVVHQVYVLKRPHVDEFLQRMGELFECVLFTASLAKYADPVADLLDKWGAFRARLFRESCVFHRGNYVKDLSRLGRDLRRVLILDNSPASYVFHPDNAVPVASWFDNMSDTELHDLLPFFEQLSRVDDVYSVLRQPRPGS

SEQ ID NO: 42438 - protein, 867 aa, Homo sapiens
MEVPAAGRVPAEGAPTAAVAEVRCPGPAPLRLLEWRVAAGAAVRIGSVLAVFEAAASAQSSGASQSRVASGGCVRPARPERRLRSERAGVVRELCAQPGQVVAPGAVLVRLEGCSHPVVMKGLCAECGQDLTQLQSKNGKQQVPLSTATVSMVHSVPELMVSSEQAEQLGREDQQRLHRNRKLVLMVDLDQTLIHTTEQHCQQMSNKGIFHFQLGRGEPMLHTRLRPHCKDFLEKIAKLYELHVFTFGSRLYAHTIAGFLDPEKKLFSHRILSRDECIDPFSKTGNLRNLFPCGDSMVCIIDDREDVWKFAPNLITVKKYVYFQGTGDMNAPPGSRESQTRKKVNHSRGTEVSEPSPPVRDPEGVTQAPGVEPSNGLEKPARELNGSEAATPRDSPRPGKPDERDIWPPAQAPTSSQELAGAPEPQGSCAQGGRVAPGQRPAQGATGTDLDFDLSSDSESSSESEGTKSSSSASDGESEGKRGRQKPKAAPEGAGALAQGSSLEPGRPAAPSLPGEAEPGAHAPDKEPELGGQEEGERDGLCGLGNGCADRKEAETESQNSELSGVTAGESLDQSMEEEEEEDTDEDDHLIYLEEILVRVHTDYYAKYDRYLNKEIEEAPDIRKIVPELKSKVLADVAIIFSGLHPTNFPIEKTREHYHATALGAKILTRLVLSPDAPDRATHLIAARAGTEKVLQAQECGHLHVVNPDWLWSCLERWDKVEEQLFPLRDDHTKAQRENSPAAFPDREGVPPTALFHPMPVLPKAQPGPEVRIYDSNTGKLIRTGARGPPAPSSSLPIRQEPSSFRWTTSLEKAATTATARRGGLRSRRRSPSPGSQGPAGSGRSGHLRPARGARQGAGGPEATRGS

SEQ ID NO: 42439 - protein, 961 aa, Homo sapiens
MEVPAAGRVPAEGAPTAAVAEVRCPGPAPLRLLEWRVAAGAAVRIGSVLAVFEAAASAQSSGASQSRVASGGCVRPARPERRLRSERAGVVRELCAQPGQVVAPGAVLVRLEGCSHPVVMKGLCAECGQDLTQLQSKNGKQQVPLSTATVSMVHSVPELMVSSEQAEQLGREDQQRLHRNRKLVLMVDLDQTLIHTTEQHCQQMSNKGIFHFQLGRGEPMLHTRLRPHCKDFLEKIAKLYELHVFTFGSRLYAHTIAGFLDPEKKLFSHRILSRDECIDPFSKTGNLRNLFPCGDSMVCIIDDREDVWKFAPNLITVKKYVYFQGTGDMNAPPGSRESQTRKKVNHSRGTEVSEPSPPVRDPEGVTQAPGVEPSNGLEKPARELNGSEAATPRDSPRPGKPDERDIWPPAQAPTSSQELAGAPEPQGSCAQGGRVAPGQRPAQGATGTDLDFDLSSDSESSSESEGTKSSSSASDGESEGKRGRQKPKAAPEGAGALAQGSSLEPGRPAAPSLPGEAEPGAHAPDKEPELGGQEEGERDGLCGLGNGCADRKEAETESQNSELSGVTAGESLDQSMEEEEEEDTDEDDHLIYLEEILVRVHTDYYAKYDRYLNKEIEEAPDIRKIVPELKSKVLADVAIIFSGLHPTNFPIEKTREHYHATALGAKILTRLVLSPDAPDRATHLIAARAGTEKVLQAQECGHLHVVNPDWLWSCLERWDKVEEQLFPLRDDHTKAQRENSPAAFPDREGVPPTALFHPMPVLPKAQPGPEVRIYDSNTGKLIRTGARGPPAPSSSLPIRQEPSSFRAVPPPQPQMFGEELPDAQDGEQPGPSRRKRQPSMSETMPLYTLCKEDLESMDKEVDDILGEGSDDSDSEKRRPEEQEEEPQPRKPGTRRERTLGAPASSERSAAGGRGPRGHKRKLNEEDAASESSRESSNEDEGSSSEADEMAKALEAELNDLM

SEQ ID NO: 42440 - protein, 261 aa, Homo sapiens
MDSSAVITQISKEEARGPLRGKGDQKSAASQKPRSRGILHSLFCCVCRDDGEALPAHSGAPLLVEENGAIPKQTPVQYLLPEAKAQDSDKICVVIDLDETLVHSSFKPVNNADFIIPVEIDGVVHQVYVLKRPHVDEFLQRMGELFECVLFTASLAKYADPVADLLDKWGAFRARLFRESCVFHRGNYVKDLSRLGRDLRRVLILDNSPASYVFHPDNAVPVASWFDNMSDTELHDLLPFFEQLSRVDDVYSVLRQPRPGS

SEQ ID NO: 42441 - protein, 975 aa, Homo sapiens
MEDYEQELCGVEDDFHNQFAAELEVLAELEGASTPSPSGVPLFTAGRPPRTFEEALARGDAASSPAPAASVGSSQGGARKRQVDADLQPAGSLPHAPRIKRPRLQVVKRLNFRSEEMEEPPPPDSSPTDITPPPSPEDLAELWGHGVSEAAADVGLTRASPAARNPVLRRPPILEDYVHVTSTEGVRAYLVLRADPMAPGVQGSLLHVPWRGGGQLDLLGVSLASLKKQVDGERRERLLQEAQKLSDTLHSLRSGEEEAAQPLGAPEEEPTDGQDASSHCLWVDEFAPRHYTELLSDDFTNRCLLKWLKLWDLVVFGHERPSRKPRPSVEPARVSKEATAPGKWKSHEQVLEEMLEAGLDPSQRPKQKVALLCGPPGLGKTTLAHVIARHAGYSVVEMNASDDRSPEVFRTRIEAATQMESVLGAGGKPNCLVIDEIDGAPVAAINVLLSILNRKGPQEVGPQGPAVPSGGGRRRRAEGGLLMRPIICICNDQFAPSLRQLKQQAFLLHFPPTLPSRLVQRLQEVSLRQGMRADPGVLAALCEKTDNDIRACINTLQFLYSRGQRELSVRDVQATRVGLKDQRRGLFSVWQEVFQLPRAQRRRVGQDPALPADTLLLGDGDAGSLTSASQRFYRVLHAAASAGEHEKVVQGLFDNFLRLRLRDSSLGAVCVALDWLAFDDLLAGAAHHSQSFQLLRYPPFLPVAFHVLFASSHTPRITFPSSQQEAQNRMSQMRNLIQTLVSGIAPATRSRATPQALLLDALCLLLDILAPKLRPVSTQLYSTREKQQLASLVGTMLAYSLTYRQERTPDGQYIYRLEPNVEELCRFPELPARKPLTYQTKQLIAREIEVEKMRRAEASARVENSPQVDGSPPGLEGLLGGIGEKGVHRPAPRNHEQRLEHIMRRAAREEQPEKDFFGRVVVRSTAVPSAGDTAPEQDSVERRMGTAVGRSEVWFRFNEGVSNAVRRSLYIRDLL

SEQ ID NO: 42442 - protein, 1184 aa, Homo sapiens
MHVNASARRWGRGGAAALPGPAASPRRPAPRTGPVGRPTLAPSPSRAHAHAKTNLLPGRAVQAPDAVPGAGSSRAPARWRPRDPGSSAPDAWQRFRPAPLRAQPRPPPRPAPGPPPPRKGGCGGQWRAPQDRTRGLRSRNSPRPPLAQPRLRHANQWRAPPGTPAADWRRPARSGRAVRDGGGGAGGSERELGLADGMEDYEQELCGVEDDFHNQFAAELEVLAELEGASTPSPSGVPLFTAGRPPRTFEEALARGDAASSPAPAASVGSSQGGARKRQVDADLQPAGSLPHAPRIKRPRLQVVKRLNFRSEEMEEPPPPDSSPTDITPPPSPEDLAELWGHGFSEAAADVGLTRASPAARNPVLRRPPILEDYVHVTSTEGVRAYLVLRADPMAPGVQGSLLHVPWRGGGQLDLLGVSLASLKKQVDGERRERLLQEAQKLSDTLHRSGEEEAAQPLGAPEEEPTDGQDASSHCLWVDEFAPRHYTELLSDDFTNRCLLKWLKLWDLVVFGHERPSRKPRPSVEPARVSKEATAPGKWKSHEQVLEEMLEAGLDPSQRPKQKVALLCGPPGLGKTTLAHVIARHAGYSVVEMNASDDRSPEVFRTRIEAATQMESVLGAGGKPNCLVIDEIDGAPVAAINVLLSILNRKGPQEVGPQGPAVPSGGGRRRRAEGGLLMRPIICICNDQFAPSLRQLKQQAFLLHFPPTLPSRLVQRLQEGMRADPGVLAALCEKTDNDIRACINTLQFLYSRGQRELSVRDVQATRVGLKDQRRGLFSVWQEVFQLPRAQRSSQHVSVLTCHGTPGDAGLVVLQDMGDAGLGLWDVLLLAWTRRGTFPGRFYRVLHAAASAGEHEKVVQGLFDNFLRLRLRDSSLGAVCVALDWLAFDDLLAGAAHHSQSFQLLRYPPFLPVAFHVLFASSHTPRITFPSSQQEAQNRMSQMRNLIQTLVSGIAPATRSRATPQALLLDALCLLLDILAPKLRPVSTQLYSTREKQQLASLVGTMLAYSLTYRQERTPDGQYIYRLEPNVEELCRFPELPARKPLTYQTKQLIAREIEVEKMRRAEASARVENSPQVDGSPPGLEGLLGGIGEKGVHRPAPRNHEQRLEHIMRRAAREEQPEKDFFGRVVVRSTAVPSAGDTAPEQDSVERRMGTAVGRSEVWFRFNEGVSNAVRRSLYIRDLL

SEQ ID NO: 42443 - protein, 1003 aa, Homo sapiens
MEDYEQELCGVEDDFHNQFAAELEVLAELEGASTPSPSGVPLFTAGRPPRTFEEALARGDAASSPAPAASVGSSQGGARKRQVDADLQPAGSLPHGRLAALPQGLRSGREAEEASGSLHVSPPAPRIKRPRLQVVKRLNFRSEEMEEPPPPDSSPTDITPPPSPEDLAELWGHGVSEAAADVGLTRASPAARNPVLRRPPILEDYVHVTSTEGVRAYLVLRADPMAPGVQGSLLHVPWRGGGQLDLLGVSLASLKKQVDGERRERLLQEAQKLSDTLHSLRSGEEEAAQPLGAPEEEPTDGQDASSHCLWVDEFAPRHYTELLSDDFTNRCLLKWLKLWDLVVFGHERPSRKPRPSVEPARVSKEATAPGKWKSHEQVLEEMLEAGLDPSQRPKQKVALLCGPPGLGKTTLAHVIARHAGYSVVEMNASDDRSPEVFRTRIEAATQMESVLGAGGKPNCLVIDEIDGAPVAAINVLLSILNRKGPQEVGPQGPAVPSGGGRRRRAEGGLLMRPIICICNDQFAPSLRQLKQQAFLLHFPPTLPSRLVQRLQEVSLRQGMRADPGVLAALCEKTDNDIRACINTLQFLYSRGQRELSVRDVQATRVGLKDQRRGLFSVWQEVFQLPRAQRRRVGQDPALPADTLLLGDGDAGSLTSASQRFYRVLHAAASAGEHEKVVQGLFDNFLRLRLRDSSLGAVCVALDWLAFDDLLAGAAHHSQSFQLLRYPPFLPVAFHVLFASSHTPRITFPSSQQEAQNRMSQMRNLIQTLVSGIAPATRSRATPQALLLDALCLLLDILAPKLRPVSTQLYSTREKQQLASLVGTMLAYSLTYRQERTPDGQYIYRLEPNVEELCRFPELPARKPLTYQTKQLIAREIEVEKMRRAEASARVENSPQVDGSPPGLEGLLGGIGEKGVHRPAPRNHEQRLEHIMRRAAREEQPEKDFFGRVVVRSTAVPSAGDTAPEQDSVERRMGTAVGRSEVWFRFNEGVSNAVRRSLYIRDLL

SEQ ID NO: 42444 - protein, 524 aa, Homo sapiens
MKEPRIFPRERPTPWTRAPLPPRGRLDGSLGPQGGPVLNTGHPLGVNSDPFLMAAGSLGGNLTPFPRNPSPFPASSGSLASNPAPFPAGARDPSMASFPRGMNPTGTGAVSFPRPGGLLGPGPGPGPTLNPRTGALPGPGPLSNPRLGGLPGPGPMSNPRAGGLLGAGPDPRGGGPMGPGSGPNLRAGVLLTSGNGPPNPRPVGLGPGPNPNLRSGFLGTNPAPRSGVFPGPGLGPNPRPSGLGPGPNLDARAGGLLGTGSGLNLRMAGPQGLDLAPILRAAGLLGANSASFSQASGNMGTSPSSMARVPGPMGPNSGPSSRGIGLPGPNPSPMSRAPGPIGPNSAHFSRPVGPMGVNANPFPRGAGSSAFSQSSGTLASNPATFQRSAGLQGSNPTIFPRASGPLGPNPANFPRATGLQGPSPTTFPRSTGPLGPGQVTFPRPAAGHLGPSPAGPVGINPAPFTRPTGTLGLNPASFPRMNGPAGKSFVPFPRVGSLPGTNPAAFPRPGGPMAAMYPNGMLPP

SEQ ID NO: 42445 - protein, 121 aa, Homo sapiens
MVQIVISSARAGGLAEWVLMELQGEIEARYSTGLAGNLLGDLHYTTEGIPVLIVGHHILYGKIIHLEKPFAVLVKHTPGDQDCDELGRETGTRYLVTALIKDKILFKTRPKPIITSVPKKV

SEQ ID NO: 42446 - protein, 121 aa, Homo sapiens; identical to SEQ ID NO: 42445

SEQ ID NO: 42447 - protein, 591 aa, Homo sapiens
MKYILVTGGVISGIGKGIIASSVGTILKSCGLHVTSIKIDPYINIDAGTFSPYEHGEVFVLDDGGEVDLDLGNYERFLDIRLTKDNNLTTGKIYQYVINKERKGDYLGKTVQVVPHITDAIQEWVMRQALIPVDEDGLEPQVCVIELGGTVGDIESMPFIEAFRQFQFKVKRENFCNIHVSLVPQPSSTGEQKTKPTQNSVRELRGLGLSPDLVVCRCSNPLDTSVKEKISMFCHVEPEQVICVHDVSSIYRVPLLLEEQGVVDYFLRRLDLPIERQPRKMLMKWKEMADRYDRLLETCSIALVGKYTKFSDSYASVIKALEHSALAINHKLEIKYIDSADLEPITSQEEPVRYHEAWQKLCSAHGVLVPGGFGVRGTEGKIQAIAWARNQKKPFLGVCLGMQLAVVEFSRNVLGWQDANSTEFDPTTSHPVVVDMPEHNPGQMGGTMRLGKRRTLFQTKNSVMRKLYGDADYLEERHRHRFEVNPVWKKCLEEQGLKFVGQDVEGERMEIVELEDHPFFVGVQYHPEFLSRPIKPSPPYFGLLLASVGRLSHYLQKGCRLSPRDTYSDRSGSSSPDSEITELKFPSINHD

SEQ ID NO: 42448 - protein, 591 aa, Homo sapiens; identical to SEQ ID NO: 42447

SEQ ID NO: 42449 - protein, 360 aa, Homo sapiens
MFCHVEPEQVICVHDVSSIYRVPLLLEEQGVVDYFLRRLDLPIERQPRKMLMKWKEMADRYDRLLETCSIALVGKYTKFSDSYASVIKALEHSALAINHKLEIKYIDSADLEPITSQEEPVRYHEAWQKLCSAHGVLVPGGFGVRGTEGKIQAIAWARNQKKPFLGVCLGMQLAVVEFSRNVLGWQDANSTEFDPTTSHPVVVDMPEHNPGQMGGTMRLGKRRTLFQTKNSVMRKLYGDADYLEERHRHRFEVNPVWKKCLEEQGLKFVGQDVEGERMEIVELEDHPFFVGVQYHPEFLSRPIKPSPPYFGLLLASVGRLSHYLQKGCRLSPRDTYSDRSGSSSPDSEITELKFPSINHD

SEQ ID NO: 42450 - protein, 314 aa, Homo sapiens
MPKSKSKMKYILVTGGVISGIGKGIIASSVGTILKSCGLHVTSIKIDPYINIDAGTFSPYEHGEVFVLDDGGEVDLDLGNYERFLDIRLTKDNNLTTGKIYQYVINKERKGDYLGKTVQVVPHITDAIQEWVMRQALIPVDEDGLEPQVCVIELGGTVGDIESMPFIEAFRQFQFKVKRENFCNIHVSLVPQPSSTGEQKTKPTQNSVRELRGLGLSPDLVVCRCSNPLDTSVKEKISMFCHVEPEQVICVHDVSSIYRVPLLLEEQGVVDYFLRRLDLPIERQPRKMLMKWKEMADRFACNEELGVLASFTLL

SEQ ID NO: 42451 - protein, 586 aa, Homo sapiens
MKYILVTGGVISGIGKGIIASSIGTILKSCGLRVTAIKIDPYINIDAGTFSPYEHGEVFVLNDGGEVDLDLGNYERFLDINLYKDNNITTGKIYQHVINKERRGDYLGKTVQVVPHITDAVQEWVMNQAKVPVDGNKEEPQICVIELGGTIGDIEGMPFVEAFRQFQFKAKRENFCNIHVSLVPQLSATGEQKTKPTQNSVRALRGLGLSPDLIVCRSSTPIEMAVKEKISMFCHVNPEQVICIHDVSSTYRVPVLLEEQSIVKYFKERLHLPIGDSASNLLFKWRNMADRYERLQKICSIALVGKYTKLRDCYASVFKALEHSALAINHKLNLMYIDSIDLEKITETEDPVKFHEAWQKLCKADGILVPGGFGIRGTLGKLQAISWARTKKIPFLGVCLGMQLAVIEFARNCLNLKDADSTEFRPNAPVPLVIDMPEHNPGNLGGTMRLGIRRTVFKTENSILRKLYGDVPFIEERHRHRFEVNPNLIKQFEQNDLSFVGQDVDGDRMEIIELANHPYFVGVQFHPEFSSRPMKPSPPYLGLLLAATGNLNAYLQQGCKLSSSDRYSDASDDSFSEPRIAELEIS

SEQ ID NO: 42452 - protein, 176 aa, Homo sapiens
MYIDSIDLEKITETEDPVKFHEAWQKLCKADGILVPGGFGIRGTLGKLQAISWARTKKIPFLGVCLGMQLAVIEFARNCLNLKDADSTEFRPNAPVPLVIDMPEHNPGNLGGTMRLGIRRTVFKTENSILISLSLGLASVEHTECPSAFDLRDSLFIGLFCELPMLLEMNLDWDLD

SEQ ID NO: 42453 - protein, 586 aa, Homo sapiens; identical to SEQ ID NO: 42451

SEQ ID NO: 42454 - protein, 586 aa, Homo sapiens; identical to SEQ ID NO: 42451

SEQ ID NO: 42455 - protein, 132 aa, Homo sapiens
  VARIANT 1: note = MOD_RES - Any amino acid
XGKLQAISWARTKKIPFLGVCLGMQLAVIEFARNCLNLKDADSTEFRPNAPVPLVIDMPEHNPGNLGGTMRLGIRRTVFKTENSILISLSLGLASVEHTECPSAFDLRDSLFIGLFCELPMLLEMNLDWDLD

SEQ ID NO: 42456 - protein, 1217 aa, Homo sapiens
MAAGRAQVPSSEQAWLEDAQVFIQKTLCPAVKEPNVQLTPLVIDCVKTVWLSQGRNQGSTLPLSYSFVSVQDLKTHQRLPCCSHLSWSSSAYQAWAQEAGPNGNPLPREQLLLLGTLTDLSADLEQECRNGSLYVRDNTGVLSCELIDLDLSWLGHLFLFPRWSYLPPARWNSSGEGHLELWDAPVPVFPLTISPGPVTPIPVLYPESASCLLRLRNKLRGVQRNLAGSLVRLSALVKSKQKAYFILSLGRSHPAVTHVSIIVQVPAQLVWHRALRPGTAYVLTELRVSKIRGQRQHVWMTSQSSRLLLLKPECVQELELELEGPLLEADPKPLPMPSNSEDKKDPESLVRYSRLLSYSGAVTGVLNEPAGLYELDGQLGLCLAYQQFRGLRRVMRPGVCLQLQDVHLLQSVGGGTRRPVLAPCLRGAVLLQSFSRQKPGAHSSRQAYGASLYEQLVWERQLGLPLYLWATKALEELACKLCPHVLRHHQFLQHSSPGSPSLGLQLLAPTLDLLAPPGSPVRNAHNEILEEPHHCPLQKYTRLQTPSSFPTLATLKEEGQRKAWASFDPKALLPLPEASYLPSCQLNRRLAWSWLCLLPSAFCPAQVLLGVLVASSHKGCLQLRDQSGSLPCLLLAKHSQPLSDPRLIGCLVRAERFQLIVERDVRSSFPSWKELSMPGFIQKQQARVYVQFFLADALILPVPRPCLHSATPSTPQTDPTGPEGPHLGQSRLFLLCHKEALMKRNFCVPPGASPEVPKPALSFYVLGSWLGGTQRKEGTGWGLPEPQGNDDNDQKVHLIFFGSSVRWFEFLHPGQVYRLIAPGPATPMLFEKDGSSCISRRPLELAGCASCLTVQDNWTLELESSQDIQDVLDANKSLPESSLTDLLSDNFTDSLVSFSAEILSRTLCEPLVASLWMKLGNTGAMRRCVKLTVALETAECEFPPHLDVYIEDPHLPPSLGLLPGARVHFSQLEKRVSRSHNVYCCFRSSTYVQVLSFPPETTISIPLPHIYLAELLQGGQSPFQATASCHIVSVFSLQLFWVCAYCTSICRQGKCTRLGSTCPTQTAISQAIIRLLVEDGTAEAVVTCRNHHVAAALGLCPREWASLLDFVQVPGRVVLQFAGPGAQLESSARVDEPMTMFLWTLCTSPSVLRPIVLSFELERKPSKIVPLEPPRLQRFQCGELPFLTHVNPRLRLSCLSIRESEYSSSLGILASSC

SEQ ID NO: 42457 - protein, 1031 aa, Homo sapiens
MAAGRAQVPSSEQAWLEDAQVFIQKTLCPAVKEPNVQLTPLVIDCVKTVWLSQGRNQGSTLPLSYSFVSVQDLKTHQRLPCCSHLSWSSSAYQAWAQEAGPNGNPLPREQLLLLGTLTDLSADLEQECRNGSLYVRDNTGVLSCELIDLDLSWLGHLFLFPRWSYLPPARWNSSGEGHLELWDAPVPVFPLTISPGPVTPIPVLYPESASCLLRLRSHPAVTHVSIIVQVPAQLVWHRALRPGTAYVLTELRVSKIRGQRQHVWMTSQSSRLLLLKPECVQELELELEGPLLEADPKPLPMPSNSEDKKDPESLVRYSRLLSYSGAVTGVLNEPAGLYELDGQLGLCLAYQQFRGLRRVMRPGVCLQLQDVHLLQSVGGGTRRPVLAPCLRGAVLLQSFSRQKPGAHSSRQAYGASLYEQLVWERQLGLPLYLWATKALEELACKLCPHVLRHHQFLQHSSPGSPSLGLQLLAPTLDLLAPPGSPVRNAHNEILEEPHHCPLQKYTRLQTPSSFPTLATLKEEGQRKAWASFDPKALLPLPEASYLPSCQLNRRLAWSWLCLLPSAFCPAQVLLGVLVASSHKGCLQLRDQSGSLPCLLLAKHSQPLSDPRLIGCLVRAERFQLIVERDVRSSFPSWKELSMPGFIQKQQARVYVQFFLADALILPVPRPCLHSATPSTPQTDPTGPEGPHLGQSRLFLLCHKEALMKRNFCVPPGASPEVPKPALSFYVLGSWLGGTQRKEGTGWGLPEPQGNDDNDQKVHLIFFGSSVRWFEFLHPGQVYRLIAPGPATPMLFEKDGSSCISRRPLELAGCASCLTVQDNWTLELESSQDIQDVLDANKSLPESSLTDLLSDNFTDSLVSFSAEILSRTLCEPLVASLWMKLGNTGAMRRCVKLTVALETAECEFPPHLDVYIEDPHLPPSLGLLPGARVHFSQLEKRVSRSHNVYCCFRSSTYVQVLSFPPETTISIPLPHIYLAELLQGGQSPFQATASCHIVSVFSLQLFWVCAYCTSICRQAPGGGWDCRSRGDL

SEQ ID NO: 42458 - protein, 280 aa, Homo sapiens
MQAKYSSTRDMLDDDGDTTMSLHSQGSATTRHPEPRRTEHRAPSSTWRPVALTLLTLCLVLLIGLAALGLLFFQYYQLSNTGQDTISQMEERLGNTSQELQSLQVQNIKLAGSLQHVAEKLCRELYNKAGAHRCSPCTEQWKWHGDNCYQFYKDSKSWEDCKYFCLSENSTMLKINKQEDLEFAASQSYSEFFYSYWTGLLRPDSGKAWLWMDGTPFTSELFHIIIDVTSPRSRDCVAILNGMIFSKDCKELKRCVCERRAGMVKPESLHVPPETLGEGD

SEQ ID NO: 42459 - protein, 70 aa, Homo sapiens
MQAKYSSTRDMLDDDGDTTMSLHSQGSATTRHPEPRRTEHRAPSSTWRPVALTLLTLCLVLLIGLAALGL

SEQ ID NO: 42460 - protein, 292 aa, Homo sapiens
MTRTYENFQYLENKVKVQGFKNGPLPLQSLLQRLCSGPCHLLLSLGLGLLLLVIICVVGFQNSKFQRDLVTLRTDFSNFTSNTVAEIQALTSQGSSLEETIASLKAEVEGFKQERQAVHSEMLLRVQQLVQDLKKLTCQVATLNNNGEEASTEGTCCPVNWVEHQDSCYWFSHSGMSWAEAEKYCQLKNAHLVVINSREEQNFVQKYLGSAYTWMGLSDPEGAWKWVDGTDYATGFQNWKPGQPDDWQGHGLGGGEDCAHFHPDGRWNDDVCQRPYHWVCEAGLGQTSQESH

SEQ ID NO: 42461 - protein, 316 aa, Homo sapiens
MTRTYENFQYLENKVKVQGFKNGPLPLQSLLQRLCSGPCHLLLSLGLGLLLLVIICVVGFQNSKFQRDLVTLRTDFSNFTSNTVAEIQALTSQGSSLEETIASLKAEVEGFKQERQAGVSELQEHTTQKAHLGHCPHCPSVCVPVHSEMLLRVQQLVQDLKKLTCQVATLNNNASTEGTCCPVNWVEHQDSCYWFSHSGMSWAEAEKYCQLKNAHLVVINSREEQNFVQKYLGSAYTWMGLSDPEGAWKWVDGTDYATGFQNWKPGQPDDWQGHGLGGGEDCAHFHPDGRWNDDVCQRPYHWVCEAGLGQTSQESH

SEQ ID NO: 42462 - protein, 292 aa, Homo sapiens; identical to SEQ ID NO: 42460

SEQ ID NO: 42463 - protein, 265 aa, Homo sapiens
MSEEVTYADLQFQNSSEMEKIPEIGKFGEKAPPAPSHVWRPAALFLTLLCLLLLIGLGVLASMFHVTLKIEMKKMNKLQNISEELQRNISLQLMSNMNISNKIRNLSTTLQTIATKLCRELYSKEQEHKCKPCPRRWIWHKDSCYFLSDDVQTWQESKMACAAQNASLLKINNKNALEFIKSQSRSYDYWLGLSPEEDSTRGMRVDNIINSSAWVIRNAPDLNNMYCGYINRLYVQYYHCTYKKRMICEKMANPVQLGSTYFREA

SEQ ID NO: 42464 - protein, 232 aa, Homo sapiens
MSEEVTYADLQFQNSSEMEKIPEIGKFGEKVHVTLKIEMKKMNKLQNISEELQRNISLQLMSNMNISNKIRNLSTTLQTIATKLCRELYSKEQEHKCKPCPRRWIWHKDSCYFLSDDVQTWQESKMACAAQNASLLKINNKNALEFIKSQSRSYDYWLGLSPEEDSTRGMRVDNIINSSAWVIRNAPDLNNMYCGYINRLYVQYYHCTYKKRMICEKMANPVQLGSTYFREA

SEQ ID NO: 42465 - protein, 275 aa, Homo sapiens
MWIDFFTYSSMSEEVTYADLQFQNSSEMEKIPEIGKFGEKAPPAPSHVWRPAALFLTLLCLLLLIGLGVLASMFHVTLKIEMKKMNKLQNISEELQRNISLQLMSNMNISNKIRNLSTTLQTIATKLCRELYSKEQEHKCKPCPRRWIWHKDSCYFLSDDVQTWQESKMACAAQNASLLKINNKNALEFIKSQSRSYDYWLGLSPEEDSTRGMRVDNIINSSAWVIRNAPDLNNMYCGYINRLYVQYYHCTYKKRMICEKMANPVQLGSTYFREA

SEQ ID NO: 42466 - protein, 87 aa, Homo sapiens
HKCKPCPRRWIWHKDSCYFLSDDVQTWQESKMACAAQNASLLKINNKNIFSVIKKKTEKFFWLGLSWDSSGRSWFWEDGSVPSPSLY

SEQ ID NO: 42467 - protein, 165 aa, Homo sapiens
MSEEVTYADLQFQNSSEMEKIPEIGKFGEKAPPAPSHVWRPAALFLTLLCLLLLIGLGVLASMFHVTLKIEMKKMNKLQNISEELQRNISLQLMSNMNISNKIRNLSTTLQTIATKLCRELYSKEQEHKCKPCPRRWIWHKDSCYFLSDDVQTWQESKMACAAQN

SEQ ID NO: 42468 - protein, 213 aa, Homo sapiens
MSEEVTYADLQFQNSSEMEKIPEIGKFGEKAPPAPSHVWRPAALFLTLLCLLLLIGLGVLASMFHVTLKIEMKKMNKLQNISEELQRNISLQLMSNMNISNKIRNLSTTLQTIATKLCRELYSKEQEHKCKPCPRRWIWHKDSCYFLSDDVQTWQESKMACAAQNASLLKINNKNALEFIKSQSRSYDYWLGLSPEEDSTRGMRVDNIINSSA

SEQ ID NO: 42469 - protein, 140 aa, Homo sapiens
MAATGFSAPNGSCHGTSRTVNSDAPMSPELPKPHLPDQLVIVNETEADSKPSKNVARSAAVETASLSPSLVPARQPTISLLCEDTADTLSVESLTLVPPVDPHSLRSLTGMPPLSTPAAACTEPVGEEAACAEPVGTAED

SEQ ID NO: 42470 - protein, 906 aa, Homo sapiens
MFGRSRSWVGGGHGKTSRNIHSLDHLKYLYHVLTKNTTVTEQNRNLLVETIRSITEILIWGDQNDSSVFDFFLEKNMFVFFLNILRQKSGRYVCVQLLQTLNILFENISHETSLYYLLSNNYVNSIIVHKFDFSDEEIMAYYISFLKTLSLKLNNHTVHFFYNEHTNDFALYTEAIKFFNHPESMVRIAVRTITLNVYKVDNQAMLHYIRDKTAVPYFSNLVWFIGSHVIELDDCVQTDEEHRNRGKLSDLVAEHLDHLHYLNDILIINCEFLNDVLTDHLLNRLFLPLYVYSLENQDKGGERPKISLPVSLYLLSQVFLIIHHAPLVNSLAEVILNGDLSEMYAKTEQDIQRSSAKPSIRCFIKPTETLERSLEMNKHKGKRRVQKRPNYKNVGEEEDEEKGPTEDAQEDAEKAKEIEMVIMERSKLSELAASTSVQEQNTTDEEKSAAATCSESTQWSRPFLDMVYHALDSPDDDYHALFVLCLLYAMSHNKGMDPEKLERIQLPVPNAAEKTTYNHPLAERLIRIMNNAAQPDGKIRLATLELSCLLLKQQVLMSAGCIMKDVHLACLEGAREESVHLVRHFYKGEDIFLDMFEDEYRSMTMKPMNVEYLMMDASILLPPTGTPLTGIDFVKRLPCGDVEKTRRAIRVFFMLRSLSLQLRGEPETQLPLTREEDLIKTDDVLDLNNSDLIACTVITKDGGMVQRFLAVDIYQMSLVEPDVSRLGWGVVKFAGLLQDMQVTGVEDDSRALNITIHKPASSPHSKPFPILQATFIFSDHIRCIIAKQRLAKGRIQARRMKMQRIAALLDLPIQPTTEVLGFGLGSSTSTQHLPFRFYDQGRRGSSDPTVQRSVFASVDKVPGEPAPRPAPQLVHHGGRSRSFSLWSLCELPFLSQKPRRLAAPAS

SEQ ID NO: 42471 - protein, 1053 aa, Homo sapiens
MFGRSRSWVGGGHGKTSRNIHSLDHLKYLYHVLTKNTTVTEQNRNLLVETIRSITEILIWGDQNDSSVFDFFLEKNMFVFFLNILRQKSGRYVCVQLLQTLNILFENISHETSLYYLLSNNYVNSIIVHKFDFSDEEIMAYYISFLKTLSLKLNNHTVHFFYNEHTNDFALYTEAIKFFNHPESMVRIAVRTITLNVYKVSLDNQAMLHYIRDKTAVPYFSNLVWFIGSHVIELDDCVQTDEEHRNRGKLSDLVAEHLDHLHYLNDILIINCEFLNDVLTDHLLNRLFLPLYVYSLENQDKGGERPKISLPVSLYLLSQVFLIIHHAPLVNSLAEVILNGDLSEMYAKTEQDIQRSSAKPSIRCFIKPTETLERSLEMNKHKGKRRVQKRPNYKNVGEEEDEEKGPTEDAQEDAEKAKGTEGGSKGIKTSGESEEIEMVIMERSKLSELAASTSVQEQNTTDEEKSAAATCSESTQWSRPFLDMVYHALDSPDDDYHALFVLCLLYAMSHNKGMDPEKLERIQLPVPNAAEKTTYNHPLAERLIRIMNNAAQPDGKIRLATLELSCLLLKQQVLMSAGCIMKDVHLACLEGAREESVHLVRHFYKGEDIFLDMFEDEYRSMTMKPMNVEYLMMDASILLPPTGTPLTGIDFVKRLPCGDVEKTRRAIRVFFMLRSLSLQLRGEPETQLPLTREEDLIKTDDVLDLNNSDLIACTVITKDGGMVQRFLAVDIYQMSLVEPDVSRLGWGVVKFAGLLQDMQVTGVEDDSRALNITIHKPASSPHSKPFPILQATFIFSDHIRCIIAKQRLAKGRIQARRMKMQRIAALLDLPIQPTTEVLGFGLGSSTSTQHLPFRFYDQGRRGSSDPTVQRSVFASVDKVPGFAVAQCINQHSSPSLSSQSPPSASGSPSGSGSTSHCDSGGTSSSSTPSTAQSPADAPMSPELPKPHLPDQLVIVNETEADSKPSKNVARSAAVETASLSPSLVPARQPTISLLCEDTADTLSVESLTLVPPVDPHSLRSLTGMPPLSTPAAACTEPVGEEAACAEPVGTAED

SEQ ID NO: 42472 - protein, 1053 aa, Homo sapiens
MFGRSRSWVGGGHGKTSRNIHSLDHLKYLYHVLTKNTTVTEQNRNLLVETIRSITEILIWGDQNDSSVFDFFLEKNMFVFFLNILRQKSGRYVCVQLLQTLNILFENISHETSLYYLLSNNYVNSIIVHKFDFSDEEIMAYYISFLKTLSLKLNNHTVHFFYNEHTNDFALYTEAIKFFNHPESMVRIAVRTITLNVYKVSVDNQAMLHYIRDKTAVPYFSNLVWFIGSHVIELDDCVQTDEEHRNRGKLSDLVAEHLDHLHYLNDILIINCEFLNDVLTDHLLNRLFLPLYVYSLENQDKGGERPKISLPVSLYLLSQVFLIIHHAPLVNSLAEVILNGDLSEMYAKTEQDIQRSSAKPSIRCFIKPTETLERSLEMNKHKGKRRVQKRPNYKNVGEEEDEEKGPTEDAQEDAEKAKGTEGGSKGIKTSGESEEIEMVIMERSKLSELAASTSVQEQNTTDEEKSAAATCSESTQWSRPFLDMVYHALDSPDDDYHALFVLCLLYAMSHNKGMDPEKLERIQLPVPNAAEKTTYNHPLAERLIRIMNNAAQPDGKIRLATLELSCLLLKQQVLMSAGCIMKDVHLACLEGAREESVHLVRHFYKGEDIFLDMFEDEYRSMTMKPMNVEYLMMDASILLPPTGTPLTGIDFVKRLPCGDVEKTRRAIRVFFMLRSLSLQLRGEPETQLPLTREEDLIKTDDVLDLNNSDLIACTVITKDGGMVQRFLAVDIYQMSLVEPDVSRLGWGVVKFAGLLQDMQVTGVEDDSRALNITIHKPASSPHSKPFPILQATFIFSDHIRCIIAKQRLAKGRIQARRMKMQRIAALLDLPIQPTTEVLGFGLGSSTSTQHLPFRFYDQGRRGSSDPTVQRSVFASVDKVPGFAVAQCINQHSSPSLSSQSPPSASGSPSGSGSTSHCDSGGTSSSSTPSTAQSPADAPMSPELPKPHLPDQLVIVNETEADSKPSKNVARSAAVETASLSPSLVPARQPTISLLCEDTADTLSVESLTLVPPVDPHSLRSLTGMPPLSTPAAACTEPVGEEAACAEPVGTAED

SEQ ID NO: 42473 - protein, 95 aa, Homo sapiens
MHDSNNVEKDITPSELPANPAIRANCHQEPSVCLQAACPESWIGFQRKCFYFSDDTKNWTSSQRFCDSQDADLAQVESFQELVSYPGSRRVCLFE

SEQ ID NO: 42474 - protein, 174 aa, Homo sapiens
MINPELRDGRADGFIHRIVPKLIQNWKIGLMCFLSIIITTVCIIMIATWSKHAKPVACSGDWLGVRDKCFYFSDDTRNWTASKIFCSLQKAELAQIDTQEDMEFLKRYAGTDMHWIGLSRKQGDSWKWTNGTTFNGWFEIIGNGSFAFLSADGVHSSRGFIDIKWICSKPKYFL

SEQ ID NO: 42475 - protein, 149 aa, Homo sapiens
MMTKHKKCFIIVGVLITTNIITLIVKLTRDSQSLCPYDWIGFQNKCYYFSKEEGDWNSSKYNCSTQHADLTIIDNIEEMNFLRRYKCSSDHWIGLKMAKNRTGQWVDGATFTKSFGMRGSEGCAYLSDDGAATARCYTERKWICRKRIH

SEQ ID NO: 42476 - protein, 154 aa, Homo sapiens
MHDSNNVEKDITPSELPANPAIRANCHQEPSVCLQAACPESWIGFQRKCFYFSDDTKNWTSSQRFCDSQDADLAQVESFQELNFLLRYKGPSDHWIGLSREQGQPWKWINGTEWTRQFPILGAGECAYLNDKGASSARHYTERKWICSKSDIHV

SEQ ID NO: 42477 - protein, 194 aa, Homo sapiens
MHDSNNVEKDITPSELPANPGCLHSKEHSIKATLIWRLFFLIMFLTIIVCGMVAALSAIRANCHQEPSVCLQAACPESWIGFQRKCFYFSDDTKNWTSSQRFCDSQDADLAQVESFQELNFLLRYKGPSDHWIGLSREQGQPWKWINGTEWTRQLVMKEDGANLYVAKVSQVPRMNPRPVMVSYPGSRRVCLFE

SEQ ID NO: 42478 - protein, 191 aa, Homo sapiens
MHDSNNVEKDITPSELPANPGCLHSKEHSIKATLIWRLFFLIMFLTIIVCGMVAALSAIRANCHQEPSVCLQAACPESWIGFQRKCFYFSDDTKNWTSSQRFCDSQDADLAQVESFQELNFLLRYKGPSDHWIGLSREQGQPWKWINGTEWTRQFPILGAGECAYLNDKGASSARHYTERKWICSKSDIHV

SEQ ID NO: 42479 - protein, 132 aa, Homo sapiens
MHDSNNVEKDITPSELPANPGCLHSKEHSIKATLIWRLFFLIMFLTIIVCGMVAALSAIRANCHQEPSVCLQAACPESWIGFQRKCFYFSDDTKNWTSSQRFCDSQDADLAQVESFQELVSYPGSRRVCLFE

SEQ ID NO: 42480 - protein, 296 aa, Homo sapiens
MSDSKEPRVQQLGLLGCLGHGALVLQLLSFMLLAGVLVAILVQVSKVPSSLSQEQSEQDAIYQNLTQLKAAVGELSEKSKLQEIYQELTQLKAAVGELPEKSKLQEIYQELTRLKAAVGELPEKSKLQEIYQELTRLKAAVGELPEKSKLQEIYQELTRLKAAVGELPEKSKLQEIYQELTELKAAVGELPEKSKLQEIYQELTQLKAAVGELPDQSKQQQIYQELTDLKTAFERLCRHCPKDWTFFQGNCYFMSNSQRNWHDSVTACQEVRAQLVVIKTAEEQLPAVLEQWRTQQ

SEQ ID NO: 42481 - protein, 237 aa, Homo sapiens
MTSEITYAEVRFKNEFKSSGINTASSAASKERTAPHKSNTGFPKLLCASLLIFFLLLAISFFIAFVIFFQKYSQLLEKKTTKELVHTTLECVKKNMPVEETAWSCCPKNWKSFSSNCYFISTESASWQDSEKDCARMEAHLLVINTQEEQDFIFQNLQEESAYFVGLSDPEGQRHWQWVDQTPYNESSTFWHPREPSDPNERCVVLNFRKSPKRWGWNDVNCLGPQRSVCEMMKIHL

SEQ ID NO: 42482 - protein, 165 aa, Homo sapiens
MTSEITYAEVRFKNEFKSSGINTASSAETAWSCCPKNWKSFSSNCYFISTESASWQDSEKDCARMEAHLLVINTQEEQDFIFQNLQEESAYFVGLSDPEGQRHWQWVDQTPYNESSTFWHPREPSDPNERCVVLNFRKSPKRWGWNDVNCLGPQRSVCEMMKIHL

SEQ ID NO: 42483 - protein, 204 aa, Homo sapiens
MTSEITYAEVRFKNEFKSSGINTASSAASKERTAPHKSNTGFPKLLCASLLIFFLLLAISFFIAFVKTAWSCCPKNWKSFSSNCYFISTESASWQDSEKDCARMEAHLLVINTQEEQDFIFQNLQEESAYFVGLSDPEGQRHWQWVDQTPYNESSTFWHPREPSDPNERCVVLNFRKSPKRWGWNDVNCLGPQRSVCEMMKIHL

SEQ ID NO: 42484 - protein, 198 aa, Homo sapiens
MTSEITYAEVRFKNEFKSSGINTASSAVFFQKYSQLLEKKTTKELVHTTLECVKKNMPVEETAWSCCPKNWKSFSSNCYFISTESASWQDSEKDCARMEAHLLVINTQEEQDFIFQNLQEESAYFVGLSDPEGQRHWQWVDQTPYNESSTFWHPREPSDPNERCVVLNFRKSPKRWGWNDVNCLGPQRSVCEMMKIHL

SEQ ID NO: 42485 - protein, 182 aa, Homo sapiens
MVPEEEPQDRVPHNFMYSKTVKRLSKLREYQQYHPSLTCVMEGKDIEDWSCCPTPWTSFQSSCYFISTGMQSWTKSQKNCSVMGADLVVINTREEQDFIIQNLKRNSSYFLGLSDPGGRRHWQWVDQTPYNENVTFWHSGEPNNLDERCAIINFRSSEEWGWNDIHCHVPQKSICKMKKIYI

SEQ ID NO: 42486 - protein, 213 aa, Homo sapiens
MVPEEEPQDREKGLWWFQLKVWSMAVVSILLLSVCFTVSSVVPHNFMYSKTVKRLSKLREYQQYHPSLTCVMEGKDIEDWSCCPTPWTSFQSSCYFISTGMQSWTKSQKNCSVMGADLVVINTREEQDFIIQNLKRNSSYFLGLSDPGGRRHWQWVDQTPYNENVTFWHSGEPNNLDERCAIINFRSSEEWGWNDIHCHVPQKSICKMKKIYI

SEQ ID NO: 42487 - protein, 182 aa, Homo sapiens; identical to SEQ ID NO: 42485

SEQ ID NO: 42488 - protein, 213 aa, Homo sapiens; identical to SEQ ID NO: 42486

SEQ ID NO: 42489 - protein, 215 aa, Homo sapiens
MGLEKPQSKLEGGMHPQLIPSVIAVVFILLLSVCFIASCLVTHHNFSRCKRGTGVHKLEHHAKLKCIKEKSELKSAEGSTWNCCPIDWRAFQSNCYFPLTDNKTWAESERNCSGMGAHLMTISTEAEQNFIIQFLDRRLSYFLGLRDENAKGQWRWVDQTPFNPRRVFWHKNEPDNSQGENCVVLVYNQDKWAWNDVPCNFEASRICKIPGTTLN

SEQ ID NO: 42490 - protein, 144 aa, Homo sapiens
MGLEKPQSKLEGGMHPQLIPSVIAVVFILLLSVCFIASCLVTHHNFSRCKRGTGVHKLEHHAKLKCIKEKSELKSAEGSTWNCCPIDWRAFQSNCYFPLTDNKTWAESERNCSGMGAHLMTISTEAEQNFIIQFLDRRLSYFLG

SEQ ID NO: 42491 - protein, 219 aa, Homo sapiens
MNSSKSSETQCTERGCFSSQMFLWTVAGIPILFLSACFITRCVVTFRIFQTCDEKKFQLPENFTELSCYNYGSGSVKNCCPLNWEYFQSSCYFFSTDTISWALSLKNCSAMGAHLVVINSQEEQEFLSYKKPKMREFFIGLSDQVVEGQWQWVDGTPLTKSLSFWDVGEPNNIATLEDCATMRDSSNPRQNWNDVTCFLNYFRICEMVGINPLNKGKSL

SEQ ID NO: 42492 - protein, 377 aa, Homo sapiens
MSDSKEPRVQQLGLLEEDPTTSGIRLFPRDFQFQQIHGHKSSTGCLGHGALVLQLLSFMLLAGVLVAILVQVSKVPSSLSQEQSEQDAIYQNLTQLKAAVGELSEKSKLQEIYQELTQLKAAVVGELPEKSKLQEIYQELTRLKAAVGELPEKSKLQEIYQELTRLKAAVGELPEKSKLQEIYQELTELKAAVGELPEKSKLQEIYQELTQLKAAVGELPDQSKQQQIYQELTDLKTAFERLCRHCPKDWTFFQGNCYFMSNSQRNWHDSVTACQEVRAQLVVIKTAEEQNFLQLQTSRSNRFSWMGLSDLNQEGTWQWVDGSPLSPSFQRYWNSGEPNNSGNEDCAEFSGSGWNDNRCDVDNYWICKKPAACFRDE

SEQ ID NO: 42493 - protein, 399 aa, Homo sapiens
MSDSKEPRVQQLGLLEEDPTTSGIRLFPRDFQFQQIHGHKSSTGCLGHGALVLQLLSFMLLAGVLVAILVQVSKVPSSLSQEQSEQDAIYQNLTQLKAAVGELSEKSKLQEIYQELTQLKAAVGELPEKSKLQEIYQELTRLKAAVGELPEKSKLQEIYQELTRLKAAVGELPEKSKLQEIYQELTRLKAAVGELPEKSKLQEIYQELTELKAAVGELPEKSKLQEIYQELTQLKAAVGELPDQSKQQQIYQELTDLKTAFERLCRHCPKDWTFFQGNCYFMSNSQRNWHDSVTACQEVRAQLVVIKTAEEQNFLQLQTSRSNRFSWMGLSDLNQEGTWQWVDGSPLSPSFQRYWNSGEPNNSGNEDCAEFSGSGWNDNRCDVDNYWICKKPAACFRDE

SEQ ID NO: 42494 - protein, 348 aa, Homo sapiens
MSDSKEPRVQQLGLLGCLGHGALVLQLLSFMLLAGVLVAILVQVSKVPSSLSQEQSEQDAIYQNLTQLKAAVGELSEKSKLQEIYQELTQLKAAVGELPEKSKLQEIYQELTRLKAAVGELPEKSKLQEIYQELTRLKAAVGELPEKSKLQEIYQELTELKAAVGELPEKSKLQEIYQELTQLKAAVGELPDQSKQQQIYQELTDLKTAFERLCRHCPKDWTFFQGNCYFMSNSQRNWHDSVTACQEVRAQLVVIKTAEEQNFLQLQTSRSNRFSWMGLSDLNQEGTWQWVDGSPLSPSFQRYWNSGEPNNSGNEDCAEFSGSGWNDNRCDVDNYWICKKPAACFRDE

SEQ ID NO: 42495 - protein, 324 aa, Homo sapiens
MSDSKEPRVQQLGLLEEDPTTSGIRLFPRDFQFQQIHGHKSSTGCLGHGALVLQLLSFMLLAGVLVAILVQVSKVPSSLSQEQSEQDAIYQNLTQLKAAVGELSEKSKLQEIYQELTQLKAAVGELPEKSKLQEIYQELTRLKAAVGELPEKSKLQEIYQELTRLKAAVGELPEKSKLQEIYQELTRLKAAVGELPEKSKLQEIYQELTELKAAVGELPEKSKLQEIYQELTQLKAAVGELPDQSKQQQIYQELTDLKTAFERLCRHCPKDWTFFQGNCYFMSNSQRNWHDSVTACQEVRAQLVVIKTAEEQLPAVLEQWRTQQ

SEQ ID NO: 42496 - protein, 256 aa, Homo sapiens
MSDSKEPRVQQLGLLVSKVPSSLSQEQSEQDAIYQNLTQLKAAVGELSEKSKLQEIYQELTQLKAAVGELPEKSKLQEIYQELTRLKAAVGELPEKSKLQEIYQELTRLKAAVGELPEKSKLQEIYQELTRLKAAVGELPEKSKLQEIYQELTELKAAVGELPEKSKLQEIYQELTQLKAAVGELPDQSKQQQIYQELTDLKTAFERLCRHCPKDWTFFQGNCYFMSNSQRNWHDSVTACQEVRAQLVVIKTAEEQ

SEQ ID NO: 42497 - protein, 332 aa, Homo sapiens
MSDSKEPRVQQLGLLEEDPTTSGIRLFPRDFQFQQIHGHKSSTVPFLLGPVSKVPSSLSQEQSEQDAIYQNLTQLKAAVGELSEKSKLQEIYQELTQLKAAVGELPEKSKLQEIYQELTRLKAAVGELPEKSKLQEIYQELTRLKAAVGELPEKSKLQEIYQELTELKAAVGELPEKSKLQEIYQELTQLKAAVERLCRHCPKDWTFFQGNCYFMSNSQRNWHDSVTACQEVRAQLVVIKTAEEQNFLQLQTSRSNRFSWMGLSDLNQEGTWQWVDGSPLSPSFQRYWNSGEPNNSGNEDCAEFSGSGWNDNRCDVDNYWICKKPAACFRDE

SEQ ID NO: 42498 - protein, 387 aa, Homo sapiens
MSDSKEPRVQQLGLLEEDPTTNFQFQQIHGHKSSTGCLGHGALVLQLLSFMLLAGVLPRLSKVPSSLSQEQSEQDAIYQNLTQLKAAVGELSEKSKLQEIYQELTQLKAAVGELPEKSKLQEIYQELTRLKAAVGELPEKSKLQEIYQELTRLKAAVGELPEKSKLQEIYQELTRLKAAVGELPEKSKLQEIYQELTELKAAVGELPEKSKLQEIYQELTQLKAAVGELPDQSKQQQIYQELTDLKTAFERLCRHCPKDWTFFQGNCYFMSNSQRNWHDSVTACQEVRAQLVVIKTAEEQNFLQLQTSRSNRFSWMGLSDLNQEGTWQWVDGSPLSPSFQRYWNSGEPNNSGNEDCAEFSGSGWNDNRCDVDNYWICKKPAACFRDE

SEQ ID NO: 42499 - protein, 188 aa, Homo sapiens
MNWHMIISGLIVVVLKVVGMTLFLLYFPQIFNKSNDGFTTTRSYGTVSQIFGSSSPSPNGFITTRSYGTVCPKDWEFYQARCFFLSTSESSWNESRDFCKGKGSTLAIVNTPEKLKFLQDITDAEKYFIGLIYHREEKRWRWINNSVFNGNVTNQNQNFNCATIGLTKTFDAASCDISYRRICEKNAK

SEQ ID NO: 42500 - protein, 209 aa, Homo sapiens
MMQEQQPQSTEKRGWLSLRLWSVAGISIALLSACFIVSCVVTYHFTYGETGKRLSELHSYHSSLTCFSEGTKVPAWGCCPASWKSFGSSCYFISSEEKVWSKSEQNCVEMGAHLVVFNTEAEQNFIVQQLNESFSYFLGLSDPQGNNNWQWIDKTPYEKNVRFWHLGEPNHSAEQCASIVFWKPTGWGWNDVICETRRNSICEMNKIYL

SEQ ID NO: 42501 - protein, 143 aa, Homo sapiens
MEYHPDLENLDEDGYTQLHFDSQSNTRIAVVSEKGSCAASPPWRLIAVILGILCLVILVIAVVLGTMGVLSSPCPPNWIIYEKSCYLFSMSLNSWDGSKRQCWQLGSNLLKIDSSNELISDQNHSYPRKPISKLCMDSRVSHL

SEQ ID NO: 42502 - protein, 247 aa, Homo sapiens
MEYHPDLENLDEDGYTQLHFDSQSNTRIAVVSEKGSCAASPPWRLIAVILGILCLVILVIAVVLGTMAIWRSNSGSNTLENGYFLSRNKENHSQPTQSSLEDSVTPTKAVKTTGVLSSPCPPNWIIYEKSCYLFSMSLNSWDGSKRQCWQLGSNLLKIDSSNELGFIVKQVSSQPDNSFWIGLSRPQTEVPWLWEDGSTFSSNLFQIRTTATQENPSPNCVWIHVSVIYDQLCSVPSYSICEKKFSM

SEQ ID NO: 42503 - protein, 77 aa, Homo sapiens
MEYHPDLENLDEDGYTQLHFDSQSNTRIAVVSEKGSCAASPPWRLIAVILGILCLVILVIAVVLGTMAGFKAVEFKG

SEQ ID NO: 42504 - protein, 201 aa, Homo sapiens
MEYHPDLENLDEDGYTQLHFDSQSNTRIAVVSEKGSCAASPPWRLIAVILGILCLVILVIAVVLGTMGVLSSPCPPNWIIYEKSCYLFSMSLNSWDGSKRQCWQLGSNLLKIDSSNELGFIVKQVSSQPDNSFWIGLSRPQTEVPWLWEDGSTFSSNLFQIRTTATQENPSPNCVWIHVSVIYDQLCSVPSYSICEKKFSM

SEQ ID NO: 42505 - protein, 168 aa, Homo sapiens
MEYHPDLENLDEDGYTQLHFDSQSNTRIAVVSEKGVLSSPCPPNWIIYEKSCYLFSMSLNSWDGSKRQCWQLGSNLLKIDSSNELGFIVKQVSSQPDNSFWIGLSRPQTEVPWLWEDGSTFSSNLFQIRTTATQENPSPNCVWIHVSVIYDQLCSVPSYSICEKKFSM

SEQ ID NO: 42506 - protein, 116 aa, Homo sapiens
MEYHPDLENLDEDGYTQLHFDSQSNTRIAVVSEKGSCAASPPWRLIAVILGILCLVILVIAVVLGTMGTGQFLKDLSFLNNRRKLFGDPIQEATHWRMATFYQEIKRTTVNPHNHL

SEQ ID NO: 42507 - protein, 247 aa, Homo sapiens; identical to SEQ ID NO: 42502

SEQ ID NO: 42508 - protein, 189 aa, Homo sapiens
MEYHPDLENLDEDGYTQLHFDSQSNTRIAVVSEKGSCAASPPWRLIAVILGILCLVILVIAVVLGTMAIWRSNSGSNTLENGYFLSRNKENHSQPTQSSLEDSVTPTKAVKTTGVLSSPCPPNWIIYEKSCYLFSMSLNSWDGSKRQCWQLGSNLLKIDSSNELISDQNHSYPRKPISKLCMDSRVSHL

SEQ ID NO: 42509 - protein, 3426 aa, Homo sapiens
VLPSHTCGNPGEILKGVLHGTRFNIGDKIRYSCLPGYILEGHAILTCIVSPGNGASWDFPAPFCRAEGACGGTLRGTSSSISSPHFPSEYENNADCTWTILAEPGDTIALVFTDFQLEEGYDFLEISGTEAPSIWLTGMNLPSPVISSKNWLRLHFTSDSNHRRKGFNAQFQVKKAIELKSRGVKMLPSKDGSHKNSVLSQGGVALVSDMCPDPGIPENGRRAGSDFSRVGANVQFSCEDNYVLQGSKSITCQRVTETLAAWSDHRPICRARTCGSNLRGPSGVITSPNYPVQYEDNAHCVWVITTTDPDKVIKLAFEEFELERGYDTLTVGDAGKVGDTRSVLYVLTGSSVPDLIVSMSNQMWLHLQSDDSIGSPGFKAVYQEIEKGGCGDPGIPAYGKRTGSSFLHGDTLTFECPAAFELVGERVITCQQNNQWSGNKPSCVFSCFFNFTASSGIILSPNYPEEYGNNMNCVWLIISEPGSRIHLIFNDFDVEPQFDFLAVKDDGISDITVLGTFSGNEVPSQLASSGHIVRLEFQSDHSTTGRGFNITYTTFGQNECHDPGIPINGRRFGDRFLLGSSVSFHCDDGFVKTQGSESITCILQDGNVVWSSTVPRCEAPCGGHLTASSGVILPPGWPGYYKDSLHCEWIIEAKPGHSIKITFDRFQTEVNYDTLEVRDGPASSSPLIGEYHGTQAPQFLISTGNFMYLLFTTDNSRSSIGFLIHYESVTLESDSCLDPGIPVNGHRHGGDFGIRSTVTFSCDPGYTLSDDEPLVCERNHQWNHALPSCDALCGGYIQGKSGTVLSPGFPDFYPNSLNCTWTIEVSHGKGVQMIFHTFHLESSHDYLLITEDGSFSEPVARLTGSVLPHTIKAGLFGNFTAQLRFISDFSISYEGFNITFSEYDLEPCDDPGVPAFSRRIGFHFGVGDSLTFSCFLGYRLEGATKLTCLGGGRRVWSAPLPRCVAECGASVKGNEGTLLSPNFPSNYDNNHECIYKIETEAGKGIHLRTRSFQLFEGDTLKVYDGKDSSSRPLGTFTKNELLGLILNSTSNHLWLEFNTNGSDTDQGFQLTYTSFDLVKCEDPGIPNYGYRIRDEGHFTDTVVLYSCNPGYAMHGSNTLTCLSGDRRVWDKPLPSCIAECGGQIHAATSGRILSPGYPAPYDNNLHCTWIIEADPGKTISLHFIVFDTEMAHDILKVWDGPVDSDILLKEWSGSALPEDIHSTFNSLTLQFDSDFFISKSGFSIQFSTSIAATCNDPGMPQNGTRYGDSREAGDTVTFQCDPGYQLQGQAKITCVQLNNRFFWQPDPPTCIAACGGNLTGPAGVILSPNYPQPYPPGKECDWRVKVNPDFVIALIFKSFNMEPSYDFLHIYEGEDSNSPLIGSYQGSQAPERIESSGNSLFLAFRSDASVGLSGFAIEFKEKPREACFDPGNIMNGTRVGTDFKLGSTITYQCDSGYKILDPSSITCVIGADGKPSWDQVLPSCNAPCGGQYTGSEGVVLSPNYPHNYTAGQICLYSITVPKEFVVFGQFAYFQTALNDLAELFDGTHAQARLLSSLSGSHSGETLPLATSNQILLRFSAKSGASARGFHFVYQAVPRTSDTQCSSVPEPRYGRRIGSEFSAGSIVRFECNPGYLLQGSTALHCQSVPNALAQWNDTIPSCVVPCSGNFTQRRGTILSPGYPEPYGNNLNCIWKIIVTEGSGIQDPSDQFCHGAELGLEIHDGGDVTAPRLGSFSGTTVPALLNSTSNQLYLHFQSDISVAAAGFHLEYKTVGLAACQEPALPSNSIKIGDRYMVNDVLSFQCEPGYTLQGRSHISCMPGTVRRWNYPSPLCIATCGGTLSTLGGVILSPGFPGSYPNNLDCTWRISLPIGYGAHIQFLNFSTEANHDFLEIQNGPYHTSPMIGQFSGTDLPAALLSTTHETLIHFYSDHSQNRQGFKLAYQAYELQNCPDPPPFQNGYMINSDYSVGQSVSFECYPGYILIGHPVLTCQHGINRNWNYPFPRCDAPCGYNVTSQNGTIYSPGFPDEYPILKDCIWLITVPPGHGVYINFTLLQTEAVNDYIAVWDGPDQNSPQLGVFSGNTALETAYSSTNQVLLKFHSDFSNGGFFVLNFHAFQLKKCQPPPAVPQAEMLTEDDDFEIGDFVKYQCHPGYTLVGTDILTCKLSSQLQFEGSLPTCEAQCPANEVRTGSSGVILSPGYPGNYFNSQTCSWSIKVEPNYNITIFVDTFQSEKQFDALEVFDGSSGQSPLLVVLSGNHTEQSNFTSRSNQLYLRWSTDHATSKKGFKIRYAAPYCSLTHPLKNGGILNRTAGAVGSKVHYFCKPGYRMVGHSNATCRRNPLGMYQWDSLTPLCQAVSCGIPESPGNGSFTGNEFTLDSKVVYECHEGFKLESSQQATAVCQEDGLWSNKGKPPTCKPVACPSIEAQLSEHVIWRLVSGSLNEYGAQVLLSCSPGYYLEGWRLLRCQANGTWNIGDERPSCRVISCGSLSFPPNGNKIGTLTVYGATAIFTCNTGYTLVGSHVRECLANGLWSGSETRCLAGHCGSPDPIVNGHISGDGFSYRDTVVYQCNPGFRLVGTSVRICLQDHKWSGQTPVCVPITCGHPGNPAHGFTNGSEFNLNDVVNFTCNTGYLLQGVSRAQCRSNGQWSSPLPTCRVVNCSDPGFVENAIRHGQQNFPESFEYGMSILYHCKKGFYLLGSSALTCMANGLWDRSLPKCLAISCGHPGVPANAVLTGELFTYGAVVHYSCRGSESLIGNDTRVCQEDSHWSGALPHCTGNNPGFCGDPGTPAHGSRLGDDFKTKSLLRFSCEMGHQLRGSPERTCLLNGSWSGLQPVCEAVSCGNPGTPTNGMIVSSDGILFSSSVIYACWEGYKTSGLMTRHCTANGTWTGTAPDCTIISCGDPGTLANGIQFGTDFTFNKTVSYQCNPGYVMEAVTSATIRCTKDGRWNPSKPVCKAVLCPQPPPVQNGTVEGSDFRWGSSISYSCMDGYQLSHSAILSCEGRGVWKGEIPQCLPVFCGDPGIPAEGRLSGKSFTYKSEVFFQCKSPFILVGSSRRVCQADGTWSGIQPTCIDPAHNTCPDPGTPHFGIQNSSRGYEVGSTVFFRCRKGYHIQGSTTRTCLANLTWSGIQTECIPHACRQPETPAHADVRAIDLPTFGYTLVYTCHPGFFLAGGSEHRTCKADMKWTGKSPVCKSKGVREVNETVTKTPVPSDVFFVNSLWKGYYEYLGKRQPATLTVDWFNATSSKVNATFSEASPVELKLTGIYKKEEAHLLLKAFQIKGQADIFVSKFENDNWGLDGYVSSGLERGGFTFQGDIHGKDFGKFKLERQDPLNPDQDSSSHYHGTSSGSVAAAILVPFFALILSGFAFYLYKHRTRPKVQYNGYAGHENSNGQASFENPMYDTNLKPTEAKAVRFDTTLNTVCTVV

SEQ ID NO: 42510 - protein, 3388 aa, Homo sapiens
MTAWRRFQSLLLLLGLLVLCARLLTAAKGQNCGGLVQGPNGTIESPGFPHGYPNYANCTWIIITGERNRIQLSFHTFALEEDFDILSVYDGQPQQGNLKVRLSGFQLPSSIVSTGSILTLWFTTDFAVSAQGFKALYEVLPSHTCGNPGEILKGVLHGTRFNIGDKIRYSCLPGYILEGHAILTCIVSPGNGASWDFPAPFCRAEGACGGTLRGTSSSISSPHFPSEYENNADCTWTILAEPGDTIALVFTDFQLEEGYDFLEISGTEAPSIWLTGMNLPSPVISSKNWLRLHFTSDSNHRRKGFNAQFQVKKAIELKSRGVKMLPSKDGSHKNSVLSQGGVALVSDMCPDPGIPENGRRAGSDFSRVGANVQFSCEDNYVLQGSKSITCQRVTETLAAWSDHRPICRARTCGSNLRGPSGVITSPNYPVQYEDNAHCVWVITTTDPDKVIKLAFEEFELERGYDTLTVGDAGKVGDTRSVLYVLTGSSVPDLIVSMSNQMWLHLQSDDSIGSPGFKAVYQEIEKGGCGDPGIPAYGKRTGSSFLHGDTLTFECPAAFELVGERVITCQQNNQWSGNKPSCVFSCFFNFTASSGIILSPNYPEEYGNNMNCVWLIISEPGSRIHLIFNDFDVEPQFDFLAVKDDGISDITVLGTFSGNEVPSQLASSGHIVRLEFQSDHSTTGRGFNITYTTFGQNECHDPGIPINGRRFGDRFLLGSSVSFHCDDGFVKTQGSESITCILQDGNVVWSSTVPRCEAPCGGHLTASSGVILPPGWPGYYKDSLHCEWIIEAKPGHSIKITFDRFQTEVNYDTLEVRDGPASSSPLIGEYHGTQAPQFLISTGNFMYLLFTTDNSRSSIGFLIHYESVTLESDSCLDPGIPVNGHRHGGDFGIRSTVTFSCDPGYTLSDDEPLVCERNHQWNHALPSCDALCGGYIQGKSGTVLSPGFPDFYPNSLNCTWTIEVSHGKGVQMIFHTFHLESSHDYLLITEDGSFSEPVARLTGSVLPHTIKAGLFGNFTAQLRFISDFSISYEGFNITFSEYDLEPCDDPGVPAFSRRIGFHFGVGDSLTFSCFLGYRLEGATKLTCLGGGRRVWSAPLPRCVAECGASVKGNEGTLLSPNFPSNYDNNHECIYKIETEAGKGIHLRTRSFQLFEGDTLKVYDGKDSSSRPLGTFTKNELLGLILNSTSNHLWLEFNTNGSDTDQGFQLTYTSFDLVKCEDPGIPNYGYRIRDEGHFTDTVVLYSCNPGYAMHGSNTLTCLSGDRRVWDKPLPSCIAECGGQIHAATSGRILSPGYPAPYDNNLHCTWIIEADPGKTISLHFIVFDTEMAHDILKVWDGPVDSDILLKEWSGSALPEDIHSTFNSLTLQFDSDFFISKSGFSIQFSTSIAATCNDPGMPQNGTRYGDSREAGDTVTFQCDPGYQLQGQAKITCVQLNNRFFWQPDPPTCIAACGGNLTGPAGVILSPNYPQPYPPGKECDWRVKVNPDFVIALIFKSFNMEPSYDFLHIYEGEDSNSPLIGSYQGSQAPERIESSGNSLFLAFRSDASVGLSGFAIEFKEKPREACFDPGNIMNGTRVGTDFKLGSTITYQCDSGYKILDPSSITCVIGADGKPSWDQVLPSCNAPCGGQYTGSEGVVLSPNYPHNYTAGQICLYSITVPKEFVVFGQFAYFQTALNDLAELFDGTHAQARLLSSLSGSHSGETLPLATSNQILLRFSAKSGASARGFHFVYQAVPRTSDTQCSSVPEPRYGRRIGSEFSAGSIVRFECNPGYLLQGSTALHCQSVPNALAQWNDTIPSCVVPCSGNFTQRRGTILSPGYPEPYGNNLNCIWKIIVTEGSGIQIQVISFATEQNWDSLEIHDGGDVTAPRLGSFSGTTVPALLNSTSNQLYLHFQSDISVAAAGFHLEYKTVGLAACQEPALPSNSIKIGDRYMVNDVLSFQCEPGYTLQGRSHISCMPGTVRRWNYPSPLCIATCGGTLSTLGGVILSPGFPGSYPNNLDCTWRISLPIGYGAHIQFLNFSTEANHDFLEIQNGPYHTSPMIGQFSGTDLPAALLSTTHETLIHFYSDHSQNRQGFKLAYQAYELQNCPDPPPFQNGYMINSDYSVGQSVSFECYPGYILIGHPVLTCQHGINRNWNYPFPRCDAPCGYNVTSQNGTIYSPGFPDEYPILKDCIWLITVPPGHGVYINFTLLQTEAVNDYIAVWDGPDQNSPQLGVFSGNTALETAYSSTNQVLLKFHSDFSNGGFFVLNFHAFQLKKCQPPPAVPQAEMLTEDDDFEIGDFVKYQCHPGYTLVGTDILTCKLSSQLQFEGSLPTCEAQCPANEVRTGSSGVILSPGYPGNYFNSQTCSWSIKVEPNYNITIFVDTFQSEKQFDALEVFDGSSGQSPLLVVLSGNHTEQSNFTSRSNQLYLRWSTDHATSKKGFKIRYAAPYCSLTHPLKNGGILNRTAGAVGSKVHYFCKPGYRMVGHSNATCRRNPLGMYQWDSLTPLCQAVSCGIPESPGNGSFTGNEFTLDSKVVYECHEGFKLESSQQATAVCQEDGLWSNKGKPPTCKPVACPSIEAQLSEHVIWRLVSGSLNEYGAQVLLSCSPGYYLEGWRLLRCQANGTWNIGDERPSCRAGHCGSPDPIVNGHISGDGFSYRDTVVYQCNPGFRLVGTSVRICLQDHKWSGQTPVCVPITCGHPGNPAHGFTNGSEFNLNDVVNFTCNTGYLLQGVSRAQCRSNGQWSSPLPTCRVVNCSDPGFVENAIRHGQQNFPESFEYGMSILYHCKKGFYLLGSSALTCMANGLWDRSLPKCLAISCGHPGVPANAVLTGELFTYGAVVHYSCRGSESLIGNDTRVCQEDSHWSGALPHCTGNNPGFCGDPGTPAHGSRLGDDFKTKSLLRFSCEMGHQLRGSPERTCLLNGSWSGLQPVCEAVLCPQPPPVQNGTVEGSDFRWGSSISYSCMDGYQLSHSAILSCEGRGVWKGEIPQCLPVFCGDPGIPAEGRLSGKSFTYKSEVFFQCKSPFILVGSSRRVCQADGTWSGIQPTCIDPAHNTCPDPGTPHFGIQNSSRGYEVGSTVFFRCRKGYHIQGSTTRTCLANLTWSGIQTECIPHACRQPETPAHADVRAIDLPTFGYTLVYTCHPGFFLAGGSEHRTCKADMKWTGKSPVCKSKGVREVNETVTKTPVPSDVFFVNSLWKGYYEYLGKRQPATLTVDWFNATSSKVNATFSEASPVELKLTGIYKKEEAHLLLKAFQIKGQADIFVSKFENDNWGLDGYVSSGLERGGFTFQGDIHGKDFGKFKLERQDPLNPDQDSSSHYHGTSSGSVAAAILVPFFALILSGFAFYLYKHRTRPKVQYNGYAGHENSNGQASFENPMYDTNLKPTEAKAVRFDTTLNTVCTVV

SEQ ID NO: 42511 - protein, 3565 aa, Homo sapiens
MTAWRRFQSLLLLLGLLVLCARLLTAAKGQNCGGLVQGPNGTIESPGFPHGYPNYANCTWIIITGERNRIQLSFHTFALEEDFDILSVYDGQPQQGNLKVRLSGFQLPSSIVSTGSILTLWFTTDFAVSAQGFKALYEVLPSHTCGNPGEILKGVLHGTRFNIGDKIRYSCLPGYILEGHAILTCIVSPGNGASWDFPAPFCRAEGACGGTLRGTSSSISSPHFPSEYENNADCTWTILAEPGDTIALVFTDFQLEEGYDFLEISGTEAPSIWLTGMNLPSPVISSKNWLRLHFTSDSNHRRKGFNAQFQVKKAIELKSRGVKMLPSKDGSHKNSVLSQGGVALVSDMCPDPGIPENGRRAGSDFSRVGANVQFSCEDNYVLQGSKSITCQRVTETLAAWSDHRPICRARTCGSNLRGPSGVITSPNYPVQYEDNAHCVWVITTTDPDKVIKLAFEEFELERGYDTLTVGDAGKVGDTRSVLYVLTGSSVPDLIVSMSNQMWLHLQSDDSIGSPGFKAVYQEIEKGGCGDPGIPAYGKRTGSSFLHGDTLTFECPAAFELVGERVITCQQNNQWSGNKPSCVFSCFFNFTASSGIILSPNYPEEYGNNMNCVWLIISEPGSRIHLIFNDFDVEPQFDFLAVKDDGISDITVLGTFSGNEVPSQLASSGHIVRLEFQSDHSTTGRGFNITYTTFGQNECHDPGIPINGRRFGDRFLLGSSVSFHCDDGFVKTQGSESITCILQDGNVVWSSTVPRCEAPCGGHLTASSGVILPPGWPGYYKDSLHCEWIIEAKPGHSIKITFDRFQTEVNYDTLEVRDGPASSSPLIGEYHGTQAPQFLISTGNFMYLLFTTDNSRSSIGFLIHYESVTLESDSCLDPGIPVNGHRHGGDFGIRSTVTFSCDPGYTLSDDEPLVCERNHQWNHALPSCDALCGGYIQGKSGTVLSPGFPDFYPNSLNCTWTIEVSHGKGVQMIFHTFHLESSHDYLLITEDGSFSEPVARLTGSVLPHTIKAGLFGNFTAQLRFISDFSISYEGFNITFSEYDLEPCDDPGVPAFSRRIGFHFGVGDSLTFSCFLGYRLEGATKLTCLGGGRRVWSAPLPRCVAECGASVKGNEGTLLSPNFPSNYDNNHECIYKIETEAGKGIHLRTRSFQLFEGDTLKVYDGKDSSSRPLGTFTKNELLGLILNSTSNHLWLEFNTNGSDTDQGFQLTYTSFDLVKCEDPGIPNYGYRIRDEGHFTDTVVLYSCNPGYAMHGSNTLTCLSGDRRVWDKPLPSCIAECGGQIHAATSGRILSPGYPAPYDNNLHCTWIIEADPGKTISLHFIVFDTEMAHDILKVWDGPVDSDILLKEWSGSALPEDIHSTFNSLTLQFDSDFFISKSGFSIQFSTSIAATCNDPGMPQNGTRYGDSREAGDTVTFQCDPGYQLQGQAKITCVQLNNRFFWQPDPPTCIAACGGNLTGPAGVILSPNYPQPYPPGKECDWRVKVNPDFVIALIFKSFNMEPSYDFLHIYEGEDSNSPLIGSYQGSQAPERIESSGNSLFLAFRSDASVGLSGFAIEFKEKPREACFDPGNIMNGTRVGTDFKLGSTITYQCDSGYKILDPSSITCVIGADGKPSWDQVLPSCNAPCGGQYTGSEGVVLSPNYPHNYTAGQICLYSITVPKEFVVFGQFAYFQTALNDLAELFDGTHAQARLLSSLSGSHSGETLPLATSNQILLRFSAKSGASARGFHFVYQAVPRTSDTQCSSVPEPRYGRRIGSEFSAGSIVRFECNPGYLLQGSTALHCQSVPNALAQWNDTIPSCVVPCSGNFTQRRGTILSPGYPEPYGNNLNCIWKIIVTEGSGIQIQVISFATEQNWDSLEIHDGGDVTAPRLGSFSGTTVPALLNSTSNQLYLHFQSDISVAAAGFHLEYKTVGLAACQEPALPSNSIKIGDRYMVNDVLSFQCEPGYTLQGRSHISCMPGTVRRWNYPSPLCIATCGGTLSTLGGVILSPGFPGSYPNNLDCTWRISLPIGYGAHIQFLNFSTEANHDFLEIQNGPYHTSPMIGQFSGTDLPAALLSTTHETLIHFYSDHSQNRQGFKLAYQAYELQNCPDPPPFQNGYMINSDYSVGQSVSFECYPGYILIGHPVLTCQHGINRNWNYPFPRCDAPCGYNVTSQNGTIYSPGFPDEYPILKDCIWLITVPPGHGVYINFTLLQTEAVNDYIAVWDGPDQNSPQLGVFSGNTALETAYSSTNQVLLKFHSDFSNGGFFVLNFHAFQLKKCQPPPAVPQAEMLTEDDDFEIGDFVKYQCHPGYTLVGTDILTCKLSSQLQFEGSLPTCEAQCPANEVRTGSSGVILSPGYPGNYFNSQTCSWSIKVEPNYNITIFVDTFQSEKQFDALEVFDGSSGQSPLLVVLSGNHTEQSNFTSRSNQLYLRWSTDHATSKKGFKIRYAAPYCSLTHPLKNGGILNRTAGAVGSKVHYFCKPGYRMVGHSNATCRRNPLGMYQWDSLTPLCQAVSCGIPESPGNGSFTGNEFTLDSKVVYECHEGFKLESSQQATAVCQEDGLWSNKGKPPTCKPVACPSIEAQLSEHVIWRLVSGSLNEYGAQVLLSCSPGYYLEGWRLLRCQANGTWNIGDERPSCRVISCGSLSFPPNGNKIGTLTVYGATAIFTCNTGYTLVGSHVRECLANGLWSGSETRCLAGHCGSPDPIVNGHISGDGFSYRDTVVYQCNPGFRLVGTSVRICLQDHKWSGQTPVCVPITCGHPGNPAHGFTNGSEFNLNDVVNFTCNTGYLLQGVSRAQCRSNGQWSSPLPTCRVVNCSDPGFVENAIRHGQQNFPESFEYGMSILYHCKKGFYLLGSSALTCMANGLWDRSLPKCLAISCGHPGVPANAVLTGELFTYGAVVHYSCRGSESLIGNDTRVCQEDSHWSGALPHCTGNNPGFCGDPGTPAHGSRLGDDFKTKSLLRFSCEMGHQLRGSPERTCLLNGSWSGLQPVCEAVSCGNPGTPTNGMIVSSDGILFSSSVIYACWEGYKTSGLMTRHCTANGTWTGTAPDCTIISCGDPGTLANGIQFGTDFTFNKTVSYQCNPGYVMEAVTSATIRCTKDGRWNPSKPVCKAVLCPQPPPVQNGTVEGSDFRWGSSISYSCMDGYQLSHSAILSCEGRGVWKGEIPQCLPVFCGDPGIPAEGRLSGKSFTYKSEVFFQCKSPFILVGSSRRVCQADGTWSGIQPTCIDPAHNTCPDPGTPHFGIQNSSRGYEVGSTVFFRCRKGYHIQGSTTRTCLANLTWSGIQTECIPHACRQPETPAHADVRAIDLPTFGYTLVYTCHPGFFLAGGSEHRTCKADMKWTGKSPVCKSKGVREVNETVTKTPVPSDVFFVNSLWKGYYEYLGKRQPATLTVDWFNATSSKVNATFSEASPVELKLTGIYKKEEAHLLLKAFQIKGQADIFVSKFENDNWGLDGYVSSGLERGGFTFQGDIHGKDFGKFKLERQDPLNPDQDSSSHYHGTSSGSVAAAILVPFFALILSGFAFYLYKHRTRPKVQYNGYAGHENSNGQASFENPMYDTNLKPTEAKAVRFDTTLNTVCTVV

SEQ ID NO: 42512 - protein, 3564 aa, Homo sapiens
MTAWRRFQSLLLLLGLLVLCARLLTAAKGQNCGGLVQGPNGTIESPGFPHGYPNYANCTWIIITGERNRIQLSFHTFALEEDFDILSVYDGQPQQGNLKVRLSGFQLPSSIVSTGSILTLWFTTDFAVSAQGFKALYEVLPSHTCGNPGEILKGVLHGTRFNIGDKIRYSCLPGYILEGHAILTCIVSPGNGASWDFPAPFCRAEGACGGTLRGTSSSISSPHFPSEYENNADCTWTILAEPGDTIALVFTDFQLEEGYDFLEISGTEAPSIWLTGMNLPSPVISSKNWLRLHFTSDSNHRRKGFNAQFQVKKAIELKSRGVKMLPSKDGSHKNSVLSQGGVALVSDMCPDPGIPENGRRAGSDFRVGANVQFSCEDNYVLQGSKSITCQRVTETLAAWSDHRPICRARTCGSNLRGPSGVITSPNYPVQYEDNAHCVWVITTTDPDKVIKLAFEEFELERGYDTLTVGDAGKVGDTRSVLYVLTGSSVPDLIVSMSNQMWLHLQSDDSIGSPGFKAVYQEIEKGGCGDPGIPAYGKRTGSSFLHGDTLTFECPAAFELVGERVITCQQNNQWSGNKPSCVFSCFFNFTASSGIILSPNYPEEYGNNMNCVWLIISEPGSRIHLIFNDFDVEPQFDFLAVKDDGISDITVLGTFSGNEVPSQLASSGHIVRLEFQSDHSTTGRGFNITYTTFGQNECHDPGIPINGRRFGDRFLLGSSVSFHCDDGFVKTQGSESITCILQDGNVVWSSTVPRCEAPCGGHLTASSGVILPPGWPGYYKDSLHCEWIIEAKPGHSIKITFDRFQTEVNYDTLEVRDGPASSSPLIGEYHGTQAPQFLISTGNFMYLLFTTDNSRSSIGFLIHYESVTLESDSCLDPGIPVNGHRHGGDFGIRSTVTFSCDPGYTLSDDEPLVCERNHQWNHALPSCDALCGGYIQGKSGTVLSPGFPDFYPNSLNCTWTIEVSHGKGVQMIFHTFHLESSHDYLLITEDGSFSEPVARLTGSVLPHTIKAGLFGNFTAQLRFISDFSISYEGFNITFSEYDLEPCDDPGVPAFSRRIGFHFGVGDSLTFSCFLGYRLEGATKLTCLGGGRRVWSAPLPRCVAECGASVKGNEGTLLSPNFPSNYDNNHECIYKIETEAGKGIHLRTRSFQLFEGDTLKVYDGKDSSSRPLGTFTKNELLGLILNSTSNHLWLEFNTNGSDTDQGFQLTYTSFDLVKCEDPGIPNYGYRIRDEGHFTDTVVLYSCNPGYAMHGSNTLTCLSGDRRVWDKPLPSCIAECGGQIHAATSGRILSPGYPAPYDNNLHCTWIIEADPGKTISLHFIVFDTEMAHDILKVWDGPVDSDILLKEWSGSALPEDIHSTFNSLTLQFDSDFFISKSGFSIQFSTSIAATCNDPGMPQNGTRYGDSREAGDTVTFQCDPGYQLQGQAKITCVQLNNRFFWQPDPPTCIAACGGNLTGPAGVILSPNYPQPYPPGKECDWRVKVNPDFVIALIFKSFNMEPSYDFLHIYEGEDSNSPLIGSYQGSQAPERIESSGNSLFLAFRSDASVGLSGFAIEFKEKPREACFDPGNIMNGTRVGTDFKLGSTITYQCDSGYKILDPSSITCVIGADGKPSWDQVLPSCNAPCGGQYTGSEGVVLSPNYPHNYTAGQICLYSITVPKEFVVFGQFAYFQTALNDLAELFDGTHAQARLLSSLSGSHSGETLPLATSNQILLRFSAKSGASARGFHFVYQAVPRTSDTQCSSVPEPRYGRRIGSEFSAGSIVRFECNPGYLLQGSTALHCQSVPNALAQWNDTIPSCVVPCSGNFTQRRGTILSPGYPEPYGNNLNCIWKIIVTEGSGIQIQVISFATEQNWDSLEIHDGGDVTAPRLGSFSGTTVPALLNSTSNQLYLHFQSDISVAAAGFHLEYKTVGLAACQEPALPSNSIKIGDRYMVNDVLSFQCEPGYTLQGRSHISCMPGTVRRWNYPSPLCIATCGGTLSTLGGVILSPGFPGSYPNNLDCTWRISLPIGYGAHIQFLNFSTEANHDFLEIQNGPYHTSPMIGQFSGTDLPAALLSTTHETLIHFYSDHSQNRQGFKLAYQAYELQNCPDPPPFQNGYMINSDYSVGQSVSFECYPGYILIGHPVLTCQHGINRNWNYPFPRCDAPCGYNVTSQNGTIYSPGFPDEYPILKDCIWLITVPPGHGVYINFTLLQTEAVNDYIAVWDGPDQNSPQLGVFSGNTALETAYSSTNQVLLKFHSDFSNGGFFVLNFHAFQLKKCQPPPAVPQAEMLTEDDDFEIGDFVKYQCHPGYTLVGTDILTCKLSSQLQFEGSLPTCEAQCPANEVRTGSSGVILSPGYPGNYFNSQTCSWSIKVEPNYNITIFVDTFQSEKQFDALEVFDGSSGQSPLLVVLSGNHTEQSNFTSRSNQLYLRWSTDHATSKKGFKIRYAAPYCSLTHPLKNGGILNRTAGAVGSKVHYFCKPGYRMVGHSNATCRRNPLGMYQWDSLTPLCQAVSCGIPESPGNGSFTGNEFTLDSKVVYECHEGFKLESSQQATAVCQEDGLWSNKGKPPTCKPVACPSIEAQLSEHVIWRLVSGSLNEYGAQVLLSCSPGYYLEGWRLLRCQANGTWNIGDERPSCRVISCGSLSFPPNGNKIGTLTVYGATAIFTCNTGYTLVGSHVRECLANGLWSGSETRCLAGHCGSPDPIVNGHISGDGFSYRDTVVYQCNPGFRLVGTSVRICLQDHKWSGQTPVCVPITCGHPGNPAHGFTNGSEFNLNDVVNFTCNTGYLLQGVSRAQCRSNGQWSSPLPTCRVVNCSDPGFVENAIRHGQQNFPESFEYGMSILYHCKKGFYLLGSSALTCMANGLWDRSLPKCLAISCGHPGVPANAVLTGELFTYGAVVHYSCRGSESLIGNDTRVCQEDSHWSGALPHCTGNNPGFCGDPGTPAHGSRLGDDFKTKSLLRFSCEMGHQLRGSPERTCLLNGSWSGLQPVCEAVSCGNPGTPTNGMIVSSDGILFSSSVIYACWEGYKTSGLMTRHCTANGTWTGTAPDCTIISCGDPGTLANGIQFGTDFTFNKTVSYQCNPGYVMEAVTSATIRCTKDGRWNPSKPVCKAVLCPQPPPVQNGTVEGSDFRWGSSISYSCMDGYQLSHSAILSCEGRGVWKGEIPQCLPVFCGDPGIPAEGRLSGKSFTYKSEVFFQCKSPFILVGSSRRVCQADGTWSGIQPTCIDPAHNTCPDPGTPHFGIQNSSRGYEVGSTVFFRCRKGYHIQGSTTRTCLANLTWSGIQTECIPHACRQPETPAHADVRAIDLPTFGYTLVYTCHPGFFLAGGSEHRTCKADMKWTGKSPVCKSKGVREVNETVTKTPVPSDVFFVNSLWKGYYEYLGKRQPATLTVDWFNATSSKVNATFSEASPVELKLTGIYKKEEAHLLLKAFQIKGQADIFVSKFENDNWGLDGYVSSGLERGGFTFQGDIHGKDFGKFKLERQDPLNPDQDSSSHYHGTSSGSVAAAILVPFFALILSGFAFYLYKHRTRPKVQYNGYAGHENSNGQASFENPMYDTNLKPTEAKAVRFDTTLNTVCTVV

SEQ ID NO: 42513 - protein, 2109 aa, Homo sapiens
MTAWRRFQSLLLLLGLLVLCARLLTAAKGQNCGGLVQGPNGTIESPGFPHGYPNYANCTWIIITGERNRIQLSFHTFALEEDFDILSVYDGQPQQGNLKVRLSGFQLPSSIVSTGSILTLWFTTDFAVSAQGFKALYEVLPSHTCGNPGEILKGVLHGTRFNIGDKIRYSCLPGYILEGHAILTCIVSPGNGASWDFPAPFCRAEGACGGTLRGTSSSISSPHFPSEYENNADCTWTILAEPGDTIALVFTDFQLEEGYDFLEISGTEAPSIWLTGMNLPSPVISSKNWLRLHFTSDSNHRRKGFNAQFQVKKAIELKSRGVKMLPSKDGSHKNSVLSQGGVALVSDMCPDPGIPENGRRAGSDFRVGANVQFSCEDNYVLQGSKSITCQRVTETLAAWSDHRPICRARTCGSNLRGPSGVITSPNYPVQYEDNAHCVWVITTTDPDKVIKLAFEEFELERGYDTLTVGDAGKVGDTRSVLYVLTGSSVPDLIVSMSNQMWLHLQSDDSIGSPGFKAVYQEIEKGGCGDPGIPAYGKRTGSSFLHGDTLTFECPAAFELVGERVITCQQNNQWSGNKPSCVFSCFFNFTASSGIILSPNYPEEYGNNMNCVWLIISEPGSRIHLIFNDFDVEPQFDFLAVKDDGISDITVLGTFSGNEVPSQLASSGHIVRLEFQSDHSTTGRGFNITYTTFGQNECHDPGIPINGRRFGDRFLLGSSVSFHCDDGFVKTQGSESITCILQDGNVVWSSTVPRCEAPCGGHLTASSGVILPPGWPGYYKDSLHCEWIIEAKPGHSIKITFDRFQTEVNYDTLEVRDGPASSSPLIGEYHGTQAPQFLISTGNFMYLLFTTDNSRSSIGFLIHYESVTLESDSCLDPGIPVNGHRHGGDFGIRSTVTFSCDPGYTLSDDEPLVCERNHQWNHALPSCDALCGGYIQGKSGTVLSPGFPDFYPNSLNCTWTIEVSHGKGVQMIFHTFHLESSHDYLLITEDGSFSEPVARLTGSVLPHTIKAGLFGNFTAQLRFISDFSISYEGFNITFSEYDLEPCDDPGVPAFSRRIGFHFGVGDSLTFSCFLGYRLEGATKLTCLGGGRRVWSAPLPRCVAECGASVKGNEGTLLSPNFPSNYDNNHECIYKIETEAGKGIHLRTRSFQLFEGDTLKVYDGKDSSSRPLGTFTKNELLGLILNSTSNHLWLEFNTNGSDTDQGFQLTYTSFDLVKCEDPGIPNYGYRIRDEGHFTDTVVLYSCNPGYAMHGSNTLTCLSGDRRVWDKPLPSCIAECGGQIHAATSGRILSPGYPAPYDNNLHCTWIIEADPGKTISLHFIVFDTEMAHDILKVWDGPVDSDILLKEWSGSALPEDIHSTFNSLTLQFDSDFFISKSGFSIQFSTSIAATCNDPGMPQNGTRYGDSREAGDTVTFQCDPGYQLQGQAKITCVQLNNRFFWQPDPPTCIAACGGNLTGPAGVILSPNYPQPYPPGKECDWRVKVNPDFVIALIFKSFNMEPSYDFLHIYEGEDSNSPLIGSYQGSQAPERIESSGNSLFLAFRSDASVGLSGFAIEFKEKPREACFDPGNIMNGTRVGTDFKLGSTITYQCDSGYKILDPSSITCVIGADGKPSWDQVLPSCNAPCGGQYTGSEGVVLSPNYPHNYTAGQICLYSITVPKEFVVFGQFAYFQTALNDLAELFDGTHAQARLLSSLSGSHSGETLPLATSNQILLRFSAKSGASARGFHFVYQAVPRTSDTQCSSVPEPRYGRRIGSEFSAGSIVRFECNPGYLLQGSTALHCQSVPNALAQWNDTIPSCVVPCSGNFTQRRGTILSPGYPEPYGNNLNCIWKIIVTEGSGIQIQVISFATEQNWDSLEIHDGGDVTAPRLGSFSGTTVPALLNSTSNQLYLHFQSDISVAAAGFHLEYKTVGLAACQEPALPSNSIKIGDRYMVNDVLSFQCEPGYTLQGRSHISCMPGTVRRWNYPSPLCIATCGGTLSTLGGVILSPGFPGSYPNNLDCTWRISLPIGYGAHIQFLNFSTEANHDFLEIQNGPYHTSPMIGQFSGTDLPAALLSTTHETLIHFYSDHSQNRQGFKLAYQGGSGNIGPAFPCLDTPFQARCQGEERTFN

SEQ ID NO: 42514 - protein, 3387 aa, Homo sapiens
MTAWRRFQSLLLLLGLLVLCARLLTAAKGQNCGGLVQGPNGTIESPGFPHGYPNYANCTWIIITGERNRIQLSFHTFALEEDFDILSVYDGQPQQGNLKVRLSGFQLPSSIVSTGSILTLWFTTDFAVSAQGFKALYEVLPSHTCGNPGEILKGVLHGTRFNIGDKIRYSCLPGYILEGHAILTCIVSPGNGASWDFPAPFCRAEGACGGTLRGTSSSISSPHFPSEYENNADCTWTILAEPGDTIALVFTDFQLEEGYDFLEISGTEAPSIWLTGMNLPSPVISSKNWLRLHFTSDSNHRRKGFNAQFQVKKAIELKSRGVKMLPSKDGSHKNSVLSQGGVALVSDMCPDPGIPENGRRAGSDFRVGANVQFSCEDNYVLQGSKSITCQRVTETLAAWSDHRPICRARTCGSNLRGPSGVITSPNYPVQYEDNAHCVWVITTTDPDKVIKLAFEEFELERGYDTLTVGDAGKVGDTRSVLYVLTGSSVPDLIVSMSNQMWLHLQSDDSIGSPGFKAVYQEIEKGGCGDPGIPAYGKRTGSSFLHGDTLTFECPAAFELVGERVITCQQNNQWSGNKPSCVFSCFFNFTASSGIILSPNYPEEYGNNMNCVWLIISEPGSRIHLIFNDFDVEPQFDFLAVKDDGISDITVLGTFSGNEVPSQLASSGHIVRLEFQSDHSTTGRGFNITYTTFGQNECHDPGIPINGRRFGDRFLLGSSVSFHCDDGFVKTQGSESITCILQDGNVVWSSTVPRCEAPCGGHLTASSGVILPPGWPGYYKDSLHCEWIIEAKPGHSIKITFDRFQTEVNYDTLEVRDGPASSSPLIGEYHGTQAPQFLISTGNFMYLLFTTDNSRSSIGFLIHYESVTLESDSCLDPGIPVNGHRHGGDFGIRSTVTFSCDPGYTLSDDEPLVCERNHQWNHALPSCDALCGGYIQGKSGTVLSPGFPDFYPNSLNCTWTIEVSHGKGVQMIFHTFHLESSHDYLLITEDGSFSEPVARLTGSVLPHTIKAGLFGNFTAQLRFISDFSISYEGFNITFSEYDLEPCDDPGVPAFSRRIGFHFGVGDSLTFSCFLGYRLEGATKLTCLGGGRRVWSAPLPRCVAECGASVKGNEGTLLSPNFPSNYDNNHECIYKIETEAGKGIHLRTRSFQLFEGDTLKVYDGKDSSSRPLGTFTKNELLGLILNSTSNHLWLEFNTNGSDTDQGFQLTYTSFDLVKCEDPGIPNYGYRIRDEGHFTDTVVLYSCNPGYAMHGSNTLTCLSGDRRVWDKPLPSCIAECGGQIHAATSGRILSPGYPAPYDNNLHCTWIIEADPGKTISLHFIVFDTEMAHDILKVWDGPVDSDILLKEWSGSALPEDIHSTFNSLTLQFDSDFFISKSGFSIQFSTSIAATCNDPGMPQNGTRYGDSREAGDTVTFQCDPGYQLQGQAKITCVQLNNRFFWQPDPPTCIAACGGNLTGPAGVILSPNYPQPYPPGKECDWRVKVNPDFVIALIFKSFNMEPSYDFLHIYEGEDSNSPLIGSYQGSQAPERIESSGNSLFLAFRSDASVGLSGFAIEFKEKPREACFDPGNIMNGTRVGTDFKLGSTITYQCDSGYKILDPSSITCVIGADGKPSWDQVLPSCNAPCGGQYTGSEGVVLSPNYPHNYTAGQICLYSITVPKEFVVFGQFAYFQTALNDLAELFDGTHAQARLLSSLSGSHSGETLPLATSNQILLRFSAKSGASARGFHFVYQAVPRTSDTQCSSVPEPRYGRRIGSEFSAGSIVRFECNPGYLLQGSTALHCQSVPNALAQWNDTIPSCVVPCSGNFTQRRGTILSPGYPEPYGNNLNCIWKIIVTEGSGIQIQVISFATEQNWDSLEIHDGGDVTAPRLGSFSGTTVPALLNSTSNQLYLHFQSDISVAAAGFHLEYKTVGLAACQEPALPSNSIKIGDRYMVNDVLSFQCEPGYTLQGRSHISCMPGTVRRWNYPSPLCIATCGGTLSTLGGVILSPGFPGSYPNNLDCTWRISLPIGYGAHIQFLNFSTEANHDFLEIQNGPYHTSPMIGQFSGTDLPAALLSTTHETLIHFYSDHSQNRQGFKLAYQAYELQNCPDPPPFQNGYMINSDYSVGQSVSFECYPGYILIGHPVLTCQHGINRNWNYPFPRCDAPCGYNVTSQNGTIYSPGFPDEYPILKDCIWLITVPPGHGVYINFTLLQTEAVNDYIAVWDGPDQNSPQLGVFSGNTALETAYSSTNQVLLKFHSDFSNGGFFVLNFHAFQLKKCQPPPAVPQAEMLTEDDDFEIGDFVKYQCHPGYTLVGTDILTCKLSSQLQFEGSLPTCEAQCPANEVRTGSSGVILSPGYPGNYFNSQTCSWSIKVEPNYNITIFVDTFQSEKQFDALEVFDGSSGQSPLLVVLSGNHTEQSNFTSRSNQLYLRWSTDHATSKKGFKIRYAAPYCSLTHPLKNGGILNRTAGAVGSKVHYFCKPGYRMVGHSNATCRRNPLGMYQWDSLTPLCQAVSCGIPESPGNGSFTGNEFTLDSKVVYECHEGFKLESSQQATAVCQEDGLWSNKGKPPTCKPVACPSIEAQLSEHVIWRLVSGSLNEYGAQVLLSCSPGYYLEGWRLLRCQANGTWNIGDERPSCRAGHCGSPDPIVNGHISGDGFSYRDTVVYQCNPGFRLVGTSVRICLQDHKWSGQTPVCVPITCGHPGNPAHGFTNGSEFNLNDVVNFTCNTGYLLQGVSRAQCRSNGQWSSPLPTCRVVNCSDPGFVENAIRHGQQNFPESFEYGMSILYHCKKGFYLLGSSALTCMANGLWDRSLPKCLAISCGHPGVPANAVLTGELFTYGAVVHYSCRGSESLIGNDTRVCQEDSHWSGALPHCTGNNPGFCGDPGTPAHGSRLGDDFKTKSLLRFSCEMGHQLRGSPERTCLLNGSWSGLQPVCEAVLCPQPPPVQNGTVEGSDFRWGSSISYSCMDGYQLSHSAILSCEGRGVWKGEIPQCLPVFCGDPGIPAEGRLSGKSFTYKSEVFFQCKSPFILVGSSRRVCQADGTWSGIQPTCIDPAHNTCPDPGTPHFGIQNSSRGYEVGSTVFFRCRKGYHIQGSTTRTCLANLTWSGIQTECIPHACRQPETPAHADVRAIDLPTFGYTLVYTCHPGFFLAGGSEHRTCKADMKWTGKSPVCKSKGVREVNETVTKTPVPSDVFFVNSLWKGYYEYLGKRQPATLTVDWFNATSSKVNATFSEASPVELKLTGIYKKEEAHLLLKAFQIKGQADIFVSKFENDNWGLDGYVSSGLERGGFTFQGDIHGKDFGKFKLERQDPLNPDQDSSSHYHGTSSGSVAAAILVPFFALILSGFAFYLYKHRTRPKVQYNGYAGHENSNGQASFENPMYDTNLKPTEAKAVRFDTTLNTVCTVV

SEQ ID NO: 42515 - protein, 3487 aa, Homo sapiens
MRLISIAPGPRWQVQSHHPRSAGQNCTFQLHGPNGTVESPGFPYGYPNYANCTWTITAEEQHRIQLVFQSFALEEDFDVLSVFDGPPQPENLRTRLTGFQLPATIVSAATTLSLRLISDYAVSAQGFHATYEVLPSHTCGNPGRLPNGIQQGSTFNLGDKVRYSCNLGFFLEGHAVLTCHAGSENSATWDFPLPSCRADDACGGTLRGQSGIISSPHFPSEYHNNADCTWTILAELGDTIALVFIDFQLEDGYDFLEVTGTEGSSLWFTGASLPAPVISSKNWLRLHFTSDGNHRQRGFSAQYQVKKQIELKSRGVKLMPSKDNSQKTSVLTQVGVSQGHNMCPDPGIPERGKRLGSDFRLGSSVQFTCNEGYDLQGSKRITCMKVSDMFAAWSDHRPVCRARMCDAHLRGPSGIITSPNFPIQYDNNAHCVWIITALNPSKVIKLAFEEFDLERGYDTLTVGDGGQDGDQKTVLYILTGTSVPDLIVSTNHQMWLLFQTDGSGSSLGFKASYEEIEQGSCGDPGIPAYGRREGSRFHHGDTLKFECQPAFELVGQKAITCQKNNQWSAKKPGCVFSCFFNFTSPSGVVLSPNYPEDYGNHLHCVWLILARPESRIHLAFNDIDVEPQFDFLVIKDGATAEAPVLGTFSGNQLPSSITSSGHVARLEFQTDHSTGKRGFNITFTTFRHNECPDPGVPVNGKRFGDSLQLGSSISFLCDEGFLGTQGSETITCVLKEGSVVWNSAVLRCEAPCGGHLTSPSGTILSPGWPGFYKDALSCAWVIEAQPGYPIKITFDRFKTEVNYDTLEVRDGRTYSAPLIGVYHGTQVPQFLISTSNYLYLLFSTDKSHSDIGFQLRYETITLQSDHCLDPGIPVNGQRHGNDFYVGALVTFSCDSGYTLSDGEPLECEPNFQWSRALPSCEALCGGFIQGSSGTILSPGFPDFYPNNLNCTWIIETSHGKGVFFTFHTFHLESGHDYLLITENGSFTQPLRQLTGSRLPAPISAGLYGNFTAQVRFISDFSMSYEGFNITFSEYDLEPCEEPEVPAYSIRKGLQFGVGDTLTFSCFPGYRLEGTARITCLGGRRRLWSSPLPRCVAECGNSVTGTQGTLLSPNFPVNYNNNHECIYSIQTQPGKGIQLKARAFELSEGDVLKVYDGNNNSARLLGVFSHSEMMGVTLNSTSSSLWLDFITDAENTSKGFELHFSSFELIKCEDPGTPKFGYKVHDEGHFAGSSVSFSCDPGYSLRGSEELLCLSGERRTWDRPLPTCVAECGGTVRGEVSGQVLSPGYPAPYEHNLNCIWTIEAEAGCTIGLHFLVFDTEEVHDVLRIWDGPVESGVLLKELSGPALPKDLHSTFNSVVLQFSTDFFTSKQGFAIQFSVSTATSCNDPGIPQNGSRSGDSWEAGDSTVFQCDPGYALQGSAEISCVKIENRFFWQPSPPTCIAPCGGDLTGPSGVILSPNYPEPYPPGKECDWKVTVSPDYVIALVFNIFNLEPGYDFLHIYDGRDSLSPLIGSFYGSQLPGRIESSSNSLFLAFRSDASVSNAGFVIDYTENPRESCFDPGSIKNGTRVGSDLKLGSSVTYYCHGGYEVEGTSTLSCILGPDGKPVWNNPRPVCTAPCGGQYVGSDGVVLSPNYPQNYTSGQICLYFVTVPKDYVVFGQFAFFHTALNDVVEVHDGHSQHSRLLSSLSGSHTGESLPLATSNQVLIKFSAKGLAPARGFHFVYQAVPRTSATQCSSVPEPRYGKRLGSDFSVGAIVRFECNSGYALQGSPEIECLPVPGALAQWNVSAPTCVVPCGGNLTERRGTILSPGFPEPYLNSLNCVWKIVVPEGAGIQIQVVSFVTEQNWDSLEVFDGADNTVTMLGSFSGTTVPALLNSTSNQLYLHFYSDISVSAAGFHLEYKTVGLSSCPEPAVPSNGVKTGERYLVNDVVSFQCEPGYALQGHAHISCMPGTVRRWNYPPPLCIAQCGGTVEEMEGVILSPGFPGNYPSNMDCSWKIALPVGFGAHIQFLNFSTEPNHDYIEIRNGPYETSRMMGRFSGSELPSSLLSTSHETTVYFHSDHSQNRPGFKLEYQDLTYSHQISSFLRGFDLSELERTNSTPPVAASYVWDLDPGCEAYELQECPDPEPFANGIVRGAGYNVGQSVTFECLPGYQLTGHPVLTCQHGTNRNWDHPLPKCEVPCGGNITSSNGTVYSPGFPSPYSSSQDCVWLITVPIGHGVRLNLSLLQTEPSGDFITIWDGPQQTAPRLGVFTRSMAKKTVQSSSNQVLLKFHRDAATGGIFAIAFSAYPLTKCPPPTILPNAEVVTENEEFNIGDIVRYRCLPGFTLVGNEILTCKLGTYLQFEGPPPICEVHCPTNELLTDSTGVILSQSYPGSYPQFQTCSWLVRVEPDYNISLTVEYFLSEKQYDEFEIFDGPSGQSPLLKALSGNYSAPLIVTSSSNSVYLRWSSDHAYNRKGFKIRYSAPYCSLPRAPLHGFILGQTSTQPGGSIHFGCNAGYRLVGHSMAICTRHPQGYHLWSEAIPLCQALSCGLPEAPKNGMVFGKEYTVGTKAMYSCSEGYHLQAGAEATAECLDTGLWSNRNVPPQCVPVTCPDVSSISVEHGRWRLIFETQYQFQAQLMLICDPGYYYTGQRVIRCQANGKWSLGDSTPTCRIISCGELPIPPNGHRIGTLSVYGATAIFSCNSGYTLVGSRVRECMANGLWSGSEVRCLAGHCGTPEPIVNGHINGENYSYRGSVVYQCNAGFRLIGMSVRICQQDHHWSGKTPFCVLVSCGHPGSPPHSQMSGDSYTVGAVVRYSCIGKRTLVGNSTRMCGLDGHWTGSLPHCSGTSVGVCGDPGIPAHGIRLGDSFDPGTVMRFSCEAGHVLRGSSERTCQANGSWSGSQPECGVISCGNPGTPSNARVVFSDGLVFSSSIVYECREGYYATGLLSRHCSVNGTWTGSDPECLVINCGDPGIPANGLRLGNDFRYNKTVTYQCVPGYMMESHRVSVLSCTKDRTWNGTKPVCKALMCKPPPLIPNGKVVGSDFMWGSSVTYACLEGYQLSLPAVFTCEGNGSWTGELPQCFPVFCGDPGVPSRGRREDRGFSYRSSVSFSCHPPLVLVGSPRRFCQSDGTWSGTQPSCIDPTLTTCADPGVPQFGIQNNSQGYQVGSTVLFRCQKGYLLQGSTTRTCLPNLTWSGTPPDCVPHHCRQPETPTHANVGALDLPSMGYTLIYSCQEGFSLKGGSEHRTCKADGSWTGKPPICLEVRPSGRPINTAREPPLTQALIPGDVFAKNSLWKGAYEYQGKKQPAMLRVTGFQVANSKVNATMIDHSGVELHLAGTYKKEDFHLLLQVYQITGPVEIFMNKFKDDHWALDGHVSSESSGATFIYQGSVKGQGFGQFGFQRLDLRLLESDPESIGRHFASNSSSVAAAILVPFIALIIAGFVLYLYKHRRRPKVPFNGYAGHENTNVRATFENPMYDRNIQPTDIMASEAEFTVSTVCTAV

SEQ ID NO: 42516 - protein, 225 aa, Homo sapiens
MCDAHLRGPSGIITSPNFPIQYDNNAHCVWIITALNPSKAGGDPGNIQCNKEGLSVETQSLRLRNRSCLLGNSKDNGCCVPNPVHGTGLQVIKLAFEEFDLERGYDTLTVGDGGQDGDQKTVLYILTGTSVPDLIVSTNHQMWLLFQTDGSGSSLGFKASYEEIEQGSCGDPGIPAYGRREGSRFHHGDTLKFECQPAFELVGQKAITCQKNNQWSAKKPGCVCK

SEQ ID NO: 42517 - protein, 426 aa, Homo sapiens
MLGSFSGTTVPALLNSTSNQLYLHFYSDISVSAAGFHLEYKTVGLSSCPEPAVPSNGVKTGERYLVNDVVSFQCEPGYALQGHAHISCMPGTVRRWNYPPPLCIAQCGGTVEEMEGVILSPGFPGNYPSNMDCSWKIALPVGFGAHIQFLNFSTEPNHDYIEIRNGPYETSRMMGRFSGSELPSSLLSTSHETTVYFHSDHSQNRPGFKLEYQAYELQECPDPEPFANGIVRGAGYNVGQSVTFECLPGYQLTGHPVLTCQHGTNRNWDHPLPKCEVPCGGNITSSNGTVYSPGFPSPYSSSQDCVWLITVPIGHGVRLNLSLLQTEPSGDFITIWDGPQQTAPRLGVFTRSMAKKTVQSSSNQVLLKFHRDAATGGIFAIAFSDHCRYFNQKSGKLDFTPSSTLGQLCKTLHRSLPHLRLQFLHL

SEQ ID NO: 42518 - protein, 1167 aa, Homo sapiens
MVIVILFPAECGNSVTGTQGTLLSPNFPVNYNNNHECIYSIQTQPGKGIQLKARAFELSEGDVLKVYDGNNNSARLLGVFSHSEMMGVTLNSTSSSLWLDFITDAENTSKGFELHFSSFELIKCEDPGTPKFGYKVHDEGHFAGSSVSFSCDPGYSLRGSEELLCLSGERRTWDRPLPTCVAECGGTVRGEVSGQVLSPGYPAPYEHNLNCIWTIEAEAGCTIGLHFLVFDTEEVHDVLRIWDGPVESGVLLKELSGPALPKDLHSTFNSVVLQFSTDFFTSKQGFAIQFSVSTATSCNDPGIPQNGSRSGDSWEAGDSTVFQCDPGYALQGSAEISCVKIENRFFWQPSPPTCIAPCGGDLTGPSGVILSPNYPEPYPPGKECDWKVTVSPDYVIALVFNIFNLEPGYDFLHIYDGRDSLSPLIGSFYGSQLPGRIESSSNSLFLAFRSDASVSNAGFVIDYTENPRESCFDPGSIKNGTRVGSDLKLGSSVTYYCHGGYEVEGTSTLSCILGPDGKPVWNNPRPVCTAPCGGQYVGSDGVVLSPNYPQNYTSGQICLYFVTVPKDYVVFGQFAFFHTALNDVVEVHDGHSQHSRLLSSLSGSHTGESLPLATSNQVLIKFSAKGLAPARGFHFVYQAVPRTSATQCSSVPEPRYGKRLGSDFSVGAIVRFECNSGYALQGSPEIECLPVPGALAQWNVSAPTCVVPCGGNLTERRGTILSPGFPEPYLNSLNCVWKIVVPEGAGIQIQVVSFVTEQNWDSLEVFDGADNTVTMLGSFSGTTVPALLNSTSNQLYLHFYSDISVSAAGFHLEYKTVGLSSCPEPAVPSNGVKTGERYLVNDVVSFQCEPGYALQGHAHISCMPGTVRRWNYPPPLCIAQCGGTVEEMEGVILSPGFPGNYPSNMDCSWKIALPVGFGAHIQFLNFSTEPNHDYIEIRNGPYETSRMMGRFSGSELPSSLLSTSHETTVYFHSDHSQNRPGFKLEYQAYELQECPDPEPFANGIVRGAGYNVGQSVTFECLPGYQLTGHPVLTCQHGTNRNWDHPLPKCEVPCGGNITSSNGTVYSPGFPSPYSSSQDCVWLITVPIGHGVRLNLSLLQTEPSGDFITIWDGPQQTAPRLGVFTRSMAKKTVQSSSNQVLLKFHRDAATGGIFAIAFSGHLAAVCTL

SEQ ID NO: 42519 - protein, 3631 aa, Homo sapiens
MPRSRGRELGRCGCPAGRARGETGISALVPGAGSRWGRPPPPTPPPLLLLLGCGLLSVSAAAGQNCTFQLHGPNGTVESPGFPYGYPNYANCTWTITAEEQHRIQLVFQSFALEEDFDVLSVFDGPPQPENLRTRLTGFQLPATIVSAATTLSLRLISDYAVSAQGFHATYEVLPSHTCGNPGRLPNGIQQGSTFNLGDKVRYSCNLGFFLEGHAVLTCHAGSENSATWDFPLPSCRADDACGGTLRGQSGIISSPHFPSEYHNNADCTWTILAELGDTIALVFIDFQLEDGYDFLEVTGTEGSSLWFTGASLPAPVISSKNWLRLHFTSDGNHRQRGFSAQYQVKKQIELKSRGVKLMPSKDNSQKTSVLTQVGVSQGHNMCPDPGIPERGKRLGSDFRLGSSVQFTCNEGYDLQGSKRITCMKVSDMFAAWSDHRPVCRARMCDAHLRGPSGIITSPNFPIQYDNNAHCVWIITALNPSKVIKLAFEEFDLERGYDTLTVGDGGQDGDQKTVLYILTGTSVPDLIVSTNHQMWLLFQTDGSGSSLGFKASYEEIEQGSCGDPGIPAYGRREGSRFHHGDTLKFECQPAFELVGQKAITCQKNNQWSAKKPGCVFSCFFNFTSPSGVVLSPNYPEDYGNHLHCVWLILARPESRIHLAFNDIDVEPQFDFLVIKDGATAEAPVLGTFSGNQLPSSITSSGHVARLEFQTDHSTGKRGFNITFTTFRHNECPDPGVPVNGKRFGDSLQLGSSISFLCDEGFLGTQGSETITCVLKEGSVVWNSAVLRCEAPCGGHLTSPSGTILSPGWPGFYKDALSCAWVIEAQPGYPIKITFDRFKTEVNYDTLEVRDGRTYSAPLIGVYHGTQVPQFLISTSNYLYLLFSTDKSHSDIGFQLRYETITLQSDHCLDPGIPVNGQRHGNDFYVGALVTFSCDSGYTLSDGEPLECEPNFQWSRALPSCEALCGGFIQGSSGTILSPGFPDFYPNNLNCTWIIETSHGKGVFFTFHTFHLESGHDYLLITENGSFTQPLRQLTGSRLPAPISAGLYGNFTAQVRFISDFSMSYEGFNITFSEYDLEPCEEPEVPAYSIRKGLQFGVGDTLTFSCFPGYRLEGTARITCLGGRRRLWSSPLPRCVAECGNSVTGTQGTLLSPNFPVNYNNNHECIYSIQTQPGKGIQLKARAFELSEGDVLKVYDGNNNSARLLGVFSHSEMMGVTLNSTSSSLWLDFITDAENTSKGFELHFSSFELIKCEDPGTPKFGYKVHDEGHFAGSSVSFSCDPGYSLRGSEELLCLSGERRTWDRPLPTCVAECGGTVRGEVSGQVLSPGYPAPYEHNLNCIWTIEAEAGCTIGLHFLVFDTEEVHDVLRIWDGPVESGVLLKELSGPALPKDLHSTFNSVVLQFSTDFFTSKQGFAIQFSVSTATSCNDPGIPQNGSRSGDSWEAGDSTVFQCDPGYALQGSAEISCVKIENRFFWQPSPPTCIAPCGGDLTGPSGVILSPNYPEPYPPGKECDWKVTVSPDYVIALVFNIFNLEPGYDFLHIYDGRDSLSPLIGSFYGSQLPGRIESSSNSLFLAFRSDASVSNAGFVIDYTENPRESCFDPGSIKNGTRVGSDLKLGSSVTYYCHGGYEVEGTSTLSCILGPDGKPVWNNPRPVCTAPCGGQYVGSDGVVLSPNYPQNYTSGQICLYFVTVPKDYVVFGQFAFFHTALNDVVEVHDGHSQHSRLLSSLSGSHTGESLPLATSNQVLIKFSAKGLAPARGFHFVYQAVPRTSATQCSSVPEPRYGKRLGSDFSVGAIVRFECNSGYALQGSPEIECLPVPGALAQWNVSAPTCVVPCGGNLTERRGTILSPGFPEPYLNSLNCVWKIVVPEGAGIQIQVVSFVTEQNWDSLEVFDGADNTVTMLGSFSGTTVPALLNSTSNQLYLHFYSDISVSAAGFHLEYKTVGLSSCPEPAVPSNGVKTGERYLVNDVVSFQCEPGYALQGHAHISCMPGTVRRWNYPPPLCIAQCGGTVEEMEGVILSPGFPGNYPSNMDCSWKIALPVGFGAHIQFLNFSTEPNHDYIEIRNGPYETSRMMGRFSGSELPSSLLSTSHETTVYFHSDHSQNRPGFKLEYQAYELQECPDPEPFANGIVRGAGYNVGQSVTFECLPGYQLTGHPVLTCQHGTNRNWDHPLPKCEVPCGGNITSSNGTVYSPGFPSPYSSSQDCVWLITVPIGHGVRLNLSLLQTEPSGDFITIWDGPQQTAPRLGVFTRSMAKKTVQSSSNQVLLKFHRDAATGGIFAIAFSAYPLTKCPPPTILPNAEVVTENEEFNIGDIVRYRCLPGFTLVGNEILTCKLGTYLQFEGPPPICEVHCPTNELLTDSTGVILSQSYPGSYPQFQTCSWLVRVEPDYNISLTVEYFLSEKQYDEFEIFDGPSGQSPLLKALSGNYSAPLIVTSSSNSVYLRWSSDHAYNRKGFKIRYSAPYCSLPRAPLHGFILGQTSTQPGGSIHFGCNAGYRLVGHSMAICTRHPQGYHLWSEAIPLCQALSCGLPEAPKNGMVFGKEYTVGTKAMYSCSEGYHLQAGAEATAECLDTGLWSNRNVPPQCVPVTCPDVSSISVEHGRWRLIFETQYQFQAQLMLICDPGYYYTGQRVIRCQANGKWSLGDSTPTCRIISCGELPIPPNGHRIGTLSVYGATAIFSCNSGYTLVGSRVRECMANGLWSGSEVRCLATQTKLHSIFYKLLFDVLSSPSLTKAGHCGTPEPIVNGHINGENYSYRGSVVYQCNAGFRLIGMSVRICQQDHHWSGKTPFCVPITCGHPGNPVNGLTQGNQFNLNDVVKFVCNPGYMAEGAARSQCLASGQWSDMLPTCRIINCTDPGHQENSVRQVHASGPHRFSFGTTVSYRCNHGFYLLGTPVLSCQGDGTWDRPRPQCLLVSCGHPGSPPHSQMSGDSYTVGAVVRYSCIGKRTLVGNSTRMCGLDGHWTGSLPHCSGTSVGVCGDPGIPAHGIRLGDSFDPGTVMRFSCEAGHVLRGSSERTCQANGSWSGSQPECGVISCGNPGTPSNARVVFSDGLVFSSSIVYECREGYYATGLLSRHCSVNGTWTGSDPECLVINCGDPGIPANGLRLGNDFRYNKTVTYQCVPGYMMESHRVSVLSCTKDRTWNGTKPVCKALMCKPPPLIPNGKVVGSDFMWGSSVTYACLEGYQLSLPAVFTCEGNGSWTGELPQCFPVFCGDPGVPSRGRREDRGFSYRSSVSFSCHPPLVLVGSPRRFCQSDGTWSGTQPSCIDPTLTTCADPGVPQFGIQNNSQGYQVGSTVLFRCQKGYLLQGSTTRTCLPNLTWSGTPPDCVPHHCRQPETPTHANVGALDLPSMGYTLIYSCQEGFSLKGGSEHRTCKADGSWTGKPPICLEVRPSGRPINTAREPPLTQALIPGDVFAKNSLWKGAYEYQGKKQPAMLRVTGFQVANSKVNATMIDHSGVELHLAGTYKKEDFHLLLQVYQITGPVEIFMNKFKDDHWALDGHVSSESSGATFIYQGSVKGQGFGQFGFQRLDLRLLESDPESIGRHFASNSSSVAAAILVPFIALIIAGFVLYLYKHRRRPKVPFNGYAGHENTNVRATFENPMYDRNIQPTDIMASEAEFTVSTVCTAV

SEQ ID NO: 42520 - protein, 426 aa, Homo sapiens; identical to SEQ ID NO: 42517

SEQ ID NO: 42521 - protein, 3707 aa, Homo sapiens
MKGIRKGESRAKESKPWEPGKRRCAKCGRLDFILMKKMGIKSGFTFWNLVFLLTVSCVKGFIYTCGGTLKGLNGTIESPGFPYGYPNGANCTWVIIAEERNRIQIVFQSFALEEEYDYLSLYDGHPHPTNFRTRLTGFHLPPPVTSTKSVFSLRLTSDFAVSAHGFKVYYEELQSSSCGNPGVPPKGVLYGTRFDVGDKIRYSCVTGYILDGHPQLTCIANSVNTASWDFPVPICRAEDACGGTMRGSSGIISSPSFPNEYHNNADCTWTIVAEPGDTISLIFTDFQMEEKYDYLEIEGSEPPTIWLSGMNIPPPIISNKNWLRLHFVTDSNHRYRGFSAPYQGSSTLTHTTSTGELEEHNRTTTGAIAVASTPADVTVSSVTAVTIHRLSEEQRVQVTSLRNSGLDPNTSKDGLSPHPADTQSTRRRPRHAEQIERTKELAVVTHRVKKAIDFKSRGFKLFPGKDNSNKFSILNEGGIKTASNLCPDPGEPENGKRIGSDFSLGSTVQFSCDEDYVLQGAKSITCQRIAEVFAAWSDHRPVCKVKTCGSNLQGPSGTFTSPNFPFQYDSNAQCVWVITAVNTNKVIQINFEEFDLEIGYDTLTIGDGGEVGDPRTVLQVLTGSFVPDLIVSMSSQMWLHLQTDESVGSVGFKVNYKEIEKESCGDPGTPLYGIREGDGFSNRDVLRFECQFGFELIGEKSIVCQENNQWSANIPICIFPCLSNFTAPMGTVLSPDYPEGYGNNLNCIWTIISDPGSRIHLSFNDFDLESQFDFLAVKDGDSPESPILGTFTGAEVPSHLTSNSHILRLEFQADHSMSGRGFNITYNTFGHNECPDPGIPINARRFGDNFQLGSSISVICEEGFIKTQGTETITCILMDGKVMWSGLIPKCGAPCGGHFSAPSGVILSPGWPGYYKDSLNCEWVIEAEPGHSIKITFERFQTELNYDVLEVHDGPNLLSPLLGSYNGTQVPQFLFSSSNFIYLLFTTDNSRSNNGFKIHYESVTVNTYSCLDPGIPVHGRRYGHDFSIGSTVSFSCDSGYRLSHEEPLLCEKNHWWSHPLPTCDALCGGDVRGPSGTILSPGYPEFYPNSLNCTWTVDVTHGKGVQFNFHTFHLEDHHDYLLITENGSFTQPLARLTGSDLPPTINAGLYGNFRAQLRFISDFSISYEGFNITFSEYNLEPCEDPGIPQYGSRIGFNFGIGDTLTFSCSSGYRLEGTSEIICLGGGRRVWSAPLPRCVAECGASATNNEGILLSPNYPLNYENNHECIYSIQVQAGKGINISARTFHLAQGDVLKIYDGKDKTTHLLGAFTGASMRGLTLSSTSNQLWLEFNSDTEGTDEGFQLVYTSFELSHCEDPGIPQFGYKISDQGHFAGSTIIYGCNPGYTLHGSSLLKCMTGERRAWDYPLPSCIAECGGRFKGESSGRILSPGYPFPYDNNLRCMWMIEVDPGNIVSLQFLAFDTEASHDILRVWDGPPENDMLLKEISGSLIPEGIHSTLNIVTIQFDTDFYISKSGFAIQFSSSVATACRDPGVPMNGTRNGDGREPGDTVVFQCDPGYELQGEERITCIQVENRYFWQPSPPVCIAPCGGNLTGSSGFILSPNFPHPYPHSRDCDWTITVNADYVISLAFISFSIEPNYDFLYIYDGPDSNSPLIGSFQDSKLPERIESSSNTMHLAFRSDGSVSYTGFHLEYKAKLRESCFDPGNIMNGTRLGMDYKLGSTVTYYCDAGYVLQGYSTLTCIMGDDGRPGWNRALPSCHAPCGSRSTGSEGTVLSPNYPKNYSVGHNCVYSIAVPKEFVVFGQFVFFQTSLHDVVEVYDGPTQQSSLLSSLSGSHSGESLPLSSGNQITIRFTSVGPITAKGFHFVYQAVPRTSSTQCSSVPEPRFGRRIGNEFAVGSSVLFDCNPGYILHGSIAIRCETVPNSLAQWNDSLPTCIVPCGGILTKRKGTILSPGYPEPYDNNLNCVWKITVPEGAGIQVQVVSFATEHNWDSLDFYDGGDNNAPRLGSYSGTTIPHLLNSTSNNLYLNFQSDISVSAAGFHLEYTAIGLDSCPEPQTPSSGIKIGDRYMVGDVVSFQCDQGYSLQGHSHITCMPGPVRRWNYPIPICLAQCGGAMSDFSGVILSPGFPGNYPSSLDCTWTINLPIGFGVHLQFVNFSTETIHDYLEVRSGSSETSTVIGRLSGPQIPSSLFSTTHETSLYFHSDYSQNKQGFHIVYQAYQLQSCPDPRPFRNGFVIGNDFTVGQTISFECFPGYTLIGNSALTCLHGVSRNWNHPLPRCEALCGGNITAMNGTIYSPGYPDEYPNFQDCFWLVRVPPGNGIYINFTVLQTEPIYDFITVWDGPDQNSPQIGQFSGNTALESVYSTSNQILIKFHSDFTTSGFFVLSYHAYQLRVCQPPPPVPNAEILTEDDEFEIGDIIRYQCLPGFTLVGNAILTCRLGERLQMDGAPPVCQVLCPANELRLDSTGVILSPGYPDSYPNLQMCAWSISVEKGYNITMFVEFFQTEKEFDVLQVYDGPNIQSPVLISLSGDYSSAFNITSNGHEVFLQWSADHGNNKKGFRIRYIAFYCSTPESPPHGYIISQTGGQLNSVVRWACDRGFRLVGKSSAVCRKSSYGYHAWDAPVPACQAISCGIPKAPTNGGILTTDYLVGTRVTYFCNDGYRLSSKELTTAVCQSDGTWSNHNKTPRCVVVTCPSINSFILEHGRWRIVNGSHYEYKTKVVFSCDPGYHGLGPASIECLPNGTWSWRNERPYCQIISCGELPTPPNGNKIGTQTSYGSTAIFTCDLGFMLVGSAVRECLSSGLWSESETRCLAGHCGIPELIVNGQVIGENYGYRDTVVYQCNPGFRLIGSSVRICQQDHNWSGQLPSCVPVSCGHPGSPIYGRTSGNGFNFNDVVTFSCNIGYLMQGPTKAQCQANRQWSHPPPMCKVVNCSDPGIPANSKRESKIEHGNFTYGTVVFYDCNPGYFLFGSSVLICQPNGQWDKPLPECIMIDCGHPGVPPNAVLSGEKYTFGSTVHYSCTGKRSLLGQSSRTCQLNGHWSGSQPHCSGDATGTCGDPGTPGHGSRQESNFRTKSTVRYACDTGYILHGSEERTCLANGSWTGRQPECKAVQCGNPGTTANGKVFRIDGTTFSSSVIYSCMEGYILSGPSVRQCTANGTWSGTLPNCTIISCGDPGIPANGLRYGDDYVVGQNVSYMCQPGYTMELNGSRIRTCTINGTWSGVMPTCRAVTCPTPPQISNGRLEGTNFDWGFSISYICSPGYELSFPAVLTCVGNGTWSGEVPQCLPKFCGDPGIPAQGKREGKSFIYQSEVSFSCNFPFILVGSSTRICQADGTWSGSSPHCIEPTQTSCENPGVPRHGSQNNTFGFQVGSVVQFHCKKGHLLQGSTTRTCLPDLTWSGIQPECIPHSCKQPETPAHANVVGMDLPSHGYTLIYTCQPGFFLAGGTEHRVCRSDNTWTGKVPICEAGSKILVKDPRPALGTPSPKLSVPDDVFAQNYIWKGSYNFKGRKQPMTLTVTSFNASTGRVNATLSNSNMELLLSGVYKSQEARLMLRIYLIKVPAHASVKKMKEENWAMDGFVSAEPDGATYVFQGFIQGKDYGQFGLQRLGLNMSEGSNSSNQPHGTNSSSVAIAILVPFFALIFAGFGFYLYKQRTAPKTQYTGCSVHENNNGQAAFENPMYDTNAKSVEGKAVRFDPNLNTVCTMV

SEQ ID NO: 42522 - protein, 3667 aa, Homo sapiens
MWSWFLCWKPVQLDRQTASGFIYTCGGTLKGLNGTIESPGFPYGYPNGANCTWVIIAEERNRIQIVFQSFALEEEYDYLSLYDGHPHPTNFRTRLTGFHLPPPVTSTKSVFSLRLTSDFAVSAHGFKVYYEELQSSSCGNPGVPPKGVLYGTRFDVGDKIRYSCVTGYILDGHPQLTCIANSVNTASWDFPVPICRAEDACGGTMRGSSGIISSPSFPNEYHNNADCTWTIVAEPGDTISLIFTDFQMEEKYDYLEIEGSEPPTIWLSGMNIPPPIISNKNWLRLHFVTDSNHRYRGFSAPYQGSSTLTHTTSTGELEEHNRTTTGAIAVASTPADVTVSSVTAVTIHRLSEEQRVQVTSLRNSGLDPNTSKDGLSPHPADTQSTRRRPRHAEQIERTKELAVVTHRVKKAIDFKSRGFKLFPGKDNSNKFSILNEGGIKTASNLCPDPGEPENGKRIGSDFSLGSTVQFSCDEDYVLQGAKSITCQRIAEVFAAWSDHRPVCKVKTCGSNLQGPSGTFTSPNFPFQYDSNAQCVWVITAVNTNKVIQINFEEFDLEIGYDTLTIGDGGEVGDPRTVLQVLTGSFVPDLIVSMSSQMWLHLQTDESVGSVGFKVNYKEIEKESCGDPGTPLYGIREGDGFSNRDVLRFECQFGFELIGEKSIVCQENNQWSANIPICIFPCLSNFTAPMGTVLSPDYPEGYGNNLNCIWTIISDPGSRIHLSFNDFDLESQFDFLAVKDGDSPESPILGTFTGAEVPSHLTSNSHILRLEFQADHSMSGRGFNITYNTFGHNECPDPGIPINARRFGDNFQLGSSISVICEEGFIKTQGTETITCILMDGKVMWSGLIPKCGAPCGGHFSAPSGVILSPGWPGYYKDSLNCEWVIEAEPGHSIKITFERFQTELNYDVLEVHDGPNLLSPLLGSYNGTQVPQFLFSSSNFIYLLFTTDNSRSNNGFKIHYESVTVNTYSCLDPGIPVHGRRYGHDFSIGSTVSFSCDSGYRLSHEEPLLCEKNHWWSHPLPTCDALCGGDVRGPSGTILSPGYPEFYPNSLNCTWTVDVTHGKGVQFNFHTFHLEDHHDYLLITENGSFTQPLARLTGSDLPPTINAGLYGNFRAQLRFISDFSISYEGFNITFSEYNLEPCEDPGIPQYGSRIGFNFGIGDTLTFSCSSGYRLEGTSEIICLGGGRRVWSAPLPRCVAECGASATNNEGILLSPNYPLNYENNHECIYSIQVQAGKGINISARTFHLAQGDVLKIYDGKDKTTHLLGAFTGASMRGLTLSSTSNQLWLEFNSDTEGTDEGFQLVYTSFELSHCEDPGIPQFGYKISDQGHFAGSTIIYGCNPGYTLHGSSLLKCMTGERRAWDYPLPSCIAECGGRFKGESSGRILSPGYPFPYDNNLRCMWMIEVDPGNIVSLQFLAFDTEASHDILRVWDGPPENDMLLKEISGSLIPEGIHSTLNIVTIQFDTDFYISKSGFAIQFSSSVATACRDPGVPMNGTRNGDGREPGDTVVFQCDPGYELQGEERITCIQVENRYFWQPSPPVCIAPCGGNLTGSSGFILSPNFPHPYPHSRDCDWTITVNADYVISLAFISFSIEPNYDFLYIYDGPDSNSPLIGSFQDSKLPERIESSSNTMHLAFRSDGSVSYTGFHLEYKAKLRESCFDPGNIMNGTRLGMDYKLGSTVTYYCDAGYVLQGYSTLTCIMGDDGRPGWNRALPSCHAPCGSRSTGSEGTVLSPNYPKNYSVGHNCVYSIAVPKEFVVFGQFVFFQTSLHDVVEVYDGPTQQSSLLSSLSGSHSGESLPLSSGNQITIRFTSVGPITAKGFHFVYQAVPRTSSTQCSSVPEPRFGRRIGNEFAVGSSVLFDCNPGYILHGSIAIRCETVPNSLAQWNDSLPTCIVPCGGILTKRKGTILSPGYPEPYDNNLNCVWKITVPEGAGIQVQVVSFATEHNWDSLDFYDGGDNNAPRLGSYSGTTIPHLLNSTSNNLYLNFQSDISVSAAGFHLEYTAIGLDSCPEPQTPSSGIKIGDRYMVGDVVSFQCDQGYSLQGHSHITCMPGPVRRWNYPIPICLAQCGGAMSDFSGVILSPGFPGNYPSSLDCTWTINLPIGFGVHLQFVNFSTETIHDYLEVRSGSSETSTVIGRLSGPQIPSSLFSTTHETSLYFHSDYSQNKQGFHIVYQAYQLQSCPDPRPFRNGFVIGNDFTVGQTISFECFPGYTLIGNSALTCLHGVSRNWNHPLPRCEALCGGNITAMNGTIYSPGYPDEYPNFQDCFWLVRVPPGNGIYINFTVLQTEPIYDFITVWDGPDQNSPQIGQFSGNTALESVYSTSNQILIKFHSDFTTSGFFVLSYHAYQLRVCQPPPPVPNAEILTEDDEFEIGDIIRYQCLPGFTLVGNAILTCRLGERLQMDGAPPVCQVLCPANELRLDSTGVILSPGYPDSYPNLQMCAWSISVEKGYNITMFVEFFQTEKEFDVLQVYDGPNIQSPVLISLSGDYSSAFNITSNGHEVFLQWSADHGNNKKGFRIRYIAFYCSTPESPPHGYIISQTGGQLNSVVRWACDRGFRLVGKSSAVCRKSSYGYHAWDAPVPACQAISCGIPKAPTNGGILTTDYLVGTRVTYFCNDGYRLSSKELTTAVCQSDGTWSNHNKTPRCVVVTCPSINSFILEHGRWRIVNGSHYEYKTKVVFSCDPGYHGLGPASIECLPNGTWSWRNERPYCQIISCGELPTPPNGNKIGTQTSYGSTAIFTCDLGFMLVGSAVRECLSSGLWSESETRCLAGHCGIPELIVNGQVIGENYGYRDTVVYQCNPGFRLIGSSVRICQQDHNWSGQLPSCVPVSCGHPGSPIYGRTSGNGFNFNDVVTFSCNIGYLMQGPTKAQCQANRQWSHPPPMCKVVNCSDPGIPANSKRESKIEHGNFTYGTVVFYDCNPGYFLFGSSVLICQPNGQWDKPLPECIMIDCGHPGVPPNAVLSGEKYTFGSTVHYSCTGKRSLLGQSSRTCQLNGHWSGSQPHCSGDATGTCGDPGTPGHGSRQESNFRTKSTVRYACDTGYILHGSEERTCLANGSWTGRQPECKAVQCGNPGTTANGKVFRIDGTTFSSSVIYSCMEGYILSGPSVRQCTANGTWSGTLPNCTIISCGDPGIPANGLRYGDDYVVGQNVSYMCQPGYTMELNGSRIRTCTINGTWSGVMPTCRAVTCPTPPQISNGRLEGTNFDWGFSISYICSPGYELSFPAVLTCVGNGTWSGEVPQCLPKFCGDPGIPAQGKREGKSFIYQSEVSFSCNFPFILVGSSTRICQADGTWSGSSPHCIEPTQTSCENPGVPRHGSQNNTFGFQVGSVVQFHCKKGHLLQGSTTRTCLPDLTWSGIQPECIPHSCKQPETPAHANVVGMDLPSHGYTLIYTCQPGFFLAGGTEHRVCRSDNTWTGKVPICEAGSKILVKDPRPALGTPSPKLSVPDDVFAQNYIWKGSYNFKGRKQPMTLTVTSFNASTGRVNATLSNSNMELLLSGVYKSQEARLMLRIYLIKVPAHASVKKMKEENWAMDGFVSAEPDGATYVFQGFIQGKDYGQFGLQRLGLNMSEGSNSSNQPHGTNSSSVAIAILVPFFALIFAGFGFYLYKQRTAPKTQYTGCSVHENNNGQAAFENPMYDTNAKSVEGKAVRFDPNLNTVCTMV

SEQ ID NO: 42523 - protein, 3637 aa, Homo sapiens
MKGIRKGESRAKESKPWEPGKRRCAKCGRLDFILMKKMGIKSGFTFWNLVFLLTVSCVKGFIYTCGGTLKGLNGTIESPGFPYGYPNGANCTWVIIAEERNRIQIVFQSFALEEEYDYLSLYDGHPHPTNFRTRLTGFHLPPPVTSTKSVFSLRLTSDFAVSAHGFKVYYEELQSSSCGNPGVPPKGVLYGTRFDVGDKIRYSCVTGYILDGHPQLTCIANSVNTASWDFPVPICRAEDACGGTMRGSSGIISSPSFPNEYHNNADCTWTIVAEPGDTISLIFTDFQMEEKYDYLEIEGSEPPTIWLSGMNIPPPIISNKNWLRLHFVTDSNHRYRGFSAPYQGSSTLTHTTSTGELEEHNRTTTGAIAVASTPADVTVSSVTAVTIHRLSEEQRVQVTSLRNSGLDPNTSKDGLSPHPADTQSTRRRPRHAEQIERTKELAVVTHRVKKAIDFKSRGFKLFPGKDNSNKFSILNEGGIKTASNLCPDPGEPENGKRIGSDFSLGSTVQFSCDEDYVLQGAKSITCQRIAEVFAAWSDHRPVCKVKTCGSNLQGPSGTFTSPNFPFQYDSNAQCVWVITAVNTNKVIQINFEEFDLEIGYDTLTIGDGGEVGDPRTVLQVLTGSFVPDLIVSMSSQMWLHLQTDESVGSVGFKVNYKEIEKESCGDPGTPLYGIREGDGFSNRDVLRFECQFGFELIGEKSIVCQENNQWSANIPICIFPCLSNFTAPMGTVLSPDYPEGYGNNLNCIWTIISDPGSRIHLSFNDFDLESQFDFLAVKDGDSPESPILGTFTGAEVPSHLTSNSHILRLEFQADHSMSGRGFNITYNTFGHNECPDPGIPINARRFGDNFQLGSSISVICEEGFIKTQGTETITCILMDGKVMWSGLIPKCGAPCGGHFSAPSGVILSPGWPGYYKDSLNCEWVIEAEPGHSIKITFERFQTELNYDVLEVHDGPNLLSPLLGSYNGTQVPQFLFSSSNFIYLLFTTDNSRSNNGFKIHYESVTVNTYSCLDPGIPVHGRRYGHDFSIGSTVSFSCDSGYRLSHEEPLLCEKNHWWSHPLPTCDALCGGDVRGPSGTILSPGYPEFYPNSLNCTWTVDVTHGKGVQFNFHTFHLEDHHDYLLITENGSFTQPLARLTGSDLPPTINAGLYGNFRAQLRFISDFSISYEGFNITFSEYNLEPCEDPGIPQYGSRIGFNFGIGDTLTFSCSSGYRLEGTSEIICLGGGRRVWSAPLPRCVAECGASATNNEGILLSPNYPLNYENNHECIYSIQVQAGKGINISARTFHLAQGDVLKIYDGKDKTTHLLGAFTGASMRGLTLSSTSNQLWLEFNSDTEGTDEGFQLVYTSFELSHCEDPGIPQFGYKISDQGHFAGSTIIYGCNPGYTLHGSSLLKCMTGERRAWDYPLPSCIAECGGRFKGESSGRILSPGYPFPYDNNLRCMWMIEVDPGNIVSLQFLAFDTEASHDILRVWDGPPENDMLLKEISGSLIPEGIHSTLNIVTIQFDTDFYISKSGFAIQFSSSVATACRDPGVPMNGTRNGDGREPGDTVVFQCDPGYELQGEERITCIQVENRYFWQPSPPVCIAPCGGNLTGSSGFILSPNFPHPYPHSRDCDWTITVNADYVISLAFISFSIEPNYDFLYIYDGPDSNSPLIGSFQDSKLPERIESSSNTMHLAFRSDGSVSYTGFHLEYKAKLRESCFDPGNIMNGTRLGMDYKLGSTVTYYCDAGYVLQGYSTLTCIMGDDGRPGWNRALPSCHAPCGSRSTGSEGTVLSPNYPKNYSVGHNCVYSIAVPKEFAVPRTSSTQCSSVPEPRFGRRIGNEFAVGSSVLFDCNPGYILHGSIAIRCETVPNSLAQWNDSLPTCIVPCGGILTKRKGTILSPGYPEPYDNNLNCVWKITVPEGAGIQVQVVSFATEHNWDSLDFYDGGDNNAPRLGSYSGTTIPHLLNSTSNNLYLNFQSDISVSAAGFHLEYTAIGLDSCPEPQTPSSGIKIGDRYMVGDVVSFQCDQGYSLQGHSHITCMPGPVRRWNYPIPICLAQCGGAMSDFSGVILSPGFPGNYPSSLDCTWTINLPIGFGVHLQFVNFSTETIHDYLEVRSGSSETSTVIGRLSGPQIPSSLFSTTHETSLYFHSDYSQNKQGFHIVYQAYQLQSCPDPRPFRNGFVIGNDFTVGQTISFECFPGYTLIGNSALTCLHGVSRNWNHPLPRCEALCGGNITAMNGTIYSPGYPDEYPNFQDCFWLVRVPPGNGIYINFTVLQTEPIYDFITVWDGPDQNSPQIGQFSGNTALESVYSTSNQILIKFHSDFTTSGFFVLSYHAYQLRVCQPPPPVPNAEILTEDDEFEIGDIIRYQCLPGFTLVGNAILTCRLGERLQMDGAPPVCQVLCPANELRLDSTGVILSPGYPDSYPNLQMCAWSISVEKGYNITMFVEFFQTEKEFDVLQVYDGPNIQSPVLISLSGDYSSAFNITSNGHEVFLQWSADHGNNKKGFRIRYIAFYCSTPESPPHGYIISQTGGQLNSVVRWACDRGFRLVGKSSAVCRKSSYGYHAWDAPVPACQAISCGIPKAPTNGGILTTDYLVGTRVTYFCNDGYRLSSKELTTAVCQSDGTWSNHNKTPRCVVVTCPSINSFILEHGRWRIVNGSHYEYKTKVVFSCDPGYHGLGPASIECLPNGTWSWRNERPYCQIISCGELPTPPNGNKIGTQTSYGSTAIFTCDLGFMLVGSAVRECLSSGLWSESETRCLAGHCGIPELIVNGQVIGENYGYRDTVVYQCNPGFRLIGSSVRICQQDHNWSGQLPSCVPVSCGHPGSPIYGRTSGNGFNFNDVVTFSCNIGYLMQGPTKAQCQANRQWSHPPPMCKVVNCSDPGIPANSKRESKIEHGNFTYGTVVFYDCNPGYFLFGSSVLICQPNGQWDKPLPECIMIDCGHPGVPPNAVLSGEKYTFGSTVHYSCTGKRSLLGQSSRTCQLNGHWSGSQPHCSGDATGTCGDPGTPGHGSRQESNFRTKSTVRYACDTGYILHGSEERTCLANGSWTGRQPECKAVQCGNPGTTANGKVFRIDGTTFSSSVIYSCMEGYILSGPSVRQCTANGTWSGTLPNCTIISCGDPGIPANGLRYGDDYVVGQNVSYMCQPGYTMELNGSRIRTCTINGTWSGVMPTCRAVTCPTPPQISNGRLEGTNFDWGFSISYICSPGYELSFPAVLTCVGNGTWSGEVPQCLPKFCGDPGIPAQGKREGKSFIYQSEVSFSCNFPFILVGSSTRICQADGTWSGSSPHCIEPTQTSCENPGVPRHGSQNNTFGFQVGSVVQFHCKKGHLLQGSTTRTCLPDLTWSGIQPECIPHSCKQPETPAHANVVGMDLPSHGYTLIYTCQPGFFLAGGTEHRVCRSDNTWTGKVPICEAGSKILVKDPRPALGTPSPKLSVPDDVFAQNYIWKGSYNFKGRKQPMTLTVTSFNASTGRVNATLSNSNMELLLSGVYKSQEARLMLRIYLIKVPAHASVKKMKEENWAMDGFVSAEPDGATYVFQGFIQGKDYGQFGLQRLGLNMSEGSNSSNQPHGTNSSSVAIAILVPFFALIFAGFGFYLYKQRTAPKTQYTGCSVHENNNGQAAFENPMYDTNAKSVEGKAVRFDPNLNTVCTMV

SEQ ID NO: 42524 - protein, 3538 aa, Homo sapiens
MKGIRKGESRAKESKPWEPGKRRCAKCGRLDFILMKKMGIKSGFTFWNLVFLLTVSCVKGFIYTCGGTLKGLNGTIESPGFPYGYPNGANCTWVIIAEERNRIQIVFQSFALEEEYDYLSLYDGHPHPTNFRTRLTGFHLPPPVTSTKSVFSLRLTSDFAVSAHGFKVYYEELQSSSCGNPGVPPKGVLYGTRFDVGDKIRYSCVTGYILDGHPQLTCIANSVNTASWDFPVPICRAEDACGGTMRGSSGIISSPSFPNEYHNNADCTWTIVAEPGDTISLIFTDFQMEEKYDYLEIEGSEPPTIWLSGMNIPPPIISNKNWLRLHFVTDSNHRYRGFSAPYQVKKAIDFKSRGFKLFPGKDNSNKFSILNEGGIKTASNLCPDPGEPENGKRIGSDFSLGSTVQFSCDEDYVLQGAKSITCQRIAEVFAAWSDHRPVCKVKTCGSNLQGPSGTFTSPNFPFQYDSNAQCVWVITAVNTNKVIQINFEEFDLEIGYDTLTIGDGGEVGDPRTVLQVLTGSFVPDLIVSMSSQMWLHLQTDESVGSVGFKVNYKEIEKESCGDPGTPLYGIREGDGFSNRDVLRFECQFGFELIGEKSIVCQENNQWSANIPICIFPCLSNFTAPMGTVLSPDYPEGYGNNLNCIWTIISDPGSRIHLSFNDFDLESQFDFLAVKDGDSPESPILGTFTGAEVPSHLTSNSHILRLEFQADHSMSGRGFNITYNTFGHNECPDPGIPINARRFGDNFQLGSSISVICEEGFIKTQGTETITCILMDGKVMWSGLIPKCGAPCGGHFSAPSGVILSPGWPGYYKDSLNCEWVIEAEPGHSIKITFERFQTELNYDVLEVHDGPNLLSPLLGSYNGTQVPQFLFSSSNFIYLLFTTDNSRSNNGFKIHYESVTVNTYSCLDPGIPVHGRRYGHDFSIGSTVSFSCDSGYRLSHEEPLLCEKNHWWSHPLPTCDALCGGDVRGPSGTILSPGYPEFYPNSLNCTWTVDVTHGKGVQFNFHTFHLEDHHDYLLITENGSFTQPLARLTGSDLPPTINAGLYGNFRAQLRFISDFSISYEGFNITFSEYNLEPCEDPGIPQYGSRIGFNFGIGDTLTFSCSSGYRLEGTSEIICLGGGRRVWSAPLPRCVAECGASATNNEGILLSPNYPLNYENNHECIYSIQVQAGKGINISARTFHLAQGDVLKIYDGKDKTTHLLGAFTGASMRGLTLSSTSNQLWLEFNSDTEGTDEGFQLVYTSFELSHCEDPGIPQFGYKISDQGHFAGSTIIYGCNPGYTLHGSSLLKCMTGERRAWDYPLPSCIAECGGRFKGESSGRILSPGYPFPYDNNLRCMWMIEVDPGNIVSLQFLAFDTEASHDILRVWDGPPENDMLLKEISGSLIPEGIHSTLNIVTIQFDTDFYISKSGFAIQFSSSVATACRDPGVPMNGTRNGDGREPGDTVVFQCDPGYELQGEERITCIQVENRYFWQPSPPVCIAPCGGNLTGSSGFILSPNFPHPYPHSRDCDWTITVNADYVISLAFISFSIEPNYDFLYIYDGPDSNSPLIGSFQDSKLPERIESSSNTMHLAFRSDGSVSYTGFHLEYKAKLRESCFDPGNIMNGTRLGMDYKLGSTVTYYCDAGYVLQGYSTLTCIMGDDGRPGWNRALPSCHAPCGSRSTGSEGTVLSPNYPKNYSVGHNCVYSIAVPKEFVVFGQFVFFQTSLHDVVEVYDGPTQQSSLLSSLSGSHSGESLPLSSGNQITIRFTSVGPITAKGFHFVYQAVPRTSSTQCSSVPEPRFGRRIGNEFAVGSSVLFDCNPGYILHGSIAIRCETVPNSLAQWNDSLPTCIVPCGGILTKRKGTILSPGYPEPYDNNLNCVWKITVPEGAGIQVQVVSFATEHNWDSLDFYDGGDNNAPRLGSYSGTTIPHLLNSTSNNLYLNFQSDISVSAAGFHLEYTAIGLDSCPEPQTPSSGIKIGDRYMVGDVVSFQCDQGYSLQGHSHITCMPGPVRRWNYPIPICLAQCGGAMSDFSGVILSPGFPGNYPSSLDCTWTINLPIGFGVHLQFVNFSTETIHDYLEVRSGSSETSTVIGRLSGPQIPSSLFSTTHETSLYFHSDYSQNKQGFHIVYQAYQLQSCPDPRPFRNGFVIGNDFTVGQTISFECFPGYTLIGNSALTCLHGVSRNWNHPLPRCEALCGGNITAMNGTIYSPGYPDEYPNFQDCFWLVRVPPGNGIYINFTVLQTEPIYDFITVWDGPDQNSPQIGQFSGNTALESVYSTSNQILIKFHSDFTTSGFFVLSYHAYQLRVCQPPPPVPNAEILTEDDEFEIGDIIRYQCLPGFTLVGNAILTCRLGERLQMDGAPPVCQVLCPANELRLDSTGVILSPGYPDSYPNLQMCAWSISVEKGYNITMFVEFFQTEKEFDVLQVYDGPNIQSPVLISLSGDYSSAFNITSNGHEVFLQWSADHGNNKKGFRIRYIAFYCSTPESPPHGYIISQTGGQLNSVVRWACDRGFRLVGKSSAVCRKSSYGYHAWDAPVPACQAISCGIPKAPTNGGILTTDYLVGTRVTYFCNDGYRLSSKELTTAVCQSDGTWSNHNKTPRCVVISCGELPTPPNGNKIGTQTSYGSTAIFTCDLGFMLVGSAVRECLSSGLWSESETRCLAGHCGIPELIVNGQVIGENYGYRDTVVYQCNPGFRLIGSSVRICQQDHNWSGQLPSCVPVSCGHPGSPIYGRTSGNGFNFNDVVTFSCNIGYLMQGPTKAQCQANRQWSHPPPMCKVVNCSDPGIPANSKRESKIEHGNFTYGTVVFYDCNPGYFLFGSSVLICQPNGQWDKPLPECIMIDCGHPGVPPNAVLSGEKYTFGSTVHYSCTGKRSLLGQSSRTCQLNGHWSGSQPHCSGDATGTCGDPGTPGHGSRQESNFRTKSTVRYACDTGYILHGSEERTCLANGSWTGRQPECKAVQCGNPGTTANGKVFRIDGTTFSSSVIYSCMEGYILSGPSVRQCTANGTWSGTLPNCTIISCGDPGIPANGLRYGDDYVVGQNVSYMCQPGYTMELNGSRIRTCTINGTWSGVMPTCRAVTCPTPPQISNGRLEGTNFDWGFSISYICSPGYELSFPAVLTCVGNGTWSGEVPQCLPKFCGDPGIPAQGKREGKSFIYQSEVSFSCNFPFILVGSSTRICQADGTWSGSSPHCIEPTQTSCENPGVPRHGSQNNTFGFQVGSVVQFHCKKGHLLQGSTTRTCLPDLTWSGIQPECIPHSCKQPETPAHANVVGMDLPSHGYTLIYTCQPGFFLAGGTEHRVCRSDNTWTGKVPICEAGSKILVKDPRPALGTPSPKLSVPDDVFAQNYIWKGSYNFKGRKQPMTLTVTSFNASTGRVNATLSNSNMELLLSGVYKSQEARLMLRIYLIKVPAHASVKKMKEENWAMDGFVSAEPDGATYVFQGFIQGKDYGQFGLQRLGLNMSEGSNSSNQPHGTNSSSVAIAILVPFFALIFAGFGFYLYKQRTAPKTQYTGCSVHENNNGQAAFENPMYDTNAKSVEGKAVRFDPNLNTVCTMV

SEQ ID NO: 42525 - protein, 836 aa, Homo sapiens
MAGLNCGVSIALLGVLLLGAARLPRGAEAFEIALPRESNITVLIKLGTPTLLAKPCYIVISKRHITMLSIKSGERIVFTFSCQSPENHFVIEIQKNIDCMSGPCPFGEVQLQPSTSLLPTLNRTFIWDVKAHKSIGLELQFSIPRLRQIGPGESCPDGVTHSISGRIDATVVRIGTFCSNGTVSRIKMQEGVKMALHLPWFHPRNVSGFSIANRSSIKRLCIIESVFEGEGSATLMSANYPEGFPEDELMTWQFVVPAHLRASVSFLNFNLSNCERKEERVEYYIPGSTTNPEVFKLEDKQPGNMAGNFNLSLQGCDQDAQSPGILRLQFQVLVQHPQNESNKIYVVDLSNERAMSLTIEPRPVKQSRKFVPGCFVCLESRTCSSNLTLTSGSKHKISFLCDDLTRLWMNVEKTISCTDHRYCQRKSYSLQVPSDILHLPVELHDFSWKLLVPKDRLSLVLVPAQKLQQHTHEKPCNTSFSYLVASAIPSQDLYFGSFCPGGSIKQIQVKQNISVTLRTFAPSFQQEASRQGLTVSFIPYFKEEGVFTVTPDTKSKVYLRTPNWDRGLPSLTSVSWNISVPRDQVACLTFFKERSGVVCQTGRAFMIIQEQRTRAEEIFSLDEDVLPKPSFHHHSFWVNISNCSPTSGKQLDLLFSVTLTPRTVDLTVILIAAVGGGVLLLSALGLIICCVKKKKKKTNKGPAVGIYNDNINTEMPRQPKKFQKGRKDNDSHVYAVIEDTMVYGHLLQDSSGSFLQPEVDTYRPFQGTMGVCPPSPPTICSRAPTAKLATEEPPPRSPPESESEPYTFSHPNNGDVSSKDTDIPLLNTQEPMEPAE

SEQ ID NO: 42526 - protein, 343 aa, Homo sapiens
MAGLNCGVSIALLGVLLLGAARLPRGAEAFEIALPRESNITVLIKLGTPTLLAKPCYIVISKRHITMLSIKSGERIVFTFSCQSPENHFVIEIQKNIDCMSGPCPFGEVQLQPSTSLLPTLNRTFIWDVKAHKSIGLELQFSIPRLRQIGPGESCPDGVTHSISGRIDATVVRIGTFCSNGTVSRIKMQEGVKMALHLPWFHPRNVSGFSIANRSSIKRLCIIESVFEGEGSATLMSANYPEGFPEDELMTWQFVVPAHLRASVSFLNFNLSNCERKEERVEYYIPGSTTNPEVFKLEDKQPGNMAGNFNLSLQGCDQDAQSPGILRLQFQVLVQHPQNESSE

SEQ ID NO: 42527 - protein, 170 aa, Homo sapiens
MMNMSLPFLWSLLTLLIFAEVNGEAGELELQRQKRSINLQQPRMATERGNLVFLTGSAQNIEFRTGSLGKIKLNDEDLSECLHQIQKNKEDIIELKGSAIGLPQNISSQIYQLNSKLVDLERKFQGLQQTVDKKVCSSNPCQNGGTCLNLHDSFFCICPPQWKVSHLLFG

SEQ ID NO: 42528 - protein, 3623 aa, Homo sapiens
MMNMSLPFLWSLLTLLIFAEVNGEAGELELQRQKRSINLQQPRMATERGNLVFLTGSAQNIEFRTGSLGKIKLNDEDLSECLHQIQKNKEDIIELKGSAIGLPQNISSQIYQLNSKLVDLERKFQGLQQTVDKKVCSSNPCQNGGTCLNLHDSFFCICPPQWKGPLCSADVNECEIYSGTPLSCQNGGTCVNTMGSYSCHCPPETYGPQCASKYDDCEGGSVARCVHGICEDLMREQAGEPKYSCVCDAGWMFSPNSPACTLDRDECSFQPGPCSTLVQCFNTQGSFYCGACPTGWQGNGYICEDINECEINNGGCSVAPPVECVNTPGSSHCQACPPGYQGDGRVCTLTDICSVSNGGCHPDASCSSTLGSLPLCTCLPGYTGNGYGPNGCVQLSNICLSHPCLNGQCIDTVSGYFCKCDSGWTGVNCTENINECLSNPCLNGGTCVDGVDSFSCECTRLWTGALCQVPQQVCGESLSGINGSFSYRSPDVGYVHDVNCFWVIKTEMGKVLRITFTFFRLESMDNCPHEFLQVYDGDSSSAFQLGRFCGSSLPHELLSSDNALYFHLYSEHLRNGRGFTVRWETQQPECGGILTGPYGSIKSPGYPGNYPPGRDCVWIVVTSPDLLVTFTFGTLSLEHHDDCNKDYLEIRDGPLYQDPLLGKFCTTFSVPPLQTTGPFARIHFHSDSQISDQGFHITYLTSPSDLRCGGNYTDPEGELFLPELSGPFTHTRQCVYMMKQPQGEQIQINFTHVELQCQSDSSQNYIEVRDGETLLGKVCGNGTISHIKSITNSVWIRFKIDASVEKASFRAVYQVACGDELTGEGVIRSPFFPNVYPGERTCRWTIHQPQSQVILLNFTVFEIGSSAHCETDYVEIGSSSILGSPENKKYCGTDIPSFITSVYNFLYVTFVKSSSTENHGFMAKFSAEDLACGEILTESTGTIQSPGHPNVYPHGINCTWHILVQPNHLIHLMFETFHLEFHYNCTNDYLEVYDTDSETSLGRYCGKSIPPSLTSSGNSLMLVFVTDSDLAYEGFLINYEAISAATACLQDYTDDLGTFTSPNFPNNYPNNWECIYRITVRTGQLIAVHFTNFSLEEAIGNYYTDFLEIRDGGYEKSPLLGIFYGSNLPPTIISHSNKLWLKFKSDQIDTRSGFSAYWDGSSTGCGGNLTTSSGTFISPNYPMPYYHSSECYWWLKSSHGSAFELEFKDFHLEHHPNCTLDYLAVYDGPSSNSHLLTQLCGDEKPPLIRSSGDSMFIKLRTDEGQQGRGFKAEYRQTCENVVIVNQTYGILESIGYPNPYSENQHCNWTIRATTGNTVNYTFLAFDLEHHINCSTDYLELYDGPRQMGRYCGVDLPPPGSTTSSKLQVLLLTDGVGRREKGFQMQWFVYGCGGELSGATGSFSSPGFPNRYPPNKECIWYIRTDPGSSIQLTIHDFDVEYHSRCNFDVLEIYGGPDFHSPRIAQLCTQRSPENPMQVSSTGNELAIRFKTDLSINGRGFNASWQAVTGGCGGIFQAPSGEIHSPNYPSPYRSNTDCSWVIRVDRNHRVLLNFTDFDLEPQDSCIMAYDGLSSTMSRLARTCGREQLANPIVSSGNSLFLRFQSGPSRQNRGFRAQFRQACGGHILTSSFDTVSSPRFPANYPNNQNCSWIIQAQPPLNHITLSFTHFELERSTTCARDFVEILDGGHEDAPLRGRYCGTDMPHPITSFSSALTLRFVSDSSISAGGFHTTVTASVSACGGTFYMAEGIFNSPGYPDIYPPNVECVWNIVSSPGNRLQLSFISFQLEDSQDCSRDFVEIREGNATGHLVGRYCGNSFPLNYSSIVGHTLWVRFISDGSGSGTGFQATFMKIFGNDNIVGTHGKVASPFWPENYPHNSNYQWTVNVNASHVVHGRILEMDIEEIQNCYYDKLRIYDGPSIHARLIGAYCGTQTESFSSTGNSLTFHFYSDSSISGKGFLLEWFAVDAPDGVLPTIAPGACGGFLRTGDAPVFLFSPGWPDSYSNRVDCTWLIQAPDSTVELNILSLDIESHRTCAYDSLVIRDGDNNLAQQLAVLCGREIPGPIRSTGEYMFIRFTSDSSVTRAGFNASFHKSCGGYLHADRGIITSPKYPETYPSNLNCSWHVLVQSGLTIAVHFEQPFQIPNGDSSCNQGDYLVLRNGPDICSPPLGPPGGNGHFCGSHASSTLFTSDNQMFVQFISDHSNEGQGFKIKYEAKSLACGGNVYIHDADSAGYVTSPNHPHNYPPHADCIWILAAPPETRIQLQFEDRFDIEVTPNCTSNYLELRDGVDSDAPILSKFCGTSLPSSQWSSGEVMYLRFRSDNSPTHVGFKAKYSIAQCGGRVPGQSGVVESIGHPTLPYRDNLFCEWHLQGLSGHYLTISFEDFNLQNSSGCEKDFVEIWDNHTSGNILGRYCGNTIPDSIDTSSNTAVVRFVTDGSVTASGFRLRFESSMEECGGDLQGSIGTFTSPNYPNPNPHGRICEWRITAPEGRRITLMFNNLRLATHPSCNNEHVIVFNGIRSNSPQLEKLCSSVNVSNEIKSSGNTMKVIFFTDGSRPYGGFTASYTSSEDAVCGGSLPNTPEGNFTSPGYDGVRNYSRNLNCEWTLSNPNQGNSSISIHFEDFYLESHQDCQFDVLEFRVGDADGPLMWRLCGPSKPTLPLVIPYSQVWIHFVTNERVEHIGFHAKYSFTDCGGIQIGDSGVITSPNYPNAYDSLTHCSSLLEAPQGHTITLTFSDFDIEPHTTCAWDSVTVRNGGSPESPIIGQYCGNSNPRTIQSGSNQLVVTFNSDHSLQGGGFYATWNTQTLGCGGIFHSDNGTIRSPHWPQNFPENSRCSWTAITHKSKHLEISFDNNFLIPSGDGQCQNSFVKVWAGTEEVDKALLATGCGNVAPGPVITPSNTFTAVFQSQEAPAQGFSASFVSRCGSNFTGPSGYIISPNYPKQYDNNMNCTYVIEANPLSVVLLTFVSFHLEARSAVTGSCVNDGVHIIRGYSVMSTPFATVCGDEMPAPLTIAGPVLLNFYSNEQITDFGFKFSYRIISCGGVFNFSSGIITSPAYSYADYPNDMHCLYTITVSDDKVIELKFSDFDVVPSTSCSHDYLAIYDGANTSDPLLGKFCGSKRPPNVKSSNNSMLLVFKTDSFQTAKGWKMSFRQTLGPQQGCGGYLTGSNNTFASPDSDSNGMYDKNLNCVWIIIAPVNKVIHLTFNTFALEAASTRQRCLYDYVKLYDGDSENANLAGTFCGSTVPAPFISSGNFLTVQFISDLTLEREGFNATYTIMDMPCGGTYNATWTPQNISSPNSSDPDVPFSICTWVIDSPPHQQVKITVWALQLTSQDCTQNYLQLQDSPQGHGNSRFQFCGRNASAVPVFYSSMSTAMVIFKSGVVNRNSRMSFTYQIADCNRDYHKAFGNLRSPGWPDNYDNDKDCTVTLTAPQNHTISLFFHSLGIENSVECRNDFLEVRNGSNSNSPLLGKYCGTLLPNPVFSQNNELYLRFKSDSVTSDRGYEIIWTSSPSGCGGTLYGDRGSFTSPGYPGTYPNNTYCEWVLVAPAGRLVTINFYFISIDDPGDCVQNYLTLYDGPNASSPSSGPYCGGDTSIAPFVASSNQVFIKFHADYARRPSAFRLTWDS

SEQ ID NO: 42529 - protein, 105 aa, Homo sapiens
NSKLVDLERKFQGLQQTVDKKVCSSNPCQNGGTCLNLHDSFFCICPPQWKGPLCSADVNECEIYSGTPLSCQNGGTCVNTMGSYRNPCSNIPKEPEEGSRDWHRE

SEQ ID NO: 42530 - protein, 88 aa, Homo sapiens
STGNELAIRFKTDLSINGRGFNASWQAVTGGCGGIFQAPSGEIHSPNYPSPYRSNTDCSWVIRVDRNHRVLLNFTDFDLEPQDSCIMV

SEQ ID NO: 42531 - protein, 464 aa, Homo sapiens
MSHSWNVLWLTFCSDSNGMYDKNLNCVWIIIAPVNKVIHLTFNTFALEAASTRQRCLYDYVKLYDGDSENANLAGTFCGSTVPAPFISSGNFLTVQFISDLTLEREGFNATYTIMDMPCGGTYNATWTPQNISSPNSSDPDVPFSICTWVIDSPPHQQVKITVWALQLTSQDCTQNYLQLQDSPQGHGNSRFQFCGRNASAVPVFYSSMSTAMVIFKSGVVNRNSRMSFTYQIADCNRDYHKAFGNLRSPGWPDNYDNDKDCTVTLTAPQNHTISLFFHSLGIENSVECRNDFLEVRNGSNSNSPLLGKYCGTLLPNPVFSQNNELYLRFKSDSVTSDRGYEIIWTSSPSGCGGTLYGDRGSFTSPGYPGTYPNNTYCEWVLVAPAGRLVTINFYFISIDDPGDCVQNYLTLYDGPNASSPSSGPYCGGDTSIAPFVASSNQVFIKFHADYARRPSAFRLTWDS

SEQ ID NO: 42532 - protein, 287 aa, Homo sapiens
MELERIVSAALLAFVQTHLPEADLSGLDEVIFSYVLGVLEDLGPSGPSEENFDMEAFTEMMEAYVPGFAHIPRGTIGDMMQKLSGQLSDARNKENLQPQSSGVQGQVPISPEPLQRPEMLKEETRSSAAAAADTQDEATGAEEELLPGVDVLLEVFPTCSVEQAQWVLAKARGDLEEAVQMLVEGKEEGPAAWEGPNQDLPRRLRGPQKDELKSFILQKYMMVDSAEDQKIHRPMAPKEAPKKLIRYIDNQVVSTKGERFKDVRNPEAEEMKATYINLKPARKYRFH

SEQ ID NO: 42533 - protein, 454 aa, Homo sapiens
MAAAPGGSAQPAGPGPRLGFSTADSGVGMSGLNPGPAVPMKDHDAIKLFVGQIPRGLDEQDLKPLFEEFGRIYELTVLKDRLTGLHKGCAFLTYCARDSALKAQSALHEQKTLPGMNRPIQVKPAASEGRGEDRKLFVGMLGKQQGEEDVRRLFQPFGHIEECTVLRSPDGTSKGCAFVKFGSQGEAQAAIRGLHGSRTMAGASSSLVVKLADTDRERALRRMQQMAGHLGAFHPAPLPLGACGAYTTAILQHQAALLAAAQGPGLGPVAAVAAQMQHVAAFSLVAAPLLPAAAANSPPGSGPGTLPGLPAPIGVNGFGPLTPQTNGQPGSDTLYNNGLSPYPAQSPGVADPLQQAYAGMHHYAGPEGCNLFIYHLPQEFGDAELIQTFLPFGAVVSAKVFVDRATNQSKCFGFVSFDNPTSAQTAIQAMNGFQIGMKRLKVQLKRPKDANRPY

SEQ ID NO: 42534 - protein, 465 aa, Homo sapiens
MKEPDAIKLFVGQIPRHLEEKDLKPIFEQFGRIFELTVIKDKYTGLHKGCAFLTYCARDSALKAQSALHEQKTLPGMNRPIQVKPADSESRGEDRKLFVGMLGKQQTDEDVRKMFEPFGTIDECTVLRGPDGTSKGCAFVKFQTHAEAQAAINTLHSSRTLPGASSSLVVKFADTEKERGLRRMQQVATQLGMFSPIALQFGAYSAYTQALMQQQAALVAAHSAYLSPMATMAAVQMQHMAAINANGLIATPITPSSGTSTPPAIAATPVSAIPAALGVNGYSPVPTQPTGQPAPDALYPNGVHPYPAQSPAAPVDPLQQAYAGMQHYTAAYPAAYSLVAPAFPQPPALVAQQPPPPPQQQQQQQQQQQQQQQREGPDGCNIFIYHLPQEFTDSEILQMFVPFGHVISAKVFVDRATNQSKCFGFVSFDNPASAQAAIQAMNGFQIGMKRLKVQLKRPKDANRPY

SEQ ID NO: 42535 - protein, 415 aa, Homo sapiens
MKEPDAIKLFVGQIPRHLEEKDLKPIFEQFGRIFELTVIKDKYTGLHKGCAFLTYCARDSALKAQSALHEQKTLPGMNRPIQVKPADSESRGEDRKLFVGMLGKQQTDEDVRKMFEPFGTIDECTVLRGPDGTSKGCAFVKFQTHAEAQAAINTLHSSRTLPGASSSLVVKFADTEKERGLRRMQQVATQLGMFSPIALQFGAYSAYTQALMQQQAALVAAHSAYLSPMATMAAVQMQHMAAINANGLIATPITPSSAQSPAAPVDPLQQAYAGMQHYTAAYPAAYSLVAPAFPQPPALVAQQPPPPPQQQQQQQQQQQQQQQREGPDGCNIFIYHLPQEFTDSEILQMFVPFGHVISAKVFVDRATNQSKCFGFVSFDNPASAQAAIQAMNGFQIGMKRLKVQLKRPKDANRPY

SEQ ID NO: 42536 - protein, 299 aa, Homo sapiens
MKEPDAIKLFVGQIPRHLEEKDLKPIFEQFGRIFELTVIKDKYTGLHKGCAFLTYCARDSALKAQSALHEQKTLPGMNRPIQVKPADSESRGDRKLFVGMLGKQQTDEDVRKMFEPFGTIDECTVLRGPDGTSKGCAFVKFQTHAEAQAAINTLHSSRTLPGASSSLVVKFADTEKERGLRRMQQVATQLGMFSPIALQFGAYSAYTQALMQQQAALVAAHSAYLSPMATMAAVQMQHMAAINANGLIATPITPSSAKGHGYASLAPRAHFLLDALLAFVRERGTGSKAPGYLPSAGLL

SEQ ID NO: 42537 - protein, 260 aa, Homo sapiens
MQQVATQLGMFSPIALQFGAYSAYTQALMQQQAALVAAHSAYLSPMATMAAVQMQHMAAINANGLIATPITPSSGTSTPPAIAATPVSAIPAALGVNGYSPVPTQPTGQPAPDALYPNGVHPYPAAYPAAYSLVAPAFPQPPALVAQQPPPPPQQQQQQQQQQQQQQQREGPDGCNIFIYHLPQEFTDSEILQMFVPFGHVISAKVFVDRATNQSKCFGFVSFDNPASAQAAIQAMNGFQIGMKRLKVQLKRPKDANRPY

SEQ ID NO: 42538 - protein, 466 aa, Homo sapiens
  VARIANT 1: note = MOD_RES - Any amino acid
XVEESAAGEQSSGTQIPRHLEEKDLKPIFEQFGRIFELTVIKDKYTGLHKGCAFLTYCARDSALKAQSALHEQKTLPGMNRPIQVKPADSESRGDRKLFVGMLGKQQTDEDVRKMFEPFGTIDECTVLRGPDGTSKGCAFVKFQTHAEAQAAINTLHSSRTLPGASSSLVVKFADTEKERGLRRMQQVATQLGMFSPIALQFGAYSAYTQALMQQQAALVAAHSAYLSPMATMAAVQMQHMAAINANGLIATPITPSSGTSTPPAIAATPVSAIPAALGVNGYSPVPTQPTGQPAPDALYPNGVHPYPAQSPAAPVDPLQQAYAGMQHYTAAYPAAYSLVAPAFPQPPALVAQQPPPPPQQQQQQQQQQQQQQQREGPDGCNIFIYHLPQEFTDSEILQMFVPFGHVISAKVFVDRATNQSKCFGFVSFDNPASAQAAIQAMNGFQIGMKRLKVQLKRPKDANRPY

SEQ ID NO: 42539 - protein, 448 aa, Homo sapiens
MYIKMATLANGQADNASLSTNGLGSSPGSAGHMNGLSHSPGNPSTIPMKDHDAIKLFIGQIPRNLDEKDLKPLFEEFGKIYELTVLKDRFTGMHKGCAFLTYCERESALKAQSALHEQKTLPGMNRPIQVKPADSESRGEDRKLFVGMLNKQQSEDDVRRLFEAFGNIEECTILRGPDGNSKGCAFVKYSSHAEAQAAINALHGSQTMPGASSSLVVKFADTDKERTMRRMQQMAGQMGMFNPMAIPFGAYGAYAQALMQQQAALMASVAQGGYLNPMAAFAAAQMQQMAALNMNGLAAAPMTPTSGGSTPPGITAPAVPSIPSPIGVNGFTGLPPQANGQPAAEAVFANGIHPYPAQSPTAADPLQQAYAGVQQYAGPAAYPAAYGQISQAFPQPPPMIPQQQREGFVSFDNPASAQTAIQAMNGFQIGMKRLKVQLKRPKDANRPY

SEQ ID NO: 42540 - protein, 212 aa, Homo sapiens
VSAEGPERAARAEDSARDEPADPGEACGQREPKDRKLFVGMLNKQQSEDDVRRLFEAFGNIEECTILRGPDGNSKGCAFVKYSSHAEAQAAINALHGSQTMPGASSSLVVKFADTDKERTMRRMQQMAGQMGMFNPMAIPFGAYGAYAQALMQQQAALMASVAQGGYLNPMAAFAAAQMQQMAALNMWPGGRTYDPNLRWQHPSGHHCTSRA

SEQ ID NO: 42541 - protein, 486 aa, Homo sapiens
MYIKMATLANGQADNASLSTNGLGSSPGSAGHMNGLSHSPGNPSTIPMKDHDAIKLFIGQIPRNLDEKDLKPLFEEFGKIYELTVLKDRFTGMHKGCAFLTYCERESALKAQSALHEQKTLPGMNRPIQVKPADSESRGGSSCLRQPPSQDRKLFVGMLNKQQSEDDVRRLFEAFGNIEECTILRGPDGNSKGCAFVKYSSHAEAQAAINALHGSQTMPGASSSLVVKFADTDKERTMRRMQQMAGQMGMFNPMAIPFGAYGAYAQALMQQQAALMASVAQGGYLNPMAAFAAAQMQQMAALNMNGLAAAPMTPTSGGSTPPGITAPAVPSIPSPIGVNGFTGLPPQANGQPAAEAVFANGIHPYPAQSPTAADPLQQAYAGVQQYAGPAAYPAAYGQISQAFPQPPPMIPQQQREGPEGCNLFIYHLPQEFGDAELMQMFLPFGFVSFDNPASAQTAIQAMNGFQIGMKRLKVQLKRPKDANRPY

SEQ ID NO: 42542 - protein, 485 aa, Homo sapiens
MYIKMATLANGQADNASLSTNGLGSSPGSAGHMNGLSHSPGNPSTIPMKDHDAIKLFIGQIPRNLDEKDLKPLFEEFGKIYELTVLKDRFTGMHKGCAFLTYCERESALKAQSALHEQKTLPGMNRPIQVKPADSESRGGSSCLRQPPSQDRKLFVGMLNKQQSEDDVRRLFEAFGNIEECTILRGPDGNSKGCAFVKYSSHAEAQAAINALHGSQTMPGASSSLVVKFADTDKERTMRRMQQMAGQMGMFNPMAIPFGAYGAYAQAMQQQAALMASVAQGGYLNPMAAFAAAQMQQMAALNMNGLAAAPMTPTSGGSTPPGITAPAVPSIPSPIGVNGFTGLPPQANGQPAAEAVFANGIHPYPAQSPTAADPLQQAYAGVQQYAGPAAYPAAYGQISQAFPQPPPMIPQQQREGPEGCNLFIYHLPQEFGDAELMQMFLPFGFVSFDNPASAQTAIQAMNGFQIGMKRLKVQLKRPKDANRPY

SEQ ID NO: 42543 - protein, 484 aa, Homo sapiens
MYIKMATLANGQADNASLSTNGLGSSPGSAGHMNGLSHSPGNPSTIPMKDHDAIKLFIGQIPRNLDEKDLKPLFEEFGKIYELTVLKDRFTGMHKGCAFLTYCERESALKAQSALHEQKTLPGMNRPIQVKPADSESRGGSSCLRQPPSHRKLFVGMLNKQQSEDDVRRLFEAFGNIEECTILRGPDGNSKGCAFVKYSSHAEAQAAINALHGSQTMPGASSSLVVKFADTDKERTMRRMQQMAGQMGMFNPMAIPFGAYGAYAQAMQQQAALMASVAQGGYLNPMAAFAAAQMQQMAALNMNGLAAAPMTPTSGGSTPPGITAPAVPSIPSPIGVNGFTGLPPQANGQPAAEAVFANGIHPYPAQSPTAADPLQQAYAGVQQYAGPAAYPAAYGQISQAFPQPPPMIPQQQREGPEGCNLFIYHLPQEFGDAELMQMFLPFGFVSFDNPASAQTAIQAMNGFQIGMKRLKVQLKRPKDANRPY

SEQ ID NO: 42544 - protein, 485 aa, Homo sapiens
MARLTESEARRQQQQLLQPRPSPVGSSGPEPPGGQPDGMKDLDAIKLFVGQIPRHLDEKDLKPLFEQFGRIYELTVLKDPYTGMHKGCAFLTYCARDSAIKAQTALHEQKTLPGMARPIQVKPADSESRGGRDRKLFVGMLNKQQSEEDVLRLFQPFGVIDECTVLRGPDGSSKGCAFVKFSSHTEAQAAIHALHGSQTMPGASSSLVVKFADTDKERTLRRMQQMVGQLGILTPSLTLPFSPYSAYAQALMQQQTTVLSTSGSYLSPGVAFSPCHIQQIGAVSLNGLPATPIAPASGLHSPPLLGTTAVPGLVAPITNGFAGVVPFPGGHPALETVYANGLVPYPAQSPTVAETLHPAFSGVQQYTAMYPTAAITPIAHSVPQPPPLLQQQQREGPEGCNLFIYHLPQEFGDTELTQMFLPFGNIISSKVFMDRATNQSKCFGFVSFDNPASAQAAIQAMNGFQIGMKRLKVQLKRPKDPGHPY

SEQ ID NO: 42545 - protein, 320 aa, Homo sapiens
MARPIQVKPADSESRGGRDRKLFVGMLNKQQSEEDVLRLFQPFGVIDECTVLRGPDGSSKGCAFVKFSSHTEAQAAIHALHGSQTMPGASSSLVVKFADTDKERTLRRMQQMVGQLGILTPSLTLPFSPYSAYAQALMQQQTTVLSTSGSYLSPGVAFSPCHIQQIGAVSLNGLPATPIAPASGLHSPPLLGTTAVPGLVAPITNGFAGVVPFPGGHPALETVYANGLVPYPAQSPTVAETLHPAFSGVQQYTAMYPTAAITPIAHSVPQPPPLLQQQQREGVWRHGADADVPTLRQYHFLQGVYGSSYQPEQVFRLREL

SEQ ID NO: 42546 - protein, 409 aa, Homo sapiens
MARLTESEARRQQQQLLQPRPSPVGSSGPEPPGGQPDGMKDLDAIKLFVGQIPRHLDEKDLKPLFEQFGRIYELTVLKDPYTGMHKGCAFLTYCARDSAIKAQTALHEQKTLPGMARPIQVKPADSESRGGRDRKLFVGMLNKQQSEEDVLRLFQPFGVIDECTVLRGPDGSSKGCAFVKFSSHTEAQAAIHALHGSQTMPGASSSLVVKFADTDKERTLRRMQQMVGQLGILTPSLTLPFSPYSAYAQALMQQQTTVLSTSGSYLSPGVAFSPCHIQQIGAVSLNGLPATPIAPASGVVPFPGGHPALETVYANGLVPYPAQSPTVAETLHPAFSGVQQYTAMYPTAAITPIAHSVPQPPPLLQQQQREGVWRHGADADVPTLRQYHFLQGVYGSSYQPEQVFRLREL

SEQ ID NO: 42547 - protein, 481 aa, Homo sapiens
MAAAPGGSAQPAGPGPRLGFSTADSGVGMSGLNPGPAVPMKDHDAIKLFVGQIPRGLDEQDLKPLFEEFGRIYELTVLKDRLTGLHKGCAFLTYCARDSALKAQSALHEQKTLPGMNRPIQVKPAASEGRGEDRKLFVGMLGKQQGEEDVRRLFQPFGHIEECTVLRSPDGTSKGCAFVKFGSQGEAQAAIRGLHGSRTMAGASSSLVVKLADTDRERALRRMQQMAGHLGAFHPAPLPLGACGAYTTAILQHQAALLAAAQGPGLGPVAAVAAQMQHVAAFSLVAAPLLPAAAANSPPGSGPGTLPGLPAPIGVNGFGPLTPQTNGQPGSDTLYNNGLSPYPAQSPGVADPLQQAYAGMHHYAAAYPSAYAPVSTAFPQQPSALPQQQREGPEGCNLFIYHLPQEFGDAELIQTFLPFGAVVSAKVFVDRATNQSKCFGFVSFDNPTSAQTAIQAMNGFQIGMKRLKVQLKRPKDANRPY

SEQ ID NO: 42548 - protein, 368 aa, Homo sapiens
MISDPPSNNSWNSVLYLLEDRKLFVGMLGKQQGEEDVRRLFQPFGHIEECTVLRSPDGTSKGCAFVKFGSQGEAQAAIRGLHGSRTMAGASSSLVVKLADTDRERALRRMQQMAGHLGAFHPAPLPLGACGAYTTAILQHQAALLAAAQGPGLGPVAAVAAQMQHVAAFSLVAAPLLPAAAANSPPGSGPGTLPGLPAPIGVNGFGPLTPQTNGQPGSDTLYNNGLSPYPAQSPGVADPLQQAYAGMHHYAAAYPSAYAPVSTAFPQQPSALPQQQREGPEGCNLFIYHLPQEFGDAELIQTFLPFGAVVSAKVFVDRATNQSKCFGFVSFDNPTSAQTAIQAMNGFQIGMKRLKVQLKRPKDANRPY

SEQ ID NO: 42549 - protein, 454 aa, Homo sapiens; identical to SEQ ID NO: 42533

SEQ ID NO: 42550 - protein, 342 aa, Homo sapiens
MLGKQQGEEDVRRLFQPFGHIEECTVLRSPDGTSKGCAFVKFGSQGEAQAAIRGLHGSRTMAGASSSLVVKLADTDRERALRRMQQMAGHLGAFHPAPLPLGACGAYTTAILQHQAALLAAAQGPGLGPVAAVAAQMQHVAAFSLVAAPLLPAAAANSPPGSGPGTLPGLPAPIGVNGFGPLTPQTNGQPGSDTLYNNGLSPYPAQSPGVADPLQQAYAGMHHYAAAYPSAYAPVSTAFPQQPSALPQQQREGPEGCNLFIYHLPQEFGDAELIQTFLPFGAVVSAKVFVDRATNQSKCFGFVSFDNPTSAQTAIQAMNGFQIGMKRLKVQLKRPKDANRPY

SEQ ID NO: 42551 - protein, 344 aa, Homo sapiens
MNRPIQVKPAASEGRGEDRKLFVGMLGKQQGEEDVRRLFQPFGHIEECTVLRSPDGTSKGCAFVKFGSQGEAQAAIRGLHGSRTMAGASSSLVVKLADTDRERALRRMQQMAGHLGAFHPAPLPLGACGAYTTAILQHQAALLAAAQGPGLGPVAAVAAQMQHVAAFSLVAAPLLPAAANSPPGSGPGTLPGLPAPIGVNGFGPLTPQTNGQPGSDTLYNNGLSPYPAAYPSAYAPVSTAFPQQPSALPQQQREGPEGCNLFIYHLPQEFGDAELIQTFLPFGAVVSAKVFVDRATNQSKCFGFVSFDNPTSAQTAIQAMNGFQIGMKRLKVQLKRPKDANRPY

SEQ ID NO: 42552 - protein, 659 aa, Homo sapiens
MLYKQLRQACEDHVQAQILPFREDSLDSVLFLKKINTCWQDHCRQMIMIRSIFLFLDRTYVLQNSTLPSIWDMGLELFRTHIISDKMVQSKTIDGILLLIERERSGEAVDRSLLRSLLGMLSDLQVYKDSFELKFLEETNCLYAAEGQRLMQEREVPEYLNHVSKRLEEEGDRVITYLDHSTQKPLIACVEKQLLGEHLTAILQKGLDHLLDENRVPDLAQMYQLFSRVRGGQQALLQHWSEYIKTFGTAIVINPEKDKDMVQDLLDFKDKVDHVIEVCFQKNERFVNLMKESFETFINKRPNKPAELIAKHVDSKLRAGNKEATDEELERTLDKIMILFRFIHGKDVFEAFYKKDLAKRLLVGKSASVDAEKSMLSKLKHECGAAFTSKLEGMFKDMELSKDIMVHFKQHMQNQSDSGPIDLTVNILTMGYWPTYTPMEVHLTPEMIKLQEVFKAFYLGKHSGRKLQWQTTLGHAVLKAEFKEGKKEFQVSLFQTLVLLMFNEGDGFSFEEIKMATGIEDSELRRTLQSLACGKARVLIKSPKGKEVEDGDKFIFNGEFKHKLFRIKINQIQMKETVEEQVSTTERVFQDRQYQIDAAIVRIMKMRKTLGHNLLVSELYNQLKFPVKPGDLKKRIESLIDRDYMERDKDNPNQYHYVA

SEQ ID NO: 42553 - protein, 759 aa, Homo sapiens
MADEAPRKGSFSALVGRTNGLTKPAALAAAPAKPGGAGGSKKLVIKNFRDRPRLPDNYTQDTWRKLHEAVRAVQSSTSIRYNLEELYQAVENLCSHKVSPMLYKQLRQACEDHVQAQILPFREDSLDSVLFLKKINTCWQDHCRQMIMIRSIFLFLDRTYVLQNSTLPSIWDMGLELFRTHIISDKMVQSKTIDGILLLIERERSGEAVDRSLLRSLLGMLSDLQVYKDSFELKFLEETNCLYAAEGQRLMQEREVPEYLNHVSKRLEEEGDRVITYLDHSTQKPLIACVEKQLLGEHLTAILQKGLDHLLDENRVPDLAQMYQLFSRVRGGQQALLQHWSEYIKTFGTAIVINPEKDKDMVQDLLDFKDKVDHVIEVCFQKNERFVNLMKESFETFINKRPNKPAELIAKHVDSKLRAGNKEATDEELERTLDKIMILFRFIHGKDVFEAFYKKDLAKRLLVGKSASVDAEKSMLSKLKHECGAAFTSKLEGMFKDMELSKDIMVHFKQHMQNQSDSGPIDLTVNILTMGYWPTYTPMEVHLTPEMIKLQEVFKAFYLGKHSGRKLQWQTTLGHAVLKAEFKEGKKEFQVSLFQTLVLLMFNEGDGFSFEEIKMATGIEDSELRRTLQSLACGKARVLIKSPKGKEVEDGDKFIFNGEFKHKLFRIKINQIQMKETVEEQVSTTERVFQDRQYQIDAAIVRIMKMRKTLGHNLLVSELYNQLKFPVKPGDLKKRIESLIDRDYMERDKDNPNQYHYVA

SEQ ID NO: 42554 - protein, 659 aa, Homo sapiens; identical to SEQ ID NO: 42552

SEQ ID NO: 42555 - protein, 659 aa, Homo sapiens; identical to SEQ ID NO: 42552

SEQ ID NO: 42556 - protein, 900 aa, Homo sapiens
MKSVCPVTSGFSSPSPSAAAAAQEVRSATDGNTSTTPPTSAKKRKLNSSSSSSSNSSNEREDFDSTSSSSSTPPLQPRDSASPSTSSFCLGVSVAASSHVPIQKKLRFEDTLEFVGFDAKMAEESSSSSSSSSPTAATSQQQQLKNKSILISSVASVHHANGLAKSSTTVSSFANSKPGSAKKLVIKNFKDKPKLPENYTDETWQKLKEAVEAIQNSTSIKYNLEELYQAVENLCSYKISANLYKQLRQICEDHIKAQIHQFREDSLDSVLFLKKIDRCWQNHCRQMIMIRSIFLFLDRTYVLQNSMLPSIWDMGLELFRAHIISDQKVQNKTIDGILLLIERERNGEAIDRSLLRSLLSMLSDLQIYQDSFEQRFLEETNRLYAAEGQKLMQEREVPEYLHHVNKRLEEEADRLITYLDQTTQKSLIATVEKQLLGEHLTAILQKGLNNLLDENRIQDLSLLYQLFSRVRGGVQVLLQQWIEYIKAFGSTIVINPEKDKTMVQELLDFKDKVDHIIDICFLKNEKFINAMKEAFETFINKRPNKPAELIAKYVDSKLRAGNKEATDEELEKMLDKIMIIFRFIYGKDVFEAFYKKDLAKRLLVGKSASVDAEKSMLSKLKHECGAAFTSKLEGMFKDMELSKDIMIQFKQYMQNQNVPGNIELTVNILTMGYWPTYVPMEVHLPPEMVKLQEIFKTFYLGKHSGRKLQWQSTLGHCVLKAEFKEGKKELQVSLFQTLVLLMFNEGEEFSLEEIKQATGIEDGELRRTLQSLACGKARVLAKNPKGKDIEDGDKFICNDDFKHKLFRIKINQIQMKETVEEQASTTERVFQDRQYQIDAAIVRIMKMRKTLSHNLLVSEVYNQLKFPVKPADLKKRIESLIDRDYMERDKENPNQYNYIA

SEQ ID NO: 42557 - protein, 895 aa, Homo sapiens
MFPTGFSSPSPSAAAAAQEVRSATDGNTSTTPPTSAKKRKLNSSSSSSSNSSNEREDFDSTSSSSSTPPLQPRDSASPSTSSFCLGVSVAASSHVPIQKKLRFEDTLEFVGFDAKMAEESSSSSSSSSPTAATSQQQQLKNKSILISSVASVHHANGLAKSSTTVSSFANSKPGSAKKLVIKNFKDKPKLPENYTDETWQKLKEAVEAIQNSTSIKYNLEELYQAVENLCSYKISANLYKQLRQICEDHIKAQIHQFREDSLDSVLFLKKIDRCWQNHCRQMIMIRSIFLFLDRTYVLQNSMLPSIWDMGLELFRAHIISDQKVQNKTIDGILLLIERERNGEAIDRSLLRSLLSMLSDLQIYQDSFEQRFLEETNRLYAAEGQKLMQEREVPEYLHHVNKRLEEEADRLITYLDQTTQKSLIATVEKQLLGEHLTAILQKGLNNLLDENRIQDLSLLYQLFSRVRGGVQVLLQQWIEYIKAFGSTIVINPEKDKTMVQELLDFKDKVDHIIDICFLKNEKFINAMKEAFETFINKRPNKPAELIAKYVDSKLRAGNKEATDEELEKMLDKIMIIFRFIYGKDVFEAFYKKDLAKRLLVGKSASVDAEKSMLSKLKHECGAAFTSKLEGMFKDMELSKDIMIQFKQYMQNQNVPGNIELTVNILTMGYWPTYVPMEVHLPPEMVKLQEIFKTFYLGKHSGRKLQWQSTLGHCVLKAEFKEGKKELQVSLFQTLVLLMFNEGEEFSLEEIKQATGIEDGELRRTLQSLACGKARVLAKNPKGKDIEDGDKFICNDDFKHKLFRIKINQIQMKETVEEQASTTERVFQDRQYQIDAAIVRIMKMRKTLSHNLLVSEVYNQLKFPVKPADLKKRIESLIDRDYMERDKENPNQYNYIA

SEQ ID NO: 42558 - protein, 234 aa, Homo sapiens
MIDPDFADKPKLPENYTDETWQKLKEAVEAIQNSTSIKYNLEELYQAVENLCSYKISANLYKQLRQICEDHIKAQIHQFREDSLDSVLFLKKIDRCWQNHCRQMIMIRSIFLFLDRTYVLQNSMLPSIWDMGLELFRAHIISDQKVQNKTIDGILLLIERERNGEAIDRSLLRSLLSMLSDLQIYQDSFEQRFLEETNRLYAAEGQKLMQEREVPEYLHHVNKRLEEEADRLIT

SEQ ID NO: 42559 - protein, 913 aa, Homo sapiens
MMSQSSGSGDGNDDEATTSKDGGFSSPSPSAAAAAQEVRSATDGNTSTTPPTSAKKRKLNSSSSSSSNSSNEREDFDSTSSSSSTPPLQPRDSASPSTSSFCLGVSVAASSHVPIQKKLRFEDTLEFVGFDAKMAEESSSSSSSSSPTAATSQQQQLKNKSILISSVASVHHANGLAKSSTTVSSFANSKPGSAKKLVIKNFKDKPKLPENYTDETWQKLKEAVEAIQNSTSIKYNLEELYQAVENLCSYKISANLYKQLRQICEDHIKAQIHQFREDSLDSVLFLKKIDRCWQNHCRQMIMIRSIFLFLDRTYVLQNSMLPSIWDMGLELFRAHIISDQKVQNKTIDGILLLIERERNGEAIDRSLLRSLLSMLSDLQIYQDSFEQRFLEETNRLYAAEGQKLMQEREVPEYLHHVNKRLEEEADRLITYLDQTTQKSLIATVEKQLLGEHLTAILQKGLNNLLDENRIQDLSLLYQLFSRVRGGVQVLLQQWIEYIKAFGSTIVINPEKDKTMVQELLDFKDKVDHIIDICFLKNEKFINAMKEAFETFINKRPNKPAELIAKYVDSKLRAGNKEATDEELEKMLDKIMIIFRFIYGKDVFEAFYKKDLAKRLLVGKSASVDAEKSMLSKLKHECGAAFTSKLEGMFKDMELSKDIMIQFKQYMQNQNVPGNIELTVNILTMGYWPTYVPMEVHLPPEMVKLQEIFKTFYLGKHSGRKLQWQSTLGHCVLKAEFKEGKKELQVSLFQTLVLLMFNEGEEFSLEEIKQATGIEDGELRRTLQSLACGKARVLAKNPKGKDIEDGDKFICNDDFKHKLFRIKINQIQMKETVEEQASTTERVFQDRQYQIDAAIVRIMKMRKTLSHNLLVSEVYNQLKFPVKPADLKKRIESLIDRDYMERDKENPNQYNYIA

SEQ ID NO: 42560 - protein, 780 aa, Homo sapiens
MATSNLLKNKGSLQFEDKWDFMRPIVLKLLRQESVTKQQWFDLFSDVHAVCLWDDKGPAKIHQALKEDILEFIKQAQARVLSHQDDTALLKAYIVEWRKFFTQCDILPKPFCQLEITLMGKQGSNKKSNVEDSIVRKLMLDTWNESIFSNIKNRLQDSAMKLVHAERLGEAFDSQLVIGVRESYVNLCSNPEDKLQIYRDNFEKAYLDSTERFYRTQAPSYLQQNGVQNYMKYADAKLKEEEKRALRYLETRRECNSVEALMECCVNALVTSFKETILAECQGMIKRNETEKLHLMFSLMDKVPNGIEPMLKDLEEHIISAGLADMVAAAETITTDSEKYVEQLLTLFNRFSKLVKEAFQDDPRFLTARDKAYKAVVNDATIFKLELPLKQKGVGLKTQPESKCPELLANYCDMLLRKTPLSKKLTSEEIEAKLKEVLLVLKYVQNKDVFMRYHKAHLTRRLILDISADSEIEENMVEWLREVGMPADYVNKLARMFQDIKVSEDLNQAFKEMHKNNKLALPADSVNIKILNAGAWSRSSEKVFVSLPTELEDLIPEVEEFYKKNHSGRKLHWHHLMSNGIITFKNEVGQYDLEVTTFQLAVLFAWNQRPREKISFENLKLATELPDAELRRTLWSLVAFPKLKRQVLLYEPQVNSPKDFTEGTLFSVNQEFSLIKNAKVQKRGKINLIGRLQLTTERMREEENEGIVQLRILRTQEAIIQIMKMRKKISNAQLQTELVEILKNMFLPQKKMIKEQIEWLIEHKYIRRDESDINTFIYMA

SEQ ID NO: 42561 - protein, 780 aa, Homo sapiens; identical to SEQ ID NO: 42560

SEQ ID NO: 42562 - protein, 1698 aa, Homo sapiens
MVGELRYREFRVPLGPGLHAYPDELIRQRVGHDGHPEYQIRWLILRRGDEGDGGSGQVDCKAEHILLWMSKDEIYANCHKMLGEDGQVIGPSQESAGEVGALDKSVLEEMETDVKSLIQRALRQLEECVGTIPPAPLLHTVHVLSAYASIEPLTGVFKDPRVLDLLMHMLSSPDYQIRWSAGRMIQALSSHDAGTRTQILLSLSQQEAIEKHLDFDSRCALLALFAQATLSEHPMSFEGIQLPQVPGRVLFSLVKRYLHVTSLLDQLNDSAAEPGAQNTSAPEELSGERGQLELEFSMAMGTLISELVQAMRWDQASDRPRSSARSPGSIFQPQLADVSPGLPAAQAQPSFRRSRRFRPRSEFASGNTYALYVRDTLQPGMRVRMLDDYEEISAGDEGEFRQSNNGVPPVQVFWESTGRTYWVHWHMLEILGFEEDIEDMVEADEYQGAVASRVLGRALPAWRWRPMTELYAVPYVLPEDEDTEECEHLTLAEWWELLFFIKKLDGPDHQEVLQILQENLDGEILDDEILAELAVPIELAQDLLLTLPQRLNDSALRDLINCHVYKKYGPEALAGNQAYPSLLEAQEDVLLLDAQAQAKDSEDAAKVEAKEPPSQSPNTPLQRLVEGYGPAGKILLDLEQALSSEGTQENKVKPLLLQLQRQPQPFLALMQSLDTPETNRTLHLTVLRILKQLVDFPEALLLPWHEAVDACMACLRSPNTDREVLQELIFFLHRLTSVSRDYAVVLNQLGARDAISKALEKHLGKLELAQELRDMVFKCEKHAHLYRKLITNILGGCIQMVLGQIEDHRRTHQPINIPFFDVFLRYLCQGSSVEVKEDKCWEKVEVSSNPHRASKLTDHNPKTYWESNGSAGSHYITLHMRRGILIRQLTLLVASEDSSYMPARVVVCGGDSTSSLHTELNSVNVMPSASRVILLENLTRFWPIIQIRIKRCQQGGIDTRIRGLEILGPKPTFWPVFREQLCRHTRLFYMVRAQAWSQDMAEDRRSLLHLSSRLNGALRQEQNFADRFLPDDEAAQALGKTCWEALVSPVVQNITSPDEDGISPLGWLLDQYLECQEAVFNPQSRGPAFFSRVRRLTHLLVHVEPCEAPPPVVATPRPKGRNRSHDWSSLATRGLPSSIMRNLTRCWRAVVEKQVNNFLTSSWRDDDFVPRYCEHFNILQNSSSELFGPRAAFLLALQNGCAGALLKLPFLKAAHVSEQFARHIDQQIQGSRIGGAQEMERLAQLQQCLQAVLIFSGLEIATTFEHYYQHYMADRLLGVVSSWLEGAVLEQIGPCFPNRLPQQMLQSLSTSKELQRQFHVYQLQQLDQELLKLEDTEKKIQVGLGASGKEHKSEKEEEAGAAAVVDVAEGEEEEEENEDLYYEGAMPEVSVLVLSRHSWPVASICHTLNPRTCLPSYLRGTLNRYSNFYNKSQSHPALERGSQRRLQWTWLGWAELQFGNQTLHVSTVQMWLLLYLNDLKAVSVESLLAFSGLSADMLNQAIGPLTSSRGPLDLHEQKDIPGGVLKIRDGSKEPRSRWDIVRLIPPQTYLQAEGEDGQNLEKRRNLLNCLIVRILKAHGDEGLHIDQLVCLVLEAWQKGPCPPRGLVSSLGKGSACSSTDVLSCILHLLGKGTLRRHDDRPQVLSYAVPVTVMEPHTESLNPGSSGPNPPLTFHTLQIRSRGVPYASCTATQSFSTFR

SEQ ID NO: 42563 - protein, 1782 aa, Homo sapiens
MSRGFWLAEPLAGTGPHPAPVAADSRGCSSVPRRHAPSRLSVSTPSRGPGARMVGELRYREFRVPLGPGLHAYPDELIRQRVGHDGHPEYQIRWLILRRGDEGDGGSGQVDCKAEHILLWMSKDEIYANCHKMLGEDGQVIGPSQESAGEVGALDKSVLEEMETDVKSLIQRALRQLEECVGTIPPAPLLHTVHVLSAYASIEPLTGVFKDPRVLDLLMHMLSSPDYQIRWSAGRMIQALSSHDAGEGQCGEEGKAGEGLGRLRDSQDTVAGASDLIRTRTQILLSLSQQEAIEKHLDFDSRCALLALFAQATLSEHPMSFEGIQLPQVPGRVLFSLVKRYLHVTSLLDQLNDSAAEPGAQNTSAPEELSGERGQLELEFSMAMGTLISELVQAMRWDQASDRPRSSARSPGSIFQPQLADVSPGLPAAQAQPSFRRSRRFRPRSEFASGNTYALYVRDTLQPGMRVRMLDDYEEISAGDEGEFRQSNNGVPPVQVFWESTGRTYWVHWHMLEILGFEEDIEDMVEADEYQGAVASRVLGRALPAWRWRPMTELYAVPYVLPEDEDTEECEHLTLAEWWELLFFIKKLDGPDHQEVLQILQENLDGEILDDEILAELAVPIELAQDLLLTLPQRLNDSALRDLINCHVYKKYGPEALAGNQAYPSLLEAQEDVLLLDAQAQAKDSEDAAKVEAKEPPSQSPNTPLQRLVEGYGPAGKILLDLEQALSSEGTQENKVKPLLLQLQRQPQPFLALMQSLDTPETNRTLHLTVLRILKQLVDFPEALLLPWHEAVDACMACLRSPNTDREVLQELIFFLHRLTSVSRDYAVVLNQLGARDAISKALEKHLGKLELAQELRDMVFKCEKHAHLYRKLITNILGGCIQMVLGQIEDHRRTHQPINIPFFDVFLRYLCQGSSVEVKEDKCWEKVEVSSNPHRASKLTDHNPKTYWESNGSAGSHYITLHMRRGILIRQLTLLVASEDSSYMPARVVVCGGDSTSSLHTELNSVNVMPSASRVILLENLTRFWPIIQIRIKRCQQGGIDTRIRGLEILGPKPTFWPVFREQLCRHTRLFYMVRAQAWSQDMAEDRRSLLHLSSRLNGALRQEQNFADRFLPDDEAAQALGKTCWEALVSPVVQNITSPDEDGISPLGWLLDQYLECQEAVFNPQSRGPAFFSRVRRLTHLLVHVEPCEAPPPVVATPRPKGRNRSHDWSSLATRGLPSSIMRNLTRCWRAVVEKQVNNFLTSSWRDDDFVPRYCEHFNILQNSSSELFGPRAAFLLALQNGCAGALLKLPFLKAAHVSEQFARHIDQQIQGSRIGGAQEMERLAQLQQCLQAVLIFSGLEIATTFEHYYQHYMADRLLGVVSSWLEGAVLEQIGPCFPNRLPQQMLQSLSTSKELQRQFHVYQLQQLDQELLKLEDTEKKIQVGLGASGKEHKSEKEEEAGAAAVVDVAEGEEEEEENEDLYYEGAMPEVSVLVLSRHSWPVASICHTLNPRTCLPSYLRGTLNRYSNFYNKSQSHPALERGSQRRLQWTWLGWAELQFGNQTLHVSTVQMWLLLYLNDLKAVSVESLLAFSGLSADMLNQAIGPLTSSRGPLDLHEQKDIPGGVLKIRDGSKEPRSRWDIVRLIPPQTYLQAEGEDGQNLEKRRNLLNCLIVRILKAHGDEGLHIDQLVCLVLEAWQKGPCPPRGLVSSLGKGSACSSTDVLSCILHLLGKGTLRRHDDRPQVLSYAVPVTVMEPHTESLNPGSSGPNPPLTFHTLQIRSRGVPYASCTATQSFSTFR

SEQ ID NO: 42564 - protein, 144 aa, Homo sapiens
MGVLQVVKQSVQIPVFVMIRPRGGDFLYSDREIEVMKADIRLAKLYGADGLVFGALTEDGHIDKELCMSLMAICRPLPVTFHRAFDMVHDPMAALETLLTLGFERVLTSGCDSSALEGLPLIKRLIEQAKGRIVVMPGGGITDR

SEQ ID NO: 42565 - protein, 273 aa, Homo sapiens
MKRQGASSERKRARIPSGKAGAANGFLMEVCVDSVESAVNAERGGADRIELCSGLSEGGTTPSMGVLQVVKQSVQIPVFVMIRPRGGDFLYSDREIEVMKADIRLAKLYGADGLVFGALTEDGHIDKELCMSLMAICRPLPVTFHRAFDMVHDPMAALETLLTLGFERVLTSGCDSSALEGLPLIKRLIEQAKGRIVVMPGGGITDRNLQRILEGSGATEFHCSARSTRDSGMKFRNSSVAMGASLSCSEYSLKVTDVTKVRTLNAIAKNILV

SEQ ID NO: 42566 - protein, 373 aa, Homo sapiens
MSLLLLLLLVSYYVGTLGTHTEIKRVAEEKVTLPCHHQLGLPEKDTLDIEWLLTDNEGNQKVVITYSSRHVYNNLTEEQKGRVAFASNFLAGDASLQIEPLKPSDEGRYTCKVKNSGRYVWSHVILKVLVRPSKPKCELEGELTEGSDLTLQCESSSGTEPIVYYWQRIREKEGEDERLPPKSRIDYNHPGRVLLQNLTMSYSGLYQCTAGNEAGKESCVVRVTVQYVQSIGMVAGAVTGIVAGALLIFLLVWLLIRRKDKERYEEEERPNEIREDAEAPKARLVKPSSSSSGSRSSRSGSSSTRSTANSASRSQRTLSTDAAPQPGLATQAYSLVGPEVRGSEPKKVHHANLTKAETTPSMIPSQSRAFQTV

SEQ ID NO: 42567 - protein, 198 aa, Homo sapiens
MHHRNDSQRLGKAGCPPEPSLQMANTNFLSTLSPEHCRPLAGECMNKLKCGAAEAEIMNLPERVGTFSAIPALGGISLPPGVIVMTALHSPAAASAAVTDSAFQIANLADCPQNHSSSSSSSSGGAGGANPAKKKRKRCGVCVPCKRLINCGVCSSCRNRKTGHQICKFRKCEELKKKPGTSLERTPVPSAEAFRWFF

SEQ ID NO: 42568 - protein, 198 aa, Homo sapiens; identical to SEQ ID NO: 42567

SEQ ID NO: 42569 - protein, 322 aa, Homo sapiens
MSSLGGGSQDAGGSSSSSTNGSGGSGSSGPKAGAADKSAVVAAAAPASVADDTPPPERRNKSGIISEPLNKSLRRSRPLSHYSSFGSSGGSGGGSMMGGESADKATAAAAAASLLANGHDLAAAMAVDKSNPTSKHKSGAVASLLSKAERATELAAEGQLTLQQFAQSTEMLKRVVQEHLPLMSEAGAGLPDMEAVAGAEALNGQSDFPYLGAFPINPGLFIMTPAGVFLAESALHMAGLAEYPMQGELASAISSGKKKRKRCGMCAPCRRRINCEQCSSCRNRKTGHQICKFRKCEELKKKPSAALEKVMLPTGAAFRWFQ

SEQ ID NO: 42570 - protein, 69 aa, Homo sapiens [sequence omitted]

SEQ ID NO: 42571 - protein, 80 aa, Homo sapiens
MSSLGGGSQDAGGSSSSSTNGSGGSGSSGPKAGAADKSAVVAAAAPASVADDTPPPERRNKSGIISEPLNKSLRRSRPLS

SEQ ID NO: 42572 - protein, 181 aa, Homo sapiens
MSSLGGGSQDAGGSSSSSTNGSGGSGSSGPKAGAADKSAVVAAAAPASVADDTPPPERRNKSGIISEPLNKSLRRSRPLSHYSSFGSSGGSGGGSMMGGESADKATAAAAAASLLANGHDLAAAMAVDKSNPTSKHKSGAVASLLSKAERATELAAEGQLTLQQFAQSTEMLKRVVQEHLP

SEQ ID NO: 42573 - protein, 83 aa, Homo sapiens
MSSLGGGSQDAGGSSSSSTNGSGGSGSSGPKAGAADKSAVVAAAAPASVADDTPPPERRNKSGIISEPLNKSLRRSRPLSHYS

SEQ ID NO: 42574 - protein, 161 aa, Homo sapiens
MSSLGGGSQDAGGSSSSSTNGSGGSGSSGPKAGAADKSAVVAAAAPASVADDTPPPERRNKSGIISEPLNKSLRRSRPLSHYSSFGSSGGSGGGSMMGGESADKATAAAAAASLLANGHDLAAAMAVDKSNPTSKHKSGAVASLLSKAERATELAAEGQLT

SEQ ID NO: 42575 - protein, 102 aa, Homo sapiens
MSSLGGGSQDAGGSSSSSTNGSGGSGSSGPKAGAADKSAVVAAAAPASVADDTPPPERRNKSGIISEPLNKSLRRSRPLSHYSSFGSSGGSGGGSMMGGESA

SEQ ID NO: 42576 - protein, 11 aa, Homo sapiens
MSSLGGGSQDA

SEQ ID NO: 42577 - protein, 98 aa, Homo sapiens
MSSLGGGSQDAGGSSSSSTNGSGGSGSSGPKAGAADKSAVVAAAAPASVADDTPPPERRNKSGIISEPLNKSLRRSRPLSHYSSFGSSGGSGGGSMMG

SEQ ID NO: 42578 - protein, 322 aa, Homo sapiens; identical to SEQ ID NO: 42569

SEQ ID NO: 42579 - protein, 197 aa, Homo sapiens
MSSLGGGSQDAGGSSSSSTNGSGGSGSSGPKAGAADKSAVVAAAAPASVADDTPPPERRNKSGIISEPLNKSLRRSRPLSHYSSFGSSGGSGGGSMMGGESADKATAAAAAASLLANGHDLAAAMAVDKSNPTSKHKSGAVASLLSKAERATELAAEGQLTLQQFAQSTEMLKRVVQEHLPLMSEAGAGLPDMEAVA

SEQ ID NO: 42580 - protein, 8 aa, Homo sapiens
MSSLGGGS

SEQ ID NO: 42581 - protein, 73 aa, Homo sapiens
MSSLGGGSQDAGGSSSSSTNGSGGSGSSGPKAGAADKSAVVAAAAPASVADDTPPPERRNKSGIISEPLNKSL

SEQ ID NO: 42582 - protein, 137 aa, Homo sapiens
MSSLGGGSQDAGGSSSSSTNGSGGSGSSGPKAGAADKSAVVAAAAPASVADDTPPPERRNKSGIISEPLNKSLRRSRPLSHYSSFGSSGGSGGGSMMGGESADKATAAAAAASLLANGHDLAAAMAVDKSNPTSKHK

SEQ ID NO: 42583 - protein, 690 aa, Homo sapiens
MKLSMKNNIINTQQSFVTMPNVIVPDIEKEIRRMENGACSSFSEDDDSASTSEESENENPHARGSFSYKSLRKGGPSQREQYLPGAIALFNVNNSSNKDQEPEEKKKKKKEKKSKSDDKNENKNDPEKKKKKKDKEKKKKEEKSKDKKEEEKKEVVVIDPSGNTYYNWLFCITLPVMYNWTMVIARACFDELQSDYLEYWLILDYVSDIVYLIDMFVRTRTGYLEQGLLVKEELKLINKYKSNLQFKLDVLSLIPTDLLYFKLGWNYPEIRLNRLLRFSRMFEFFQRTETRTNYPNIFRISNLVMYIVIIIHWNACVFYSISKAIGFGNDTWVYPDINDPEFGRLARKYVYSLYWSTLTLTTIGETPPPVRDSEYVFVVVDFLIGVLIFATIVGNIGSMISNMNAARAEFQARIDAIKQYMHFRNVSKDMEKRVIKWFDYLWTNKKTVDEKEVLKYLPDKLRAEIAINVHLDTLKKVRIFADCEAGLLVELVLKLQPQVYSPGDYICKKGDIGREMYIIKEGKLAVVADDGVTQFVVLSDGSYFGEISILNIKGSKAGNRRTANIKSIGYSDLFCLSKDDLMEALTEYPDAKTMLEEKGKQILMKDGLLDLNIANAGSDPKDLEEKVTRMEGSVDLLQTRFARILAEYESMQQKLKQRLTKVEKFLKPLIDTEFSSIEGPGAESGPIDST

SEQ ID NO: 42584 - protein, 759 aa, Homo sapiens
MESRSSPRLECSGAISAHCSLHLPDSSDFQLIFVFLVEMGFHHVGQAGLELLISSDLPTSASQSAGITDMKLSMKNNIINTQQSFVTMPNVIVPDIEKEIRRMENGACSSFSEDDDSASTSEESENENPHARGSFSYKSLRKGGPSQREQYLPGAIALFNVNNSSNKDQEPEEKKKKKKEKKSKSDDKNENKNDPEKKKKKKDKEKKKKEEKSKDKKEEEKKEVVVIDPSGNTYYNWLFCITLPVMYNWTMVIARACFDELQSDYLEYWLILDYVSDIVYLIDMFVRTRTGYLEQGLLVKEELKLINKYKSNLQFKLDVLSLIPTDLLYFKLGWNYPEIRLNRLLRFSRMFEFFQRTETRTNYPNIFRISNLVMYIVIIIHWNACVFYSISKAIGFGNDTWVYPDINDPEFGRLARKYVYSLYWSTLTLTTIGETPPPVRDSEYVFVVVDFLIGVLIFATIVGNIGSMISNMNAARAEFQARIDAIKQYMHFRNVSKDMEKRVIKWFDYLWTNKKTVDEKEVLKYLPDKLRAEIAINVHLDTLKKVRIFADCEAGLLVELVLKLQPQVYSPGDYICKKGDIGREMYIIKEGKLAVVADDGVTQFVVLSDGSYFGEISILNIKGSKAGNRRTANIKSIGYSDLFCLSKDDLMEALTEYPDAKTMLEEKGKQILMKDGLLDLNIANAGSDPKDLEEKVTRMEGSVDLLQTRFARILAEYESMQQKLKQRLTKVEKFLKPLIDTEFSSIEGPGAESGPIDST

SEQ ID NO: 42585 - protein, 690 aa, Homo sapiens; identical to SEQ ID NO: 42583

SEQ ID NO: 42586 - protein, 128 aa, Homo sapiens
MKLSMKNNIINTQQSFVTMPNVIVPDIEKEIRRMENGACSSFSEDDDSASTSEESENENPHARGSFSYKSLRKGGPSQREQYLPGAIALFNVNNSSNKDQEPEEKKKKKKEKKSKSDDKNENKNDPEK

SEQ ID NO: 42587 - protein, 99 aa, Homo sapiens
MKLSMKNNIINTQQSFVTMPNVIVPDIEKEIRRMENGACSSFSEDDDSASTSEESENENPHARGSFSYKSLRKGGPSQREQYLPGAIALFNVNNSSNKD

SEQ ID NO: 42588 - protein, 690 aa, Homo sapiens; identical to SEQ ID NO: 42583

SEQ ID NO: 42589 - protein, 99 aa, Homo sapiens; identical to SEQ ID NO: 42587

SEQ ID NO: 42590 - protein, 690 aa, Homo sapiens; identical to SEQ ID NO: 42583

SEQ ID NO: 42591 - protein, 664 aa, Homo sapiens
MTEKTNGVKSSPANNHNHHAPPAIKANGKDDHRTSSRPHSAADDDTSSELQRLADVDAPQQGRSGFRRIVRLVGIIREWANKNFREEEPRPDSFLERFRGPELQTVTTQEGDGKGDKDGEDKGTKKKFELFVLDPAGDWYYCWLFVIAMPVLYNWCLLVARACFSDLQKGYYLVWLVLDYVSDVVYIADLFIRLRTGFLEQGLLVKDTKKLRDNYIHTLQFKLDVASIIPTDLIYFAVDIHSPEVRFNRLLHFARMFEFFDRTETRTNYPNIFRISNLVLYILVIIHWNACIYYAISKSIGFGVDTWVYPNITDPEYGYLAREYIYCLYWSTLTLTTIGETPPPVKDEEYLFVIFDFLIGVLIFATIVGNVGSMISNMNATRAEFQAKIDAVKHYMQFRKVSKGMEAKVIRWFDYLWTNKKTVDEREILKNLPAKLRAEIAINVHLSTLKKVRIFHDCEAGLLVELVLKLRPQVFSPGDYICRKGDIGKEMYIIKEGKLAVVADDGVTQYALLSAGSCFGEISILNIKGSKMGNRRTANIRSLGYSDLFCLSKDDLMEAVTEYPDAKKVLEERGREILMKEGLLDENEVATSMEVDVQEKLGQLETNMETLYTRFGRLLAEYTGAQQKLKQRITVLETKMKQNNEDDYLSDGMNSPELAAADEP

SEQ ID NO: 42592 - protein, 694 aa, Homo sapiens
MAKINTQYSHPSRTHLKVKTSDRDLNRAENGLSRAHSSSEETSSVLQPGIAMETRGLADSGQGSFTGQGIARLSRLIFLLRRWAARHVHHQDQGPDSFPDRFRGAELKEVSSQESNAQANVGSQEPADRGRSAWPLAKCNTNTSNNTEEEKKTKKKDAIVVDPSSNLYYRWLTAIALPVFYNWYLLICRACFDELQSEYLMLWLVLDYSADVLYVLDVLVRARTGFLEQGLMVSDTNRLWQHYKTTTQFKLDVLSLVPTDLAYLKVGTNYPEVRFNRLLKFSRLFEFFDRTETRTNYPNMFRIGNLVLYILIIIHWNACIYFAISKFIGFGTDSWVYPNISIPEHGRLSRKYIYSLYWSTLTLTTIGETPPPVKDEEYLFVVVDFLVGVLIFATIVGNVGSMISNMNASRAEFQAKIDSIKQYMQFRKVTKDLETRVIRWFDYLWANKKTVDEKEVLKSLPDKLKAEIAINVHLDTLKKVRIFQDCEAGLLVELVLKLRPTVFSPGDYICKKGDIGKEMYIINEGKLAVVADDGVTQFVVLSDGSYFGEISILNIKGSKSGNRRTANIRSIGYSDLFCLSKDDLMEALTEYPEAKKALEEKGRQILMKDNLIDEELARAGADPKDLEEKVEQLGSSLDTLQTRFARLLAEYNATQMKMKQRLSQLESQVKGGGDKPLADGEVPGDATKTEDKQQ

SEQ ID NO: 42593 - protein, 694 aa, Homo sapiens; identical to SEQ ID NO: 42592

SEQ ID NO: 42594 - protein, 676 aa, Homo sapiens
MAKINTQYSHPSRTHLKVKTSDRDLNRAENGLSRAHSSSEETSSVLQPGIAMETRGLADSGQGSFTGQGIARLSRLIFLLRRWAARHVHHQDQGPDSFPDRFRGAELKEVSSQESNAQANVGSQEPADRGRRKKTKKKDAIVVDPSSNLYYRWLTAIALPVFYNWYLLICRACFDELQSEYLMLWLVLDYSADVLYVLDVLVRARTGFLEQGLMVSDTNRLWQHYKTTTQFKLDVLSLVPTDLAYLKVGTNYPEVRFNRLLKFSRLFEFFDRTETRTNYPNMFRIGNLVLYILIIIHWNACIYFAISKFIGFGTDSWVYPNISIPEHGRLSRKYIYSLYWSTLTLTTIGETPPPVKDEEYLFVVVDFLVGVLIFATIVGNVGSMISNMNASRAEFQAKIDSIKQYMQFRKVTKDLETRVIRWFDYLWANKKTVDEKEVLKSLPDKLKAEIAINVHLDTLKKVRIFQDCEAGLLVELVLKLRPTVFSPGDYICKKGDIGKEMYIINEGKLAVVADDGVTQFVVLSDGSYFGEISILNIKGSKSGNRRTANIRSIGYSDLFCLSKDDLMEALTEYPEAKKALEEKGRQILMKDNLIDEELARAGADPKDLEEKVEQLGSSLDTLQTRFARLLAEYNATQMKMKQRLSQLESQVKGGGDKPLADGEVPGDATKTEDKQQ

SEQ ID NO: 42595 - protein, 1251 aa, Homo sapiens
MLGWVQRVLPQPPGTPRKTKMQEEEEVEPEPEMEAEVEPEPNPEEAETESESMPPEESFKEEEVAVADPSPQETKEAALTSTISLRAQGAEISEMNSPSRRVLTWLMKGVEKVIPQPVHSITEDPAQILGHGSTGDTGCTDEPNEALEAQDTRPGLRLLLWLEQNLERVLPQPPKSSEVWRDEPAVATGAASDPAPPGRPQEMGPKLQARETPSLPTPIPLQPKEEPKEAPAPEPQPGSQAQTSSLPPTRDPARLVAWVLHRLEMALPQPVLHGKIGEQEPDSPGICDVQTISILPGGQVEPDLVLEEVEPPWEDAHQDVSTSPQGTEVVPAYEEENKAVEKMPRELSRIEEEKEDEEEEEEEEEEEEEEEVTEVLLDSCVVSQVGVGQSEEDGTRPQSTSDQKLWEEVGEEAKKEAEEKAKEEAEEVAEEEAEKEPQDWAETKEEPEAEAEAASSGVPATKQHPEVQVEDTDADSCPLMAEENPPSTVLPPPSPAKSDTLIVPSSASGTHRKKLPSEDDEAEELKALSPAESPVVAWSDPTTPKDTDGQDRAASTASTNSAIINDRLQELVKLFKERTEKVKEKLIDPDVTSDEESPKPSPAKKAPEPAPDTKPAEAEPVEEEHYCDMLCCKFKHRPWKKYQFPQSIDPLTNLMYVLWLFFVVMAWNWNCWLIPVRWAFPYQTPDNIHHWLLMDYLCDLIYFLDITVFQTRLQFVRGGDIITDKKDMRNNYLKSRRFKMDLLSLLPLDFLYLKVGVNPLLRLPRCLKYMAFFEFNSRLESILSKAYVYRVIRTTAYLLYSLHLNSCLYYWASAYQGLGSTHWVYDGVGNSYIRCYYFAVKTLITIGGLPDPKTLFEIVFQLLNYFTGVFAFSVMIGQMRDVVGAATAGQTYYRSCMDSTVKYMNFYKIPKSVQNRVKTWYEYTWHSQGMLDESELMVQLPDKMRLDLAIDVNYNIVSKVALFQGCDRQMIFDMLKRLRSVVYLPNDYVCKKGEIGREMYIIQAGQVQVLGGPDGKSVLVTLKAGSVFGEISLLAVGGGNRRTANVVAHGFTNLFILDKKDLNEILVHYPESQKLLRKKARRMLRSNNKPKEEKSVLILPPRAGTPKLFNAALAMTGKMGGKGAKGGKLAHLRARLKELAALEAAAKQQELVEQAKSSQDVKGEEGSAAPDQHTHPKEAATDPPAPRTPPEPPGSPPSSPPPASLGRPEGEEEGPAEPEEHSVRICMSPGPEPGEQILSVKMPEEREEKAE

SEQ ID NO: 42596 - protein, 299 aa, Homo sapiens
MLGWVQRVLPQPPGTPRKTKMQEEEEVEPEPEMEAEVEPEPNPEEAETESESMPPEESFKEEEVAVADPSPQETKEAALTSTISLRAQGAEISEMNSPSRRVLTWLMKGVEKVIPQPVHSITEDPAQILGHGSTGDTGCTDEPNEALEAQDTRPGLRLLLWLEQNLERVLPQPPKSSEVWRDEPAVATGAASDPAPPGRPQEMGPKLQARETPSLPTPIPLQPKEEPKEAPAPEPQPGSQAQTSSLPPTRDPARLVAWVLHRLEMALPQPVLHGKIGEQEPDSPGICDVQTRVMGAGGL

SEQ ID NO: 42597 - protein, 809 aa, Homo sapiens
MFKSLTKVNKVKPIGENNENEQSSRRNEEGSHPSNQSQQTTAQEENKGEEKSLKTKSTPVTSEEPHTNIQDKLSKKNSSGDLTTNPDPQNAAEPTGTVPEQKEMDPGKEGPNSPQNKPPAAPVINEYADAQLHNLVKRMRQRTALYKKKLVEGDLSSPEASPQTAKPTAVPPVKESDDKPTEHYYRLLWFKVKKMPLTEYLKRIKLPNSIDSYTDRLYLLWLLLVTLAYNWNCCFIPLRLVFPYQTADNIHYWLIADIICDIIYLYDMLFIQPRLQFVRGGDIIVDSNELRKHYRTSTKFQLDVASIIPFDICYLFFGFNPMFRANRMLKYTSFFEFNHHLESIMDKAYIYRVIRTTGYLLFILHINACVYYWASNYEGIGTTRWVYDGEGNEYLRCYYWAVRTLITIGGLPEPQTLFEIVFQLLNFFSGVFVFSSLIGQMRDVIGAATANQNYFRACMDDTIAYMNNYSIPKLVQKRVRTWYEYTWDSQRMLDESDLLKTLPTTVQLALAIDVNFSIISKVDLFKGCDTQMIYDMLLRLKSVLYLPGDFVCKKGEIGKEMYIIKHGEVQVLGGPDGTKVLVTLKAGSVFGEISLLAAGGGNRRTANVVAHGFANLLTLDKKTLQEILVHYPDSERILMKKARVLLKQKAKTAEATPPRKDLALLFPPKEETPKLFKTLLGGTGKASLARLLKLKREQAAQKKENSEGGEEEGKENEDKQKENEDKQKENEDKGKENEDKDKGREPEEKPLDRPECTASPIAVEEEPHSVRRTVLPRGTSRQSLIISMAPSAEGGEEVLTIEVKEKAKQ

SEQ ID NO: 42598 - protein, 1395 aa, Homo sapiens
MLLPLPPQSSKPVPKKSQSSKIVPSHHDPSEKTGENCQTKISPSSLQESPSSLQGALKKRSAFEDLTNASQCQPVQPKKEANKEFVKVVSKKINRNTHALGLAKKNKRNLKWHKLEVTPVVASTTVVPNIMEKPLILDISTTSKTPNTEEASLFRKPLVLKEEPTIEDETLINKSLSLKKCSNHEEVSLLEKLQPLQEESDSDDAFVIEPMTFKKTHKTEEAAITKKTLSLKKKMCASQRKQSCQEESLAVQDVNMEEDSFFMESMSFKKKPKTEESIPTHKLSSLKKKCTIYGKICHFRKPPVLQTTICGAMSSIKKPTTEKETLFQELSVLQEKHTTEHEMSILKKSLALQKTNFKEDSLVKESLAFKKKPSTEEAIMMPVILKEQCMTEGKRSRLKPLVLQEITSGEKSLIMKPLSIKEKPSTEKESFSQEPSALQKKHTTQEEVSILKEPSSLLKSPTEESPFDEALAFTKKCTIEEAPPTKKPLILKRKHATQGTMSHLKKPLILQTTSGEKSLIKEPLPFKEEKVSLKKKCTTQEMMSICPELLDFQDMIGEDKNSFFMEPMSFRKNPTTEETVLTKTSLSLQEKKITQGKMSHLKKPLVLQKITSEEESFYKKLLPFKMKSTTEEKFLSQEPSALKEKHTTLQEVSLSKESLAIQEKATTEEEFSQELFSLHVKHTNKSGSLFQEALVLQEKTDAEEDSLKNLLALQEKSTMEEESLINKLLALKEELSAEAATNIQTQLSLKKKSTSHGKVFFLKKQLALNETINEEEFLNKQPLALEGYPSIAEGETLFKKLLAMQEEPSIEKEAVLKEPTIDTEAHFKEPLALQEEPSTEKEAVLKEPSVDTEAHFKETLALQEKPSIEQEALFKRHSALWEKPSTEKETIFKESLDLQEKPSIKKETLLKKPLALKMSTINEAVLFEDMIALNEKPTTGKELSFKEPLALQESPTYKEDTFLKTLLVPQVGTSPNVSSTAPESITSKSSIATMTSVGKSGTINEAFLFEDMITLNEKPTTGKELSFKEPLALQESPTCKEDTFLETFLIPQIGTSPYVFSTTPESITEKSSIATMTSVGKSRTTTESSACESASDKPVSPQAKGTPKEITPREDIDEDSSDPSFNPMYAKEIFSYMKEREEQFILTDYMNRQIEITSDMRAILVDWLVEVQVSFEMTHETLYLAVKLVDLYLMKAVCKKDKLQLLGATAFMIAAKFEEHNSPRVDDFVYICDDNYQRSEVLSMEINILNVLKCDINIPIAYHFLRRYARCIHTNMKTLTLSRYICEMTLQEYHYVQEKASKLAAASLLLALYMKKLGYWVPFLEHYSGYSISELHPLVRQLNKLLTFSSYDSLKAVYYKYSHPVFFEVAKIPALDMLKLEEILNCDCEAQGLVL

SEQ ID NO: 42599 - protein, 291 aa, Homo sapiens
MLLPLPPQSSKPVPKKSQSSKIVPSHHDPSEKTGENCQTKISPSSLQESPSSLQGALKKRSAFEDLTNVSFEMTHETLYLAVKLVDLYLMKAVCKKDKLQLLGATAFMIAAKFEEHNSPRVDDFVYICDDNYQRSEVLSMEINILNVLKCDINIPIAYHFLRRYARCIHTNMKTLTLSRYICEMTLQEYHYVQEKASKLAAASLLLALYMKKLGYWVPFLEHYSGYSISELHPLVRQLNKLLTFSSYDSLKAVYYKYSHPVFFEVAKIPALDMLKLEEILNCDCEAQGLVL

SEQ ID NO: 42600 - protein, 291 aa, Homo sapiens; identical to SEQ ID NO: 42599

SEQ ID NO: 42601 - protein, 1395 aa, Homo sapiens; identical to SEQ ID NO: 42598

SEQ ID NO: 42602 - protein, 111 aa, Homo sapiens
MLLPLPPQSSKPVPKKSQSSKIVPSHHDPSEKTGENCQTKISPSSLQESPSSLQGALKKRSAFEDLTNASQCQPVQPKKEANKEFVKVVSKKINRNTHALGLAKKNKRNLK

SEQ ID NO: 42603 - protein, 360 aa, Homo sapiens
MASATAPAAAVPTLASPLEQLRHLAEELRLLLPRVRVGEAQETTEEFNREMFWRRLNEAAVTVSREATTLTIVFSQLPLPSPQETQKFCEQVHAAIKAFIAVYYLLPKDQGITLRKLVRGATLDIVDGMAQLMEVLSVTPTQSPENNDLISYNSVWVACQQMPQIPRDNKAAALLMLTKNVDFVKDAHEEMEQAVEECDPYSGLLNDTEENNSDNHNHEDDVLGFPSNQDLYWSEDDQELIIPCLALVRASKACLKKIRMLVAENGKKDQVAQLDDIVDISDEISPSVDDLALSIYPPMCHLTVRINSAKLVSVLKKALEITKASHVTPQPEDSWIPLLINAIDHCMNRIKELTQSELEL

SEQ ID NO: 42604 - protein, 199 aa, Homo sapiens
MPQIPRDNKAAALLMLTKNVDFVKDAHEEMEQAVEECDPYSGLLNDTEENNSDNHNHEDDVLGFPSNQDLYWSEDDQELIIPCLALVRASKACLKKIRMLVAENGKKDQVAQLDDIVDISDEISPSVDDLALSIYPPMCHLTVRINSAKLVSVLKKALEITKASHVTPQPEDSWIPLLINAIDHCMNRIKELTQSELEL

SEQ ID NO: 42605 - protein, 232 aa, Homo sapiens
MAQLMEVLSVTPTQSPENNDLISYNSVWVACQQMPQIPRDNKAAALLMLTKNVDFVKDAHEEMEQAVEECDPYSGLLNDTEENNSDNHNHEDDVLGFPSNQDLYWSEDDQELIIPCLALVRASKACLKKIRMLVAENGKKDQVAQLDDIVDISDEISPSVDDLALSIYPPMCHLTVRINSAKLVSVLKKALEITKASHVTPQPEDSWIPLLINAIDHCMNRIKELTQSELEL

SEQ ID NO: 42606 - protein, 1311 aa, Homo sapiens
MSLLQSALDFLAGPGSLGGASGRDQSDFVGQTVELGELRLRVRRVLAEGGFAFVYEAQDVGSGREYALKRLLSNEEEKNRAIIQEVCFMKKLSGHPNIVQFCSAASIGKEESDTGQAEFLLLTELCKGQLVEFLKKMESRGPLSCDTVLKIFYQTCRAVQHMHRQKPPIIHRDLKVENLLLSNQGTIKLCDFGSATTISHYPDYSWSAQRRALVEEEITRNTTPMYRTPEIIDLYSNFPIGEKQDIWALGCILYLLCFRQHPFEDGAKLRIVNGKYSIPPHDTQYTVFHSLIRAMLQVNPEERLSIAEVVHQLQEIAAARNVNPKSPITELLEQNGGYGSATLSRGPPPPVGPAGSGYSGGLALAEYDQPYGGFLDILRGGTERLFTNLKDTSSKVIQSVANYAKGDLDISYITSRIAVMSFPAEGVESALKNNIEDVRLFLDSKHPGHYAVYNLSPRTYRPSRFHNRVSECGWAARRAPHLHTLYNICRNMHAWLRQDHKNVCVVHCMDGRAASAVAVCSFLCFCRLFSTAEAAVYMFSMKRCPPGIWPSHKRYIEYMCDMVAEEPITPHSKPILVRAVVMTPVPLFSKQRSGCRPFCEVYVGDERVASTSQEYDKMRDFKIEDGKAVIPLGVTVQGDVLIVIYHARSTLGGRLQAKMASMKMFQIQFHTGFVPRNATTVKFAKYDLDACDIQEKYPDLFQVNLEVEVEPRDRPSREAPPWENSSMRGLNPKILFSSREEQQDILSKFGKPELPRQPGSTAQYDAGAGSPEAEPTDSDSPPSSSADASRFLHTLDWQEEKEAETGAENASSKESESALMEDRDESEVSDEGGSPISSEGQEPRADPEPPGLAAGLVQQDLVFEVETPAVLPEPVPQEDGVDLLGLHSEVGAGPAVPPQACKAPSSNTDLLSCLLGPPEAASQGPPEDLLSEDPLLLASPAPPLSVQSTPRGGPPAAADPFGPLLPSSGNNSQPCSNPDLFGEFLNSDSVTVPPSFPSAHSAPPPSCSADFLHLGDLPGEPSKMTASSSNPDLLGGWAAWTETAASAVAPTPATEGPLFSPGGQPAPCGSQASWTKSQNPDPFADLGDLSSGLQGSPAGFPPGGFIPKTATTPKGSSSWQTSRPPAQGASWPPQAKPPPKACTQPRPNYASNFSVIGAREERGVRAPSFAQKPKVSENDFEDLLSNQGFSSRSDKKGPKTIAEMRKQDLAKDTDPLKLKLLDWIEGKERNIRALLSTLHTVLWDGESRWTPVGMADLVAPEQVKKHYRRAVLAVHPDKAAGQPYEQHAKMIFMELNDAWSEFENQGSRPLF

SEQ ID NO: 42607 - protein, 587 aa, Homo sapiens
MSLLQSALDFLAGPGSLGGASGRDQSDFVGQTVELGELRLRVRRVLAEGGFAFVYEAQDVGSGREYALKRLLSNEEEKNRAIIQEVCFMKKLSGHPNIVQFCSAASIGKEESDTGQAEFLLLTEPPGLAAGLVQQDLVFEVETPAVLPEPVPQEDGVDLLGLHSEVGAGPAVPPQACKAPSSNTDLLSCLLGPPEAASQGPPEDLLSEDPLLLASPAPPLSVQSTPRGGPPAAADPFGPLLPSSGNNSQPCSNPDLFGEFLNSDSVTVPPSFPSAHSAPPPSCSADFLHLGDLPGEPSKMTASSSNPDLLGGWAAWTETAASAVAPTPATEGPLFSPGGQPAPCGSQASWTKSQNPDPFADLGDLSSGLQGSPAGFPPGGFIPKTATTPKGSSSWQTSRPPAQGASWPPQAKPPPKACTQPRPNYASNFSVIGAREERGVRAPSFAQKPKVSENDFEDLLSNQGFSSRSDKKGPKTIAEMRKQDLAKDTDPLKLKLLDWIEGKERNIRALLSTLHTVLWDGESRWTPVGMADLVAPEQVKKHYRRAVLAVHPDKAAGQPYEQHAKMIFMELNDAWSEFENQGSRPLF

SEQ ID NO: 42608 - protein, 357 aa, Homo sapiens
MKENKENSSPSVTSANLDHTKPCWYWDKKDLAHTPSQLEGLDPATEARYRREGARFIFDVGTRLGLHYDTLATGIIYFHRFYMFHSFKQFPRYVTGACCLFLAGKVEETPKKCKDIIKTARSLLNDVQFGQFGDDPKEEVMVLERILLQTIKFDLQVEHPYQFLLKYAKQLKGDKNKIQKLVQMAWTFVNDRTSLCTTLSLQWEPEIIAVAVMYLAGRLCKFEIQEWTSKPMYRRWWEQFVQDVPVDVLEDICHQILDLYSQGKQQMPHHTPHQLQQPPSLQPTPQVPQVQQSQPSQSSEPSQPQQKDPPLILLQGWACRQPATHLLPSPLEDSLLCPRPFPHPACLQLGGWGGQPG

SEQ ID NO: 42609 - protein, 359 aa, Homo sapiens
MKENKENSSPSVTSANLDHTKPCWYWDKKDLAHTPSQLEGLDPATEARYRREGARFIFDVGTRLGLHYDTLATGIIYFHRFYMFHSFKQFPRYVTGACCLFLAGKVEETPKKCKDIIKTARSLLNDVQFGQFGDDPKEEVMVLERILLQTIKFDLQVEHPYQFLLKYAKQLKGDKNKIQKLVQMAWTFVNDRTSLCTTLSLQWEPEIIAVAVMYLAGRLCKFEIQEWTSKPMYRRWWEQFVQDVPVDVLEDICHQILDLYSQGKQQMPHHTPHQLQQPPSLQPTPQVPQVQQSQPSQSSEPSQPQQKDPQQPAQQQQPAQQPKKPSPQPSSPRQVKRAVVVSPKEENKAAGKASLKHTW

SEQ ID NO: 42610 - protein, 580 aa, Homo sapiens
MKENKENSSPSVTSANLDHTKPCWYWDKKDLAHTPSQLEGLDPATEARYRREGARFIFDVGTRLGLHYDTLATGIIYFHRFYMFHSFKQFPRYVTGACCLFLAGKVEETPKKCKDIIKTARSLLNDVQFGQFGDDPKEEVMVLERILLQTIKFDLQVEHPYQFLLKYAKQLKGDKNKIQKLVQMAWTFVNDSLCTTLSLQWEPEIIAVAVMYLAGRLCKFEIQEWTSKPMYRRWWEQFVQDVPVDVLEDICHQILDLYSQGKQQMPHHTPHQLQQPPSLQPTPQVPQVQQSQPSQSSEPSQPQQKDPQQPAQQQQPAQQPKKPSPQPSSPRQVKRAVVVSPKEENKAAEPPPPKIPKIETTHPPLPPAHPPPDRKPPLAAALGEAEPPGPVDATDLPKVQIPPPAHPAPVHQPPPLPHRPPPPPPSSYMTGMSTTSSYMSGEGYQSLQSMMKTEGPSYGALPPAYGPPAHLPYHPHVYPPNPPPPPVPPPPASFPPPAIPPPTPGYPPPPPTYNPNFPPPPPRLPPTHAVPPHPPPGLGLPPASYPPPAVPPGGQPPVPPPIPPPGMPPVGGLGRAAWMR

SEQ ID NO: 42611 - protein, 600 aa, Homo sapiens
MKENKENSSPSVTSANLDHTKPCWYWDKKDLAHTPSQLEGLDPATEARYRREGARFIFDVGTRLGLHYDTLATGIIYFHRFYMFHSFKQFPRYVTGACCLFLAGKVEETPKKCKDIIKTARSLLNDVQFGQFGDDPKEEVMVLERILLQTIKFDLQVEHPYQFLLKYAKQLKGDKNKIQKLVQMAWTFVNDSLCTTLSLQWEPEIIAVAVMYLAGRLCKFEIQEWTSKPMYRRWWEQFVQDVPVDVLEDICHQILDLYSQGKQQMPHHTPHQLQQPPSLQPTPQVPQVQQSQPSQSSEPSQPQQKDPQQPAQQQQPAQQPKKPSPQPSSPRQVKRAVVSGLKQALGRAGFPGGGNTTVVSPKEENKAAEPPPPKIPKIETTHPPLPPAHPPPDRKPPLAAALGEAEPPGPVDATDLPKVQIPPPAHPAPVHQPPPLPHRPPPPPPSSYMTGMSTTSSYMSGEGYQSLQSMMKTEGPSYGALPPAYGPPAHLPYHPHVYPPNPPPPPVPPPPASFPPPAIPPPTPGYPPPPPTYNPNFPPPPPRLPPTHAVPPHPPPGLGLPPASYPPPAVPPGGQPPVPPPIPPPGMPPVGGLGRAAWMR

SEQ ID NO: 42612 - protein, 110 aa, Homo sapiens
MKENKENSSPSVTSANLDHTKPCWYWDKKDLAHTPSQLEGLDPATEARYRREGARFIFDVGTRLGLHYDTLATGIIYFHRFYMFHSFKQFPRYVTGACCLFLAGKVEETP

SEQ ID NO: 42613 - protein, 227 aa, Homo sapiens
MKENKENSSPSVTSANLDHTKPCWYWDKKDLAHTPSQLEGLDPATEARYRREGARFIFDVGTRLGLHYDTLATGIIYFHRFYMFHSFKQFPRYVTGACCLFLAGKVEETPKKCKDIIKTARSLLNDVQFGQFGDDPKEEVMVLERILLQTIKFDLQVEHPYQFLLKYAKQLKGDKNKIQKLVQMAWTFVNDSLCTTLSLQWEPEIIAVAVMYLAGRLCKFEIQEWTS

SEQ ID NO: 42614 - protein, 172 aa, Homo sapiens
MASGPHSTATAAAAASSAAPSAGGSSSGTTTTTTTTTGGILIGDRLYSEVSLTIDHSLIPEERLSPTPSMQDGLDLPSETDLRILGCELIQAAGILLRLPQVAMATGQVLFHRFFYSKSFVKHSFEIVAMACINLASKIEEAPRRIRDVINVFHHLRQLRGKSDQLHLPKPG

SEQ ID NO: 42615 - protein, 526 aa, Homo sapiens
MASGPHSTATAAAAASSAAPSAGGSSSGTTTTTTTTTGGILIGDRLYSEVSLTIDHSLIPEERLSPTPSMQDGLDLPSETDLRILGCELIQAAGILLRLPQVAMATGQVLFHRFFYSKSFVKHSFEIVAMACINLASKIEEAPRRIRDVINVFHHLRQLRGKRTPSPLILDQNYINTKNQVIKAERRVLKELGFCVHVKHPHKIIVMYLQVLECERNQTLVQTAWNYMNDSLRTNVFVRFQPETIACACIYLAARALQIPLPTRPHWFLLFGTTEEEIQEICIETLRLYTRKKPNYELLEKEVEKRKVALQEAKLKAKGLNPDGTPALSTLGGFSPASKPSSPREVKAEEKSPISINVKTVKKEPEDRQQASKSPYNGVRKDSKRSRNSRSASRSRSRTRSRSRSHTPRRHYNNRRSRSGTYSSRSRSRSRSHSESPRRHHNHGSPHLKAKHTRDDLKSSNRHGHKRKKSRSRSQSKSRDHSDAAKKHRHERGHHRDRRERSRSFERSHKSKHHGGSRSGHGRHRR

SEQ ID NO: 42616 - protein, 520 aa, Homo sapiens
MAAAAAAAGAAGSAAPAAAAGAPGSGGAPSGSQGVLIGDRLYSGVLITLENCLLPDDKLRFTPSMSSGLDTDTETDLRVVGCELIQAAGILLRLPQVAMATGQVLFQRFFYTKSFVKHSMEHVSMACVHLASKIEEAPRRIRDVINVFHRLRQLRDKKKPVPLLLDQDYVNLKNQIIKAERRVLKELGFCVHVKHPHKIIVMYLQVLECERNQHLVQTSWNYMNDSLRTDVFVRFQPESIACACIYLAARTLEIPLPNRPHWFLLFGATEEEIQEICLKILQLYARKKVDLTHLEGEVEKRKHAIEEAKAQARGLLPGGTQVLDGTSGFSPAPKLVESPKEGKGSKPSPLSVKNTKRRLEGAKKAKADSPVNGLPKGRESRSRSRSREQSYSRSPSRSASPKRRKSDSGSTSGGSKSQSRSRSRSDSPPRQAPRSAPYKGSEIRGSRKSKDCKYPQKPHKSRSRSSSRSRSRSRERADNPGKYKKKSHYYRDQRRERSRSYERTGRRYERDHPGHSRHRR

SEQ ID NO: 42617 - protein, 226 aa, Homo sapiens
MAAAAAAAGAAGSAAPAAAAGAPGSGGAPSGSQGVLIGDRLYSGVLITLENCLLPDDKLRFTPSMSSGLDTDTETDLRVVGCELIQAAGILLRLPQVAMATGQVLFQRFFYTKSFVKHSMEHVSMACVHLASKIEEAPRRIRDVINVFHRLRQLRDKKKPVPLLLDQDYVNLKNQIIKAERRVLKELGFCVHVKHPHKIIVMYLQVLECERNQHLVQTSWVASEGK

SEQ ID NO: 42618 - protein, 347 aa, Homo sapiens [sequence omitted]

SEQ ID NO: 42619 - protein, 951 aa, Homo sapiens
MAAAAAAAAAVGVRLRDCCSRGAVLLLFFSLSPRPPAAAAWLLGLRPEDTAGGRVSLEGGTLRAAEGTSFLLRVYFQPGPPATAAPVPSPTLNSGENGTGDWAPRLVFIEEPPGGGGVAPSAVPTRPPGPQRCREQSDWASDVEVLGPLRPGGVAGSALVQVRVRELRKGEAERGGAGGGGKLFSLCAWDGRAWHHHGAAGGFLLRVRPRLYGPGGDLLPPAWLRALGALLLLALSALFSGLRLSLLSLDPVELRVLRNSGSAAEQEQARRVQAVRGRGTHLLCTLLLGQAGANAALAGWLYTSLPPGFGGTGEDYSEEGIHFPWLPALVCTGAVFLGAEICPYSVCSRHGLAIASHSVCLTRLLMAAAFPVCYPLGRLLDWALRQEISTFYTREKLLETLRAADPYSDLVKEELNIIQGALELRTKVVEEVLTPLGDCFMLRSDAVLDFATVSEILRSGYTRIPVYEGDQRHNIVDILFVKDLAFVDPDDCTPLLTVTRFYNRPLHCVFNDTRLDTVLEEFKKGKSHLAIVQRVNNEGEGDPFYEVMGIVTLEDIIEEIIKSEILDETDLYTDNRKKQRVPQRERKRHDFSLFKLSDTEMRVKISPQLLLATHRFMATEVEPFKSLYLSEKILLRLLKHPNVIQELKFDEKNKKAPEHYLYQRNRPVDYFVLLLQGKVEVEVGKEGLRFENGAFTYYGVPAIMTTACSDNDVRKVGSLAGSSVFLNRSPSRCSGLNRSESPNRERSDFGGSNTQLYSSSNNLYMPDYSVHILSDVQFVKITRQQYQNALTACHMDSSPQSPDMEAFTDGDSTKAPTTRGTPQTPKDDPAITLLNNRNSLPCSRSDGLRSPSEVVYLRMEELAFTQEEMTDFEEHSTQQLTLSPAAVPTRAASDSECCNINLDTETSPCSSDFEENVGKKLLRTLSGQKRKRSPEGERTSEDNSNLTPLIT

SEQ ID NO: 42620 - protein, 830 aa, Homo sapiens
MAAAAAAAAAVGVRLRDCCSRGAVLLLFFSLSPRPPAAAAWLLGLRPEDTAGGRVSLEGGTLRAAEGTSFLLRVYFQPGPPRCREQSDWASDVEVLGPLRPGGVAGSALVQLFSLCAWDGRAWHHHGAAGGFLLRVRPRLYGPGGDLLPPAWLRALGALLLLALSALFSGLRLSLLSLDPVELRVLRNSGSAAEQEQARRVQAVRGRGTHLLCTLLLGQAGANAALAGWLYTSLPPGFGGTGEDYSEEGIHFPWLPALVCTGAVFLGAEICPYSVCSRHGLAIASHSVCLTRLLMAAAFPVCYPLGRLLDWALRQEISTFYTREKLLETLRAADPYSDLVKEELNIIQGALELRTKVVEEVLTPLGDCFMLRSDAVLDFATVSEILRSGYTRIPVYEGDQRHNIVDILFVKDLAFVDPDDCTPLLTVTRFYNRPLHCVFNDTRLDTVLEEFKKGKSHLAIVQRVNNEGEGDPFYEVMGIVTLEDIIEEIIKSEILDETDLYTDNRKKQRVPQRERKRHDFSLFKLSDTEMRVKISPQLLLATHRFMATEVEPFKSLYLSEKILLRLLKHPNVIQELKFDEKNKKAPEHYLYQRNRPVDYFVLLLQGKVEVEVGKEGLRFENGAFTYYGVPAIMTTACSDNDVRKVGSLAGSSVFLNRSPSRCSGLNRSESPNRERSDFGGSNTQLYSSSNNLYMPDYSVHILSDVQFVKITRQQYQNALTACHMDSSPQSPDMEAFTDGDSTKAPTTRGTPQTPKDDPAITLLNNRNSLPSSDSECCNINLDTETSPCSSDFEENVGKKLLRTLSGQKRKRSPEGERTSEDNSNLTPLIT

SEQ ID NO: 42621 - protein, 607 aa, Homo sapiens
MAAAFPVCYPLGRLLDWALRQEISTFYTREKLLETLRAADPYSDLVKEELNIIQGALELRTKVVEEVLTPLGDCFMLRSDAVLDFATVSEILRSGYTRIPVYEGDQRHNIVDILFVKDLAFVDPDDCTPLLTVTRFYNRPLHCVFNDTRLDTVLEEFKKGKSHLAIVQRVNNEGEGDPFYEVMGIVTLEDIIEEIIKSEILDETDLYTDNRKKQRVPQRERKRHDFSLFKLSDTEMRVKISPQLLLATHRFMATEVEPFKSLYLSEKILLRLLKHPNVIQELKFDEKNKKAPEHYLYQRNRPVDYFVLLLQGKVEVEVGKEGLRFENGAFTYYGVPAIMTTACSDNDVRKVGSLAGSSVFLPVSVSRTFAVSRGDSLAGSPVNRSPSRCSGLNRSESPNRERSDFGGSNTQLYSSSNNLYMPDYSVHILSDVQFVKITRQQYQNALTACHMDSSPQSPDMEAFTDGDSTKAPTTRGTPQTPKDDPAITLLNNRNSLPCSRSDGLRSPSEVVYLRMEELAFTQEEMTDFEEHSTQQLTLSPAAVPTRAASDSECCNINLDTETSPCSSDFEENVGKKLLRTLSGQKRKRSPEGERTSEDNSNLTPLIT

SEQ ID NO: 42622 - protein, 880 aa, Homo sapiens
MAAAAAAAAAVGVRLRDCCSRGAVLLLFFSLSPRPPAAAAWLLGLRPEDTAGGRVSLEGGTLRAAEGTSFLLRVYFQPGPPRCREQSDWASDVEVLGPLRPGGVAGSALVQLFSLCAWDGRAWHHHGAAGGFLLRVRPRLYGPGGDLLPPAWLRALGALLLLALSALFSGLRLSLLSLDPVELRVLRNSGSAAEQEQARRVQAVRGRGTHLLCTLLLGQAGANAALAGWLYTSLPPGFGGTGEDYSEEGIHFPWLPALVCTGAVFLGAEICPYSVCSRHGLAIASHSVCLTRLLMAAAFPVCYPLGRLLDWALRQEISTFYTREKLLETLRAADPYSDLVKEELNIIQGALELRTKVVEEVLTPLGDCFMLRSDAVLDFATVSEILRSGYTRIPVYEGDQRHNIVDILFVKDLAFVDPDDCTPLLTVTRFYNRPLHCVFNDTRLDTVLEEFKKGKSHLAIVQRVNNEGEGDPFYEVMGIVTLEDIIEEIIKSEILDETDLYTDNRKKQRVPQRERKRHDFSLFKLSDTEMRVKISPQLLLATHRFMATEVEPFKSLYLSEKILLRLLKHPNVIQELKFDEKNKKAPEHYLYQRNRPVDYFVLLLQGKVEVEVGKEGLRFENGAFTYYGVPAIMTTACSDNDVRKVGSLAGSSVFLNRSPSRCSGLNRSESPNRERSDFGGSNTQLYSSSNNLYMPDYSVHILSDVQFVKITRQQYQNALTACHMDSSPQSPDMEAFTDGDSTKAPTTRGTPQTPKDDPAITLLNNRNSLPCSRSDGLRSPSEVVYLRMEELAFTQEEMTDFEEHSTQQLTLSPAAVPTRAASDSECCNINLDTETSPCSSDFEENVGKKLLRTLSGQKRKRSPEGERTSEDNSNLTPLIT

SEQ ID NO: 42623 - protein, 404 aa, Homo sapiens
MGIVTLEDIIEEIIKSEILDETDLYTDNRKKQRVPQRERKRHDFSLFKLSDTEMRVKISPQLLLATHRFMATEVEPFKSLYLSEKILLRLLKHPNVIQELKFDEKNKKAPEHYLYQRNRPVDYFVLLLQGKVEVEVGKEGLRFENGAFTYYGVPAIMTTACSDNDVRKVGSLAGSSVFLNRSPSRCSGLNRSESPNRERSDFGGSNTQLYSSSNNLYMPDYSVHILSDVQFVKITRQQYQNALTACHMDSSPQSPDMEAFTDGDSTKAPTTRGTPQTPKDDPAITLLNNRNSLPCSRSDGLRSPSEVVYLRMEELAFTQEEMTDFEEHSTQQLTLSPAAVPTRAASDSECCNINLDTETSPCSSDFEENVGKKLLRTLSGQKRKRSPEGERTSEDNSNLTPLIT

SEQ ID NO: 42624 - protein, 853 aa, Homo sapiens
MIGCGACEPKVKMAGGQAAAALPTWKMAARRSLSARGRGILQAAAGRLLPLLLLSCCCGAGGCAAVGENEETVIIGLRLEDTNDVSFMEGGALRVSERTRVKLRVYGQNINNETWSRIAFTEHERRRHSPGERGLGGPAPPEPDSGPQRCGIRTSDIIILPHIILNRRTSGIIEIEIKPLRKMEKSKSYYLCTSLSTPALGAGGSGSTGGAVGGKGGSGVAGLPPPPWAETTWIYHDGEDTKMIVGEEKKFLLPFWLQVIFISLLLCLSGMFSGLNLGLMALDPMELRIVQNCGTEKEKNYAKRIEPVRRQGNYLLCSLLLGNVLVNTTLTILLDDIAGSGLVAVVVSTIGIVIFGEIVPQAICSRHGLAVGANTIFLTKFFMMMTFPASYPVSKLLDCVLGQEIGTVYNREKLLEMLRVTDPYNDLVKEELNIIQGALELRTKTVEDVMTPLRDCFMITGEAILDFNTMSEIMESGYTRIPVFEGERSNIVDLLFVKDLAFVDPDDCTPLKTITKFYNHPLHFVFNDTKLDAMLEEFKKGKSHLAIVQRVNNEGEGDPFYEVLGIVTLEDVIEEIIKSEILDETDLYTDNRTKKKVAHRERKQDFSAFKQTDSEMKVKISPQLLLAMHRFLATEVEAFSPSQMSEKILLRLLKHPNVIQELKYDEKNKKAPEYYLYQRNKPVDYFVLILQGKVEVEAGKEGMKFEASAFSYYGVMALTASPGENKSPPRPCGLNHSDSLSRSDRIDAVTPTLGSSNNQLNSSLLQVYIPDYSVRALSDLQFVKISRQQYQNALMASRMDKTPQSSDSENTKIELTLTELHDGLPDETANLLNEQNCVTHSKANHSLHNEGAI

SEQ ID NO: 42625 - protein, 552 aa, Homo sapiens
MIGCGACEPKVKMAGGQAAAALPTWKMAARRSLSARGRGILQAAAGRLLPLLLLSCCCGAGGCAAVGENEETVIIGLRLEDTNDVSFMEGGALRVSERTRVKLRVYGQNINNETWSRIAFTEHERRRHSPGERGLGGPAPPEPDSGPQRCGIRTSDIIILPHIILNRRTSGIIEIEIKPLRKMEKSKSYYLCTSLSTPALGAGGSGSTGGAVGGKGGSGVAGLPPPPWAETTWIYHDGEDTKMIVGEEKKFLLPFWLQVIFISLLLCLSGMFSGLNLGLMALDPMELRIVQNCGTEKEKNYAKRIEPVRRQGNYLLCSLLLGNVLVNTTLTILLDDIAGSGLVAVVVSTIGIVIFGEIVPQAICSRHGLAVGANTIFLTKFFMMMTFPASYPVSKLLDCVLGQEIGTVYNREKLLEMLRVTDPYNDLVKEELNIIQGALELRTKTVEDVMTPLRDCFMITGEAILDFNTMSEIMESGYTRIPVFEGERSNIVDLLFVKDLAFVDPDDCTPLKTITKFYNHPLHFVFNDTKLDAMLEEFKKEHTNKKPKSYQH

SEQ ID NO: 42626 - protein, 875 aa, Homo sapiens
MIGCGACEPKVKMAGGQAAAALPTWKMAARRSLSARGRGILQAAAGRLLPLLLLSCCCGAGGCAAVGENEETVIIGLRLEDTNDVSFMEGGALRVSERTRVKLRVYGQNINNETWSRIAFTEHERRRHSPGERGLGGPAPPEPDSGPQRCGIRTSDIIILPHIILNRRTSGIIEIEIKPLRKMEKSKSYYLCTSLSTPALGAGGSGSTGGAVGGKGGSGVAGLPPPPWAETTWIYHDGEDTKMIVGEEKKFLLPFWLQVIFISLLLCLSGMFSGLNLGLMALDPMELRIVQNCGTEKEKNYAKRIEPVRRQGNYLLCSLLLGNVLVNTTLTILLDDIAGSGLVAVVVSTIGIVIFGEIVPQAICSRHGLAVGANTIFLTKFFMMMTFPASYPVSKLLDCVLGQEIGTVYNREKLLEMLRVTDPYNDLVKEELNIIQGALELRTKTVEDVMTPLRDCFMITGEAILDFNTMSEIMESGYTRIPVFEGERSNIVDLLFVKDLAFVDPDDCTPLKTITKFYNHPLHFVFNDTKLDAMLEEFKKGKSHLAIVQRVNNEGEGDPFYEVLGIVTLEDVIEEIIKSEILDETDLYTDNRTKKKVAHRERKQDFSAFKQTDSEMKVKISPQLLLAMHRFLATEVEAFSPSQMSEKILLRLLKHPNVIQELKYDEKNKKAPEYYLYQRNKPVDYFVLILQGKVEVEAGKEGMKFEASAFSYYGVMALTASPVPLSLSRTFVVSRTELLAAGSPGENKSPPRPCGLNHSDSLSRSDRIDAVTPTLGSSNNQLNSSLLQVYIPDYSVRALSDLQFVKISRQQYQNALMASRMDKTPQSSDSENTKIELTLTELHDGLPDETANLLNEQNCVTHSKANHSLHNEGAI

SEQ ID NO: 42627 - protein, 854 aa, Homo sapiens [sequence omitted]

SEQ ID NO: 42628 - protein, 876 aa, Homo sapiens [sequence omitted]

SEQ ID NO: 42629 - protein, 574 aa, Homo sapiens
MIGCGACEPKVKMAGGQAAAALPTWKMAARRSLSARGRGILQAAAGRLLPLLLLSCCCGAGGCAAVGENEETVIIGLRLEDTNDVSFMEGGALRVSERTRVKLRVYGQNINNETWSRIAFTEHERRRHSPGERGLGGPAPPEPDSGPQRCGIRTSDIIILPHIILNRRTSGIIEIEIKPLRKMEKSKSYYLCTSLSTPALGAGGSGSTGGAVGGKGGSGVAGLPPPPWAETTWIYHDGEDTKMIVGEEKKFLLPFWLQVIFISLLLCLSGMFSGLNLGLMALDPMELRIVQNCGTEKEKNYAKRIEPVRRQGNYLLCSLLLGNVLVNTTLTILLDDIAGSGLVAVVVSTIGIVIFGEIVPQAICSRHGLAVGANTIFLTKFFMMMTFPASYPVSKLLDCVLGQEIGTVYNREKLLEMLRVTDPYNDLVKEELNIIQGALELRTKTVEDVMTPLRDCFMITGEAILDFNTMSEIMESGYTRIPVFEGERSNIVDLLFVKDLAFVDPDDCTPLKTITKFYNHPLHFVFNDTKLDAMLEEFKKEHTNKKPKSYQHCNEQNCVTHSKANHSLHNEGAI

SEQ ID NO: 42630 - protein, 707 aa, Homo sapiens
MAAAVAAAGRLGWLFAALCLGNAAGEAAPGPRVLGFCLEEDGAAGAGWVRGGAARDTPDATFLLRLFGPGFANSSWSWVAPEGAGCREEAASPAGEWRALLRLRLRAEAVRPHSALLAVRVEPGGGAAEEAAPPWALGLGAAGLLALAALARGLQLSALALAPAEVQVLRESGSEAERAAARRLEPARRWAGCALGALLLLASLAQAALAVLLYRAAGQRAVPAVLGSAGLVFLVGEVVPAAVSGRWTLALAPRALGLSRLAVLLTLPVALPVGQLLELAARPGRLRERVLELARGGGDPYSDLSKGVLRCRTVEDVLTPLEDCFMLDASTVLDFGVLASIMQSGHTRIPVYEEERSNIVDMLYLKDLAFVDPEDCTPLSTITRFYNHPLHFVFNDTKLDAVLEEFKRGKSHLAIVQKVNNEGEGDPFYEVLGLVTLEDVIEEIIRSEILDESEDYRDTVVKRKPASLMAPLKRKEEFSLFKVSDDEYKVTISPQLLLATQRFLSREVDVFSPLRISEKVLLHLLKHPSVNQEVRFDESNRLATHHYLYQRSQPVDYFILILQGRVEVEIGKEGLKFENGAFTYYGVSALTVPSSVHQSPVSSLQPIRHDLQPDPGDGTHSSAYCPDYTVRALSDLQLIKVTRLQYLNALLATRAQNLPQSPENTDLQVIPGSQTRLLGEKTTTAAGSSHSRPGVPVEGSPGRNPGV

SEQ ID NO: 42631 - protein, 659 aa, Homo sapiens
MAAAVAAAGRLGWLFAALCLGNAAGEAAPGPRVLGFCLEEDGAAGAGWVRGGAARDTPDATFLLRLFGPGFANSSWSWVAPEGAGCREEAASPAGEWRALLRLRLRAEAVRPHSALLAVRVEPGGGAAEEAAPPWALGLGAAGLLALAALARGLQLSALALAPAEVQVLRESGSEAERAAARRLEPARRWAGCALGALLLLASLAQAALAVLLYRAAGQRAVPAVLGSAGLVFLVGEVVPAAVSGRWTLALAPRALGLSRLAVLLTLPVALPVGQLLELAARPGRLRERVLELARGGGDPYSDLSKGVLRCRTVEDVLTPLEDCFMLDASTVLDFGVLASIMQSGHTRIPVYEEERSNIVDMLYLKDLAFVDPEDCTPLSTITRFYNHPLHFVFNDTKLDAVLEEFKRGDTVVKRKPASLMAPLKRKEEFSLFKVSDDEYKVTISPQLLLATQRFLSREVDVFSPLRISEKVLLHLLKHPSVNQEVRFDESNRLATHHYLYQRSQPVDYFILILQGRVEVEIGKEGLKFENGAFTYYGVSALTVPSSVHQSPVSSLQPIRHDLQPDPGDGTHSSAYCPDYTVRALSDLQLIKVTRLQYLNALLATRAQNLPQSPENTDLQVIPGSQTRLLGEKTTTAAGSSHSRPGVPVEGSPGRNPGV

SEQ ID NO: 42632 - protein, 680 aa, Homo sapiens
MAAAVAAAGRLGWLFAALCLGNAAGEAAPGPRVLGFCLEEDGAAGAGWVRGGAARDTPDATFLLRLFGPGFANSSWSWVAPEGAGCREEAASPAGEWRALLRLRLRAEAVRPHSALLAVRVEPGGGAAEEAAPPWALGLGAAGLLALAALARGLQLSALALAPAEVQVLRESGSEAERAAARRLEPARRWAGCALGALLLLASLAQAALAVLLYRAAGQRAVPAVLGSAGLVFLVGEVVPAAVSGRWTLALAPRALGLSRLAVLLTLPVALPVGQLLELAARPGRLRERVLELARGGGDPYSDLSKGVLRCRTVEDVLTPLEDCFMLDASTVLDFGVLASIMQSGHTRIPVYEEERSNIVDMLYLKDLAFVDPEDCTPLSTITRFYNHPLHFVFNDTKLDAVLEEFKRGDTVVKRKPASLMAPLKRKEEFSLFKVSDDEYKVTISPQLLLATQRFLSREVDVFSPLRISEKVLLHLLKHPSVNQEVRFDESNRLATHHYLYQRSQPVDYFILILQGRVEVEIGKEGLKFENGAFTYYGVSALTVPSSVHQSPVSSLQPIRHDLQPDPGDGTHSSAYCPDYTVRALSDLQLIKVTRLQYLNALLATRAQNLPQSPENTDLQVIPGSQTRLLGEKTTTAAGSSHSRPSLPLLPRGRDSAAYSDSDLFGLSHLVSAVTAFVWP

SEQ ID NO: 42633 - protein, 775 aa, Homo sapiens
MAPVGGGGRPVGGPARGRLLLAAPVLLVLLWALGARGQGSPQQGTIVGMRLASCNKSCGTNPDGIIFVSEGSTVNLRLYGYSLGNISSNLISFTEVDDAETLHKSTSCLELTKDLVVQQLVNVSRGNTSGVLVVLTKFLRRSESMKLYALCTRAQPDGPWLKWTDKDSLLFMVEEPGRFLPLWLHILLITVLLVLSGIFSGLNLGLMALDPMELRIVQNCGTEKERRYARKIEPIRRKGNYLLCSLLLGNVLVNTSLTILLDNLIGSGLMAVASSTIGIVIFGEILPQALCSRHGLAVGANTILLTKFFMLLTFPLSFPISKLLDFFLGQEIRTVYNREKLMEMLKVTEPYNDLVKEELNMIQGALELRTKTVEDIMTQLQDCFMIRSDAILDFNTMSEIMESGYTRIPVFEDEQSNIVDILYVKDLAFVDPDDCTPLKTITRFYNHPVHFVFHDTKLDAMLEEFKKGKSHLAIVQKVNNEGEGDPFYEVLGLVTLEDVIEEIIKSEILDESDMYTDNRSRKRVSEKNKRDFSAFKDADNELKVKISPQLLLAAHRFLATEVSQFSPSLISEKILLRLLKYPDVIQELKFDEHNKYYARHYLYTRNKPADYFILILQGKVEVEAGKENMKFETGAFSYYGTMALTSVPSDRSPAHPTPLSRSASLSYPDRTDVSTAATLAGSSNQFGSSVLGQYISDFSVRALVDLQYIKITRQQYQNGLLASRMENSPQFPIDGCTTHMENLAEKSELPVVDETTTLLNERNSLLHKASHENAI

SEQ ID NO: 42634 - protein, 263 aa, Homo sapiens
MYTDNRSRKRVSEKNKRDFSAFKDADNELKVKISPQLLLAAHRFLATEVSQFSPSLISEKILLRLLKYPDVIQELKFDEHNKYYARHYLYTRNKPADYFILILQGKVEVEAGKENMKFETGAFSYYGTMALTSVPSDRSPAHPTPLSRSASLSYPDRTDVSTAATLAGSSNQFGSSVLGQYISDFSVRALVDLQYIKPQSWPCFSRPGDRVCLPAPPSMNSSLPHADHSAAVPERAAGFSHGEQPSVSHRRVHHPHGELGREV

SEQ ID NO: 42635 - protein, 730 aa, Homo sapiens
MASGRGASSRWFFTREQLENTPSRRCGVEADKELSCRQQAANLIQEMGQRLNVSQLTINTAIVYMHRFYMHHSFTKFNKNIISSTALFLAAKVEEQARKLEHVIKVAHACLHPLEPLLDTKCDAYLQQTQELVILETIMLQTLGFEITIEHPHTDVVKCTQLVRASKDLAQTSYFMATNSLHLTTFCLQYKPTVIACVCIHLACKWSNWEIPVSTDGKHWWEYVDPTVTLELLDELTHEFLQILEKTPNRLKKIRNWRANQAARKPKVDGQVSETPLLGSSLVQNSILVDSVTGVPTNPSFQKPSTSAFPAPVPLNSGNISVQDSHTSDNLSMLATGMPSTSYGLSSHQEWPQHQDSARTEQLYSQKQETSLSGSQYNINFQQGPSISLHSGLHHRPDKISDHSSVKQEYTHKAGSSKHHGPISTTPGIIPQKMSLDKYREKRKLETLDLDVRDHYIAAQVEQQHKQGQSQAASSSSVTSPIKMKIPIANTEKYMADKKEKSGSLKLRIPIPPTDKSASKEELKMKIKVSSSERHSSSDEGSGKSKHSSPHISRDHKEKHKEHPSSRHHTSSHKHSHSHSGSSSGGSKHSADGIPPTVLRSPVGLSSDGISSSSSSSRKRLHVNDASHNHHSKMSKSSKSSGSSSSSSSSVKQYISSHNSVFNHPLPPPPPVTYQVGYGHLSTLVKLDKKPVETNGPDANHEYSTSSQHMDYKDTFDMLDSLLSAQGMNM

SEQ ID NO: 42636 - protein, 663 aa, Homo sapiens
MASGRGASSRWFFTREQLENTPSRRCGVEADKELSCRQQAANLIQEMGQRLNVSQLTINTAIVYMHRFYMHHSFTKFNKNIISSTALFLAAKVEEQARKLEHVIKVAHACLHPLEPLLDTKCDAYLQQTQELVILETIMLQTLGFEITIEHPHTDVVKCTQLVRASKDLAQTSYFMATNSLHLTTFCLQYKPTVIACVCIHLACKWSNWEIPVSTDGKHWWEYVDPTVTLELLDELTHEFLQILEKTPNRLKKIRNWRANQAARKPKVDGQVSETPLLGSSLVQNSILVDSVTGVPTNPSFQKPSTSAFPAPVPLNSGNISVQDSHTSDNLSMLATGMPSTSYGLSSHQEWPQHQDSARTEQLYSQKQETSLSGSQYNINFQQGPSISLHSGLHHRPDKISDHSSVKQEYTHKAGSSKHHGPISTTPGIIPQKMSLDKYREKRKLETLDLDVRDHYIAAQVEQQHKQGQSQAASSSSVTSPIKMKIPIANTEKYMADKKEKSGSLKLRIPIPPTDKSASKEELKMKIKVSSSERHSSSDEGSGKSKHSSPHISRDHKEKHKEHPSSRHHTSSHKHSHSHSGSSSGGSKHSADGIPPTVLRSPVGLSSDGISSSSSSSRKRLHVNDASHNHHSKMSKSSKSSGGLRTSQHPRETGQEASGDQRS

SEQ ID NO: 42637 - protein, 488 aa, Homo sapiens
MATNSLHLTTFCLQYKPTVIACVCIHLACKWSNWEIPVSTDGKHWWEYVDPTVTLELLDELTHEFLQILEKTPNRLKKIRNWRANQAARKPKVDGQVSETPLLGSSLVQNSILVDSVTGVPTNPSFQKPSTSAFPAPVPLNSGNISVQDSHTSDNLSMLATGMPSTSYGLSSHQEWPQHQDSARTEQLYSQKQETSLSGSQYNINFQQGPSISLHSGLHHRPDKISDHSSVKQEYTHKAGSSKHHGPISTTPGIIPQKMSLDKYREKRKLETLDLDVRDHYIAAQVEQQHKQGQSQAASSSSVTSPIKMKIPIANTEKYMADKKEKSGSLKLRIPIPPTDKSASKEELKMKIKVSSSERHSSSDEGSGKSKHSSPHISRDHKEKHKEHPSSRHHTSSHKHSHSHSGSSSGGSKHSADGIPPTVLRSPVGLSSDGISSSSSSSRKRLHVNDASHNHHSKMSKSSKSSGGLRTSQHPRETGQEASGDQRS

SEQ ID NO: 42638 - protein, 287 aa, Homo sapiens
MEFNPSDHPRASTIFLSKSQTDVREKRKSLFINHHPPGQIARKYSSCSTIFLDDSTVSQPNLKYTIKCVALAIYYHIKNRDPDGRMLLDIFDENLHPLSKSEVPPDYDKHNPEQKQIYRFVRTLFSAAQLTAECAIVTLVYLERLLTYAEIDICPANWKRIVLGAILLASKVWDDQAVWNVDYCQILKDITVEDMNELERQFLELLQFNINVPSSVYAKYYFDLRSLAEANNLSFPLEPLSRERAHKLEAISRLCEDKYKDLRRSARKRSASADNLTLPRWSPAIIS

SEQ ID NO: 42639 - protein, 316 aa, Homo sapiens
MGNTTSCCVSSSPKLRRNAHSRLESYRPDTDLSREDTGCNLQHISDRENIDVREKRKSLFINHHPPGQIARKYSSCSTIFLDDSTVSQPNLKYTIKCVALAIYYHIKNRDPDGRMLLDIFDENLHPLSKSEVPPDYDKHNPEQKQIYRFVRTLFSAAQLTAECAIVTLVYLERLLTYAEIDICPANWKRIVLGAILLASKVWDDQAVWNVDYCQILKDITVEDMNELERQFLELLQFNINVPSSVYAKYYFDLRSLAEANNLSFPLEPLSRERAHKLEAISRLCEDKYKDLRRSARKRSASADNLTLPRWSPAIIS

SEQ ID NO: 42640 - protein, 341 aa, Homo sapiens
MGNTTSCCVSSSPKLRRNAHSRLESYRPDTDLSREDTGCNLQHISDRENIDDLNMEFNPSDHPRASTIFLSKSQTDVREKRKSLFINHHPPGQIARKYSSCSTIFLDDSTVSQPNLKYTIKCVALAIYYHIKNRDPDGRMLLDIFDENLHPLSKSEVPPDYDKHNPEQKQIYRFVRTLFSAAQLTAECAIVTLVYLERLLTYAEIDICPANWKRIVLGAILLASKVWDDQAVWNVDYCQILKDITVEDMNELERQFLELLQFNINVPSSVYAKYYFDLRSLAEANNLSFPLEPLSRERAHKLEAISRLCEDKYKDLRRSARKRSASADNLTLPRWSPAIIS

SEQ ID NO: 42641 - protein, 287 aa, Homo sapiens; identical to SEQ ID NO: 42638

SEQ ID NO: 42642 - protein, 208 aa, Homo sapiens
MDPDGRMLLDIFDENLHPLSKSEVPPDYDKHNPEQKQIYRFVRTLFSAAQLTAECAIVTLVYLERLLTYAEIDICPANWKRIVLGAILLASKVWDDQAVWNVDYCQILKDITVEDMNELERQFLELLQFNINVPSSVYAKYYFDLRSLAEANNLSFPLEPLSRERAHKLEAISRLCEDKYKDLRRSARKRSASADNLTLPRWSPAIIS

SEQ ID NO: 42643 - protein, 341 aa, Homo sapiens; identical to SEQ ID NO: 42640

SEQ ID NO: 42644 - protein, 313 aa, Homo sapiens
MEPMYQDRARDTQTDEIVALKKVRMDKEKDGIPISSLREITLLLRLRHPNIVELKEVVVGNHLESIFLVMGYCEQDLASLLENMPTPFSEAQVKCIVLQVLRGLQYLHRNFIIHRDLKVSNLLMTDKGCVKTADFGLARAYGVPVKPMTPKVVTLWYRAPELLLGTTTQTTSIDMWAVGCILAELLAHRPLLPGTSEIHQIDLIVQLLGTPSENIWPGFSKLPLVGQYSLRKQPYNNLKHKFPWLSEAGLRLLHFLFMYDPKKRATAGDCLESSYFKEKPLPCEPELMPTFPHHRNKRAAPATSEGQSKRCKP

SEQ ID NO: 42645 - protein, 360 aa, Homo sapiens
MAEPDLECEQIRLKCIRKEGFFTVPPEHRLGRCRSVKEFEKLNRIGEGTYGIVYRARDTQTDEIVALKKVRMDKEKDGIPISSLREITLLLRLRHPNIVELKEVVVGNHLESIFLVMGYCEQDLASLLENMPTPFSEAQVKCIVLQVLRGLQYLHRNFIIHRDLKVSNLLMTDKGCVKTADFGLARAYGVPVKPMTPKVVTLWYRAPELLLGTTTQTTSIDMWAVGCILAELLAHRPLLPGTSEIHQIDLIVQLLGTPSENIWPGFSKLPLVGQYSLRKQPYNNLKHKFPWLSEAGLRLLHFLFMYDPKKRATAGDCLESSYFKEKPLPCEPELMPTFPHHRNKRAAPATSEGQSKRCKP

SEQ ID NO: 42646 - protein, 272 aa, Homo sapiens
MDKEKDGIPISSLREITLLLRLRHPNIVELKEVVVGNHLESIFLVMGYCEQDLASLLENMPTPFSEAQVKCIVLQVLRGLQYLHRNFIIHRDLKVSNLLMTDKGCVKTADFGLARAYGVPVKPMTPKVVTLWYRAPELLLGTTTQTTSIDMWAVGCILAELLAHRPLLPGTSEIHQIDLIVQLLGTPSENIWPGFSKLPLVGQYSLRKQPYNNLKHKFPWLSEAGLRLLHFLFMYDPKKRATAGDCLESSYFKEKPLRLPISGVCEGCREPG

SEQ ID NO: 42647 - protein, 167 aa, Homo sapiens
MGKTEEKGNGKGAFQERKGPLGAVRKEAGAGAQDAGAAEGAAVKKMTFSEHPYNNLRKRFGALLSDQGFDLMNKFLTYFPGRRISAEDGLKHEYFRETPLPIDPSMFPTWPAKSEQQRVKRGTSPRPPEGGLGYSQLGDDDLKETGFHLTTTNQGASAAGPGFSLKF

SEQ ID NO: 42648 - protein, 746 aa, Homo sapiens
MSQSDDRDSKRDSLEEGELRDHCMEITIRNSPYRREDSMEDRGEEDDSLAIKPPQQMSRKEKVHHRKDEKRKEKCRHHSHSAEGGKHARVKEREHERRKRHREEQDKARREWERQKRREMAREHSRRERDRLEQLERKRERERKMREQQKEQREQKERERRAEERRKEREARREVSAHHRTMREDYSDKVKASHWSRSPPRPPRERFELGDGRKPVKEEKMEERDLLSDLQDISDSERKTSSAESSSAESGSGSEEEEEEEEEEEEEGSTSEESEEEEEEEEEEEEETGSNSEEASEQSAEEVSEEEMSEDEERENENHLLVVPESRFDRDSGESEEAEEEVGEGTPQSSALTEGDYVPDSPALLPIELKQELPKYLPALQGCRSVEEFQCLNRIEEGTYGVVYRAKDKKTDEIVALKRLKMEKEKEGFPITSLREINTILKAQHPNIVTVREIVVGSNMDKIYIVMNYVEHDLKSLMETMKQPFLPGEVKTLMIQLLRGVKHLHDNWILHRDLKTSNLLLSHAGILKVGDFGLAREYGSPLKAYTPVVVTQWYRAPELLLGAKEYSTAVDMWSVGCIFGELLTQKPLFPGNSEIDQINKVFKELGTPSEKIWPGYSELPVVKKMTFSEHPYNNLRKRFGALLSDQGFDLMNKFLTYFPGRRISAEDGLKHEYFRETPLPIDPSMFPTWPAKSEQQRVKRGTSPRPPEGGLGYSQLGDDDLKETGFHLTTTNQGASAAGPGFSLKF

SEQ ID NO: 42649 - protein, 779 aa, Homo sapiens
MGDEKDSWKVKTLDEILQEKKRRKEQEEKAEIKRLKNSDDRDSKRDSLEEGELRDHCMEITIRNSPYRREDSMEDRGEEDDSLAIKPPQQMSRKEKVHHRKDEKRKEKWKHARVKEREHERRKRHREEQDKARREWERQKRREMAREHSRRERGNDGVCLFRDRLEQLERKRERERKMREQQKEQREQKERERRAEERRKEREARREVSAHHRTMREDYSDKVKASHWSRSPPRPPRERFELGDGRKPVKEEKMEERDLLSDLQDISDSERKTSSAESSSAESGSGSEEEEEEEEEEEEEGSTSEESEEEEEEEEEEEEETGSNSEEASEQSAEEVSEEEMSEDEERENENHLLVVPESRFDRDSGESEEAEEEVGEGTPQSSALTEGDYVPDSPALLPIELKQELPKYLPALQGCRSVEEFQCLNRIEEGTYGVVYRAKDKKTDEIVALKRLKMEKEKEGFPITSLREINTILKAQHPNIVTVREIVVGSNMDKIYIVMNYVEHDLKSLMETMKQPFLPGEVKTLMIQLLRGVKHLHDNWILHRDLKTSNLLLSHAGILKVGDFGLAREYGSPLKAYTPVVVTQWYRAPELLLGAKEYSTAVDMWSVGCIFGELLTQKPLFPGNSEIDQINKVFKELGTPSEKIWPGYSELPVVKKMTFSEHPYNNLRKRFGALLSDQGFDLMNKFLTYFPGRRISAEDGLKHEYFRETPLPIDPSMFPTWPAKSEQQRVKRGTSPRPPEGGLGYSQLGDDDLKETGFHLTTTNQGASAAGPGFSLKF

SEQ ID NO: 42650 - protein, 770 aa, Homo sapiens
MGDEKDSWKVKTLDEILQEKKRRKEQEEKAEIKRLKNSDDRDSKRDSLEEGELRDHCMEITIRNSPYRREDSMEDRGEEDDSLAIKPPQQMSRKEKVHHRKDEKRKEKWKHARVKEREHERRKRHREEQDKARREWERQKRREMAREHSRRERDRLEQLERKRERERKMREQQKEQREQKERERRAEERRKEREARREVSAHHRTMREDYSDKVKASHWSRSPPRPPRERFELGDGRKPVKEEKMEERDLLSDLQDISDSERKTSSAESSSAESGSGSEEEEEEEEEEEEEGSTSEESEEEEEEEEEEEEETGSNSEEASEQSAEEVSEEEMSEDEERENENHLLVVPESRFDRDSGESEEAEEEVGEGTPQSSALTEGDYVPDSPALLPIELKQELPKYLPALQGCRSVEEFQCLNRIEEGTYGVVYRAKDKKTDEIVALKRLKMEKEKEGFPITSLREINTILKAQHPNIVTVREIVVGSNMDKIYIVMNYVEHDLKSLMETMKQPFLPGEVKTLMIQLLRGVKHLHDNWILHRDLKTSNLLLSHAGILKVGDFGLAREYGSPLKAYTPVVVTQWYRAPELLLGAKEYSTAVDMWSVGCIFGELLTQKPLFPGNSEIDQINKVFKELGTPSEKIWPGYSELPVVKKMTFSEHPYNNLRKRFGALLSDQGFDLMNKFLTYFPGRRISAEDGLKHEYFRETPLPIDPSMFPTWPAKSEQQRVKRGTSPRPPEGGLGYSQLGDDDLKETGFHLTTTNQGASAAGPGFSLKF

SEQ ID NO: 42651 - protein, 746 aa, Homo sapiens; identical to SEQ ID NO: 42648

SEQ ID NO: 42652 - protein, 783 aa, Homo sapiens
MGDEKDSWKVKTLDEILQEKKRRKEQEEKAEIKRLKNSDDRDSKRDSLEEGELRDHCMEITIRNSPYRREDSMEDRGEEDDSLAIKPPQQMSRKEKVHHRKDEKRKEKWKHARVKEREHERRKRHREEQDKARREWERQKRREMAREHSRRERDRLEQLERKRERERKMREQQKEQREQKERERRAEERRKEREARREVSAHHRTMREDYSDKVKASHWSRSPPRPPRERFELGDGRKPGEARPAPAQKPAQLKEEKMEERDLLSDLQDISDSERKTSSAESSSAESGSGSEEEEEEEEEEEEEGSTSEESEEEEEEEEEEEEETGSNSEEASEQSAEEVSEEEMSEDEERENENHLLVVPESRFDRDSGESEEAEEEVGEGTPQSSALTEGDYVPDSPALLPIELKQELPKYLPALQGCRSVEEFQCLNRIEEGTYGVVYRAKDKKTDEIVALKRLKMEKEKEGFPITSLREINTILKAQHPNIVTVREIVVGSNMDKIYIVMNYVEHDLKSLMETMKQPFLPGEVKTLMIQLLRGVKHLHDNWILHRDLKTSNLLLSHAGILKVGDFGLAREYGSPLKAYTPVVVTQWYRAPELLLGAKEYSTAVDMWSVGCIFGELLTQKPLFPGNSEIDQINKVFKELGTPSEKIWPGYSELPVVKKMTFSEHPYNNLRKRFGALLSDQGFDLMNKFLTYFPGRRISAEDGLKHEYFRETPLPIDPSMFPTWPAKSEQQRVKRGTSPRPPEGGLGYSQLGDDDLKETGFHLTTTNQGASAAGPGFSLKF

SEQ ID NO: 42653 - protein, 232 aa, Homo sapiens
MGDEKDSWKVKTLDEILQEKKRRKEQEEKAEIKRLKNSDDRDSKRDSLEEGELRDHCMEITIRNSPYRREDSMEDRGEEDDSLAIKPPQQMSRKEKVHHRKDEKRKEKWKHARVKEREHERRKRHREEQDKARREWERQKRREMAREHSRRESVCTSPNDERGLQRQSESQPLESQPASAAAGAVRVGRRPEASKRRENGRKGPAVRLTGHQRQREEDQLGRVLVSGIRLRF

SEQ ID NO: 42654 - protein, 746 aa, Homo sapiens; identical to SEQ ID NO: 42648

SEQ ID NO: 42655 - protein, 37 aa, Homo sapiens
MGDEKDSWKVKTLDEILQEKKRRKEQEEKAEIKRLKN

SEQ ID NO: 42656 - protein, 780 aa, Homo sapiens
MGDEKDSWKVKTLDEILQEKKRRKEQEEKAEIKRLKNSDDRDSKRDSLEEGELRDHCMEITIRNSPYRREDSMEDRGEEDDSLAIKPPQQMSRKEKVHHRKDEKRKEKCRHHSHSAEGGKHARVKEREHERRKRHREEQDKARREWERQKRREMAREHSRRERDRLEQLERKRERERKMREQQKEQREQKERERRAEERRKEREARREVSAHHRTMREDYSDKVKASHWSRSPPRPPRERFELGDGRKPVKEEKMEERDLLSDLQDISDSERKTSSAESSSAESGSGSEEEEEEEEEEEEEGSTSEESEEEEEEEEEEEEETGSNSEEASEQSAEEVSEEEMSEDEERENENHLLVVPESRFDRDSGESEEAEEEVGEGTPQSSALTEGDYVPDSPALLPIELKQELPKYLPALQGCRSVEEFQCLNRIEEGTYGVVYRAKDKKTDEIVALKRLKMEKEKEGFPITSLREINTILKAQHPNIVTVREIVVGSNMDKIYIVMNYVEHDLKSLMETMKQPFLPGEVKTLMIQLLRGVKHLHDNWILHRDLKTSNLLLSHAGILKVGDFGLAREYGSPLKAYTPVVVTQWYRAPELLLGAKEYSTAVDMWSVGCIFGELLTQKPLFPGNSEIDQINKVFKELGTPSEKIWPGYSELPVVKKMTFSEHPYNNLRKRFGALLSDQGFDLMNKFLTYFPGRRISAEDGLKHEYFRETPLPIDPSMFPTWPAKSEQQRVKRGTSPRPPEGGLGYSQLGDDDLKETGFHLTTTNQGASAAGPGFSLKF

SEQ ID NO: 42657 - protein, 151 aa, Homo sapiens
MGDEKDSWKVKTLDEILQEKKRRKEQEEKAEIKRLKNSDDRDSKRDSLEEGELRDHCMEITIRNSPYRREDSMEDRGEEDDSLAIKPPQQMSRKEKVHHRKDEKRKEKWKHARVKEREHERRKRHREEQDKARREWERQKRREMAREHSRR

SEQ ID NO: 42658 - protein, 420 aa, Homo sapiens
MGDEKDSWKVKTLDEILQEKKRRKEQEEKAEIKRLKNSDDRDSKRDSLEEGELRDHCMEITIRNSPYRREDSMEDRGEEDDSLAIKPPQQMSRKEKVHHRKDEKRKEKCRHHSHSAEGGKHARVKEREHERRKRHREEQDKARREWERQKRREMAREHSRRERDRLEQLERKRERERKMREQQKEQREQKERERRAEERRKEREARREVSAHHRTMREDYSDKVKASHWSRSPPRPPRERFELGDGRKPGEARPAPAQKPAQLKEEKMEERDLLSDLQDISDSERKTSSAESSSAESGSGSEEEEEEEEEEEEEGSTSEESEEEEEEEEEEEEETGSNSEEASEQSAEEVSEEEMSEDEERENENHLLVVPESRFDRDSGESEEAEEEVGLPERRGVPVPEQDRGGHLWSGLQSKRQENR

SEQ ID NO: 42659 - protein, 212 aa, Homo sapiens
MEAKTLGTVTPRKPVLSVSARKIKDNAADWHNLILKWETLNDAGFTTANNIANLKISLLNKDKIELDSSSPASKENEEKVCLEYNEELEKLCEELQATLDGLTKIQVKMEKLSSTTKGICELENYHYGEESKRPPLFHTWPTTHFYEVSHKLLEMYRKELLLKRTVAKELAHTGDPDLTLSYLSMWLHQPYVESDSRLHLESMLLETGHRAL

SEQ ID NO: 42660 - protein, 227 aa, Homo sapiens
MNGTIYANECQQIRHPNSKTLGTVTPRKPVLSVSARKIKDNAADWHNLILKWETLNDAGFTTANNIANLKISLLNKDKIELDSSSPASKENEEKVCLEYNEELEKLCEELQATLDGLTKIQVKMEKLSSTTKGICELENYHYGEESKRPPLFHTWPTTHFYEVSHKLLEMYRKELLLKRTVAKELAHTGDPDLTLSYLSMWLHQPYVESDSRLHLESMLLETGHRAL

SEQ ID NO: 42661 - protein, 118 aa, Homo sapiens
MEAKTLGTVTPRKPVLSVSARKIKDNAADWHNLILKWETLNDAGFTTANNIANLKISLLNKDKIELDSSSPASKENEEKVCLEYNEELEKLCEELQATLDGLMRFRISSWRCTGRSCS

SEQ ID NO: 42662 - protein, 212 aa, Homo sapiens; identical to SEQ ID NO: 42659

SEQ ID NO: 42663 - protein, 305 aa, Homo sapiens
MDMFQKVEKIGEGTYGVVYKAKNRETGQLVALKKIRLDLEMEGVPSTAIREISLLKELKHPNIVRLLDVVHNERKLYLVFEFLSQDLKKYMDSTPGSELPLHLIKSYLFQLLQGVSFCHSHRVIHRDLKPQNLLINELGAIKLADFGLARAFGVPLRTYTHEVVTLWYRAPEILLGSKFYTTAVDIWSIGCIFAEMVTRKALFPGDSEIDQLFRIFRMLGTPSEDTWPGVTQLPDYKGSFPKWTRKGLEEIVPNLEPEGRDLLMQLLQYDPSQRITAKTALAHPYFSSPEPSPAARQYVLQRFRH

SEQ ID NO: 42664 - protein, 305 aa, Homo sapiens; identical to SEQ ID NO: 42663

SEQ ID NO: 42665 - protein, 292 aa, Homo sapiens
MQKYEKLEKIGEGTYGTVFKAKNRETHEIVALKRVRLDDDDEGVPSSALREICLLKELKHKNIVRLHDVLHSDKKLTLVFEFCDQDLKKYFDSCNGDLDPEIVKSFLFQLLKGLGFCHSRNVLHRDLKPQNLLINRNGELKLADFGLARAFGIPVRCYSAEVVTLWYRPPDVLFGAKLYSTSIDMWSAGCIFAELANAGRPLFPGNDVDDQLKRIFRLLGTPTEEQWPSMTKLPDYKPYPMYPATTSLVNVVPKLNATGRDLLQNLLKCNPVQRISAEEALQHPYFSDFCPP

SEQ ID NO: 42666 - protein, 260 aa, Homo sapiens
MQKYEKLEKIGEGTYGTVFKAKNRETHEIVALKRVRLDDDDEGVPSSALREICLLKELKHKNIVRLHDVLHSDKKLTLVFEFCDQDLKKYFDSCNGDLDPEIVKNGELKLADFGLARAFGIPVRCYSAEVVTLWYRPPDVLFGAKLYSTSIDMWSAGCIFAELANAGRPLFPGNDVDDQLKRIFRLLGTPTEEQWPSMTKLPDYKPYPMYPATTSLVNVVPKLNATGRDLLQNLLKCNPVQRISAEEALQHPYFSDFCPP

SEQ ID NO: 42667 - protein, 367 aa, Homo sapiens
MGTVLSLSPASSAKGRRPGGLPEEKKKAPPAGDEALGGYGAPPVGKGGKGESRLKRPSVLISALTWKRLVAASAKKKKGSKKVTPKPASTGPDPLVQQRNRENLLRKGRDPPDGGGTAKPLAVPVPTVPAAAATCEPPSGGSAAAQPPGSGGGKPPPPPPPAPQVAPPVPGGSPRRVIVQASTGELLRCLGDFVCRRCYRLKELSPGELVGWFRGVDRSLLLQGWQDQAFITPANLVFVYLLCRESLRGDELASAAELQAAFLTCLYLAYSYMGNEISYPLKPFLVEPDKERFWQRCLRLIQRLSPQMLRLNADPHFFTQVFQDLKNEGEAAASGGGPPSGGAPAASSAARDSCAAGTKHWTMNLDR

SEQ ID NO: 42668 - protein, 592 aa, Homo sapiens
MEMYETLGKVGEGSYGTVMKCKHKNTGQIVAIKIFYERPEQSVNKIAMREIKFLKQFHHENLVNLIEVFRQKKKIHLVFEFIDHTVLDELQHYCHGLESKRLRKYLFQILRAIDYLHSNNIIHRDIKPENILVSQSGITKLCDFGFARTLAAPGDIYTDYVATRWYRAPELVLKDTSYGKPVDIWALGCMIIEMATGNPYLPSSSDLDLLHKIVLKVGNLSPHLQNIFSKSPIFAGVVLPQVQHPKNARKKYPKLNGLLADIVHACLQIDPADRISSSDLLHHEYFTRDGFIEKFMPELKAKLLQEAKVNSLIKPKESSKENELRKDERKTVYTNTLLSSSVLGKEIEKEKKPKEIKVRVIKVKGGRGDISEPKKKEYEGGLGQQDANENVHPMSPDTKLVTIEPPNPINPSTNCNGLKENPHCGGSVTMPPINLTNSNLMAANLSSNLFHPSVRLTERAKKRRTSSQSIGQVMPNSRQEDPGPIQSQMEKGIFNERTGHSDQMANENKRKLNFSRSDRKEFHFPELPVTIQSKDTKGMEVKQIKMLKRESKKTESSKIPTLLNVDQNQEKQEGGDGHCEGKNLKRNRFFFW

SEQ ID NO: 42669 - protein, 455 aa, Homo sapiens
MEMYETLGKVGEGSYGTVMKCKHKNTGQIVAIKIFYERPEQSVNKIAMREIKFLKQFHHENLVNLIEVFRQKKKIHLVFEFIDHTVLDELQHYCHGLESKRLRKYLFQILRAIDYLHSNNIIHRDIKPENILVSQSGITKLCDFGFARTLAAPGDIYTDYVATRWYRAPELVLKDTSYGKPVDIWALGCMIIEMATGNPYLPSSSDLDLLHKIVLKVGNLSPHLQNIFSKSPIFAGVVLPQVQHPKNARKKYPKLNGLLADIVHACLQIDPADRISSSDLLHHEYFTRDGFIEKFMPELKAKLLQEAKVNSLIKPKESSKENELRKDERKTVYTNTLLSSSVLGKEIEKEKKPKEIKVRVIKVKGGRGDISEPKKKEYEGGLGQQDANENVHPMSPDTKLVTIEPPNPINPSTNCNGLKENPHCGGSVTMPPINLTNSNLMAANLSSNLFHPSVR

SEQ ID NO: 42670 - protein, 363 aa, Homo sapiens
MPELKAKLLQEAKVNSLIKPKESSKENELRKDERKTVYTNTLLSSSVLGKEIEKEKKPKEIKVRVIKVKGGRGDISEPKKKEYEGGLGQQDANENVHPMSPDTKLVTIEPPNPINPSTNCNGLKENPHCGGSVTMPPINLTNSNLMAANLSSNLFHPSVRLTERAKKRRTSSQSIGQVMPNSRQEDPGPIQSQMEKGIFNERTGHSDQMANENKRKLNFSRSDRKEFHFPELPVTIQSKDTKGMEVKQIKMLKRESKKTESSKIPTLLNVDQNQEKQEFIPLSLLSACCPIFTNICSQLTIRYVFISGMKTDQYSELVPVEWGIAEKIPKNVEATLELGNRQRFEQFGELRRRQENVGKFGTF

SEQ ID NO: 42671 - protein, 590 aa, Homo sapiens
MEMYETLGKVGEGSYGTVMKCKHKNTGQIVAIKIFYERPEQSVNKIAMREIKFLKQFHHENLVNLIEVFRQKKKIHLVFEFIDHTVLDELQHYCHGLESKRLRKYLFQILRAIDYLHSNNIIHRDIKPENILVSQSGITKLCDFGFARTLAAPGDIYTDYVATRWYRAPELVLKDTSYGKPVDIWALGCMIIEMATGNPYLPSSSDLDLLHKIVLKVGNLSPHLQNIFSKSPIFAGVVLPQVQHPKNARKKYPKLNGLLADIVHACLQIDPADRISSSDLLHHEYFTRDGFIEKFMPELKAKLLQEAKVNSLIKPKESSKENELRKDERKTVYTNTLLSSSVLGKEIEKEKKPKEIKVRVIKVKGGRGDISEPKKKEYEGGLGQQDANENVHPMSPDTKLVTIEPPNPINPSTNCNGLKENPHCGGSVTMPPINLTNSNLMAANLSSNLFHPSVRLTERAKKRRTSSQSIGQVMPNSRQEDPGPIQSQMEKGIFNERTGHSDQMANENKRKLNFSRSDRKEFHFPELPVTIQSKDTKGMEVKQIKMLKRESKKTESSKIPTLLNVDQNQEKQENTGNAQTERKKNLPDVE

SEQ ID NO: 42672 - protein, 455 aa, Homo sapiens; identical to SEQ ID NO: 42669

SEQ ID NO: 42673 - protein, 291 aa, Homo sapiens
MPELKAKLLQEAKVNSLIKPKESSKENELRKDERKTVYTNTLLSSSVLGKEIEKEKKPKEIKVRVIKVKGGRGDISEPKKKEYEGGLGQQDANENVHPMSPDTKLVTIEPPNPINPSTNCNGLKENPHCGGSVTMPPINLTNSNLMAANLSSNLFHPSVRLTERAKKRRTSSQSIGQVMPNSRQEDPGPIQSQMEKGIFNERTGHSDQMANENKRKLNFSRSDRKEFHFPELPVTIQSKDTKGMEVKQIKMLKRESKKTESSKIPTLLNVDQNQEKQEVRLYQRHEDRPIQ

SEQ ID NO: 42674 - protein, 1030 aa, Homo sapiens
MKIPNIGNVMNKFEILGVVGEGAYGVVLKCRHKETHEIVAIKKFKDSEENEEVKETTLRELKMLRTLKQENIVELKEAFRRRGKLYLVFEYVEKNMLELLEEMPNGVPPEKVKSYIYQLIKAIHWCHKNDIVHRDIKPENLLISHNDVLKLCDFGFARNLSEGNNANYTEYVATRWYRSPELLLGAPYGKSVDMWSVGCILGELSDGQPLFPGESEIDQLFTIQKVLGPLPSEQMKLFYSNPRFHGLRFPAVNHPQSLERRYLGILNSVLLDLMKNLLKLDPADRYLTEQCLNHPTFQTQRLLDRSPSRSAKRKPYHVESSTLSNRNQAGKSTALQSHHRSNSKDIQNLSVGLPRADEGLPANESFLNGNLAGASLSPLHTKTYQASSQPGSTSKDLTNNNIPHLLSPKEAKSKTEFDFNIDPKPSEGPGTKYLKSNSRSQQNRHSFMESSQSKAGTLQPNEKQSRHSYIDTIPQSSRSPSYRTKAKSHGALSDSKSVSNLSEARAQIAEPSTSRYFPSSCLDLNSPTSPTPTRHSDTRTLLSPSGRNNRNEGTLDSRRTTTRHSKTMEELKLPEHMDSSHSHSLSAPHESFSYGLGYTSPFSSQQRPHRHSMYVTRDKVRAKGLDGSLSIGQGMAARANSLQLLSPQPGEQLPPEMTVARSSVKETSREGTSSFHTRQKSEGGVYHDPHSDDGTAPKENRHLYNDPVPRRVGSFYRVPSPRPDNSFHENNVSTRVSSLPSESSSGTNHSKRQPAFDPWKSPENISHSEQLKEKEKQGFFRSMKKKKKKSQTVPNSDSPDLLTLQKSIHSASTPSSRPKEWRPEKISDLQTQSQPLKSLRKLLHLSSASNHPASSDPRFQPLTAQQTKNSFSEIRIHPLSQASGGSSNIRQEPAPKGRPALQLPDGGCDGRRQRHHSGPQDRRFMLRTTEQQGEYFCCGDPKKPHTPCVPNRALHRPISSPAPYPVLQVRGTSMCPTLQVRGTDAFSCPTQQSGFSFFVRHVMREALIHRAQVNQAALLTYHENAALTGK

SEQ ID NO: 42675 - protein, 1030 aa, Homo sapiens; identical to SEQ ID NO: 42674

SEQ ID NO: 42676 - protein, 651 aa, Homo sapiens
MSLPRLLKVNIRTYDNSIPISESSRKSWNQKHFALTFPKPLQRGTNDKSRPLKSQITVTRHDKRKLEEGQKPAHKWIRHSFRKILQWPPIYTAAREQTPFRHLYTSKTHLKKAEYKKSKDEKGGTPLKKDSKKKGGSYATNPESKQIVEEKTKRQNEADKTPLKSSHENEQSKKSKSSSETNPESQNSKTVSKNCSQKDKKDSKNSKKTNTEFLHTKNNPKKDLKRSKTSNDPISEICSENSLNVDFLMLVGQSDDESINFDAWLRNYSQNNSKNYSLKYTKYTKKDTKKNAKKSSDAESEDSKDAKKDSKKVKKNVKKDDKKKDVKKDTESTDAESGDSKDERKDTKKDKKKLKKDDKKKDTKKYPESTDTESGDAKDARNDSRNLKKASKNDDKKKDAKKITFSTDSESELESKESQKDEKKDKKDSKTDNKKSVKNDEESTDADSEPKGDSKKGKKDEKKGKKDSKKDDKKKDAKKNAESTEMESDLELKKDKKHSKEKKGSKKDIKKDARKDTESTDAEFDESSKTGFKTSTKIKGSDTESEESLYKPGAKKKIDESDGTSANSKMEGLESKRGFRMSSKKTTFNEKGEKASTGRVPPSREKPPLPACEPSLPSPKVRRLCWCKMPPPPPKPRYAPLPEAPWIHKLL

SEQ ID NO: 42677 - protein, 657 aa, Homo sapiens
MSLPRLLKVNIRTYDNSIPISESSRKSWNQKHFALTFPKPLQRGTNDKSRPLKSQITVTRHDKRKLEEGQKPAHKWIRHSFRKILQWPPIYTAAREQTPFRHLYTSKTHLKKAEYKKSKDEKGGTPLKKDSKKKGGSYATNPESKQIVEEKTKRQNEADKTPLKSSHENEQSKKSKSSSETNPESQNSKTVSKNCSQKDKKDSKNSKKTNTEFLHTKNNPKKDLKRSKTSNDPISEICSENSLNVDFLMLVGQSDDESINFDAWLRNYSQNNSKNYSLKYTKYTKKDTKKNAKKSSDAESEDSKDAKKDSKKVKKNVKKDDKKKDVKKDTESTDAESGDSKDERKDTKKDKKKLKKDDKKKDTKKYPESTDTESGDAKDARNDSRNLKKASKNDDKKKDAKKITFSTDSESELESKESQKDEKKDKKDSKTDNKKSVKNDEESTDADSEPKGDSKKGKKDEKKGKKDSKKDDKKKDAKKNAESTEMESDLELKKDKKHSKEKKGSKKDIKKDARKDTESTDAEFDESSKTGFKTSTKIKGSDTESEESLYKPGAKKKIDESDGTSANSKMEGLESKRGFRMSSKKTTFNEKGEKASTGRVPPSREKPPLPACEPSLPSPKVRRLCWCKMPPPPPKPRYAPLIQRRQRLGVRRCQLLM

SEQ ID NO: 42678 - protein, 361 aa, Homo sapiens
MQEKDASSQGFLPHFQHFATQAIHVGQDPEQWTSRAVVPPISLSTTFKQGAPGQHSGFEYSRSGNPTRNCLEKAVAALDGAKYCLAFASGLAATVTITHLLKAGDQIICMDDVYGGTNRYFRQVASEFGLKISFVDCSKIKLLEAAITPETKRPLALGADISMYSATKYMNGHSDVVMGLVSVNCESLHNRLRFLQNSLGAVPSPIDCYLCNRGLKTLHVRMEKHFKNGMAVAQFLESNPWVEKVIYPGLPSHPQHELVKRQCTGCTGMVTFYIKGTLQHAEIFLKNLKLFTLAESLGGFESLAELPAIMTHASVLKNDRDVLGISDTLIRLSVGLEDEEDLLEDLDQALKAAHPPSGSHS

SEQ ID NO: 42679 - protein, 405 aa, Homo sapiens
MQEKDASSQGFLPHFQHFATQAIHVGQDPEQWTSRAVVPPISLSTTFKQGAPGQHSGFEYSRSGNPTRNCLEKAVAALDGAKYCLAFASGLAATVTITHLLKAGDQIICMDDVYGGTNRYFRQVASEFGLKISFVDCSKIKLLEAAITPETKLVWIETPTNPTQKVIDIEGCAHIVHKHGDIILVVDNTFMSPYFQRPLALGADISMYSATKYMNGHSDVVMGLVSVNCESLHNRLRFLQNSLGAVPSPIDCYLCNRGLKTLHVRMEKHFKNGMAVAQFLESNPWVEKVIYPGLPSHPQHELVKRQCTGCTGMVTFYIKGTLQHAEIFLKNLKLFTLAESLGGFESLAELPAIMTHASVLKNDRDVLGISDTLIRLSVGLEDEEDLLEDLDQALKAAHPPSGSHS

SEQ ID NO: 42680 - protein, 373 aa, Homo sapiens
MQEKDASSQGFLPHFQHFATQAIHVGQDPEQWTSRAVVPPISLSTTFKQGAPGQHSGFEYSRSGNPTRNCLEKAVAALDGAKYCTNRYFRQVASEFGLKISFVDCSKIKLLEAAITPETKLVWIETPTNPTQKVIDIEGCAHIVHKHGDIILVVDNTFMSPYFQRPLALGADISMYSATKYMNGHSDVVMGLVSVNCESLHNRLRFLQNSLGAVPSPIDCYLCNRGLKTLHVRMEKHFKNGMAVAQFLESNPWVEKVIYPGLPSHPQHELVKRQCTGCTGMVTFYIKGTLQHAEIFLKNLKLFTLAESLGGFESLAELPAIMTHASVLKNDRDVLGISDTLIRLSVGLEDEEDLLEDLDQALKAAHPPSGSHS

SEQ ID NO: 42681 - protein, 551 aa, Homo sapiens
MPSETPQAEVGPTGCPHRSGPHSAKGSLEKGSPEDKEAKEPLWIRPDAPSRCTWQLGRPASESPHHHTAPAKSPKILPDILKKIGDTPMVRINKIGKKFGLKCELLAKCEFFNAGGSVKDRISLRMIEDAERDGTLKPGDTIIEPTSGNTGIGLALAAAVRGYRCIIVMPEKMSSEKVDVLRALGAEIVRTPTNARFDSPESHVGVAWRLKNEIPNSHILDQYRNASNPLAHYDTTADEILQQCDGKLDMLVASVGTGGTITGIARKLKEKCPGCRIIGVDPEGSILAEPEELNQTEQTTYEVEGIGYDFIPTVLDRTVVDKWFKSNDEEAFTFARMLIAQEGLLCGGSAGSTVAVAVKAAQELQEGQRCVVILPDSVRNYMTKFLSDRWMLQKGFLKEEDLTEKKPWWWHLRVQELGLSAPLTVLPTITCGHTIEILREKGFDQAPVVDEAGVILGMVTLGNMLSSLLAGKVQPSDQVGKVIYKQFKQIRLTDTLGRLSHILEMDHFALVVHEQIQYHSTGKSSQRQMVFGVVTAIDLLNFVAAQERDQK

SEQ ID NO: 42682 - protein, 551 aa, Homo sapiens; identical to SEQ ID NO: 42681

SEQ ID NO: 42683 - protein, 551 aa, Homo sapiens; identical to SEQ ID NO: 42681

SEQ ID NO: 42684 - protein, 551 aa, Homo sapiens; identical to SEQ ID NO: 42681

SEQ ID NO: 42685 - protein, 565 aa, Homo sapiens
MPSETPQAEVGPTGCPHRSGPHSAKGSLEKGSPEDKEAKEPLWIRPDAPSRCTWQLGRPASESPHHHTAPAKSPKILPDILKKIGDTPMVRINKIGKKFGLKCELLAKCEFFNAGGSVKDRISLRMIEDAERDGTLKPGDTIIEPTSGNTGIGLALAAAVRGYRCIIVMPEKMSSEKVDVLRALGAEIVRTPTNARFDSPESHVGVAWRLKNEIPNSHILDQYRNASNPLAHYDTTADEILQQCDGKLDMLVASVGTGGTITGIARKLKEKCPGCRIIGVDPEGSILAEPEELNQTEQTTYEVEGIGYDFIPTVLDRTVVDKWFKSNDEEAFTFARMLIAQEGLLCGGSAGSTVAVAVKAAQELQEGQRCVVILPDSVRNYMTKFLSDRWMLQKGFLKEEDLTEKKPWWWHLRVQELGLSAPLTVLPTITCGHTIEILREKGFDQAPVVDEAGVILGMVTLGNMLSSLLAGKVQPSDQVGKVIYKQFKQIRLTDTLGRLSHILEMDHFALVVHEQIQSQDQAWAGVVGGPADHSTGKSSQRQMVFGVVTAIDLLNFVAAQERDQK

SEQ ID NO: 42686 - protein, 177 aa, Homo sapiens
MPSETPQAEVGPTGCPHRSGPHSAKGSLEKGSPEDKEAKEPLWIRPDAPSRCTWQLGRPASESPHHHTAPAKSPKILPDILKKIGDTPMVRINKIGKKFGLKCELLAKCEFFNAGGSVKDRISLRMIEDAERDGTLKPGDTIIEPTSGNTGIGLALAAAVRGYRCIIVMPEKMSSEK

SEQ ID NO: 42687 - protein, 508 aa, Homo sapiens
MPSETPQAEVGPTGCPHRSGPHHHTAPAKSPKILPDILKKIGDTPMVRINKIGKKFGLKCELLAKCEFFNAGGSVKDRISLRMIEDAERDGTLKPGDTIIEPTSGNTGIGLALAAAVRGYRCIIVMPEKMSSEKVDVLRALGAEIVRTPTNARFDSPESHVGVAWRLKNEIPNSHILDQYRNASNPLAHYDTTADEILQQCDGKLDMLVASVGTGGTITGIARKLKEKCPGCRIIGVDPEGSILAEPEELNQTEQTTYEVEGIGYDFIPTVLDRTVVDKWFKSNDEEAFTFARMLIAQEGLLCGGSAGSTVAVAVKAAQELQEGQRCVVILPDSVRNYMTKFLSDRWMLQKGFLKEEDLTEKKPWWWHLRVQELGLSAPLTVLPTITCGHTIEILREKGFDQAPVVDEAGVILGMVTLGNMLSSLLAGKVQPSDQVGKVIYKQFKQIRLTDTLGRLSHILEMDHFALVVHEQIQYHSTGKSSQRQMVFGVVTAIDLLNFVAAQERDQK

SEQ ID NO: 42688 - protein, 463 aa, Homo sapiens [sequence omitted]

SEQ ID NO: 42689 - protein, 103 aa, Homo sapiens
MMAEPWQALQLLLAILLTLMALPYQARKKTFLSVHEVMAVENYAKDSLQWITDQYNKESDDKYHFRIFRVLKVQRQQVNCFFSVFAVPWFEQYKILNKSCSSD

SEQ ID NO: 42690 - protein, 138 aa, Homo sapiens
MMAEPWQALQLLLAILLTLMALPYQARKKTFLSVHEVMAVENYAKDSLQWITDQYNKESDDKYHFRIFRVLKVQRQVTDHLEYHLNVEMQWTTCQKPETTNCVPQERELHKQVNCFFSVFAVPWFEQYKILNKSCSSD

SEQ ID NO: 42691 - protein, 98 aa, Homo sapiens
MIPGGLSEAKPATPEIQEIVDKVKPQLEEKTNETYGKLEAVQYKTQVVAGTNYYIKVRAGDNKYMHLKVFKSLPGQNEDLVLTGYQVDKNKDDELTGF

SEQ ID NO: 42692 - protein, 98 aa, Homo sapiens
MMCGAPSATQPATAETQHIADQVRSQLEEKENKKFPVFKAVSFKSQVVAGTNYFIKVHVGDEDFVHLRVFQSLPHENKPLTLSNYQTNKAKHDELTYF

SEQ ID NO: 42693 - protein, 146 aa, Homo sapiens
MAGPLRAPLLLLAILAVALAVSPAAGSSPGKPPRLVGGPMDASVEEEGVRRALDFAVGEYNKASNDMYHSRALQVVRARKQIVAGVNYFLDVELGRTTCTKTQPNLDNCPFHDQPHLKRKAFCSFQIYAVPWQGTMTLSKSTCQDA

SEQ ID NO: 42694 - protein, 146 aa, Homo sapiens; identical to SEQ ID NO: 42693

SEQ ID NO: 42695 - protein, 146 aa, Homo sapiens; identical to SEQ ID NO: 42693

SEQ ID NO: 42696 - protein, 142 aa, Homo sapiens
MMWPMHTPLLLLTALMVAVAGSASAQSRTLAGGIHATDLNDKSVQCALDFAISEYNKVINKDEYYSRPLQVMAAYQQIVGGVNYYFNVKFGRTTCTKSQPNLDNCPFNDQPKLKEEEFCSFQINEVPWEDKISILNYKCRKV

SEQ ID NO: 42697 - protein, 141 aa, Homo sapiens
MARPLCTLLLLMATLAGALASSSKEENRIIPGGIYDADLNDEWVQRALHFAISEYNKATEDEYYRRPLQVLRAREQTFGGVNYFFDVEVGRTICTKSQPNLDTCAFHEQPELQKKQLCSFEIYEVPWEDRMSLVNSRCQEA

SEQ ID NO: 42698 - protein, 141 aa, Homo sapiens
MAWPLCTLLLLLATQAVALAWSPQEEDRIIEGGIYDADLNDERVQRALHFVISEYNKATEDEYYRRLLRVLRAREQIVGGVNYFFDIEVGRTICTKSQPNLDTCAFHEQPELQKKQLCSFQIYEVPWEDRMSLVNSRCQEA

SEQ ID NO: 42699 - protein, 141 aa, Homo sapiens
MAQYLSTLLLLLATLAVALAWSPKEEDRIIPGGIYNADLNDEWVQRALHFAISEYNKATKDDYYRRPLRVLRARQQTVGGVNYFFDVEVGRTICTKSQPNLDTCAFHEQPELQKKQLCSFEIYEVPWENRRSLVKSRCQES

SEQ ID NO: 42700 - protein, 141 aa, Homo sapiens; identical to SEQ ID NO: 42699

SEQ ID NO: 42701 - protein, 193 aa, Homo sapiens
MPNWGGGKKCGVCQKTVYFAEEVQCEGNSFHKSCFLCMVCKKNLDSTTVAVHGEEIYCKSCYGKKYGPKGYGYGQGAGTLSTDKGESLGIKHEEAPGHRPTTNPNASKFAQKIGGSERCPRCSQAVYAAEKVIGAGKSWHKACFRCAKCGKGLESTTLADKDGEIYCKGCYAKNFGPKGFGFGQGAGALVHSE

SEQ ID NO: 42702 - protein, 193 aa, Homo sapiens; identical to SEQ ID NO: 42701

SEQ ID NO: 42703 - protein, 193 aa, Homo sapiens; identical to SEQ ID NO: 42701

SEQ ID NO: 42704 - protein, 193 aa, Homo sapiens; identical to SEQ ID NO: 42701

SEQ ID NO: 42705 - protein, 170 aa, Homo sapiens
MPNWGGGKKCGVCQKTVYFAEEVQCEGNSFHKSCFLCMVCKKNLDSTTVAVHGEEIYCKSCYGKKYGPKGYGYGQGAGTNPNASKFAQKIGGSERCPRCSQAVYAAEKVIGAGKSWHKACFRCAKCGKGLESTTLADKDGEIYCKGCYAKNFGPKGFGFGQGAGALVHSE

SEQ ID NO: 42706 - protein, 193 aa, Homo sapiens
MPVWGGGNKCGACGRTVYHAEEVQCDGRSFHRCCFLCMVCRKNLDSTTVAIHDEEIYCKSCYGKKYGPKGYGYGQGAGTLNMDRGERLGIKPESVQPHRPTTNPNTSKFAQKYGGAEKCSRCGDSVYAAEKIIGAGKPWHKNCFRCAKCGKSLESTTLTEKEGEIYCKGCYAKNFGPKGFGYGQGAGALVHAQ

SEQ ID NO: 42707 - protein, 193 aa, Homo sapiens; identical to SEQ ID NO: 42706

SEQ ID NO: 42708 - protein, 194 aa, Homo sapiens
MPNWGGGAKCGACEKTVYHAEEIQCNGRSFHKTCFHCMACRKALDSTTVAAHESEIYCKVCYGRRYGPKGIGYGQGAGCLSTDTGEHLGLQFQQSPKPARSVTTSNPSKFTAKFGESEKCPRCGKSVYAAEKVMGGGKPWHKTCFRCAICGKSLESTNVTDKDGELYCKVCYAKNFGPTGIGFGGLTQQVEKKE

SEQ ID NO: 42709 - protein, 194 aa, Homo sapiens; identical to SEQ ID NO: 42708

SEQ ID NO: 42710 - protein, 454 aa, Homo sapiens
MFLAQRSLCSLSGRAKFLKTISSSKILGFSTSAKMSLKFTNAKRIEGLDSNVWIEFTKLAADPSVVNLGQGFPDISPPTYVKEELSKIAAIDSLNQYTRGFGHPSLVKALSYLYEKLYQKQIDSNKEILVTVGAYGSLFNTIQALIDEGDEVILIVPFYDCYEPMVRMAGATPVFIPLRSKPVYGKRWSSSDWTLDPQELESKFNSKTKAIILNTPHNPLGKVYNREELQVIADLCIKYDTLCISDEVYEWLVYSGNKHLKIATFPGMWERTITIGSAGKTFSVTGWKLGWSIGPNHLIKHLQTVQQNTIYTCATPLQEALAQAFWIDIKRMDDPECYFNSLPKELEVKRDRMVRLLESVGLKPIVPDGGYFIIADVSLLDPDLSDMKNNEPYDYKFVKWMTKHKKLSAIPVSAFCNSETKSQFEKFVRFCFIKKDSTLDAAEEIIKAWSVQKS

SEQ ID NO: 42711 - protein, 167 aa, Homo sapiens
MFLAQRSLCSLSGRAKFLKTISSSKILGFSTSAKMSLKFTNAKRIEGLDSNVWIEFTKLAADPSVVNLGQGFPDISPPTYVKEELSKIAAIDSLNQYTRGFGHPSLVKALSYLYEKLYQKQIDSNKEILVTVGAYGSLFNTIQALIDEGDEYNACTVKFTNLKCTAG

SEQ ID NO: 42712 - protein, 262 aa, Homo sapiens
MFLAQRSLCSLSGRAKFLKTISSSKILGFSTSAKMSLKFTNAKRIEGLDSNVWIEFTKLAADPSVVNLGQGFPDISPPTYVKEELSKIAAIDSLNQYTRGFGHPSLVKALSYLYEKLYQKQIDSNKEILVTVGAYGSLFNTIQALIDEGDEVILIVPFYDCYEPMVRMAGATPVFIPLRSKPVYGKRWSSSDWTLDPQELESKFNSKTKAIILNTPHNPLGKVYNREELQVIADLCIKYDTLCISDEVYEWLVYSGNKHLKI

SEQ ID NO: 42713 - protein, 420 aa, Homo sapiens
MSLKFTNAKRIEGLDSNVWIEFTKLAADPSVVNLGQGFPDISPPTYVKEELSKIAAIDSLNQYTRGFGHPSLVKALSYLYEKLYQKQIDSNKEILVTVGAYGSLFNTIQALIDEGDEVILIVPFYDCYEPMVRMAGATPVFIPLRSKPVYGKRWSSSDWTLDPQELESKFNSKTKAIILNTPHNPLGKVYNREELQVIADLCIKYDTLCISDEVYEWLVYSGNKHLKIATFPGMWERTITIGSAGKTFSVTGWKLGWSIGPNHLIKHLQTVQQNTIYTCATPLQEALAQAFWIDIKRMDDPECYFNSLPKELEVKRDRMVRLLESVGLKPIVPDGGYFIIADVSLLDPDLSDMKNNEPYDYKFVKWMTKHKKLSAIPVSAFCNSETKSQFEKFVRFCFIKKDSTLDAAEEIIKAWSVQKS

SEQ ID NO: 42714 - protein, 422 aa, Homo sapiens
MAKQLQARRLDGIDYNPWVEFVKLASEHDVVNLGQGFPDFPPPDFAVEAFQHAVSGDFMLNQYTKTFGYPPLTKILASFFGELLGQEIDPLRNVLVTVGGYGALFTAFQALVDEGDEVIIIEPFFDCYEPMTMMAGGRPVFVSLKPGPIQNGELGSSSNWQLDPMELAGKFTSRTKALVLNTPNNPLGKVFSREELELVASLCQQHDVVCITDEVYQWMVYDGHQHISIASLPGMWERTLTIGSAGKTFSATGWKVGWVLGPDHIMKHLRTVHQNSVFHCPTQSQAAVAESFEREQLLFRQPSSYFVQFPQAMQRCRDHMIRSLQSVGLKPIIPQGSYFLITDISDFKRKMPDLPGAVDEPYDRRFVKWMIKNKGLVAIPVSIFYSVPHQKHFDHYIRFCFVKDEATLQAMDEKLRKWKVEL

SEQ ID NO: 42715 - protein, 372 aa, Homo sapiens
MAKQLQARRLDGIDYNPWVEFVKLASEHDVVNLGQGFPDFPPPDFAVEAFQHAVSGDFMLNQYTKTFVIIIEPFFDCYEPMTMMAGGRPVFVSLKPGPIQNGELGSSSNWQLDPMELAGKFTSRTKALVLNTPNNPLGKVFSREELELVASLCQQHDVVCITDEVYQWMVYDGHQHISIASLPGMWERTLTIGSAGKTFSATGWKVGWVLGPDHIMKHLRTVHQNSVFHCPTQSQAAVAESFEREQLLFRQPSSYFVQFPQAMQRCRDHMIRSLQSVGLKPIIPQGSYFLITDISDFKRKMPDLPGAVDEPYDRRFVKWMIKNKGLVAIPVSIFYSVPHQKHFDHYIRFCFVKDEATLQAMDEKLRKWKVEL

SEQ ID NO: 42716 - protein, 159 aa, Homo sapiens
AMAKQLQARRLDGIDYNPWVEFVKLASEHDVVNLGQGFPDFPPPDFAVEAFQHAVSGDFMLNQYTKTFVSLCYPGWSAMVRSWSTAALTLPVSSGPPTSASGVTGTTGWSQSWLESSFFDPKKKKIIWGYPPLTKILASFFGELLGQEIDPLRNVLVTV

SEQ ID NO: 42717 - protein, 184 aa, Homo sapiens
MAKQLQARRLDGIDYNPWVEFVKLASEHDVVNLGQGFPDFPPPDFAVEAFQHAVSGDFMLNQYTKTFGYPPLTKILASFFGELLGQEIDPLRNVLVTVGGYGALFTAFQALVDEGDEVIIIEPFFDCYEPMTMMAGGRPVFVSLKPGPIQNGELGSSSNWQLDPMELAGKFTSRTKALVLNTPN

SEQ ID NO: 42718 - protein, 159 aa, Homo sapiens; identical to SEQ ID NO: 42716

SEQ ID NO: 42719 - protein, 516 aa, Homo sapiens
MFRTAAAISVHLVGPLQGRKAGAPLTWFLHQTQVAEKNVGSPAPRPTSHLGLANPQERKVPQGPQSPCEVPAAEGILRTGGAKLPIQGHPAKLAMAKQLQARRLDGIDYNPWVEFVKLASEHDVVNLGQGFPDFPPPDFAVEAFQHAVSGDFMLNQYTKTFGYPPLTKILASFFGELLGQEIDPLRNVLVTVGGYGALFTAFQALVDEGDEVIIIEPFFDCYEPMTMMAGGRPVFVSLKPGPIQNGELGSSSNWQLDPMELAGKFTSRTKALVLNTPNNPLGKVFSREELELVASLCQQHDVVCITDEVYQWMVYDGHQHISIASLPGMWERTLTIGSAGKTFSATGWKVGWVLGPDHIMKHLRTVHQNSVFHCPTQSQAAVAESFEREQLLFRQPSSYFVQFPQAMQRCRDHMIRSLQSVGLKPIIPQGSYFLITDISDFKRKMPDLPGAVDEPYDRRFVKWMIKNKGLVAIPVSIFYSVPHQKHFDHYIRFCFVKDEATLQAMDEKLRKWKVEL

SEQ ID NO: 42720 - protein, 251 aa, Homo sapiens
MAKQLQARRLDGIDYNPWVEFVKLASEHDVVNLGQGFPDFPPPDFAVEAFQHAVSGDFMLNQYTKTFGYPPLTKILASFFGELLGQEIDPLRNVLVTVGGYGALFTAFQALVDEGDEVIIIEPFFDCYEPMTMMAGGRPVFVSLKPGPIQNGELGSSSNWQLDPMELAGKFTSRTKALVLNTPNNPLGKVFSREELELVASLCQQHDVVCITDEVYQWMVYDGHQHISIASLPGMWERTLTIGSAGKTFSA

SEQ ID NO: 42721 - protein, 200 aa, Homo sapiens
MEQTEVLKPRTLADLIRILHQLFAGDEVNVEEVQAIMEAYESDPTEWAMYAKFDQYRYTRNLVDQGNGKFNLMILCWGEGHGSSIHDHTNSHCFLKMLQGNLKETLFAWPDKKSNEMVKKSERVLRENQCAYINDSIGLHRVENISHTEPAVSLHLYSPPFDTCHAFDQRTGHKNKVTMTFHSKFGIRTPNATSGSLENN

SEQ ID NO: 42722 - protein, 1036 aa, Homo sapiens
MYLVAGDRGLAGCGHLLVSLLGLLLLLARSGTRALVCLPCDESKCEEPRNCPGSIVQGVCGCCYTCASQRNESCGGTFGIYGTCDRGLRCVIRPPLNGDSLTEYEAGVCEDENWTDDQLLGFKPCNENLIAGCNIINGKCECNTIRTCSNPFEFPSQDMCLSALKRIEEEKPDCSKARCEVQFSPRCPEDSVLIEGYAPPGECCPLPSRCVCNPAGCLRKVCQPGNLNILVSKASGKPGECCDLYECKPVFGVDCRTVECPPVQQTACPPDSYETQVRLTADGCCTLPTRCECLSGLCGFPVCEVGSTPRIVSRGDGTPGKCCDVFECVNDTKPACVFNNVEYYDGDMFRMDNCRFCRCQGGVAICFTAQCGEINCERYYVPEGECCPVCEDPVYPFNNPAGCYANGLILAHGDRWREDDCTFCQCVNGERHCVATVCGQTCTNPVKVPGECCPVCEEPTIITVDPPACGELSNCTLTGKDCINGFKRDHNGCRTCQCINTEELCSERKQGCTLNCPFGFLTDAQNCEICECRPRPKKCRPIICDKYCPLGLLKNKHGCDICRCKKCPELSCSKICPLGFQQDSHGCLICKCREASASAGPPILSGTCLTVDGHHHKNEESWHDGCRECYCLNGREMCALITCPVPACGNPTIHPGQCCPSCADDFVVQKPELSTPSICHAPGGEYFVEGETWNIDSCTQCTCHSGRVLCETEVCPPLLCQNPSRTQDSCCPQCTDQPFRPSLSRNNSVPNYCKNDEGDIFLAAESWKPDVCTSCICIDSVISCFSESCPSVSCERPVLRKGQCCPYCIEDTIPKKVVCHFSGKAYADEERWDLDSCTHCYCLQGQTLCSTVSCPPLPCVEPINVEGSCCPMCPEMYVPEPTNIPIEKTNHRGEVDLEVPLWPTPSENDIVHLPRDMGHLQVDYRDNRLHPSEDSSLDSIASVVVPIIICLSIIIAFLFINQKKQWIPLLCWYRTPTKPSSLNNQLVSVDCKKGTRVQVDSSQRMLRIAEPDARFSGFYSMQKQNHLQADNFYQTV

SEQ ID NO: 42723 - protein, 165 aa, Homo sapiens
MADFDEIYEEEEDEERALEEQLLKYSPDPVVVRGSGHVTVFGLSNKFESEFPSSLTGKVAPEEFKASINRVNSCLKKNLPVNVRWLLCGCLCCCCTLGCSMWPVICLSKRTRRSIEKLLEWENNRLYHKLCLHWRLSKRKCETNNMMEYVILIEFLPKTPIFRPD

SEQ ID NO: 42724 - protein, 77 aa, Homo sapiens
MPKCPKCNKEVYFAERVTSLGKDWHRPCLKCEKCGKTLTSGGHAEHEGKPYCNHPCYAAMFGPKGFGRGGAESHTFK

SEQ ID NO: 42725 - protein, 77 aa, Homo sapiens; identical to SEQ ID NO: 42724

SEQ ID NO: 42726 - protein, 77 aa, Homo sapiens; identical to SEQ ID NO: 42724

SEQ ID NO: 42727 - protein, 208 aa, Homo sapiens
MASKCPKCDKTVYFAEKVSSLGKDWHKFCLKCERCSKTLTPGGHAEHDGKPFCHKPCYATLFGPKGVNIGGAGSYIYEKPLAEGPQVTGPIEVPAARAEERKASGPPKGPSRASSVTTFTGEPNTCPRCSKKVYFAEKVTSLGKDWHRPCLRCERCGKTLTPGGHAEHDGQPYCHKPCYGILFGPKGVNTGAVGSYIYDRDPEGKVQP

SEQ ID NO: 42728 - protein, 282 aa, Homo sapiens
MPPHHLLPWLAQVPSAEGELVRLVSRAGGRGACFWPAVTMEMAVAAGCVCKGGGCCHREPSQDHHESQEHRGPLVGSQTCLVHQAEGTAEKVSSLGKDWHKFCLKCERCSKTLTPGGHAEHDGKPFCHKPCYATLFGPKGVNIGGAGSYIYEKPLAEGPQVTGPIEVPAARAEERKASGPPKGPSRASSVTTFTGEPNTCPRCSKKVYFAEKVTSLGKDWHRPCLRCERCGKTLTPGGHAEHDGQPYCHKPCYGILFGPKGVNTGAVGSYIYDRDPEGKVQP

SEQ ID NO: 42729 - protein, 104 aa, Homo sapiens
  VARIANT 1: note = MOD_RES - Any amino acid
XPGGERAEGAGRPGAPTMASKCPKCDKTVYFAEKVTSLGKDWHRPCLRCERCGKTLTPGGHAEHDGQPYCHKPCYGILFGPKGVNTGAVGSYIYDRDPEGKVQP

SEQ ID NO: 42730 - protein, 178 aa, Homo sapiens
MEIKHLLFLVAAACLLPMLSMKKKSARDQFNKLVTDLPNVQEEIVNIHNALRRRVVPPASNMLKMSWSEEAAQNARIFSKYCDMTESNPLERRLPNTFCGENMHMTSYPVSWSSVIGVWYSESTSFKHGEWTTTDDDITTDHYTQIVWATSYLIGCAIASCRQQGSPRYLYVCHYCHD

SEQ ID NO: 42731 - protein, 249 aa, Homo sapiens
MEIKHLLFLVAAACLLPMLSMKKKSARDQFNKLVTDLPNVQEEIVNIHNALRRRVVPPASNMLKMSWSEEAAQNARIFSKYCDMTESNPLERRLPNTFCGENMHMTSYPVSWSSVIGVWYSESTSFKHGEWTTTDDDITTDHYTQIVWATSYLIGCAIASCRQQGSPRYLYVCHYCHEGNDPETKNEPYKTGVPCEACPSNCEDKLCTNPCIYYDEYFDCDIQVHYLGCNHSTTILFCKATCLCDTEIK

SEQ ID NO: 42732 - protein, 249 aa, Homo sapiens; identical to SEQ ID NO: 42731

SEQ ID NO: 42733 - protein, 249 aa, Homo sapiens; identical to SEQ ID NO: 42731

SEQ ID NO: 42734 - protein, 178 aa, Homo sapiens; identical to SEQ ID NO: 42730

SEQ ID NO: 42735 - protein, 178 aa, Homo sapiens; identical to SEQ ID NO: 42730

SEQ ID NO: 42736 - protein, 278 aa, Homo sapiens
MALLPVLFLVTVLLPSLPAEGKDPAFTALLTTQLQVQREIVNKHNELRKAVSPPASNMLKMEWSREVTTNAQRWANKCTLQHSDPEDRKTSTRCGENLYMSSDPTSWSSAIQSWYDEILDFVYGVGPKSPNAVVGHYTQLVWYSTYQVGCGIAYCPNQDSLKYYYVCQYCPAMKTYLNKREGINVWKCFLRLRHFQLLRGEQLLTFSGNNMNRKNTPYQQGTPCAGCPDDCDKGLCTNSCQYQDLLSNCDSLKNTAGCEHELLKEKCKATCLCENKIY

SEQ ID NO: 42737 - protein, 243 aa, Homo sapiens
MALLPVLFLVTVLLPSLPAEGKDPAFTALLTTQLQVQREIVNKHNELRKAVSPPASNMLKMEWSREVTTNAQRWANKCTLQHSDPEDRKTSTRCGENLYMSSDPTSWSSAIQSWYDEILDFVYGVGPKSPNAVVGHYTQLVWYSTYQVGCGIAYCPNQDSLKYYYVCQYCPAGNNMNRKNTPYQQGTPCAGCPDDCDKGLCTNSCQYQDLLSNCDSLKNTAGCEHELLKEKCKATCLCENKIY

SEQ ID NO: 42738 - protein, 497 aa, Homo sapiens
MSCVLGGVIPLGLLFLVCGSQGYLLPNVTLLEELLSKYQHNESHSRVRRAIPREDKEEILMLHNKLRGQVQPQASNMEYMTWDDELEKSAAAWASQCIWEHGPTSLLVSIGQNLGAHWGRYRSPGFHVQSWYDEVKDYTYPYPSECNPWCPERCSGPMCTHYTQIVWATTNKIGCAVNTCRKMTVWGEVWENAVYFVCNYSPKGNWIGEAPYKNGRPCSECPPSYGGSCRNNLCYREETYTPKPETDEMNEVETAPIPEENHVWLQPRVMRPTKPKKTSAVNYMTQVVRCDTKMKDRCKGSTCNRYQCPAGCLNHKAKIFGTLFYESSSSICRAAIHYGILDDKGGLVDITRNGKVPFFVKSERHGVQSLSKYKPSSSFMVSKVKVQDLDCYTTVAQLCPFEKPATHCPRIHCPAHCKDEPSYWAPVFGTNIYADTSSICKTAVHAGVISNESGGDVDVMPVDKKKTYVGSLRNGVQSESLGTPRDGKAFRIFAVRQ

SEQ ID NO: 42739 - protein, 422 aa, Homo sapiens
MAPWPPKGLVPAMLWGLSLFLNLPGPIWLQPSPPPQSSPPPQPHPCHTCRGLVDSFNKGLERTIRDNFGGGNTAWEEENLSKYKDSETRLVEVLEGVCSKSDFECHRLLELSEELVESWWFHKQQEAPDLFQWLCSDSLKLCCPAGTFGPSCLPCPGGTERPCGGYGQCEGEGTRGGSGHCDCQAGYGGEACGQCGLGYFEAERNASHLVCSACFGPCARCSGPEESNCLQCKKGWALHHLKCVDIDECGTEGANCGADQFCVNTEGSYECRDCAKACLGCMGAGPGRCKKCSPGYQQVGSKCLDVDECETEVCPGENKQCENTEGGYRCICAEGYKQMEGICVKEQIPGAFPILTDLTPETTRRWKLGSHPHSTYVKMKMQRDEATFPGLYGKQVAKLGSQSRQSDRGTRLIHSQQASSQR

SEQ ID NO: 42740 - protein, 420 aa, Homo sapiens
MAPWPPKGLVPAMLWGLSLFLNLPGPIWLQPSPPPQSSPPPQPHPCHTCRGLVDSFNKGLERTIRDNFGGGNTAWEEENLSKYKDSETRLVEVLEGVCSKSDFECHRLLELSEELVESWWFHKQQEAPDLFQWLCSDSLKLCCPAGTFGPSCLPCPGGTERPCGGYGQCEGEGTRGGSGHCDCQAGYGGEACGQCGLGYFEAERNASHLVCSACFGPCARCSGPEESNCLQCKKGWALHHLKCVDIDECGTEGANCGADQFCVNTEGSYECRDCAKACLGCMGAGPGRCKKCSPGYQQVGSKCLDVDECETEVCPGENKQCENTEGGYRCICAEGYKQMEGICVKEQIPESAGFFSEMTEDELVVLQQMFFGIIICALATLAAKGDLVFTAIFIGAVAAMTGYWLSERSDRVLEGFIKGR

SEQ ID NO: 42741 - protein, 420 aa, Homo sapiens; identical to SEQ ID NO: 42740

SEQ ID NO: 42742 - protein, 420 aa, Homo sapiens; identical to SEQ ID NO: 42740

SEQ ID NO: 42743 - protein, 379 aa, Homo sapiens
MSSRIARALALVVTLLHLTRLALSTCPAACHCPLEAPKCAPGVGLVRDGCGCCKVCAKQLNEDCSKTQPCDHTKGLECNFGASSTALKGICRAQSEGRPCEYNSRIYQNGESFQPNCKHQCTCIDGAVGCIPLCPQELSLPNLGCPNPRLVKVTGQCCEEWVCDEDSIKDPMEDQDGLLGKELGFDASEVELTRNNELIAVGKGSSLKRLPVFGMEPRILYNPLQGQKCIVQTTSWSQCSKTCGTGISTRVTNDNPECRLVKETRICEVRPCGQPVYSSLKKGKKCSKTKKSPEPVRFTYAGCLSVKKYRPKYCGSCVDGRCCTPQLTRCEDAVPLRRWGDIFQERHDDPVKCNYNCPHANEAAFPFYRLFNDIHKFRD

SEQ ID NO: 42744 - protein, 381 aa, Homo sapiens [sequence omitted]

SEQ ID NO: 42745 - protein, 357 aa, Homo sapiens
MSSRIARALALVVTLLHLTRLALSTCGCCKVCAKQLNEDCSKTQPCDHTKGLECNFGASSTALKGICRAQSEGRPCEYNSRIYQNGESFQPNCKHQCTCIDGAVGCIPLCPQELSLPNLGCPNPRLVKVTGQCCEEWVCDEDSIKDPMEDQDGLLGKELGFDASEVELTRNNELIAVGKGSSLKRLPVFGMEPRILYNPLQGQKCIVQTTSWSQCSKTCGTGISTRVTNDNPECRLVKETRICEVRPCGQPVYSSLKKGKKCSKTKKSPEPVRFTYAGCLSVKKYRPKYCGSCVDGRCCTPQLTRTVKMRFRCEDGETFSKNVMMIQSCKCNYNCPHANEAAFPFYRLFNDIHKFRD

SEQ ID NO: 42746 - protein, 337 aa, Homo sapiens
MDETGNLTVSSATCHDTIDDFRNQVYSTLYSMISVVGFFGNGFVLYVLIKTYHKKSAFQVYMINLAVADLLCVCTLPLRVVYYVHKGIWLFGDFLCRLSTYALYVNLYCSIFFMTAMSFFRCIAIVFPVQNINLVTQKKARFVCVGIWIFVILTSSPFLMAKPQKDEKNNTKCFEPPQDNQTKNHVLVLHYVSLFVGFIIPFVIIIVCYTMIILTLLKKSMKKNLSSHKKAIGMIMVVTAAFLVSFMPYHIQRTIHLHFLHNETKPCDSVLRMQKSVVITLSLAASNCCFDPLLYFFSGGNFRKRLSTFRKHSLSSVTYVPRKKASLPEKGEEICKV

SEQ ID NO: 42747 - protein, 346 aa, Homo sapiens
MERKFMSLQPSISVSEMEPNGTFSNNNSRNCTIENFKREFFPIVYLIIFFWGVLGNGLSIYVFLQPYKKSTSVNVFMLNLAISDLLFISTLPFRADYYLRGSNWIFGDLACRIMSYSLYVNMYSSIYFLTVLSVVRFLAMVHPFRLLHVTSIRSAWILCGIIWILIMASSIMLLDSGSEQNGSVTSCLELNLYKIAKLQTMNYIALVVGCLLPFFTLSICYLLIIRVLLKVEVPESGLRVSHRKALTTIIITLIIFFLCFLPYHTLRTVHLTTWKVGLCKDRLHKALVITLALAAANACFNPLLYYFAGENFKDRLKSALRKGHPQKAKTKCVFPVSVWLRKETRV

SEQ ID NO: 42748 - protein, 726 aa, Homo sapiens
MADSSGQQGKGRRVQPQWSPPAGTQPCRLHLYNSLTRNKEVFIPQDGKKVTWYCCGPTVYDASHMGHARSYISFDILRRVLKDYFKFDVFYCMNITDIDDKIIKRARQNHLFEQYREKRPEAAQLLEDVQAALKPFSVKLNETTDPDKKQMLERIQHAVQLATEPLEKAVQSRLTGEEVNSCVEVLLEEAKDLLSDWLDSTLGCDVTDNSIFSKLPKFWEGDFHRDMEALNVLPPDVLTRVSEYVPEIVNFVQKIVDNGYGYVSNGSVYFDTAKFASSEKHSYGKLVPEAVGDQKALQEGEGDLSISADRLSEKRSPNDFALWKASKPGEPSWPCPWGKGRPGWHIECSAMAGTLLGASMDIHGGGFDLRFPHHDNELAQSEAYFENDCWVRYFLHTGHLTIAGCKMSKSLKNFITIKDALKKHSARQLRLAFLMHSWKDTLDYSSNTMESALQYEKFLNEFFLNVKDILRAPVDITGQFEKWGEEEAELNKNFYDKKTAIHKALCDNVDTRTVMEEMRALVSQCNLYMAARKAVRKRPNQALLENIALYLTHMLKIFGAVEEDSSLGFPVGGPGTSLSLEATVMPYLQVLSEFREGVRKIAREQKVPEILQLSDALRDNILPELGVRFEDHEGLPTVVKLVDRNTLLKEREEKRRVEEEKRKKKEEAARRKQEQEAAKLAKMKIPPSEMFLSETDKYSKFDENVSMVCPHMTWRAKSSAKGKPRS

SEQ ID NO: 42749 - protein, 831 aa, Homo sapiens
MADSSGQQAPDYRSILSISDEAARAQALNEHLSTRSYVQGYSLSQADVDAFRQLSAPPADPQLFHVARWFRHIEALLGSPCGKGQPCRLQASKGRRVQPQWSPPAGTQPCRLHLYNSLTRNKEVFIPQDGKKVTWYCCGPTVYDASHMGHARSYISFDILRRVLKDYFKFDVFYCMNITDIDDKIIKRARQNHLFEQYREKRPEAAQLLEDVQAALKPFSVKLNETTDPDKKQMLERIQHAVQLATEPLEKAVQSRLTGEEVNSCVEVLLEEAKDLLSDWLDSTLGCDVTDNSIFSKLPKFWEGDFHRDMEALNVLPPDVLTRVSEYVPEIVNFVQKIVDNGYGYVSNGSVYFDTAKFASSEKHSYGKLVPEAVGDQKALQEGEGDLSISADRLSEKRSPNDFALWKASKPGEPSWPCPWGKGRPGWHIECSAMAGTLLGASMDIHGGGFDLRFPHHDNELAQSEAYFENDCWVRYFLHTGHLTIAGCKMSKSLKNFITIKDALKKHSARQLRLAFLMHSWKDTLDYSSNTMESALQYEKFLNEFFLNVKDILRAPVDITGQFEKWGEEEAELNKNFYDKKTAIHKALCDNVDTRTVMEEMRALVSQCNLYMAARKAVRKRPNQALLENIALYLTHMLKIFGAVEEDSSLGFPVGGPGTSLSLEATVMPYLQVLSEFREGVRKIAREQKVPEILQLSDALRDNILPELGVRFEDHEGLPTVVKLVDRNTLLKEREEKRRVEEEKRKKKEEAARRKQEQEAAKLAKMKIPPSEMFLSETDKYSKFDENGLPTHDMEGKELSKGQAKKLKKLFEAQEKLYKEYLQMAQNGSFQ

SEQ ID NO: 42750 - protein, 748 aa, Homo sapiens
MADSSGQQGKGRRVQPQWSPPAGTQPCRLHLYNSLTRNKEVFIPQDGKKVTWYCCGPTVYDASHMGHARSYISFDILRRVLKDYFKFDVFYCMNITDIDDKIIKRARQNHLFEQYREKRPEAAQLLEDVQAALKPFSVKLNETTDPDKKQMLERIQHAVQLATEPLEKAVQSRLTGEEVNSCVEVLLEEAKDLLSDWLDSTLGCDVTDNSIFSKLPKFWEGDFHRDMEALNVLPPDVLTRVSEYVPEIVNFVQKIVDNGYGYVSNGSVYFDTAKFASSEKHSYGKLVPEAVGDQKALQEGEGDLSISADRLSEKRSPNDFALWKASKPGEPSWPCPWGKGRPGWHIECSAMAGTLLGASMDIHGGGFDLRFPHHDNELAQSEAYFENDCWVRYFLHTGHLTIAGCKMSKSLKNFITIKDALKKHSARQLRLAFLMHSWKDTLDYSSNTMESALQYEKFLNEFFLNVKDILRAPVDITGQFEKWGEEEAELNKNFYDKKTAIHKALCDNVDTRTVMEEMRALVSQCNLYMAARKAVRKRPNQALLENIALYLTHMLKIFGAVEEDSSLGFPVGGPGTSLSLEATVMPYLQVLSEFREGVRKIAREQKVPEILQLSDALRDNILPELGVRFEDHEGLPTVVKLVDRNTLLKEREEKRRVEEEKRKKKEEAARRKQEQEAAKLAKMKIPPSEMFLSETDKYSKFDENGLPTHDMEGKELSKGQAKKLKKLFEAQEKLYKEYLQMAQNGSFQ

SEQ ID NO: 42751 - protein, 738 aa, Homo sapiens
MQTPPLQQPHQEQVFLAFLVIVIPSFLTKEVFIPQDGKKVTWYCCGPTVYDASHMGHARSYISFDILRRVLKDYFKFDVFYCMNITDIDDKIIKRARQNHLFEQYREKRPEAAQLLEDVQAALKPFSVKLNETTDPDKKQMLERIQHAVQLATEPLEKAVQSRLTGEEVNSCVEVLLEEAKDLLSDWLDSTLGCDVTDNSIFSKLPKFWEGDFHRDMEALNVLPPDVLTRVSEYVPEIVNFVQKIVDNGYGYVSNGSVYFDTAKFASSEKHSYGKLVPEAVGDQKALQEGEGDLSISADRLSEKRSPNDFALWKASKPGEPSWPCPWGKGRPGWHIECSAMAGTLLGASMDIHGGGFDLRFPHHDNELAQSEAYFENDCWVRYFLHTGHLTIAGCKMSKSLKNFITIKDALKKHSARQLRLAFLMHSWKDTLDYSSNTMESALQYEKFLNEFFLNVKDILRAPVDITGQFEKWGEEEAELNKNFYDKKTAIHKALCDNVDTRTVMEEMRALVSQCNLYMAARKAVRKRPNQALLENIALYLTHMLKIFGAVEEDSSLGFPVGGPGTSLSLEATVMPYLQVLSEFREGVRKIAREQKVPEILQLSDALRDNILPELGVRFEDHEGLPTVVKLVDRNTLLKEREEKRRVEEEKRKKKEEAARRKQEQEAAKLAKMKIPPSEMFLSETDKYSKFDENGLPTHDMEGKELSKGQAKKLKKLFEAQEKLYKEYLQMAQNGSFQ

SEQ ID NO: 42752 - protein, 739 aa, Homo sapiens
MEPTSGPFRTDLGYHLVGCSSGKGRRVQPQWSPPAGTQPCRLHLYNSLTRNKEVFIPQDGKKVTWYCCGPTVYDASHMGHARSYISFDILRRVLKDYFKFDVFYCMNITDIDDKIIKRARQNHLFEQYREKRPEAAQLLEDVQAALKPFSVKLNETTDPDKKQMLERIQHAVQLATEPLEKAVQSRLTGEEVNSCVEVLLEEAKDLLSDWLDSTLGCDVTDNSIFSKLPKFWEGDFHRDMEALNVLPPDVLTRVSEYVPEIVNFVQKIVDNGYGYVSNGSVYFDTAKFASSEKHSYGKLVPEAVGDQKALQEGEGDLSISADRLSEKRSPNDFALWKASKPGEPSWPCPWGKGRPGWHIECSAMAGTLLGASMDIHGGGFDLRFPHHDNELAQSEAYFENDCWVRYFLHTGHLTIAGCKMSKSLKNFITIKDALKKHSARQLRLAFLMHSWKDTLDYSSNTMESALQYEKFLNEFFLNVKDILRAPVDITGQFEKWGEEEAELNKNFYDKKTAIHKALCDNVDTRTVMEEMRALVSQCNLYMAARKAVRKRPNQALLENIALYLTHMLKIFGAVEEDSSLGFPVGGPGTSLSLEATVMPYLQVLSEFREGVRKIAREQKVPEILQLSDALRDNILPELGVRFEDHEGLPTVVKLVDRNTLLKEREEKRRVEEEKRKKKEEAARRKQEQEAAKLAKMKIPPSEMFLSETDKYSKFDENVSMVCPHMTWRAKSSAKGKPRS

SEQ ID NO: 42753 - protein, 564 aa, Homo sapiens
MLRTTRGPGLGPPLLQAALGLGRAGWHWPAGRAASGGRGRAWLQPTGRETGVQVYNSLTGRKEPLIVAHAEAASWYSCGPTVYDHAHLGHACSYVRFDIIRRILTKVFGCSIVMVMGITDVDDKIIKRANEMNISPASLASLYEEDFKQDMAALKVLPPTVYLRVTENIPQIISFIEGIIARGNAYSTAKGNVYFDLKSRGDKYGKLVGVVPGPVGEPADSDKRHASDFALWKAAKPQEVFWASPWGPGRPGWHIECSAIASMVFGSQLDIHSGGIDLAFPHHENEIAQCEVFHQCEQWGNYFLHSGHLHAKGKEEKMSKSLKNYITIKDFLKTFSPDVFRFFCLRSSYRSAIDYSDSAMLQAQQLLLGLGSFLEDARAYMKGQLACGSVREAMLWERLSSTKRAVKAALADDFDTPRVVDAILGLAHHGNGQLRASLKEPEGPRSPAVFGAIISYFEQFFETVGISLANQQYVSGDGSEATLHGVVDELVRFRQKVRQFALAMPEATGDARRQQLLERQPLLEACDTLRRGLTAHGINIKDRSSTTSTWELLDQRTKDQKSAG

SEQ ID NO: 42754 - protein, 182 aa, Homo sapiens
MVFGSQLDIHSGGIDLAFPHHENEIAQCEVFHQCEQWGNYFLHSGHLHAKGKEEKMSKSLKNYITIKDFLKTFSPDVFRFFCLRSSYRSAIDYSDSAMLQAQQLLLGLGSFLEDARAYMKGQLACGSVREAMLWERLSSTKRAVKAALADDFDTPRVVDAILGLAHHGNGQLRASLKKPGSA

SEQ ID NO: 42755 - protein, 146 aa, Homo sapiens [sequence omitted]

SEQ ID NO: 42756 - protein, 228 aa, Homo sapiens
MLSRCRSGLLHVLGLSFLLQTRRPILLCSPRLMKPLVVFVLGGPGAGKGTQCARIVEKYGYTHLSAGELLRDERKNPDSQYGELIEKYIKEGKIVPVEITISLLKREMDQTMAANAQKNKFLIDGFPRNQDNLQGWNKTMDGKADVSFVLFFDCNNEICIERCLERGKSSGRSDDNRESLEKRIQTYLQSTKPIIDLYEEMGKVKKIDASKSVDEVFDEVVQIFDKEG

SEQ ID NO: 42757 - protein, 179 aa, Homo sapiens
MLSRCRSGLLHVLGLSFLLQTRRPILLCSPRLMKPLVVFVLGGPGAGKGTQCARIVEEMDQTMAANAQKNKFLIDGFPRNQDNLQGWNKTMDGKADVSFVLFFDCNNEICIERCLERGKSSGRSDDNRESLEKRIQTYLQSTKPIIDLYEEMGKVKKIDASKSVDEVFDEVVQIFDKEG

SEQ ID NO: 42758 - protein, 409 aa, Homo sapiens
MAFARRLLRGPLSGPLLGRRGVCAGAMAPPRRFVLELPDCTLAHFALGADAPGDADAPDPRLAALLGPPERSYSLCVPVTPDAGCGARVRAARLHQRLLHQLRRGPFQRCQLLRLLCYCPGGQAGGAQQGFLLRDPLDDPDTRQALLELLGACQEAPRPHLGEFEADPRGQLWQRLWEVQDGRRLQVGCAQVVPVPEPPLHPVVPDLPSSVVFPDREAARAVLEECTSFIPEARAVLDLVDQCPKQIQKGKFQVVAIEGLDATGKTTVTQSVADSLKAVLLKSPPSCIGQWRKIFDDEPTIIRRAFYSLGNYIVASEIAKESAKSPVIVDRYWHSTATYAIATEVSGGLQHLPPAHHPVYQWPEDLLKPDLILLLTVSPEERLQRLQGRGMEKTREEAELEANSVFRQK

SEQ ID NO: 42759 - protein, 449 aa, Homo sapiens
MAFARRLLRGPLSGPLLGRRGVCAGAMAPPRRFVLELPDCTLAHFALGADAPGDADAPDPRLAALLGPPERSYSLCVPVTPDAGCGARVRAARLHQRLLHQLRRGPFQRCQLLRLLCYCPGGQAGGAQQGFLLRDPLDDPDTRQALLELLGACQEAPRPHLGEFEADPRGQLWQRLWEVQDGRRLQVGCAQVVPVPEPPLHPVVPDLPSSVVFPDREAARAVLEECTSFIPEARAVLDLVDQCPKQIQKGKFQVVAIEGLDATGKTTVTQSVADSLKAVLLKSPPSCIGQWRKIFDDEPTIIRRAFYSLGNYIVASEIAKESAKSPVIVDRYWHSTATYAIATEVSGGLQHLPPAHHPVYQWPEDLLKPDLILLLTVSPEERLQRLQGRGMEKTREEAELEANSVFRQKVEMSYQRMENPGCHVVDASPSREKVLQTVLSLIQNSFSEP

SEQ ID NO: 42760 - protein, 366 aa, Homo sapiens
MAFARRLLRGPLSGPLLGRRGVCAGAMAPPRRFVLELPDCTLAHFALGADAPGDADAPDPRLAALLGPPERSYSLCVPVTPDAGCGARVRAARLHQRLLHQLRRGPFQRCQLLRLLCYCPGGQAGGAQQGFLLRDPLDDPDTRQALLELLGACQEAPRPHLGEFEADPRGQLWQRLWEVQDGRRLQVGCAQVVPVPEPPLHPVVPDLPSSVVFPDREAARAVLEECTSFIPEARAVLDLVDQCPKQIQKGKFQVVAIEGLDATGKTTVTQSVADSLKAVLLKSPPSCIGQWRKIFDDEPTIIRRAFYSLGNYIVASEIAKESAKSPVIVDRSQLGGTLYHPSLHLLGSEVCGTGILDSSHSSQGLE

SEQ ID NO: 42761 - protein, 434 aa, Homo sapiens
MDSVEKGAATSVSNPRGRPSRGRPPKLQRNSRGGQGRGVEKPPHLAALILARGGSKGIPLKNIKHLAGVPLIGWVLRAALDSGAFQSVWVSTDHDEIENVAKQFGAQVHRRSSEVSKDSSTSLDAIIEFLNYHNEVDIVGNIQATSPCLHPTDLQKVAEMIREEGYDSVFSVVRRHQFRWSEIQKGVREVTEPLNLNPAKRPRRQDWDGELYENGSFYFAKRHLIEMGYLQGGKMAYYEMRAEHSVDIDVDIDWPIAEQRVLRYGYFGKEKLKEIKLLVCNIDGCLTNGHIYVSGDQKEIISYDVKDAIGISLLKKSGIEVRLISERACSKQTLSSLKLDCKMEVSVSDKLAVVDEWRKEMGLCWKEVAYLGNEVSDEECLKRVGLSGAPADACSTAQKAVGYICKCNGGRGAIREFAEHICLLMEKVNNSCQK

SEQ ID NO: 42762 - protein, 195 aa, Homo sapiens
MGQIEWAMWANEQALASGLILITGGIVATAGRFTQWYFGAYSIVAGVFVCLLEYPRGKRKKGSTMERWGQKYMTAVVKLFGPFTRNYYVRAVLHLLLSVPAGFLLATILGTACLAIASGIYLLAAVRGEQWTPIEPKPRERPQIGGTIKQPPSNPPPRPPAEARKKPSEEEAAVAAGGPPGGPQVNPIPVTDEVV

SEQ ID NO: 42763 - protein, 570 aa, Homo sapiens
MGNWAVNEGLSIFVILVWLGLNVFLFVWYYRVYDIPPKFFYTRKLLGSALALARAPAACLNFNCMLILLPVCRNLLSFLRGSSACCSTRVRRQLDRNLTFHKMVAWMIALHSAIHTIAHLFNVEWCVNARVNNSDPYSVALSELGDRQNESYLNFARKRIKNPEGGLYLAVTLLAGITGVVITLCLILIITSSTKTIRRSYFEVFWYTHHLFVIFFIGLAIHGAERIVRGQTAESLAVHNITVCEQKISEWGKIKECPIPQFAGNPPMTWKWIVGPMFLYLCERLVRFWRSQQKVVITKVVTHPFKTIELQMKKKGFKMEVGQYIFVKCPKVSKLEWHPFTLTSAPEEDFFSIHIRIVGDWTEGLFNACGCDKQEFQDAWKLPKIAVDGPFGTASEDVFSYEVVMLVGAGIGVTPFASILKSVWYKYCNNATNLKLKKIYFYWLCRDTHAFEWFADLLQLLESQMQERNNAGFLSYNIYLTGWDESQANHFAVHHDEEKDVITGLKQKTLYGRPNWDNEFKTIASQHPNTRIGVFLCGPEALAETLSKQSISNSESGPRGVHFIFNKENF

SEQ ID NO: 42764 - protein, 303 aa, Homo sapiens [sequence omitted]

SEQ ID NO: 42765 - protein, 538 aa, Homo sapiens
MGNWAVNEGLSIFVISALALARAPAACLNFNCMLILLPVCRNLLSFLRGSSACCSTRVRRQLDRNLTFHKMVAWMIALHSAIHTIAHLFNVEWCVNARVNNSDPYSVALSELGDRQNESYLNFARKRIKNPEGGLYLAVTLLAGITGVVITLCLILIITSSTKTIRRSYFEVFWYTHHLFVIFFIGLAIHGAERIVRGQTAESLAVHNITVCEQKISEWGKIKECPIPQFAGNPPMTWKWIVGPMFLYLCERLVRFWRSQQKVVITKVVTHPFKTIELQMKKKGFKMEVGQYIFVKCPKVSKLEWHPFTLTSAPEEDFFSIHIRIVGDWTEGLFNACGCDKQEFQDAWKLPKIAVDGPFGTASEDVFSYEVVMLVGAGIGVTPFASILKSVWYKYCNNATNLKLKKIYFYWLCRDTHAFEWFADLLQLLESQMQERNNAGFLSYNIYLTGWDESQANHFAVHHDEEKDVITGLKQKTLYGRPNWDNEFKTIASQHPNTRIGVFLCGPEALAETLSKQSISNSESGPRGVHFIFNKENF

SEQ ID NO: 42766 - protein, 237 aa, Homo sapiens
MNSRRREPITLQDPEAKYPLPLIEKEKISHNTRRFRFGLPSPDHVLGLPVGNYVQLLAKIDNELVVRAYTPVSSDDDRGFVDLIIKIYFKNVHPQYPEGGKMTQYLENMKIGETIFFRGPRGRLFYHGPGNLGIRPDQTSEPKKTLADHLGMIAGGTGITPMLQLIRHITKDPSDRTRMSLIFANQTEEDILVRKELEEIARTHPDQFNLWYTLDRPPIGPWSAEGATLLSNSAQFH

SEQ ID NO: 42767 - protein, 276 aa, Homo sapiens
MNSRRREPITLQDPEAKYPLPLIEKEKISHNTRRFRFGLPSPDHVLGLPVGNYVQLLAKIDNELVVRAYTPVSSDDDRGFVDLIIKIYFKNVHPQYPEGGKMTQYLENMKIGETIFFRGPRGRLFYHGPGNLGIRPDQTSEPKKTLADHLGMIAGGTGITPMLQLIRHITKDPSDRTRMSLIFANQTEEDILVRKELEEIARTHPDQFNLWYTLDRPPIGWKYSSGFVTADMIKEHLPPPAKSTLILVCGPPPLIQTAAHPNLEKLGYTQDMIFTY

SEQ ID NO: 42768 - protein, 116 aa, Homo sapiens
MNSRRREPITLQDPEAKYPLPLIEKEKISHNTRRFRFGLPSPDHVLGLPVGNYVQLLAKIDNELVVRAYTPVSSDDDRGFVDLIIKIYFKNVHPQYPEGGKMTQYLENMKIGETIF

SEQ ID NO: 42769 - protein, 237 aa, Homo sapiens; identical to SEQ ID NO: 42766

SEQ ID NO: 42770 - protein, 146 aa, Homo sapiens
MNSRRREPITLQDPEAKYPLPLIEKEKISHNTRRFRFGLPSPDHVLGLPVGNYVQLLAKIDNELVVRAYTPVSSDDDRGFVDLIIKIYFKNVHPQYPEGGKMTQYLENMKIGETIFFRGPRGRLFYHGPGNLGIRPDQTSEPKKTL

SEQ ID NO: 42771 - protein, 171 aa, Homo sapiens
MNSRRREPITLQDPEAKYPLPLIEKEKISHNTRRFRFGLPSPDHVLGLPVGNYVQLLAKIDNELVVRAYTPVSSDDDRGFVDLIIKIYFKNVHPQYPEGGKMTQYLENMKIGETIFFRGPRGRLFYHGPGNLGIRPDQTSEPKKTLADHLGMIAGGTGITPMLQLIRHITK

SEQ ID NO: 42772 - protein, 276 aa, Homo sapiens; identical to SEQ ID NO: 42767

SEQ ID NO: 42773 - protein, 301 aa, Homo sapiens
MGAQLSTLGHMVLFPVWFLYSLLMKLFQRSTPAITLESPDIKYPLRLIDREIISHDTRRFRFALPSPQHILGLPVGQHIYLSARIDGNLVVRPYTPISSDDDKGFVDLVIKVYFKDTHPKFPAGGKMSQYLESMQIGDTIEFRGPSGLLVYQGKGKFAIRPDKKSNPIIRTVKSVGMIAGGTGITPMLQVIRAIMKDPDDHTVCHLLFANQTEKDILLRPELEELRNKHSARFKLWYTLDRAPEAWDYGQGFVNEEMIRDHLPPPEEEPLVLMCGPPPMIQYACLPNLDHVGHPTERCFVF

SEQ ID NO: 42774 - protein, 334 aa, Homo sapiens
MNRSLLVGCMQSKDIWGREESICERLKQDGLDVERAESWELGHMVLFPVWFLYSLLMKLFQRSTPAITLESPDIKYPLRLIDREIISHDTRRFRFALPSPQHILGLPVGQHIYLSARIDGNLVVRPYTPISSDDDKGFVDLVIKVYFKDTHPKFPAGGKMSQYLESMQIGDTIEFRGPSGLLVYQGKGKFAIRPDKKSNPIIRTVKSVGMIAGGTGITPMLQVIRAIMKDPDDHTVCHLLFANQTEKDILLRPELEELRNKHSARFKLWYTLDRAPEAWDYGQGFVNEEMIRDHLPPPEEEPLVLMCGPPPMIQYACLPNLDHVGHPTERCFVF

SEQ ID NO: 42775 - protein, 278 aa, Homo sapiens
MKLFQRSTPAITLESPDIKYPLRLIDREIISHDTRRFRFALPSPQHILGLPVGQHIYLSARIDGNLVVRPYTPISSDDDKGFVDLVIKVYFKDTHPKFPAGGKMSQYLESMQIGDTIEFRGPSGLLVYQGKGKFAIRPDKKSNPIIRTVKSVGMIAGGTGITPMLQVIRAIMKDPDDHTVCHLLFANQTEKDILLRPELEELRNKHSARFKLWYTLDRAPEAWDYGQGFVNEEMIRDHLPPPEEEPLVLMCGPPPMIQYACLPNLDHVGHPTERCFVF

SEQ ID NO: 42776 - protein, 278 aa, Homo sapiens; identical to SEQ ID NO: 42775

SEQ ID NO: 42777 - protein, 278 aa, Homo sapiens; identical to SEQ ID NO: 42775

SEQ ID NO: 42778 - protein, 278 aa, Homo sapiens; identical to SEQ ID NO: 42775

SEQ ID NO: 42779 - protein, 147 aa, Homo sapiens
MKLFQRSTPAITLESPDIKYPLRLIDREIISHDTRRFRFALPSPQHILGLPVGQHIYLSARIDGNLVVRPYTPISSDDDKGFVDLVIKVYFKDTHPKFPAGGKMSQYLESMQIGDTIEFRGPSGLLVYQGKGKFAIRPDKKSNPIIR

SEQ ID NO: 42780 - protein, 109 aa, Homo sapiens
MDWIRLTKSGKDLTGLKGRLIEVTEEELKKHNKKDDCWICIRGFVYNVSPYMEYHPGGEDELMRAAGSDGTELFDQVHRWVNYESMLKECLVGRMAIKPAVLKGKLWHL

SEQ ID NO: 42781 - protein, 521 aa, Homo sapiens
MLNVPSQSFPAPRSQQRVASGGRSKVPLKQGRSLMDWIRLTKSGKDLTGLKGRLIEVTEEELKKHNKKDDCWICIRGFVYNVSPYMEYHPGGEDELMRAAGSDGTELFDQVHRWVNYESMLKECLVGRMAIKPAVLKDYREEEKKVLNGMLPKSQVTDTLAKEGPSYPSYDWFQTDSLVTIAIYTKQKDINLDSIIVDHQNDSFRAETIIKDCLYLIHIGLSHEVQEDFSVRVVESVGKIEIVLQKKENTSWDFLGHPLKNHNSLIPRKDTGLYYRKCQLISKEDVTHDTRLFCLMLPPSTHLQVPIGQHVYLKLPITGTEIVKPYTPVSGSLLSEFKEPVLPNNKYIYFLIKIYPTGLFTPELDRLQIGDFVSVSSPEGNFKISKFQELEDLFLLAAGTGFTPMVKILNYALTDIPSLRKVKLMFFNKTEDDIIWRSQLEKLAFKDKRLDVEFVLSAPISEWNGKQGHISPALLSEFLKRNLDKSKVLVCICGPVPFTEQGVRLLHDLNFSKNEIHSFTA

SEQ ID NO: 42782 - protein, 98 aa, Homo sapiens
MAEQSDEAVKYYTLEEIQKHNHSKSTWLILHHKVYDLTKFLEEHPGGEEVLREQAGGDATENFEDVGHSTDAREMSKTFIIGELHPDDRPKLNKPPKP

SEQ ID NO: 42783 - protein, 134 aa, Homo sapiens
MAEQSDEAVKYYTLEEIQKHNHSKSTWLILHHKVYDLTKFLEEHPGGEEVLREQAGGDATENFEDVGHSTDAREMSKTFIIGELHPDDRPKLNKPPETLITTIDSSSSWWTNWVIPAISAVAVALMYRLYMAED

SEQ ID NO: 42784 - protein, 124 aa, Homo sapiens
MAEQSDEAVKYYTLEEIQKHNHSKSTWLILHHKVYDLTKFLEEHPGGEEVLREQAGGDATENFEDVGHSTDAREMSKTFIIGELHPETLITTIDSSSSWWTNWVIPAISAVAVALMYRLYMAED

SEQ ID NO: 42785 - protein, 98 aa, Homo sapiens
MAEQSDEAVKYYTLEEIQKHNHSKSTWLILHHKVYDLTKFLEEHPGGEEVLREQAGGDATENFEDVGHSTDAREMSKTFIIGELHPDDRPKLNKPPEP

SEQ ID NO: 42786 - protein, 150 aa, Homo sapiens
MSGSMATAEASGSDGKGQEVETSVTYYRLEEVAKRNSLKELWLVIHGRVYDVTRFLNEHPGGEEVLLEQAGVDASESFEDVGHSSDAREMLKQYYIGDIHPSDLKPESGSKDPSKNDTCKSCWAYWILPIIGAVLLGFLYRYYTSESKSS

SEQ ID NO: 42787 - protein, 146 aa, Homo sapiens
MATAEASGSDGKGQEVETSVTYYRLEEVAKRNSLKELWLVIHGRVYDVTRFLNEHPGGEEVLLEQAGVDASESFEDVGHSSDAREMLKQYYIGDIHPSDLKPESGSKDPSKNDTCKSCWAYWILPIIGAVLLGFLYRYYTSESKSS

SEQ ID NO: 42788 - protein, 251 aa, Homo sapiens
MEGGAAAATPTALPYYVAFSQLLGLTLVAMTGAWLGLYRGGIAWESDLQFNAHPLCMVIGLIFLQGNALLVYRVFRNEAKRTTKVLHGLLHIFALVIALVGLVAVFDYHRKKGYADLYSLHSWCGILVFVLYFVQWLVGFSFFLFPGASFSLRSRYRPQHIFFGATIFLLSVGTALLGLKEALLFNLGGKYSAFEPEGVLANVLGLLLACFGGAVLYILTRADWKRPSQAEEQALSMDFKTLTEGDSPGSQ

SEQ ID NO: 42789 - protein, 251 aa, Homo sapiens; identical to SEQ ID NO: 42788

SEQ ID NO: 42790 - protein, 251 aa, Homo sapiens; identical to SEQ ID NO: 42788

SEQ ID NO: 42791 - protein, 138 aa, Homo sapiens
MEGGAAAATPTALPYYVAFSQLLGLTLVAMTGAWLGLYRGGIAWESDLQFNAHPLCMVIGLIFLQGNALLVYRVFRNEAKRTTKVLHGLLHIFALVIALVGLVAVFDYHRKKGYADLYSLHSWCGILVFVLYFVQGQV

SEQ ID NO: 42792 - protein, 318 aa, Homo sapiens
MKQKTKPGTGPLSSLEFGVSFLAPSPHMELLASCPRSRLSPWGGWAPPPSHSRDLRPLPQDDGVCLSMEGGAAAATPTALPYYVAFSQLLGLTLVAMTGAWLGLYRGGIAWESDLQFNAHPLCMVIGLIFLQGNALLVYRVFRNEAKRTTKVLHGLLHIFALVIALVGLVAVFDYHRKKGYADLYSLHSWCGILVFVLYFVQWLVGFSFFLFPGASFSLRSRYRPQHIFFGATIFLLSVGTALLGLKEALLFNLGGKYSAFEPEGVLANVLGLLLACFGGAVLYILTRADWKRPSQAEEQALSMDFKTLTEGDSPGSQ

SEQ ID NO: 42793 - protein, 222 aa, Homo sapiens
MALSAETESHIYRALRTASGAAAHLVALGFTIFVAVLARPGSSLFSWHPVLMSLAFSFLMTEALLVFSPESSLLHSLSRKGRARCHWVLQLLALLCALLGLGLVILHKEQLGKAHLVTRHGQAGLLAVLWAGLQCSGGVGLLYPKLLPRWPLAKLKLYHATSGLVGYLLGSASLLLGMCSLWFTASVTGAAWYLAVLCPVLTSLVIMNQVSNAYLYRKRIQP

SEQ ID NO: 42794 - protein, 222 aa, Homo sapiens; identical to SEQ ID NO: 42793

SEQ ID NO: 42795 - protein, 222 aa, Homo sapiens; identical to SEQ ID NO: 42793

SEQ ID NO: 42796 - protein, 222 aa, Homo sapiens; identical to SEQ ID NO: 42793

SEQ ID NO: 42797 - protein, 231 aa, Homo sapiens
MGGLWRPGWRCVPFCGWRWIHPGSPTRAAERVEPFLRPEWSGTGGAERGLRWLGTWKRCSLRARHPALQPPRRPKSSNPFTRAQEEERRRQNKTTLTYVAAVAVGMLGASYAAVPLYRLYCQTTGLGGSAVAGHASDKIENMVPVKDRIIKISFNADVHASLQWNFRPQQTEIYVVPGETALAFYRAKNPTDKPVIGISTYNIVPFEAGQYFNKIQASKLHRVYVLESWHL

SEQ ID NO: 42798 - protein, 169 aa, Homo sapiens
MLATRVFSLVGKRAISTSVCVRAHESVVKSEDFSLPAYMDRRDHPLPEVAHVKHLSASQKALKEKEKASWSSLSMDEKVELYRIKFKESFAEMNRGSNEWKTVVGGAMFFIGFTALVIMWQKHYVYGPLPQSFDKEWVAKQTKRMLDMKVNPIQGLASKWDYEKNEWKK

SEQ ID NO: 42799 - protein, 171 aa, Homo sapiens
MLPRAAWSLVLRKGGGGRRGMHSSEGTTRGGGKMSPYTNCYAQRYYPMPEEPFCTELNAEEQALKEKEKGSWTQLTHAEKVALYRLQFNETFAEMNRRSNEWKTVMGCVFFFIGFAALVIWWQRVYVFPPKPITLTDERKAQQLQRMLDMKVNPVQGLASRWDYEKKQWKK

SEQ ID NO: 42800 - protein, 129 aa, Homo sapiens
MASRLLRGAGTLAAQALRARGPSGAAAMRSMASGGGVPTDEEQATGLEREIMLAAKKGLDPYNVLAPKGASGTREDPNLVPSISNKRIVGCICEEDNTSVVWFWLHKGEAQRCPRCGAHYKLVPQQLAH

SEQ ID NO: 42801 - protein, 109 aa, Homo sapiens
MAVVGVSSVSRLLGRSRPQLGRPMSSGAHGEEGSARMWKTLTFFVALPGVAVSMLNVYLKSHHGEHERPEFIAYPHLRIRTKPFPWGDGNHTLFHNPHVNPLPTGYEDE

SEQ ID NO: 42802 - protein, 86 aa, Homo sapiens
MAEDMETKIKNYKTAPFDSRFPNQNQTRNCWQNYLDFHRCQKAMTAKGGDISVCEWYQRVYQSLCPTSWVTDWDEQRAEGTFPGKI

SEQ ID NO: 42803 - protein, 103 aa, Homo sapiens
MHPHPQIPGRDLAGFSTMAEDMETKIKNYKTAPFDSRFPNQNQTRNCWQNYLDFHRCQKAMTAKGGDISVCEWYQRVYQSLCPTSWVTDWDEQRAEGTFPGKI

SEQ ID NO: 42804 - protein, 75 aa, Homo sapiens
MAPEVLPKPRMRGLLARRLRNHMAVAFVLSLGVAALYKFRVADQRKKAYADFYRNYDVMKDFEEMRKAGIFQSVK

SEQ ID NO: 42805 - protein, 75 aa, Homo sapiens; identical to SEQ ID NO: 42804

SEQ ID NO: 42806 - protein, 75 aa, Homo sapiens; identical to SEQ ID NO: 42804

SEQ ID NO: 42807 - protein, 75 aa, Homo sapiens; identical to SEQ ID NO: 42804

SEQ ID NO: 42808 - protein, 75 aa, Homo sapiens; identical to SEQ ID NO: 42804

SEQ ID NO: 42809 - protein, 75 aa, Homo sapiens; identical to SEQ ID NO: 42804

SEQ ID NO: 42810 - protein, 75 aa, Homo sapiens; identical to SEQ ID NO: 42804

SEQ ID NO: 42811 - protein, 75 aa, Homo sapiens; identical to SEQ ID NO: 42804

SEQ ID NO: 42812 - protein, 75 aa, Homo sapiens; identical to SEQ ID NO: 42804

SEQ ID NO: 42813 - protein, 75 aa, Homo sapiens; identical to SEQ ID NO: 42804

SEQ ID NO: 42814 - protein, 79 aa, Homo sapiens
MQALRVSQALIRSFSSTARNRFQNRVREKQKLFQEDNDIPLYLKGGIVDNILYRVTMTLCLGGTVYSLYSLGWASFPRN

SEQ ID NO: 42815 - protein, 109 aa, Homo sapiens
  VARIANT 1: note = MOD_RES - Any amino acid
XSFWVLSLPGPSRQPGHPQARLQGESPPNPAGSSRVSQALIRSFSSTARNRFQNRVREKQKLFQEDNDIPLYLKGGIVDNILYRVTMTLCLGGTVYSLYSLGWASFPRN

SEQ ID NO: 42816 - protein, 83 aa, Homo sapiens
MLRNLLALRQIGQRTISTASRRHFKNKVPEKQKLFQEDDEIPLYLKGGVADALLYRATMILTVGGTAYAIYELAVASFPKKQE

SEQ ID NO: 42817 - protein, 115 aa, Homo sapiens
MHTQDSEVVPVPAWPFSLVVFSCGGCWSVTAKMLRNLLALRQIGQRTISTASRRHFKNKVPEKQKLFQEDDEIPLYLKGGVADALLYRATMILTVGGTAYAIYELAVASFPKKQE

SEQ ID NO: 42818 - protein, 115 aa, Homo sapiens; identical to SEQ ID NO: 42817

SEQ ID NO: 42819 - protein, 114 aa, Homo sapiens
MYYKFSGFTQKLAGAWASEAYSPQGLKPVVSTEAPPIIFATPTKLTSDSTVYDYAGKNKVPELQKFFQKADGVPVYLKRGLPDQMLYRTTMALTVGGTIYCLIALYMASQPKNK

SEQ ID NO: 42820 - protein, 114 aa, Homo sapiens; identical to SEQ ID NO: 42819

SEQ ID NO: 42821 - protein, 81 aa, Homo sapiens
MMFPLARNALSSLKIQSILQSMARHSHVKHSPDFHDKYGNAVLASGTAFCVATWVFTATQIGIEWNLSPVGRVTPKEWKHQ

SEQ ID NO: 42822 - protein, 81 aa, Homo sapiens; identical to SEQ ID NO: 42821

SEQ ID NO: 42823 - protein, 81 aa, Homo sapiens; identical to SEQ ID NO: 42821

SEQ ID NO: 42824 - protein, 32 aa, Homo sapiens
MMFPLARNALSSLKIQSILQSMARHSHVKHSP

SEQ ID NO: 42825 - protein, 80 aa, Homo sapiens
MFPLARNALSSLKIQSILQSMARHSHVKHSPDFHDKYGNAVLASGTAFCVATWVFTATQIGIEWNLSPVGRVTPKEWKHQ

SEQ ID NO: 42826 - protein, 63 aa, Homo sapiens
MLGQSIRRFTTSVVRRSHYEEGPGKNLPFSVENKWSLLAKMCLYFGSAFATPFLVVRHQLLKT

SEQ ID NO: 42827 - protein, 63 aa, Homo sapiens; identical to SEQ ID NO: 42826

SEQ ID NO: 42828 - protein, 325 aa, Homo sapiens
MAAAAASLRGVVLGPRGAGLPGARARGLLCSARPGQLPLRTPQAVALSSKSGLSRGRKVMLSALGMLAAGGAGLAMALHSAVSASDLELHPPSYPWSHRGLLSSLDHTSIRRGFQVYKQVCASCHSMDFVAYRHLVGVCYTEDEAKELAAEVEVQDGPNEDGEMFMRPGKLFDYFPKPYPNSEAARAANNGALPPDLSYIVRARHGGEDYVFSLLTGYCEPPTGVSLREGLYFNPYFPGQAIAMAPPIYTDVLEFDDGTPATMSQIAKDVCTFLRWASEPEHDHRKRMGLKMLMMMALLVPLVYTIKRHKWSVLKSRKLAYRPPK

SEQ ID NO: 42829 - protein, 83 aa, Homo sapiens
MEPFVVLVLCLSFMLLFSLWRQSCRRRKLPPGPTPLPIIGNMLQIDVKDICKSFTNVSLPYVPPANCKGSQKSMVLCSPCILA

SEQ ID NO: 42830 - protein, 72 aa, Homo sapiens
MEPFVVLVLCLSFMLLFSLWRQSCRRRKLPPGPTPLPIIGNMLQIDVKDICKSFTNVSLPYVPPANCKGVLL

SEQ ID NO: 42831 - protein, 140 aa, Homo sapiens
MDLIPNLAVETWLLLAVSLVLLYLYGTRTHGLFKRLGIPGPTPLPLLGNVLSYRQGLWKFDTECYKKYGKMWGTYEGQLPVLAITDPDVIRTVLVKECYSVFTNRRICATTSTIKMQTHSVTMWLPPAVLQSQHGVCLFL

SEQ ID NO: 42832 - protein, 520 aa, Homo sapiens
MPQLSLSSLGLWPMAASPWLLLLLVGASWLLARILAWTYTFYDNCCRLRCFPQPPKRNWFLGHLGLVTPTEQGMRVLTQLVATYPQGFKVWMGPIFPVIRFCHPNIIRSVINASAAIVPKDKVFYSFLKPWLGDGLLLSAGEKWSRHRRMLTPAFHFNILKPYMKIFNESVNIMHAKWQLLASEGSARLDMFEHISLMTLDSLQKCVFSFDSHCQEKPSEYIAAILELSALVTKRHQQILLYIDFLYYLTPDGQRFRRACRLVHDFTDAVIQERRRTLPSQGVDDFLQAKAKSKTLDFIDVLLLSKDEDGKKLSDEDIRAEADTFMFEGHDTTASGLSWVLYHLAKHPEYQERCRQEVQELLKDREPKEIEWDDLAQLPFLTMCIKESLRLHPPVPAVSRCCTQDIVLPDGRVIPKGIICLISVFGTHHNPAVWPDPEVYDPFRFDPKNIKERSPLAFIPFSAGPRNCIGQAFAMAEMKVVLGLTLLRFRVLPDHTEPRRKPELVLRAEGGLWLRVEPLS

SEQ ID NO: 42833 - protein, 484 aa, Homo sapiens
MLFPISMSATEFLLASVIFCLVFWVIRASRPQVPKGLKNPPGPWGWPLIGHMLTLGKNPHLALSRMSQQYGDVLQIRIGSTPVVVLSGLDTIRQALVRQGDDFKGRPDLYTFTLISNGQSMSFSPDSGPVWAARRRLAQNGLKSFSIASDPASSTSCYLEEHVSKEAEVLISTLQELMAGPGHFNPYRYVVVSVTNVICAICFGRRYDHNHQELLSLVNLNAFKDLNEKFYSFMQKMVKEHYKTFEKGHIRDITDSLIEHCQEKQLDENANVQLSDEKIINIVLDLFGAGFDTVTTAISWSLMYLVMNPRVQRKIQEELDTVIGRSRRPRLSDRSHLPYMEAFILETFRHSSFVPFTIPHSTTRDTSLKGFYIPKGRCVFVNQWQINHDQKLWVNPSEFLPERFLTPDGAIDKVLSEKVIIFGMGKRKCIGETIARWEVFLFLAILLQRVEFSVPLGVKVDMTPIYGLTMKHACCEHFQMQLRS

SEQ ID NO: 42834 - protein, 512 aa, Homo sapiens [sequence omitted]

SEQ ID NO: 42835 - protein, 512 aa, Homo sapiens [sequence omitted]

SEQ ID NO: 42836 - protein, 483 aa, Homo sapiens
MLFPISMSATEFLLASVIFCLVFWVIRASRPQVPKGLKNPPGPWGWPLIGHMLTLGKNPHLALSRMSQQYGDVLQIRIGSTPVVVLSGLDTIRQALVRQGDDFKGRPDLYTFTLISNGQSMSFSPDSGPVWAARRRLAQNGLKSFSIASDPASSTSCYLEEHVSKEAEVLISTLQELMAGPGHFNPYRYVVVSVTNVICAICFGRRYDHNHQELLSLVNLNNNFGEVVGSGNPADFIPILRYLPNPSLNAFKDLNEKFYSFMQKMVKEHYKTFEKGHIRDITDSLIEHCQEKQLDENANVQLSDEKIINIVLDLFGAGFDTVTTAISWSLMYLVMNPRVQRKIQEELDTVIGRSRRPRLSDRSHLPYMEAFILETFRHSSFVPFTIPHRKLWVNPSEFLPERFLTPDGAIDKVLSEKVIIFGMGKRKCIGETIARWEVFLFLAILLQRVEFSVPLGVKVDMTPIYGLTMKHACCEHFQMQLRS

SEQ ID NO: 42837 - protein, 516 aa, Homo sapiens
MALSQSVPFSATELLLASAIFCLVFWVLKGLRPRVPKGLKSPPEPWGWPLLGHVLTLGKNPHLALSRMSQRYGDVLQIRIGSTPVLVLSRLDTIRQALVRQGDDFKGRPDLYTSTLITDGQSLTFSTDSGPVWAARRRLAQNALNTFSIASDPASSSSCYLEEHVSKEAKALISRLQELMAGPGHFDPYNQVVVSVANVIGAMCFGQHFPESSDEMLSLVKNTHEFVETASSGNPLDFFPILRYLPNPALQRFKAFNQRFLWFLQKTVQEHYQDFDKNSVRDITGALFKHSKKGPRASGNLIPQEKIVNLVNDIFGAGFDTVTTAISWSLMYLVTKPEIQRKIQKELDTVIGRERRPRLSDRPQLPYLEAFILETFRHSSFLPFTIPHSTTRDTTLNGFYIPKKCCVFVNQWQVNHDPELWEDPSEFRPERFLTADGTAINKPLSEKMMLFGMGKRRCIGEVLAKWEIFLFLAILLQQLEFSVPPGVKVDLTPIYGLTMKHARCEHVQARLRFSIN

SEQ ID NO: 42838 - protein, 503 aa, Homo sapiens
MALRAKAEVCMAVPWLSLQRAQALGTRAARVPRTVLPFEAMPRRPGNRWLRLLQIWREQGYEDLHLEVHQTFQELGPIFRYDLGGAGMVCVMLPEDVEKLQQVDSLHPHRMSLEPWVAYRQHRGHKCGVFLLNGPEWRFNRLRLNPEVLSPNAVQRFLPMVDAVARDFSQALKKKVLQNARGSLTLDVQPSIFHYTIEASNLALFGERLGLVGHSPSSASLNFLHALEVMFKSTVQLMFMPRSLSRWTSPKVWKEHFEAWDCIFQYGDNCIQKIYQELAFSRPQQYTSIVAELLLNAELSPDAIKANSMELTAGSVDTTVFPLLMTLFELARNPNVQQALRQESLAAAASISEHPQKATTELPLLRAALKETLRLYPVGLFLERVASSDLVLQNYHIPAGTLVRVFLYSLGRNPALFPRPERYNPQRWLDIRGSGRNFYHVPFGFGMRQCLGRRLAEAEMLLLLHHVLKHLQVETLTQEDIKMVYSFILRPSMFPLLTFRAIN

SEQ ID NO: 42839 - protein, 437 aa, Homo sapiens
MALRAKAEVCMAVPWLSLQRAQALGTRAARVPRTVLPFEAMPRRPGNRWLRLLQIWREQGYEDLHLEVHQTFQELGPIFRYDLGGAGMVCVMLPEDVEKLQQVDSLHPHRMSLEPWVAYRQHRGHKCGVFLLNGPEWRFNRLRLNPEVLSPNAVQRFLPMVDAVARDFSQALKKKVLQNARGSLTLDVQPSIFHYTIEASNLALFGERLGLVGHSPSSASLNFLHALEVMFKSTVQLMFMPRSLSRWTSPKVWKEHFEAWDCIFQYGDNCIQKIYQELAFSRPQQYTSIVAELLLNAELSPDAIKANSMELTAGSVDTTVFPLLMTLFELARNPNVQQALRQESLAAAASISEHPQKATTELPLLRAALKETLRLYPVGLFLERVASSDLVLQNYHIPAGVLKHLQVETLTQEDIKMVYSFILRPSMFPLLTFRAIN

SEQ ID NO: 42840 - protein, 503 aa, Homo sapiens
MALRAKAEVCVAAPWLSLQRARALGTRAARAPRTVLPFEAMPQHPGNRWLRLLQIWREQGYEHLHLEMHQTFQELGPIFRYNLGGPRMVCVMLPEDVEKLQQVDSLHPCRMILEPWVAYRQHRGHKCGVFLLNGPEWRFNRLRLNPDVLSPKAVQRFLPMVDAVARDFSQALKKKVLQNARGSLTLDVQPSIFHYTIEASNLALFGERLGLVGHSPSSASLNFLHALEVMFKSTVQLMFMPRSLSRWISPKVWKEHFEAWDCIFQYGDNCIQKIYQELAFNRPQHYTGIVAELLLKAELSLEAIKANSMELTAGSVDTTAFPLLMTLFELARNPDVQQILRQESLAAAASISEHPQKATTELPLLRAALKETLRLYPVGLFLERVVSSDLVLQNYHIPAGTLVQVFLYSLGRNAALFPRPERYNPQRWLDIRGSGRNFHHVPFGFGMRQCLGRRLAEAEMLLLLHHVLKHFLVETLTQEDIKMVYSFILRPGTSPLLTFRAIN

SEQ ID NO: 42841 - protein, 508 aa, Homo sapiens
MWELVALLLLTLAYLFWPKRRCPGAKYPKSLLSLPLVGSLPFLPRHGHMHNNFFKLQKKYGPIYSVRMGTKTTVIVGHHQLAKEVLIKKGKDFSGRPQMATLDIASNNRKGIAFADSGAHWQLHRRLAMATFALFKDGDQKLEKIICQEISTLCDMLATHNGQSIDISFPVFVAVTNVISLICFNTSYKNGDPELNVIQNYNEGIIDNLSKDSLVDLVPWLKIFPNKTLEKLKSHVKIRNDLLNKILENYKEKFRSDSITNMLDTLMQAKMNSDNGNAGPDQDSELLSDNHILTTIGDIFGAGVETTTSVVKWTLAFLLHNPQVKKKLYEEIDQNVGFSRTPTISDRNRLLLLEATIREVLRLRPVAPMLIPHKANVDSSIGEFAVDKGTEVIINLWALHHNEKEWHQPDQFMPERFLNPAGTQLISPSVSYLPFGAGPRSCIGEILARQELFLIMAWLLQRFDLEVPDDGQLPSLEGIPKVVFLIDSFKVKIKVRQAWREAQAEGST

SEQ ID NO: 42842 - protein, 503 aa, Homo sapiens
MVLEMLNPIHYNITSIVPEAMPAATMPVLLLTGLFLLVWNYEGTSSIPGPGYCMGIGPLISHGRFLWMGIGSACNYYNRVYGEFMRVWISGEETLIISKSSSMFHIMKHNHYSSRFGSKLGLQCIGMHEKGIIFNNNPELWKTTRPFFMKALSGPGLVRMVTVCAESLKTHLDRLEEVTNESGYVDVLTLLRRVMLDTSNTLFLRIPLDESAIVVKIQGYFDAWQALLIKPDIFFKISWLYKKYEKSVKDLKDAIEVLIAEKRRRISTEEKLEECMDFATELILAEKRGDLTRENVNQCILEMLIAAPDTMSVSLFFMLFLIAKHPNVEEAIIKEIQTVIGERDIKIDDIQKLKVMENFIYESMRYQPVVDLVMRKALEDDVIDGYPVKKGTNIILNIGRMHRLEFFPKPNEFTLENFAKNVPYRYFQPFGFGPRGCAGKYIAMVMMKAILVTLLRRFHVKTLQGQCVESIQKIHDLSLHPDETKNMLEMIFTPRNSDRCLEH

SEQ ID NO: 42843 - protein, 503 aa, Homo sapiens; identical to SEQ ID NO: 42842

SEQ ID NO: 42844 - protein, 503 aa, Homo sapiens; identical to SEQ ID NO: 42842

SEQ ID NO: 42845 - protein, 166 aa, Homo sapiens
MVLEMLNPIHYNITSIVPEAMPAATMPVLLLTGLFLLVWNYEGTSSIPGPGYCMGIGPLISHGRFLWMGIGSACNYYNRVYGEFMRVWISGEETLIISKSSSMFHIMKHNHYSSRFGSKLGLQCIGMHEKGIIFNNNPELWKTTRPFFMKALSGPGLVRMVTVCAE

SEQ ID NO: 42846 - protein, 218 aa, Homo sapiens
MVLEMLNPIHYNITSIVPEAMPAATMPVLLLTGLFLLVWNYEGTSSIPGPGYCMGIGPLISHGRFLWMGIGSACNYYNRVYGEFMRVWISGEETLIISKSSSMFHIMKHNHYSSRFGSKLGLQCIGMHEKGIIFNNNPELWKTTRPFFMKALSGPGLVRMVTVCAESLKTHLDRLEEVTNESGYVDVLTLLRRVMLDTSNTLFLRIPLDGTEIFTLTS

SEQ ID NO: 42847 - protein, 359 aa, Homo sapiens
MVLEMLNPIHYNITSIVPEAMPAATMPVLLLTGLFLLVWNYEGTSSIPGPGYCMGIGPLISHGRFLWMGIGSACNYYNRVYGEFMRVWISGEETLIISKSSSMFHIMKHNHYSSRFGSKLGLQCIGMHEKGIIFNNNPELWKTTRPFFMKALSGPGLVRMVTVCAESLKTHLDRLEEVTNESGYVDVLTLLRRVMLDTSNTLFLRIPLDESAIVVKIQGYFDAWQALLIKPDIFFKISWLYKKYEKSVKDLKDAIEVLIAEKRRRISTEEKLEECMDFATELILAEKRGDLTRENVNQCILEMLIAAPDTMSVSLFFMLFLIAKHPNVEEAIIKEIQTVIGERDIKIDDIQKLKKHDAK

SEQ ID NO: 42848 - protein, 352 aa, Homo sapiens
MVLEMLNPIHYNITSIVPEAMPAATMPVLLLTGLFLLVWNYEGTSSIPGPGYCMGIGPLISHGRFLWMGIGSACNYYNRVYGEFMRVWISGEETLIISKSSSMFHIMKHNHYSSRFGSKLGLQCIGMHEKGIIFNNNPELWKTTRPFFMKALSGPGLVRMVTVCAESLKTHLDRLEEVTNESGYVDVLTLLRRVMLDTSNTLFLRIPLDESAIVVKIQGYFDAWQALLIKPDIFFKISWLYKKYEKSVKDLKDAIEVLIAEKRRRISTEEKLEECMDFATELILAEKRGDLTRENVNQCILEMLIAAPDTMSVSLFFMLFLIAKHPNVEEAIIKEIQTVIGERDIKIDDIQK

SEQ ID NO: 42849 - protein, 242 aa, Homo sapiens
MVLEMLNPIHYNITSIVPEAMPAATMPVLLLTGLFLLVWNYEGTSSIPGPGYCMGIGPLISHGRFLWMGIGSACNYYNRVYGEFMRVWISGEETLIISKSSSMFHIMKHNHYSSRFGSKLGLQCIGMHEKGIIFNNNPELWKTTRPFFMKALSGPGLVRMVTVCAESLKTHLDRLEEVTNESGYVDVLTLLRRVMLDTSNTLFLRIPLDESAIVVKIQGYFDAWQALLIKPDIFFKISWLYK

SEQ ID NO: 42850 - protein, 181 aa, Homo sapiens [sequence omitted]

SEQ ID NO: 42851 - protein, 218 aa, Homo sapiens; identical to SEQ ID NO: 42846

SEQ ID NO: 42852 - protein, 352 aa, Homo sapiens; identical to SEQ ID NO: 42848

SEQ ID NO: 42853 - protein, 283 aa, Homo sapiens
MVLEMLNPIHYNITSIVPEAMPAATMPVLLLTGLFLLVWNYEGTSSIPGPGYCMGIGPLISHGRFLWMGIGSACNYYNRVYGEFMRVWISGEETLIISKSSSMFHIMKHNHYSSRFGSKLGLQCIGMHEKGIIFNNNPELWKTTRPFFMKALSGPGLVRMVTVCAESLKTHLDRLEEVTNESGYVDVLTLLRRVMLDTSNTLFLRIPLDESAIVVKIQGYFDAWQALLIKPDIFFKISWLYKKYEKSVKDLKDAIEVLIAEKRRRISTEEKLEECMDFATELI

SEQ ID NO: 42854 - protein, 165 aa, Homo sapiens
MVLEMLNPIHYNITSIVPEAMPAATMPVLLLTGLFLLVWNYEGTSSIPGPGYCMGIGPLISHGRFLWMGIGSACNYYNRVYGEFMRVWISGEETLIISKSSSMFHIMKHNHYSSRFGSKLGLQCIGMHEKGIIFNNNPELWKTTRPFFMKALSGPGLVRMVTVCA

SEQ ID NO: 42855 - protein, 503 aa, Homo sapiens; identical to SEQ ID NO: 42842

SEQ ID NO: 42856 - protein, 172 aa, Homo sapiens
MVLEMLNPIHYNITSIVPEAMPAATMPVLLLTGLFLLVWNYEGTSSIPGPGYCMGIGPLISHGRFLWMGIGSACNYYNRVYGEFMRVWISGEETLIISKSSSMFHIMKHNHYSSRFGSKLGLQCIGMHEKGIIFNNNPELWKTTRPFFMKALSGPGLVRMVTVCAESLKTHL

SEQ ID NO: 42857 - protein, 244 aa, Homo sapiens
MVLEMLNPIHYNITSIVPEAMPAATMPVLLLTGLFLLVWNYEGTSSIPGPGYCMGIGPLISHGRFLWMGIGSACNYYNRVYGEFMRVWISGEETLIISKSSSMFHIMKHNHYSSRFGSKLGLQCIGMHEKGIIFNNNPELWKTTRPFFMKESAIVVKIQGYFDAWQALLIKPDIFFKISWLYKKYEKSVKDLKDAIEVLIAEKRRRISTEEKLEECMDFATELILAEKRGDLTRENVNQCILEM

SEQ ID NO: 42858 - protein, 494 aa, Homo sapiens
MLASGLLLVTLLACLTVMVLMSVWRQRKSRGKLPPGPTPLPFIGNYLQLNTEQMYNSLMKISERYGPVFTIHLGPRRVVVLCGHDAVKEALVDQAEEFSGRGEQATFDWLFKGYGVAFSNGERAKQLRRFSIATLRGFGVGKRGIEERIQEEAGFLIDALRGTHGANIDPTFFLSRTVSNVISSIVFGDRFDYEDKEFLSLLRMMLGSFQFTATSTGQLYEMFSSVMKHLPGPQQQAFKELQGLEDFIAKKVEHNQRTLDPNSPRDFIDSFLIRMQEEEKNPNTEFYLKNLVMTTLNLFFAGTETVSTTLRYGFLLLMKHPEVEAKVHEEIDRVIGKNRQPKFEDRAKMPYTEAVIHEIQRFGDMLPMGLAHRVNKDTKFRDFFLPKGTEVFPMLGSVLRDPRFFSNPRDFNPQHFLDKKGQFKKSDAFVPFSIGKRYCFGEGLARMELFLFFTTIMQNFRFKSPQSPKDIDVSPKHVGFATIPRNYTMSFLPR

SEQ ID NO: 42859 - protein, 494 aa, Homo sapiens
MLASGMLLVALLVCLTVMVLMSVWQQRKSKGKLPPGPTPLPFIGNYLQLNTEQMYNSLMKISERYGPVFTIHLGPRRVVVLCGHDAVREALVDQAEEFSGRGEQATFDWVFKGYGVVFSNGERAKQLRRFSIATLRDFGVGKRGIEERIQEEAGFLIDALRGTGGANIDPTFFLSRTVSNVISSIVFGDRFDYKDKEFLSLLRMMLGIFQFTSTSTGQLYEMFSSVMKHLPGPQQQAFQLLQGLEDFIAKKVEHNQRTLDPNSPRDFIDSFLIRMQEEEKNPNTEFYLKNLVMTTLNLFIGGTETVSTTLRYGFLLLMKHPEVEAKVHEEIDRVIGKNRQPKFEDRAKMPYMEAVIHEIQRFGDVIPMSLARRVKKDTKFRDFFLPKGTEVFPMLGSVLRDPSFFSNPQDFNPQHFLNEKGQFKKSDAFVPFSIGKRNCFGEGLARMELFLFFTTVMQNFRLKSSQSPKDIDVSPKHVGFATIPRNYTMSFLPR

SEQ ID NO: 42860 - protein, 443 aa, Homo sapiens
MLASGLLLVALLACLTVMVLMSVWQQRKSRGKLPPGPTPLPFIGNYLQLNTEHICDSIMKVSQGVAFSNGERAKQLLRFAIATLRDFGVGKRGIEERIQEESGFLIEAIRSTHGANIDPTFFLSRTVSNVISSIVFGDRFDYEDKEFLSLLSMMLGIFQFTSTSTGQLYEMFSSVMKHLPGPQQQAFKLLQGLEDFIAKKVEHNQRTLDPNSPQDFIDSFLIHMQEEEKNPNTEFYLKNLMMSTLNLFIAGTETVSTTLRYGFLLLMKHPEVEAKVHEEIDRVIGKNRQPKFEDRTKMPYMEAVIHEIQRFGDVIPMSLARRVKKDTKFRDFFLPKGTEVFPMLGSVLRDPSFFSNPQDFNPQHFLDDKGQFKKSDAFVPFSIGKRNCFGEGLARMELFLFFTTVMQNFRLKSSQSPKDIDVSPKHVVFATIPRNYTMSFLPR

SEQ ID NO: 42861 - protein, 494 aa, Homo sapiens
MLASGLLLVALLACLTVMVLMSVWQQRKSRGKLPPGPTPLPFIGNYLQLNTEHICDSIMKFSECYGPVFTIHLGPRRVVVLCGHDAVREALVDQAEEFSGRGEQATFDWVFKGYGVAFSNGERAKQLLRFAIATLRDFGVGKRGIEERIQEESGFLIEAIRSTHGANIDPTFFLSRTVSNVISSIVFGDRFDYEDKEFLSLLSMMLGIFQFTSTSTGQLYEMFSSVMKHLPGPQQQAFKLLQGLEDFIAKKVEHNQRTLDPNSPQDFIDSFLIHMQEEEKNPNTEFYLKNLMMSTLNLFIAGTETVSTTLRYGFLLLMKHPEVEAKVHEEIDRVIGKNRQPKFEDRTKMPYMEAVIHEIQRFGDVIPMSLARRVKKDTKFRDFFLPKGTEVFPMLGSVLRDPSFFSNPQDFNPQHFLDDKGQFKKSDAFVPFSIGKRNCFGEGLARMELFLFFTTVMQNFRLKSSQSPKDIDVSPKHVVFATIPRNYTMSFLPR

SEQ ID NO: 42862 - protein, 491 aa, Homo sapiens
MELSVLLFLALLTGLLLLLVQRHPNTHDRLPPGPRPLPLLGNLLQMDRRGLLKSFLRFREKYGDVFTVHLGPRPVVMLCGVEAIREALVDKAEAFSGRGKIAMVDPFFRGYGVIFANGNRWKVLRRFSVTTMRDFGMGKRSVEERIQEEAQCLIEELRKSKGALMDPTFLFQSITANIICSIVFGKRFHYQDQEFLKMLNLFYQTFSLISSVFGQLFELFSGFLKYFPGAHRQVYKNLQEINAYIGHSVEKHRETLDPSAPKDLIDTYLLHMEKEKSNAHSEFSHQNLNLNTLSLFFAGTETTSTTLRYGFLLMLKYPHVAERVYREIEQVIGPHRPPELHDRAKMPYTEAVIYEIQRFSDLLPMGVPHIVTQHTSFRGYIIPKDTEVFLILSTALHDPHYFEKPDAFNPDHFLDANGALKKTEAFIPFSLGKRICLGEGIARAELFLFFTTILQNFSMASPVAPEDIDLTPQECGVGKIPPTYQIRFLPR

SEQ ID NO: 42863 - protein, 291 aa, Homo sapiens
MRCMLTNSHPWCGCDWQFREKYGDVFTVHLGPRPVVMLCGVEAIREALVDKAEAFSGRGKIAMVDPFFRGYGVIFANGNRWKVLRRFSVTTMRDFGMGKRSVEERIQEEAQCLIEELRKSKERVYREIEQVIGPHRPPELHDRAKMPYTEAVIYEIQRFSDLLPMGVPHIVTQHTSFRGYIIPKDTEVFLILSTALHDPHYFEKPDAFNPDHFLDANGALKKTEAFIPFSLGKRICLGEGIARAELFLFFTTILQNFSMASPVAPEDIDLTPQECGVGKIPPTYQIRFLPR

SEQ ID NO: 42864 - protein, 490 aa, Homo sapiens [sequence omitted]

SEQ ID NO: 42865 - protein, 490 aa, Homo sapiens
MEPFVVLVLCLSFMLLFSLWRQSCRRRKLPPGPTPLPIIGNMLQIDVKDICKSFTNFSKVYGPVFTVYFGMNPIVVFHGYEAVKEALIDNGEEFSGRGNSPISQRITKGLGIISSNGKRWKEIRRFSLTTLRNFGMGKRSIEDRVQEEAHCLVEELRKTKASPCDPTFILGCAPCNVICSVVFQKRFDYKDQNFLTLMKRFNENFRILNSPWIQVCNNFPLLIDCFPGTHNKVLKNVALTRSYIREKVKEHQASLDVNNPRDFIDCFLIKMEQEKDNQKSEFNIENLVGTVADLFVAGTETTSTTLRYGLLLLLKHPEVTAKVQEEIDHVIGRHRSPCMQDRSHMPYTDAVVHEIQRYSDLVPTGVPHAVTTDTKFRNYLIPKGTTIMALLTSVLHDDKEFPNPNIFDPGHFLDKNGNFKKSDYFMPFSAGKRICAGEGLARMELFLFLTTILQNFNLKSVDDLKNLNTTAVTKGIVSLPPSYQICFIPV

SEQ ID NO: 42866 - protein, 457 aa, Homo sapiens
MERSFLEEAIPQYLKELLKDLVGAHISVSALVTGVRGMENRALKSFSAELSLSAWLPSVAALSSLAVNSPSFCPFFLGIISSNGKRWKEIRRFSLTTLRNFGMGKRSIEDRVQEEAHCLVEELRKTKASPCDPTFILGCAPCNVICSVVFQKRFDYKDQNFLTLMKRFNENFRILNSPWIQVCNNFPLLIDCFPGTHNKVLKNVALTRSYIREKVKEHQASLDVNNPRDFIDCFLIKMEQEKDNQKSEFNIENLVGTVADLFVAGTETTSTTLRYGLLLLLKHPEVTAKVQEEIDHVIGRHRSPCMQDRSHMPYTDAVVHEIQRYSDLVPTGVPHAVTTDTKFRNYLIPKGTTIMALLTSVLHDDKEFPNPNIFDPGHFLDKNGNFKKSDYFMPFSAGKRICAGEGLARMELFLFLTTILQNFNLKSVDDLKNLNTTAVTKGIVSLPPSYQICFIPV

SEQ ID NO: 42867 - protein, 388 aa, Homo sapiens
MFLQPIAKGIISSNGKRWKEIRRFSLTTLRNFGMGKRSIEDRVQEEAHCLVEELRKTKASPCDPTFILGCAPCNVICSVVFQKRFDYKDQNFLTLMKRFNENFRILNSPWIQVCNNFPLLIDCFPGTHNKVLKNVALTRSYIREKVKEHQASLDVNNPRDFIDCFLIKMEQEKDNQKSEFNIENLVGTVADLFVAGTETTSTTLRYGLLLLLKHPEVTAKVQEEIDHVIGRHRSPCMQDRSHMPYTDAVVHEIQRYSDLVPTGVPHAVTTDTKFRNYLIPKGTTIMALLTSVLHDDKEFPNPNIFDPGHFLDKNGNFKKSDYFMPFSAGKRICAGEGLARMELFLFLTTILQNFNLKSVDDLKNLNTTAVTKGIVSLPPSYQICFIPV

SEQ ID NO: 42868 - protein, 307 aa, Homo sapiens
MAAKCCSTFFLGCEFSQFLPLFLLGIISSNGKRWKEIRRFSLTTLRNFGMGKRSIEDRVQEEAHCLVEELRKTKASPCDPTFILGCAPCNVICSVVFQKRFDYKDQNFLTLMKRFNENFRILNSPWIQVCNNFPLLIDCFPGTHNKVLKNVALTRSYIREKVKEHQASLDVNNPRDFIDCFLIKMEQEKDNQKSEFNIENLVGTVADLFVAGTETTSTTLRYGLLLLLKHPEVTAKVQEEIDHVIGRHRSPCMQDRSHMPYTDAVVHEIQRYSDLVPTGVPHAVTTDTKFRNYLIPKSFDNKIMLAA

SEQ ID NO: 42869 - protein, 490 aa, Homo sapiens [sequence omitted]

SEQ ID NO: 42870 - protein, 453 aa, Homo sapiens
MDSLVVLVLCLSCLLLLSLWRQSSGRGKLPPGPTPLPVIGNILQIGIKDISKSLTNLSKVYGPVFTLYFGLKPIVVLHGYEAVKEALIDLGEEFSGRGIFPLAERANRGFGIVFSNGKKWKEIRRFSLMTLRNFGMGKRSIEDRVQEEARCLVEELRKTKASPCDPTFILGCAPCNVICSIIFHKRFDYKDQQFLNLMEKLNENIKILSSPWIQICNNFSPIIDYFPGTHNKLLKNVAFMKSYILEKVKEHQESMDMNNPQDFIDCFLMKMEKEKHNQPSEFTIESLENTAVDLFGAGTETTSTTLRYALLLLLKHPEVTAKVQEEIERVIGRNRSPCMQDRSHMPYTDAVVHEVQRYIDLLPTSLPHAVTCDIKFRNYLIPKGTTILISLTSVLHDNKEFPNPEMFDPHHFLDEGGNFKKSKYFMLVLKMIRTERTKRKRVGKLFWVSVRVT

SEQ ID NO: 42871 - protein, 446 aa, Homo sapiens
MGLEALVPLAVIVAIFLLLVDLMHRRQRWAARYPPGPLPLPGLGNLLHVDFQNTPYCFDQLRRRFGDVFSLQLAWTPVVVLNGLAAVREALVTHGEDTADRPPVPITQILGFGPRSQGRPFRPNGLLDKAVSNVIASLTCGRRFEYDDPRFLRLLDLAQEGLKEESGFLREVLNAVPVLLHIPALAGKVLRFQKAFLTQLDELLTEHRMTWDPAQPPRDLTEAFLAEMEKAKGNPESSFNDENLCIVVADLFSAGMVTTSTTLAWGLLLMILHPDVQRRVQQEIDDVIGQVRRPEMGDQAHMPYTTAVIHEVQRFGDIVPLGVTHMTSRDIEVQGFRIPKGTTLITNLSSVLKDEAVWEKPFRFHPEHFLDAQGHFVKPEAFLPFSAGRRACLGEPLARMELFLFFTSLLQHFSFSVPTGQPRPSHHGVFAFLVTPSPYELCAVPR

SEQ ID NO: 42872 - protein, 497 aa, Homo sapiens
MGLEALVPLAVIVAIFLLLVDLMHRRQRWAARYPPGPLPLPGLGNLLHVDFQNTPYCFDQLRRRFGDVFSLQLAWTPVVVLNGLAAVREALVTHGEDTADRPPVPITQILGFGPRSQGVFLARYGPAWREQRRFSVSTLRNLGLGKKSLEQWVTEEAACLCAAFANHSGRPFRPNGLLDKAVSNVIASLTCGRRFEYDDPRFLRLLDLAQEGLKEESGFLREVLNAVPVLLHIPALAGKVLRFQKAFLTQLDELLTEHRMTWDPAQPPRDLTEAFLAEMEKAKGNPESSFNDENLCIVVADLFSAGMVTTSTTLAWGLLLMILHPDVQRRVQQEIDDVIGQVRRPEMGDQAHMPYTTAVIHEVQRFGDIVPLGVTHMTSRDIEVQGFRIPKGTTLITNLSSVLKDEAVWEKPFRFHPEHFLDAQGHFVKPEAFLPFSAGRRACLGEPLARMELFLFFTSLLQHFSFSVPTGQPRPSHHGVFAFLVTPSPYELCAVPR

SEQ ID NO: 42873 - protein, 497 aa, Homo sapiens
MGLEALVPLAVIVAIFLLLVDLMHRRQRWAARYPPGPLPLPGLGNLLHVDFQNTPYCFDQLRRRFGDVFSLQLAWTPVVVLNGLAAVREALVTHGEDTADRPPVPITQILGFGPRGQGVFLARYGPAWREQRRFSVSTLRNLGLGKKSLEQWVTEEAACLCAAFANHSGRPFRPNGLLDKAVSNVIASLTCGRRFEYDDPRFLRLLDLAQEGLKEESGFLREVLNAVPVLLHIPALAGKVLRFQKAFLTQLDELLTEHRMTWDPAQPPRDLTEAFLAEMEKAKGNPESSFNDENLCIVVADLFSAGMVTTSTTLAWGLLLMILHPDVQRRVQQEIDDVIGQVRRPEMGDQAHMPYTTAVIHEVQRFGDIVPLGVTHMTSRDIEVQGFRIPKGTTLITNLSSVLKDEAVWEKPFRFHPEHFLDAQGHFVKPEAFLPFSAGRRACLGEPLARMELFLFFTSLLQHFSFSVPTGQPRPSHHGVFAFLVTPSPYELCAVPR

SEQ ID NO: 42874 - protein, 443 aa, Homo sapiens
QEALTLPLQLRRRFGDVFSLQLAWTPVVVLNGLAAVREALVTHGEDTADRPPVPITQILGFGPRGQGVFLARYGPAWREQRRFSVSTLRNLGLGKKSLEQWVTEEAACLCAAFANHDAPFAPTVSWTKPNVIASLTCGRRFEYDDPRFLRLLDLAQEGLKEESGFLREVLNAVPVLLHIPALAGKVLRFQKAFLTQLDELLTEHRMTWDPAQPPRDLTEAFLAEMEKAKGNPESSFNDENLCIVVADLFSAGMVTTSTTLAWGLLLMILHPDVQRRVQQEIDDVIGQVRRPEMGDQAHMPYTTAVIHEVQRFGDIVPLGVTHMTSRDIEVQGFRIPKGTTLITNLSSVLKDEAVWEKPFRFHPEHFLDAQGHFVKPEAFLPFSAGRRACLGEPLARMELFLFFTSLLQHFSFSVPTGQPRPSHHGVFAFLVTPSPYELCAVPR

SEQ ID NO: 42875 - protein, 446 aa, Homo sapiens [sequence omitted]

SEQ ID NO: 42876 - protein, 493 aa, Homo sapiens
MSALGVTVALLVWAAFLLLVSMWRQVHSSWNLPPGPFPLPIIGNLFQLELKNIPKSFTRLAQRFGPVFTLYVGSQRMVVMHGYKAVKEALLDYKDEFSGRGDLPAFHAHRDRGIIFNNGPTWKDIRRFSLTTLRNYGMGKQGNESRIQREAHFLLEALRKTQGQPFDPTFLIGCAPCNVIADILFRKHFDYNDEKFLRLMYLFNENFHLLSTPWLQLYNNFPSFLHYLPGSHRKVIKNVAEVKEYVSERVKEHHQSLDPNCPRDLTDCLLVEMEKEKHSAERLYTMDGITVTVADLFFAGTETTSTTLRYGLLILMKYPEIEEKLHEEIDRVIGPSRIPAIKDRQEMPYMDAVVHEIQRFITLVPSNLPHEATRDTIFRGYLIPKGTVVVPTLDSVLYDNQEFPDPEKFKPEHFLNENGKFKYSDYFKPFSTGKRVCAGEGLARMELFLLLCAILQHFNLKPLVDPKDIDLSPIHIGFGCIPPRYKLCVIPRS

SEQ ID NO: 42877 - protein, 493 aa, Homo sapiens; identical to SEQ ID NO: 42876

SEQ ID NO: 42878 - protein, 86 aa, Homo sapiens
MSALGVTVALLVWAAFLLLVSMWRQVHSSWNLPPGPFPLPIIGNLFQLELKNIPKSFTRLAQRFGPVFTLYVGSQRMVVMHGYKAV

SEQ ID NO: 42879 - protein, 491 aa, Homo sapiens
MDSISTAILLLLLALVCLLLTLSSRDKGKLPPGPRPLSILGNLLLLCSQDMLTSLTKLSKEYGSMYTVHLGPRRVVVLSGYQAVKEALVDQGEEFSGRGDYPAFFNFTKGNGIAFSSGDRWKVLRQFSIQILRNFGMGKRSIEERILEEGSFLLAELRKTEGEPFDPTFVLSRSVSNIICSVLFGSRFDYDDERLLTIIRLINDNFQIMSSPWGELYDIFPSLLDWVPGPHQRIFQNFKCLRDLIAHSVHDHQASLDPRSPRDFIQCFLTKMAEEKEDPLSHFHMDTLLMTTHNLLFGGTKTVSTTLHHAFLALMKYPKVQARVQEEIDLVVGRARLPALKDRAAMPYTDAVIHEVQRFADIIPMNLPHRVTRDTAFRGFLIPKGTDVITLLNTVHYDPSQFLTPQEFNPEHFLDANQSFKKSPAFMPFSAGRRLCLGESLARMELFLYLTAILQSFSLQPLGAPEDIDLTPLSSGLGNLPRPFQLCLRPR

SEQ ID NO: 42880 - protein, 502 aa, Homo sapiens
MLAAMGSLAAALWAVVHPRTLLLGTVAFLLAADFLKRRRPKNYPPGPWRLPFLGNFFLVDFEQSHLEVQLFVKKYGNLFSLELGDISAVLITGLPLIKEALIHMDQNFGNRPVTPMREHIFKKNGLIMSSGQAWKEQRRFTLTALRNFGLGKKSLEERIQEEAQHLTEAIKEENGQPFDPHFKINNAVSNIICSITFGERFEYQDSWFQQLLKLLDEVTYLEASKTCQLYNVFPWIMKFLPGPHQTLFSNWKKLKLFVSHMIDKHRKDWNPAETRDFIDAYLKEMSKHTGNPTSSFHEENLICSTLDLFFAGTETTSTTLRWALLYMALYPEIQEKVQAEIDRVIGQGQQPSTAARESMPYTNAVIHEVQRMGNIIPLNVPREVTVDTTLAGYHLPKGTMILTNLTALHRDPTEWATPDTFNPDHFLENGQFKKREAFMPFSIGKRACLGEQLARTELFIFFTSLMQKFTFRPPNNEKLSLKFRMGITISPVSHRLCAVPQV

SEQ ID NO: 42881 - protein, 501 aa, Homo sapiens
MWKLWRAEEGAAALGGALFLLLFALGVRQLLKQRRPMGFPPGPPGLPFIGNIYSLAASSELPHVYMRKQSQVYGEIFSLDLGGISTVVLNGYDVVKECLVHQSEIFADRPCLPLFMKMTKMGGLLNSRYGRGWVDHRRLAVNSFRYFGYGQKSFESKILEETKFFNDAIETYKGRPFDFKQLITNAVSNITNLIIFGERFTYEDTDFQHMIELFSENVELAASASVFLYNAFPWIGILPFGKHQQLFRNAAVVYDFLSRLIEKASVNRKPQLPQHFVDAYLDEMDQGKNDPSSTFSKENLIFSVGELIIAGTETTTNVLRWAILFMALYPNIQGQVQKEIDLIMGPNGKPSWDDKCKMPYTEAVLHEVLRFCNIVPLGIFHATSEDAVVRGYSIPKGTTVITNLYSVHFDEKYWRDPEVFHPERFLDSSGYFAKKEALVPFSLGRRHCLGEHLARMEMFLFFTALLQRFHLHFPHELVPDLKPRLGMTLQPQPYLICAERR

SEQ ID NO: 42882 - protein, 564 aa, Homo sapiens
MEATGTWALLLALALLLLLTLALSGTRARGHLPPGPTPLPLLGNLLQLRPGALYSGLMRLSKKYGPVFTIYLGPWRPVVVLVGQEAVREALGGQAEEFSGRGTVAMLEGTFDGHGVFFSNGERWRQLRKFTMLALRDLGMGKREGEELIQAEARCLVETFQGTEGRPFDPSLLLAQATSNVVCSLLFGLRFSYEDKEFQAVVRAAGGTLLGVSSQGGQTYEMFSWFLRPLPGPHKQLLHHVSTLAAFTVRQVQQHQGNLDASGPARDLVDAFLLKMAQEEQNPGTEFTNKNMLMTVIYLLFAGTMTVSTTVGYTLLLLMKYPHVQKWVREELNRELGAGQAPSLGDRTRLPYTDAVLHEAQRLLALVPMGIPRTLMRTTRFRGYTLPQGTEVFPLLGSILHDPNIFKHPEEFNPDRFLDADGRFRKHEAFLPFSLGKRVCLGEGLAKAELFLFFTTILQAFSLESPCPPDTLSLKPTVSGLFNIPPASTVGMDRVNVSRVYTAGSHIYTPAVVFRSLSHGPHAHLTHAAKMHNRTPIHNYKGHKATAGLAFHRHKYSPSAITST

SEQ ID NO: 42883 - protein, 504 aa, Homo sapiens
MEATGTWALLLALALLLLLTLALSGTRARGHLPPGPTPLPLLGNLLQLRPGALYSGLMRLSKKYGPVFTIYLGPWRPVVVLVGQEAVREALGGQAEEFSGRGTVAMLEGTFDGHGVFFSNGERWRQLRKFTMLALRDLGMGKREGEELIQAEARCLVETFQGTEGRPFDPSLLLAQATSNVVCSLLFGLRFSYEDKEFQAVVRAAGGTLLGVSSQGGQTYEMFSWFLRPLPGPHKQLLHHVSTLAAFTVRQVQQHQGNLDASGPARDLVDAFLLKMAQEEQNPGTEFTNKNMLMTVIYLLFAGTMTVSTTVGYTLLLLMKYPHVQKWVREELNRELGAGQAPSLGDRTRLPYTDAVLHEAQRLLALVPMGIPRTLMRTTRFRGYTLPQGTEVFPLLGSILHDPNIFKHPEEFNPDRFLDADGRFRKHEAFLPFSLGKRVCLGEGLAKAELFLFFTTILQAFSLESPCPPDTLSLKPTVSGLFNIPPAFQLQVRPTDLHSTTQTR

SEQ ID NO: 42884 - protein, 229 aa, Homo sapiens
MAMEEQNPGTEFTNKNMLMTVIYLLFAGTMTVSTTVGYTLLLLMKYPHVQKWVREELNRELGAGQAPSLGDRTRLPYTDAVLHEAQRLLALVPMGIPRTLMRTTRFRGYTLPQGTEVFPLLGSILHDPNIFKHPEEFNPDRFLDADGRFRKHEAFLPFSLGKRVCLGEGLAKAELFLFFTTILQAFSLESPCPPDTLSLKPTVSGLFNIPPAFQLQVRPTDLHSTTQTR

SEQ ID NO: 42885 - protein, 544 aa, Homo sapiens
MSSPGPSQPPAEDPPWPARLLRAPLGLLRLDPSGGALLLCGLVALLGWSWLRRRRARGIPPGPTPWPLVGNFGHVLLPPFLRRRSWLSSRTRAAGIDPSVIGPQVLLAHLARVYGSIFSFFIGHYLVVVLSDFHSVREALVQQAEVFSDRPRVPLISIVTKEKGVVFAHYGPVWRQQRKFSHSTLRHFGLGKLSLEPKIIEEFKYVKAEMQKHGEDPFCPFSIISNAVSNIICSLCFGQRFDYTNSEFKKMLGFMSRGLEICLNSQVLLVNICPWLYYLPFGPFKELRQIEKDITSFLKKIIKDHQESLDRENPQDFIDMYLLHMEEERKNNSNSSFDEEYLFYIIGDLFIAGTDTTTNSLLWCLLYMSLNPDVQEKVHEEIERVIGANRAPSLTDKAQMPYTEATIMEVQRLTVVVPLAIPHMTSENTVLQGYTIPKGTLILPNLWSVHRDPAIWEKPEDFYPNRFLDDQGQLIKKETFIPFGIGKRVCMGEQLAKMELFLMFVSLMQSFAFALPEDSKKPLLTGRFGLTLAPHPFNITISRR

SEQ ID NO: 42886 - protein, 501 aa, Homo sapiens
MSSPGPSQPPAEDPPWPARLLRAPLVGNFGHVLLPPFLRRRSWLSSRTRAAGIDPSVIGPQVLLAHLARVYGSIFSFFIGHYLVVVLSDFHSVREALVQQAEVFSDRPRVPLISIVTKEKGVVFAHYGPVWRQQRKFSHSTLRHFGLGKLSLEPKIIEEFKYVKAEMQKHGEDPFCPFSIISNAVSNIICSLCFGQRFDYTNSEFKKMLGFMSRGLEICLNSQVLLVNICPWLYYLPFGPFKELRQIEKDITSFLKKIIKDHQESLDRENPQDFIDMYLLHMEEERKNNSNSSFDEEYLFYIIGDLFIAGTDTTTNSLLWCLLYMSLNPDVQEKVHEEIERVIGANRAPSLTDKAQMPYTEATIMEVQRLTVVVPLAIPHMTSENTVLQGYTIPKGTLILPNLWSVHRDPAIWEKPEDFYPNRFLDDQGQLIKKETFIPFGIGKRVCMGEQLAKMELFLMFVSLMQSFAFALPEDSKKPLLTGRFGLTLAPHPFNITISRR

SEQ ID NO: 42887 - protein, 465 aa, Homo sapiens
MLLLGLLLLLPLLAGARLLWNWWKLRSLHLPPLAPGFLHLLQPDLPIYLLGLTQKFGPIYRLHLGLQDKLVSRNYPDLSLGDYSLLWKAHKKLTRSALLLGIRDSMEPVVEQLTQEFCERMRAQPGTPVAIEEEFSLLTCSIICYLTFGDKIKDDNLMPAYYKCIQEVLKTWSHWSIQIVDVIPFLRFFPNPGLRRLKQAIEKRDHIVEMQLRQHKESLVAGQWRDMMDYMLQGVAQPSMEEGSGQLLEGHVHMAAVDLLIGGTETTANTLSWAVVFLLHHPEIQQRLQEELDHELGPGASSSRVPYKDRARLPLLNATIAEVLRLRPVVPLALPHRTTRPSSISGYDIPEGTVIIPNLQGAHLDETVWERPHEFWPDRFLEPGKNSRALAFGCGARVCLGEPLARLELFVVLTRLLQAFTLLPSGDALPSLQPLPHCSVILKMQPFQVRLQPRGMGAHSPGQSQ

SEQ ID NO: 42888 - protein, 495 aa, Homo sapiens
MLLLGLLLLLPLLAGARLLWNWWKLRSLHLPPLAPGFLHLLQPDLPIYLLGLTQKFGPIYRLHLGLQDVVVLNSKRTIEEAMVKKWADFAGRPEPLTYKLVSRNYPDLSLGDYSLLWKAHKKLTRSALLLGIRDSMEPVVEQLTQEFCERMRAQPGTPVAIEEEFSLLTCSIICYLTFGDKIKDDNLMPAYYKCIQEVLKTWSHWSIQIVDVIPFLRFFPNPGLRRLKQAIEKRDHIVEMQLRQHKESLVAGQWRDMMDYMLQGVAQPSMEEGSGQLLEGHVHMAAVDLLIGGTETTANTLSWAVVFLLHHPEIQQRLQEELDHELGPGASSSRVPYKDRARLPLLNATIAEVLRLRPVVPLALPHRTTRPSSISGYDIPEGTVIIPNLQGAHLDETVWERPHEFWPDRFLEPGKNSRALAFGCGARVCLGEPLARLELFVVLTRLLQAFTLLPSGDALPSLQPLPHCSVILKMQPFQVRLQPRGMGAHSPGQSQ

SEQ ID NO: 42889 - protein, 495 aa, Homo sapiens; identical to SEQ ID NO: 42888

SEQ ID NO: 42890 - protein, 465 aa, Homo sapiens; identical to SEQ ID NO: 42887

SEQ ID NO: 42891 - protein, 465 aa, Homo sapiens; identical to SEQ ID NO: 42887

SEQ ID NO: 42892 - protein, 494 aa, Homo sapiens [sequence omitted]

SEQ ID NO: 42893 - protein, 494 aa, Homo sapiens [sequence omitted]

SEQ ID NO: 42894 - protein, 495 aa, Homo sapiens; identical to SEQ ID NO: 42888

SEQ ID NO: 42895 - protein, 464 aa, Homo sapiens
MLLLGLLLLPLLAGARLLWNWWKLRSLHLPPLAPGFLHLLQPDLPIYLLGLTQKFGPIYRLHLGLQDKLVSKNYPDLSLGDYSLLWKAHKKLTRSALLLGIRDSMEPVVEQLTQEFCERMRAQPGTPVAIEEEFSLLTCSIICYLTFGDKIKDDNLMPAYYKCIQEVLKTWSHWSIQIVDVIPFLRFFPNPGLRRLKQAIEKRDHIVEMQLRQHKESLVAGQWRDMMDYMLQGVAQPSMEEGSGQLLEGHVHMAAVDLLIGGTETTANTLSWAVVFLLHHPEIQQRLQEELDHELGPGASSSRVPYKDRARLPLLNATIAEVLRLRPVVPLALPHRTTRPSSISGYDIPEGTVIIPNLQGAHLDETVWERPHEFWPDRFLEPGKNSRALAFGCGARVCLGEPLARLELFVVLTRLLQAFTLLPSGDALPSLQPLPHCSVILKMQPFQVRLQPRGMGAHSPGQNQ

SEQ ID NO: 42896 - protein, 465 aa, Homo sapiens; identical to SEQ ID NO: 42887

SEQ ID NO: 42897 - protein, 464 aa, Homo sapiens; identical to SEQ ID NO: 42895

SEQ ID NO: 42898 - protein, 495 aa, Homo sapiens
MLLLGLLLLLPLLAGARLLWNWWKLRSLHLLPLAPGFLHLLQPDLPIYLLGLTQKFGPIYRLHLGLQDVVVLNSKRTIEEAMVKKWADFAGRPEPLTYKLVSKNYPDLSLGDYSLLWKAHKKLTRSALLLGIRDSMEPVVEQLTQEFCERMRAQPGTPVAIEEEFSLLTCSIICYLTFGDKIKDDNLMPAYYKCIQEVLKTWSHWSIQIVDVIPFLRFFPNPGLRRLKQAIEKRDHIVEMQLRQHKESLVAGQWRDMMDYMLQGVAQPSMEEGSGQLLEGHVHMAAVDLLIGGTETTANTLSWAVVFLLHHPEIQQRLQEELDHELGPGASSSRVPYKDRARLPLLNATIAEVLRLRPVVPLALPHRTTRPSSISGYDIPEGTVIIPNLQGAHLDETVWERPHEFWPDRFLEPGKNSRALAFGCGARVCLGEPLARLELFVVLTRLLQAFTLLPSGDALPSLQPLPHCSVILKMQPFQVRLQPRGMGAHSPGQNQ

SEQ ID NO: 42899 - protein, 495 aa, Homo sapiens
MLLLGLLLLLPLLAGARLLWNWWKLRSLHLPPLAPGFLHLLQPDLPIYLLGLTQKFGPIYRLHLGLQDVVVLNSKRTIEEAMVKKWADFAGRPEPLTYKLVSKNYPDLSLGDYSLLWKAHKKLTRSALLLGIRDSMEPVVEQLTQEFCERMRAQPGTPVAIEEEFSLLTCSIICYLTFGDKIKDDNLMPAYYKCIQEVLKTWSHWSIQIVDVIPFLRFFPNPGLRRLKQAIEKRDHIVEMQLRQHKESLVAGQWRDMMDYMLQGVAQPSMEEGSGQLLEGHVHMAAVDLLIGGTETTANTLSWAVVFLLHHPEIQQRLQEELDHELGPGASSSRVPYKDRARLPLLNATIAEVLRLRPVVPLALPHRTTRPSSISGYDIPEGTVIIPNLQGAHLDETVWERPHEFWPDRFLEPGKNSRALAFGCGARVCLGEPLARLELFVVLTRLLQAFTLLPSGDALPSLQPLPHCSVILKMQPFQVRLQPRGMGAHSPGQNQ

SEQ ID NO: 42900 - protein, 465 aa, Homo sapiens
MLLLGLLLLLPLLAGARLLWNWWKLRSLHLLPLAPGFLHLLQPDLPIYLLGLTQKFGPIYRLHLGLQDKLVSKNYPDLSLGDYSLLWKAHKKLTRSALLLGIRDSMEPVVEQLTQEFCERMRAQPGTPVAIEEEFSLLTCSIICYLTFGDKIKDDNLMPAYYKCIQEVLKTWSHWSIQIVDVIPFLRFFPNPGLRRLKQAIEKRDHIVEMQLRQHKESLVAGQWRDMMDYMLQGVAQPSMEEGSGQLLEGHVHMAAVDLLIGGTETTANTLSWAVVFLLHHPEIQQRLQEELDHELGPGASSSRVPYKDRARLPLLNATIAEVLRLRPVVPLALPHRTTRPSSISGYDIPEGTVIIPNLQGAHLDETVWERPHEFWPDRFLEPGKNSRALAFGCGARVCLGEPLARLELFVVLTRLLQAFTLLPSGDALPSLQPLPHCSVILKMQPFQVRLQPRGMGAHSPGQNQ

SEQ ID NO: 42901 - protein, 514 aa, Homo sapiens
MSSPISKSRSLAAFLQQLRSPRQPPRLVTSTAYTSPQPREVPVCPLTAGGETQNAAALPGPTSWPLLGSLLQILWKGGLKKQHDTLVEYHKKYGKIFRMKLGSFESVHLGSPCLLEALYRTESAYPQRLEIKPWKAYRDYRKEGYGLLILEGEDWQRVRSAFQKKLMKPGEVMKLDNKINEVLADFMGRIDELCDERGHVEDLYSELNKWSFESICLVLYEKRFGLLQKNAGDEAVNFIMAIKTMMSTFGRMMVTPVELHKSLNTKVWQDHTLAWDTIFKSVKACIDNRLEKYSQQPSADFLCDIYHQNRLSKKELYAAVTELQLAAVETTANSLMWILYNLSRNPQVQQKLLKEIQSVLPENQVPRAEDLRNMPYLKACLKESMRLTPSVPFTTRTLDKATVLGEYALPKGTVLMLNTQVLGSSEDNFEDSSQFRPERWLQEKEKINPFAHLPFGVGKRMCIGRRLAELQLHLALCWIVRKYDIQATDNEPVEMLHSGTLVPSRELPIAFCQR

SEQ ID NO: 42902 - protein, 448 aa, Homo sapiens
MSSPISKSRSLAAFLQQLRSPRQPPRLVTSTAYTSPQPREVPVCPLTAGGETQNAAALPGPTSWPLLGSLLQILWKGGLKKQHDTLVEYHKKYGKIFRMKLGSFESVHLGSPCLLEALYRTESAYPQRLEIKPWKAYRDYRKEGYGLLILEGEDWQRVRSAFQKKLMKPGEVMKLDNKINEVLADFMGRIDELCDERGHVEDLYSELNKWSFESICLVLYEKRFGLLQKNAGDEAVNFIMAIKTMMSTFGRMMVTPVELHKSLNTKVWQDHTLAWDTIFKSVKACIDNRLEKYSQQPSADFLCDIYHQNRLSKKELYAAVTELQLAAVETTANSLMWILYNLSRNPQVQQKLLKEIQSVLPENQVPRAEDLRNMPYLKACLKESMRLTPSVPFTTRTLDKATVLGEYALPKGIVRKYDIQATDNEPVEMLHSGTLVPSRELPIAFCQR

SEQ ID NO: 42903 - protein, 497 aa, Homo sapiens
MGLPALLASALCTFVLPLLLFLAAIKLWDLYCVSGRDRSCALPLPPGTMGFPFFGETLQMVLQRRKFLQMKRRKYGFIYKTHLFGRPTVRVMGADNVRRILLGEHRLVSVHWPASVRTILGSGCLSNLHDSSHKQRKKVIMRAFSREALECYVPVITEEVGSSLEQWLSCGERGLLVYPEVKRLMFRIAMRILLGCEPQLAGDGDSEQQLVEAFEEMTRNLFSLPIDVPFSGLYRGMKARNLIHARIEQNIRAKICGLRASEAGQGCKDALQLLIEHSWERGERLDMQALKQSSTELLFGGHETTASAATSLITYLGLYPHVLQKVREELKSKGLLCKSNQDNKLDMEILEQLKYIGCVIKETLRLNPPVPGGFRVALKTFELNGYQIPKGWNVIYSICDTHDVAEIFTNKEEFNPDRFMLPHPEDASRFSFIPFGGGLRSCVGKEFAKILLKIFTVELARHCDWQLLNGPPTMKTSPTVYPVDNLPARFTHFHGEI

SEQ ID NO: 42904 - protein, 428 aa, Homo sapiens
MKRRKYGFIYKTHLFGRPTVRVMGADNVRRILLGEHRLVSVHWPASVRTILGSGCLSNLHDSSHKQRKKVIMRAFSREALECYVPVITEEVGSSLEQWLSCGERGLLVYPEVKRLMFRIAMRILLGCEPQLAGDGDSEQQLVEAFEEMTRNLFSLPIDVPFSGLYRGMKARNLIHARIEQNIRAKICGLRASEAGQGCKDALQLLIEHSWERGERLDMQALKQSSTELLFGGHETTASAATSLITYLGLYPHVLQKVREELKSKGLLCKSNQDNKLDMEILEQLKYIGCVIKETLRLNPPVPGGFRVALKTFELNGYQIPKGWNVIYSICDTHDVAEIFTNKEEFNPDRFMLPHPEDASRFSFIPFGGGLRSCVGKEFAKILLKIFTVELARHCDWQLLNGPPTMKTSPTVYPVDNLPARFTHFHGEI

SEQ ID NO: 42905 - protein, 428 aa, Homo sapiens; identical to SEQ ID NO: 42904

SEQ ID NO: 42906 - protein, 522 aa, Homo sapiens
MFPWGLSCLSVLGAAGTALLCAGLLLSLAQHLWTLRWMLSRDRASTLPLPKGSMGWPFFGETLHWLVQGSRFHSSRRERYGTVFKTHLLGRPVIRVSGAENVRTILLGEHRLVRSQWPQSAHILLGSHTLLGAVGEPHRRRRKVLARVFSRAALERYVPRLQGALRHEVRSWCAAGGPVSVYDASKALTFRMAARILLGLRLDEAQCATLARTFEQLVENLFSLPLDVPFSGLRKGIRARDQLHRHLEGAISEKLHEDKAAEPGDALDLIIHSARELGHEPSMQELKESAVELLFAAFFTTASASTSLVLLLLQHPAAIAKIREELVAQGLGRACGCAPGAAGGSEGPPPDCGCEPDLSLAALGRLRYVDCVVKEVLRLLPPVSGGYRTALRTFELDGYQIPKGWSVMYSIRDTHETAAVYRSPPEGFDPERFGAAREDSRGASSRFHYIPFGGGARSCLGQELAQAVLQLLAVELVRTARWELATPAFPAMQTVPIVHPVDGLRLFFHPLTPSVAGNGLCL

SEQ ID NO: 42907 - protein, 531 aa, Homo sapiens
MAALGCARLRWALRGAGRGLCPHGARAKAAIPAALPSDKATGAPGAGPGVRRRQRSLEEIPRLGQLRFFFQLFVQGYALQLHQLQVLYKAKYGPMWMSYLGPQMHVNLASAPLLEQVMRQEGKYPVRNDMELWKEHRDQHDLTYGPFTTEGHHWYQLRQALNQRLLKPAEAALYTDAFNEVIDDFMTRLDQLRAESASGNQVSDMAQLFYYFALEAICYILFEKRIGCLQRSIPEDTVTFVRSIGLMFQNSLYATFLPKWTRPVLPFWKRYLDGWNAIFSFGKKLIDEKLEDMEAQLQAAGPDGIQVSGYLHFLLASGQLSPREAMGSLPELLMAGVDTTSNTLTWALYHLSKDPEIQEALHEEVVGVVPAGQVPQHKDFAHMPLLKAVLKETLRLYPVVPTNSRIIEKEIEVDGFLFPKNTQFVFCHYVVSRDPTAFSEPESFQPHRWLRNSQPATPRIQHPFGSVPFGYGVRACLGRRIAELEMQLLLARLIQKYKVVLAPETGELKSVARIVLVPNKKVGLQFLQRQC

SEQ ID NO: 42908 - protein, 508 aa, Homo sapiens
MTQTLKYASRVFHRVRWAPELGASLGYREYHSARRSLADIPGPSTPSFLAELFCKGGLSRLHELQVQGAAHFGPVWLASFGTVRTVYVAAPALVEELLRQEGPRPERCSFSPWTEHRRCRQRACGLLTAEGEEWQRLRSLLAPLLLRPQAAARYAGTLNNVVCDLVRRLRRQRGRGTGPPALVRDVAGEFYKFGLEGIAAVLLGSRLGCLEAQVPPDTETFIRAVGSVFVSTLLTMAMPHWLRHLVPGPWGRLCRDWDQMFAFAQRHVERREAEAAMRNGGQPEKDLESGAHLTHFLFREELPAQSILGNVTELLLAGVDTVSNTLSWALYELSRHPEVQTALHSEITAALSPGSSAYPSATVLSQLPLLKAVVKEVLRLYPVVPGNSRVPDKDIHVGDYIIPKNTLVTLCHYATSRDPAQFPEPNSFRPARWLGEGPTPHPFASLPFGFGKRSCMGRRLAELELQMALAQILTHFEVQPEPGAAPVRPKTRTVLVPERSINLQFLDR

SEQ ID NO: 42909 - protein, 503 aa, Homo sapiens
MALIPDLAMETWLLLAVSLVLLYLYGTHSHGLFKKLGIPGPTPLPFLGNILSYHKGFCMFDMECHKKYGKVWGFYDGQQPVLAITDPDMIKTVLVKECYSVFTNRRPFGPVGFMKSAISIAEDEEWKRLRSLLSPTFTSGKLKEMVPIIAQYGDVLVRNLRREAETGKPVTLKDVFGAYSMDVITSTSFGVNIDSLNNPQDPFVENTKKLLRFDFLDPFFLSITVFPFLIPILEVLNICVFPREVTNFLRKSVKRMKESRLEDTQKHRVDFLQLMIDSQNSKETESHKALSDLELVAQSIIFIFAGYETTSSVLSFIMYELATHPDVQQKLQEEIDAVLPNKAPPTYDTVLQMEYLDMVVNETLRLFPIAMRLERVCKKDVEINGMFIPKGVVVMIPSYALHRDPKYWTEPEKFLPERFSKKNKDNIDPYIYTPFGSGPRNCIGMRFALMNMKLALIRVLQNFSFKPCKETQIPLKLSLGGLLQPEKPVVLKVESRDGTVSGA

SEQ ID NO: 42910 - protein, 353 aa, Homo sapiens
MALIPDLAMETWLLLAVSLVLLYLVFGAYSMDVITSTSFGVNIDSLNNPQDPFVENTKKLLRFDFLDPFFLSITVFPFLIPILEVLNICVFPREVTNFLRKSVKRMKESRLEDTQKHRVDFLQLMIDSQNSKETESHKALSDLELVAQSIIFIFAGYETTSSVLSFIMYELATHPDVQQKLQEEIDAVLPNKAPPTYDTVLQMEYLDMVVNETLRLFPIAMRLERVCKKDVEINGMFIPKGVVVMIPSYALHRDPKYWTEPEKFLPERFSKKNKDNIDPYIYTPFGSGPRNCIGMRFALMNMKLALIRVLQNFSFKPCKETQIPLKLSLGGLLQPEKPVVLKVESRDGTVSGA

SEQ ID NO: 42911 - protein, 79 aa, Homo sapiens
MVPIIAQYGDVLVRNLRREAETGKPVTLKDVFGAYSMDVITSTSFGVNIDSLNNPQDPFVENTKKLLRFDFLDPFFLSI

SEQ ID NO: 42912 - protein, 504 aa, Homo sapiens
MDLIPNFAMETWVLVATSLVLLYIYGTHSHKLFKKLGIPGPTPLPFLGTILFYLRGLWNFDRECNEKYGEMWGLYEGQQPMLVIMDPDMIKTVLVKECYSVFTNQMPLGPMGFLKSALSFAEDEEWKRIRTLLSPAFTSVKFKEMVPIISQCGDMLVRSLRQEAENSKSINLKDFFGAYTMDVITGTLFGVNLDSLNNPQDPFLKNMKKLLKLDFLDPFLLLISLFPFLTPVFEALNIGLFPKDVTHFLKNSIERMKESRLKDKQKHRVDFFQQMIDSQNSKETKSHKALSDLELVAQSIIIIFAAYDTTSTTLPFIMYELATHPDVQQKLQEEIDAVLPNKAPVTYDALVQMEYLDMVVNETLRLFPVVSRVTRVCKKDIEINGVFIPKGLAVMVPIYALHHDPKYWTEPEKFCPESRFSKKNKDSIDLYRYIPFGAGPRNCIGMRFALTNIKLAVIRALQNFSFKPCKETQIPLKLDNLPILQPEKPIVLKVHLRDGITSGP

SEQ ID NO: 42913 - protein, 420 aa, Homo sapiens
MDLIPNFAMETWVLVATSLVLLYIYGTHSHKLFKKLGIPGPTPLPFLGTILFYLRGLWNFDRECNEKYGEMWGLYEGQQPMLVIMDPDMIKTVLVKECYSVFTNQMPLGPMGFLKSALSFAEDEEWKRIRTLLSPAFTSVKFKEMVPIISQCGDMLVRSLRQEAENSKSINLKDFFGAYTMDVITGTLFGVNLDSLNNPQDPFLKNMKKLLKLDFLDPFLLLISLFPFLTPVFEALNIGLFPKDVTHFLKNSIERMKESRLKDKQKHRVDFFQQMIDSQNSKETKSHKALSDLELVAQSIIIIFAAYDTTSTTLPFIMYELATHPDVQQKLQEEIDAVLPNKAPVTYDALVQMEYLDMVVNETLRLFPVVSRVTRVCKKDIEINGVFIPKGLAVMVPIYALHHDPKYWTEPEKFCPERSH

SEQ ID NO: 42914 - protein, 280 aa, Homo sapiens
MNLETGNGPHHFPMWRYVGEKPEAGSREQQVHQLERFLWGLHHGCNHWHIIWSELGFSQQSTRSLSEKYEEAFKIGFFGSLFTLNIQSLAVLPRPECMVRSGLTETSTSWVRVILLPQPPEELGLQHRVDFFQQMIDSQNSKETKSHKALSDLELVAQSIIIIFAAYDTTSTTLPFIMYELATHPDVQQKLQEEIDAVLPNKAPVTYDALVQMEYLDMVVNETLRLFPVVSRVTRVCKKDIEINGVFIPKGLAVMVPIYALHHDPKYWTEPEKFCPERSH

SEQ ID NO: 42915 - protein, 503 aa, Homo sapiens
MDLIPNFAMETWVLVATSLVLLYIYGTHSHKLFKKLGIPGPTPLPFLGTILFYLRGLWNFDRECNEKYGEMWGLYEGQQPMLVIMDPDMIKTVLVKECYSVFTNQMPLGPMGFLKSALSFAEDEEWKRIRTLLSPAFTSVKFKEMVPIISQCGDMLVRSLRQEAENSKSINLKDFFGAYTMDVITGTLFGVNLDSLNNPQDPFLKNMKKLLKLDFLDPFLLLISLFPFLTPVFEALNIGLFPKDVTHFLKNSIERMKESRLKDKQKHRVDFFQQMIDSQNSKETKSHKALSDLELVAQSIIIIFAAYDTTSTTLPFIMYELATHPDVQQKLQEEIDAVLPNKAPVTYDALVQMEYLDMVVNETLRLFPVVSRVTRVCKKDIEINGVFIPKGLAVMVPIYALHHDPKYWTEPEKFCPERFSKKNKDSIDLYRYIPFGAGPRNCIGMRFALTNIKLAVIRALQNFSFKPCKETQIPLKLDNLPILQPEKPIVLKVHLRDGITSGP

SEQ ID NO: 42916 - protein, 126 aa, Homo sapiens
MDLIPNFAMETWVLVATSLVLLYIYGTHSHKLFKKLGIPGPTPLPFLGTILFYLRGLWNFDRECNEKFLWGLHHGCNHWHIIWSELGFSQQSTRSLSEKYEEAFKIGFFGSLFTLNITLSISYPSF

SEQ ID NO: 42917 - protein, 74 aa, Homo sapiens
MDLIPNFAMETWVLVATSLVLLYIYGTHSHKLFKKLGIPGPTPLPFLGTILFYLRGLWNFDRECNEKYGEMWGP

SEQ ID NO: 42918 - protein, 502 aa, Homo sapiens
MDLIPNLAVETWLLLAVSLVLLYLYGTRTHGLFKRLGIPGPTPLPLLGNVLSYRQGLWKFDTECYKKYGKMWGTYEGQLPVLAITDPDVIRTVLVKECYSVFTNRRSLGPVGFMKSAISLAEDEEWKRIRSLLSPTFTSGKLKEMFPIIAQYGDVLVRNLRREAEKGKPVTLKDIFGAYSMDVITGTSFGVNIDSLNNPQDPFVESTKKFLKFGFLDPLFLSIILFPFLTPVFEALNVSLFPKDTINFLSKSVNRMKKSRLNDKQKHRLDFLQLMIDSQNSKETESHKALSDLELAAQSIIFIFAGYETTSSVLSFTLYELATHPDVQQKLQKEIDAVLPNKAPPTYDAVVQMEYLDMVVNETLRLFPVAIRLERTCKKDVEINGVFIPKGSMVVIPTYALHHDPKYWTEPEEFRPERFSKKKDSIDPYIYTPFGTGPRNCIGMRFALMNMKLALIRVLQNFSFKPCKETQIPLKLDTQGLLQPEKPIVLKVDSRDGTLSGE

SEQ ID NO: 42919 - protein, 39 aa, Homo sapiens
MDLIPNLAVETWLLLAVSLVLLYLMRVPKSAKSPLTKQT

SEQ ID NO: 42920 - protein, 492 aa, Homo sapiens
MQLLMLELLLLFIVYGTRTHGLFKRLGIPGPTPLPLLGNVLSYRQGLWKFDTECYKKYGKMWGTYEGQLPVLAITDPDVIRTVLVKECYSVFTNRRSLGPVGFMKSAISLAEDEEWKRIRSLLSPTFTSGKLKEMFPIIAQYGDVLVRNLRREAEKGKPVTLKDIFGAYSMDVITGTSFGVNIDSLNNPQDPFVESTKKFLKFGFLDPLFLSIILFPFLTPVFEALNVSLFPKDTINFLSKSVNRMKKSRLNDKQKHRLDFLQLMIDSQNSKETESHKALSDLELAAQSIIFIFAGYETTSSVLSFTLYELATHPDVQQKLQKEIDAVLPNKAPPTYDAVVQMEYLDMVVNETLRLFPVAIRLERTCKKDVEINGVFIPKGSMVVIPTYALHHDPKYWTEPEEFRPERFSKKKDSIDPYIYTPFGTGPRNCIGMRFALMNMKLALIRVLQNFSFKPCKETQIPLKLDTQGLLQPEKPIVLKVDSRDGTLSGE

SEQ ID NO: 42921 - protein, 533 aa, Homo sapiens
MDLIPNLAVETWLLLAVSLILLYLYGTRTHGLFKKLGIPGPTPLPFLGNALSFRKGYWTFDMECYKKYRKVWGIYDCQQPMLAITDPDMIKTVLVKECYSVFTNRRPFGPVGFMKNAISIAEDEEWKRIRSLLSPTFTSGKLKEMVPIIAQYGDVLVRNLRREAETGKPVTLKHVFGAYSMDVITSTSFGVSIDSLNNPQDPFVENTKKLLRFNPLDPFVLSIKVFPFLTPILEALNITVFPRKVISFLTKSVKQIKEGRLKETQKHRVDFLQLMIDSQNSKDSETHKALSDLELMAQSIIFIFAGYETTSSVLSFIIYELATHPDVQQKVQKEIDTVLPNKAPPTYDTVLQLEYLDMVVNETLRLFPVAMRLERVCKKDVEINGMFIPKGVVVMIPSYVLHHDPKYWREPEKFLPERFSKKNKDNIDPYIYTPFGSGPRNCIGMRFALVNMKLALVRVLQNFSFKPCKETQIPLKLRFGGLLLTEKPIVLKAESRDETFVDMEPIHMDFLRSLAFQGPHLCFFWELLCPTIR

SEQ ID NO: 42922 - protein, 503 aa, Homo sapiens
MDLIPNLAVETWLLLAVSLILLYLYGTRTHGLFKKLGIPGPTPLPFLGNALSFRKGYWTFDMECYKKYRKVWGIYDCQQPMLAITDPDMIKTVLVKECYSVFTNRRPFGPVGFMKNAISIAEDEEWKRIRSLLSPTFTSGKLKEMVPIIAQYGDVLVRNLRREAETGKPVTLKHVFGAYSMDVITSTSFGVSIDSLNNPQDPFVENTKKLLRFNPLDPFVLSIKVFPFLTPILEALNITVFPRKVISFLTKSVKQIKEGRLKETQKHRVDFLQLMIDSQNSKDSETHKALSDLELMAQSIIFIFAGYETTSSVLSFIIYELATHPDVQQKVQKEIDTVLPNKAPPTYDTVLQLEYLDMVVNETLRLFPVAMRLERVCKKDVEINGMFIPKGVVVMIPSYVLHHDPKYWREPEKFLPERFSKKNKDNIDPYIYTPFGSGPRNCIGMRFALVNMKLALVRVLQNFSFKPCKETQIPLKLRFGGLLLTEKPIVLKAESRDETVSGA

SEQ ID NO: 42923 - protein, 469 aa, Homo sapiens
MELISPTVIIILGCLALFLLLQRKNLRRPPCIKGWIPWIGVGFEFGKAPLEFIEKARIKYGPIFTVFAMGNRMTFVTEEEGINVFLKSKKVDFELAVQNIVYRTASIPKNVFLALHEKLYIMLKGKMGTVNLHQFTGQLTEELHEQLENLGTHGTMDLNNLVRHLLYPVTVNMLFNKSLFSTNKKKIKEFHQYFQVYDEDFEYGSQLPECLLRNWSKSKKWFLELFEKNIPDIKACKSAKDNSMTLLQATLDIVETETSKENSPNYGLLLLWASLSNAVPVAFWTLAYVLSHPDIHKAIMEGISSVFGKAGKDKIKVSEDDLENLLLIKWCVLETIRLKAPGVITRKVVKPVEILNYIIPSGDLLMLSPFWLHRNPKYFPEPELFKPERWKKANLEKHSFLDCFMAFGSGKFQCPARWFALLEVQMCIILILYKYDCSLLDPLPKQSYLHLVGVPQPEGQCRIEYKQRI

SEQ ID NO: 42924 - protein, 519 aa, Homo sapiens
MSVSVLSPSRLLGDVSGILQAASLLILLLLLIKAVQLYLHRQWLLKALQQFPCPPSHWLFGHIQELQQDQELQRIQKWVETFPSACPHWLWGGKVRVQLYDPDYMKVILGRSDPKSHGSYRFLAPWIGYGLLLLNGQTWFQHRRMLTPAFHYDILKPYVGLMADSVRVMLDKWEELLGQDSPLEVFQHVSLMTLDTIMKCAFSHQGSIQVDRNSQSYIQAISDLNNLVFSRVRNAFHQNDTIYSLTSAGRWTHRACQLAHQHTDQVIQLRKAQLQKEGELEKIKRKRHLDFLDILLLAKMENGSILSDKDLRAEVDTFMFEGHDTTASGISWILYALATHPKHQERCREEIHSLLGDGASITWNHLDQMPYTTMCIKEALRLYPPVPGIGRELSTPVTFPDGRSLPKGIMVLLSIYGLHHNPKVWPNPEVFDPFRFAPGSAQHSHAFLPFSGGSRNCIGKQFAMNELKVATALTLLRFELLPDPTRIPIPIARLVLKSKNGIHLRLRRLPNPCEDKDQL

SEQ ID NO: 42925 - protein, 520 aa, Homo sapiens [sequence omitted]

SEQ ID NO: 42926 - protein, 455 aa, Homo sapiens
MSVSVLSPSRLLGDVSGILQAASLLILLLLLIKAVQLYLHRQWLLKALQQFPCPPSHWLFGHIQELQQDQELQRIQKWVETFPSACPHWLWGGKVRVQLYDPDYMKVILGRSDPKSHGSYRFLAPWIGYGLLLLNGQTWFQHRRMLTPAFHYDILKPYVGLMADSVRVMLDKWEELLGQDSPLEVFQHVSLMTLDTIMKCAFSHQGSIQVDRNSQSYIQAISDLNNLVFSRVRNAFHQNDTIYSLTSAGRWTHRACQLAHQHTDQVIQLRKAQLQKEGELEKIKRKRHLDFLDILLLAKMENGSILSDKDLRAEVDTFMFEGHDTTASGISWILYALATHPKHQERCREEIHSLLGDGASITWNHLDQMPYTTMCIKEALRLYPPVPGIGRELSTPVTFPDGRSLPKGIMVLLSIYGLHHNPKVWPNPEVFDPFRFAPGSAQHSHAFLPFSGGSR

SEQ ID NO: 42927 - protein, 157 aa, Homo sapiens
MKVILGRSDPKSHGSYRFLAPWIGYGLLLLNGQTWFQHRRMLTPAFHYDILKPYVGLMADSVRVMLDKWEELLGQDSPLEVFQHVSLMTLDTIMKCAFSHQGSIQVDRPSDPTEEGSTTEGGGAGEDQEEEAFGFSGYPPLGQNGEWEHLVRQGPPC

SEQ ID NO: 42928 - protein, 524 aa, Homo sapiens
MPQLSLSWLGLGPVAASPWLLLLLVGGSWLLARVLAWTYTFYDNCRRLQCFPQPPKQNWFWGHQGLVTPTEEGMKTLTQLVTTYPQGFKLWLGPTFPLLILCHPDIIRPITSASAAVAPKDMIFYGFLKPWLGDGLLLSGGDKWSRHRRMLTPAFHFNILKPYMKIFNKSVNIMHDKWQRLASEGSARLDMFEHISLMTLDSLQKCVFSFESNCQEKPSEYIAAILELSAFVEKRNQQILLHTDFLYYLTPDGQRFRRACHLVHDFTDAVIQERRCTLPTQGIDDFLKNKAKSKTLDFIDVLLLSKDEDGKELSDEDIRAEADTFMFEGHDTTASGLSWVLYHLAKHPEYQEQCRQEVQELLKDREPIEIEWDDLAQLPFLTMCIKESLRLHPPVPVISRCCTQDFVLPDGRVIPKGIVCLINIIGIHYNPTVWPDPEVYDPFRFDQENIKERSPLAFIPFSAGPRNCIGQAFAMAEMKVVLALTLLHFRILPTHTEPRRKPELILRAEGGLWLRVEPLGANSQ

SEQ ID NO: 42929 - protein, 454 aa, Homo sapiens
MPQLSLSWLGLGPVAASPWLLLLLVGGSWLLARVLAWTYTFYDNCRRLQCFPQPPKQNWFWGHQGLVTPTEEGMKTLTQLVTTYPQGFKLWLGPTFPLLILCHPDIIRPITSASAAVAPKDMIFYGFLKPWLGDGLLLSGGDKWSRHRRMLTPAFHFNILKPYMKIFNKSVNIMHDKWQRLASEGSARLDMFEHISLMTLDSLQKCVFSFESNCQEKPSEYIAAILELSAFVEKRNQQILLHTDFLYYLTPDGQRFRRACHLVHDFTDAVIQERRCTLPTQGIDDFLKNKAKSKTLDFIDVLLLSKDEDGKELSDEDIRAEADTFMFEGHDTTASGLSWVLYHLAKHPEYQEQCRQEVQELLKDREPIEIEWDDLAQLPFLTMCIKESLRLHPPVPVISRCCTQDFVLPDGRVIPKGLRPLPFRPREHQGEVTSGFYSLLGRAQKLHRAGVRHG

SEQ ID NO: 42930 - protein, 524 aa, Homo sapiens; identical to SEQ ID NO: 42928

SEQ ID NO: 42931 - protein, 524 aa, Homo sapiens
MSLLSLPWLGLRPVATSPWLLLLLVVGSWLLARILAWTYAFYNNCRRLQCFPQPPKRNWFWGHLGLITPTEEGLKNSTQMSATYSQGFTIWLGPIIPFIVLCHPDTIRSITNASAAIAPKDNLFIRFLKPWLGEGILLSGGDKWSRHRRMLTPAFHFNILKSYITIFNKSANIMLDKWQHLASEGSSCLDMFEHISLMTLDSLQKCIFSFDSHCQERPSEYIATILELSALVEKRSQHILQHMDFLYYLSHDGRRFHRACRLVHDFTDAVIRERRRTLPTQGIDDFFKDKAKSKTLDFIDVLLLSKDEDGKALSDEDIRAEADTFMFGGHDTTASGLSWVLYNLARHPEYQERCRQEVQELLKDRDPKEIEWDDLAQLPFLTMCVKESLRLHPPAPFISRCCTQDIVLPDGRVIPKGITCLIDIIGVHHNPTVWPDPEVYDPFRFDPENSKGRSPLAFIPFSAGPRNCIGQAFAMAEMKVVLALMLLHFRFLPDHTEPRRKLELIMRAEGGLWLRVEPLNVSLQ

SEQ ID NO: 42932 - protein, 524 aa, Homo sapiens; identical to SEQ ID NO: 42931

SEQ ID NO: 42933 - protein, 531 aa, Homo sapiens
MLPITDRLLHLLGLEKTAFRIYAVSTLLLFLLFFLFRLLLRFLRLCRSFYITCRRLRCFPQPPRRNWLLGHLGMYLPNEAGLQDEKKVLDNMHHVLLVWMGPVLPLLVLVHPDYIKPLLGASAAIAPKDDLFYGFLKPWLGDGLLLSKGDKWSRHRRLLTPAFHFDILKPYMKIFNQSADIMHAKWRHLAEGSAVSLDMFEHISLMTLDSLQKCVFSYNSNCQEKMSDYISAIIELSALSVRRQYRLHHYLDFIYYRSADGRRFRQACDMVHHFTTEVIQERRRALRQQGAEAWLKAKQGKTLDFIDVLLLARDEDGKELSDEDIRAEADTFMFEGHDTTSSGISWMLFNLAKYPEYQEKCREEIQEVMKGRELEELEWDDLTQLPFTTMCIKESLRQYPPVTLVSRQCTEDIKLPDGRIIPKGIICLVSIYGTHHNPTVWPDSKVYNPYRFDPDNPQQRSPLAYVPFSAGPRNCIGQSFAMAELRVVVALTLLRFRLSVDRTRKVRRKPELILRTENGLWLKVEPLPPRA

SEQ ID NO: 42934 - protein, 520 aa, Homo sapiens
MPQLSLSSLGLWPMAASPWLLLLLVGASWLLARILAWTYTFYDNCCRLRCFPQPPKRNWFLGHLGLIHSSEEGLLYTQSLACTFGDMCCWWVGPWHAIVRIFHPTYIKPVLFAPAAIVPKDKVFYSFLKPWLGDGLLLSAGEKWSRHRRMLTPAFHFNILKPYMKIFNESVNIMHAKWQLLASEGSARLDMFEHISLMTLDSLQKCVFSFDSHCQEKPSEYIAAILELSALVTKRHQQILLYIDFLYYLTPDGQRFRRACRLVHDFTDAVIQERRRTLPSQGVDDFLQAKAKSKTLDFIDVLLLSKDEDGKKLSDEDIRAEADTFMFEGHDTTASGLSWVLYHLAKHPEYQERCRQEVQELLKDREPKEIEWDDLAQLPFLTMCIKESLRLHPPVPAVSRCCTQDIVLPDGRVIPKGIICLISVFGTHHNPAVWPDPEVYDPFRFDPKNIKERSPLAFIPFSAGPRNCIGQAFAMAEMKVVLGLTLLRFRVLPDHTEPRRKPELVLRAEGGLWLRVEPLS

SEQ ID NO: 42935 - protein, 447 aa, Homo sapiens
MRVLTQLVATYPQGFKVWMGPIFPVIRFCHPNIIRSVINASAAIVPKDKVFYSFLKPWLGDGLLLSAGEKWSRHRRMLTPAFHFNILKPYMKIFNESVNIMHAKWQLLASEGSARLDMFEHISLMTLDSLQKCVFSFDSHCQEKPSEYIAAILELSALVTKRHQQILLYIDFLYYLTPDGQRFRRACRLVHDFTDAVIQERRRTLPSQGVDDFLQAKAKSKTLDFIDVLLLSKDEDGKKLSDEDIRAEADTFMFEGHDTTASGLSWVLYHLAKHPEYQERCRQEVQELLKDREPKEIEWDDLAQLPFLTMCIKESLRLHPPVPAVSRCCTQDIVLPDGRVIPKGIICLISVFGTHHNPAVWPDPEVYDPFRFDPKNIKERSPLAFIPFSAGPRNCIGQAFAMAEMKVVLGLTLLRFRVLPDHTEPRRKPELVLRAEGGLWLRVEPLS

SEQ ID NO: 42936 - protein, 332 aa, Homo sapiens
MPSITTAAASGVSRSPGNRTGSWVTWAWKPSEYITAIMELSALVVKRNNQFFRYKDFLYFLTPCGRRFHRACRLVHDFTDAVIQERRRTLTSQGVDDFLQAKAKSKTLDFIDVLLLSEDKNGKELSDEDIRAEADTFMFGGHDTTASGLSWVLYNLARHPEYQERCRQEVQELLKDREPKEIEWDDLAQLPFLTMCLKESLRLHPPIPTFARGCTQDVVLPDSRVIPKGNVCNINIFAIHHNPSVWPDPEVYDPFRFDPENAQKRSPMAFIPFSAGPRNCIGQKFAMAEMKVVLALTLLRFRILPDHREPRRTPEIVLRAEDGLWLRVEPLG

SEQ ID NO: 42937 - protein, 519 aa, Homo sapiens
MSLLSLSWLGLRPVAASPWLLLLVVGASWLLARILAWTYAFYHNGRRLRCFPQPRKQNWFLGHLGLVTPTEEGLRVLTQLVATYPQGFVRWLGPITPIINLCHPDIVRSVINTSDAITDKDIVFYKTLKPWLGDGLLLSVGDKWRHHRRLTPAFHFNILKPYIKIFSKSANIMHAKWQRLAMEGSTCLDVFEHISLMTLDSLQKCIFSFDSNCQEKPSEYITAIMELSALVVKRNNQFFRYKDFLYFLTPCGRRFHRACRLVHDFTDAVIQERRRTLTSQGVDDFLQAKAKSKTLDFIDVLLLSEDKNGKELSDEDIRAEADTFMFGGHDTTASGLSWVLYNLARHPEYQERCRQEVQELLKDREPKEIEWDDLAQLPFLTMCLKESLRLHPPIPTFARGCTQDVVLPDSRVIPKGNVCNINIFAIHHNPSVWPDPEVYDPFRFDPENAQKRSPMAFIPFSAGPRNCIGQKFAMAEMKVVLALTLLRFRILPDHREPRRTPEIVLRAEDGLWLRVEPLG

SEQ ID NO: 42938 - protein, 267 aa, Homo sapiens
TPAFHFNILKPYIKIFSKSANIMHAKWQRLAMEGSTCLDVFEHISLMTLDSLQKCIFSFDSNCQEKPSEYITAIMELSALVVKRNNQFFRYKDFLYFLTPCGRRFHRACRLVHDFTDAVIQERRRTLTSQGVDDFLQAKAKSKTLDFIDVLLLSEDKNGKELSDEDIRAEADTFMFGGHDTTASGLSWVLYNLARHPEYQERCRQEVQELLKDREPKEIEWDDLAQLPFLTMCLKESLRLHPPIPTFARGCTQDVVLPDSRVIPKGL

SEQ ID NO: 42939 - protein, 503 aa, Homo sapiens
MAGLWLGLVWQKLLLWGAASALSLAGASLVLSLLQRVASYALLMKPDGREFFQQIIEYTEEYRHMPLLKLWVGPVPMVALYNAENVEVILTSSKQIDKSSMYKFLEPWLGLGLLTSTGNKWRSRRKMLTPTFHFTILEDFLDIMNEQANILVKKLEKHINQEAFNCFFYITLCALDIICETAMGKNIGAQSNDDSEYVRAVYRMSEMIFRRIKMPWLWLDLWYLMFKEGWEHKKSLQILHTFTNSVIAERANEMNANEDCRGDGRGSAPSKNKRRAFLDLLLSVTDDEGNRLSHEDIREEVDTFMFEGHDTTAAAINWSLYLLGSNPEVQKKVDHELDDVFGKSDRPATVEDLKKLRYLECVIKETLRLFPSVPLFARSVSEDCEVAGYRVLKGTEAVIIPYALHRDPRYFPNPEEFQPERFFPENAQGRHPYAYVPFSAGPRNCIGQKFAVMEEKTILSCILRHFWIESNQKREELGLEGQLILRPSNGIWIKLKRRNADER

SEQ ID NO: 42940 - protein, 525 aa, Homo sapiens
MAGLWLGLVWQKLLLWGAASALSLAGASLVLSLLQRVASYARKWQQMRPIPTVARAYPLVGHALLMKPDGREFFQQIIEYTEEYRHMPLLKLWVGPVPMVALYNAENVEVILTSSKQIDKSSMYKFLEPWLGLGLLTSTGNKWRSRRKMLTPTFHFTILEDFLDIMNEQANILVKKLEKHINQEAFNCFFYITLCALDIICETAMGKNIGAQSNDDSEYVRAVYRMSEMIFRRIKMPWLWLDLWYLMFKEGWEHKKSLQILHTFTNSVIAERANEMNANEDCRGDGRGSAPSKNKRRAFLDLLLSVTDDEGNRLSHEDIREEVDTFMFEGHDTTAAAINWSLYLLGSNPEVQKKVDHELDDVFGKSDRPATVEDLKKLRYLECVIKETLRLFPSVPLFARSVSEDCEVAGYRVLKGTEAVIIPYALHRDPRYFPNPEEFQPERFFPENAQGRHPYAYVPFSAGPRNCIGQKFAVMEEKTILSCILRHFWIESNQKREELGLEGQLILRPSNGIWIKLKRRNADER

SEQ ID NO: 42941 - protein, 500 aa, Homo sapiens
MSPGLLLLGSAVLLAFGLCCTFVHRARSRYEHIPGPPRPSFLLGHLPCFWKKDEVGGRVLQDVFLDWAKKYGPVVRVNVFHKTSVIVTSPESVKKFLMSTKYNKDSKMYRALQTVFGERLFGQGLVSECNYERWHKQRRVIDLAFSRSSLVSLMETFNEKAEQLVEILEAKADGQTPVSMQDMLTYTAMDILAKAAFGMETSMLLGAQKPLSQAVKLMLEGITASRNTLAKFLPGKRKQLREVRESIRFLRQVGRDWVQRRREALKRGEEVPADILTQILKAEEGAQDDEGLLDNFVTFFIAGHETSANHLAFTVMELSRQPEIVARLQAEVDEVIGSKRYLDFEDLGRLQYLSQVLKESLRLYPPAWGTFRLLEEETLIDGVRVPGNTPLLFSTYVMGRMDTYFEDPLTFNPDRFGPGAPKPRFTYFPFSLGHRSCIGQQFAQMEVKVVMAKLLQRLEFRLVPGQRFGLQEQATLKPLDPVLCTLRPRGWQPAPPPPPC

SEQ ID NO: 42942 - protein, 403 aa, Homo sapiens
MSTKYNKDSKMYRALQTVFGERLFGQGLVSECNYERWHKQRRVIDLAFSRSSLVSLMETFNEKAEQLVEILEAKADGQTPVSMQDMLTYTAMDILAKAAFGMETSMLLGAQKPLSQAVKLMLEGITASRNTLAKFLPGKRKQLREVRESIRFLRQVGRDWVQRRREALKRGEEVPADILTQILKAEEGAQDDEGLLDNFVTFFIAGHETSANHLAFTVMELSRQPEIVARLQAEVDEVIGSKRYLDFEDLGRLQYLSQVLKESLRLYPPAWGTFRLLEEETLIDGVRVPGNTPLLFSTYVMGRMDTYFEDPLTFNPDRFGPGAPKPRFTYFPFSLGHRSCIGQQFAQMEVKVVMAKLLQRLEFRLVPGQRFGLQEQATLKPLDPVLCTLRPRGWQPAPPPPPC

SEQ ID NO: 42943 - protein, 509 aa, Homo sapiens
MAAAAGMLLLGLLQAGGSVLGQAMEKVTGGNLLSMLLIACAFTLSLVYLIRLAAGHLVQLPAGVKSPPYIFSPIPFLGHAIAFGKSPIEFLENAYEKYGPVFSFTMVGKTFTYLLGSDAAALLFNSKNEDLNAEDVYSRLTTPVFGKGVAYDVPNPVFLEQKKMLKSGLNIAHFKQHVSIIEKETKEYFESWGESGEKNVFEALSELIILTASHCLHGKEIRSQLNEKVAQLYADLDGGFSHAAWLLPGWLPLPSFRRRDRAHREIKDIFYKAIQKRRQSQEKIDDILQTLLDATYKDGRPLTDDEVAGMLIGLLLAGQHTSSTTSAWMGFFLARDKTLQKKCYLEQKTVCGENLPPLTYDQLKDLNLLDRCIKETLRLRPPIMIMMRMARTPQTVAGYTIPPGHQVCVSPTVNQRLKDSWVERLDFNPDRYLQDNPASGEKFAYVPFGAGRHRCIGENFAYVQIKTIWSTMLRLYEFDLIDGYFPTVNYTTMIHTPENPVIRYKRRSK

SEQ ID NO: 42944 - protein, 404 aa, Homo sapiens
MVGKTFTYLLGSDAAALLFNSKNEDLNAEDVYSRLTTPVFGKGVAYDVPNPVFLEQKKMLKSGLNIAHFKQHVSIIEKETKEYFESWGESGEKNVFEALSELIILTASHCLHGKEIRSQLNEKVAQLYADLDGGFSHAAWLLPGWLPLPSFRRRDRAHREIKDIFYKAIQKRRQSQEKIDDILQTLLDATYKDGRPLTDDEVAGMLIGLLLAGQHTSSTTSAWMGFFLARDKTLQKKCYLEQKTVCGENLPPLTYDQLKDLNLLDRCIKETLRLRPPIMIMMRMARTPQTVAGYTIPPGHQVCVSPTVNQRLKDSWVERLDFNPDRYLQDNPASGEKFAYVPFGAGRHRCIGENFAYVQIKTIWSTMLRLYEFDLIDGYFPTVNYTTMIHTPENPVIRYKRRSK

SEQ ID NO: 42945 - protein, 449 aa, Homo sapiens
MKHEKSPPYIFSPIPFLGHAIAFGKSPIEFLENAYEKYGPVFSFTMVGKTFTYLLGSDAAALLFNSKNEDLNAEDVYSRLTTPVFGKGVAYDVPNPVFLEQKKMLKSGLNIAHFKQHVSIIEKETKEYFESWGESGEKNVFEALSELIILTASHCLHGKEIRSQLNEKVAQLYADLDGGFSHAAWLLPGWLPLPSFRRRDRAHREIKDIFYKAIQKRRQSQEKIDDILQTLLDATYKDGRPLTDDEVAGMLIGLLLAGQHTSSTTSAWMGFFLARDKTLQKKCYLEQKTVCGENLPPLTYDQLKDLNLLDRCIKETLRLRPPIMIMMRMARTPQTVAGYTIPPGHQVCVSPTVNQRLKDSWVERLDFNPDRYLQDNPASGEKFAYVPFGAGRHRCIGENFAYVQIKTIWSTMLRLYEFDLIDGYFPTVNYTTMIHTPENPVIRYKRRSK

SEQ ID NO: 42946 - protein, 504 aa, Homo sapiens
MMTTSLIWGIAIAACCCLWLILGIRRRQTGEPPLENGLIPYLGCALQFGANPLEFLRANQRKHGHVFTCKLMGKYVHFITNPLSYHKVLCHGKYFDWKKFHFATSAKAFGHRSIDPMDGNTTENINDTFIKTLQGHALNSLTESMMENLQRIMRPPVSSNSKTAAWVTEGMYSFCYRVMFEAGYLTIFGRDLTRRDTQKAHILNNLDNFKQFDKVFPALVAGLPIHMFRTAHNAREKLAESLRHENLQKRESISELISLRMFLNDTLSTFDDLEKAKTHLVVLWASQANTIPATFWSLFQMIRNPEAMKAATEEVKRTLENAGQKVSLEGNPICLSQAELNDLPVLDSIIKESLRLSSASLNIRTAKEDFTLHLEDGSYNIRKDDIIALYPQLMHLDPEIYPDPLTFKYDRYLDENGKTKTTFYCNGLKLKYYYMPFGSGATICPGRLFAIHEIKQFLILMLSYFELELIEGQAKCPPLDQSRAGLGILPPLNDIEFKYKFKHL

SEQ ID NO: 42947 - protein, 506 aa, Homo sapiens
MAGEVSAATGRFSLERLGLPGLALAAALLLLALCLLVRRTRRPGEPPLIKGWLPYLGVVLNLRKDPLRFMKTLQKQHGDTFTVLLGGKYITFILDPFQYQLVIKNHKQLSFRVFSNKLLEKAFSISQLQKNHDMNDELHLCYQFLQGKSLDILLESMMQNLKQVFEPQLLKTTSWDTAELYPFCSSIIFEITFTTIYGKVIVCDNNKFISELRDDFLKFDDKFAYLVSNIPIELLGNVKSIREKIIKCFSSEKLAKMQGWSEVFQSRQDVLEKYYVHEDLEIGAHHLGFLWASVANTIPTMFWAMYYLLRHPEAMAAVRDEIDRLLQSTGQKKGSGFPIHLTREQLDSLICLESSIFEALRLSSYSTTIRFVEEDLTLSSETGDYCVRKGDLVAIFPPVLHGDPEIFEAPEEFRYDRFIEDGKKKTTFFKRGKKLKCYLMPFGTGTSKCPGRFFALMEIKQLLVILLTYFDLEIIDDKPIGLNYSRLLFGIQYPDSDVLFRYKVKS

SEQ ID NO: 42948 - protein, 501 aa, Homo sapiens
MVLWGPVLGALLVVIAGYLCLPGMLRQRRPWEPPLDKGTVPWLGHAMAFRKNMFEFLKRMRTKHGDVFTVQLGGQYFTFVMDPLSFGSILKDTQRKLDFGQYAKKLVLKVFGYRSVQGDHEMIHSASTKHLRGDGLKDLNETMLDSLSFVMLTSKGWSLDASCWHEDSLFRFCYYILFTAGYLSLFGYTKDKEQDLLQAGELFMEFRKFDLLFPRFVYSLLWPREWLEVGRLQRLFHKMLSVSHSQEKEGISNWLGNMLQFLREQGVPSAMQDKFNFMMLWASQGNTGPTSFWALLYLLKHPEAIRAVREEATQVLGEARLETKQSFAFKLGALQHTPVLDSVVEETLRLRAAPTLLRLVHEDYTLKMSSGQEYLFRHGDILALFPYLSVHMDPDIHPEPTVFKYDRFLNPNGSRKVDFFKTGKKIHHYTMPWGSGVSICPGRFFALSEVKLFILLMVTHFDLELVDPDTPLPHVDPQRWGFGTMQPSHDVRFRYRLHPTE

SEQ ID NO: 42949 - protein, 190 aa, Homo sapiens
MEKVPGEMEIERRERSEELSEAERKAVQAMWARLYANCEDVGVAILVRFFVNFPSAKQYFSQFKHMEDPLEMERSPQLRKHACRVMGALNTVVENLHDPDKVSSVLALVGKAHALKHKVEPVYFKILSGVILEVVAEEFASDFPPETQRAWAKLRGLIYSHVTAAYKEVGWVQQVPNATTPPATLPSSGP

SEQ ID NO: 42950 - protein, 397 aa, Homo sapiens
MEEDDSYVPSDLTAEERQELENIRRRKQELLADIQRLKDEIAEVANEIENLGSTEERKNMQRNKQVAMGRKKFNMDPKKGIQFLIENDLLKNTCEDIAQFLYKGEGLNKTAIGDYLGERDEFNIQVLHAFVELHEFTDLNLVQALRQFLWSFRLPGEAQKIDRMMEAFAQRYCQCNNGVFQSTDTCYVLSFAIIMLNTSLHNPNVKDKPTVERFIAMNRGINDGGDLPEELLRNLYESIKNEPFKIPEDDGNDLTHTFFNPDREGWLLKLGGRVKTWKRRWFILTDNCLYYFEYTTDKEPRGIIPLENLSIREVEDSKKPNCFELYIPDNKDQVIKACKTEADGRVVEGNHTVYRISAPTPEEKEEWIKCIKAAISRDPFYEMLAARKKKVSSTKRH

SEQ ID NO: 42951 - protein, 398 aa, Homo sapiens
MEEDDSYVPSDLTAEERQELENIRRRKQELLADIQRLKDEIAEVANEIENLGSTEERKNMQRNKQVAMGRKKFNMDPKKGIQFLIENDLLKNTCEDIAQFLYKGEGLNKTAIGDYLGERDEFNIQVLHAFVELHEFTDLNLVQALRQFLWSFRLPGEAQKIDRMMEAFAQRYCQCNNGVFQSTDTCYVLSFAIIMLNTSLHNPNVKDKPTVERFIAMNRGINDGGDLPEELLRNLYESIKNEPFKIPEDDGNDLTHTFFNPDREGWLLKLGGGRVKTWKRRWFILTDNCLYYFEYTTDKEPRGIIPLENLSIREVEDSKKPNCFELYIPDNKDQVIKACKTEADGRVVEGNHTVYRISAPTPEEKEEWIKCIKAAISRDPFYEMLAARKKKVSSTKRH

SEQ ID NO: 42952 - protein, 218 aa, Homo sapiens
MMEAFAQRYCQCNNGVFQSTDTCYVLSFAIIMLNTSLHNPNVKDKPTVERFIAMNRGINDGGDLPEELLRNLYESIKNEPFKIPEDDGNDLTHTFFNPDREGWLLKLAGGRVKTWKRRWFILTDNCLYYFEYTTDKEPRGIIPLENLSIREVEDSKKPNCFELYIPDNKDQVIKACKTEADGRVVEGNHTVYRISAPTPEEKEEWIKCIKFQVSPGEP

SEQ ID NO: 42953 - protein, 398 aa, Homo sapiens; identical to SEQ ID NO: 42951

SEQ ID NO: 42954 - protein, 339 aa, Homo sapiens
MQRNKQVAMGRKKFNMDPKKGIQFLIENDLLKNTCEDIAQFLYKGEGLNKTAIGDYLGERDEFNIQVLHAFVELHEFTDLNLVQALRQFLWSFRLPGEAQKIDRMMEAFAQRYCQCNNGVFQSTDTCYVLSFAIIMLNTSLHNPNVKDKPTVERFIAMNRGINDGGDLPEELLRNLYESIKNEPFKIPEDDGNDLTHTFFNPDREGWLLKLGGGRVKTWKRRWFILTDNCLYYFEYTTDKEPRGIIPLENLSIREVEDSKKPNCFELYIPDNKDQVIKACKTEADGRVVEGNHTVYRISAPTPEEKEEWIKCIKAAISRDPFYEMLAARKKKVSSTKRH

SEQ ID NO: 42955 - protein, 339 aa, Homo sapiens; identical to SEQ ID NO: 42954

SEQ ID NO: 42956 - protein, 359 aa, Homo sapiens
MSLQRLLQHSSNGNLADFCAGPAYSSYSTLTGSLTMDDNRRIQMLADTVATLPRGRKQLALTRSSSLSDFSWSQRKLVTVEKQDNETFGFEIQSYRPQNQNACSSEMFTLICKIQEDSPAHCAGLQAGDVLANINGVSTEGFTYKQVVDLIRSSGNLLTIETLNGTMILKRTELEAKLQVLKQTLKQKWVEYRSLQLQEHRLLHGDAANCPSLENMDLDELSLFGPLPGPGPALVDRNRLSSESSCKSWLSSMTMDSEDGYQTCVSEDSSRGAFSRQTSTDDECFIPKEGDDFLRRSSSRRNRSISNTSSGSMSPLWEGNLSSMFGTLPRKSRKGSVRKQLLKFIPGLHRAVEEEESRF

SEQ ID NO: 42957 - protein, 253 aa, Homo sapiens
MFTLICKIQEDSPAHCAGLQAGDVLANINGVSTEGFTYKQVVDLIRSSGNLLTIETLNGTMILKRTELEAKLQVLKQTLKQKWVEYRSLQLQEHRLLHGDAANCPSLENMDLDELSLFGPLPGPGPALVDRNRLSSESSCKSWLSSMTMDSEDGYQTCVSEDSSRGAFSRQTSTDDECFIPKEGDDFLRRSSSRRNRSISNTSSGSMSPLWEGNLSSMFGTLPRKSRKGSVRKQLLKFIPGLHRAVEEEESRF

SEQ ID NO: 42958 - protein, 400 aa, Homo sapiens
MEDGVYEPPDLTPEERMELENIRRRKQELLVEIQRLREELSEAMSEVEGLEANEGSKTLQRNRKMAMGRKKFNMDPKKGIQFLVENELLQNTPEEIARFLYKGEGLNKTAIGDYLGEREELNLAVLHAFVDLHEFTDLNLVQALRQFLWSFRLPGEAQKIDRMMEAFAQRYCLCNPGVFQSTDTCYVLSFAVIMLNTSLHNPNVRDKPGLERFVAMNRGINEGGDLPEELLRNLYDSIRNEPFKIPEDDGNDLTHTFFNPDREGWLLKLAGGRVKTWKRRWFILTDNCLYYFEYTTDKEPRGIIPLENLSIREVDDPRKPNCFELYIPNNKGQLIKACKTEADGRVVEGNHMVYRISAPTQEEKDEWIKSIQAAVSVDPFYEMLAARKKRISVKKKQEQP

SEQ ID NO: 42959 - protein, 399 aa, Homo sapiens
MEDGVYEPPDLTPEERMELENIRRRKQELLVEIQRLREELSEAMSEVEGLEANEGSKTLQRNRKMAMGRKKFNMDPKKGIQFLVENELLQNTPEEIARFLYKGEGLNKTAIGDYLGEREELNLAVLHAFVDLHEFTDLNLVQALRQFLWSFRLPGEAQKIDRMMEAFAQRYCLCNPGVFQSTDTCYVLSFAVIMLNTSLHNPNVRDKPGLERFVAMNRGINEGGDLPEELLRNLYDSIRNEPFKIPEDDGNDLTHTFFNPDREGWLLKLGGRVKTWKRRWFILTDNCLYYFEYTTDKEPRGIIPLENLSIREVDDPRKPNCFELYIPNNKGQLIKACKTEADGRVVEGNHMVYRISAPTQEEKDEWIKSIQAAVSVDPFYEMLAARKKRISVKKKQEQP

SEQ ID NO: 42960 - protein, 399 aa, Homo sapiens
MDEDGGGEGGGVPEDLSLEEREELLDIRRRKKELIDDIERLKYEIAEVMTEIDNLTSVEESKTTQRNKQIAMGRKKFNMDPKKGIQFLIENDLLQSSPEDVAQFLYKGEGLNKTVIGDYLGERDEFNIKVLQAFVELHEFADLNLVQALRQFLWSFRLPGEAQKIDRMMEAFASRYCLCNPGVFQSTDTCYVLSFAIIMLNTSLHNHNVRDKPTAERFIAMNRGINEGGDLPEELLRNLYESIKNEPFKIPEDDGNDLTHTFFNPDREGWLLKLGGRVKTWKRRWFILTDNCLYYFEYTTDKEPRGIIPLENLSIREVEDPRKPNCFELYNPSHKGQVIKACKTEADGRVVEGNHVVYRISAPSPEEKEEWMKSIKASISRDPFYDMLATRKRRIANKK

SEQ ID NO: 42961 - protein, 314 aa, Homo sapiens
MALPQLQTAMLAAFLWDPRDVVLTAQPGAEQCAESSQHIRILQPQFRLIRLRFWKLYIQRRVQAWQFLWSFRLPGEAQKIDRMMEAFASRYCLCNPGVFQSTDTCYVLSFAIIMLNTSLHNHNVRDKPTAERFIAMNRGINEGGDLPEELLRNLYESIKNEPFKIPEDDGNDLTHTFFNPDREGWLLKLGGRVKTWKRRWFILTDNCLYYFEYTTDKEPRGIIPLENLSIREVEDPRKPNCFELYNPSHKGQVIKACKTEADGRVVEGNHVVYRISAPSPEEKEEWMKSIKASISRDPFYDMLATRKRRIANKK

SEQ ID NO: 42962 - protein, 394 aa, Homo sapiens
MDLCHPEPAELSSGETEELQRIKWHRKQLLEDIQKLKDEIADVFAQIDCFESAEESRMAQKEKELCIGRKKFNMDPAKGIQYFIEHKLLTPDVQDIARFLYKGEGLNKTAIGTYLGERDPINLQVLQAFVDCHEFANLNLVQALRQFLWSFRLPGEAQKIDRMMEAFATRYCLCNPGVFQSTDTCYVLSFSIIMLNTSLHNPNVRDRPPFERFVSMNRGINNGSDLPEDQLRNLFDSIKSEPFSIPEDDGNDLTHTFFNPDREGWLLKLGGRVKTWKRRWFILTDNCLYYFEFTTDKEPRGIIPLENLSVQKVDDPKKPFCLELYNPSCRGQKIKACKTDGDGRVVEGKHESYRISATSAEERDQWIESIRASITRVPFYDLVSTRKKKIASKQ

SEQ ID NO: 42963 - protein, 157 aa, Homo sapiens
MDLCHPEPAELSSGETEELQRIKWHRKQLLEDIQKLKDEIADVFAQIDCFESAEESRMAQKEKELCIGRKKFNMDPAKGIQYFIEHKLLTPDVQDIARFLYKGEGLNKTAIGTYLGERDPINLQVLQAFVDCHEFANLNLVQALRFREGASDLGFGG

SEQ ID NO: 42964 - protein, 291 aa, Homo sapiens
DRSTGHLFPRGVGMDLCHPEPAELSSGETEELQRIKWHRKQLLEDIQKLKDEIADVFAQIDCFESAEESRMAQKEKELCIGRKKFNMDPAKGIQYFIEHKLLTPDVQDIARFLYKGEGLNKTAIGTYLGERDPINLQVLQAFVDCHEFANLNLVQALRQFLWSFRLPGEAQKIDRMMEAFATRYCLCNPGVFQSTDTCYVLSFSIIMLNTSLHNPNVRDRPPFERFVSMNRGINNGSDLPEDQLRVTWECSQRRSRERTFQKEEVARTEACPDWERRGVQCGREPLRQHQE

SEQ ID NO: 42965 - protein, 147 aa, Homo sapiens
  VARIANT 1: note = MOD_RES - Any amino acid
XTHTSGSLSSRDSQAGDSASRAGGRVKTWKRRWFILTDNCLYYFEFTTDKEPRGIIPLENLSVQKVDDPKKPFCLELYNPSCRGQKIKACKTDGDGRVVEGKHESYRISATSAEERDQWIESIRASITRVPFYDLVSTRKKKIASKQ

SEQ ID NO: 42966 - protein, 117 aa, Homo sapiens
MDLCHPEPAELSSGETEELQRIKWHRKQLLEDIQKLKDEIADVFAQIDCFESAEESRMAQKEKELCIGRKKFNMDPAKGIQYFIEHKLLTPDVQDIARFLYKGEGLNKTAIGTYLGE

SEQ ID NO: 42967 - protein, 258 aa, Homo sapiens
MVLCVQGPRPLLAVERTGQRPLWAPSLELPKPVMQPLPAGAFLEEVAEGTPAQTESEPKVLDPEEDLLCIAKTFSYLRESGWYWGSITASEARQHLQKMPEGTFLVRDSTHPSYLFTLSVKTTRGPTNVRIEYADSSFRLDSNCLSRPRILAFPDVVSLVQHYVASCTADTRSDSPDPAPTPALPMPKEDAPSDPALPAPPPATAVHLKLVQPFVRRSSARSLQHLCRLVINRLVADVDCLPLPRRMADYLRQYPFQL

SEQ ID NO: 42968 - protein, 275 aa, Homo sapiens
MYLEHTSHCPHHDDDTAMDTPLPRPRPLLAVERTGQRPLWAPSLELPKPVMQPLPAGAFLEEVAEGTPAQTESEPKVLDPEEDLLCIAKTFSYLRESGWYWGSITASEARQHLQKMPEGTFLVRDSTHPSYLFTLSVKTTRGPTNVRIEYADSSFRLDSNCLSRPRILAFPDVVSLVQHYVASCTADTRSDSPDPAPTPALPMPKEDAPSDPALPAPPPATAVHLKLVQPFVRRSSARSLQHLCRLVINRLVADVDCLPLPRRMADYLRQYPFQL

SEQ ID NO: 42969 - protein, 422 aa, Homo sapiens
MPAGRRGPAAQSARRPPPLLPLLLLLCVLGAPRAGSGAHTAVISPQDPTLLIGSSLLATCSVHGDPPGATAEGLYWTLNGRRLPPELSRVLNASTLALALANLNGSRQRSGDNLVCHARDGSILAGSCLYVGLPPEKPVNISCWSKNMKDLTCRWTPGAHGETFLHTNYSLKYKLRWYGQDNTCEEYHTVGPHSCHIPKDLALFTPYEIWVEATNRLGSARSDVLTLDILDVVTTDPPPDVHVSRVGGLEDQLSVRWVSPPALKDFLFQAKYQIRYRVEDSVDWKVVDDVSNQTSCRLAGLKPGTVYFVQVRCNPFGIYGSKKAGIWSEWSHPTAASTPRSERPGPGGGACEPRGGEPSSGPVRRELKQFLGWLKKHAYCSNLSFRLYDQWRAWMQKSHKTRNQDEGILPSGRRGTARGPAR

SEQ ID NO: 42970 - protein, 233 aa, Homo sapiens
MGRLVLLWGAAVFLLGGWMALGQGGAAEGVQIQIIYFNLETVQVTWNASKYSRTNLTFHYRFNGDEAYDQCTNYLLQEGHTSGCLLDAEQRDDILYFSIRNGTHPVFTASRWMVYYLKPSSPKHVRFSWHQDAVTVTCSDLSYGDLLYEVQYRSPFDTEWQTQSRSVTQAGVQWCDLCLLQPSPPRFKRFSCLSLPSSWDYRHPPPRLANFCIISRDGVSPCWPGWSRTCDLR

SEQ ID NO: 42971 - protein, 256 aa, Homo sapiens
MGRLVLLWGAAVFLLGGWMALGQGGAAEGVQIQIIYFNLETVQVTWNASKYSRTNLTFHYRFNGDEAYDQCTNYLLQEGHTSGCLLDAEQRDDILYFSIRNGTHPVFTASRWMVYYLKPSSPKHVRFSWHQDAVTVTCSDLSYGDLLYEVQYRSPFDTEWQSKQENTCNVTIEGLDAEKCYSFWVRVKAMEDVYGPDTYPSDWSEVTCWQRGEIRDACAETPTPPKPKLSKFILISSLAILLMVSLLLLSLWKLWR

SEQ ID NO: 42972 - protein, 255 aa, Homo sapiens
MGRLVLLWGAAVFLLGGWMALGQGGAAEGVQIQIIYFNLETVQVTWNASKYSRTNLTFHYRFNGDEAYDQCTNYLLQEGHTSGCLLDAEQRDDILYFSIRNGTHPVFTASRWMVYYLKPSSPKHVRFSWHQDAVTVTCSDLSYGDLLYEVQYRSPFDTEWQSKQENTCNVTIEGLDAEKCYSFWVRVKAMEDVYGPDTYPSDWSEVTCWQRGEIRDACAETPTPPKPKLSKFILISSLAILLMVSLLLLSLWKLW

SEQ ID NO: 42973 - protein, 136 aa, Homo sapiens
MRTPGPLPVLLLLLAGAPAARPTPPTCYSRMRALSQEITRDFNLLQVSEPSEPCVRYLPRLYLDIHNYCVLDKLRDFVASPPCWKVAQVDSLKDKARKLYTIMNSFCRRDLVFLLDDCNALEYPIPVTTVLPDRQR

SEQ ID NO: 42974 - protein, 1253 aa, Homo sapiens
MAAQVTLEDALSNVDLLEELPLPDQQPCIEPPPSSLLYQPNFNTNFEDRNAFVTGIARYIEQATVHSSMNEMLEEGQEYAVMLYTWRSCSRAIPQVKCNEQPNRVEIYEKTVEVLEPEVTKLMNFMYFQRNAIERFCGEVRRLCHAERRKDFVSEAYLITLGKFINMFAVLDELKNMKCSVKNDHSAYKRAAQFLRKMADPQSIQESQNLSMFLANHNKITQSLQQQLEVISGYEELLADIVNLCVDYYENRMYLTPSEKHMLLKVMGFGLYLMDGSVSNIYKLDAKKRINLSKIDKYFKQLQVVPLFGDMQIELARYIKTSAHYEENKSRWTCTSSGSSPQYNICEQMIQIREDHMRFISELARYSNSEVVTGSGRQEAQKTDAEYRKLFDLALQGLQLLSQWSAHVMEVYSWKLVHPTDKYSNKDCPDSAEEYERATRYNYTSEEKFALVEVIAMIKGLQVLMGRMESVFNHAIRHTVYAALQDFSQVTLREPLRQAIKKKKNVIQSVLQAIRKTVCDWETGHEPFNDPALRGEKDPKSGFDIKVPRRAVGPSSTQLYMVRTMLESLIADKSGSKKTLRSSLEGPTILDIEKFHRESFFYTHLINFSETLQQCCDLSQLWFREFFLELTMGRRIQFPIEMSMPWILTDHILETKEASMMEYVLYSLDLYNDSAHYALTRFNKQFLYDEIEAEVNLCFDQFVYKLADQIFAYYKVMAGSLLLDKRLRSECKNQGATIHLPPSNRYETLLKQRHVQLLGRSIDLNRLITQRVSAAMYKSLELAIGRFESEDLTSIVELDGLLEINRMTHKLLSRYLTLDGFDAMFREANHNVSAPYGRITLHVFWELNYDFLPNYCYNGSTNRFVRTVLPFSQEFQRDKQPNAQPQYLHGSKALNLAYSSIYGSYRNFVGPPHFQVICRLLGYQGIAVVMEELLKVVKSLLQGTILQYVKTLMEVMPKICRLPRHEYGSPGILEFFHHQLKDIVEYAELKTVCFQNLREVGNAILFCLLIEQSLSLEEVCDLLHAAPFQNILPRVHVKEGERLDAKMKRLESKYAPLHLVPLIERLGTPQQIAIAREGDLLTKERLCCGLSMFEVILTRIRSFLDDPIWRGPLPSNGVMHVDECVEFHRLWSAMQFVYCIPVGTHEFTVEQCFGDGLHWAGCMIIVLLGQQRRFAVLDFCYHLLKVQKHDGKDEIIKNVPLKKMVERIRKFQILNDEIITILDKYLKSGDGEGTPVEHVRCFQPPIHQSLASS

SEQ ID NO: 42975 - protein, 1255 aa, Homo sapiens
MGPKHVLRQPGPSERHHPEVPAWTPRAGPPCWLCRQRWGWTLHPPGRGCPALLLSEPRMAAQVTLEDALSNVDLLEELPLPDQQPCIEPPPSSLLYQNEMLEEGQEYAVMLYTWRSCSRAIPQVKCNEQPNRVEIYEKTVEVLEPEVTKLMNFMYFQRNAIERFCGEVRRLCHAERRKDFVSEAYLITLGKFINMFAVLDELKNMKCSVKNDHSAYKRAAQFLRKMADPQSIQESQNLSMFLANHNKITQSLQQQLEVISGYEELLADIVNLCVDYYENRMYLTPSEKHMLLKVMGFGLYLMDGSVSNIYKLDAKKRINLSKIDKYFKQLQVVPLFGDMQIELARYIKTSAHYEENKSRWTCTSSGSSPQYNICEQMIQIREDHMRFISELARYSNSEVVTGSGRQEAQKTDAEYRKLFDLALQGLQLLSQWSAHVMEVYSWKLVHPTDKYSNKDCPDSAEEYERATRYNYTSEEKFALVEVIAMIKGLQVLMGRMESVFNHAIRHTVYAALQDFSQVTLREPLRQAIKKKKNVIQSVLQAIRKTVCDWETGHEPFNDPALRGEKDPKSGFDIKVPRRAVGPSSTQLYMVRTMLESLIADKSGSKKTLRSSLEGPTILDIEKFHRESFFYTHLINFSETLQQCCDLSQLWFREFFLELTMGRRIQFPIEMSMPWILTDHILETKEASMMEYVLYSLDLYNDSAHYALTRFNKQFLYDEIEAEVNLCFDQFVYKLADQIFAYYKVMAGSLLLDKRLRSECKNQGATIHLPPSNRYETLLKQRHVQLLGRSIDLNRLITQRVSAAMYKSLELAIGRFESEDLTSIVELDGLLEINRMTHKLLSRYLTLDGFDAMFREANHNVSAPYGRITLHVFWELNYDFLPNYCYNGSTNRFVRTVLPFSQEFQRDKQPNAQPQYLHGSKALNLAYSSIYGSYRNFVGPPHFQVICRLLGYQGIAVVMEELLKVVKSLLQGTILQYVKTLMEVMPKICRLPRHEYGSPGILEFFHHQLKDIVEYAELKTVCFQNLHAAPFQNILPRVHVKEGERLDAKMKRLESKYAPLHLVPLIERLGTPQQIAIAREGDLLTKERLCCGLSMFEVILTRIRSFLDDPIWRGPLPSNGVMHVDECVEFHRLWSAMQFVYCIPVGTHEFTVEQCFGDGLHWAGCMIIVLLGQQRRFAVLDFCYHLLKVQKHDGKDEIIKNVPLKKMVERIRKFQILNDEIITILDKYLKSGDGEGTPVEHVRCFQPPIHQSLASS

SEQ ID NO: 42976 - protein, 822 aa, Homo sapiens
MAESLGSAELLRQLKSLGMERLLHAVNTFLRQSCTYLPLLTFGGKTSFVSLDVYGTEANCSATSCSFPKAAATWPRRQAPGPLGELVRGPPDQGVAEQSFSHGLFEFGITNVPCIFSPPQMFPWIIQLYMVRTMLESLIADKSGSKKTLRSSLEGPTILDIEKFHRESFFYTHLINFSETLQQCCDLSQLWFREFFLELTMGRRIQFPIEMSMPWILTDHILETKEASMMEYVLYSLDLYNDSAHYALTRFNKQFLYDEIEAEVNLCFDQFVYKLADQIFAYYKVMAGSLLLDKRLRSECKNQGATIHLPPSNRYETLLKQRHVQLLGRSIDLNRLITQRVSAAMYKSLELAIGRFESEDLTSIVELDGLLEINRMTHKLLSRYLTLDGFDAMFREANHNVSAPYGRITLHVFWELNYDFLPNYCYNGSTNRFVRTVLPFSQEFQRDKQPNAQPQYLHGSKALNLAYSSIYGSYRNFVGPPHFQVICRLLGYQGIAVVMEELLKVVKSLLQGTILQYVKTLMEVMPKICRLPRHEYGSPGILEFFHHQLKDIVEYAELKTVCFQNLREVGNAILFCLLIEQSLSLEEVCDLLHAAPFQNILPRVHVKEGERLDAKMKRLESKYAPLHLVPLIERLGTPQQIAIAREGDLLTKERLCCGLSMFEVILTRIRSFLDDPIWRGPLPSNGVMHVDECVEFHRLWSAMQFVYCIPVGTHEFTVEQCFGDGLHWAGCMIIVLLGQQRRFAVLDFCYHLLKVQKHDGKDEIIKNVPLKKMVERIRKFQILNDEIITILDKYLKSGDGEGTPVEHVRCFQPPIHQSLASS

SEQ ID NO: 42977 - protein, 1253 aa, Homo sapiens; identical to SEQ ID NO: 42974

SEQ ID NO: 42978 - protein, 161 aa, Homo sapiens
MAAQVTLEDALSNVDLLEELPLPDQQPCIEPPPSSLLYQPNFNTNFEDRNAFVTGIARYIEQATVHSSMNEMLEEGQEYAVMLYTWRSCSRAIPQVKCNEQPNRVEIYEKTVEVLEPEVTKLMNFMYFQRNAIERFCGEVRRLCHAERRKDFVSEAYLITL

SEQ ID NO: 42979 - protein, 151 aa, Homo sapiens
MAAQVTLEDALSNVDLLEELPLPDQQPCIEPPPSSLLYQPNFNTNFEDRNAFVTGIARYIEQATVHSSMNEMLEEGQEYAVMLYTWRSCSRAIPQVKCNEQPNRVEIYEKTVEVLEPEVTKLMNFMYFQRNAIERFCGEVRRLCHAERRKD

SEQ ID NO: 42980 - protein, 1278 aa, Homo sapiens
MTTHVTLEDALSNVDLLEELPLPDQQPCIEPPPSSIMYQANFDTNFEDRNAFVTGIARYIEQATVHSSMNEMLEEGHEYAVMLYTWRSCSRAIPRVKCNEQPNRVEIYEKTVEVLEPEVTKLMKFMYFQRKAIERFCSEVKRLCHAERRKDFVSEAYLLTLGKFINMFAVLDELKNMKCSVKNDHSAYKRAAQFLRKMADPQSIQESQNLSMFLANHNRITQCLHQQLEVIPGYEELLADIVNICVDYYENKMYLTPSEKHMLLKVMGFGLYLMDGNVSNIYKLDAKKRINLSKIDKFFKQLQVVPLFGDMQIELARYIKTSAHYEENKSKWTCTQSSISPQYNICEQMVQIRDDHIRFISELARYSNSEVVTGSGLDSQKSDEEYRELFDLALRGLQLLSKWSAHVMEVYSWKLVHPTDKFCNKDCPGTAEEYERATRYNYTSEEKFAFVEVIAMIKGLQVLMGRMESVFNQAIRNTIYAALQDFAQVTLREPLRQAVRKKKNVLISVLQAIRKTICDWEGGREPPNDPCLRGEKDPKGGFDIKVPRRAVGPSSTQACQWSPRALFHPTGGTQGRRGCRSLLYMVRTMLESLIADKSGSKKTLRSSLDGPIVLAIEDFHKQSFFFTHLLNISEALQQCCDLSQLWFREFFLELTMGRRIQFPIEMSMPWILTDHILETKEPSMMEYVLYPLDLYNDSAYYALTKFKKQFLYDEIEAEVNLCFDQFVYKLADQIFAYYKAMAGSVLLDKRFRAECKNYGVIIPYPPSNRYETLLKQRHVQLLGRSIDLNRLITQRISAAMYKSLDQAISRFESEDLTSIVELEWLLEINRLTHRLLCKHMTLDSFDAMFREANHNVSAPYGRITLHVFWELNFDFLPNYCYNGSTNRFVRTAIPFTQEPQRDKPANVQPYYLYGSKPLNIAYSHIYSSYRNFVGPPHFKTICRLLGYQGIAVVMEELLKIVKSLLQGTILQYVKTLIEVMPKICRLPRHEYGSPGILEFFHHQLKDIIEYAELKTDVFQSLREVGNAILFCLLIEQALSQEEVCDLLHAAPFQNILPRVYIKEGERLEVRMKRLEAKYAPLHLVPLIERLGTPQQIAIAREGDLLTKERLCCGLSMFEVILTRIRSYLQDPIWRGPPPTNGVMHVDECVEFHRLWSAMQFVYCIPVGTNEFTAEQCFGDGLNWAGCSIIVLLGQQRRFDLFDFCYHLLKVQRQDGKDEIIKNVPLKKMADRIRKYQILNNEVFAILNKYMKSVETDSSTVEHVRCFQPPIHQSLATTC

SEQ ID NO: 42981 - protein, 1253 aa, Homo sapiens
MTTHVTLEDALSNVDLLEELPLPDQQPCIEPPPSSIMYQANFDTNFEDRNAFVTGIARYIEQATVHSSMNEMLEEGHEYAVMLYTWRSCSRAIPKVKCNEQPNRVEIYEKTVEVLEPEVTKLMKFMYFQRKAIERFCSEVKRLCHAERRKDFVSEAYLLTLGKFINMFAVLDELKNMKCSVKNDHSAYKRAAQFLRKMADPQSIQESQNLSMFLANHNRITQCLHQQLEVIPGYEELLADIVNICVDYYENKMYLTPSEKHMLLKVMGFGLYLMDGNVSNIYKLDAKKRINLSKIDKFFKQLQVVPLFGDMQIELARYIKTSAHYEENKSKWTCTQSSISPQYNICEQMVQIRDDHIRFISELARYSNSEVVTGSGLDSQKSDEEYRELFDLALRGLQLLSKWSAHVMEVYSWKLVHPTDKFCNKDCPGTAEEYERATRYNYTSEEKFAFVEVIAMIKGLQVLMGRMESVFNQAIRNTIYAALQDFAQVTLREPLRQAVRKKKNVLISVLQAIRKTICDWEGGREPPNDPCLRGEKDPKGGFDIKVPRRAVGPSSTQLYMVRTMLESLIADKSGSKKTLRSSLDGPIVLAIEDFHKQSFFFTHLLNISEALQQCCDLSQLWFREFFLELTMGRRIQFPIEMSMPWILTDHILETKEPSMMEYVLYPLDLYNDSAYYALTKFKKQFLYDEIEAEVNLCFDQFVYKLADQIFAYYKAMAGSVLLDKRFRAECKNYGVIIPYPPSNRYETLLKQRHVQLLGRSIDLNRLITQRISAAMYKSLDQAISRFESEDLTSIVELEWLLEINRLTHRLLCKHMTLDSFDAMFREANHNVSAPYGRITLHVFWELNFDFLPNYCYNGSTNRFVRTAIPFTQEPQRDKPANVQPYYLYGSKPLNIAYSHIYSSYRNFVGPPHFKTICRLLGYQGIAVVMEELLKIVKSLLQGTILQYVKTLIEVMPKICRLPRHEYGSPGILEFFHHQLKDIIEYAELKTDVFQSLREVGNAILFCLLIEQALSQEEVCDLLHAAPFQNILPRVYIKEGERLEVRMKRLEAKYAPLHLVPLIERLGTPQQIAIAREGDLLTKERLCCGLSMFEVILTRIRSYLQDPIWRGPPPTNGVMHVDECVEFHRLWSAMQFVYCIPVGTNEFTAEQCFGDGLNWAGCSIIVLLGQQRRFDLFDFCYHLLKVQRQDGKDEIIKNVPLKKMADRIRKYQILNNEVFAILNKYMKSVETDSSTVEHVRCFQPPIHQSLATTC

SEQ ID NO: 42982 - protein, 1253 aa, Homo sapiens; identical to SEQ ID NO: 42981

SEQ ID NO: 42983 - protein, 952 aa, Homo sapiens
EKRRRWTCTQSSISPQYNICEQMVQIRDDHIRFISELARYSNSEVVTGSGLDSQKSDEEYRELFDLALRGLQLLSKWSAHVMEVYSWKLVHPTDKFCNKDCPGTAEEYERATRYNYTSEEKFAFVEVIAMIKGLQVLMGRMESVFNQAIRNTIYAALQDFAQVTLREPLRQAVRKKKNVLISVLQAIRKTICDWEGGREPPNDPCLRGEKDPKGGFDIKVPRRAVGPSSTQACQWSPRALFHPTGGTQGRRGCRSLLYMVRTMLESLIADKSGSKKTLRSSLDGPIVLAIEDFHKQSFFFTHLLNISEALQQCCDLSQLWFREFFLELTMGRRIQFPIEMSMPWILTDHILETKEPSMMEYVLYPLDLYNDSAYYALTKFKKQFLYDEIEAEVNLCFDQFVYKLADQIFAYYKAMAGSVLLDKRFRAECKNYGVIIPYPPSNRYETLLKQRHVQLLGRSIDLNRLITQRISAAMYKSLDQAISRFESEDLTSIVELEWLLEINRLTHRLLCKHMTLDSFDAMFREANHNVSAPYGRITLHVFWELNFDFLPNYCYNGSTNRFVRTAIPFTQEPQRDKPANVQPYYLYGSKPLNIAYSHIYSSYRNFVGPPHFKTICRLLGYQGIAVVMEELLKIVKSLLQGTILQYVKTLIEVMPKICRLPRHEYGSPGILEFFHHQLKDIIEYAELKTDVFQSLREVGNAILFCLLIEQALSQEEVCDLLHAAPFQNILPRVYIKEGERLEVRMKRLEAKYAPLHLVPLIERLGTPQQIAIAREGDLLTKERLCCGLSMFEVILTRIRSYLQDPIWRGPPPTNGVMHVDECVEFHRLWSAMQFVYCIPVGTNEFTAEQCFGDGLNWAGCSIIVLLGQQRRFDLFDFCYHLLKVQRQDGKDEIIKNVPLKKMADRIRKYQILNNEVFAILNKYMKSVETDSSTVEHVRCFQPPIHQSLATTC

SEQ ID NO: 42984 - protein, 216 aa, Homo sapiens
MAGSVLLDKRFRAECKNYGVIIPYPPSNRYETLLKQRHVQLLGRSIDLNRLITQRISAAMYKSLDQAISRFESEDLTSIVELEWLLEINRLTHRLLCKHMTLDSFDAMFREANHNVSAPYGRITLHVFWELNFDFLPNYCYNGSTNRFVRTASFHPRTTTRQTCQRPALLPLWIQASQHCLQPHLQLLQEFRGATSFQDYADSWVIRASLWSWRNC

SEQ ID NO: 42985 - protein, 1178 aa, Homo sapiens
MTTHVTLEDALSNVDLLEELPLPNEQPNRVEIYEKTVEVLEPEVTKLMKFMYFQRKAIERFCSEVKRLCHAERRKDFVSEAYLLTLGKFINMFAVLDELKNMKCSVKNDHSAYKRAAQFLRKMADPQSIQESQNLSMFLANHNRITQCLHQQLEVIPGYEELLADIVNICVDYYENKMYLTPSEKHMLLKVMGFGLYLMDGNVSNIYKLDAKKRINLSKIDKFFKQLQVVPLFGDMQIELARYIKTSAHYEENKSKWTCTQSSISPQYNICEQMVQIRDDHIRFISELARYSNSEVVTGSGLDSQKSDEEYRELFDLALRGLQLLSKWSAHVMEVYSWKLVHPTDKFCNKDCPGTAEEYERATRYNYTSEEKFAFVEVIAMIKGLQVLMGRMESVFNQAIRNTIYAALQDFAQVTLREPLRQAVRKKKNVLISVLQAIRKTICDWEGGREPPNDPCLRGEKDPKGGFDIKVPRRAVGPSSTQLYMVRTMLESLIADKSGSKKTLRSSLDGPIVLAIEDFHKQSFFFTHLLNISEALQQCCDLSQLWFREFFLELTMGRRIQFPIEMSMPWILTDHILETKEPSMMEYVLYPLDLYNDSAYYALTKFKKQFLYDEIEAEVNLCFDQFVYKLADQIFAYYKAMAGSVLLDKRFRAECKNYGVIIPYPPSNRYETLLKQRHVQLLGRSIDLNRLITQRISAAMYKSLDQAISRFESEDLTSIVELEWLLEINRLTHRLLCKHMTLDSFDAMFREANHNVSAPYGRITLHVFWELNFDFLPNYCYNGSTNRFVRTAIPFTQEPQRDKPANVQPYYLYGSKPLNIAYSHIYSSYRNFVGPPHFKTICRLLGYQGIAVVMEELLKIVKSLLQGTILQYVKTLIEVMPKICRLPRHEYGSPGILEFFHHQLKDIIEYAELKTDVFQSLREVGNAILFCLLIEQALSQEEVCDLLHAAPFQNILPRVYIKEGERLEVRMKRLEAKYAPLHLVPLIERLGTPQQIAIAREGDLLTKERLCCGLSMFEVILTRIRSYLQDPIWRGPPPTNGVMHVDECVEFHRLWSAMQFVYCIPVGTNEFTAEQCFGDGLNWAGCSIIVLLGQQRRFDLFDFCYHLLKVQRQDGKDEIIKNVPLKKMADRIRKYQILNNEVFAILNKYMKSVETDSSTVEHVRCFQPPIHQSLATTC

SEQ ID NO: 42986 - protein, 1538 aa, Homo sapiens
MEPRMESCLAQVLQKDVGKRLQVGQELIDYFSDKQKSADLEHDQTMLDKLVDGLATSWVNSSNYKVVLLGMDILSALVTRLQDRFKAQIGTVLPSLIDRLGDAKDSVREQDQTLLLKIMDQAANPQYVWDRMLGGFKHKNFRTREGICLCLIATLNASGAQTLTLSKIVPHICNLLGDPNSQVRDAAINSLVEIYRHVGERVRADLSKKGLPQSRLNVIFTKFDEVQKSGNMIQSANDKNFDDEDSVDGNRPSSASSTSSKAPPSSRRNVGMGTTRRLGSSTLGSKSSAAKEGAGAVDEEDFIKAFDDVPVVQIYSSRDLEESINKIREILSDDKHDWEQRVNALKKIRSLLLAGAAEYDNFFQHLRLLDGAFKLSAKDLRSQVVREACITLGHLSSVLGNKFDHGAEAIMPTIFNLIPNSAKIMATSGVVAVRLIIRHTHIPRLIPVITSNCTSKSVAVRRRCFEFLDLLLQEWQTHSLERHISVLAETIKKGIHDADSEARIEARKCYWGFHSHFSREAEHLYHTLESSYQKALQSHLKNSDSIVSLPQSDRSSSSSQESLNRPLSAKRSPTGSTTSRASTVSTKSVSTTGSLQRSRSDIDVNAAASAKSKVSSSSGTTPFSSAAALPPGSYASLGRIRTRRQSSGSATNVASTPDNRGRSRAKVVSQSQRSRSANPAGAGSRSSSPGKLLGSGYGGLTGGSSRGPPVTPSSEKRSKIPRSQGCSRETSPNRIGLARSSRIPRPSMSQGCSRDTSRESSRDTSPARGFPPLDRFGLGQPGRIPGSVNAMRVLSTSTDLEAAVADALKKPVRRRYEPYGMYSDDDANSDASSVCSERSYGSRNGGIPHYLRQTEDVAEVLNHCASSNWSERKEGLLGLQNLLKSQRTLSRVELKRLCEIFTRMFADPHSKRVFSMFLETLVDFIIIHKDDLQDWLFVLLTQLLKKMGADLLGSVQAKVQKALDVTRDSFPFDQQFNILMRFIVDQTQTPNLKVKVAILKYIESLARQMDPTDFVNSSETRLAVSRIITWTTEPKSSDVRKAAQIVLISLFELNTPEFTMLLGALPKTFQDGATKLLHNHLKNSSNTSVGSPSNTIGRTPSRHTSSRTSPLTSPTNCSHGGLSPSRLWGWSADGLAKHPPPFSQPNSIPTAPSHKALRRSYSPSMLDYDTENLNSEEIYSSLRGVTEAIEKFSFRSQEDLNEPIKRDGKKECDIVSRDGGAASPATEGRGGSEVEGGRTALDNKTSLLNTQPPRAFPGPRARDYNPYPYSDAINTYDKTALKEAVFDDDMEQLRDVPIDHSDLVADLLKELSNHNERVEERKGALLELLKITREDSLGVWEEHFKTILLLLLETLGDKDHSIRALALRVLREILRNQPARFKNYAELTIMKTLEAHKDSHKEVVRAAEEAASTLASSIHPEQCIKVLCPIIQTADYPINLAAIKMQTKVVERIAKESLLQLLVDIIPGLLQGYDNTESSVRKASVFCLVAIYSVIGEDLKPHLAQLTGSKMKLLNLYIKRAQTTNSNSSSSSDVSTHS

SEQ ID NO: 42987 - protein, 1478 aa, Homo sapiens
MEPRMESCLAQVLQKDVGKRLQVGQELIDYFSDKQKSADLEHDQTMLDKLVDGLATSWVNSSNYKVVLLGMDILSALVTRLQDRFKAQIGTVLPSLIDRLGDAKDSVREQDQTLLLKIMDQAANPQYVWDRMLGGFKHKNFRTREGICLCLIATLNASGAQTLTLSKIVPHICNLLGDPNSQVRDAAINSLVEIYRHVGERVRADLSKKGLPQSRLNVIFTKFDEVQKSGNMIQSANDKNFDDEDSVDGNRPSSASSTSSKAPPSSRRNVGMGTTRRLGSSTLGSKSSAAKEGAGAVDEEDFIKAFDDVPVVQIYSSRDLEESINKIREILSDDKHDWEQRVNALKKIRSLLLAGAAEYDNFFQHLRLLDGAFKLSAKDLRSQVVREACITLGHLSSVLGNKFDHGAEAIMPTIFNLIPNSAKIMATSGVVAVRLIIRHTHIPRLIPVITSNCTSKSVAVRRRCFEFLDLLLQEWQTHSLERHISVLAETIKKGIHDADSEARIEARKCYWGFHSHFSREAEHLYHTLESSYQKALQSHLKNSDSIVSLPQSDRSSSSSQESLNRPLSAKRSPTGSTTSRASTVSTKSVSTTGSLQRSRSDIDVNAAASAKSKVSSSSGTTPFSSAAALPPGSYASLDGTTTKAEGRIRTRRQSSGSATNVASTPDNRGRSRAKVVSQSQRSRSANPAGAGSRSSSPGKLLGSGYGGLTGGSSRGPPVTPSSEKRSKIPRSQGCSRETSPNRIGLDRFGLGQPGRIPGSVNAMRVLSTSTDLEAAVADALLLGDSRSKKKPVRRRYEPYGMYSDDDANSDASSVCSERSYGSRNGGIPHYLRQTEDVAEVLNHCASSNWSERKEGLLGLQNLLKSQRTLSRVELKRLCEIFTRMFADPHSKVFSMFLETLVDFIIIHKDDLQDWLFVLLTQLLKKMGADLLGSVQAKVQKALDVTRDSFPFDQQFNILMRFIVDQTQTPNLKVKVAILKYIESLARQMDPTDFVNSSETRLAVSRIITWTTEPKSSDVRKAAQIVLISLFELNTPEFTMLLGALPKTFQDGATKLLHNHLKNSSNTSVGSPSNTIGRTPSRHTSSRTSPLTSPTNCSHGGLSPSMLDYDTENLNSEEIYSSLRGVTEAIEKFSFRSQEDLNEPIKRDGKKECDIVSRDGGAASPATEGRGGSEVEGGRTALDNKTSLLNTQPPRAFPGPRARDYNPYPYSDAINTYDKTALKEAVFDDDMEQLRDVPIDHSDLVADLLKELSNHNERVEERKGALLELLKITREDSLGVWEEHFKTILLLLLETLGDKDHSIRALALRVLREILRNQPARFKNYAELTIMKTLEAHKDSHKEVVRAAEEAASTLASSIHPEQCIKVLCPIIQTADYPINLAAIKMQTKVVERIAKESLLQLLVDIIPGLLQGYDNTESSVRKASVFCLVAIYSVIGEDLKPHLAQLTGSKMKLLNLYIKRAQTTNSNSSSSSDVSTHS

SEQ ID NO: 42988 - protein, 1471 aa, Homo sapiens
MEPRMESCLAQVLQKDVGKRLQVGQELIDYFSDKQKSADLEHDQTMLDKLVDGLATSWVNSSNYKVVLLGMDILSALVTRLQDRFKAQIGTVLPSLIDRLGDAKDSVREQDQTLLLKIMDQAANPQYVWDRMLGGFKHKNFRTREGICLCLIATLNASGAQTLTLSKIVPHICNLLGDPNSQVRDAAINSLVEIYRHVGERVRADLSKKGLPQSRLNVIFTKFDEVQKSGNMIQSANDKNFDDEDSVDGNRPSSASSTSSKAPPSSRRNVGMGTTRRLGSSTLGSKSSAAKEGAGAVDEEDFIKAFDDVPVVQIYSSRDLEESINKIREILSDDKHDWEQRVNALKKIRSLLLAGAAEYDNFFQHLRLLDGAFKLSAKDLRSQVVREACITLGHLSSVLGNKFDHGAEAIMPTIFNLIPNSAKIMATSGVVAVRLIIRHTHIPRLIPVITSNCTSKSVAVRRRCFEFLDLLLQEWQTHSLERHISVLAETIKKGIHDADSEARIEARKCYWGFHSHFSREAEHLYHTLESSYQKALQSHLKNSDSIVSLPQSDRSSSSSQESLNRPLSAKRSPTGSTTSRASTVSTKSVSTTGSLQRSRSDIDVNAAASAKSKVSSSSGTTPFSSAAALPPGSYASLGRIRTRRQSSGSATNVASTPDNRGRSRAKVVSQSQRSRSANPAGAGSRSSSPGKLLGSGYGGLTGGSSRGPPVTPSSEKRSKIPRSQGCSRETSPNRIGLDRFGLGQPGRIPGSVNAMRVLSTSTDLEAAVADALLLGDSRSKKKPVRRRYEPYGMYSDDDANSDASSVCSERSYGSRNGGIPHYLRQTEDVAEVLNHCASSNWSERKEGLLGLQNLLKSQRTLSRVELKRLCEIFTRMFADPHSKLVFSMFLETLVDFIIIHKDDLQDWLFVLLTQLLKKMGADLLGSVQAKVQKALDVTRDSFPFDQQFNILMRFIVDQTQTPNLKVKVAILKYIESLARQMDPTDFVNSSETRLAVSRIITWTTEPKSSDVRKAAQIVLISLFELNTPEFTMLLGALPKTFQDGATKLLHNHLKNSSNTSVGSPSNTIGRTPSRHTSSRTSPLTSPTNCSHGGLSPSMLDYDTENLNSEEIYSSLRGVTEAIEKFSFRSQEDLNEPIKRDGKKECDIVSRDGGAASPATEGRGGSEVEGGRTALDNKTSLLNTQPPRAFPGPRARDYNPYPYSDAINTYDKTALKEAVFDDDMEQLRDVPIDHSDLVADLLKELSNHNERVEERKGALLELLKITREDSLGVWEEHFKTILLLLLETLGDKDHSIRALALRVLREILRNQPARFKNYAELTIMKTLEAHKDSHKEVVRAAEEAASTLASSIHPEQCIKVLCPIIQTADYPINLAAIKMQTKVVERIAKESLLQLLVDIIPGLLQGYDNTESSVRKASVFCLVAIYSVIGEDLKPHLAQLTGSKMKLLNLYIKRAQTTNSNSSSSSDVSTHS

SEQ ID NO: 42989 - protein, 704 aa, Homo sapiens
  VARIANT 1: note = MOD_RES - Any amino acid
XTKFDEVQKSGNMIQSANDKNFDDEDSVDGNRPSSASSTSSKAPPSSRRNVGMGTTRRLGSSTLGSKSSAAKEGAGAVDEEDFIKAFDDVPVVQIYSSRDLEESINKIREILSDDKHDWEQRVNALKKIRSLLLAGAAEYDNFFQHLRLLDGAFKLSAKDLRSQVVREACITLGHLSSVLGNKFDHGAEAIMPTIFNLIPNSAKIMATSGVVAVRLIIRHTHIPRLIPVITSNCTSKSVAVRRRCFEFLDLLLQEWQTHSLERHISVLAETIKKGIHDADSEARIEARKCYWGFHSHFSREAEHLYHTLESSYQKALQSHLKNSDSIVSLPQSDRSSSSSQESLNRPLSAKRSPTGSTTSRASTVSTKSVSTTGSLQRSRSDIDVNAAASAKSKVSSSSGTTPFSSAAALPPGSYASLGRIRTRRQSSGSATNVASTPDNRGRSRAKVVSQSQRSRSANPAGAGSRSSSPGKLLGSGYGGLTGGSSRGPPVTPSSEKRSKIPRSQGCSRETSPNRIGLDRFGLGQPGRIPGSVNAMRVLSTSTDLEAAVADALLLGDSRSKKKPVRRRYEPYGMYSDDDANSDASSVCSERSYGSRNGGIPHYLRQTEDVAEVLNHCASSNWSERKEGLLGLQNLLKSQRTLSRVELKRLCEIFTRMFADPHSKIADSEAECEDKEGNLFPSEVSCTVSFQYVFGDSCGFYNNS

SEQ ID NO: 42990 - protein, 1494 aa, Homo sapiens
MEPRMESCLAQVLQKDVGKRLQVGQELIDYFSDKQKSADLEHDQTMLDKLVDGLATSWVNSSNYKVVLLGMDILSALVTRLQDRFKAQIGTVLPSLIDRLGDAKDSVREQDQTLLLKIMDQAANPQYVWDRMLGGFKHKNFRTREGICLCLIATLNASGAQTLTLSKIVPHICNLLGDPNSQVRDAAINSLVEIYRHVGERVRADLSKKGLPQSRLNVIFTKFDEVQKSGNMIQSANDKNFDDEDSVDGNRPSSASSTSSKAPPSSRRNVGMGTTRRLGSSTLGSKSSAAKEGAGAVDEEDFIKAFDDVPVVQIYSSRDLEESINKIREILSDDKHDWEQRVNALKKIRSLLLAGAAEYDNFFQHLRLLDGAFKLSAKDLRSQVVREACITLGHLSSVLGNKFDHGAEAIMPTIFNLIPNSAKIMATSGVVAVRLIIRHTHIPRLIPVITSNCTSKSVAVRRRCFEFLDLLLQEWQTHSLERHISVLAETIKKGIHDADSEARIEARKCYWGFHSHFSREAEHLYHTLESSYQKALQSHLKNSDSIVSLPQSDRSSSSSQESLNRPLSAKRSPTGSTTSRASTVSTKSVSTTGSLQRSRSDIDVNAAASAKSKVSSSSGTTPFSSAAALPPGSYASLGRIRTRRQSSGSATNVASTPDNRGRSRAKVVSQSQRSRSANPAGAGSRSSSPGKLLGSGYGGLTGGSSRGPPVTPSSEKRSKIPRSQGCSRETSPNRIGLDRFGLGQPGRIPGSVNAMRVLSTSTDLEAAVADALVRGTSTGKKKPVRRRYEPYGMYSDDDANSDASSVCSERSYGSRNGGIPHYLRQTEDVAEVLNHCASSNWSERKEGLLGLQNLLKSQRTLSRVELKRLCEIFTRMFADPHSKIADSEAECEDKEGNLFPSEVSCTRVFSMFLETLVDFIIIHKDDLQDWLFVLLTQLLKKMGADLLGSVQAKVQKALDVTRDSFPFDQQFNILMRFIVDQTQTPNLKVKVAILKYIESLARQMDPTDFVNSSETRLAVSRIITWTTEPKSSDVRKAAQIVLISLFELNTPEFTMLLGALPKTFQDGATKLLHNHLKNSSNTSVGSPSNTIGRTPSRHTSSRTSPLTSPTNCSHGGLSPSMLDYDTENLNSEEIYSSLRGVTEAIEKFSFRSQEDLNEPIKRDGKKECDIVSRDGGAASPATEGRGGSEVEGGRTALDNKTSLLNTQPPRAFPGPRARDYNPYPYSDAINTYDKTALKEAVFDDDMEQLRDVPIDHSDLVADLLKELSNHNERVEERKGALLELLKITREDSLGVWEEHFKTILLLLLETLGDKDHSIRALALRVLREILRNQPARFKNYAELTIMKTLEAHKDSHKEVVRAAEEAASTLASSIHPEQCIKVLCPIIQTADYPINLAAIKMQTKVVERIAKESLLQLLVDIIPGLLQGYDNTESSVRKASVFCLVAIYSVIGEDLKPHLAQLTGSKMKLLNLYIKRAQTTNSNSSSSSDVSTHS

SEQ ID NO: 42991 - protein, 1477 aa, Homo sapiens
MEPRMESCLAQVLQKDVGKRLQVGQELIDYFSDKQKSADLEHDQTMLDKLVDGLATSWVNSSNYKVVLLGMDILSALVTRLQDRFKAQIGTVLPSLIDRLGDAKDSVREQDQTLLLKIMDQAANPQYVWDRMLGGFKHKNFRTREGICLCLIATLNASGAQTLTLSKIVPHICNLLGDPNSQVRDAAINSLVEIYRHVGERVRADLSKKGLPQSRLNVIFTKFDEVQKSGNMIQSANDKNFDDEDSVDGNRPSSASSTSSKAPPSSRRNVGMGTTRRLGSSTLGSKSSAAKEGAGAVDEEDFIKAFDDVPVVQIYSSRDLEESINKIREILSDDKHDWEQRVNALKKIRSLLLAGAAEYDNFFQHLRLLDGAFKLSAKDLRSQVVREACITLGHLSSVLGNKFDHGAEAIMPTIFNLIPNSAKIMATSGVVAVRLIIRHTHIPRLIPVITSNCTSKSVAVRRRCFEFLDLLLQEWQTHSLERHISVLAETIKKGIHDADSEARIEARKCYWGFHSHFSREAEHLYHTLESSYQKALQSHLKNSDSIVSLPQSDRSSSSSQESLNRPLSAKRSPTGSTTSRASTVSTKSVSTTGSLQRSRSDIDVNAAASAKSKVSSSSGTTPFSSAAALPPGSYASLESRHMREDMEYIGLDSGRIRTRRQSSGSATNVASTPDNRGRSRAKVVSQSQPGSRSSSPGKLLGSGYGGLTGGSSRGPPVTPSSEKRSKIPRSQGCSRETSPNRIGLDRFGLGQPGRIPGSVNAMRVLSTSTDLEAAVADALLLGDSRSKKPVRRRYEPYGMYSDDDANSDASSVCSERSYGSRNGGIPHYLRQTEDVAEVLNHCASSNWSERKEGLLGLQNLLKSQRTLSRVELKRLCEIFTRMFADPHSKRVFSMFLETLVDFIIIHKDDLQDWLFVLLTQLLKKMGADLLGSVQAKVQKALDVTRDSFPFDQQFNILMRFIVDQTQTPNLKVKVAILKYIESLARQMDPTDFVNSSETRLAVSRIITWTTEPKSSDVRKAAQIVLISLFELNTPEFTMLLGALPKTFQDGATKLLHNHLKNSSNTSVGSPSNTIGRTPSRHTSSRTSPLTSPTNCSHGGLSPSMLDYDTENLNSEEIYSSLRGVTEAIEKFSFRSQEDLNEPIKRDGKKECDIVSRDGGAASPATEGRGGSEVEGGRTALDNKTSLLNTQPPRAFPGPRARDYNPYPYSDAINTYDKTALKEAVFDDDMEQLRDVPIDHSDLVADLLKELSNHNERVEERKGALLELLKITREDSLGVWEEHFKTILLLLLETLGDKDHSIRALALRVLREILRNQPARFKNYAELTIMKTLEAHKDSHKEVVRAAEEAASTLASSIHPEQCIKVLCPIIQTADYPINLAAIKMQTKVVERIAKESLLQLLVDIIPGLLQGYDNTESSVRKASVFCLVAIYSVIGEDLKPHLAQLTGSKMKLLNLYIKRAQTTNSNSSSSSDVSTHS

SEQ ID NO: 42992 - protein, 1255 aa, Homo sapiens
MLQNCSDKNFDDEDSVDGNRPSSASSTSSKAPPSSRRNVGMGTTRRLGSSTLGSKSSAAKEGAGAVDEEDFIKAFDDVPVVQIYSSRDLEESINKIREILSDDKHDWEQRVNALKKIRSLLLAGAAEYDNFFQHLRLLDGAFKLSAKDLRSQVVREACITLGHLSSVLGNKFDHGAEAIMPTIFNLIPNSAKIMATSGVVAVRLIIRHTHIPRLIPVITSNCTSKSVAVRRRCFEFLDLLLQEWQTHSLERHISVLAETIKKGIHDADSEARIEARKCYWGFHSHFSREAEHLYHTLESSYQKALQSHLKNSDSIVSLPQSDRSSSSSQESLNRPLSAKRSPTGSTTSRASTVSTKSVSTTGSLQRSRSDIDVNAAASAKSKVSSSSGTTPFSSAAALPPGSYASLGRIRTRRQSSGSATNVASTPDNRGRSRAKVVSQSQRSRSANPAGAGSRSSSPGKLLGSGYGGLTGGSSRGPPVTPSSEKRSKIPRSQGCSRETSPNRIGLDRFGLGQPGRIPGSVNAMRVLSTSTDLEAAVADALKKPVRRRYEPYGMYSDDDANSDASSVCSERSYGSRNGGIPHYLRQTEDVAEVLNHCASSNWSERKEGLLGLQNLLKSQRTLSRVELKRLCEIFTRMFADPHSKIADSEAECEDKEGNLFPSEVSCTRVFSMFLETLVDFIIIHKDDLQDWLFVLLTQLLKKMGADLLGSVQAKVQKALDVTRDSFPFDQQFNILMRFIVDQTQTPNLKVKVAILKYIESLARQMDPTDFVNSSETRLAVSRIITWTTEPKSSDVRKAAQIVLISLFELNTPEFTMLLGALPKTFQDGATKLLHNHLKNSSNTSVGSPSNTIGRTPSRHTSSRTSPLTSPTNCSHGGLSPSMLDYDTENLNSEEIYSSLRGVTEAIEKFSFRSQEDLNEPIKRDGKKECDIVSRDGGAASPATEGRGGSEVEGGRTALDNKTSLLNTQPPRAFPGPRARDYNPYPYSDAINTYDKTALKEAVFDDDMEQLRDVPIDHSDLVADLLKELSNHNERVEERKGALLELLKITREDSLGVWEEHFKTILLLLLETLGDKDHSIRALALRVLREILRNQPARFKNYAELTIMKTLEAHKDSHKEVVRAAEEAASTLASSIHPEQCIKVLCPIIQTADYPINLAAIKMQTKVVERIAKESLLQLLVDIIPGLLQGYDNTESSVRKASVFCLVAIYSVIGEDLKPHLAQLTGSKMKLLNLYIKRAQTTNSNSSSSSDVSTHS

SEQ ID NO: 42993 - protein, 1245 aa, Homo sapiens
MTTGKDKNFDDEDSVDGNRPSSASSTSSKAPPSSRRNVGMGTTRRLGSSTLGSKSSAAKEGAGAVDEEDFIKAFDDVPVVQIYSSRDLEESINKIREILSDDKHDWEQRVNALKKIRSLLLAGAAEYDNFFQHLRLLDGAFKLSAKDLRSQVVREACITLGHLSSVLGNKFDHGAEAIMPTIFNLIPNSAKIMATSGVVAVRLIIRHTHIPRLIPVITSNCTSKSVAVRRRCFEFLDLLLQEWQTHSLERHISVLAETIKKGIHDADSEARIEARKCYWGFHSHFSREAEHLYHTLESSYQKALQSHLKNSDSIVSLPQSDRSSSSSQESLNRPLSAKRSPTGSTTSRASTVSTKSVSTTGSLQRSRSDIDVNAAASAKSKVSSSSGTTPFSSAAALPPGSYASLDGTTTKAEGRIRTRRQSSGSATNVASTPDNRGRSRAKVVSQSQRSRSANPAGAGSRSSSPGKLLGSGYGGLTGGSSRGPPVTPSSEKRSKIPRSQGCSRETSPNRIGLDRFGLGQPGRIPGSVNAMRVLSTSTDLEAAVADALLLGDSRSKKPVRRRYEPYGMYSDDDANSDASSVCSERSYGSRNGGIPHYLRQTEDVAEVLNHCASSNWSERKEGLLGLQNLLKSQRTLSRVELKRLCEIFTRMFADPHSKVFSMFLETLVDFIIIHKDDLQDWLFVLLTQLLKKMGADLLGSVQAKVQKALDVTRDSFPFDQQFNILMRFIVDQTQTPNLKVKVAILKYIESLARQMDPTDFVNSSETRLAVSRIITWTTEPKSSDVRKAAQIVLISLFELNTPEFTMLLGALPKTFQDGATKLLHNHLKNSSNTSVGSPSNTIGRTPSRHTSSRTSPLTSPTNCSHGGLSPSMLDYDTENLNSEEIYSSLRGVTEAIEKFSFRSQEDLNEPIKRDGKKECDIVSRDGGAASPATEGRGGSEVEGGRTALDNKTSLLNTQPPRAFPGPRARDYNPYPYSDAINTYDKTALKEAVFDDDMEQLRDVPIDHSDLVADLLKELSNHNERVEERKGALLELLKITREDSLGVWEEHFKTILLLLLETLGDKDHSIRALALRVLREILRNQPARFKNYAELTIMKTLEAHKDSHKEVVRAAEEAASTLASSIHPEQCIKVLCPIIQTADYPINLAAIKMQTKVVERIAKESLLQLLVDIIPGLLQGYDNTESSVRKASVFCLVAIYSVIGEDLKPHLAQLTGSKMKLLNLYIKRAQTTNSNSSSSSDVSTHS

SEQ ID NO: 42994 - protein, 995 aa, Homo sapiens
MGLRNHFPGEAETLYNSLEPSYQKSLQTYLKSSGSVASLPQSDRSSSSSQESLNRPFSSKWSTANPSTVAGRVSAGSSKASSLPGSLQRSRSDIDVNAAAGAKAHHAAGQSVRSGRLGAGALNAGSYASLEDTSDKLDGTASEDGRVRAKLSAPLAGMGNAKADSRGRSRTKMVSQSQPGSRSGSPGRVLTTTALSTVSSGVQRVLVNSASAQKRSKIPRSQGCSREASPSRLSVARSSRIPRPSVSQGCSREASRESSRDTSPVRSFQPLGPGYGISQSSRLSSSVSAMRVLNTGSDVEEAVADALKKPARRRYESYGMHSDDDANSDASSACSERSYSSRNGSIPTYMRQTEDVAEVLNRCASSNWSERKEGLLGLQNLLKNQRTLSRVELKRLCEIFTRMFADPHGKRVFSMFLETLVDFIQVHKDDLQDWLFVLLTQLLKKMGADLLGSVQAKVQKALDVTRESFPNDLQFNILMRFTVDQTQTPSLKVKVAILKYIETLAKQMDPGDFINSSETRLAVSRVITWTTEPKSSDVRKAAQSVLISLFELNTPEFTMLLGALPKTFQDGATKLLHNHLRNTGNGTQSSMGSPLTRPTPRSPANWSSPLTSPTNTSQNTLSPSAFDYDTENMNSEDIYSSLRGVTEAIQNFSFRSQEDMNEPLKRDSKKDDGDSMCGGPGMSDPRAGGDATDSSQTALDNKASLLHSMPTHSSPRSRDYNPYNYSDSISPFNKSALKEAMFDDDADQFPDDLSLDHSDLVAELLKELSNHNERVEERKIALYELMKLTQEESFSVWDEHFKTILLLLLETLGDKEPTIRALALKVLREILRHQPARFKNYAELTVMKTLEAHKDPHKEVVRSAEEAASVLATSISPEQCIKVLCPIIQTADYPINLAAIKMQTKVIERVSKETLNLLLPEIMPGLIQGYDNSESSVRKACVFCLVAVHAVIGDELKPHLSQLTGSKMKLLNLYIKRAQTGSGGADPTTDVSGQS

SEQ ID NO: 42995 - protein, 431 aa, Homo sapiens
MRRLICKRICDYKSFDDEESVDGNRPSSAASAFKVPAPKTSGNPANSARKPGSAGGPKVGGASKEGGAGAVDEDDFIKAFTDVPSIQIYSSRELEETLNKIREILSDDKHDWDQRANALKKIRSLLVAGAAQYDCFFQHLRLLDGALKLSAKDLRSQVVREACITVAHLSTVLGNKFDHGAEAIVPTLFNLVPNSAKVMATSGCAAIRFIIRHTHVPRLIPLITSNCTSKSVPVRRRSFEFLDLLLQEWQTHSLERHAAVLVETIKKGIHDADAEARVEARKTYMGLRNHFPGEAETLYNSLEPSYQKSLQTYLKSSGSVASLPQSDRSSSSSQESLNRPFSSKWSTANPSTVAGRVSAGSSKASSLPGSLQRSRSDIDVNAAAGAKAHHAAGQSVRSGRLGAGALNAGSYASLECEAFWRSGRTAKLYSV

SEQ ID NO: 42996 - protein, 1505 aa, Homo sapiens
MEPRSMEYFCAQVQQKDVGGRLQVGQELLLYLGAPGAISDLEEDLGRLGKTVDALTGWVGSSNYRVSLMGLEILSAFVDRLSTRFKSYVAMVIVALIDRMGDAKDKVRDEAQTLILKLMDQVAPPMYIWEQLASGFKHKNFRSREGVCLCLIETLNIFGAQPLVISKLIPHLCILFGDSNSQVRDAAILAIVEIYRHVGEKVRMDLYKRGIPPARLEMIFAKFDEVQSSGGMILSVCKDKSFDDEESVDGNRPSSAASAFKVPAPKTSGNPANSARKPGSAGGPKVGGASKEGGAGAVDEDDFIKAFTDVPSIQIYSSRELEETLNKIREILSDDKHDWDQRANALKKIRSLLVAGAAQYDCFFQHLRLLDGALKLSAKDLRSQVVREACITVAHLSTVLGNKFDHGAEAIVPTLFNLVPNSAKVMATSGCAAIRFIIRHTHVPRLIPLITSNCTSKSVPVRRRSFEFLDLLLQEWQTHSLERHAAVLVETIKKGIHDADAEARVEARKTYMGLRNHFPGEAETLYNSLEPSYQKSLQTYLKSSGSVASLPQSDRSSSSSQESLNRPFSSKWSTANPSTVAGRVSAGSSKASSLPGSLQRSRSDIDVNAAAGAKAHHAAGQSVRSGRLGAGALNAGSYASLEDTSDKLDGTASEDGRVRAKLSAPLAGMGNAKADSRGRSRTKMVSQSQPGSRSGSPGRVLTTTALSTVSSGVQRVLVNSASAQKRSKIPRSQGCSREASPSRLSVARSSRIPRPSVSQGCSREASRESSRDTSPVRSFQPLGPGYGISQSSRLSSSVSAMRVLNTGSDVEEAVADALKKPARRRYESYGMHSDDDANSDASSACSERSYSSRNGSIPTYMRQTEDVAEVLNRCASSNWSERKEGLLGLQNLLKNQRTLSRVELKRLCEIFTRMFADPHGKVFSMFLETLVDFIQVHKDDLQDWLFVLLTQLLKKMGADLLGSVQAKVQKALDVTRESFPNDLQFNILMRFTVDQTQTPSLKVKVAILKYIETLAKQMDPGDFINSSETRLAVSRVITWTTEPKSSDVRKAAQSVLISLFELNTPEFTMLLGALPKTFQDGATKLLHNHLRNTGNGTQSSMGSPLTRPTPRSPANWSSPLTSPTNTSQNTLSPSAFDYDTENMNSEDIYSSLRGVTEAIQNFSFRSQEDMNEPLKRDSKKDDGDSMCGGPGMSDPRAGGDATDSSQTALDNKASLLHSMPTHSSPRSRDYNPYNYSDSISPFNKSALKEAMFDDDADQFPDDLSLDHSDLVAELLKELSNHNERVEERKIALYELMKLTQEESFSVWDEHFKTILLLLLETLGDKEPTIRALALKVLREILRHQPARFKNYAELTVMKTLEAHKDPHKEVVRSAEEAASVLATSISPEQCIKVLCPIIQTADYPINLAAIKMQTKVIERVSKETLNLLLPEIMPGLIQGYDNSESSVRKACVFCLVAVHAVIGDELKPHLSQLTGSKMKLLNLYIKRAQTGSGGADPTTDVSGQS

SEQ ID NO: 42997 - protein, 1513 aa, Homo sapiens
MEPRSMEYFCAQVQQKDVGGRLQVGQELLLYLGAPGAISDLEEDLGRLGKTVDALTGWVGSSNYRVSLMGLEILSAFVDRLSTRFKSYVAMVIVALIDRMGDAKDKVRDEAQTLILKLMDQVAPPMYIWEQLASGFKHKNFRSREGVCLCLIETLNIFGAQPLVISKLIPHLCILFGDSNSQVRDAAILAIVEIYRHVGEKVRMDLYKRGIPPARLEMIFAKFDEVQSSGGMILSVCKDKSFDDEESVDGNRPSSAASAFKVPAPKTSGNPANSARKPGSAGGPKVGGASKEGGAGAVDEDDFIKAFTDVPSIQIYSSRELEETLNKIREILSDDKHDWDQRANALKKIRSLLVAGAAQYDCFFQHLRLLDGALKLSAKDLRSQVVREACITVAHLSTVLGNKFDHGAEAIVPTLFNLVPNSAKVMATSGCAAIRFIIRHTHVPRLIPLITSNCTSKSVPVRRRSFEFLDLLLQEWQTHSLERHAAVLVETIKKGIHDADAEARVEARKTYMGLRNHFPGEAETLYNSLEPSYQKSLQTYLKSSGSVASLPQSDRSSSSSQESLNRPFSSKWSTANPSTVAGRVSAGSSKASSLPGSLQRSRSDIDVNAAAGAKAHHAAGQSVRSGRLGAGALNAGSYASLEDTSDKLDGTASEDGRVRAKLSAPLAGMGNAKADSRGRSRTKMVSQSQPGSRSGSPGRVLTTTALSTVSSGVQRVLVNSASAQKRSKIPRSQGCSREASPSRLSVARSSRIPRPSVSQGCSREASRESSRDTSPVRSFQPLGPGYGISQSSRLSSSVSAMRVLNTGSDVEEAVADALLLGDIRTKKKPARRRYESYGMHSDDDANSDASSACSERSYSSRNGSIPTYMRQTEDVAEVLNRCASSNWSERKEGLLGLQNLLKNQRTLSRVELKRLCEIFTRMFADPHGKVFSMFLETLVDFIQVHKDDLQDWLFVLLTQLLKKMGADLLGSVQAKVQKALDVTRESFPNDLQFNILMRFTVDQTQTPSLKVKVAILKYIETLAKQMDPGDFINSSETRLAVSRVITWTTEPKSSDVRKAAQSVLISLFELNTPEFTMLLGALPKTFQDGATKLLHNHLRNTGNGTQSSMGSPLTRPTPRSPANWSSPLTSPTNTSQNTLSPSAFDYDTENMNSEDIYSSLRGVTEAIQNFSFRSQEDMNEPLKRDSKKDDGDSMCGGPGMSDPRAGGDATDSSQTALDNKASLLHSMPTHSSPRSRDYNPYNYSDSISPFNKSALKEAMFDDDADQFPDDLSLDHSDLVAELLKELSNHNERVEERKIALYELMKLTQEESFSVWDEHFKTILLLLLETLGDKEPTIRALALKVLREILRHQPARFKNYAELTVMKTLEAHKDPHKEVVRSAEEAASVLATSISPEQCIKVLCPIIQTADYPINLAAIKMQTKVIERVSKETLNLLLPEIMPGLIQGYDNSESSVRKACVFCLVAVHAVIGDELKPHLSQLTGSKMKLLNLYIKRAQTGSGGADPTTDVSGQS

SEQ ID NO: 42998 - protein, 1514 aa, Homo sapiens
MEPRSMEYFCAQVQQKDVGGRLQVGQELLLYLGAPGAISDLEEDLGRLGKTVDALTGWVGSSNYRVSLMGLEILSAFVDRLSTRFKSYVAMVIVALIDRMGDAKDKVRDEAQTLILKLMDQVAPPMYIWEQLASGFKHKNFRSREGVCLCLIETLNIFGAQPLVISKLIPHLCILFGDSNSQVRDAAILAIVEIYRHVGEKVRMDLYKRGIPPARLEMIFAKFDEVQSSGGMILSVCKDKSFDDEESVDGNRPSSAASAFKVPAPKTSGNPANSARKPGSAGGPKVGAGASKEGGAGAVDEDDFIKAFTDVPSIQIYSSRELEETLNKIREILSDDKHDWDQRANALKKIRSLLVAGAAQYDCFFQHLRLLDGALKLSAKDLRSQVVREACITVAHLSTVLGNKFDHGAEAIVPTLFNLVPNSAKVMATSGCAAIRFIIRHTHVPRLIPLITSNCTSKSVPVRRRSFEFLDLLLQEWQTHSLERHAAVLVETIKKGIHDADAEARVEARKTYMGLRNHFPGEAETLYNSLEPSYQKSLQTYLKSSGSVASLPQSDRSSSSSQESLNRPFSSKWSTANPSTVAGRVSAGSSKASSLPGSLQRSRSDIDVNAAAGAKAHHAAGQSVRSGRLGAGALNAGSYASLEDTSDKLDGTASEDGRVRAKLSAPLAGMGNAKADSRGRSRTKMVSQSQPGSRSGSPGRVLTTTALSTVSSGVQRVLVNSASAQKRSKIPRSQGCSREASPSRLSVARSSRIPRPSVSQGCSREASRESSRDTSPVRSFQPLGPGYGISQSSRLSSSVSAMRVLNTGSDVEEAVADALLLGDIRTKKKPARRRYESYGMHSDDDANSDASSACSERSYSSRNGSIPTYMRQTEDVAEVLNRCASSNWSERKEGLLGLQNLLKNQRTLSRVELKRLCEIFTRMFADPHGKVFSMFLETLVDFIQVHKDDLQDWLFVLLTQLLKKMGADLLGSVQAKVQKALDVTRESFPNDLQFNILMRFTVDQTQTPSLKVKVAILKYIETLAKQMDPGDFINSSETRLAVSRVITWTTEPKSSDVRKAAQSVLISLFELNTPEFTMLLGALPKTFQDGATKLLHNHLRNTGNGTQSSMGSPLTRPTPRSPANWSSPLTSPTNTSQNTLSPSAFDYDTENMNSEDIYSSLRGVTEAIQNFSFRSQEDMNEPLKRDSKKDDGDSMCGGPGMSDPRAGGDATDSSQTALDNKASLLHSMPTHSSPRSRDYNPYNYSDSISPFNKSALKEAMFDDDADQFPDDLSLDHSDLVAELLKELSNHNERVEERKIALYELMKLTQEESFSVWDEHFKTILLLLLETLGDKEPTIRALALKVLREILRHQPARFKNYAELTVMKTLEAHKDPHKEVVRSAEEAASVLATSISPEQCIKVLCPIIQTADYPINLAAIKMQTKVIERVSKETLNLLLPEIMPGLIQGYDNSESSVRKACVFCLVAVHAVIGDELKPHLSQLTGSKMKLLNLYIKRAQTGSGGADPTTDVSGQS

SEQ ID NO: 42999 - protein, 1293 aa, Homo sapiens
MAMGDDKSFDDEESVDGNRPSSAASAFKVPAPKTSGNPANSARKPGSAGGPKVGGASKEGGAGAVDEDDFIKAFTDVPSIQIYSSRELEETLNKIREILSDDKHDWDQRANALKKIRSLLVAGAAQYDCFFQHLRLLDGALKLSAKDLRSQVVREACITVAHLSTVLGNKFDHGAEAIVPTLFNLVPNSAKVMATSGCAAIRFIIRHTHVPRLIPLITSNCTSKSVPVRRRSFEFLDLLLQEWQTHSLERHAAVLVETIKKGIHDADAEARVEARKTYMGLRNHFPGEAETLYNSLEPSYQKSLQTYLKSSGSVASLPQSDRSSSSSQESLNRPFSSKWSTANPSTVAGRVSAGSSKASSLPGSLQRSRSDIDVNAAAGAKAHHAAGQSVRSGRLGAGALNAGSYASLEDTSDKLDGTASEDGRVRAKLSAPLAGMGNAKADSRGRSRTKMVSQSQPGSRSGSPGRVLTTTALSTVSSGVQRVLVNSASAQKRSKIPRSQGCSREASPSRLSVARSSRIPRPSVSQGCSREASRESSRDTSPVRSFQPLASRHHSRSTGALYAPEVYGASGPGYGISQSSRLSSSVSAMRVLNTGSDVEEAVADALKKPARRRYESYGMHSDDDANSDASSACSERSYSSRNGSIPTYMRQTEDVAEVLNRCASSNWSERKEGLLGLQNLLKNQRTLSRVELKRLCEIFTRMFADPHGKVFSMFLETLVDFIQVHKDDLQDWLFVLLTQLLKKMGADLLGSVQAKVQKALDVTRESFPNDLQFNILMRFTVDQTQTPSLKVKVAILKYIETLAKQMDPGDFINSSETRLAVSRVITWTTEPKSSDVRKAAQSVLISLFELNTPEFTMLLGALPKTFQDGATKLLHNHLRNTGNGTQSSMGSPLTRPTPRSPANWSSPLTSPTNTSQNTLSPSAFDYDTENMNSEDIYSSLRGVTEAIQNFSFRSQEDMNEPLKRDSKKDDGDSMCGGPGMSDPRAGGDATDSSQTALDNKASLLHSMPTHSSPRSRDYNPYNYSDSISPFNKSALKEAMFDDDADQFPDDLSLDHSDLVAELLKELSNHNERVEERKIALYELMKLTQEESFSVWDEHFKTILLLLLETLGDKEPTIRALALKVLREILRHQPARFKNYAELTVMKTLEAHKDPHKEVVRSAEEAASVLATSISPEQCIKVLCPIIQTADYPINLAAIKMQTKVIERVSKETLNLLLPEIMPGLIQGYDNSESSVRKACVFCLVAVHAVIGDELKPHLSQLTGSKMKLLNLYIKRAQTGSGGADPTTDVSGQS

SEQ ID NO: 43000 - protein, 1063 aa, Homo sapiens
MRRLICKRICDYKSFDDEESVDGNRPSSAASAFKVPAPKTSGNPANSARKPGSAGGPKVGELLSIMIYSSRELEETLNKIREILSDDKHDWDQRANALKKIRSLLVAGAAQYDCFFQHLRLLDGALKLSAKDLRSQVVREACITVAHLSTVLGNKFDHGAEAIVPTLFNLVPNSAKVMATSGCAAIRFIIRHTHVPRLIPLITSNCTSKSVPVRRRSFEFLDLLLQEWQTHSLERHAAVLVETIKKGIHDADAEARVEARKTYMGLRNHFPGEAETLYNSLEPSYQKSLQTYLKSSGSVASLPQSDRSSSSSQESLNRPFSSKWSTANPSTVAGRVSAGSSKASSLPGSLQRSRSDIDVNAAAGAKAHHAAGQSVRSGRLGAGALNAGSYASLEDTSDKLDDLFSDNGRVRAKLSAPLAGMGNAKADSRGRSRTKMVSQSQRSSSPDKNEGSQSANTIGAGSRSGSPGRVLTTTALSTVSSGVQRVLVNSASAQKRSKIPRSQGCSREASPSRLSVARSSRIPRPSVSQGCSREASRESSRDTSPVRSFQPLGPGYGISQSSRLSSSVSAMRVLNTGSDVEEAVADALVLFDFKTKKKPARRRYESYGMHSDDDANSDASSACSERSYSSRNGSIPTYMRQTEDVAEVLNRCASSNWSERKEGLLGLQNLLKNQRTLSRVELKRLCEIFTRMFADPHGKVFSMFLETLVDFIQVHKDDLQDWLFVLLTQLLKKMGADLLGSVQAKVQKALDVTRESFPNDLQFNILMRFTVDQTQTPSLKVKVAILKYIETLAKQMDPGDFINSSETRLAVSRVITWTTEPKSSDVRKAAQSVLISLFELNTPEFTMLLGALPKTFQDGATKLLHNHLRNTGNGTQSSMGSPLTRPTPRSPANWSSPLTSPTNTSQNTLSPSAFDYDTENMNSEDIYSSLRGVTEAIQNFSFRSQEDMNEPLKRDSKKDDGDSMCGGPGMSDPRAGGDATDSSQTALDNKASLLHSMPTHSSPRSRDYNPYNYSDSISPFNKSALKEAMFDDDADQFPDDLSLDHSDLVAELLKELSNHNERV

SEQ ID NO: 43001 - protein, 559 aa, Homo sapiens
MPPPSPDSENGFYPGLPSSMNPAFFPSFSPVSPHGCTGLSVPTSGGGGGGFGGPFSATAVPPPPPPAMNIPQQQPPPPAAPQQPQSRRSPVSPQLQQQHQAAAAAFLQQRNSYNHHQPLLKQSPWSNHQSSGWGTGSMSWGAMHGRDHRRTGNMGIPGTMNQISPLKKPFSGNVIAPPKFTRSTPSLTPKSWIEDNVFRTDNNSNTLLPLQDRSRMYDSLNMHSLENSLIDIMRAEHDPLKGRLSYPHPGTDNLLMLNGRSSLFPIDDGLLDDGHSDQVGVLNSPTCYSAHQNGERIERFSRKVFVGGLPPDIDEDEITASFRRFGPLVVDWPHKAESKSYFPPKGYAFLLFQEESSVQALIDACIEEDGKLYLCVSSPTIKDKPVQIRPWNLSDSDFVMDGSQPLDPRKTIFVGGVPRPLRAVELAMIMDRLYGGVCYAGIDTDPELKYPKGAGRVAFSNQQSYIAAISARFVQLQHGDIDKRVEVKPYVLDDQMCDECQGARCGGKFAPFFCANVTCLQYYCEFCWANIHSRAGREFHKPLVKEGADRPRQIHFRWN

SEQ ID NO: 43002 - protein, 576 aa, Homo sapiens
MPPPSPDSENGFYPGLPSSMNPAFFPSFSPVSPHGCTGLSVPPPPAMNIPQQQPPPPAAPQQPQSRRSPVSPQLQQQHQAAAAAFLQQRNSYNHHQPLLKQSPWSNHQSSGWGTGSMSWGAMHGRDHRRTGNMGIPGTMNQISPLKKPFSGNVIAPPKFTRSTPSLTPKSWIEDNVFRTDNNSNTLLPLQVRSSLQLPAWGSDSLQDSWCTAAGTSRIDQDRSRMYDSLNMHSLENSLIDIMRAEHDPLKGRLSYPHPGTDNLLMLNARSYGRRRGRSSLFPIDDGLLDDGHSDQVGVLNSPTCYSAHQNGERIERFSRKVFVGGLPPDIDEDEITASFRRFGPLVVDWPHKAESKSYFPPKGYAFLLFQEESSVQALIDACIEEDGKLYLCVSSPTIKDKPVQIRPWNLSDSDFVMDGSQPLDPRKTIFVGGVPRPLRAVELAMIMDRLYGGVCYAGIDTDPELKYPKGAGRVAFSNQQSYIAAISARFVQLQHGDIDKRVEVKPYVLDDQMCDECQGARCGGKFAPFFCANVTCLQYYCEFCWANIHSRAGREFHKPLVKEGADRPRQIHFRWN

SEQ ID NO: 43003 - protein, 567 aa, Homo sapiens
MPPPSPDSENGFYPGLPSSMNPAFFPSFSPVSPHGCTGLSVPTSGGGGGGFGGPFSATAVPPPPPPAMNIPQQQPPPPAAPQQPQSRRSPVSPQLQQQHQAAAAAFLQQRNSYNHHQPLLKQSPWSNHQSSGWGTGSMSWGAMHGRDHRRTGNMGIPGTMNQISPLKKPFSGNVIAPPKFTRSTPSLTPKSWIEDNVFRTDNNSNTLLPLQDRSRMYDSLNMHSLENSLIDIMRAEHDPLKGRLSYPHPGTDNLLMLNARSYGRRRGRSSLFPIDDGLLDDGHSDQVGVLNSPTCYSAHQNGERIERFSRKVFVGGLPPDIDEDEITASFRRFGPLVVDWPHKAESKSYFPPKGYAFLLFQEESSVQALIDACIEEDGKLYLCVSSPTIKDKPVQIRPWNLSDSDFVMDGSQPLDPRKTIFVGGVPRPLRAVELAMIMDRLYGGVCYAGIDTDPELKYPKGAGRVAFSNQQSYIAAISARFVQLQHGDIDKRVEVKPYVLDDQMCDECQGARCGGKFAPFFCANVTCLQYYCEFCWANIHSRAGREFHKPLVKEGADRPRQIHFRWN

SEQ ID NO: 43004 - protein, 562 aa, Homo sapiens
MPPPSPDSENGFYPGLPSSMNPAFFPSFSPVSPHGCTGLSVPTSGGGGGGFGGPFSATAVPPPPPPAMNIPQQQPPPPAAPQQPQSRRSPVSPQLQQQHQAAAAAFLQQRNSYNHHQPLLKQSPWSNHQSSGWGTGSMSWGAMHGRDHRRTGNMGIPGTMNQISPLKKPFSGNVIAPPKFTRSTPSLTPKSWIEDNVFRTDNNSNTLLPLQVRMDRSRMYDSLNMHSLENSLIDIMRAEHDPLKGRLSYPHPGTDNLLMLNGRSSLFPIDDGLLDDGHSDQVGVLNSPTCYSAHQNGERIERFSRKVFVGGLPPDIDEDEITASFRRFGPLVVDWPHKAESKSYFPPKGYAFLLFQEESSVQALIDACIEEDGKLYLCVSSPTIKDKPVQIRPWNLSDSDFVMDGSQPLDPRKTIFVGGVPRPLRAVELAMIMDRLYGGVCYAGIDTDPELKYPKGAGRVAFSNQQSYIAAISARFVQLQHGDIDKRVEVKPYVLDDQMCDECQGARCGGKFAPFFCANVTCLQYYCEFCWANIHSRAGREFHKPLVKEGADRPRQIHFRWN

SEQ ID NO: 43005 - protein, 1007 aa, Homo sapiens
MRDFGFGVLQTAPLRSSSPGPLFCGEAYGPYAVGSVNPLPSATPFGPLSPPPLPVTGFLEAASPFSVPLGGGAGSPAAAASSSSPFLAHQQTMQDELLLGLTQQPARPLSGAAATEKLPDHHPGGGTIAGVTHLLPSQDFKPSLHHPSSSSASSCCCCRTSSPQDFSKRQQQQLSSQKRKEFSPPHLPHPPDSKPPPPPPPLHCPGRFSPPPPPAGPLLQPAQLAQRQQQQPPQQFSLLHQQHLSPQDFAPRQRPADLPPLPQLPPSPPAAPRRRHGGAGSPRKTPAAGEGSAAESPNAGLASSTPVNPAPGSMESPNHPLLNSPSNLLPGGALGAGAFSSLQSPDLPHPGGGGGGGGGGPPGGGGGGGSASPPPLPGFGTPWSVQTASPPPQPQQPPPTQPQQQPPPPQQPPQPQPQPPGSSATTPGGGSGGSLSAMPPPSPDSENGFYPGLPSSMNPAFFPSFSPVSPHGCTGLSVPTSGGGGGGFGGPFSATAVPPPPPPAMNIPQQQPPPPAAPQQPQSRRSPVSPQLQQQHQAAAAAFLQQRNSYNHHQPLLKQSPWSNHQSSGWGTGSMSWGAMHGRDHRRTGNMGIPGTMNQISPLKKPFSGNVIAPPKFTRSTPSLTPKSWIEDNVFRTDNNSNTLLPLQVRMDRSRMYDSLNMHSLENSLIDIMRAEHDPLKGRLSYPHPGTDNLLMLNARSYGRRRGRSSLFPIDDGLLDDGHSDQVGVLNSPTCYSAHQNGERIERFSRKVFVGGLPPDIDEDEITASFRRFGPLVVDWPHKAESKSYFPPKGYAFLLFQEESSVQALIDACIEEDGKLYLCVSSPTIKDKPVQIRPWNLSDSDFVMDGSQPLDPRKTIFVGGVPRPLRAVELAMIMDRLYGGVCYAGIDTDPELKYPKGAGRVAFSNQQSYIAAISARFVQLQHGDIDKRVEVKPYVLDDQMCDECQGARCGGKFAPFFCANVTCLQYYCEFCWANIHSRAGREFHKPLVKEGADRPRQIHFRWN

SEQ ID NO: 43006 - protein, 589 aa, Homo sapiens
MPPPSPDSENGFYPGLPSSMNPAFFPSFSPVSPHGCTGLSVPTSGGGGGGFGGPFSATAVPPPPPPAMNIPQQQPPPPAAPQQPQSRRSPVSPQLQQQHQAAAAAFLQQRNSYNHHQPLLKQSPWSNHQSSGWGTGSMSWGAMHGRDHRRTGNMGIPGTMNQISPLKKPFSGNVIAPPKFTRSTPSLTPKSWIEDNVFRTDNNSNTLLPLQVRSSLQLPAWGSDSLQDSWCTAAGTSRIDQDRSRMYDSLNMHSLENSLIDIMRAEHDPLKGRLSYPHPGTDNLLMLNGRSSLFPIDDGLLDDGHSDQVGVLNSPTCYSAHQNGERIERFSRKVFVGGLPPDIDEDEITASFRRFGPLVVDWPHKAESKSYFPPKGYAFLLFQEESSVQALIDACIEEDGKLYLCVSSPTIKDKPVQIRPWNLSDSDFVMDGSQPLDPRKTIFVGGVPRPLRAVELAMIMDRLYGGVCYAGIDTDPELKYPKGAGRVAFSNQQSYIAAISARFVQLQHGDIDKRVEVKPYVLDDQMCDECQGARCGGKFAPFFCANVTCLQYYCEFCWANIHSRAGREFHKPLVKEGADRPRQIHFRWN

SEQ ID NO: 43007 - protein, 1034 aa, Homo sapiens
MRDFGFGVLQTAPLRSSSPGPLFCGEAYGPYAVGSVNPLPSATPFGPLSPPPLPVTGFLEAASPFSVPLGGGAGSPAAAASSSSPFLAHQQTMQDELLLGLTQQPARPLSGAAATEKLPDHHPGGGTIAGVTHLLPSQDFKPSLHHPSSSSASSCCCCRTSSPQDFSKRQQQQLSSQKRKEFSPPHLPHPPDSKPPPPPPPLHCPGRFSPPPPPAGPLLQPAQLAQRQQQQPPQQFSLLHQQHLSPQDFAPRQRPADLPPLPQLPPSPPAAPRRRHGGAGSPRKTPAAGEGSAAESPNAGLASSTPVNPAPGSMESPNHPLLNSPSNLLPGGALGAGAFSSLQSPDLPHPGGGGGGGGGGPPGGGGGGGSASPPPLPGFGTPWSVQTASPPPQPQQPPPTQPQQQPPPPQQPPQPQPQPPGSSATTPGGGSGGSLSAMPPPSPDSENGFYPGLPSSMNPAFFPSFSPVSPHGCTGLSVPTSGGGGGGFGGPFSATAVPPPPPPAMNIPQQQPPPPAAPQQPQSRRSPVSPQLQQQHQAAAAAFLQQRNSYNHHQPLLKQSPWSNHQSSGWGTGSMSWGAMHGRDHRRTGNMGIPGTMNQISPLKKPFSGNVIAPPKFTRSTPSLTPKSWIEDNVFRTDNNSNTLLPLQVRSSLQLPAWGSDSLQDSWCTAAGTSRIDQDRSRMYDSLNMHSLENSLIDIMRAEHDPLKGRLSYPHPGTDNLLMLNARSYGRRRGRSSLFPIDDGLLDDGHSDQVGVLNSPTCYSAHQNGERIERFSRKVFVGGLPPDIDEDEITASFRRFGPLVVDWPHKAESKSYFPPKGYAFLLFQEESSVQALIDACIEEDGKLYLCVSSPTIKDKPVQIRPWNLSDSDFVMDGSQPLDPRKTIFVGGVPRPLRAVELAMIMDRLYGGVCYAGIDTDPELKYPKGAGRVAFSNQQSYIAAISARFVQLQHGDIDKRVEVKPYVLDDQMCDECQGARCGGKFAPFFCANVTCLQYYCEFCWANIHSRAGREFHKPLVKEGADRPRQIHFRWN

SEQ ID NO: 43008 - protein, 1026 aa, Homo sapiens
MRDFGFGVLQTAPLRSSSPGPLFCGEAYGPYAVGSVNPLPSATPFGPLSPPPLPVTGFLEAASPFSVPLGGGAGSPAAAASSSSPFLAHQQTMQDELLLGLTQQPARPLSGAAATEKLPDHHPGGGTIAGVTHLLPSQDFKPSLHHPSSSSASSCCCCRTSSPQDFSKRQQQQLSSQKRKEFSPPHLPHPPDSKPPPPPPPLHCPGRFSPPPPPAGPLLQPAQLAQRQQQQPPQQFSLLHQQHLSPQDFAPRQRPADLPPLPQLPPSPPAAPRRRHGGAGSPRKTPAAGEGSAAESPNAGLASSTPVNPAPGSMESPNHPLLNSPSNLLPGGALGAGAFSSLQSPDLPHPGGGGGGGGGGPPGGGGGGGSASPPPLPGFGTPWSVQTASPPPQPQQPPPTQPQQQPPPPQQPPQPQPQPPGSSATTPGGGSGGSLSAMPPPSPDSENGFYPGLPSSMNPAFFPSFSPVSPHGCTGLSVPTSGGGGGGFGGPFSATAVPPPPPPAMNIPQQQPPPPAAPQQPQSRRSPVSPQLQQQHQAAAAAFLQQRNSYNHHQPLLKQSPWSNHQSSGWGTGSMSWGAMHGRDHRRTGNMGIPGTMNQISPLKKPFSGNVIAPPKFTRSTPSLTPKSWIEDNVFRTDNNSNTLLPLQVRSSLQLPAWGSDSLQDSWCTAAGTSRIDQDRSRMYDSLNMHSLENSLIDIMRAEHDPLKGRLSYPHPGTDNLLMLNGRSSLFPIDDGLLDDGHSDQVGVLNSPTCYSAHQNGERIERFSRKVFVGGLPPDIDEDEITASFRRFGPLVVDWPHKAESKSYFPPKGYAFLLFQEESSVQALIDACIEEDGKLYLCVSSPTIKDKPVQIRPWNLSDSDFVMDGSQPLDPRKTIFVGGVPRPLRAVELAMIMDRLYGGVCYAGIDTDPELKYPKGAGRVAFSNQQSYIAAISARFVQLQHGDIDKRVEVKPYVLDDQMCDECQGARCGGKFAPFFCANVTCLQYYCEFCWANIHSRAGREFHKPLVKEGADRPRQIHFRWN

SEQ ID NO: 43009 - protein, 698 aa, Homo sapiens
MQDDLLMDKSKTQPQPQQQQRQQQQPQPESSVSEAPSTPLSSETPKPEENSAVPALSPAAAPPAPNGPDKMQMESPLLPGLSFHQPPQQPPPPQEPAAPGASLSPSFGSTWSTGTTNAVEDSFFQGITPVNGTMLFQNFPHHVNPVFGGTFSPQIGLAQTQHHQQPPPPAPAPQPAQPAQPPQAQPPQQRRSPASPSQAPYAQRSAAAAYGHQPIMTSKPSSSSAVAAAAAAAAASSASSSWNTHQSVNAAWSAPSNPWGGLQAGRDPRRAVGVGVGVGVGVPSPLNPISPLKKPFSSNVIAPPKFPRAAPLTSKSWMEDNAFRTDNGNNLLPFQDRSRPYDTFNLHSLENSLMDMIRTDHEPLKGKHYPPSGPPMSFADIMWRNHFAGRMGINFHHPGTDNIMALNNAFLDDSHGDQALSSGLSSPTRCQNGERVERYSRKVFVGGLPPDIDEDEITASFRRFGPLVVDWPHKAESKSYFPPKGYAFLLFQEESSVQALIDACLEEDGKLYLCVSSPTIKDKPVQIRPWNLSDSDFVMDGSQPLDPRKTIFVGGVPRPLRAVELAMIMDRLYGGVCYAGIDTDPELKYPKGAGRVAFSNQQSYIAAISARFVQLQHNDIDKRVEVKPYVLDDQMCDECQGTRCGGKFAPFFCANVTCLQYYCEYCWASIHSRAGREFHKPLVKEGGDRPRHVPFRWS

SEQ ID NO: 43010 - protein, 684 aa, Homo sapiens
MQDDLLMDKSKTQPQPQQQQRQQQQPQPESSVSEAPSTPLSSETPKPEENSAVPALSPAAAPPAPNGPDKMQMESPLLPGLSFHQPPQQPPPPQEPAAPGASLSPSFGSTWSTGTTNAVEDSFFQGITPVNGTMLFQNFPHHVNPVFGGTFSPQIGLAQTQHHQQPPPPAPAPQPAQPAQPPQAQPPQQRRSPASPSQAPYAQRSAAAAYGHQPIMTSKPSSSSAVAAAAAAAAASSASSSWNTHQSVNAAWSAPSNPWGGLQAGRDPRRAVGVGVGVGVGVPSPLNPISPLKKPFSSNVIAPPKFPRAAPLTSKSWMEDNAFRTDNGNNLLPFQDRSRPYDTFNLHSLENSLMDMIRTDHEPLKGRMGINFHHPGTDNIMALNSRSSLFPFEDAFLDDSHGDQALSSGLSSPTRCQNGERVERYSRKVFVGGLPPDIDEDEITASFRRFGPLVVDWPHKAESKSYFPPKGYAFLLFQEESSVQALIDACLEEDGKLYLCVSSPTIKDKPVQIRPWNLSDSDFVMDGSQPLDPRKTIFVGGVPRPLRAVELAMIMDRLYGGVCYAGIDTDPELKYPKGAGRVAFSNQQSYIAAISARFVQLQHNDIDKRVEVKPYVLDDQMCDECQGTRCGGKFAPFFCANVTCLQYYCEYCWASIHSRAGREFHKPLVKEGGDRPRHVPFRWS

SEQ ID NO: 43011 - protein, 684 aa, Homo sapiens; identical to SEQ ID NO: 43010

SEQ ID NO: 43012 - protein, 729 aa, Homo sapiens
MGDYGFGVLVQSNTGNKSAFPVRFHPHLQPPHHHQNATPSPAAFINNNTAANGSSAGSAWLFPAPATHNIQDEILGSEKAKSQQQEQQDPLEKQQLSPSPGQEAGILPETEKAKSEENQGDNSSENGNGKEKIRIESPVLTGFDYQEATGLGTSTQPLTSSASSLTGFSNWSAAIAPSSSTIINEDASFFHQGGVPAASANNGALLFQNFPHHVSPGFGGSFSPQIGPLSQHHPHHPHFQHHHSQHQQQRRSPASPHPPPFTHRNAAFNQLPHLANNLNKPPSPWSSYQSPSPTPSSSWSPGGGGYGGWGGSQGRDHRRGLNGGITPLNSISPLKKNFASNHIQLQKYARPSSAFAPKSWMEDSLNRADNIFPFPDRPRTFDMHSLESSLIDIMRAENDTIKGRLNYSYPGSDSSLLINARTYGRRRGQSSLFPMEDGFLDDGRGDQPLHSGLGSPHCFSHQNGERVERYSRKVFVGGLPPDIDEDEITASFRRFGPLIVDWPHKAESKSYFPPKGYAFLLFQDESSVQALIDACIEEDGKLYLCVSSPTIKDKPVQIRPWNLSDSDFVMDGSQPLDPRKTIFVGGVPRPLRAVELAMIMDRLYGGVCYAGIDTDPELKYPKGAGRVAFSNQQSYIAAISARFVQLQHGEIDKRVEVKPYVLDDQLCDECQGARCGGKFAPFFCANVTCLQYYCEYCWAAIHSRAGREFHKPLVKEGGDRPRHISFRWN

SEQ ID NO: 43013 - protein, 712 aa, Homo sapiens
MGDYGFGVLVQSNTGNKSAFPVRFHPHLQPPHHHQNATPSPAAFINNNTAANGSSAGSAWLFPAPATHNIQDEILGSEKAKSQQQEQQDPLEKQQLSPSPGQEAGILPETEKAKSEENQGDNSSENGNGKEKIRIESPVLTGFDYQEATGLGTSTQPLTSSASSLTGFSNWSAAIAPSSSTIINEDASFFHQGGVPAASANNGALLFQNFPHHVSPGFGGSFSPQIGPLSQHHPHHPHFQHHHSQHQQQRRSPASPHPPPFTHRNAAFNQLPHLANNLNKPPSPWSSYQSPSPTPSSSWSPGGGGYGGWGGSQGRDHRRGLNGGITPLNSISPLKKNFASNHIQLQKYARPSSAFAPKSWMEDSLNRADNIFPFPDRPRTFDMHSLESSLIDIMRAENDTIKARTYGRRRGQSSLFPMEDGFLDDGRGDQPLHSGLGSPHCFSHQNGERVERYSRKVFVGGLPPDIDEDEITASFRRFGPLIVDWPHKAESKSYFPPKGYAFLLFQDESSVQALIDACIEEDGKLYLCVSSPTIKDKPVQIRPWNLSDSDFVMDGSQPLDPRKTIFVGGVPRPLRAVELAMIMDRLYGGVCYAGIDTDPELKYPKGAGRVAFSNQQSYIAAISARFVQLQHGEIDKRVEVKPYVLDDQLCDECQGARCGGKFAPFFCANVTCLQYYCEYCWAAIHSRAGREFHKPLVKEGGDRPRHISFRWN

SEQ ID NO: 43014 - protein, 682 aa, Homo sapiens
MSTPAVPQDLQLPPSQRAQSAFKEQRRQKLKEHLLRRKTLFAYKQENEMLSSRDQRVVTSEDQVQEGTKVLKLKTKMADKENMKRPAESKNNTVVGKHCIPLKPSNELTNSTVVIDTHKPKDSNQTPHLLLTEDDPQSQHMTLSQAFHLKNNSKKKQMTTEKQKQDANMPKKPVLGSYRGQIVQSKINSFRKPLQVKDESSAATKKLSATIPKATKPQPVNTSSVTVKSNRSSNMTATTKFVSTTSQNTQLVRPPIRSHHSNTRDTVKQGISRTSANVTIRKGPHEKELLQSKTALSSVKTSSSQGIIRNKTLSRSIASEVIARPASLSNDKLMEKSEPVDQRRHTAGKAIVDSRSAQPKETSEERKARLSEWKAGKGRVLKRPPNSVVTQHEPAGQNEKPVGSFWTTMAEEDEQRLFTEKVNNTFSECLNLINEGCPKEDILVTLNDLIKNIPDAKKLVKYWICLALIEPITSPIENIIAIYEKAILAGAQPIEEMRHTIVDILTMKSQEKANLGENMEKSCASKEEVKEVSIEDTGVDVDPEKLEMESKLHRNLLFQDCEKEQDNKTKDPTHDVKTPNTETRTSCLIKYNVSTTPYLQSVKKKVQFDGTNSAFKELKFLTPVRRSRRLQEKTSKLPDMLKDHYPCVSSLEQLTELGRETDAFVCRPNAALCRVYYEADTT

SEQ ID NO: 43015 - protein, 494 aa, Homo sapiens
MSTPAVPQDLQLPPSQRAQSAFKEQRRQKLKEHLLRRKTLFAYKQENEMLSSRDQRVVTSEDQVQEGTKVLKLKTKMADKENMKRPAESKNNTVVGKHCIPLKPSNELTNSTVVIDTHKPKDSNQTPHLLLTEDDPQSQHMTLSQAFHLKNNSKKKQMTTEKQKQDANMPKKPVLGSYRGQIVQSKINSFRKPLQVKDESSAATKKLSATIPKATKPQPVNTSSVTVKSNRSSNMTATTKFVSTTSQNTQLVRPPIRSHHSNTRDTVKQGISRTSANVTIRKGPHEKELLQSKTALSSVKTSSSQGIIRNKTLSRSIASEVIARPASLSNDKLMEKSEPVDQRRHTAGKAIVDSRSAQPKETSEERKARLSEWKAGKGRVLKRPPNSVVTQHEPAGQNEKPVGSFWTTMAEEDEQRLFTEKVNNTFSECLNLINEGCPKEDILVTLNDLIKNIPDAKKLVKYWICLALIEPITSPIENIIAIYEKAILAGAQVR

SEQ ID NO: 43016 - protein, 683 aa, Homo sapiens
MSTPAVPQDLQLPPSQRAQSAFKEQRRQKLKEHLLRRKTLFAYKQENEMLSSSRDQRVVTSEDQVQEGTKVLKLKTKMADKENMKRPAESKNNTVVGKHCIPLKPSNELTNSTVVIDTHKPKDSNQTPHLLLTEDDPQSQHMTLSQAFHLKNNSKKKQMTTEKQKQDANMPKKPVLGSYRGQIVQSKINSFRKPLQVKDESSAATKKLSATIPKATKPQPVNTSSVTVKSNRSSNMTATTKFVSTTSQNTQLVRPPIRSHHSNTRDTVKQGISRTSANVTIRKGPHEKELLQSKTALSSVKTSSSQGIIRNKTLSRSIASEVIARPASLSNDKLMEKSEPVDQRRHTAGKAIVDSRSAQPKETSEERKARLSEWKAGKGRVLKRPPNSVVTQHEPAGQNEKPVGSFWTTMAEEDEQRLFTEKVNNTFSECLNLINEGCPKEDILVTLNDLIKNIPDAKKLVKYWICLALIEPITSPIENIIAIYEKAILAGAQPIEEMRHTIVDILTMKSQEKANLGENMEKSCASKEEVKEVSIEDTGVDVDPEKLEMESKLHRNLLFQDCEKEQDNKTKDPTHDVKTPNTETRTSCLIKYNVSTTPYLQSVKKKVQFDGTNSAFKELKFLTPVRRSRRLQEKTSKLPDMLKDHYPCVSSLEQLTELGRETDAFVCRPNAALCRVYYEADTT

SEQ ID NO: 43017 - protein, 495 aa, Homo sapiens
MSTPAVPQDLQLPPSQRAQSAFKEQRRQKLKEHLLRRKTLFAYKQENEMLSSSRDQRVVTSEDQVQEGTKVLKLKTKMADKENMKRPAESKNNTVVGKHCIPLKPSNELTNSTVVIDTHKPKDSNQTPHLLLTEDDPQSQHMTLSQAFHLKNNSKKKQMTTEKQKQDANMPKKPVLGSYRGQIVQSKINSFRKPLQVKDESSAATKKLSATIPKATKPQPVNTSSVTVKSNRSSNMTATTKFVSTTSQNTQLVRPPIRSHHSNTRDTVKQGISRTSANVTIRKGPHEKELLQSKTALSSVKTSSSQGIIRNKTLSRSIASEVIARPASLSNDKLMEKSEPVDQRRHTAGKAIVDSRSAQPKETSEERKARLSEWKAGKGRVLKRPPNSVVTQHEPAGQNEKPVGSFWTTMAEEDEQRLFTEKVNNTFSECLNLINEGCPKEDILVTLNDLIKNIPDAKKLVKYWICLALIEPITSPIENIIAIYEKAILAGAQHI

SEQ ID NO: 43018 - protein, 1972 aa, Homo sapiens
MGDDSEWLKLPVDQKCEHKLWKARLSGYEEALKIFQKIKDEKSPEWSKFLGLIKKFVTDSNAVVQLKGLEAALVYVENAHVAGKTTGEVVSGVVSKVFNQPKAKAKELGIEICLMYIEIEKGEAVQEELLKGLDNKNPKIIVACIETLRKALSEFGSKIILLKPIIKVLPKLFESREKAVRDEAKLIAVEIYRWIRDALRPPLQNINSVQLKELEEEWVKLPTSAPRPTRFLRSQQELEAKLEQQQSAGGDAEGGGDDGDEVPQIDAYELLEAVEILSKLPKDFYDKIEAKKWQERKEALESVEVLIKNPKLEAGDYADLVKALKKVVGKDTNVMLVALAAKCLTGLAVGLRKKFGQYAGHVVPTILEKFKEKKPQVVQALQEAIDAIFLTTTLQNISEDVLAVMDNKNPTIKQQTSLFIARSFRHCTASTLPKSLLKPFCAALLKHINDSAPEVRDAAFEALGTALKVVGEKAVNPFLADVDKLKLDKIKECSEKVELIHGKKAGLAADKKEFKPLPGRTAASGAAGDKDTKDISAPKPGPLKKAPAAKAGGPPKKGKPAAPGGAGNTGTKNKKGLETKEIVEPELSIEVCEEKASAVLPPTCIQLLDSSNWKERLACMEEFQKAVELMDRTEMPCQALVRMLAKKPGWKETNFQVMQMKLHIVALIAQKGNFSKTSAQVVLDGLVDKIGDVKCGNNAKEAMTAIAEACMLPWTAEQVVSMAFSQKNPKNQSETLNWLSNAIKEFGFSGLNVKAFISNVKTALAATNPAVRTAAITLLGVMYLYVGPSLRMFFEDEKPALLSQIDAEFEKMQGQSPPAPTRGISKHSTSGTDEGEDGDEPDDGSNDVVDLLPRTEISDKITSELVSKIGDKNWKIRKEGLDEVAGIINDAKFIQPNIGELPTALKGRLNDSNKILVQQTLNILQQLAVAMGPNIKQHVKNLGIPIITVLGDSKNNVRAAALATVNAWAEQTGMKEWLEGEDLSEELKKENPFLRQELLGWLAEKLPTLRSTPTDLILCVPHLYSCLEDRNGDVRKKAQDALPFFMMHLGYEKMAKATGKLKPTSKDQVLAMLEKAKVNMPAKPAPPTKATSKPMGGSAPAKFQPASAPAEDCISSSTEPKPDPKKAKAPGLSSKAKSAQGKKMPSKTSLKEDEDKSGPIFIVVPNGKEQRMKDEKGLKVLKWNFTTPRDEYIEQLKTQMSSCVAKWLQDEMFHSDFQHHNKALAVMVDHLESEKEGVIGCLDLILKWLTLRFFDTNTSVLMKALEYLKLLFTLLSEEEYHLTENEASSFIPYLVVKVGEPKDVIRKDVRAILNRMCLVYPASKMFPFIMEGTKSKNSKQRAECLEELGCLVESYGMNVCQPTPGKALKEIAVHIGDRDNAVRNAALNTIVTVYNVHGDQVFKLIGNLSEKDMSMLEERIKRSAKRPSAAPIKQVEEKPQRAQNISSNANMLRKGPAEDMSSKLNQARSMSGHPEAAQMVRREFQLDLDEIENDNGTVRCEMPELVQHKLDDIFEPVLIPEPKIRAVSPHFDDMHSNTASTINFIISQVASGDINTSIQALTQLFQIESLAREASTGVLKDLMHGLITLMLDSRIEDLEEGQQVIRSVNLLVVKVLEKSDQTNILSALLVLLQDSLLATASSPKFSELVMKCLWRMVRLLPDTINSINLDRILLDIHIFMKVFPKEKLKQCKSEFPIRTLKTLLHTLCKLKGPKILDHLTMIDNKNESELEAHLCRMMKHSMDQTGSKSDKETEKGASRIDEKSSKAKVNDFLAEIFKKIGSKENTKEGLAELYEYKKKYSDADIEPFLKNSSQFFQSYVERGLRVIEMEREGKGRISTSTGISPQMEVTCVPTPTSTVSSIGNTNGEEVGPSVYLERLKILRQRCGLDNTKQDDRPPLTSLLSKPAVPTVASSTDMLHSKLSQLRESREQHQHSDLDSNQTHSSGTVTSSSSTANIDDLKKRLERIKSSRK

SEQ ID NO: 43019 - protein, 1972 aa, Homo sapiens; identical to SEQ ID NO: 43018

SEQ ID NO: 43020 - protein, 301 aa, Homo sapiens
MGDDSEWLKLPVDQKCEHKLWKARLSGYEEALKIFQKIKDEKSPEWSKFLGLIKKFVTDSNAVVQLKGLEAALVYVENAHVAGKTTGEVVSGVVSKVFNQPKAKAKELGIEICLMYIEIEKGEAVQEELLKGLDNKNPKIIVACIETLRKALSEFGSKIILLKPIIKVLPKLFESREKAVRDEAKLIAVEIYRWIRDALRPPLQNINSVQLKELEEEWVKLPTSAPRPTRFLRSQQELEAKLEQQQSAGGDAEGGGDDGDEVPQIDAYELLEAVEILSKPKTFMTKLRQKNGKREKRPWSL

SEQ ID NO: 43021 - protein, 2039 aa, Homo sapiens
MGDDSEWLKLPVDQKCEHKLWKARLSGYEEALKIFQKIKDEKSPEWSKFLGLIKKFVTDSNAVVQLKGLEAALVYVENAHVAGKTTGEVVSGVVSKVFNQPKAKAKELGIEICLMYIEIEKGEAVQEELLKGLDNKNPKIIVACIETLRKALSEFGSKIILLKPIIKVLPKLFESREKAVRDEAKLIAVEIYRWIRDALRPPLQNINSVQLKELEEEWVKLPTSAPRPTRFLRSQQELEAKLEQQQSAGGDAEGGGDDGDEVPQIDAYELLEAVEILSKLPKDFYDKIEAKKWQERKEALESVEVLIKNPKLEAGDYADLVKALKKVVGKDTNVMLVALAAKCLTGLAVGLRKKFGQYAGHVVPTILEKFKEKKPQVVQALQEAIDAIFLTTTLQNISEDVLAVMDNKNPTIKQQTSLFIARSFRHCTASTLPKSLLKPFCAALLKHINDSAPEVRDAAFEALGTALKVVGEKAVNPFLADVDKLKLDKIKECSEKVELIHGKKAGLAADKKEFKPLPGRTAASGAAGDKDTKDISAPKPGPLKKAPAAKAGGPPKKGKPAAPGGAGNTGTKNKKGLETKEIVEPELSIEVCEEKASAVLPPTCIQLLDSSNWKERLACMEEFQKAVELMDRTEMPCQALVRMLAKKPGWKETNFQVMQMKLHIVALIAQKGNFSKTSAQVVLDGLVDKIGDVKCGNNAKEAMTAIAEACMLPWTAEQVVSMAFSQKNPKNQSETLNWLSNAIKEFGFSGLNVKAFISNVKTALAATNPAVRTAAITLLGVMYLYVGPSLRMFFEDEKPALLSQIDAEFEKMQGQSPPAPTRGISKHSTSGTDEGEDGDEPDDGSNDVVDLLPRTEISDKITSELVSKIGDKNWKIRKEGLDEVAGIINDAKFIQPNIGELPTALKGRLNDSNKILVQQTLNILQQLAVAMGPNIKQHVKNLGIPIITVLGDSKNNVRAAALATVNAWAEQTGMKEWLEGEDLSEELKKENPFLRQELLGWLAEKLPTLRSTPTDLILCVPHLYSCLEDRNGDVRKKAQDALPFFMMHLGYEKMAKATGKLKPTSKDQVLAMLEKAKVNMPAKPAPPTKATSKPMGGSAPAKFQPASAPAEDCISSSTEPKPDPKKAKAPGLSSKAKSAQGKKMPSKTSLKEDEDKSGPIFIVVPNGKEQRMKDEKGLKVLKWNFTTPRDEYIEQLKTQMSSCVAKWLQDEMFHSDFQHHNKALAVMVDHLESEKEGVIGCLDLILKWLTLRFFDTNTSVLMKALEYLKLLFTLLSEEEYHLTENEASSFIPYLVVKVGEPKDVIRKDVRAILNRMCLVYPASKMFPFIMEGTKSKNSKQRAECLEELGCLVESYGMNVCQPTPGKALKEIAVHIGDRDNAVRNAALNTIVTVYNVHGDQVFKLIGNLSEKDMSMLEERIKRSAKRPSAAPIKQVEEKPQRAQNISSNANMLRKGPAEDMSSKLNQARSMSGHPEAAQMVRREFQLDLDEIENDNGTVRCEMPELVQHKLDDIFEPVLIPEPKIRAVSPHFDDMHSNTASTINFIISQVASGDINTSIQALTQIDEVLRQEDKAEAMSGHIDQFLIATFMQLRLIYNTHMADEKLEKDEIIKLYSCIIGNMISLFQIESLAREASTGVLKDLMHGLITLMLDSRIEDLEEGQQVIRSVNLLVVKVLEKSDQTNILSALLVLLQDSLLATASSPKFSELVMKCLWRMVRLLPDTINSINLDRILLDIHIFMKVFPKEKLKQCKSEFPIRTLKTLLHTLCKLKGPKSCMCLPQILDHLTMIDNKNESELEAHLCRMMKHSMDQTGSKSDKETEKGASRIDEKSSKAKVNDFLAEIFKKIGSKENTKEGLAELYEYKKKYSDADIEPFLKNSSQFFQSYVERGLRVIEMEREGKGRISTSTGISPQMEVTCVPTPTSTVSSIGNTNGEEVGPSVYLERLKILRQRCGLDNTKQDDRPPLTSLLSKPAVPTVASSTDMLHSKLSQLRESREQHQHSDLDSNQTHSSGTVTSSSSTANIDDLKKRLERIKSSRK

SEQ ID NO: 43022 - protein, 151 aa, Homo sapiens
MGDDSEWLKLPVDQKCEHKLWKARLSGYEEALKIFQKIKDEKSPEWSKFLGLIKKFVTDSNAVVQLKGLEAALVYVENAHVAGKTTGEVVSGVVSKVFNQPKAKAKELGIEICLMYIEIEKGEAVQEELLKGLDNKNPKIIVACIETLRKA

SEQ ID NO: 43023 - protein, 2032 aa, Homo sapiens
MGDDSEWLKLPVDQKCEHKLWKARLSGYEEALKIFQKIKDEKSPEWSKFLGLIKKFVTDSNAVVQLKGLEAALVYVENAHVAGKTTGEVVSGVVSKVFNQPKAKAKELGIEICLMYIEIEKGEAVQEELLKGLDNKNPKIIVACIETLRKALSEFGSKIILLKPIIKVLPKLFESREKAVRDEAKLIAVEIYRWIRDALRPPLQNINSVQLKELEEEWVKLPTSAPRPTRFLRSQQELEAKLEQQQSAGGDAEGGGDDGDEVPQIDAYELLEAVEILSKLPKDFYDKIEAKKWQERKEALESVEVLIKNPKLEAGDYADLVKALKKVVGKDTNVMLVALAAKCLTGLAVGLRKKFGQYAGHVVPTILEKFKEKKPQVVQALQEAIDAIFLTTTLQNISEDVLAVMDNKNPTIKQQTSLFIARSFRHCTASTLPKSLLKPFCAALLKHINDSAPEVRDAAFEALGTALKVVGEKAVNPFLADVDKLKLDKIKECSEKVELIHGKKAGLAADKKEFKPLPGRTAASGAAGDKDTKDISAPKPGPLKKAPAAKAGGPPKKGKPAAPGGAGNTGTKNKKGLETKEIVEPELSIEVCEEKASAVLPPTCIQLLDSSNWKERLACMEEFQKAVELMDRTEMPCQALVRMLAKKPGWKETNFQVMQMKLHIVALIAQKGNFSKTSAQVVLDGLVDKIGDVKCGNNAKEAMTAIAEACMLPWTAEQVVSMAFSQKNPKNQSETLNWLSNAIKEFGFSGLNVKAFISNVKTALAATNPAVRTAAITLLGVMYLYVGPSLRMFFEDEKPALLSQIDAEFEKMQGQSPPAPTRGISKHSTSGTDEGEDGDEPDDGSNDVVDLLPRTEISDKITSELVSKIGDKNWKIRKEGLDEVAGIINDAKFIQPNIGELPTALKGRLNDSNKILVQQTLNILQQLAVAMGPNIKQHVKNLGIPIITVLGDSKNNVRAAALATVNAWAEQTGMKEWLEGEDLSEELKKENPFLRQELLGWLAEKLPTLRSTPTDLILCVPHLYSCLEDRNGDVRKKAQDALPFFMMHLGYEKMAKATGKLKPTSKDQVLAMLEKAKVNMPAKPAPPTKATSKPMGGSAPAKFQPASAPAEDCISSSTEPKPDPKKAKAPGLSSKAKSAQGKKMPSKTSLKEDEDKSGPIFIVVPNGKEQRMKDEKGLKVLKWNFTTPRDEYIEQLKTQMSSCVAKWLQDEMFHSDFQHHNKALAVMVDHLESEKEGVIGCLDLILKWLTLRFFDTNTSVLMKALEYLKLLFTLLSEEEYHLTENEASSFIPYLVVKVGEPKDVIRKDVRAILNRMCLVYPASKMFPFIMEGTKSKNSKQRAECLEELGCLVESYGMNVCQPTPGKALKEIAVHIGDRDNAVRNAALNTIVTVYNVHGDQVFKLIGNLSEKDMSMLEERIKRSAKRPSAAPIKQVEEKPQRAQNISSNANMLRKGPAEDMSSKLNQARSMSGHPEAAQMVRREFQLDLDEIENDNGTVRCEMPELVQHKLDDIFEPVLIPEPKIRAVSPHFDDMHSNTASTINFIISQVASGDINTSIQALTQIDEVLRQEDKAEAMSGHIDQFLIATFMQLRLIYNTHMADEKLEKDEIIKLYSCIIGNMISLFQIESLAREASTGVLKDLMHGLITLMLDSRIEDLEEGQQVIRSVNLLVVKVLEKSDQTNILSALLVLLQDSLLATASSPKFSELVMKCLWRMVRLLPDTINSINLDRILLDIHIFMKVFPKEKLKQCKSEFPIRTLKTLLHTLCKLKGPKILDHLTMIDNKNESELEAHLCRMMKHSMDQTGSKSDKETEKGASRIDEKSSKAKVNDFLAEIFKKIGSKENTKEGLAELYEYKKKYSDADIEPFLKNSSQFFQSYVERGLRVIEMEREGKGRISTSTGISPQMEVTCVPTPTSTVSSIGNTNGEEVGPSVYLERLKILRQRCGLDNTKQDDRPPLTSLLSKPAVPTVASSTDMLHSKLSQLRESREQHQHSDLDSNQTHSSGTVTSSSSTANIDDLKKRLERIKSSRK

SEQ ID NO: 43024 - protein, 339 aa, Homo sapiens
MKDSLVLLGRVPAHPDSRCWFLAWNPAGTLLASCGGDRRIRIWGTEGDSWICKSVLSEGHQRTVRKVAWSPCGNYLASASFDATTCIWKKNQDDFECVTTLEGHENEVKSVAWAPSGNLLATCSRDKSVWVWEVDEEDEYECVSVLNSHTQDVKHVVWHPSQELLASASYDDTVKLYREEEDDWVCCATLEGHESTVWSLAFDPSGQRLASCSDDRTVRIWRQYLPGNEQGVACSGSDPSWKCICTLSGFHSRTIYDIAWCQLTGALATACGDDAIRVFQEDPNSDPQQPTFSLTAHLHQAHSQDVNCVAWNPKEPGLLASCSDDGEVAFWKYQRPEGL

SEQ ID NO: 43025 - protein, 393 aa, Homo sapiens
MWWRVLSLLAWFPLQEASLTNHTETITVEEGQTLTLKCVTSLRKNSSLQWLTPSGFTIFLNEYPALKNSKYQLLHHSANQLSITVPNVTLQDEGVYKCLHYSDSVSTKEVKVIVLATPFKPILEASVIRKQNGEEHVVLMCSTMRSKPPPQITWLLGNSMEVSGGTLHEFETDGKKCNTTSTLIIHTYGKNSTVDCIIRHRGLQGRKLVAPFRFEDLVTDEETASDALERNSLSSQDPQQPTSTVSVTEDSSTSEIDKEEKEQTTQDPDLTTEANPQYLGLARKKSGILLLTLVSFLIFILFIIVQLFIMKLRKAHVIWKKENEVSEHTLESYRSRSNNEETSSEEKNGQSSHPMRCMNYITKLYSEAKTKRKENVQHSKLEEKHIQVPESIV

SEQ ID NO: 43026 - protein, 194 aa, Homo sapiens
MWVKLLSIVAEFCFSPFLVTDEETASDALERNSLSSQDPQQPTSTVSVTEDSSTSEIDKEEKEQTTQDPDLTTEANPQYLGLARKKSGILLLTLVSFLIFILFIIVQLFIMKLRKAHVIWKKENEVSEHTLESYRSRSNNEETSSEEKNGQSSHPMRCMNYITKLYSEAKTKRKENVQHSKLEEKHIQVPESIV

SEQ ID NO: 43027 - protein, 174 aa, Homo sapiens
MACLGFQRHKAQLNLATRTWPCTLLFFLLFIPVFCKAMHVAQPAVVLASSRGIASFVCEYASPGKATEVRVTVLRQADSQVTEVCAATYMMGNELTFLDDSICTGTSSGNQVNLTIQGLRAMDTGLYICKVELMYPPPYYLGIGNGTQIYVIAKEKKPSYNRGLCENAPNRARM

SEQ ID NO: 43028 - protein, 223 aa, Homo sapiens
MACLGFQRHKAQLNLATRTWPCTLLFFLLFIPVFCKAMHVAQPAVVLASSRGIASFVCEYASPGKATEVRVTVLRQADSQVTEVCAATYMMGNELTFLDDSICTGTSSGNQVNLTIQGLRAMDTGLYICKVELMYPPPYYLGIGNGTQIYVIDPEPCPDSDFLLWILAAVSSGLFFYSFLLTAVSLSKMLKKRSPLTTGVYVKMPPTEPECEKQFQPYFIPIN

SEQ ID NO: 43029 - protein, 137 aa, Homo sapiens
MHVAQPAVVLASSRGIASFVCEYASPGKATEVRVTVLRQADSQVTEVCAATYMMGNELTFLDDSICTGTSSGNQVNLTIQGLRAMDTGLYICKVELMYPPPYYLGIGNGTQIYVIAKEKKPSYNRGLCENAPNRARM

SEQ ID NO: 43030 - protein, 56 aa, Homo sapiens
MACLGFQRHKAQLNLATRTWPCTLLFFLLFIPVFCKVPPTEPECEKQFQPYFIPIN

SEQ ID NO: 43031 - protein, 325 aa, Homo sapiens
MARPVSDRTPAPLLLGGPAGTPPGGGALLGLRSLLQGTSKPKEPASCLLKEKERKAALPAATTPGPGLETAGPADAPAGAVVGGGSPRGRPGPVPAPGLLAPLLWERTLPFGDVEYVDLDAFLLEHGLPPSPPPPGGPSPEPSPARTPAPSPGPGSCGSASPRSSPGHAPARAALGTASGHRAGLTSRDTPSPVDPDTVEVLMTFEPDPADLALSSIPGHETFDPRRHRFSEEELKPQPIMKKARKIQVPEEQKDEKYWSRRYKNNEAAKRSRDARRLKENQISVRAAFLEKENALLRQEVVAVRQELSHYRAVLSRYQAQHGAL

SEQ ID NO: 43032 - protein, 521 aa, Homo sapiens
MLPRRPLAWPAWLLRGAPGAAGSWGRPVGPLARRGCCSAPGTPEVPLTRERYPVRRLPFSTVSKQDLAAFERIVPGGVVTDPEALQAPNVDWLRTLRGCSKVLLRPRTSEEVSHILRHCHERNLAVNPQGGNTGMVGGSVPVFDEIILSTARMNRVLSFHSVSGILVCQAGCVLEELSRYVEERDFIMPLDLGAKGSCHIGGNVATNAGGLRFLRYGSLHGTVLGLEVVLADGTVLDCLTSLRKDNTGYDLKQLFIGSEGTLGIITTVSILCPPKPRAVNVAFLGCPGFAEVLQTFSTCKGMLGEILSAFEFMDAVCMQLVGRHLHLASPVQESPFYVLIETSGSNAGHDAEKLGHFLEHALGSGLVTDGTMATDQRKVKMLWALRERITEALSRDGYVYKYDLSLPVERLYDIVTDLRARLGPHAKHVVGYGHLGDGNLHLNVTAEAFSPSLLAALEPHVYEWTAGQQGSVSAEHGVGFRKRDVLGYSKPPGALQLMQQLKALLDPKGILNPYKTLPSQA

SEQ ID NO: 43033 - protein, 319 aa, Homo sapiens
MLPRRPLAWPAWLLRGAPGAAGSWGRPVGPLARRGCCSAPGTPEVPLTRERYPVRRLPFSTVSKQDLAAFERIVPGGVVTDPEALQAPNVDWLRTLRGCSKVLLRPRTSEEVSHILRHCHERNLAVNPQGGNTGMVGGSVPVFDEIILSTARMNRVLSFHSVSGILVCQAGCVLEELSRYVEERDFIMPLDLGAKGSCHIGGNVATNAGGLRFLRYGSLHGTVLGLEVVLADGTVLDCLTSLRKDNTGYDLKQLFIGSEGTLGIITTVSILCPPKPRAVNVAFLVTCVPPACGPGSPRPARLPHPALRTPGVCPQPLRL

SEQ ID NO: 43034 - protein, 387 aa, Homo sapiens
MVGGSVPVFDEIILSTARMNRVLSFHSVSGILVCQAGCVLEELSRYVEERDFIMPLDLGAKGSCHIGGNVATNAGGLRFLRYGSLHGTVLGLEVVLADGTVLDCLTSLRKDNTGYDLKQLFIGSEGTLGIITTVSILCPPKPRAVNVAFLGCPGFAEVLQTFSTCKGMLGEILSAFEFMDAVCMQLVGRHLHLASPVQESPFYVLIETSGSNAGHDAEKLGHFLEHALGSGLVTDGTMATDQRKVKMLWALRERITEALSRDGYVYKYDLSLPVERLYDIVTDLRARLGPHAKHVVGYGHLGDGNLHLNVTAEAFSPSLLAALEPHVYEWTAGQQGSVSAEHGVGFRKRDVLGYSKPPGALQLMQQLKALLDPKGILNPYKTLPSQA

SEQ ID NO: 43035 - protein, 325 aa, Homo sapiens
MLPRRPLAWPAWLLRGAPGAAGSWGRPVGPLARRGCCSAPGTPEVPLTRERYPVRRLPFSTVSKQDLAAFERIVPGGVVTDPEALQAPNVDWLRTLRGCSKVLLRPRTSEEVSHILRHCHERNLAVNPQGGNTGMVGGSVPVFDEIILSTARMNRVLSFHSVSGILVCQAGCVLEELSRYVEERDFIMPLDLGAKGSCHIGGNVATNAGGLRFLRYGSLHGTVLGLEVVLADGTVLDCLTSLRKDNTGYDLKQLFIGSEGTLGIITTVSILCPPKPRAVNVAFLVTCVPPACGPGSPRPARLPHPALRTPGLRQESLASSCHAHV

SEQ ID NO: 43036 - protein, 141 aa, Homo sapiens
MLWALRERITEALSRDGYVYKYDLSLPVERLYDIVTDLRARLGPHAKHVVGYGHLGDGNLHLNVTAEAFSPSLLAALEPHVYEWTAGQQGSVSAEHGVGFRKRDVLGYSKPPGALQLMQQLKALLDPKGILNPYKTLPSQA

SEQ ID NO: 43037 - protein, 202 aa, Homo sapiens
MSFPPLWPTRHVPASHPTCPLLPGPCCCPHCLCDSAPPSLPCPTLVQGASRPILILRAFPGPCHSVPCHDLKLQVGASPFRHGCPPSVRCPSRLIAGVPGCSVLSWSLGHSLSGIDSRVGATPGLGHSLSWVRAPPGLGHSLSGVGATPGLGHLLSGVGASPGEDTEHAAALTPCGVPPVPGCRSHSQPLSHLVSSSRCCGP

SEQ ID NO: 43038 - protein, 282 aa, Homo sapiens
MALSCSSWCRSPQWKFEASKSHANHRPICLSPRIWPGSASATSTVCSSSESFLPRGPPAVSLLLHGPPTVSFPPPWPTHHVLPSPVAHPPCPCLPPDMPLELPGPCCCPHCLCDSAPPSLPCPTLVQGASRPILILRAFPGPCHSVPCHDLKLQVGASPFRHGCPPSVRCPSRLIAGVPGCSVLSWSLGHSLSGIDSRVGATPGLGHSLSWVRAPPGLGHSLSGVGATPGLGHLLSGVGASPGEDTEHAAALTPCGVPPVPGCRSHSQPLSHLVSSSRCCGP

SEQ ID NO: 43039 - protein, 414 aa, Homo sapiens
MGGLSARPTAGRTDPAGTCWGQDPGSKMATVIPGPLSLGEDFYREAIEHCRSYNARLCAERSLRLPFLDSQTGVAQNNCYIWMEKTHRGPGLAPGQIYTYPARCWRKKRRLNILEDPRLRPCEYKIDCEAPLKKEGGLPEGPVLEALLCAETGEKKIELKEEETIMDCQKQQLLEFPHDLEVEDLEDDIPRRKNRAKGKAYGIGGLRKRQDTASLEDRDKPYVCDICGKRYKNRPGLSYHYTHTHLAEEEGEENAERHALPFHRKNNHKQFYKELAWVPEAQRKHTAKKAPDGTVIPNGYCDFCLGGSKKTGCPEDLISCADCGRSGHPSCLQFTVNMTAAVRTYRWQCIECKSCSLCGTSENDDQLLFCDDCDRGYHMYCLSPPMAEPPEGSWSCHLCLRHLKEKASAYITLT

SEQ ID NO: 43040 - protein, 357 aa, Homo sapiens
MATVIHNPLKALGDQFYKEAIEHCRSYNSRLCAERSVRLPFLDSQTGVAQNNCYIWMEKRHRGPGLAPGQLYTYPARCWRKKRRLHPPEDPKLRLLEIKPEVELPLKKDGFTSESTTLEALLRGEGVEKKVDAREEESIQEIQRVLENDENVEEGNEEEDLEEDIPKRKNRTRGRARGSAGGRRRHDAASQEDHDKPYVCDICGKRYKNRPGLSYHYAHTHLASEEGDEAQDQETRSPPNHRNENHRPQKGPDGTVIPNNYCDFCLGGSNMNKKSGRPEELVSCADCGRSAHLGGEGRKEKEAAAAARTTEDLFGSTSESDTSTFHGFDEDDLEEPRSCRGRRSGRGSPTADKKGSC

SEQ ID NO: 43041 - protein, 332 aa, Homo sapiens
MEKTHRGPGLAPGQIYTYPARCWRKKRRLNILEDPRLRPCEYKIDCEAPLKKEGGLPEGPVLEALLCAETGEKKIELKEEETIMDCQKQQLLEFPHDLEVEDLEDDIPRRKNRAKGKAYGIGGLRKRQDTASLEDRDKPYVCDICGKRYKNRPGLSYHYTHTHLAEEEGEENAERHALPFHRKNNHKQFYKELAWVPEAQRKHTAKKAPDGTVIPNGYCDFCLGGSKKTGCPEDLISCADCGRSGHPSCLQFTVNMTAAVRTYRWQCIECKSCSLCGTSENDDQLLFCDDCDRGYHMYCLSPPMAEPPEGSWSCHLCLRHLKEKASAYITLT

SEQ ID NO: 43042 - protein, 380 aa, Homo sapiens
MGGLSARPTAGRTDPAGTCWGQDPGSKMATVIPGPLSLGEDFYREAIEHCRSYNARLCAERSLRLPFLDSQTGVAQNNCYIWMEKTHRGPGLAPGQIYTYPARCWRKKRRLNILEDPRLRPCEYKIDCEAPLKKEGGLPEGPVLEALLCAETGEKKIELKEEETIMDCQKQQLLEFPHDLEVEDLEDDIPRRKNRAKGKAYGIGGLRKRQDTASLEDRDKPYVCDKFYKELAWVPEAQRKHTAKKAPDGTVIPNGYCDFCLGGSKKTGCPEDLISCADCGRSGHPSCLQFTVNMTAAVRTYRWQCIECKSCSLCGTSENDGASWAGLTPQDQLLFCDDCDRGYHMYCLSPPMAEPPEGSWSCHLCLRHLKEKASAYITLT

SEQ ID NO: 43043 - protein, 203 aa, Homo sapiens
MATAIQNPLKSLGEDFYREAIEHCRSYNARLCAERSLRLPFLDSQTGVAQNNCYIWMEKTHRGPGLAPGQIYTYPARCWRKKRRLNILEDPRLRPCEYKIDCEAPLKKEGGLPEGPVLEALLCAETGEKKIELKEEETIMDCQKQQLLEFPHDLEVEDLEDDIPRRKNRAKGKAYGIGGLRKRQDTASLEDRDKPYVCDSESF

SEQ ID NO: 43044 - protein, 414 aa, Homo sapiens; identical to SEQ ID NO: 43039

SEQ ID NO: 43045 - protein, 388 aa, Homo sapiens
MATAIQNPLKSLGEDFYREAIEHCRSYNARLCAERSLRLPFLDSQTGVAQNNCYIWMEKTHRGPGLAPGQIYTYPARCWRKKRRLNILEDPRLRPCEYKIDCEAPLKKEGGLPEGPVLEALLCAETGEKKIELKEEETIMDCQKQQLLEFPHDLEVEDLEDDIPRRKNRAKGKAYGIGGLRKRQDTASLEDRDKPYVCDICGKRYKNRPGLSYHYTHTHLAEEEGEENAERHALPFHRKNNHKQFYKELAWVPEAQRKHTAKKAPDGTVIPNGYCDFCLGGSKKTGCPEDLISCADCGRSGHPSCLQFTVNMTAAVRTYRWQCIECKSCSLCGTSENDDQLLFCDDCDRGYHMYCLSPPMAEPPEGSWSCHLCLRHLKEKASAYITLT

SEQ ID NO: 43046 - protein, 391 aa, Homo sapiens
MAAVVENVVKLLGEQYYKDAMEQCHNYNARLCAERSVRLPFLDSQTGVAQSNCYIWMEKRHRGPGLASGQLYSYPARRWRKKRRAHPPEDPRLSFPSIKPDTDQTLKKEGLISQDGSSLEALLRTDPLEKRGAPDPRVDDDSLGEFPVTNSRARKRILEPDDFLDDLDDEDYEEDTPKRRGKGKSKGKGVGSARKKLDASILEDRDKPYACDICGKRYKNRPGLSYHYAHSHLAEEEGEDKEDSQPPTPVSQRSEEQKSKKGPDGLALPNNYCDFCLGDSKINKKTGQPEELVSCSDCGRSGHPSCLQFTPVMMAAVKTYRWQCIECKCCNICGTSENDDQLLFCDDCDRGYHMYCLTPSMSEPPEGSWSCHLCLDLLKEKASIYQNQNSS

SEQ ID NO: 43047 - protein, 377 aa, Homo sapiens
SSIIQNRLKKLGDQFYKEAIEHCRSYNSRLCAERSVRLPFLDSQTGVAQNNCYIWMEKRHRGPGLAPGQLYTYPARCWRKKRRLHPPEDPKLRLLEIKPEVELPLKKDGFTSESTTLEALLRGEGVEKKVDAREEESIQEIQRVLENDENVEEGNEEEDLEEDIPKRKNRTRGRARGSAGGRRRHDAASQEDHDKPYVCDICGKRYKNRPGLSYHYAHTHLASEEGDEAQDQETRSPPNHRNENHRPQKGPDGTVIPNNYCDFCLGGSNMNKKSGRPEELVSCADCGRSGHPTCLQFTLNMTEAVKTYKWQCIECKSCILCGTSENDDQLLFCDDCDRGYHMYCLNPPVAEPPEGSWSCHLCWELLKEKASAFGCQA

SEQ ID NO: 43048 - protein, 357 aa, Homo sapiens; identical to SEQ ID NO: 43040

SEQ ID NO: 43049 - protein, 378 aa, Homo sapiens
MATVIHNPLKALGDQFYKEAIEHCRSYNSRLCAERSVRLPFLDSQTGVAQNNCYIWMEKRHRGPGLAPGQLYTYPARCWRKKRRLHPPEDPKLRLLEIKPEVELPLKKDGFTSESTTLEALLRGEGVEKKVDAREEESIQEIQRVLENDENVEEGNEEEDLEEDIPKRKNRTRGRARGSAGGRRRHDAASQEDHDKPYVCDICGKRYKNRPGLSYHYAHTHLASEEGDEAQDQETRSPPNHRNENHRPQKGPDGTVIPNNYCDFCLGGSNMNKKSGRPEELVSCADCGRSGHPTCLQFTLNMTEAVKTYKWQCIECKSCILCGTSENDDQLLFCDDCDRGYHMYCLNPPVAEPPEGSWSCHLCWELLKEKASAFGCQA

SEQ ID NO: 43050 - protein, 1369 aa, Homo sapiens
MSPCGRKMGEGRQQRRAPVGKLLLLPGRRDTPHGRSGSSGARTQRSLLWLLVHVWLWAASGSSAQLFNLTLSVDEGLPPDTLVGDIRAGLPAAQQQEGSGFFLSEDSDDSPLLDDFHVHPDTGIIRTARRLDRERRDHYSFVAATLLGAVVQVEIRVNDVNDHSPRFPLDSLQLDVSELSPPGTAFRLPVAHDPDAGLFSTQGYTLVQPSDLPKDPAGPFFQLRYRTPGPLPSPLLPGSSSPLEPLDLVLLRRLDREEAAAHRLQIEAWDGGRPRRTGLLSVELRVLDENDNPPVFEQDEYRAAVREDAQPGAEVCRVRATDRDLGPNGFVRYSVRARQVPGAGSGGGALGDAAYFAVEELSGVVRVWRPLDREAQAWHQLVVEARDGGAEPEVATVRVSIAVLDVNDNRPAIHVLFLTEGGVARVSEGARPGDYVARVSVSDADGDWEKEDEATGELGVGLGDGSISLSLEGGEGDFALLPGGPPGVFFLCVEGPLDRESRDLYELLLVATDAGSPPLSTEETLLLRVADLNDQPPLFSQQHYKASVSEAAAPGTVVMWVSASDADEAGSDHAWLRYTVVQLSAPCNLGSLQSKMVHTAECGPSFAIDSESGAISTIRTLDREVQEAVELKVVAQDLGEPPLSATCLVSITVDDVNDNEPIFWRQVYNATIAEHAPVGHCFLQVTASDADSGLYGFIEYSLYDGFLSYEAPQAFRIDPHDGQICVSQDIDRERDPATYDLLVEAKDGGGLSAQAFVRVDLEDVNDNHPVFNPSTYVTSISDETQPGTEIINVLATDQDSGIYGTVAYELIPGNVSSLFTIDSTTGIIYLTLPLSHLESTTLSLMVSAQDGGGLTAVINADVTIHIFQTTLAPAEFERPKYTFLVYEDVPEDSPIGTVKAREPLNSSEPIFYRISSGDLGGKFSIHPRLGTIRTRKPLDHETQPVVVLTVQAQLGSAPACSSTEVNITVMDVNDNHPAFLRTSDEIRISQTTPPGTALYLARAEDRDSGRNGLIRYSIASPQPGVFAIDRALGVLFLNGSLGAGEQRELTLTLRAEDQGVHPQAALLVLTVVIEKREHSPSWTFEHLVYQVEVSESLSPMTQMLQTQAHPLGPQRAASPLRYSLEPSVDSAMFGIRPYTGWIYLRRQFDYESTQTYNFRVFAWIPEDGFLQNVSTTVIVRVWDENDNSPTFLHDVLFLKVEESPVPQGVIGKITAIDMDSGKNGQLLYFLLSDGKFFKMNPNTGELINWVALDREHRGHHEMTVLVTDRGSPPRNATMAVYVSVTDINDNRPFFPQCLPGKELHVKVLEGQPVNMLVTTVFAKDPDEGNNAEVTYSVSSARPMPLKGKTAFGKQSCKKQTNKQTNKILT

SEQ ID NO: 43051 - protein, 2916 aa, Homo sapiens
MRLDEITKSENEDGEKKMFTQQFESTDACVYEVYVKINSIVKSQSQCGLKRGSPETELWGAIVFRSQEENAKPVKETEVTASDADSGLYGFIEYSLYDGFLSYEAPQAFRIDPHDGQICVSQDIDRERDPATYDLLVEAKDGDEQRMTHLALVKGGLSAQAFVRVDLEDVNDNHPVFNPSTYVTSISDETQPGTEIINVLATDQDSGIYGTVAYELIPGNVSSLFTIDSTTGLYSPEVEILSAVNFSADKEVMNSLEMFLPLLRHFKKVERDEEAAEKKFEASRGWFMRFKGRRHLHYLKVQDEAASADGEAAARYVANLAKILGEGIIYLTLPLSHLESTTLSLMVSAQDGGGLTAVINADVTIHIFQTTLAPAEFERPKYTFLVYEDVPEDSPIGTVKAREPLNSSEPIFYRISSGDLGGKFSIHPRLGTIRTRKPLDHETQPVVVLTVQAQLGSAPACSSTEVNITVMDVNDNHPAFLRTSDEIRISQTTPPGTALYLARAEDRDSGRNGLIRYSIASPQPGVFAIDRALGVLFLNGSLGAGEQRELTLTLRAEDQGVHPQAALLVLTVVIEKREHSPSWTFEHLVYQVEVSESLSPMTQMLQTQAHPLGPQRAASPLRYSLEPSVDSAMFGIRPYTGWIYLRRQFDYESTQTYNFRVFAWIPEDGFLQNVSTTVIVRVWDENDNSPTFLHDVLFLKVEESPVPQGVIGKITAIDMDSGKNGQLLYFLLSDGKFFKMNPNTGPAGTIYVITWADGAAAFSGTDFAFSSDELQAFVLKSLFCELGEGELINWVALDREHRGHHEMTVLVTDRGSPPRNATMAVYVSVTDINDNRPFFPQCLPGKELHVKVLEGQPVNMLVTTVFAKDPDEGNNAEVTYSVSSEDSSDHFKIDANNGEIRTTTILSYDYRPSYRMSVIATDQGVPPLQGQAVVNIQVIPLSKGRAIMSQNIRHLIIPENLKPTKIMSLIKSSDHLQQHYNGKLHFSIVADDKDGHFEIDSSTGDLFLSKELDYETTSHYLFRVITTDHSKNLSLSSTVFLSIDVEDQNDHSPSFQDELIVISVEENVPIGTLVYVFNAKDDDGSFLNSRIQYYIESHNPGTNPFLIHPSFGTLVTVSRLDRESIPTVILTVTASDQAVNVTDRRLRSLTAQIVILDVNDHNPTFISFPNAHVKEDVTVGSLVHHITAHDPDEGRNGKVTYSILSGNENMTFMLDESSGLLTTTCPLDYEMKTQHILTVLALDDGTPALSSSQTLTVTVLDVNDEAPVFKQHLYEASVKENQNPGEFVTRVEALDRDSGVNSKLQFEIMPGASFELFEINSDTGEVVTTTILDREIQEVFTLRVLVRDGGFPSLSSTTTILCTVEDENDHAPEFIVSSYDIEVLENQEPEVVYTVLASDMDAGNNRAVEYHIIDGNTDECFTINEMSGELSTTRALDREQISNFTLVILCSDLGDPPRSSVIHLQVRVLDANDHSPSFPTLYYQSSVREDAEVGTVVLVLSAVDKDEGLNGQTEYFLTDEASGAFTIDPMSGTLKTSNTLDREARSQHTFSAVARDCSIQGSRSTTVIIKVYVTDVNDNDPVLEQNPFDVFLSPESPTNQTTVIVRADDLDLGPNGTVVFSFAETQSMFSIDKYTGEIQFQQNPSSEYFPIWLQLKVTDQGIPARTTTGLLVIHMEGEDVKISFSHHLYKGLVTENCEAGTSIVTVKAFAPDSIQDSMKYSIFSGNEDGVLSLCSKSGQLTVKEPKFLDFEVRNEVQLIVLAESSGHRAYCKVAVLIQDENDNSPCFEQSIYQASVSESQLYNAHVIQVFATDLDSGLNGLIEYSILSGNQEEAFQIDALSGVITTKAILDYELTSSYSLIVQATDKGMPRLSNTTVIKVQVTDINDNAPAFLPSEAVEITEDSLPGVIVTHVSVHDVDLNSAFIFSFAKESNPGTKFAIDQNTGVVVLVKTLDFEEMTEYELLIQISDSVHYTEGALVVRVLDVNDNPPVFSQDFYQVTVPESIPVGYSVLTLSATDLESNENISYRILSSSKEFSIDPKNGTIFTISPVLLLDTISTTQFLVEASDGGNPDLRALTLVEIGIEDMNNYAPEFTVKSYNLSLSEDALVGSTLVTFSNIDHDWTRENTYVEYSIISGNSQNNFHVETKFFHSEYPYKQVGYLVLLHSLDREASASHELVILASDSGCPPLSSTAVISIQVLDVNDNPPNFSSLSYHTHVKESTPLGSHITVVSANDRDTGSHAEIIYNIISGNEKGHFYLEENTGVLYLIKPLDYEKMTKFTLTVQASDAEKKHFSFAVVFVSVLDDNDHAPQFMFSSFSCIVPENLPISSTICSINALDFDAGPYGELTYSIVSPCFLTHGMSYDHDLFLIDPLTGDIHAKQILDYENGNKYCLTVQAKDKGDATASLVVWVDIEGIDEFEPIFTQDQYFFTLPEKNKDRQLIGRVEASDADAGIDGVILYSLGTSSPFFSVNKTNGNIYLIRALPLIKSQLNKEDTLEMKIIAHSPKSDSKFASCTVFVNVSFSSEGTPLAVFASSFSISLVVSFLVFLILICILIVMILRHKQKDTINNYEEKKTSSLDADLRVTRDASVLKAFQKTDDCSNEVVPVDATPEWLSLISIMEKDIVNLYRHSNSSGHCSVEGETAEDKEIQRINEHPYRKCSDSALSDHESRVPDSGIPRDSDQLSCLSGETDVMVTAETAEASQTFGEGDQGEGCSTTCAQNNVLPQTVQKREAKESILADVRKESVFISGDQEVRCAALSTQTTSDHDGKDNYHWNYLLSWEPKFQPLASVFNDIAKLKDEHLHMPGIPKEKKSFVFPPPLITAVAQPGIKAVPPRMPAVNLGQVPPKHPRSPIPYHLGSLPEGMTPNFSPSLSLLTMQPPALSPLLREGELLGTHISGTCHELKAEDEVQI

SEQ ID NO: 43052 - protein, 709 aa, Homo sapiens
MSPCGRKMGEGRQQRRAPVGKLLLLPGRRDTPHGRSGSSGARTQRSLLWLLVHVWLWAASGSSAQLFNLTLSVDEGLPPDTLVGDIRAGLPAAQQQEGSGFFLSEDSDDSPLLDDFHVHPDTGIIRTARRLDRERRDHYSFVAATLLGAVVQVEIRVNDVNDHSPRFPLDSLQLDVSELSPPGTAFRLPVAHDPDAGLFSTQGYTLVQPSDLPKDPAGPFFQLRYRTPGPLPSPLLPGSSSPLEPLDLVLLRRLDREEAAAHRLQIEAWDGGRPRRTGLLSVELRVLDENDNPPVFEQDEYRAAVREDAQPGAEVCRVRATDRDLGPNGFVRYSVRARQVPGAGSGGGALGDAAYFAVEELSGVVRVWRPLDREAQAWHQLVVEARDGGAEPEVATVRVSIAVLDVNDNRPAIHVLFLTEGGVARVSEGARPGDYVARVSVSDADGDWEKEDEATGELGVGLGDGSISLSLEGGEGDFALLPGGPPGVFFLCVEGPLDRESRDLYELLLVATDAGSPPLSTEETLLLRVADLNDQPPLFSQQHYKASVSEAAAPGTVVMWVSASDADEAGSDHAWLRYTVVQLSAPCNLGSLQSKMVHTAECGPSFAIDSESGAISTIRTLDREVQEAVELKVVAQDLGEPPLSATCLVSITVDDVNDNEPIFWRQVYNATIAEHAPVGHCFLQLISAQVAFVKIKQKQKEIQEKQNLA

SEQ ID NO: 43053 - protein, 702 aa, Homo sapiens
MGEGRQQRRAPVGKLLLLPGRRDTPHGRSGSSGARTQRSLLWLLVHVWLWAASGSSAQLFNLTLSVDEGLPPDTLVGDIRAGLPAAQQQEGSGFFLSEDSDDSPLLDDFHVHPDTGIIRTARRLDRERRDHYSFVAATLLGAVVQVEIRVNDVNDHSPRFPLDSLQLDVSELSPPGTAFRLPVAHDPDAGLFSTQGYTLVQPSDLPKDPAGPFFQLRYRTPGPLPSPLLPGSSSPLEPLDLVLLRRLDREEAAAHRLQIEAWDGGRPRRTGLLSVELRVLDENDNPPVFEQDEYRAAVREDAQPGAEVCRVRATDRDLGPNGFVRYSVRARQVPGAGSGGGALGDAAYFAVEELSGVVRVWRPLDREAQAWHQLVVEARDGGAEPEVATVRVSIAVLDVNDNRPAIHVLFLTEGGVARVSEGARPGDYVARVSVSDADGDWEKEDEATGELGVGLGDGSISLSLEGGEGDFALLPGGPPGVFFLCVEGPLDRESRDLYELLLVATDAGSPPLSTEETLLLRVADLNDQPPLFSQQHYKASVSEAAAPGTVVMWVSASDADEAGSDHAWLRYTVVQLSAPCNLGSLQSKMVHTAECGPSFAIDSESGAISTIRTLDREVQEAVELKVVAQDLGEPPLSATCLVSITVDDVNDNEPIFWRQVYNATIAEHAPVGHCFLQLISAQVAFVKIKQKQKEIQEKQNLA

SEQ ID NO: 43054 - protein, 1366 aa, Homo sapiens
MSPCGRKMGEGRQQRRAPVGKLLLLPGRRDTPHGRSGSSGARTQRSLLWLLVHVWLWAASGSSAQLFNLTLSVDEGLPPDTLVGDIRAGLPAAQQQEGSGFFLSEDSDDSPLLDDFHVHPDTGIIRTARRLDRERRDHYSFVAATLLGAVVQVEIRVNDVNDHSPRFPLDSLQLDVSELSPPGTAFRLPVAHDPDAGLFSTQGYTLVQPSDLPKDPAGPFFQLRYRTPGPLPSPLLPGSSSPLEPLDLVLLRRLDREEAAAHRLQIEAWDGGRPRRTGLLSVELRVLDENDNPPVFEQDEYRAAVREDAQPGAEVCRVRATDRDLGPNGFVRYSVRARQVPGAGSGGGALGDAAYFAVEELSGVVRVWRPLDREAQAWHQLVVEARDGGAEPEVATVRVSIAVLDVNDNRPAIHVLFLTEGGVARVSEGARPGDYVARVSVSDADGDWEKEDEATGELGVGLGDGSISLSLEGGEGDFALLPGGPPGVFFLCVEGPLDRESRDLYELLLVATDAGSPPLSTEETLLLRVADLNDQPPLFSQQHYKASVSEAAAPGTVVMWVSASDADEAGSDHAWLRYTVVQLSAPCNLGSLQSKMVHTAECGPSFAIDSESGAISTIRTLDREVQEAVELKVVAQDLGEPPLSATCLVSITVDDVNDNEPIFWRQVYNATIAEHAPVGHCFLQVTASDADSGLYGFIEYSLYDGFLSYEAPQAFRIDPHDGQICVSQDIDRERDPATYDLLVEAKDGGGLSAQAFVRVDLEDVNDNHPVFNPSTYVTSISDETQPGTEIINVLATDQDSGIYGTVAYELIPGNVSSLFTIDSTTGIIYLTLPLSHLESTTLSLMVSAQDGGGLTAVINADVTIHIFQTTLAPAEFERPKYTFLVYEDVPEDSPIGTVKAREPLNSSEPIFYRISSGDLGGKFSIHPRLGTIRTRKPLDHETQPVVVLTVQAQLGSAPACSSTEVNITVMDVNDNHPAFLRTSDEIRISQTTPPGTALYLARAEDRDSGRNGLIRYSIASPQPGVFAIDRALGVLFLNGSLGAGEQRELTLTLRAEDQGVHPQAALLVLTVVIEKREHSPSWTFEHLVYQVEVSESLSPMTQMLQTQAHPLGPQRAASPLRYSLEPSVDSAMFGIRPYTGWIYLRRQFDYESTQTYNFRVFAWIPEDGFLQNVSTTVIVRVWDENDNSPTFLHDVLFLKVEESPVPQGVIGKITAIDMDSGKNGQLLYFLLSDGKFFKMNPNTGELINWVALDREHRGHHEMTVLVTDRGSPPRNATMAVYVSVTDINDNRPFFPQCLPGKELHVKVLEGQPVNMLVTTVFAKDPDEGNNAEVTYSVSSARPMPLKGKTAFGKQSCKKQTNKQTKS

SEQ ID NO: 43055 - protein, 153 aa, Homo sapiens
MLEKLMGADSLQLFRSRYTLGKIYFIGFQRSILLSKSENSLNSIAKETEEGRETVTRKEGWKRRHEDGYLEMAQRHLQRSLCPWVSYLPQPYAELEEVSSHVGKVFMARNYEFLAYEASKDRRQPLERMWTCNYNQQKDQSCNHKEITSTKAE

SEQ ID NO: 43056 - protein, 82 aa, Homo sapiens
MAQRHLQRSLCPWVSYLPQPYAELEEVSSHVGKVFMARNYEFLAYEASKDRRQPLERMWTCNYNQQKDQSCNHKEITSTKAE

SEQ ID NO: 43057 - protein, 125 aa, Homo sapiens
MRTAIWKWHRGIYRDHYVLGSLTFLSPMQRAGTSNQWNMGKVMTLDSGDEVTFHKTWPTETGSPYRLEEVSSHVGKVFMARNYEFLAYEASKDRRQPLERMWTCNYNQQKDQSCNHKEITSTKAE

SEQ ID NO: 43058 - protein, 347 aa, Homo sapiens
MRVVVIGAGVIGLSTALCIHERYHSVLQPLDIKVYADRFTPLTTTDVAAGLWQPYLSDPNNPQEADWSQQTFDYLLSHVHSPNAENLGLFLISGYNLFHEAIPDPSWKDTVLGFRKLTPRELDMFPDYGYGWFHTSLILEGKNYLQWLTERLTERGVKFFQRKVESFEEVAREGADVIVNCTGVWAGALQRDPLLQPGRGQIMKVDAPWMKHFILTHDPERGIYNSPYIIPGTQTVTLGGIFQLGNWSELNNIQDHNTIWEGCCRLEPTLKNARIIGERTGFRPVRPQIRLEREQLRTGPSNTEVIHNYGHGGYGLTIHWGCALEAAKLFGRILEEKKLSRMPPSHL

SEQ ID NO: 43059 - protein, 197 aa, Homo sapiens
MRVVVIGAGVIGLSTALCIHERYHSVLQPLDIKVYADRFTPLTTTDVAAGLWQPYLSDPNNPQEADWSQQTFDYLLSHVHSPNAENLGLFLISGYNLFHEAIPDPSWKDTVLGFRKLTPRELDMFPDYGYGWFHTSLILEGKNYLQWLTERLTERGVKFFQRKVESFEEVAREGADVIVNCTGVWAGALQRDPLLQP

SEQ ID NO: 43060 - protein, 799 aa, Homo sapiens
MKPSPAGTAKELEPPAPARGEQRTAEPEGRWREKGEADTERQRTRERQEATLAGLAELEYLRQRQELLVRGALRGAGGAGAAAPRAGELLGEAAQRSRLEEKFLEENILLLRKQLNCLRRRDAGLLNQLQELDKQISDLRLDVEKTSEEHLETDSRPSSGFYELSDGASGSLSNSSNSVFSECLSSCHSSTCFCSPLEATLSLSDGCPKSADVNPKYQCDLVSKNGNDVYRYPSPLHAVAVQSPMFLLCLTGNPLREEDRLGNHASDICGGSELDAVKTDSSLPSPSSLWSASHPSSSKKMDGYILSLVQKKTHPVRTNKPRTSVNADPTKGLLRNGSVCVRAPGGVSQGNSVNLKNSKQACLPSGGIPSLNNGTFSPPKQWSKESKAEQAESKRVPLPEGCPSGAASDLQSKHLPKTAKPASQEHARCSAIGTGESPKESAQLSGASPKESPSRGPAPPQENKVVQPLKKMSQKNSLQGVPPATPPLLSTAFPVEERPALDFKSEGSSQSLEEAHLVKAQFIPGQQPSVRLHRGHRNMGVVKNSSLKHRGPALQGLENGLPTVREKTRAGSKKCRFPDDLDTNKKLKKASSKGRKSGGGPEAGVPGRPAGGGHRAGSRAHGHGREAVVAKPKHKRTDYRRWKSSAEISYEEALRRARRGRRENVGLYPAPVPLPYASPYAYVASDSEYSAECESLFHSTVVDTSEDEQSNYTTNCFGDSESSVSEGEFVGESTTTSDSEESGGLIWSQFVQTLPIQTVTAPDLHNHPAKTFVKIKASHNLKKKILRFRSGSLKLMTTV

SEQ ID NO: 43061 - protein, 836 aa, Homo sapiens
MKPSPAGTAKELEPPAPARGEQRTAEPEGRWREKGEADTERQRTRERQEATLAGLAELEYLRQRQELLVRGALRGAGGAGAAAPRAGELLGEAAQRSRLEEKFLEENILLLRKQLNCLRRRDAGLLNQLQELDKQISDLRLDVEKTSEEHLETDSRPSSGFYELSDGASGSLSNSSNSVFSECLSSCHSSTCFCSPLEATLSLSDGCPKSADLIGLLEYKEGHCEDQASGAVCRSLSTPQFNSLDVIADVNPKYQCDLVSKNGNDVYRYPSPLHAVAVQSPMFLLCLTGNPLREEDRLGNHASDICGGSELDAVKTDSSLPSPSSLWSASHPSSSKKMDGYILSLVQKKTHPVRTNKPRTSVNADPTKGLLRNGSVCVRAPGGVSQGNSVNLKNSKQACLPSGGIPSLNNGTFSPPKQWSKESKAEQAESKRVPLPEGCPSGAASDLQSKHLPKTAKPASQEHARCSAIGTGESPKESAQLSGASPKESPSRGPAPPQENKVVQPLKKMSQKNSLQGVPPATPPLLSTAFPVEERPALDFKSEGSSQSLEEAHLVKAQFIPGQQPSVRLHRGHRNMGVVKNSSLKHRGPALQGLENGLPTVREKTRAGSKKCRFPDDLDTNKKLKKASSKGRKSGGGPEAGVPGRPAGGGHRAGSRAHGHGREAVVAKPKHKRTDYRRWKSSAEISYEEALRRARRGRRENVGLYPAPVPLPYASPYAYVASDSEYSAECESLFHSTVVDTSEDEQSNYTTNCFGDSESSVSEGEFVGESTTTSDSEESGGLIWSQFVQTLPIQTVTAPDLHNHPAKTFVKIKASHNLKKKILRFRSGSLKLMTTV

SEQ ID NO: 43062 - protein, 774 aa, Homo sapiens
MWTPGGPPGSAGWDRRRLGARLRAAFAGLQELQGLRATQQERVRGALALQPPPAPAAPCGPHGLHGPEQQLEAALAALQEQLSRLRQQDIGLKTHLDQLDLQISKLQLDVGTASGEALDSDSRPSSGFYEMSDGGSCSLSTSCASVCSDHISPSLGSLLPVAQAHKARPSMGDWRPRSVDETTVPAWRPQATEEGARPPGSVEDAGQPWGTFWPRPVSTGDLDRALPADTGLQKASADAELLGLLCQGVDIPLHVPDPKYRQDLVSQGGREVYPYPSPLHAVALQSPLFVLTKETPQRGGPSFPRESPRGPAGLNTIQTGPVLEAGPARARAYIDRLLHLWGRETPAKGSEGEQGPLRHAASPSPQRQGGWSTDGGGRLLVFAPGREDEGGPAQSRGAGRGGPQQQGYMPLEGPQQSGSLPEEGSKPSNSCVLRETMVQASPSSKAQQTPSAQDYGRGNIISPSRMLDKSPSPASGHFAHPSFAASLKMGPPKSKAEKIKRSPMDKVLRFARQPLLLLDRPEGAHAAPQPSLEWDPAHWPTGRGGLQRRPALAWEAPGRSCSESTLYPMPVLVPLAVAPQESHRTSAQALFPFEASLLTSVARRKHRRWQSTVEISARARLASCPESNLGPPRPVARRAGGPLARGRPSLVRQDAYTRSDSEPSKHSAECDPRFPSVIPETSEGESSDHTTNRFGDRESSSSDEEGGAQSRDCDLALGYVAAGHAELAWTQEAPVSSGPLLSPVPKLCRIKASKALKKKIRRFQPTALKVMTMV

SEQ ID NO: 43063 - protein, 280 aa, Homo sapiens
MWTPGGPPGSAGWDRRRLGARLRAAFAGLQELQGLRATQQERVRGALALQPPPAPAAPCGPHGLHGPEQQLEAALAALQEQLSRLRQQDIGLKTHLDQLDLQISKLQLDVGTASGEALDSDSRPSSGFYEMSDGGSCSLSTSCASVCSDHISPSLGSLLPVAQAHKARPSMGDWRPRSVDETTVPAWRPQATEEGARPPGSVEDAGQPWGTFWPRPVSTELCNAPGELDMHAPPAGCTSSSLTGVGSGLRGKCGLCGCQLPFCSVNTSSKTKSSGISRQQ

SEQ ID NO: 43064 - protein, 629 aa, Homo sapiens
MIRAFSFPVSPERGRLRGWLEGSLAGLCELHWLRERQEYRVQQALRLAQPGMGGAEAEDEEDADEDEDAAAARRAAAALEEQLEALPGLVWDLGQQLGDLSLESGGLEQESGRSSGFYEDPSSTGGPDSPPSTFCGDSGFSGSSSYGRLGPSEPRGIYASERPKSLGDASPSAPEVVGARAAVPRSFSAPYPTAGGSAGPEACSSAERRARAGPFLTPSPLHAVAMRSPRPCGRPPTDSPDAGGAGRPLDGYISALLRRRRRRGAGQPRTSPGGADGGPRRQNSVRQRPPDASPSPGSARPAREPSLERVGGHPTSPAALSRAWASSWESEAAPEPAAPPAAPSPPDSPAEGRLVKAQYIPGAQAATRGLPGRAARRKPPPLTRGRSVEQSPPRERPRAAGRRGRMAEASGRRGSPRARKASRSQSETSLLGRASAVPSGPPKYPTAEREEPRPPRPRRGPAPTLAAQAAGSCRRWRSTAEIDAADGRRVRPRAPAARVPGPGPSPSAPQRRLLYGCAGSDSECSAGRLGPLGRRGPAGGVGGGYGESESSASEGESPAFSSASSDSDGSGGLVWPQQLVAATAASGGGAGAGAPAGPAKVFVKIKASHALKKKILRFRSGSLKVMTTV

SEQ ID NO: 43065 - protein, 674 aa, Homo sapiens
MNSGAMRIHSKGHFQGGIQVKNEKNRPSLKSLKTDNRPEKSKCKPLWGKVFYLDLPSVTISEKLQKDIKDLGGRVEEFLSKDISYLISNKKEAKFAQTLGRISPVPSPESAYTAETTSPHPSHDGSSFKSPDTVCLSRGKLLVEKAIKDHDFIPSNSILSNALSWGVKILHIDDIRYYIEQKKKELYLLKKSSTSVRDGGKRVGSGAQKTRTGRLKKPFVKVEDMSQLYRPFYLQLTNMPFINYSIQKPCSPFDVDKPSSMQKQTQVKLRIQTDGDKYGGTSIQLQLKEKKKKGYCECCLQKYEDLETHLLSEQHRNFAQSNQYQVVDDIVSKLVFDFVEYEKDTPKKKRIKYSVGSLSPVSASVLKKTEQKEKVELQHISQKDCQEDDTTVKEQNFLYKETQETEKKLLFISEPIPHPSNELRGLNEKMSNKCSMLSTAEDDIRQNFTQLPLHKNKQECILDISEHTLSENDLEELRVDHYKCNIQASVHVSDFSTDNSGSQPKQKSDTVLFPAKDLKEKDLHSIFTHDSGLITINSSQEHLTVQAKAPFHTPPEEPNECDFKNMDSLPSGKIHRKVKIILGRNRKENLEPNAEFDKRTEFITQEENRICSSPVQSLLDLFQTSEEKSEFLGFTSYTEKSGICNVLDIWEEENSDNLLTAFFSSPSTSTFTGF

SEQ ID NO: 43066 - protein, 217 aa, Homo sapiens
MNSGAMRIHSKGHFQGGIQVKNEKNRPSLKSLKTDNRPEKSKCKPLWGKVFYLDLPSVTISEKLQKDIKDLGGRVEEFLSKDISYLISNKKEAKFAQTLGRISPVPSPESAYTAETTSPHPSHDGSSFKSPDTVCLSRGKLLVEKAIKDHDFIPSNSILSNALSWGVKILHIDDIRYYIEQKKKELYLLKKSSTSVRDGGKRVGSGAQKTRKALQSI

SEQ ID NO: 43067 - protein, 615 aa, Homo sapiens
MSEPGKGDDCLELESSMAESRLRAPDLGVSRCLGKCQKNSPGARKHPFSGKSFYLDLPAGKNLQFLTGAIQQLGGVIEGFLSKEVSYIVSSRREVKAESSGKSHRGCPSPSPSEVRVETSAMVDPKGSHPRPSRKPVDSVPLSRGKELLQKAIRNQGSISGGGSGGSSSLLTNARSWGVRILHVDEMMMHVQQLSLASLCVKKQQPKKPEGTCPAAESRTRKVARLKAPFLKIEDESRKFRPFHHQFKSFPEISFLGPKDASPFEAPTTLGSMHHTRESKDGEPSPRSAAHTMPRRKKGYCECCQEAFEELHVHLQSAQHRSFALEAHLYAEVDRIIAQLSHSFADIPFQAGLPRWSGSPASDCDPLCPETLHPHQPSHPRAASPRIRKEDSCQASVTQGRAAGQQRWTESLDGVMGPPASHTCVSATTLLPALPKGSREQGCLCPCPASFTQSHLVTSLALLPGEWSPAEDMPLHPSQENSFAPADIPVKGPLLFPEARPWLMSARCWVRPFPFVTWGCLIPHDTTPLHEEVSPCPCLRLGYLYLLLTQSLWCRVRVPSLSTAGPIPRTSHPCTLAFPSYLNDHDLGHLCQAKPQGWNTPQPFLHCGFLAVDSG

SEQ ID NO: 43068 - protein, 431 aa, Homo sapiens
MSEPGKGDDCLELESSMAESRLRAPDLGVSRCLGKCQKNSPGARKHPFSGKSFYLDLPAGKNLQFLTGAIQQLGGVIEGFLSKEVSYIVSSRREVKAESSGKSHRGCPSPSPSEVRVETSAMVDPKGSHPRPSRKPVDSVPLSRGKELLQKAIRNQGSISGGGSGGSSSLLTNARSWGVRILHVDEMMMHVQQLSLASLCVKKQQPKKPEGTCPAAESRTRKVARLKAPFLKIEDESRKFRPFHHQFKSFPEISFLGPKDASPFEAPTTLGSMHHTRESKDGEPSPRSAAHTMPRRKKGYCECCQEAFEELHVHLQSAQHRSFALEAHLYAEVDRIIAQLSHSFADIPFQAGLPRWSGSPASDCDPLCPETLHPHQPSHPRAASPRIRKEDSCQASVTQGRAAGQQRWTESLDGVMGPPASHTCHRPCRLP

SEQ ID NO: 43069 - protein, 157 aa, Homo sapiens
MSEPGKGDDCLELESSMAESRLRAPDLGVSRCLGKCQKNSPGARKHPFSGKSFYLDLPAGKNLQFLTGAIQQLGGVIEGFLSKEVSYIVSSRREVKAESSGKSHRGCPSPSPSEVRVETSAMVDPKGSHPRPSRKPVDSVPLSRGKELLQKAIRNQK

SEQ ID NO: 43070 - protein, 189 aa, Homo sapiens
MVGGGQPCGPNMSEVSCKKRDDYLEWPEYFMAVAFLSAQRSKDPNSQVGACIVNSENKIVGIGYNGMPNGCSDDVLPWRRTAENKLDTKYPYVCHAELNAIMNKNSTDVKGCSMYVALFPCNECAKLIIQAGIKEVIFMSDKYHDSDEATAARLLFNMAGVTFRKFIPKCSKIVIDFDSINSRPSQKLQ

SEQ ID NO: 43071 - protein, 178 aa, Homo sapiens
MSEVSCKKRDDYLEWPEYFMAVAFLSAQRSKDPNSQVGACIVNSENKIVGIGYNGMPNGCSDDVLPWRRTAENKLDTKYPYVCHAELNAIMNKNSTDVKGCSMYVALFPCNECAKLIIQAGIKEVIFMSDKYHDSDEATAARLLFNMAGVTFRKFIPKCSKIVIDFDSINSRPSQKLQ

SEQ ID NO: 43072 - protein, 169 aa, Homo sapiens
MSEVSCKKRDDYLEWPEYFMAVAFLSAQRSKDPNSQVGACIVNSENKIVGIGYNGMPNGCSDDVLPWRRTAENKLDTKYPYVCHAELNAIMNKNSTDVKGCSMYVALFPCNECAKLIIQAGIKEVIFMSDKYHDSDEATAARLLFNMAGVTFRKFIPKCSKIVIDFDSI

SEQ ID NO: 43073 - protein, 73 aa, Homo sapiens
MSEVSCKKRDDYLEWPEYFMAVAFLSAQRSKDPNSQVGACIVNSENKIVGIGYNGMPNGCSDDVLPWRRTAEN

SEQ ID NO: 43074 - protein, 59 aa, Homo sapiens
MSEVSCKKRDDYLEWPEYFMAVAFLSAQRSKDPNSQVGACIVNSENKIVGIGYNGMPNG

SEQ ID NO: 43075 - protein, 23 aa, Homo sapiens
MSEVSCKKRDDYLEWPEYFMAVA

SEQ ID NO: 43076 - protein, 120 aa, Homo sapiens
MSEVSCKKRDDYLEWPEYFMAVAFLSAQRSKDPNSQVGACIVNSENKIVGIGYNGMPNGCSDDVLPWRRTAENKLDTKYPYVCHAELNAIMNKNSTDVKGCSMYVALFPCNECAKLIIQA

SEQ ID NO: 43077 - protein, 178 aa, Homo sapiens; identical to SEQ ID NO: 43071

SEQ ID NO: 43078 - protein, 119 aa, Homo sapiens
MSEVSCKKRDDYLEWPEYFMAVAFLSAQRSKDPNSQVGACIVNSENKIVGIGYNGMPNGCSDDVLPWRRTAENKLDTKYPYVCHAELNAIMNKNSTDVKGCSMYVALFPCNECAKLIIQ

SEQ ID NO: 43079 - protein, 98 aa, Homo sapiens
MSEVSCKKRDDYLEWPEYFMAVAFLSAQRSKDPNSQVGACIVNSENKIVGIGYNGMPNGCSDDVLPWRRTAENKLDTKYPYVCHAELNAIMNKNSTDV

SEQ ID NO: 43080 - protein, 259 aa, Homo sapiens
MNKLKSSQKDKVRQFMIFTQSSEKTAVSCLSQNDWKLDVATDNFFQNPELYIRESVKGSLDRKKLEQLYNRYKDPQDENKIGIDGIQQFCDDLALDPASISVLIIAWKFRAATQCEFSKQEFMDGMTELGCDSIEKLKAQIPKMEQELKEPGRFKDFYQFTFNFAKNPGQKGLDLEMAIAYWNLVLNGRFKFLDLWNKFLLEHHKRSIPKDTWNLLLDFSTMIADDMSNYDEEGAWPVLIDDFVEFARPQIAGTKSTTV

SEQ ID NO: 43081 - protein, 219 aa, Homo sapiens
MNKLKSSQKDKVRQFMIFTQSSEKTAVSCLSQNDWKLDVATDNFFQNPELYIRESVKGSLDRKKLEQLYNRYKDPQDENKIGIDGMTELGCDSIEKLKAQIPKMEQELKEPGRFKDFYQFTFNFAKNPGQKGLDLEMAIAYWNLVLNGRFKFLDLWNKFLLEHHKRSIPKDTWNLLLDFSTMIADDMSNYDEEGAWPVLIDDFVEFARPQIAGTKSTTV

SEQ ID NO: 43082 - protein, 128 aa, Homo sapiens
MIFTQSSEKTAVSCLSQNDWKLDVATDNFFQNPELYIRESVKGSLDRKKLEQLYNRYKDPQDENKIGIDGIQQFCDDLALDPASISVLIIAWKFRAATQCEFSKQEFMDGMTELGCDSIEKLKAQIPK

SEQ ID NO: 43083 - protein, 292 aa, Homo sapiens
MHSDAAAVNFQLNSHLSTLANIHKIYHTLNKLNLTEDIGQDDHQTGSLRSCSSSDCFNKVMPPRKKRRPASGDDLSAKKSRHDSMYRKYDSTRIKTEEEAFSSKRCLEWFYEYAGTDDVVGPEGMEKFCEDIGVEPENVVMLVLAWKLDAQNMGYFTLQEWLKGMTSLQCDTTEKLRNTLDYLRSFLNDSTNFKLIYRYAFDFAREKDQRSLDINTAKCMLGLLLGKIWPLFPVFHQFLEQSKYKVINKDQWCNVLEFSRTINLDLSNYDEDGAWPVLLDEFVEWYKDKQMS

SEQ ID NO: 43084 - protein, 232 aa, Homo sapiens
MPPRKKRRPASGDDLSAKKSRHDSMYRKYDSTRIKTEEEAFSSKRCLEWFYEYAGTDDVVGPEGMEKFCEDIGVEPENVVMLVLAWKLDAQNMGYFTLQEWLKGMTSLQCDTTEKLRNTLDYLRSFLNDSTNFKLIYRYAFDFAREKDQRSLDINTAKCMLGLLLGKIWPLFPVFHQFLEQSKYKVINKDQWCNVLEFSRTINLDLSNYDEDGAWPVLLDEFVEWYKDKQMS

SEQ ID NO: 43085 - protein, 257 aa, Homo sapiens
MHSDAAAVNFQLNSHLSTLANIHKIYHTLNKLNLTEDIGQDDHQTGSLRSCSSSDCFNKVMPPRKKRRPASGDDLSAKKSRHDSMYRKYDSTRIKTEEEAFSSKRCLEWFYEYAGTDDVVGPEGMEKFCEDIGVEPENVVMLVLAWKLDAQNMGYFTLQEWLKGMTSLQCDTTEKLRNTLDYLRSFLNDSTNFKLIYRYAFDFARQSKYKVINKDQWCNVLEFSRTINLDLSNYDEDGAWPVLLDEFVEWYKDKQMS

SEQ ID NO: 43086 - protein, 336 aa, Homo sapiens
MEVEAALGCSGQGRGCGGVAPAGRGRERASERGTRVRISKGLSGAGGSVRKADFQLNSHLSTLANIHKIYHTLNKLNLTEDIGQDDHQTGSLRSCSSSDCFNKVMPPRKKRRPASGDDLSAKKSRHDSMYRKYDSTRIKTEEEAFSSKRCLEWFYEYAGTDDVVGPEGMEKFCEDIGVEPENVVMLVLAWKLDAQNMGYFTLQEWLKGMTSLQCDTTEKLRNTLDYLRSFLNDSTNFKLIYRYAFDFAREKDQRSLDINTAKCMLGLLLGKIWPLFPVFHQFLEQSKYKVINKDQWCNVLEFSRTINLDLSNYDEDGAWPVLLDEFVEWYKDKQMS

SEQ ID NO: 43087 - protein, 617 aa, Homo sapiens
MAAVAAGGLVGKGRDISLAALQRHDPYINRIVDVASQVALYTFGHRANEWEKTDVEGTLFVYTRSASPKHGFTIMNRLSMENRTEPITKDLDFQLQDPFLLYRNARLSIYGIWFYDKEECQRIAELMKNLTQYEQLKAHQGTGAGISPVILNSGEGKEVDILRMLIKAKDEYTKCKTCSEPKKITSSSAIYDNPNLIKPIPVKPSENQQQRIPQPNQTLDPEPQHLSLTALFGKQDKATCQETVEPPQTLHQQQQQQQQQQEKLPIRQGVVRSLSYEEPRRHSPPIEKQLCPAIQKLMVRSADLHPLSELPENRPCENGSTHSAGEFFTGPVQPGSPHNIGTSRGVQNASRTQNLFEKLQSTPGAANKCDPSTPAPASSAALNRSRAPTSVTPVAPGKGLAQPPQAYFNGSLPPQTVGHQAHGREQSTLPRQTLPISGSQTGSSGVISPQELLKKLQIVQQEQQLHASNRPALAAKFPVLAQSSGTGKPLESWINKTPNTEQQTPLFQVISPQRIPATAAPSLLMSPMVFAQPTSVPPKERESGLLPVGGQEPPAAATSLLLPIQSPEPSVITSSPLTKLQLQEALLYLIQNDDNFLNIIYEAYLFSMTQAAMKKTM

SEQ ID NO: 43088 - protein, 515 aa, Homo sapiens
MQIKVSIYGIWFYDKEECQRIAELMKNLTQYEQLKAHQGTGAGISPVILNSGEGKEVDILRMLIKAKDEYTKCKTCSEPKKITSSSAIYDNPNLIKPIPVKPSENQQQRIPQPNQTLDPEPQHLSLTALFGKQDKATCQETVEPPQTLHQQQQQQQQQQEKLPIRQGVVRSLSYEEPRRHSPPIEKQLCPAIQKLMVRSADLHPLSELPENRPCENGSTHSAGEFFTGPVQPGSPHNIGTSRGVQNASRTQNLFEKLQSTPGAANKCDPSTPAPASSAALNRSRAPTSVTPVAPGKGLAQPPQAYFNGSLPPQTVGHQAHGREQSTLPRQTLPISGSQTGSSGVISPQELLKKLQIVQQEQQLHASNRPALAAKFPVLAQSSGTGKPLESWINKTPNTEQQTPLFQVISPQRIPATAAPSLLMSPMVFAQPTSVPPKERESGLLPVGGQEPPAAATSLLLPIQSPEPSVITSSPLTKLQLQEALLYLIQNDDNFLNIIYEAYLFSMTQAAMKKTM

SEQ ID NO: 43089 - protein, 420 aa, Homo sapiens
METKRVEIPGSVLDDFCSRFILHIPSEERDNAIRVCFQIELAHWFYLDFYMQNTPGLPQCGIRDFAKAVFSHCPFLLPQGEDVEKVLDEWKEYKMGVPTYGAIILDETLENVLLVQGYLAKSGWGFPKGKVNKEEAPHDCAAREVFEETGFDIKDYICKDDYIELRINDQLARLYIIPGIPKDTKFNPKTRREIRNIEWFSIEKLPCHRNDMTPKSKLGLAPNKFFMAIPFIRPLRDWLSRRFGDSSDSDNGFSSTGSTPAKPTVEKLSRTKFRHSQQLFPDGSPGDQWVKHRQPLQQKPYNNHSEMSDLLKGKNQSMRGNGRKQYQDSPNQKKRTNGLQPAKQQNSLMKCEKKLHPRKLQDNFETDAVYDLPSSSEDQLLEHAEGQPVACNGHCKFPFSSRAFLSFKFDHNAIMKILDL

SEQ ID NO: 43090 - protein, 385 aa, Homo sapiens
METKRVEIPGSVLDDFCSRFILHIPSEERDNAIRVCFQIELAHWFYLDFYMQNTPGLPQCGIRDFAKAVFSHCPFLLPQGEDVEKVLDEWKEYKMGVPTYGAIILDETLENVLLVQGYLAKSGWGFPKGKVNKEEAPHDCAAREVFEETGFDIKDYICKDDYIELRINDQLARLYIIPGIPKDTKFNPKTRREIRNIEWFSIEKLPCHRNDMTPKSKLGLAPNKFFMAIPFIRPLRDWLSRRFGDSSDSDNGFSSTGSTPAKPTVEKLSRTKFRHSQQLFPDGSPGDQWVKHRQPLQQKPYNNHSEMSDLLKGKKCEKKLHPRKLQDNFETDAVYDLPSSSEDQLLEHAEGQPVACNGHCKFPFSSRAFLSFKFDHNAIMKILDL

SEQ ID NO: 43091 - protein, 209 aa, Homo sapiens
MTPKSKLGLAPNKFFMAIPFIRPLRDWLSRRFGDSSDSDNGFSSTGSTPAKPTVEKLSRTKFRHSQQLFPDGSPGDQWVKHRQPLQQKPYNNHSEMSDLLKGKNQSMRGNGRKQYQDSPNQKKRTNGLQPAKQQNSLMKCEKKLHPRKLQDNFETDAVYDLPSSSEDQLLEHAEGQPVACNGHCKFPFSSRAFLSFKFDHNAIMKILDL

SEQ ID NO: 43092 - protein, 446 aa, Homo sapiens
MTELGMVVLGIDTTHLWMLPLTPGSWNSMRSRHKWNWPQGSWGLGGPPRSTAFLECCTSFLPNDLGFTDSYSQKAFCGIYSKDGQIFMSACQDQTIRLYDCRYGRFRKFKSIKARDVGWSVLDVAFTPDGNHFLYSSWSDYIHICNIYGEGDTHTALDLRPDERRFAVFSIAVSSDGREVLGGANDGCLYVFDREQNRRTLQIESHEDDVNAVAFADISSQILFSGGDDAICKVWDRRTMREDDPKPVGALAGHQDGITFIDSKGDARYLISNSKDQTIKLWDIRRFSSREGMEASRQAATQQNWDYRWQQVPKKAWRKLKLPGDSSLMTYRGHGVLHTLIRCRFSPIHSTGQQFIYSGCSTGKVVVYDLLSGHIVKKLTNHKACVRDVSWHPFEEKIVSSSWDGNLRLWQYRQAEYFQDDMPESEECASAPAPVPQSSTPFSSPQ

SEQ ID NO: 43093 - protein, 520 aa, Homo sapiens
MGSRNSSSAGSGSGDPSEGLPRRGAGLRRSEEEEEEDEDVDLAQALLDSEEENDRAWDGRLGDRYNPPVDATPDTRELEFNEIKTQVELATGQLGLRRAAQKHSFPRMLHQRERGLCHRGSFSLGEQSRVISHFLPNDLGFTDSYSQKAFCGIYSKDGQIFMSACQDQTIRLYDCRYGRFRKFKSIKARDVGWSVLDVAFTPDGNHFLYSSWSDYIHICNIYGEGDTHTALDLRPDERRFAVFSIAVSSDGREVLGGANDGCLYVFDREQNRRTLQIESHEDDVNAVAFADISSQILFSGGDDAICKVWDRRTMREDDPKPVGALAGHQDGITFIDSKGDARYLISNSKDQTIKLWDIRRFSSREGMEASRQAATQQNWDYRWQQVPKKAWRKLKLPGDSSLMTYRGHGVLHTLIRCRFSPIHSTGQQFIYSGCSTGKVVVYDLLSGHIVKKLTNHKACVRDVSWHPFEEKIVSSSWDGNLRLWQYRQAEYFQDDMPESEECASAPAPVPQSSTPFSSPQ

SEQ ID NO: 43094 - protein, 546 aa, Homo sapiens
MGSRNSSSAGSGSGDPSEGLPRRGAGLRRSEEEEEEDEDVDLAQVLAYLLRRGQVRLVQGGGAANLQFIQALLDSEEENDRAWDGRLGDRYNPPVDATPDTRELEFNEIKTQVELATGQLGLRRAAQKHSFPRMLHQRERGLCHRGSFSLGEQSRVISHFLPNDLGFTDSYSQKAFCGIYSKDGQIFMSACQDQTIRLYDCRYGRFRKFKSIKARDVGWSVLDVAFTPDGNHFLYSSWSDYIHICNIYGEGDTHTALDLRPDERRFAVFSIAVSSDGREVLGGANDGCLYVFDREQNRRTLQIESHEDDVNAVAFADISSQILFSGGDDAICKVWDRRTMREDDPKPVGALAGHQDGITFIDSKGDARYLISNSKDQTIKLWDIRRFSSREGMEASRQAATQQNWDYRWQQVPKKAWRKLKLPGDSSLMTYRGHGVLHTLIRCRFSPIHSTGQQFIYSGCSTGKVVVYDLLSGHIVKKLTNHKACVRDVSWHPFEEKIVSSSWDGNLRLWQYRQAEYFQDDMPESEECASAPAPVPQSSTPFSSPQ

SEQ ID NO: 43095 - protein, 122 aa, Homo sapiens
MGSRNSSSAGSGSGDPSEGLPRRGAGLRRSEEEEEEDEDVDLAQVLAYLLRRGQVRLVQGGGAANLQFIQALLDSEEENDRAWDGRLGDRYNPPVDATPDTRELEFNEIKTQVELATGQLGL

SEQ ID NO: 43096 - protein, 73 aa, Homo sapiens
MGSRNSSSAGSGSGDPSEGLPRRGAGLRRSEEEEEEDEDVDLAQVLAYLLRRGQVRLVQGGGAANLQFIQALL

SEQ ID NO: 43097 - protein, 93 aa, Homo sapiens
MGSRNSSSAGSGSGDPSEGLPRRGAGLRRSEEEEEEDEDVDLAQVLAYLLRRGQVRLVQGGGAANLQFIQALLDSEEENDRAWDGRLGDRYNP

SEQ ID NO: 43098 - protein, 108 aa, Homo sapiens
MGSRNSSSAGSGSGDPSEGLPRRGAGLRRSEEEEEEDEDVDLAQVLAYLLRRGQVRLVQGGGAANLQFIQALLDSEEENDRAWDGRLGDRYNPPVDATPDTRELEFNE

SEQ ID NO: 43099 - protein, 546 aa, Homo sapiens; identical to SEQ ID NO: 43094

SEQ ID NO: 43100 - protein, 90 aa, Homo sapiens
MGSRNSSSAGSGSGDPSEGLPRRGAGLRRSEEEEEEDEDVDLAQALLDSEEENDRAWDGRLGDRYNPPVDATPDTRELEFNEIKTQVELA

SEQ ID NO: 43101 - protein, 30 aa, Homo sapiens
MGSRNSSSAGSGSGDPSEGLPRRGAGLRRS

SEQ ID NO: 43102 - protein, 142 aa, Homo sapiens
MGSRNSSSAGSGSGDPSEGLPRRGAGLRRSEEEEEEDEDVDLAQVLAYLLRRGQVRLVQGGGAANLQFIQALLDSEEENDRAWDGRLGDRYNPPVDATPDTRELEFNEIKTQVELATGQLGLRRAAQKHSFPRMLHQRERGL

SEQ ID NO: 43103 - protein, 67 aa, Homo sapiens
MGSRNSSSAGSGSGDPSEGLPRRGAGLRRSEEEEEEDEDVDLAQRPSEVGAGRRCSKFTIHSGPLGL

SEQ ID NO: 43104 - protein, 106 aa, Homo sapiens
MGSRNSSSAGSGSGDPSEGLPRRGAGLRRSEEEEEEDEDVDLAQVLAYLLRRPSWTQRKRMTELGMVVLGIDTTHLWMLPLTPGSWNSMRSRHKWNWPQGSWGLGG

SEQ ID NO: 43105 - protein, 128 aa, Homo sapiens
MGSRNSSSAGSGSGDPSEGLPRRGAGLRRSEEEEEEDEDVDLAQALLDSEEENDRAWDGRLGDRYNPPVDATPDTRELEFNEIKTQVELATGQLGLRRAAQKHSFPRMLHQRERGLCHRGSFSLGEQS

SEQ ID NO: 43106 - protein, 154 aa, Homo sapiens
MGSRNSSSAGSGSGDPSEGLPRRGAGLRRSEEEEEEDEDVDLAQVLAYLLRRGQVRLVQGGGAANLQFIQALLDSEEENDRAWDGRLGDRYNPPVDATPDTRELEFNEIKTQVELATGQLGLRRAAQKHSFPRMLHQRERGLCHRGSFSLGEQS

SEQ ID NO: 43107 - protein, 942 aa, Homo sapiens
MKRRAGLGGSMRSVVGFLSQRGLHGDPLLTQDFQRRRLRGCRNLYKKDLLGHFGCVNAIEFSNNGGQWLVSGGDDRRVLLWHMEQAIHSRVKPIQLKGEHHSNIFCLAFNSGNTKVFSGGNDEQVILHDVESSETLDVFAHEDAVYGLSVSPVNDNIFASSSDDGRVLIWDIRESPHGEPFCLANYPSAFHSVMFNPVEPRLLATANSKEGVGLWDIRKPQSSLLRYGGNLSLQSAMSVRFNSNGTQLLALRRRLPPVLYDIHSRLPVFQFDNQGYFNSCTMKSCCFAGDRDQYILSGSDDFNLYMWRIPADPEAGGIGRVVNGAFMVLKGHRSIVNQVRFNPHTYMICSSGVEKIIKIWSPYKQPGCTGDLDGRIEDDSRCLYTHEEYISLVLNSGSGLSHDYANQSVQEDPRMMAFFDSLVRREIEGWSSDSDSDLSESTILQLHAGVSERSGYTDSESSASLPRSPPPTVDESADNAFHLGPLRVTTTNTVASTPPTPTCEDAASRQQRLSALRRYQDKRLLALSNESDSEENVCEVELDTDLFPRPRSPSPEDESSSSSSSSSSEDEEELNERRASTWQRNAMRRRQKTTREDKPSAPIKPTNTYIGEDNYDYPQIKVDDLSSSPTSSPERSTSTLEIQPSRASPTSDIESVERKIYKAYKWLRYSYISYSNNKDGETSLVTGEADEGRAGTSHKDNPAPSSSKEACLNIAMAQRNQDLPPEGCSKDTFKEETPRTPSNGPGHEHSSHAWAEVPEGTSQDTGNSGSVEHPFETKKLNGKALSSRAEEPPSPPVPKASGSTLNSGSGNCPRTQSDDSEERSLETICANHNNGRLHPRPPHPHNNGQNLGELEVVAYSSPGHSDTDRDNSSLTGTLLHKDCCGSEMACETPNAGTREDPTDTPATDSSRAVHGHSGLKRQRIELEDTDSENSSSEKKLKT

SEQ ID NO: 43108 - protein, 860 aa, Homo sapiens
MEQAIHSRVKPIQLKGEHHSNIFCLAFNSGNTKVFSGGNDEQVILHDVESSETLDVFAHEDAVYGLSVSPVNDNIFASSSDDGRVLIWDIRESPHGEPFCLANYPSAFHSVMFNPVEPRLLATANSKEGVGLWDIRKPQSSLLRYGGNLSLQSAMSVRFNSNGTQLLALRRRLPPVLYDIHSRLPVFQFDNQGYFNSCTMKSCCFAGDRDQYILSGSDDFNLYMWRIPADPEAGGIGRVVNGAFMVLKGHRSIVNQVRFNPHTYMICSSGVEKIIKIWSPYKQPGCTGDLDGRIEDDSRCLYTHEEYISLVLNSGSGLSHDYANQSVQEDPRMMAFFDSLVRREIEGWSSDSDSDLSESTILQLHAGVSERSGYTDSESSASLPRSPPPTVDESADNAFHLGPLRVTTTNTVASTPPTPTCEDAASRQQRLSALRRYQDKRLLALSNESDSEENVCEVELDTDLFPRPRSPSPEDESSSSSSSSSSEDEEELNERRASTWQRNAMRRRQKTTREDKPSAPIKPTNTYIGEDNYDYPQIKVDDLSSSPTSSPERSTSTLEIQPSRASPTSDIESVERKIYKAYKWLRYSYISYSNNKDGETSLVTGEADEGRAGTSHKDNPAPSSSKEACLNIAMAQRNQDLPPEGCSKDTFKEETPRTPSNGPGHEHSSHAWAEVPEGTSQDTGNSGSVEHPFETKKLNGKALSSRAEEPPSPPVPKASGSTLNSGSGNCPRTQSDDSEERSLETICANHNNGRLHPRPPHPHNNGQNLGELEVVAYSSPGHSDTDRDNSSLTGTLLHKDCCGSEMACETPNAGTREDPTDTPATDSSRAVHGHSGLKRQRIELEDTDSENSSSEKKLKT

SEQ ID NO: 43109 - protein, 210 aa, Homo sapiens
MEQAIHSRVKPIQLKGEHHSNIFCLAFNSGNTKVFSGGNDEQVILHDVESETLDVFAHEDAVYGLSVSPVNDNIFASSSDDGRVLIWDIRESPHGEPFCLANYPSAFHSVMFNPVEPRLLATANSKEGVGLWDIRKPQSSLLRYGGNLSLQSAMSVRFNSNGTQLLALRRRLPPVLYDIHSRLPVFQFDNQGYFNSCTMKSCCFAGDRDQ

SEQ ID NO: 43110 - protein, 860 aa, Homo sapiens; identical to SEQ ID NO: 43108

SEQ ID NO: 43111 - protein, 118 aa, Homo sapiens
MPFLELDTNLPANRVPAGLEKRLCAAAASILGKPADRVNVTVRPGLAMALSGSTEPCAQLSISSIGVVGTAEDNRSHSAHFFEFLTKELALGQDRILIRFFPLESWQIGKIGTVMTFL

SEQ ID NO: 43112 - protein, 118 aa, Homo sapiens; identical to SEQ ID NO: 43111

SEQ ID NO: 43113 - protein, 132 aa, Homo sapiens
MQLFLLAVSVPLPAMPFLELDTNLPANRVPAGLEKRLCAAAASILGKPADRVNVTVRPGLAMALSGSTEPCAQLSISSIGVVGTAEDNRSHSAHFFEFLTKELALGQDRILIRFFPLESWQIGKIGTVMTFL

SEQ ID NO: 43114 - protein, 134 aa, Homo sapiens
MPFLELDTNLPANRVPAGLEKRLCAAAASILGKPADRVNVTVRPGLAMALSGSTEPCAQLSISSIGVVGTAEDNRSHSAHFFEFLTKELALGQDRFPTVLSTSPAAHGGPRCPGEIIEGKKSCLNEEALFIYFI

SEQ ID NO: 43115 - protein, 740 aa, Homo sapiens
MAAFSEMGVMPEIAQAVEEMDWLLPTDIQAESIPLILGGGDVLMAAETGSGKTGAFSIPVIQIVYETLKDQQEGKKGKTTIKTGASVLNKWQMNPYDRGSAFAIGSDGLCCQSREVKEWHGCRATKGLMKGKHYYEVSCHDQGLCRVGWSTMQASLDLGTDKFGFGFGGTGKKSHNKQFDNYGEEFTMHDTIGCYLDIDKGHVKFSKNGKDLGLAFEIPPHMKNQALFPACVLKNAELKFNFGEEEFKFPPKDGFVALSKAPDGYIVKSQHSGNAQVTQTKFLPNAPKALIVEPSRELAEQTLNNIKQFKKYIDNPKLRELLIIGGVAARDQLSVLENGVDIVVGTPGRLDDLVSTGKLNLSQVRFLVLDEADGLLSQGYSDFINRMHNQIPQVTSDGKRLQVIVCSATLHSFDVKKLSEKIMHFPTWVDLKGEDSVPDTVHHVVVPVNPKTDRLWERLGKSHIRTDDVHAKDNTRPGANSPEMWSEAIKILKGEYAVRAIKEHKMDQAIIFCRTKIDCDNLEQYFIQQGGGPDKKGHQFSCVCLHGDRKPHERKQNLERFKKGDVRFLICTDVAARGIDIHGVPYVINVTLPDEKQNYVHRIGRVGRAERMGLAISLVATEKEKVWYHVCSSRGKGCYNTRLKEDGGCTIWYNEMQLLSEIEEHLNCTISQVEPDIKVPVDEFDGKVTYGQKRAAGGGSYKGHVDILAPTVQELAALEKEAQTSFLHLGYLPNQLFRTF

SEQ ID NO: 43116 - protein, 740 aa, Homo sapiens; identical to SEQ ID NO: 43115

SEQ ID NO: 43117 - protein, 16 aa, Homo sapiens
MAAFSEMGVMPEIAQA

SEQ ID NO: 43118 - protein, 622 aa, Homo sapiens
MAAFSEMGVMPEIAQAVEEMDWLLPTDIQAESIPLILGGGDVLMAAETGSGKTGAFSIPVIQIVYETLKDQQEGKKGKTTIKTGASVLNKWQMNPYDREVKEWHGCRATKGLMKGKHYYEVSCHDQGLCRVGWSTMQASLDLGTDKFGFGFGGTGKKSHNKQFDNYGEEFTMHDTIGCYLDIDKGHVKFSKNGKDLGLAFEIPPHMKNQALFPACVLKNAELKFNFGEEEFKFPPKDGFVALSKAPDGYIVKSQHSGNAQVTQTKFLPNAPKALIVEPSRELAEQTLNNIKQFKKYIDNPKLRELLIIGGVAARDQLSVLENGVDIVVGTPGRLDDLVSTGKLNLSQVRFLVLDEADGLLSQGYSDFINRMHNQIPQVTSDGKRLQVIVCSATLHSFDVKKLSEKIMHFPTWVDLKGEDSVPDTVHHVVVPVNPKTDRLWERLGKSHIRTDDVHAKDNTRPGANSPEMWSEAIKILKGEYAVRAIKEHKMDQAIIFCRTKIDCDNLEQYFIQQGGGPDKKGHQFSCVCLHGDRKPHERKQNLERFKKGDVRFLICTDVAARGIDIHGVPYVINVTLPDEKQNYVHRIGRVGRAERMGLAISLVATEKEKVWYHMVQRDAVTI

SEQ ID NO: 43119 - protein, 875 aa, Homo sapiens
MGKTANSPGSGARPDPVRSFNRWKKKHSHRQNKKKQLRKQLKKPEWQVERESISRLMQNYEKINVNEITRFSDFPLSKKTLKGLQEAQYRLVTEIQKQTIGLALQGKDVLGAAKTGSGKTLAFLVPVLEALYRLQWTSTDGLGVLIISPTRELAYQTFEVLRKVGKNHDFSAGLIIGGKDLKHEAERINNINILVCTPGRLLQHMDETVSFHATDLQMLVLDEADRILDMGFADTMNAVIENLPKKRQTLLFSATQTKSVKDLARLSLKNPEYVWVHEKAKYSTPATLEQNYIVCELQQKISVLYSFLRSHLKKKSIVFFSSCKEVQYLYRVFCRLRPGVSILALHGRQQQMRRMEVYNEFVRKRAAVLFATDIAARGLDFPAVNWVLQFDCPEDANTYIHRAGRTARYKEDGEALLILLPSEKAMVQQLLQKKVPVKEIKINPEKLIDVQKKLESILAQDQDLKERAQRCFVSYVRSVYLMKDKEVFDVSKLPIPEYALSLGLAVAPRVRFLQKMQKQPTKELVRSQADKVIEPRAPSLTNDEVEEFRAYFNEKMSILQKGGKRLEGTEHRQDNDTGNEEQEEEEDDEEEMEEKLAKAKGSQAPSLPNTSEAQKIKEVPTQFLDRDEEEEDADFLKVKRHNVFGLDLKDEKTLQKKEPSKSSIKKKMTKVAEAKKVMKRNFKVNKKITFTDEGELVQQWPQMQKSAIKDAEEDDDTGGINLHKAKERLQEEDKFDKEEYRKKIKAKHREKRLKEREARREANKRQAKAKDEEEAFLDWSDDDDDDDDGFDPSTLPDPDKYRSSEDSDSEDMENKISDTKKKQGMKKRSNSEVEDVGPTSHNRKKARWDTLEPLDTGLSLAEDEELVLHLLRSQS

SEQ ID NO: 43120 - protein, 781 aa, Homo sapiens
MGKTANSPGSGARPDPVRSFNRWKKKHSHRQNKKKQLRKQLKKPEWQVERESISRLMQNYEKINVNEITRFSDFPLSKKTLKGLQEAQYRLVTEIQKQTIGLALQGKDVLGAAKTGSGKTLAFLVPVNEADRILDMGFADTMNAVIENLPKKRQTLLFSATQTKSVKDLARLSLKNPEYVWVHEKAKYSTPATLEQNYIVCELQQKISVLYSFLRSHLKKKSIVFFSSCKEVQYLYRVFCRLRPGVSILALHGRQQQMRRMEVYNEFVRKRAAVLFATDIAARGLDFPAVNWVLQFDCPEDANTYIHRAGRTARYKEDGEALLILLPSEKAMVQQLLQKKVPVKEIKINPEKLIDVQKKLESILAQDQDLKERAQRCFVSYVRSVYLMKDKEVFDVSKLPIPEYALSLGLAVAPRVRFLQKMQKQPTKELVRSQADKVIEPRAPSLTNDEVEEFRAYFNEKMSILQKGGKRLEGTEHRQDNDTGNEEQEEEEDDEEEMEEKLAKAKGSQAPSLPNTSEAQKIKEVPTQFLDRDEEEEDADFLKVKRHNVFGLDLKDEKTLQKKEPSKSSIKKKMTKVAEAKKVMKRNFKVNKKITFTDEGELVQQWPQMQKSAIKDAEEDDDTGGINLHKAKERLQEEDKFDKEEYRKKIKAKHREKRLKEREARREANKRQAKAKDEEEAFLDWSDDDDDDDDGFDPSTLPDPDKYRSSEDSDSEDMENKISDTKKKQGMKKRSNSEVEDVGPTSHNRKKARWDTLEPLDTGLSLAEDEELVLHLLRSQS

SEQ ID NO: 43121 - protein, 652 aa, Homo sapiens
MRGGGFGDRDRDRDRGGFGARGGGGLPPKKFGNPGERLRKKKWDLSELPKFEKNFYVEHPEVARLTPYEVDELRRKKEITVRGGDVCPKPVFAFHHANFPQYVMDVLMDQHFTEPTPIQCQGFPLALSGRDMVGIAQTGSGKTLAYLLPAIVHINHQPYLERGDGPICLVLAPTRELAQQVQQVADDYGKCSRLKSTCIYGGAPKGPQIRDLERGVEICIATPGRLIDFLESGKTNLRRCTYLVLDEADRMLDMGFEPQIRKIVDQIRPDRQTLMWSATWPKEVRQLAEDFLRDYTQINVGNLELSANHNILQIVDVCMESEKDHKLIQLMEEIMAEKENKTIIFVETKRRCDDLTRRMRRDGWPAMCIHGDKSQPERDWVLNEFRSGKAPILIATDVASRGLGFDVEDVKFVINYDYPNSSEDYVHRIGRTARSTNKGTAYTFFTPGNLKQARELIKVLEEANQAINPKLMQLVDHRGGGGGGGGRSRYRTTSSANNPNLMYQDECDRRLRGVKDGGRRDSASYRDRSETDRAGYANGSGYGSPNSAFGAQAGQYTYGQGTYGAAAYGTSSYTAQEYGAGTYGASSTTSTGRSSQSSSQQFSGIGRSGQQPQPLMSQQFAQPPGATNMIGYMGQTAYQYPPPPPPPPPSRK

SEQ ID NO: 43122 - protein, 731 aa, Homo sapiens
LPTGFVAPILCVLLPSPTREAATVASATGDSASERESAAPAAAPTAEAPPPSVVTRPEPQALPSPAIRAPLPDLYPFGTMRGGGFGDRDRDRDRGGFGARGGGGLPPKKFGNPGERLRKKKWDLSELPKFEKNFYVEHPEVARLTPYEVDELRRKKEITVRGGDVCPKPVFAFHHANFPQYVMDVLMDQHFTEPTPIQCQGFPLALSGRDMVGIAQTGSGKTLAYLLPAIVHINHQPYLERGDGPICLVLAPTRELAQQVQQVADDYGKCSRLKSTCIYGGAPKGPQIRDLERGVEICIATPGRLIDFLESGKTNLRRCTYLVLDEADRMLDMGFEPQIRKIVDQIRPDRQTLMWSATWPKEVRQLAEDFLRDYTQINVGNLELSANHNILQIVDVCMESEKDHKLIQLMEEIMAEKENKTIIFVETKRRCDDLTRRMRRDGWPAMCIHGDKSQPERDWVLNEFRSGKAPILIATDVASRGLDVEDVKFVINYDYPNSSEDYVHRIGRTARSTNKGTAYTFFTPGNLKQARELIKVLEEANQAINPKLMQLVDHRGGGGGGGKGGRSRYRTTSSANNPNLMYQDECDRRLRGVKDGGRRDSASYRDRSETDRAGYANGSGYGSPNSAFGAQAGQYTYGQGTYGAAAYGTSSYTAQEYGAGTYGASSTTSTGRSSQSSSQQFSGIGRSGQQPQPLMSQQFAQPPGATNMIGYMGQTAYQYPPPPPPPPPSRK

SEQ ID NO: 43123 - protein, 729 aa, Homo sapiens
LPTGFVAPILCVLLPSPTREAATVASATGDSASERESAAPAAAPTAEAPPPSVVTRPEPQALPSPAIRAPLPDLYPFGTMRGGGFGDRDRDRDRGGFGARGGGGLPPKKFGNPGERLRKKKWDLSELPKFEKNFYVEHPEVARLTPYEVDELRRKKEITVRGGDVCPKPVFAFHHANFPQYVMDVLMDQHFTEPTPIQCQGFPLALSGRDMVGIAQTGSGKTLAYLLPAIVHINHQPYLERGDGPICLVLAPTRELAQQVQQVADDYGKCSRLKSTCIYGGAPKGPQIRDLERGVEICIATPGRLIDFLESGKTNLRRCTYLVLDEADRMLDMGFEPQIRKIVDQIRPDRQTLMWSATWPKEVRQLAEDFLRDYTQINVGNLELSANHNILQIVDVCMESEKDHKLIQLMEEIMAEKENKTIIFVETKRRCDDLTRRMRRDGWPAMCIHGDKSQPERDWVLNEFRSGKAPILIATDVASRGLDVEDVKFVINYDYPNSSEDYVHRIGRTARSTNKGTAYTFFTPGNLKQARELIKVLEEANQAINPKLMQLVDHRGGGGGGGGRSRYRTTSSANNPNLMYQDECDRRLRGVKDGGRRDSASYRDRSETDRAGYANGSGYGSPNSAFGAQAGQYTYGQGTYGAAAYGTSSYTAQEYGAGTYGASSTTSTGRSSQSSSQQFSGIGRSGQQPQPLMSQQFAQPPGATNMIGYMGQTAYQYPPPPPPPPPSRK

SEQ ID NO: 43124 - protein, 737 aa, Homo sapiens
PNLPTGFVAPILCVLLPSPTREAATVASATGDSASERESAAPAAAPTAEAPPPSVVTRPEPQALPSPAIRAPLPDLYPFGTMRGGGFGDRDRDRDRGGFGARGGGGLPPKKFGNPGERLRKKKWDLSELPKFEKNFYVEHPEVARLTPYEVDELRRKKEITVRGGDVCPKPVFAFHHANFPQYVMDVLMDQHFTEPTPIQCQGFPLALSGRDMVGIAQTGSGKTLAYLLPAIVHINHQPYLERGDGPICLVLAPTRELAQQVQQVADDYGKCSRLKSTCIYGGAPKGPQIRDLERGVEICIATPGRLIDFLESGKTNLRRCTYLVLDEADRMLDMGFEPQIRKIVDQIRPDRQTLMWSATWPKEVRQLAEDFLRDYTQINVGNLELSANHNILQIVDVCMESEKDHKLIQLMEEIMAEKENKTIIFVETKRRCDDLTRRMRRDGWPAMCIHGDKSQPERDWVLNEFRSGKAPILIATDVASRGLDVEDVKFVINYDYPNSSEDYVHRIGRTARSTNKGTAYTFFTPGNLKQARELIKVLEEANQAINPKLMQLVDHRGGGGGGGKGGRSRYRTTSSANNPNLMYQDECDRRLRGVKDGGRRDSASYRDRSETDRAGYANGSGYGSPNSAFGAQAGQYTYGQGTYGAAAYGTSSYTAQEYGAGTYGASSTTSTGRSSQSSSQQFSGIGRSGQQPQPLMSQQFAQPPGATNTLLLLPLLLLHVNETTQVVVTPADLITF

SEQ ID NO: 43125 - protein, 181 aa, Homo sapiens
MQLVDHRGGGGGGGGRSRYRTTSSANNPNLMYQDECDRRLRGVKDGGRRDSASYRDRSETDRAGYANGSGYGSPNSAFGAQAGQYTYGQGTYGAAAYGTSSYTAQEYGAGTYGASSTTSTGRSSQSSSQQFSGIGRSGQQPQPLMSQQFAQPPGATNMIGYMGQTAYQYPPPPPPPPPSRK

SEQ ID NO: 43126 - protein, 670 aa, Homo sapiens
MSHLPMKLLRKKIEKRNLKLRQRNLKFQGASNLTLSETQNGDVSEETMGSRKVKKSKQKPMNVGLSETQNGGMSQEAVGNIKVTKSPQKSTVLTNGEAAMQSSNSESKKKKKKKRKMVNDAEPDTKKAKTENKGKSEEESAETTKETENNVEKPDNDEDESEVPSLPLGLTGAFEDTSFASLCNLVNENTLKAIKEMGFTNMTEIQHKSIRPLLEGRDLLAAAKTGSGKTLAFLIPAVELIVKLRFMPRNGTGVLILSPTRELAMQTFGVLKELMTHHVHTYGLIMGGSNRSAEAQKLGNGINIIVATPGRLLDHMQNTPGFMYKNLQCLVIDEADRILDVGFEEELKQIIKLLPTRRQTMLFSATQTRKVEDLARISLKKEPLYVGVDDDKANATVDGLEQGYVVCPSEKRFLLLFTFLKKNRKKKLMVFFSSCMSVKYHYELLNYIDLPVLAIHGKQKQNKRTTTFFQFCNADSGTLLCTDVAARGLDIPEVDWIVQYDPPDDPKEYIHRVGRTARGLNGRGHALLILRPEELGFLRYLKQSKVPLSEFDFSWSKISDIQSQLEKLIEKNYFLHKSAQEAYKSYIRAYDSHSLKQIFNVNNLNLPQVALSFGFKVPPFVDLNVNSNEGKQKKRGGGGGFGYQKTKKVEKSKIFKHISKKSSDSRQFSH

SEQ ID NO: 43127 - protein, 409 aa, Homo sapiens
MEQEQTFGVLKELMTHHVHTYGLIMGGSNRSAEAQKLGNGINIIVATPGRLLDHMQNTPGFMYKNLQCLVIDEADRILDVGFEEELKQIIKLLPTRRQTMLFSATQTRKVEDLARISLKKEPLYVGVDDDKANATVDGLEQGYVVCPSEKRFLLLFTFLKKNRKKKLMVFFSSCMSVKYHYELLNYIDLPVLAIHGKQKQNKRTTTFFQFCNADSGTLLCTDVAARGLDIPEVDWIVQYDPPDDPKEYIHRVGRTARGLNGRGHALLILRPEELGFLRYLKQSKVPLSEFDFSWSKISDIQSQLEKLIEKNYFLHKSAQEAYKSYIRAYDSHSLKQIFNVNNLNLPQVALSFGFKVPPFVDLNVNSNEGKQKKRGGGGGFGYQKTKKVEKSKIFKHISKKSSDSRQFSH

SEQ ID NO: 43128 - protein, 824 aa, Homo sapiens
MAAAFEASGALAAVATAMPAEHVAVQVPAPEPTPGPVRILRTAQDLSSPRTRTGDVLLAEPADFESLLLSRPVLEGLRAAGFERPSPVQLKAIPLGRCGLDLIVQAKSGTGKTCVFSTIALDSLVLENLSTQILILAPTREIAVQIHSVITAIGIKMEGLECHVFIGGTPLSQDKTRLKKCHIAVGSPGRIKQLIELDYLNPGSIRLFILDEADKLLEEGSFQEQINWIYSSLPASKQMLAVSATYPEFLANALTKYMRDPTFVRLNSSDPSLIGLKQYYKVVNSYPLAHKVFEEKTQHLQELFSRIPFNQALVFSNLHSRAQHLADILSSKGFPAECISGNMNQNQRLDAMAKLKHFHCRVLISTDLTSRGIDAEKVNLVVNLDVPLDWETYMHRIGRAGRFGTLGLTVTYCCRGEEENMMMRIAQKCNINLLPLPDPIPSGLMEECVDWDVEVKAAVHTYGIASVPNQPLKKQIQKIERTLQIQKAHGDHMASSRNNSVSGLSVKSKNNTKQKLPVKSHSECGIIEKATSPKELGCDRQSEEQMKNSVQTPVENSTNSQHQVKEALPVSLPQIPCLSSFKIHQPYTLTFAELVEDYEHYIKEGLEKPVEIIRHYTGPGDQTVNPQNGFVRNKVIEQRVPVLASSSQSGDSESDSDSYSSRTSSQSKGNKSYLEGSSDNQLKDSESTPVDDRISLEQPPNGSDTPNPEKYQESPGIQMKTRLKEGASQRAKQSRRNLPRRSSFRLQTEAQEDDWYDCHREIRLSFSDTYQDYEEYWRAYYRAWQEYYAAASHSYYWNAQRHPSWMAAYHMNTIYLQEMMHSNQ

SEQ ID NO: 43129 - protein, 138 aa, Homo sapiens
MAAAFEASGALAAVATAMPAEHVAVQVPAPEPTPGPVRILRTAQDLSSPRTRTGDVLLAEPADFESLLLSRPVLEGLRAAGFERPSPVQLKAIPLGRCGLDLIVQAKSGTGKTCVFSTIALDSLVLENLSTQAELSNS

SEQ ID NO: 43130 - protein, 783 aa, Homo sapiens
MPGKLRSDAGLESDTAMKKGETLRKQTEEKEKKEKPKSDKTEEIAEEEETVFPKAKQVKKKAEPSEVDMNSPKSKKAKKKEEPSQNDISPKTKSLRKKKEPIEKKVVSSKTKKVTKNEEPSEEEIDAPKPKKMKKEKEMNGETREKSPKLKNGFPHPEPDCNPSEAASEESNSEIEQEIPVEQKEGAFSNFPISEETIKLLKGRGVTFLFPIQAKTFHHVYSGKDLIAQARTGTGKTFSFAIPLIEKLHGELQDRKRGRAPQVLVLAPTRELANQVSKDFSDITKKLSVACFYGGTPYGGQFERMRNGIDILVGTPGRIKDHIQNGKLDLTKLKHVVLDEVDQMLDMGFADQVEEILSVAYKKDSEDNPQTLLFSATCPHWVFNVAKKYMKSTYEQVDLIGKKTQKTAITVEHLAIKCHWTQRAAVIGDVIRVYSGHQGRTIIFCETKKEAQELSQNSAIKQDAQSLHGDIPQKQREITLKGFRNGSFGVLVATNVAARGLDIPEVDLVIQSSPPKDVESYIHRSGRTGRAGRTGVCICFYQHKEEYQLVQVEQKAGIKFKRIGVPSATEIIKASSKDAIRLLDSVPPTAISHFKQSAEKLIEEKGAVEALAAALAHISGATSVDQRSLINSNVGFVTMILQCSIEMPNISYAWKELKEQLGEEIDSKVKGMVFLKGKLGVCFDVPTASVTEIQEKWHDSRRWQLSVATEQPELEGPREGYGGFRGQREGSRGFRGQRDGNRRFRGQREGSRGPRGQRSGGGNKSNRSQNKGQKRSFSKAFGQ

SEQ ID NO: 43131 - protein, 82 aa, Homo sapiens
MPGKLRSDAGLESDTAMKKGETLRKQTEEKEKKEKPKSDKTEEIAEEEETVFPKAKQVKKKAEPSEVDMNSPKSKKKKKKKK

SEQ ID NO: 43132 - protein, 820 aa, Homo sapiens
MAGELADKKDRDASPSKEERKRSRTPDRERDRDRDRKSSPSKDRKRHRSRDRRRGGSRSRSRSRSKSAERERRHKERERDKERDRNKKDRDRDKDGHRRDKDRKRSSLSPGRGKDFKSRKDRDSKKDEEDEHGDKKPKAQPLSLEELLAKKKAEEEAEAKPKFLSKAEREAEALKRRQQEVEERQRMLEEERKKRKQFQDLGRKMLEDPQERERRERRERMERETNGNEDEEGRQKIREEKDKSKELHAIKERYLGGIKKRRRTRHLNDRKFVFEWDASEDTSIDYNPLYKERHQVQLLGRGFIAGIDLKQQKREQSRFYGDLMEKRRTLEEKEQEEARLRKLRKKEAKQRWDDRHWSQKKLDEMTDRDWRIFREDYSITTKGGKIPNPIRSWKDSSLPPHILEVIDKCGYKEPTPIQRQAIPIGLQNRDIIGVAETGSGKTAAFLIPLLVWITTLPKIDRIEESDQGPYAIILAPTRELAQQIEEETIKFGKPLGIRTVAVIGGISREDQGFRLRMGCEIVIATPGRLIDVLENRYLVLSRCTYVVLDEADRMIDMGFEPDVQKILEHMPVSNQKPDTDEAEDPEKMLANFESGKHKYRQTVMFTATMPPAVERLARSYLRRPAVVYIGSAGKPHERVEQKVFLMSESEKRKKLLAILEQGFDPPIIIFVNQKKGCDVLAKSLEKMGYNACTLHGGKGQEQREFALSNLKAGAKDILVATDVAGRGIDIQDVSMVVNYDMAKNIEDYIHRIGRTGRAGKSGVAITFLTKEDSAVFYELKQAILESPVSSCPPELANHPDAQHKPGTILTKKRREETIFA

SEQ ID NO: 43133 - protein, 138 aa, Homo sapiens
MAGELADKKDRDASPSKEERKRSRTPDRERDRDRDRKSSPSKDRKRHRSRDRRRGGSRSRSRSRSKSAERERRHKERERDKERDRNKKDRDRDKDGHRRDKDRKRSSLSPGRGKDFKSRKDRDSKKDEEDEHGDKKPK

SEQ ID NO: 43134 - protein, 182 aa, Homo sapiens
MAGELADKKDRDASPSKEERKRSRTPDRERDRDRDRKSSPSKDRKRHRSRDRRRGGSRSRSRSRSKSAERERRHKERERDKERDRNKKDRDRDKDGHRRDKDRKRSSLSPGRGKDFKSRKDRDSKKDEEDEHGDKKPKAQPLSLEELLAKKKAEEEAEAKPKFLSKAEREAEALKRRQQEVE

SEQ ID NO: 43135 - protein, 859 aa, Homo sapiens
MKLKDTKSRPKQSSCGKFQTKGIKVVGKWKEVKIDPNMFADGQMDDLVCFEELTDYQLVSPAKNPSSLFSKEAPKRKAQAVSEEEEEEEGKSSSPKKKIKLKKSKNVATEGTSTQKEFEVKDPELEAQGDDMVCDDPEAGEMTSENLVQTAPKKKKNKGKKGLEPSQSTAAKVPKKAKTWIPEVHDQKADVSAWKDLFVPRPVLRALSFLGFSAPTPIQALTLAPAIRDKLDILGAAETGSGKTLAFAIPMIHAVLQWQKRNAAPPPSNTEAPPGETRTEAGAETRSPGKAEAESDALPDDTVIESEALPSDIAAEARAKTGGTVSDQALLFGDDDAGEGPSSLIREKPVPKQNENEEENLDKEQTGNLKQELDDKSATCKAYPKRPLLGLVLTPTRELAVQVKQHIDAVARFTGIKTAILVGGMSTQKQQRMLNRRPEIVVATPGRLWELIKEKHYHLRNLRQLRCLVVDEADRMVEKGHFAELSQLLEMLNDSQYNPKRQTLVFSATLTLVHQAPARILHKKHTKKMDKTAKLDLLMQKIGMRGKPKVIDLTRNEATVETLTETKIHCETDEKDFYLYYFLMQYPGRSLVFANSISCIKRLSGLLKVLDIMPLTLHACMHQKQRLRNLEQFARLEDCVLLATDVAARGLDIPKVQHVIHYQVPRTSEIYVHRSGRTARATNEGLSLMLIGPEDVINFKKIYKTLKKDEDIPLFPVQTKYMDVVKERIRLARQIEKSEYRNFQACLHNSWIEQAAAALEIELEEDMYKGGKADQQEERRRQKQMKVLKKELRHLLSQPLFTESQKTKYPTQSGKPPLLVSAPSKSESALSCLSKQKKKKTKKPKEPQPEQPQPSTSAN

SEQ ID NO: 43136 - protein, 804 aa, Homo sapiens
MKLKDTKSRPKQSSCGKFQTKGIKVVGKWKEVKIDPNMFADGQMDDLVCFEELTDYQLVSPAKNPSSLFSKEAPKRKAQAVSEEEEEEEGKSSSPKKKIKLKKSKNVATEGTSTQKEFEVKDPELEAQGDDMVCDDPEAGEMTSENLVQTAPKKKKNKGKKGLEPSQSTAAIRDKLDILGAAETGSGKTLAFAIPMIHAVLQWQKRNAAPPPSNTEAPPGETRTEAGAETRSPGKAEAESDALPDDTVIESEALPSDIAAEARAKTGGTVSDQALLFGDDDAGEGPSSLIREKPVPKQNENEEENLDKEQTGNLKQELDDKSATCKAYPKRPLLGLVLTPTRELAVQVKQHIDAVARFTGIKTAILVGGMSTQKQQRMLNRRPEIVVATPGRLWELIKEKHYHLRNLRQLRCLVVDEADRMVEKGHFAELSQLLEMLNDSQYNPKRQTLVFSATLTLVHQAPARILHKKHTKKMDKTAKLDLLMQKIGMRGKPKVIDLTRNEATVETLTETKIHCETDEKDFYLYYFLMQYPGRSLVFANSISCIKRLSGLLKVLDIMPLTLHACMHQKQRLRNLEQFARLEDCVLLATDVAARGLDIPKVQHVIHYQVPRTSEIYVHRSGRTARATNEGLSLMLIGPEDVINFKKIYKTLKKDEDIPLFPVQTKYMDVVKERIRLARQIEKSEYRNFQACLHNSWIEQAAAALEIELEEDMYKGGKADQQEERRRQKQMKVLKKELRHLLSQPLFTESQKTKYPTQSGKPPLLVSAPSKSESALSCLSKQKKKKTKKPKEPQPEQPQPSTSAN

SEQ ID NO: 43137 - protein, 763 aa, Homo sapiens
MDDLVCFEELTDYQLVSPAKNPSSLFSKEAPKRKAQAVSEEEEEEEGKSSSPKKKIKLKKSKNVATEGTSTQKEFEVKDPELEAQGDDMVCDDPEAGEMTSENLVQTAPKKKKNKGKKGLEPSQSTAAKVPKKAKTWIPEVHDQKADVSAWKDLFVPRPVLRALSFLGFSAPTPIQALTLAPAIRDKLDILGAAETGSGKTLAFAIPMIHAVLQWQKRNAAPPPSNTEAPPGETRTEAGAETRSPGKAEAESDALPDDTVIESEALPSDIAAEARAKTGGTVSDQALLFGDDDAGEGPSSLIREKPVPKQNENEEENLDKEQTGNLKQELDDKSATCKAYPKRPLLGLVLTPTRELAVQVKQHIDAVARFTGIKTAILVGGMSTQKQQRMLNRRPEIVVATPGRLWELIKEKHYHLRNLRQLRCLVVDEADRMVEKGHFAELSQLLEMLNDSQYNPKRQTLVFSATLTLVHQAPARILHKKHTKKMDKTAKLDLLMQKIGMRGKPKVIDLTRNEATVETLTETKIHCETDEKDFYLYYFLMQYPGRSLVFANSISCIKRLSGLLKVLDIMPLTLHACMHQKQRLRNLEQFARLEDCVLLATDVAARGLDIPKVQHVIHYQVPRTSEIYVHRSGRTARATNEGLSLMLIGPEDVINFKKIYKTLKKDEDIPLFPVQTKYMDVVKERIRLARQIEKSEYRNFQACLHNSWIEQAAAALEIELEEDMYKGGKADQQEERRRQKQMKVLKKELRHLLSQPQPSTSAN

SEQ ID NO: 43138 - protein, 485 aa, Homo sapiens
MTKAPCKAYPKRPLLGLVLTPTRELAVQVKQHIDAVARFTGIKTAILVGGMSTQKQQRMLNRRPEIVVATPGRLWELIKEKHYHLRNLRQLRCLVVDEADRMVEKGHFAELSQLLEMLNDSQYNPKRQTLVFSATLTLVHQAPARILHKKHTKKMDKTAKLDLLMQKIGMRGKPKVIDLTRNEATVETLTETKIHCETDEKDFYLYYFLMQYPGRSLVFANSISCIKRLSGLLKVLDIMPLTLHACMHQKQRLRNLEQFARLEDCVLLATDVAARGLDIPKVQHVIHYQVPRTSEIYVHRSGRTARATNEGLSLMLIGPEDVINFKKIYKTLKKDEDIPLFPVQTKYMDVVKERIRLARQIEKSEYRNFQACLHNSWIEQAAAALEIELEEDMYKGGKADQQEERRRQKQMKVLKKELRHLLSQPLFTESQKTKYPTQSGKPPLLVSAPSKSESALSCLSKQKKKKTKKPKEPQPEQPQPSTSAN

SEQ ID NO: 43139 - protein, 540 aa, Homo sapiens
MALTRPVRLFSLVTRLLLAPRRGLTVRSPDEPLPVVRIPVALQRQLEQRQSRRRNLPRPVLVRPGPLLVSARRPELNQPARLTLGRWERAPLASQGWKSRRARRDHFSIERAQQEAPAVRKLSSKGSFADLGLEPRVLHALQEAAPEVVQPTTVQSSTIPSLLRGRHVVCAAETGSGKTLSYLLPLLQRLLGQPSLDSLPIPAPRGLVLVPSRELAQQVRAVAQPLGRSLGLLVRDLEGGHGMRRIRLQLSRQPSADVLVATPGALWKALKSRLISLEQLSFLVLDEADTLLDESFLELVDYILEKSHIAEGPADLEDPFNPKAQLVLVGATFPEGVGQLLNKVASPDAVTTITSSKLHCIMPHVKQTFLRLKGADKVAELVHILKHRDRAERTGPSGTVLVFCNSSSTVNWLGYILDDHKIQHLRLQGQMPALMRVGIFQSFQKSSRDILLCTDIASRGLDSTGVELVVNYDFPPTLQDYIHRAGRVGRVGSEVPGTVISFVTHPWDVSLVQKIELAARRRRSLPGLASSVKEPLPQAT

SEQ ID NO: 43140 - protein, 662 aa, Homo sapiens
MSHVAVENALGLDQQFAGLDLNSSDNQSGGSTASKGRYIPPHLRNREATKGFYDKDSSGWSSSKDKDAYSSFGSRSDSRGKSSFFSDRGSGSRGRFDDRGRSDYDGIGSRGDRSGFGKFERGGNSRWCDKSDEDDWSKPLPPSERLEQELFSGGNTGINFEKYDDIPVEATGNNCPPHIESFSDVEMGEIIMGNIELTRYTRPTPVQKHAIPIIKEKRDLMACAQTGSGKTAAFLLPILSQIYSDGPGEALRAMKENGRYGRRKQYPISLVLAPTRELAVQIYEEARKFSYRSRVRPCVVYGGADIGQQIRDLERGCHLLVATPGRLVDMMERGKIGLDFCKYLVLDEADRMLDMGFEPQIRRIVEQDTMPPKGVRHTMMFSATFPKEIQMLARDFLDEYIFLAVGRVGSTSENITQKVVWVEESDKRSFLLDLLNATGKDSLTLVFVETKKGADSLEDFLYHEGYACTSIHGDRSQRDREEALHQFRSGKSPILVATAVAARGLDISNVKHVINFDLPSDIEEYVHRIGRTGRVGNLGLATSFFNERNINITKDLLDLLVEAKQEVPSWLENMAYEHHYKGSSRGRSKSSRFSGGFGARDYRQSSGASSSSFSSSRASSSRSGGGGHGSSRGFGGGGYGGFYNSDGYGGNYNSQGVDWWGN

SEQ ID NO: 43141 - protein, 139 aa, Homo sapiens
MSHVAVENALGLDQQFAGLDLNSSDNQSGGSTASKGRYIPPHLRNREATKGFYDKDSSGWSSSKDKDAYSSFGSRSDSRGKSSFFSDRGSGSRGRFDDRGRSDYDGIGSRGDRSGYGGFYNSDGYGGNYNSQGVDWWGN

SEQ ID NO: 43142 - protein, 646 aa, Homo sapiens
MSHVAVENALGLDQQFAGLDLNSSDNQSGGSTASSFYDKDSSGWSSSKDKDAYSSFGSRSDSRGKSSFFSDRGSGSRGRFDDRGRSDYDGIGSRGDRSGFGKFERGGNSRWCDKSDEDDWSKPLPPSERLEQELFSGGNTGINFEKYDDIPVEATGNNCPPHIESFSDVEMGEIIMGNIELTRYTRPTPVQKHAIPIIKEKRDLMACAQTGSGKTAAFLLPILSQIYSDGPGEALRAMKENGRYGRRKQYPISLVLAPTRELAVQIYEEARKFSYRSRVRPCVVYGGADIGQQIRDLERGCHLLVATPGRLVDMMERGKIGLDFCKYLVLDEADRMLDMGFEPQIRRIVEQDTMPPKGVRHTMMFSATFPKEIQMLARDFLDEYIFLAVGRVGSTSENITQKVVWVEESDKRSFLLDLLNATGKDSLTLVFVETKKGADSLEDFLYHEGYACTSIHGDRSQRDREEALHQFRSGKSPILVATAVAARGLDISNVKHVINFDLPSDIEEYVHRIGRTGRVGNLGLATSFFNERNINITKDLLDLLVEAKQEVPSWLENMAYEHHYKGSSRGRSKSSRFSGGFGARDYRQSSGASSSSFSSSRASSSRSGGGGHGSSRGFGGGGYGGFYNSDGYGGNYNSQGVDWWGN

SEQ ID NO: 43143 - protein, 308 aa, Homo sapiens
MRESRLISDLGGFAGVRSAAGRDWRPFWLGGLRPSRLAQPGFPSGGPGGTRCLRACEQGFAGLDLNSSDNQSGGSTASKGRYIPPHLRNREATKGFYDKDSSGWSSSKDKDAYSSFGSRSDSRGKSSFFSDRGSGSRGRFDDRGRSDYDGIGSRGDRSGFGKFERGGNSRWCDKSDEDDWSKPLPPSERLEQELFSGGNTGINFEKYDDIPVEATGNNCPPHIESFSDVEMGEIIMGNIELTRYTRPTPVQKHAIPIIKEKRDLMACAQTGKWKVWAPQTIPNLLGISTNERVGSTDLRGSQKIFIPI

SEQ ID NO: 43144 - protein, 660 aa, Homo sapiens
MSHVVVKNDPELDQQLANLDLNSEKQSGGASTASKGRYIPPHLRNREASKGFHDKDSSGWSCSKDKDAYSSFGSRDSRGKPGYFSERGSGSRGRFDDRGRSDYDGIGNRERPGFGRFERSGHSRWCDKSVEDDWSKPLPPSERLEQELFSGGNTGINFEKYDDIPVEATGSNCPPHIENFSDIDMGEIIMGNIELTRYTRPTPVQKHAIPIIKGKRDLMACAQTGSGKTAAFLLPILSQIYTDGPGEALKAVKENGRYGRRKQYPISLVLAPTRELAVQIYEEARKFSYRSRVRPCVVYGGADIGQQIRDLERGCHLLVATPGRLVDMMERGKIGLDFCKYLVLDEADRMLDMGFEPQIRRIVEQDTMPPKGVRHTMMFSATFPKEIQMLARDFLDEYIFLAVGRVGSTSENITQKVVWVEDLDKRSFLLDILGATGSDSLTLVFVETKKGADSLEDFLYHEGYACTSIHGDRSQRDREEALHQFRSGKSPILVATAVAARGLDISNVRHVINFDLPSDIEEYVHRIGRTGRVGNLGLATSFFNEKNMNITKDLLDLLVEAKQEVPSWLENMAYEHHYKGGSRGRSKSNRFSGGFGARDYRQSSGSSSSGFGASRGSSSRSGGGGYGNSRGFGGGGYGGFYNSDGYGGNYNSQGVDWWGN

SEQ ID NO: 43145 - protein, 660 aa, Homo sapiens; identical to SEQ ID NO: 43144

SEQ ID NO: 43146 - protein, 250 aa, Homo sapiens
MEIGRPRKDTWKLANLDLNSEKQSGGASTASKGRYIPPHLRNREASKGFHDKDSSGWSCSKDKDAYSSFGSRDSRGKPGYFSERGSGSRGRFDDRGRSDYDGIGNRERPGFGRFERSGHSRWCDKSVEDDWSKPLPPSERLEQELFSGGNTGINFEKYDDIPVEATGSNCPPHIENFSDIDMGEIIMGNIELTRYTRPTPVQKHAIPIIKGKRDLMACAQTGSGKTAAFLLPILSQIYTDGPGEALKAVK

SEQ ID NO: 43147 - protein, 224 aa, Homo sapiens
MSHVVVKNDPELDQQLANLDLNSEKQSGGASTASKGRYIPPHLRNREASKGFHDKDSSGWSCSKDKDAYSSFGSRDSRGKPGYFSERGSGSRGRFDDRGRSDYDGIGNRERPGFGRFERSGHSRWCDKSVEDDWSKPLPPSERLEQELFSGGNTGINFEKYDDIPVEATGSNCPPHIENFSDIDMGEIIMGNIELTRYTRPTPVQKHAIPIIKGKRDLMACAQT

SEQ ID NO: 43148 - protein, 657 aa, Homo sapiens
MEIGRPRKDTWKLANLDLNSEKQSGGASTASKGRYIPPHLRNREASKGFHDKDSSGWSCSKDKDAYSSFGSRDSRGKPGYFSERGSGSRGRFDDRGRSDYDGIGNRERPGFGRFERSGHSRWCDKSVEDDWSKPLPPSERLEQELFSGGNTGINFEKYDDIPVEATGSNCPPHIENFSDIDMGEIIMGNIELTRYTRPTPVQKHAIPIIKGKRDLMACAQTGSGKTAAFLLPILSQIYTDGPGEALKAVKENGRYGRRKQYPISLVLAPTRELAVQIYEEARKFSYRSRVRPCVVYGGADIGQQIRDLERGCHLLVATPGRLVDMMERGKIGLDFCKYLVLDEADRMLDMGFEPQIRRIVEQDTMPPKGVRHTMMFSATFPKEIQMLARDFLDEYIFLAVGRVGSTSENITQKVVWVEDLDKRSFLLDILGATGSDSLTLVFVETKKGADSLEDFLYHEGYACTSIHGDRSQRDREEALHQFRSGKSPILVATAVAARGLDISNVRHVINFDLPSDIEEYVHRIGRTGRVGNLGLATSFFNEKNMNITKDLLDLLVEAKQEVPSWLENMAYEHHYKGGSRGRSKSNRFSGGFGARDYRQSSGSSSSGFGASRGSSSRSGGGGYGNSRGFGGGGYGGFYNSDGYGGNYNSQGVDWWGN

SEQ ID NO: 43149 - protein, 425 aa, Homo sapiens
MAENDVDNELLDYEDDEVETAAGGDGAEAPAKKDVKGSYVSIHSSGFRDFLLKPELLRAIVDCGFEHPSEVQHECIPQAILGMDVLCQAKSGMGKTAVFVLATLQQLEPVTGQVSVLVMCHTRELAFQISKEYERFSKYMPNVKVAVFFGGLSIKKDEEVLKKNCPHIVVGTPGRILALARNKSLNLKHIKHFILDECDKMLEQLDMRRDVQEIFRMTPHEKQVMMFSATLSKEIRPVCRKFMQDPMEIFVDDETKLTLHGLQQYYVKLKDNEKNRKLFDLLDVLEFNQVVIFVKSVQRCIALAQLLVEQNFPAIAIHRGMPQEERLSRYQQFKDFQRRILVATNLFGRGMDIERVNIAFNYDMPEDSDTYLHRCYPLSPSRWPEQAGLAPRAWLSHLCPMRMMPRSSMMCRIALRSILVSCLMR

SEQ ID NO: 43150 - protein, 428 aa, Homo sapiens
MAENDVDNELLDYEDDEVETAAGGDGAEAPAKKDVKGSYVSIHSSGFRDFLLKPELLRAIVDCGFEHPSEVQHECIPQAILGMDVLCQAKSGMGKTAVFVLATLQQLEPVTGQVSVLVMCHTRELAFQISKEYERFSKYMPNVKVAVFFGGLSIKKDEEVLKKNCPHIVVGTPGRILALARNKSLNLKHIKHFILDECDKMLEQLDMRRDVQEIFRMTPHEKQVMMFSATLSKEIRPVCRKFMQDPMEIFVDDETKLTLHGLQQYYVKLKDNEKNRKLFDLLDVLEFNQVVIFVKSVQRCIALAQLLVEQNFPAIAIHRGMPQEERLSRYQQFKDFQRRILVATNLFGRGMDIERVNIAFNYDMPEDSDTYLHRVARAGRFGTKGLAITFVSDENDAKILNDVQDRFEVNISELPDEIDISSYIEQTR

SEQ ID NO: 43151 - protein, 428 aa, Homo sapiens; identical to SEQ ID NO: 43150

SEQ ID NO: 43152 - protein, 425 aa, Homo sapiens; identical to SEQ ID NO: 43149

SEQ ID NO: 43153 - protein, 428 aa, Homo sapiens; identical to SEQ ID NO: 43150

SEQ ID NO: 43154 - protein, 428 aa, Homo sapiens; identical to SEQ ID NO: 43150

SEQ ID NO: 43155 - protein, 187 aa, Homo sapiens
MGSSHIGGLSINERRCSASLGLVMAENDVDNELLDYEDDEVETAAGGDGAEAPAKKDVKGSYVSIHSSGFRDFLLKPELLRAIVDCGFEHPSEVQHECIPQAILGMDVLCQAKSGMGKTAVFVLATLQQLEPVTGQVSVLVMCHTRELAFQISKEYERFSKYMPNVKVAVFFGGLSIKKDEEVLKKN

SEQ ID NO: 43156 - protein, 428 aa, Homo sapiens; identical to SEQ ID NO: 43150

SEQ ID NO: 43157 - protein, 125 aa, Homo sapiens
MAENDVDNELLDYEDDEVETAAGGDGAEAPAKKDVKGSYVSIHSSGFRDFLLKPELLRAIVDCGFEHPSEVQHECIPQAILGMDVLCQAKSGMGKTAVFVLATLQQLEPVTGQVSVLVMCHTREL

SEQ ID NO: 43158 - protein, 428 aa, Homo sapiens; identical to SEQ ID NO: 43150

SEQ ID NO: 43159 - protein, 187 aa, Homo sapiens
  VARIANT 1: note = MOD_RES - Any amino acid
XSEERDIGKPMEIFVDDETKLTLHGLQQYYVKLKDNEKNRKLFDLLDVLEFNQVVIFVKSVQRCIALAQLLVEQNFPAIAIHRGMPQEERLSRYQQFKDFQRRILVATNLFGRGMDIERVNIAFNYDMPEDSDTYLHRVARAGRFGTKGLAITFVSDENDAKILNDVQDRFEVNISELPDEIDISSY

SEQ ID NO: 43160 - protein, 125 aa, Homo sapiens; identical to SEQ ID NO: 43157

SEQ ID NO: 43161 - protein, 428 aa, Homo sapiens; identical to SEQ ID NO: 43150

SEQ ID NO: 43162 - protein, 289 aa, Homo sapiens
MAENDVDNELLDYEDDEVETAAGGDGAEAPAKKDVKGSYVSIHSSGFRDFLLKPELLRAIVDCGFEHPSEVQHECIPQAILGMDVLCQAKSGMGKTAVFVLATLQQLEPVTGQVSVLVMCHTRELAFQISKEYERFSKYMPNVKVAVFFGGLSIKKDEEVLKKNCPHIVVGTPGRILALARNKSLNLKHIKHFILDECDKMLEQLDMRRDVQEIFRMTPHEKQVMMFSATLSKEIRPVCRKFMQDPMEIFVDDETKLTLHGLQQYYVKLKDNEKNRKLFDLLDVLEFNQ

SEQ ID NO: 43163 - protein, 428 aa, Homo sapiens; identical to SEQ ID NO: 43150

SEQ ID NO: 43164 - protein, 96 aa, Homo sapiens
MAENDVDNELLDYEDDEVETAAGGDGAEAPAKKDVKGSYVSIHSSGFRDFLLKPELLRAIVDCGFEHPSEVQHECIPQAILGMDVLCQAKSGMGKT

SEQ ID NO: 43165 - protein, 125 aa, Homo sapiens; identical to SEQ ID NO: 43157

SEQ ID NO: 43166 - protein, 231 aa, Homo sapiens
MAENDVDNELLDYEDDEVETAAGGDGAEAPAKKDVKGSYVSIHSSGFRDFLLKPELLRAIVDCGFEHPSEVQHECIPQAILGMDVLCQAKSGMGKTAVFVLATLQQLEPVTGQVSVLVMCHTRELAFQISKEYERFSKYMPNVKVAVFFGGLSIKKDEEVLKKNCPHIVVGTPGRILALARNKSLNLKHIKHFILDECDKMLEQLDMRRDVQEIFRMTPHEKQVMMFSATL

SEQ ID NO: 43167 - protein, 132 aa, Homo sapiens
MAENDVDNELLDYEDDEVETAAGGDGAEAPAKKDVKGSYVSIHSSGFRDFLLKPELLRAIVDCGFEHPSEVQHECIPQAILGMDVLCQAKSGMGKTAVFVLATLQQLEPVTGQVCFCDSHFPRGDNEELHLP

SEQ ID NO: 43168 - protein, 350 aa, Homo sapiens
MWTMSSWTMKMMRWRQQLGEMGLRPLPRRMSRAPMSPSTALAFVTSCSSQSCSGPLSTVALSIRQKVAVFFGGLSIKKDEEVLKKNCPHIVVGTPGRILALARNKSLNLKHIKHFILDECDKMLEQLDMRRDVQEIFRMTPHEKQVMMFSATLSKEIRPVCRKFMQDPMEIFVDDETKLTLHGLQQYYVKLKDNEKNRKLFDLLDVLEFNQVVIFVKSVQRCIALAQLLVEQNFPAIAIHRGMPQEERLSRYQQFKDFQRRILVATNLFGRGMDIERVNIAFNYDMPEDSDTYLHRVARAGRFGTKGLAITFVSDENDAKILNDVQDRFEVNISELPDEIDISSYIEQTR

SEQ ID NO: 43169 - protein, 245 aa, Homo sapiens
MWTMSSWTMKMMRWRQQLGEMGLRPLPRRMSRAPMSPSTALAFVTSCSSQSCSGPLSTVALSIRQKVAVFFGGLSIKKDEEVLKKNCPHIVVGTPGRILALARNKSLNLKHIKHFILDECDKMLEQLDMRRDVQEIFRMTPHEKQVMMFSATLSKEIRPVCRKFMQDPMEIFVDDETKLTLHGLQQYYVKLKDNEKNRKLFDLLDVLEFNQVVIFVKSVQRCIALAQLLVEQNFPAIAIHRGMPQ

SEQ ID NO: 43170 - protein, 136 aa, Homo sapiens
MGGGRRPYDVFFSKVMAENDVDNELLDYEDDEVETAAGGDGAEAPAKKDVKGSYVSIHSSGFRDFLLKPELLRAIVDCGFEHPSEVQHECIPQAILGMDVLCQAKSGMGKTAVFVLATLQQLEPVTGQVSVLVMCH

SEQ ID NO: 43171 - protein, 428 aa, Homo sapiens; identical to SEQ ID NO: 43150

SEQ ID NO: 43172 - protein, 197 aa, Homo sapiens
MAENDVDNELLDYEDDEVETAAGGDGAEAPAKKDVKGSYVSIHSSGFRDFLLKPELLRAIVDCGFEHPSEVQHECIPQAILGMDVLCQAKSGMGKTAVFVLATLQQLEPVTGQVCFCDSHFPRGDNEELHLPYVSVYFLPKVSVLVMCHTRELAFQISKEYERFSKYMPNVKVAVFFGGLSIKKDEEVLKKNCPHIV

SEQ ID NO: 43173 - protein, 189 aa, Homo sapiens
  VARIANT 1: note = MOD_RES - Any amino acid
XATLQQLEPVTGQVSVLVMCHTRELAFQISKEYERFSKYMPNVKVAVFFGGLSIKKDEEVLKKNCPHIVVGTPGRILALARNKSLNLKHIKHFILDECDKMLEQLDMRRDVQEIFRMTPHEKQVMMFSATLSKEIRPVCRKFMQDPMEIFVDDETKLTLHGLQQYYVKLKDNEKNRKLFDLLDVLEFNQ

SEQ ID NO: 43174 - protein, 428 aa, Homo sapiens; identical to SEQ ID NO: 43150

SEQ ID NO: 43175 - protein, 236 aa, Homo sapiens
MAENDVDNELLDYEDDEVETAAGGDGAEAPAKKDVKGSYVSIHSSGFRDFLLKPELLRAIVDCGFEHPSEVQHECIPQAILGMDVLCQAKSGMGKTAVFVLATLQQLEPVTGQVSVLVMCHTRELAFQISKEYERFSKYMPNVKVAVFFGGLSIKKDEEVLKKNCPHIVVGTPGRILALARNKSLNLKHIKHFILDECDKMLEQLDMRRDVQEIFRMTPHEKQVMMFSATLSKEIR

SEQ ID NO: 43176 - protein, 187 aa, Homo sapiens
MGSSHIGGLSINERRRSASLGLVMAENDVDNELLDYEDDEVETAAGGDGAEAPAKKDVKGSYVSIHSSGFRDFLLKPELLRAIVDCGFEHPSEVQHECIPQAILGMDVLCQAKSGMGKTAVFVLATLQQLEPVTGQVSVLVMCHTRELAFQISKEYERFSKYMPNVKVAVFFGGLSIKKDEEVLKKN

SEQ ID NO: 43177 - protein, 132 aa, Homo sapiens; identical to SEQ ID NO: 43167

SEQ ID NO: 43178 - protein, 443 aa, Homo sapiens
MAENDVDNELLDYEDDEVETAAGGDGAEAPAKKDVKGSYVSIHSSGFRDFLLKPELLRAIVDCGFEHPSEVQHECIPQAILGMDVLCQAKSGMGKTAVFVLATLQQLEPVTGQVYLGRVLGRGFWCVFVSVLVMCHTRELAFQISKEYERFSKYMPNVKVAVFFGGLSIKKDEEVLKKNCPHIVVGTPGRILALARNKSLNLKHIKHFILDECDKMLEQLDMRRDVQEIFRMTPHEKQVMMFSATLSKEIRPVCRKFMQDPMEIFVDDETKLTLHGLQQYYVKLKDNEKNRKLFDLLDVLEFNQVVIFVKSVQRCIALAQLLVEQNFPAIAIHRGMPQEERLSRYQQFKDFQRRILVATNLFGRGMDIERVNIAFNYDMPEDSDTYLHRVARAGRFGTKGLAITFVSDENDAKILNDVQDRFEVNISELPDEIDISSYIEQTR

SEQ ID NO: 43179 - protein, 289 aa, Homo sapiens; identical to SEQ ID NO: 43162

SEQ ID NO: 43180 - protein, 187 aa, Homo sapiens; identical to SEQ ID NO: 43159
  VARIANT 1: note = MOD_RES - Any amino acid

SEQ ID NO: 43181 - protein, 136 aa, Homo sapiens; identical to SEQ ID NO: 43170

SEQ ID NO: 43182 - protein, 136 aa, Homo sapiens; identical to SEQ ID NO: 43170

SEQ ID NO: 43183 - protein, 132 aa, Homo sapiens; identical to SEQ ID NO: 43167

SEQ ID NO: 43184 - protein, 236 aa, Homo sapiens; identical to SEQ ID NO: 43175

SEQ ID NO: 43185 - protein, 125 aa, Homo sapiens; identical to SEQ ID NO: 43157

SEQ ID NO: 43186 - protein, 328 aa, Homo sapiens
  VARIANT 1: note = MOD_RES - Any amino acid
XATLQQLEPVTGQVSVLVMCHTRELAFQISKEYERFSKYMPNVKVAVFFGGLSIKKDEEVLKKNCPHIVVGTPGRILALARNKSLNLKHIKHFILDECDKMLEQLDMRRDVQEIFRMTPHEKQVMMFSATLSKEIRPVCRKFMQDPMEIFVDDETKLTLHGLQQYYVKLKDNEKNRKLFDLLDVLEFNQVVIFVKSVQRCIALAQLLVEQNFPAIAIHRGMPQEERLSRYQQFKDFQRRILVATNLFGRGMDIERVNIAFNYDMPEDSDTYLHRVARAGRFGTKGLAITFVSDENDAKILNDVQDRFEVNISELPDEIDISSYIEQTR

SEQ ID NO: 43187 - protein, 236 aa, Homo sapiens; identical to SEQ ID NO: 43175

SEQ ID NO: 43188 - protein, 187 aa, Homo sapiens; identical to SEQ ID NO: 43159
  VARIANT 1: note = MOD_RES - Any amino acid

SEQ ID NO: 43189 - protein, 125 aa, Homo sapiens; identical to SEQ ID NO: 43157

SEQ ID NO: 43190 - protein, 96 aa, Homo sapiens; identical to SEQ ID NO: 43164

SEQ ID NO: 43191 - protein, 125 aa, Homo sapiens; identical to SEQ ID NO: 43157

SEQ ID NO: 43192 - protein, 328 aa, Homo sapiens; identical to SEQ ID NO: 43186
  VARIANT 1: note = MOD_RES - Any amino acid

SEQ ID NO: 43193 - protein, 289 aa, Homo sapiens; identical to SEQ ID NO: 43162

SEQ ID NO: 43194 - protein, 245 aa, Homo sapiens; identical to SEQ ID NO: 43169

SEQ ID NO: 43195 - protein, 245 aa, Homo sapiens; identical to SEQ ID NO: 43169

SEQ ID NO: 43196 - protein, 131 aa, Homo sapiens
  VARIANT 1: note = MOD_RES - Any amino acid
XATLQQLEPVTGQVSVLVMCHTRELAFQISKEYERFSKYMPNVKVAVFFGGLSIKKDEEVLKKNCPHIVVGTPGRILALARNKSLNLKHIKHFILDECDKMLEQLDMRRDVQEIFRMTPHEKQVMMFSATL

SEQ ID NO: 43197 - protein, 136 aa, Homo sapiens
  VARIANT 1: note = MOD_RES - Any amino acid
XATLQQLEPVTGQVSVLVMCHTRELAFQISKEYERFSKYMPNVKVAVFFGGLSIKKDEEVLKKNCPHIVVGTPGRILALARNKSLNLKHIKHFILDECDKMLEQLDMRRDVQEIFRMTPHEKQVMMFSATLSKEIR

SEQ ID NO: 43198 - protein, 238 aa, Homo sapiens
MAENDVDNELLDYEDDEVETAAGGDGAEAPAKKDVKGSYVSIHSSGFRDFLLKPELLRAIVDCGFEHPSEVQHECIPQAILGMDVLCQAKSGMGKTAVFVLATLQQLEPVTGQVSVLVMCHTRELAFQISKEYERFSKYMPNVKVAVFFGGLSIKKDEEVLKKNCPHIVVGTPGRILALARNKSLNLKHIKHFILDECDKMLEQLDMRRDVQEIFRMTPHEKQVMMFSATLSKEIRPV

SEQ ID NO: 43199 - protein, 187 aa, Homo sapiens; identical to SEQ ID NO: 43159
  VARIANT 1: note = MOD_RES - Any amino acid

SEQ ID NO: 43200 - protein, 197 aa, Homo sapiens; identical to SEQ ID NO: 43172

SEQ ID NO: 43201 - protein, 197 aa, Homo sapiens; identical to SEQ ID NO: 43172

SEQ ID NO: 43202 - protein, 136 aa, Homo sapiens; identical to SEQ ID NO: 43170

SEQ ID NO: 43203 - protein, 425 aa, Homo sapiens; identical to SEQ ID NO: 43149

SEQ ID NO: 43204 - protein, 428 aa, Homo sapiens; identical to SEQ ID NO: 43150

SEQ ID NO: 43205 - protein, 428 aa, Homo sapiens; identical to SEQ ID NO: 43150

SEQ ID NO: 43206 - protein, 245 aa, Homo sapiens; identical to SEQ ID NO: 43169

SEQ ID NO: 43207 - protein, 231 aa, Homo sapiens; identical to SEQ ID NO: 43166

SEQ ID NO: 43208 - protein, 197 aa, Homo sapiens; identical to SEQ ID NO: 43172

SEQ ID NO: 43209 - protein, 197 aa, Homo sapiens; identical to SEQ ID NO: 43172

SEQ ID NO: 43210 - protein, 179 aa, Homo sapiens
VAVFFGGLSIKKDEEVLKKNCPHIVVGTPGRILALARNKSLNLKHIKHFILDECDKMLEQLDMRRDVQEIFRMTPHEKQVMMFSATLSKEIRPVCRKFMQDPMEIFVDDETKLTLHGLQQYYVKLKDNEKNRKLFDLLDVLEFNQVVIFVKSVQRCIALAQLLVEQNFPAIAIHRGMPQ

SEQ ID NO: 43211 - protein, 197 aa, Homo sapiens; identical to SEQ ID NO: 43172

SEQ ID NO: 43212 - protein, 187 aa, Homo sapiens; identical to SEQ ID NO: 43159
  VARIANT 1: note = MOD_RES - Any amino acid

SEQ ID NO: 43213 - protein, 64 aa, Homo sapiens
  VARIANT 1: note = MOD_RES - Any amino acid
XATLQQLEPVTGQVSVLVMCHTRELAFQISKEYERFSKYMPNVKVAVFFGGLSIKKDEEVLKKN

SEQ ID NO: 43214 - protein, 25 aa, Homo sapiens
  VARIANT 1: note = MOD_RES - Any amino acid
XATLQQLEPVTGQVSVLVMCHTREL

SEQ ID NO: 43215 - protein, 21 aa, Homo sapiens
  VARIANT 1: note = MOD_RES - Any amino acid
XATLQQLEPVTGQVSVLVMCH

SEQ ID NO: 43216 - protein, 289 aa, Homo sapiens; identical to SEQ ID NO: 43162

SEQ ID NO: 43217 - protein, 236 aa, Homo sapiens; identical to SEQ ID NO: 43175

SEQ ID NO: 43218 - protein, 236 aa, Homo sapiens; identical to SEQ ID NO: 43175

SEQ ID NO: 43219 - protein, 325 aa, Homo sapiens
  VARIANT 1: note = MOD_RES - Any amino acid
XATLQQLEPVTGQVSVLVMCHTRELAFQISKEYERFSKYMPNVKVAVFFGGLSIKKDEEVLKKNCPHIVVGTPGRILALARNKSLNLKHIKHFILDECDKMLEQLDMRRDVQEIFRMTPHEKQVMMFSATLSKEIRPVCRKFMQDPMEIFVDDETKLTLHGLQQYYVKLKDNEKNRKLFDLLDVLEFNQVVIFVKSVQRCIALAQLLVEQNFPAIAIHRGMPQEERLSRYQQFKDFQRRILVATNLFGRGMDIERVNIAFNYDMPEDSDTYLHRCYPLSPSRWPEQAGLAPRAWLSHLCPMRMMPRSSMMCRIALRSILVSCLMR

SEQ ID NO: 43220 - protein, 238 aa, Homo sapiens; identical to SEQ ID NO: 43198

SEQ ID NO: 43221 - protein, 238 aa, Homo sapiens; identical to SEQ ID NO: 43198

SEQ ID NO: 43222 - protein, 289 aa, Homo sapiens; identical to SEQ ID NO: 43162

SEQ ID NO: 43223 - protein, 425 aa, Homo sapiens; identical to SEQ ID NO: 43149

SEQ ID NO: 43224 - protein, 136 aa, Homo sapiens; identical to SEQ ID NO: 43170

SEQ ID NO: 43225 - protein, 187 aa, Homo sapiens; identical to SEQ ID NO: 43155

SEQ ID NO: 43226 - protein, 132 aa, Homo sapiens; identical to SEQ ID NO: 43167

SEQ ID NO: 43227 - protein, 289 aa, Homo sapiens; identical to SEQ ID NO: 43162

SEQ ID NO: 43228 - protein, 428 aa, Homo sapiens; identical to SEQ ID NO: 43150

SEQ ID NO: 43229 - protein, 187 aa, Homo sapiens; identical to SEQ ID NO: 43155

SEQ ID NO: 43230 - protein, 96 aa, Homo sapiens; identical to SEQ ID NO: 43164

SEQ ID NO: 43231 - protein, 187 aa, Homo sapiens; identical to SEQ ID NO: 43155

SEQ ID NO: 43232 - protein, 197 aa, Homo sapiens; identical to SEQ ID NO: 43172

SEQ ID NO: 43233 - protein, 96 aa, Homo sapiens; identical to SEQ ID NO: 43164

SEQ ID NO: 43234 - protein, 231 aa, Homo sapiens; identical to SEQ ID NO: 43166

SEQ ID NO: 43235 - protein, 231 aa, Homo sapiens; identical to SEQ ID NO: 43166

SEQ ID NO: 43236 - protein, 238 aa, Homo sapiens; identical to SEQ ID NO: 43198

SEQ ID NO: 43237 - protein, 428 aa, Homo sapiens; identical to SEQ ID NO: 43150

SEQ ID NO: 43238 - protein, 187 aa, Homo sapiens; identical to SEQ ID NO: 43159
  VARIANT 1: note = MOD_RES - Any amino acid

SEQ ID NO: 43239 - protein, 187 aa, Homo sapiens; identical to SEQ ID NO: 43155

SEQ ID NO: 43240 - protein, 238 aa, Homo sapiens; identical to SEQ ID NO: 43198

SEQ ID NO: 43241 - protein, 245 aa, Homo sapiens; identical to SEQ ID NO: 43169

SEQ ID NO: 43242 - protein, 425 aa, Homo sapiens; identical to SEQ ID NO: 43149

SEQ ID NO: 43243 - protein, 236 aa, Homo sapiens; identical to SEQ ID NO: 43175

SEQ ID NO: 43244 - protein, 245 aa, Homo sapiens; identical to SEQ ID NO: 43169

SEQ ID NO: 43245 - protein, 428 aa, Homo sapiens; identical to SEQ ID NO: 43150

SEQ ID NO: 43246 - protein, 136 aa, Homo sapiens; identical to SEQ ID NO: 43170

SEQ ID NO: 43247 - protein, 328 aa, Homo sapiens; identical to SEQ ID NO: 43186
  VARIANT 1: note = MOD_RES - Any amino acid

SEQ ID NO: 43248 - protein, 132 aa, Homo sapiens; identical to SEQ ID NO: 43167

SEQ ID NO: 43249 - protein, 139 aa, Homo sapiens
MAENDVDNELLDYEDDEVETAAGGDGAEAPAKKDVKGSYVSIHSSGFRDFLLKPELLRAIVDCGFEHPSEVQHECIPQAILGMDVLCQAKSGMGKTAVFVLATLQQLEPVTGQSHEHMTSVTLDNLTAVGDVLSQAWGS

SEQ ID NO: 43250 - protein, 238 aa, Homo sapiens; identical to SEQ ID NO: 43198

SEQ ID NO: 43251 - protein, 187 aa, Homo sapiens; identical to SEQ ID NO: 43176

SEQ ID NO: 43252 - protein, 236 aa, Homo sapiens; identical to SEQ ID NO: 43175

SEQ ID NO: 43253 - protein, 425 aa, Homo sapiens; identical to SEQ ID NO: 43149

SEQ ID NO: 43254 - protein, 231 aa, Homo sapiens; identical to SEQ ID NO: 43166

SEQ ID NO: 43255 - protein, 32 aa, Homo sapiens
  VARIANT 1: note = MOD_RES - Any amino acid
XATLQQLEPVTGQVCFCDSHFPRGDNEELHLP

SEQ ID NO: 43256 - protein, 132 aa, Homo sapiens; identical to SEQ ID NO: 43167

SEQ ID NO: 43257 - protein, 132 aa, Homo sapiens; identical to SEQ ID NO: 43167

SEQ ID NO: 43258 - protein, 245 aa, Homo sapiens; identical to SEQ ID NO: 43169

SEQ ID NO: 43259 - protein, 231 aa, Homo sapiens; identical to SEQ ID NO: 43166

SEQ ID NO: 43260 - protein, 243 aa, Homo sapiens
MWTMSSWTMKMMRWRQQLGEMGLRPLPRRMSRAPMSPSTALAFVTSCSSQSCSGPLSTVALSIRQKVSVLVMCHTRELAFQISKEYERFSKYMPNVKVAVFFGGLSIKKDEEVLKKNCPHIVVGTPGRILALARNKSLNLKHIKHFILDECDKMLEQLDMRRDVQEIFRMTPHEKQVMMFSATLSKEIRPVCRKFMQDVNTLLPSLPPLPARCLLPFLALFLRLPCHSSAKKAACAQLGVMTP

SEQ ID NO: 43261 - protein, 428 aa, Homo sapiens; identical to SEQ ID NO: 43150

SEQ ID NO: 43262 - protein, 425 aa, Homo sapiens; identical to SEQ ID NO: 43149

SEQ ID NO: 43263 - protein, 96 aa, Homo sapiens; identical to SEQ ID NO: 43164

SEQ ID NO: 43264 - protein, 136 aa, Homo sapiens; identical to SEQ ID NO: 43170

SEQ ID NO: 43265 - protein, 187 aa, Homo sapiens; identical to SEQ ID NO: 43159
  VARIANT 1: note = MOD_RES - Any amino acid

SEQ ID NO: 43266 - protein, 238 aa, Homo sapiens; identical to SEQ ID NO: 43198

SEQ ID NO: 43267 - protein, 138 aa, Homo sapiens
  VARIANT 1: note = MOD_RES - Any amino acid
XATLQQLEPVTGQVSVLVMCHTRELAFQISKEYERFSKYMPNVKVAVFFGGLSIKKDEEVLKKNCPHIVVGTPGRILALARNKSLNLKHIKHFILDECDKMLEQLDMRRDVQEIFRMTPHEKQVMMFSATLSKEIRPV

SEQ ID NO: 43268 - protein, 289 aa, Homo sapiens; identical to SEQ ID NO: 43162

SEQ ID NO: 43269 - protein, 428 aa, Homo sapiens; identical to SEQ ID NO: 43150

SEQ ID NO: 43270 - protein, 231 aa, Homo sapiens; identical to SEQ ID NO: 43166

SEQ ID NO: 43271 - protein, 428 aa, Homo sapiens; identical to SEQ ID NO: 43150

SEQ ID NO: 43272 - protein, 125 aa, Homo sapiens; identical to SEQ ID NO: 43157

SEQ ID NO: 43273 - protein, 97 aa, Homo sapiens
  VARIANT 1: note = MOD_RES - Any amino acid
XATLQQLEPVTGQVCFCDSHFPRGDNEELHLPYVSVYFLPKVSVLVMCHTRELAFQISKEYERFSKYMPNVKVAVFFGGLSIKKDEEVLKKNCPHIV

SEQ ID NO: 43274 - protein, 96 aa, Homo sapiens; identical to SEQ ID NO: 43164

SEQ ID NO: 43275 - protein, 96 aa, Homo sapiens; identical to SEQ ID NO: 43164

SEQ ID NO: 43276 - protein, 428 aa, Homo sapiens; identical to SEQ ID NO: 43150

SEQ ID NO: 43277 - protein, 243 aa, Homo sapiens; identical to SEQ ID NO: 43260

SEQ ID NO: 43278 - protein, 323 aa, Homo sapiens
MAENDVDNELLDYEDDEVETAAGGDGAEAPAKKDVKGSYVSIHSSGFRDFLLKPELLRAIVDCGFEHPSEVQHECIPQAILGMDVLCQAKSGMGKTAVFVLATLQQLEPVTGQVSVLVMCHTRELAFQISKEYERFSKYMPNVKVAVFFGGLSIKKDEEVLKKNCPHIVVGTPGRILALARNKSLNLKHIKHFILDECDKMLEQLDMRRDVQEIFRMTPHEKQVMMFSATLSKEIRPVCRKFMQDPMEIFVDDETKLTLHGLQQYYVKLKDNEKNRKLFDLLDVLEFNQEITCKSVQRFSTTNSCGYQPIWPRHGHRAGEHCF

SEQ ID NO: 43279 - protein, 323 aa, Homo sapiens; identical to SEQ ID NO: 43278

SEQ ID NO: 43280 - protein, 443 aa, Homo sapiens; identical to SEQ ID NO: 43178

SEQ ID NO: 43281 - protein, 243 aa, Homo sapiens; identical to SEQ ID NO: 43260

SEQ ID NO: 43282 - protein, 443 aa, Homo sapiens; identical to SEQ ID NO: 43178

SEQ ID NO: 43283 - protein, 139 aa, Homo sapiens; identical to SEQ ID NO: 43249

SEQ ID NO: 43284 - protein, 243 aa, Homo sapiens; identical to SEQ ID NO: 43260

SEQ ID NO: 43285 - protein, 243 aa, Homo sapiens; identical to SEQ ID NO: 43260

SEQ ID NO: 43286 - protein, 139 aa, Homo sapiens; identical to SEQ ID NO: 43249

SEQ ID NO: 43287 - protein, 323 aa, Homo sapiens; identical to SEQ ID NO: 43278

SEQ ID NO: 43288 - protein, 443 aa, Homo sapiens; identical to SEQ ID NO: 43178

SEQ ID NO: 43289 - protein, 243 aa, Homo sapiens; identical to SEQ ID NO: 43260

SEQ ID NO: 43290 - protein, 350 aa, Homo sapiens; identical to SEQ ID NO: 43168

SEQ ID NO: 43291 - protein, 443 aa, Homo sapiens; identical to SEQ ID NO: 43178

SEQ ID NO: 43292 - protein, 350 aa, Homo sapiens; identical to SEQ ID NO: 43168

SEQ ID NO: 43293 - protein, 243 aa, Homo sapiens; identical to SEQ ID NO: 43260

SEQ ID NO: 43294 - protein, 139 aa, Homo sapiens; identical to SEQ ID NO: 43249

SEQ ID NO: 43295 - protein, 350 aa, Homo sapiens; identical to SEQ ID NO: 43168

SEQ ID NO: 43296 - protein, 323 aa, Homo sapiens; identical to SEQ ID NO: 43278

SEQ ID NO: 43297 - protein, 350 aa, Homo sapiens; identical to SEQ ID NO: 43168

SEQ ID NO: 43298 - protein, 139 aa, Homo sapiens; identical to SEQ ID NO: 43249

SEQ ID NO: 43299 - protein, 443 aa, Homo sapiens; identical to SEQ ID NO: 43178

SEQ ID NO: 43300 - protein, 323 aa, Homo sapiens; identical to SEQ ID NO: 43278

SEQ ID NO: 43301 - protein, 323 aa, Homo sapiens; identical to SEQ ID NO: 43278

SEQ ID NO: 43302 - protein, 350 aa, Homo sapiens; identical to SEQ ID NO: 43168

SEQ ID NO: 43303 - protein, 139 aa, Homo sapiens; identical to SEQ ID NO: 43249

SEQ ID NO: 43304 - protein, 350 aa, Homo sapiens; identical to SEQ ID NO: 43168

SEQ ID NO: 43305 - protein, 139 aa, Homo sapiens; identical to SEQ ID NO: 43249

SEQ ID NO: 43306 - protein, 443 aa, Homo sapiens; identical to SEQ ID NO: 43178

SEQ ID NO: 43307 - protein, 183 aa, Homo sapiens
MEIFVDDETKLTLHGLQQYYVKLKDNEKNRKLFDLLDVLEFNQVVIFVKSVQRCIALAQLLVEQNFPAIAIHRGMPQEERWLSRYQQFKDFQRRILVATNLFGRGMDIERVNIAFNYDMPEDSDTYLHRVARAGRFGTKGLAITFVSDENDAKILNDVQDRFEVNISELPDEIDISSYIEQTR

SEQ ID NO: 43308 - protein, 690 aa, Homo sapiens
MGDEDWEAEINPHMSSYVPIFEKDRYSGENGDNFNRTPASSSEMDDGPSRRDHFMKSGFASGRNFGNRDAGECNKRDNTSTMGGFGVGKSFGNRGFSNSRFEDGDSSGFWRESSNDCEDNPTRNRGFSKRGDNDLDPDECMQRTGGLFGSRRPVLSGTGNGDTSQSRSGSGSERGGYKGLNEEVITGSGKNSWKSEAEGGESSDTQGPKVTYIPPPPPEDEDSIFAHYQTGINFDKYDTILVEVSGHDAPPAILTFEEANLCQTLNNNIAKAGYTKLTPVQKYSIPIILAGRDLMACAQTGSGKTAAFLLPILAHMMHDGITASRFKELQEPECIIVAPTRELVNQIYLEARKFSFGTCVRAVVIYGGTQLGHSIRQIVQGCNILCATPGRLMDIIGKEKIGLKQIKYLVLDEADRMLDMGFGPEMKKLISCPGMPSKEQRQTLMFSATFPEEIQRLAAEFLKSNYLFVAVGQVGGACRDVQQTVLQVGQFSKREKLVEILRNIGDERTMVFVETKKKADFIATFLCQEKISTTSIHGDREQREREQALGDFRFGKCPVLVATSVAARGLDIENVQHVINFDLPSTIDEYVHRIGRTGRCGNTGRAISFFDLESDNHLAQPLVKVLTDAQQDVPAWLEEIAFSTYIPGFSGSTRGNVFASVDTRKGKSTLNTAGFSSSQAPNPVDDESWD

SEQ ID NO: 43309 - protein, 690 aa, Homo sapiens; identical to SEQ ID NO: 43308

SEQ ID NO: 43310 - protein, 724 aa, Homo sapiens
MGDEDWEAEINPHMSSYVPIFEKDRYSGENGDNFNRTPASSSEMDDGPSRRDHFMKSGFASGRNFGNRDAGECNKRDNTSTMGGFGVGKSFGNRGFSNSRFEDGDSSGFWRESSNDCEDNPTRNRGFSKRGGYRDGNNSEASGPYRRGGRGSFRGCRGGFGLGSPNNDLDPDECMQRTGGLFGSRRPVLSGTGNGDTSQSRSGSGSERGGYKGLNEEVITGSGKNSWKSEAEGGESSDTQGPKVTYIPPPPPEDEDSIFAHYQTGINFDKYDTILVEVSGHDAPPAILTFEEANLCQTLNNNIAKAGYTKLTPVQKYSIPIILAGRDLMACAQTGSGKTAAFLLPILAHMMHDGITASRFKELQEPECIIVAPTRELVNQIYLEARKFSFGTCVRAVVIYGGTQLGHSIRQIVQGCNILCATPGRLMDIIGKEKIGLKQIKYLVLDEADRMLDMGFGPEMKKLISCPGMPSKEQRQTLMFSATFPEEIQRLAAEFLKSNYLFVAVGQVGGACRDVQQTVLQVGQFSKREKLVEILRNIGDERTMVFVETKKKADFIATFLCQEKISTTSIHGDREQREREQALGDFRFGKCPVLVATSVAARGLDIENVQHVINFDLPSTIDEYVHRIGRTGRCGNTGRAISFFDLESDNHLAQPLVKVLTDAQQDVPAWLEEIAFSTYIPGFSGSTRGNVFASVDTRKGKSTLNTAGFSSSQAPNPVDDESWD

SEQ ID NO: 43311 - protein, 105 aa, Homo sapiens
MGDEDWEAEINPHMSSYVPIFEKDRYSGENGDNFNRTPASSSEMDDGPSRRDHFMKSGFASGRNFGNRDAGECNKRDNTSTMGGFGVGKSFGNRGFSNSRFEDGD

SEQ ID NO: 43312 - protein, 704 aa, Homo sapiens
MGDEDWEAEINPHMSSYVPIFEKDRYSGENGDNFNRTPASSSEMDDGPSRRDHFMKSGFASGRNFGNRDAGECNKRDNTSTMGGFGVGKSFGNRGFSNSRFEDGDSSGFWRGYRDGNNSEASGPYRRGGRGSFRGCRGGFGLGSPNNDLDPDECMQRTGGLFGSRRPVLSGTGNGDTSQSRSGSGSERGGYKGLNEEVITGSGKNSWKSEAEGGESSDTQGPKVTYIPPPPPEDEDSIFAHYQTGINFDKYDTILVEVSGHDAPPAILTFEEANLCQTLNNNIAKAGYTKLTPVQKYSIPIILAGRDLMACAQTGSGKTAAFLLPILAHMMHDGITASRFKELQEPECIIVAPTRELVNQIYLEARKFSFGTCVRAVVIYGGTQLGHSIRQIVQGCNILCATPGRLMDIIGKEKIGLKQIKYLVLDEADRMLDMGFGPEMKKLISCPGMPSKEQRQTLMFSATFPEEIQRLAAEFLKSNYLFVAVGQVGGACRDVQQTVLQVGQFSKREKLVEILRNIGDERTMVFVETKKKADFIATFLCQEKISTTSIHGDREQREREQALGDFRFGKCPVLVATSVAARGLDIENVQHVINFDLPSTIDEYVHRIGRTGRCGNTGRAISFFDLESDNHLAQPLVKVLTDAQQDVPAWLEEIAFSTYIPGFSGSTRGNVFASVDTRKGKSTLNTAGFSSSQAPNPVDDESWD

SEQ ID NO: 43313 - protein, 159 aa, Homo sapiens
MGDEDWEAEINPHMSSYVPIFEKDRYSGENGDNFNRTPASSSEMDDGPSRRDHFMKSGFASGRNFGNRDAGECNKRDNTSTMGGFGVGKSFGNRGFSNSRFEDGDSSGFWRESSNDCEDNPTRNRGFSKRGGYRDGNNSEASGPYRRGGRGSFRGCRGG

SEQ ID NO: 43314 - protein, 575 aa, Homo sapiens
MGSRNLFLTNSPESSNDCEDNPTRNRGFSKRGDNDLDPDECMQRTGGLFGSRRPVLSGTGNGDTSQSRSGSGSERDSWKSEAEGGESSDTQGPKVTYIPPPPPEDEDSIFAHYQTGINFDKYDTILVEVSGHDAPPAILTFEEANLCQTLNNNIAKAGYTKLTPVQKYSIPIILAGRDLMACAQTGSGKTAAFLLPILAHMMHDGITASRFKELQEPECIIVAPTRELVNQIYLEARKFSFGTCVRAVVIYGGTQLGHSIRQIVQGCNILCATPGRLMDIIGKEKIGLKQIKYLVLDEADRMLDMGFGPEMKKLISCPGMPSKEQRQTLMFSATFPEEIQRLAAEFLKSNYLFVAVGQVGGACRDVQQTVLQVGQFSKREKLVEILRNIGDERTMVFVETKKKADFIATFLCQEKISTTSIHGDREQREREQALGDFRFGKCPVLVATSVAARGLDIENVQHVINFDLPSTIDEYVHRIGRTGRCGNTGRAISFFDLESDNHLAQPLVKVLTDAQQDVPAWLEEIAFSTYIPGFSGSTRGNVFASVDTRKGKSTLNTAGFSSSQAPNPVDDESWD

SEQ ID NO: 43315 - protein, 622 aa, Homo sapiens
MEESEPERKRARTDEVPAGGSRSEAEDEDDEDYVPYVPLRQRRQLLLQKLLQRRRKGAAEEEQQDSGSEPRGDEDDIPLGPQSNVSLLDQHQHLKEKAEARKESAKEKQLKEEEKILESVAEGRALMSVKEMAKGITYDDPIKTSWTPPRYVLSMSEERHERVRKKYHILVEGDGIPPPIKSFKEMKFPAAILRGLKKKGIHHPTPIQIQGIPTILSGRDMIGIAFTGSGKTLVFTLPVIMFCLEQEKRLPFSKREGPYGLIICPSRELARQTHGILEYYCRLLQEDSSPLLRCALCIGGMSVKEQMETIRHGVHMMVATPGRLMDLLQKKMVSLDICRYLALDEADRMIDMGFEGDIRTIFSYFKGQRQTLLFSATMPKKIQNFAKSALVKPVTINVGRAGAASLDVIQEVEYVKEEAKMVYLLECLQKTPPPVLIFAEKKADVDAIHEYLLLKGVEAVAIHGGKDQEERTKAIEAFREGKKDVLVATDVASKGLDFPAIQHVINYDMPEEIENYVHRIGRTGRSGNTGIATTFINKACDESVLMDLKALLLEAKQKVPPVLQVLHCGDESMLDIGGERGCAFCGGLGHRITDCPKLEAMQTKQVSNIGRKDYLAHSSMDF

SEQ ID NO: 43316 - protein, 626 aa, Homo sapiens
MHQIRKSEYTQPTPIQCQGVPVALSGRDMIGIAKTGSGKTAAFIWPMLIHIMDQKELEPGDGPIAVIVCPTRELCQQIHAECKRFGKAYNLRSVAVYGGGSMWEQAKALQEGAEIVVCTPGRLIDHVKKKATNLQRVSYLVFDEADRMFDMGFEYQVRSIASHVRPDRQTLLFSATFRKKIEKLARDILIDPIRVVQGDIGEANEDVTQIVEILHSGPSKWNWLTRRLVEFTSSGSVLLFVTKKANAEELANNLKQEGHNLGLLHGDMDQSERNKVISDFKKKDIPVLVATDVAARGLDIPSIKTVINYDVARDIDTLLTPKDSNFAGDLVRNLEGANQHVSKELLDLAMQNAWFRKSRFKGGKGKKLNIGGGGLGYRERPGLGSENMDRGNNNVMSNYEAYKPSTGAMGDRLTAMKAAFQSQYKSHFVAASLSNQKAGSSAAGASGWTSAGSLNSVPTNSAQQGHNSPDSPVTSAAKGIPGFGNTGNISGAPVTYPSAGAQGVNNTASGNNSREGTGGSNGKRERYTENRGSSRHSHGETGNRHSDSPRHGDGGRHGDGYRHPESSSRHTDGHRHGENRHGGSAGRHGENRGANDGRNGESRKEAFNRESKMEPPPKRKKSRWDS

SEQ ID NO: 43317 - protein, 938 aa, Homo sapiens
MNWNKGGPGTKRGFGFGGFAISAGKKEEPKLPQQSHSAFGATSSSSGFGKSAPPQLPSFYKIGSKRANFDEENAYFEDEEEDSSNVDLPYIPAENSPTRQQFHSKPVDSDSDDDPLEAFMAEVEDQAARDMKRLEEKDKERKNVKGIRDDIEEEDDQEAYFRYMAENPTAGVVQEEEEDNLEYDSDGNPIAPTKKIIDPLPPIDHSEIDYPPFEKNFYNEHEEITNLTPQQLIDLRHKLNLRVSGAAPPRPGSSFAHFGFDEQLMHQIRKSEYTQPTPIQCQGVPVALSGRDMIGIAKTGSGKTAAFIWPMLIHIMDQKELEPGDGPIAVIVCPTRELCQQIHAECKRFGKAYNLRSVAVYGGGSMWEQAKALQEGAEIVVCTPGRLIDHVKKKATNLQRVSYLVFDEADRMFDMGFEYQVRSIASHVRPDRQTLLFSATFRKKIEKLARDILIDPIRVVQGDIGEANEDVTQIVEILHSGPSKWNWLTRRLVEFTSSGSVLLFVTKKANAEELANNLKQEGHNLGLLHGDMDQSERNKVISDFKKKDIPVLVATDVAARGLDIPSIKTVINYDVARDIDTHTHRIGRTGRAGEKGVAYTLLTPKDSNFAGDLVRNLEGANQHVSKELLDLAMQNAWFRKSRFKGGKGKKLNIGGGGLGYRERPGLGSENMDRGNNNVMSNYEAYKPSTGAMGDRLTAMKAAFQSQYKSHFVAASLSNQKAGSSAAGASGWTSAGSLNSVPTNSAQQGHNSPDSPVTSAAKGIPGFGNTGNISGAPVTYPSAGAQGVNNTASGNNSREGTGGSNGKRERYTENRGSSRHSHGETGNRHSDSPRHGDGGRHGDGYRHPESSSRHTDGHRHGENRHGGSAGRHGENRGANDGRNGESRKEAFNRESKMEPKMEPKVDSSKMDKVDSKTDKTADGFAVPEPPKRKKSRWDS

SEQ ID NO: 43318 - protein, 938 aa, Homo sapiens; identical to SEQ ID NO: 43317

SEQ ID NO: 43319 - protein, 938 aa, Homo sapiens; identical to SEQ ID NO: 43317

SEQ ID NO: 43320 - protein, 938 aa, Homo sapiens; identical to SEQ ID NO: 43317

SEQ ID NO: 43321 - protein, 648 aa, Homo sapiens
MSHHGGAPKASTWVVASRRSSTVSRAPERRPAEELNRTGPEGYSVGRGGRWRGTSRPPEAVAAGHEELPLCFALKSHFVGAVIGRGGSKIKNIQSTTNTTIQIIQEQPESLVKIFGSKAMQTKAKAVIDNFVKKLEENYNSECGIDTAFQPSVGKDGSTDNNVVAGDRPLIDWDQIREEGLKWQKTKWADLPPIKKNFYKESTATSAMSKVEADSWRKENFNITWDDLKDGEKRPIPNPTCTFDDAFQCYPEVMENIKKAGFQKPTPIQSQAWPIVLQGIDLIGVAQTGTGKTLCYLMPGFIHLVLQPSLKGQRNRPGMLVLTPTRELALQVEGECCKYSYKGLRSVCVYGGGNRDEQIEELKKGVDIIIATPGRLNDLQMSNFVNLKNITYLVLDEADKMLDMGFEPQIMKILLDVRPDRQTVMTSATWPHSVHRLAQSYLKEPMIVYVGTLDLVAVSSVKQNIIVTTEEEKWSHMQTFLQSMSSTDKVIVFVSRKAVADHLSSDLILGNISVESLHGDREQRDREKALENFKTGKVRILIATDLASRGLDVHDVTHVYNFDFPRNIEEYVHRIGRTGRAGRTGVSITTLTRNDWRVASELINILERANQSIPEELVSMAERFKAHQQKREMERKMERPQGRPKKFH

SEQ ID NO: 43322 - protein, 195 aa, Homo sapiens
MSHHGGAPKASTWVVASRRSSTVSRAPERRPAEELNRTGPEGYSVGRGGRWRGTSRPPEAVAAGHEELPLCFALKSHFVGAVIGRGGSKIKNIQSTTNTTIQIIQEQPESLVKIFGSKAMQTKAKAVIDNFVKKLEENYNSECGIDTAFQPSVGKDGSTDNNVVAGDRPLIDWDQIREEGLKWQKTKWAGKKILI

SEQ ID NO: 43323 - protein, 603 aa, Homo sapiens
MSGYSSDRDRGRDRGFGAPRFGGSRAGPLSGKKFGNPGEKLVKKKNFYQEHPDLARRTAQEVETYRRSKEITVRGHNCPKPVLNFYEANFPANVMDVIARQNFTEPTAIQAQGWPVALSGLDMVGVAQTGSGKTLSYLLPAIVHINHQPFLERGDGPICLVLAPTRELAQQVQQVAAEYCRACRLKSTCIYGGAPKGPQIRDLERGVEICIATPGRLIDFLECGKTNLRRTTYLVLDEADRMLDMGFEPQIRKIVDQIRPDRQTLMWSATWPKEVRQLAEDFLKDYIHINIGALELSANHNILQIVDVCHDVEKDEKLIRLMEEIMSEKENKTIVFVETKRRCDELTRKMRRDGWPAMGIHGDKSQQERDWVLNEFKHGKAPILIATDVASRGLDVEDVKFVINYDYPNSSEDYIHRIGRTARSTKTGTAYTFFTPNNIKQVSDLISVLREANQAINPKLLQLVEDRGSGRSRGRGGMKDDRRDRYSAGKRGGFNTFRDRENYDRGYSSLLKRDFGAKTQNGVYSAANYTNGSFGSNFVSAGIQTSFRTGNPTGTYQNGYDSTQQYGSNVPNMHNGMNQQAYAYPATAAAPMIGYPMPTGYSQ

SEQ ID NO: 43324 - protein, 544 aa, Homo sapiens
MSGYSSDRDRGRDRGFGAPRFGGSRAGPLSGKKFGNPGEKLVKKKWNLDELPKFEKNFYQEHPDLARRTAQEVETYRYLLPAIVHINHQPFLERGDGPICLVLAPTRELAQQVQQVAAEYCRACRLKSTCIYGGAPKGPQIRDLERGVEICIATPGRLIDFLECGKTNLRRTTYLVLDEADRMLDMGFEPQIRKIVDQIRPDRQTLMWSATWPKEVRQLAEDFLKDYIHINIGALELSANHNILQIVDVCHDVEKDEKLIRLMEEIMSEKENKTIVFVETKRRCDELTRKMRRDGWPAMGIHGDKSQQERDWVLNEFKHGKAPILIATDVASRGLDVEDVKFVINYDYPNSSEDYIHRIGRTARSTKTGTAYTFFTPNNIKQVSDLISVLREANQAINPKLLQLVEDRGSGRSRGRGGMKDDRRDRYSAGKRGGFNTFRDRENYDRGYSSLLKRDFGAKTQNGVYSAANYTNGSFGSNFVSAGIQTSFRTGNPTGTYQNGYDSTQQYGSNVPNMHNGMNQQAYAYPATAAAPMIGYPMPTGYSQ

SEQ ID NO: 43325 - protein, 614 aa, Homo sapiens
MSGYSSDRDRGRDRGFGAPRFGGSRAGPLSGKKFGNPGEKLVKKKWNLDELPKFEKNFYQEHPDLARRTAQEVETYRRSKEITVRGHNCPKPVLNFYEANFPANVMDVIARQNFTEPTAIQAQGWPVALSGLDMVGVAQTGSGKTLSYLLPAIVHINHQPFLERGDGPICLVLAPTRELAQQVQQVAAEYCRACRLKSTCIYGGAPKGPQIRDLERGVEICIATPGRLIDFLECGKTNLRRTTYLVLDEADRMLDMGFEPQIRKIVDQIRPDRQTLMWSATWPKEVRQLAEDFLKDYIHINIGALELSANHNILQIVDVCHDVEKDEKLIRLMEEIMSEKENKTIVFVETKRRCDELTRKMRRDGWPAMGIHGDKSQQERDWVLNEFKHGKAPILIATDVASRGLDVEDVKFVINYDYPNSSEDYIHRIGRTARSTKTGTAYTFFTPNNIKQVSDLISVLREANQAINPKLLQLVEDRGSGRSRGRGGMKDDRRDRYSAGKRGGFNTFRDRENYDRGYSSLLKRDFGAKTQNGVYSAANYTNGSFGSNFVSAGIQTSFRTGNPTGTYQNGYDSTQQYGSNVPNMHNGMNQQAYAYPATAAAPMIGYPMPTGYSQ

SEQ ID NO: 43326 - protein, 599 aa, Homo sapiens
MDVHDLFRRLGAGAKFDTRRFSADAARFQIGKRKYDFDSSEVLQGLDFFGNKKSVPGVCGASQTHQKPQNGEKKEESLTERKREQSKKKRKTMTSEIASQEEGATIQWMSSVEAKIEDKKVQRESKLTSGKLENLRKEKINFLRNKHKIHVQGTDLPDPIATFQQLDQEYKINSRLLQNILDAGFQMPTPIQMQAIPVMLHGRELLASAPTGSGKTLAFSIPILMQLKQPANKGFRALIISPTRELASQIHRELIKISEGTGFRIHMIHKAAVAAKKFGPKSSKKFDILVTTPNRLIYLLKQDPPGIDLASVEWLVVDESDKLFEDGKTGFRDQLASIFLACTSHKVRRAMFSATFAYDVEQWCKLNLDNVISVSIGARNSAVETVEQELLFVGSETGKLLAMRELVKKGFNPPVLVFVQSIERAKELFHELIYEGINVDVIHAERTQQQRDNTVHSFRAGKIWVLICTALLARGIDFKGVNLVINYDFPTSSVEYIHRIGRTGRAGNKGKAITFFTEDDKPLLRSVANVIQQAGCPVPEYIKGFQKLLSKQKKKMIKKPLERESISTTPKCFLEKAKDKQKKVTGQNSKKKVALEDKS

SEQ ID NO: 43327 - protein, 491 aa, Homo sapiens
MSSVEAKIEDKKVQRESKLTSGKLENLRKEKINFLRNKHKIHVQGTDLPDPIATFQQLDQEYKINSRLLQNILDAGFQMPTPIQMQAIPVMLHGRELLASAPTGSGKTLAFSIPILMQLKQPANKGFRALIISPTRELASQIHRELIKISEGTGFRIHMIHKAAVAAKKFGPKSSKKFDILVTTPNRLIYLLKQDPPGIDLASVEWLVVDESDKLFEDGKTGFRDQLASIFLACTSHKVRRAMFSATFAYDVEQWCKLNLDNVISVSIGARNSAVETVEQELLFVGSETGKLLAMRELVKKGFNPPVLVFVQSIERAKELFHELIYEGINVDVIHAERTQQQRDNTVHSFRAGKIWVLICTALLARGIDFKGVNLVINYDFPTSSVEYIHRIGRTGRAGNKGKAITFFTEDDKPLLRSVANVIQQAGCPVPEYIKGFQKLLSKQKKKMIKKPLERESISTTPKCFLEKAKDKQKKVTGQNSKKKVALEDKS

SEQ ID NO: 43328 - protein, 881 aa, Homo sapiens
MAADKGPAAGPRSRAAMAQWRKKKGLRKRRGAASQARGSDSEDGEFEIQAEDDARARKLGPGRPLPTFPTSECTSDVEPDTREMVRAQNKKKKKSGGFQSMGLSYPVFKGIMKKGYKVPTPIQRKTIPVILDGKDVVAMARTGSGKTACFLLPMFERLKTHSAQTGARALILSPTRELALQTLKFTKELGKFTGLKTALILGGDRMEDQFAALHENPDIIIATPGRLVHVAVEMSLKLQSVEYVVFDEADRLFEMGFAEQLQEIIARLPGGHQTVLFSATLPKLLVEFARAGLTEPVLIRLDVDTKLNEQLKTSFFLVREDTKAAVLLHLLHNVVRPQDQTVVFVATKHHAEYLTELLTTQRVSCAHIYSALDPTARKINLAKFTLGKCSTLIVTDLAARGLDIPLLDNVINYSFPAKGKLFLHRVGRVARAGRSGTAYSLVAPDEIPYLLDLHLFLGRSLTLARPLKEPSGVAGVDGMLGRVPQSVVDEEDSGLQSTLEASLELRGLARVADNAQQQYVRSRPAPSPESIKRAKEMDLVGLGLHPLFSSRFEEEELQRLRLVDSIKNYRSRATIFEINASSRDLCSQVMRAKRQKDRKAIARFQQGQQGRQEQQEGPVGPAPSRPALQEKQPEKEEEEEAGESVEDIFSEVVGRKRQRSGPNRGAKRRREEARQRDQEFYIPYRPKDFDSERGLSISGEGGAFEQQAAGAVLDLMGDEAQNLTRGRQQLKWDRKKKRFVGQSGQEDKKKIKTESGRYISSSYKRDLYQKWKQKQKIDDRDSDEEGASDRRGPERRGGKRDRGQGASRPHAPGTPAGRVRPELKTKQQILKQRRRAQKLHFLQRGGLKQLSARNRRRVQELQQGAFGRGARSKKGKMRKRM

SEQ ID NO: 43329 - protein, 882 aa, Homo sapiens
MAADKGPAAGPRSRAAMAQWRKKKGLRKRRGAASQARGSDSEDGEFEIQAEDDARARKLGPGRPLPTFPTSECTSDVEPDTREMVRAQNKKKKKSGGFQSMGLSYPVFKGIMKKGYKVPTPIQRKTIPVILDGKDVVAMARTGSGKTACFLLPMFERLKTHSAQTGARALILSPTRELALQTLKFTKELGKFTGLKTALILGGDRMEDQFAALHENPDIIIATPGRLVHVAVEMSLKLQSVEYVVFDEADRLFEMGFAEQLQEIIARLPGGHQTVLFSATLPKLLVEFARAGLTEPVLIRLDVDTKLNEQLKTSFFLVREDTKAAVLLHLLHNVVRPQDQTVVFVATKHHAEYLTELLTTQRVSCAHIYSALDPTARKINLAKFTLGKCSTLIVTDLAARGLDIPLLDNVINYSFPAKGKLFLHRVGRVARAGRSGTAYSLVAPDEIPYLLDLHLFLGRSLTLARPLKEPSGVAGVDGMLGRVPQSVVDEEDSGLQSTLEASLELRGLARVADNAQQQYVRSRPAPSPESIKRAKEMDLVGLGLHPLFSSRFEEEELQRLRLVDSIKNYRSRATIFEINASSRDLCSQVMRAKRQKDRKAIARFQQGQQGRQEQQEGPVGPAPSRPALQEKQPEKEEEEEAGESVEDIFSEVVGRKRQRSGPNRGAKRRREEARQRDQEFYIPYRPKDFDSERGLSISGEGGAFEQQAAGAVLDLMGDEAQNLTRGRQQLKWDRKKKRFVGQSGQEDKKKIKTESGRYISSSYKRDLYQKWKQKQKIDDRDSDEEGASDRRGPERRGGKRDRGQAGASRPHAPGTPAGRVRPELKTKQQILKQRRRAQKLHFLQRGGLKQLSARNRRRVQELQQGAFGRGARSKKGKMRKRM

SEQ ID NO: 43330 - protein, 483 aa, Homo sapiens
MSTARTENPVIMGLSSQNGQLRGPVKPTGGPGGGGTQTQQQMNQLKNTNTINNGTQQQAQSMTTTIKPGDDWKKTLKLPPKDLRIKTSDVTSTKGNEFEDYCLKRELLMGIFEMGWEKPSPIQEESIPIALSGRDILARAKNGTGKSGAYLIPLLERLDLKKDNIQAMVIVPTRELALQVSQICIQVSKHMGGAKVMATTGGTNLRDDIMRLDDTVHVVIATPGRILDLIKKGVAKVDHVQMIVLDEADKLLSQDFVQIMEDIILTLPKNRQILLYSATFPLSVQKFMNSHLQKPYEINLMEELTLKGVTQYYAYVTERQKVHCLNTLFSRLQINQSIIFCNSSQRVELLAKKISQLGYSCFYIHAKMRQEHRNRVFHDFRNGLCRNLVCTDLFTRGIDIQAVNVVINFDFPKLAETYLHRIGRSGRFGHLGLAINLITYDDRFNLKSIEEQLGTEIKPIPSNIDKSLYVAEYHSEPVEDEKP

SEQ ID NO: 43331 - protein, 483 aa, Homo sapiens; identical to SEQ ID NO: 43330

SEQ ID NO: 43332 - protein, 483 aa, Homo sapiens; identical to SEQ ID NO: 43330

SEQ ID NO: 43333 - protein, 187 aa, Homo sapiens [sequence omitted]

SEQ ID NO: 43334 - protein, 1712 aa, Homo sapiens
MERNVLTTFSQEMSQLILNEMPKAEYSSLFNDFVESEFFLIDGDSLLITCICEISFKPGQNLHFFYLVERYLVDLISKGGQFTIVFFKDAEYAYFNFPELLSLRTALILHLQKNTTIDVRTTFSRCLSKEWGSFLEESYPYFLIVADEGLNDLQTQLFNFLIIHSWARKVNVVLSSGQESDVLCLYAYLLPSMYRHQIFSWKNKQNIKDAYTTLLNQLERFKLSALAPLFGSLKWNNITEEAHKTVSLLTQVWPEGSDIRRVFCVTSCSLSLRMYHRFLGNREPSSGQETEIQQVNSNCLTLQEMEDLCKLHCLTVVFLLHLPLSQRACARVITSHWAEDMKPLLQMKKWCEYFILRNIHTFEFWNLNLIHLSDLNDELLLKNIAFYYENENVKGLHLNLGDTIMKDYEYLWNTVSKLVRDFEVGQPFPLRTTKVCFLEKKPSPIKDSSNEMVPNLGFIPTSSFVVDKFAGDILKDLPFLKSDDPIVTSLVKQKEFDELVHWHSHKPLSDDYDRSRCQFDEKSRDPRVLRSVQKYHVFQRFYGNSLETVSSKIIVTQTIKSKKDFSGPKSKKAHETKAEIIARENKKRLFAREEQKEEQKWNALSFSIEEQLKENLHSGIKSLEDFLKSCKSSCVKLQVEMVGLTACLKAWKEHCRSEEGKTTKDLSIAVQVMKRIHSLMEKYSELLQEDDRQLIARCLKYLGFDELASSLHPAQDAENDVKVKKRNKYSVGIGPARFQLQYMGHYLIRDERKDPDPRVQDFIPDTWQRELLDVVDKNESAVIVAPTSSGKTYASYYCMEKVLKESDDGVVVYVAPTKALVNQVAATVQNRFTKNLPSGEVLCGVFTREYRHDALNCQVLITVPACFEILLLAPHRQNWVKKIRYVIFDEVHCLGGEIGAEIWEHLLVMIRCPFLALSATISNPEHLTEWLQSVKWYWKQEDKIIENNTASKRHVGRQAGFPKDYLQVKQSYKVRLVLYGERYNDLEKHVCSIKHGDIHFDHFHPCAALTTDHIERYGFPPDLTLSPRESIQLYDAMFQIWKSWPRAQELCPENFIHFNNKLVIKKMDARKYEESLKAELTSWIKNGNVEQARMVLQNLSPEADLSPENMITMFPLLVEKLRKMEKLPALFFLFKLGAVENAAESVSTFLKKKQETKRPPKADKEAHVMANKLRKVKKSIEKQKIIDEKSQKKTRNVDQSLIHEAEHDNLVKCLEKNLEIPQDCTYADQKAVDTETLQKVFGRVKFERKGEELKALAERGIGYHHSAMSFKEKQLVEILFRKGYLRVVTATGTLALGVNMPCKSVVFAQNSVYLDALNYRQMSGRAGRRGQDLMGDVYFFDIPFPKIGKLIKSNVPELRGHFPLSITLVLRLMLLASKGDDPEDAKAKVLSVLKHSLLSFKQPRVMDMLKLYFLFSLQFLVKEGYLDQEGNPMGFAGLVSHLHYHEPSNLVFVSFLVNGLFHDLCQPTRKGSKHFSQDVMEKLVLVLAHLFGRRYFPPKFQDAHFEFYQSKVFLDDLPEDFSDALDEYNMKIMEDFTTFLRIVSKLADMNQEYQLPLSKIKFTGKECEDSQLVSHLMSCKEGRVAISPFVCLSGNFDDDLLRLETPNHVTLGTIGVNRSQAPVLLSQKFDNRGRKMSLNAYALDFYKHGSLIGLVQDNRMNEGDAYYLLKDFALTIKSISVSLRELCENEDDNVVLAFEQLSTTFWEKLNKV

SEQ ID NO: 43335 - protein, 120 aa, Homo sapiens
MERNVLTTFSQEMSQLILNEMPKAEYSSLFNDFVESEFFLIDGDSLLITCICEISFKPGQNLHFFYLVERYLVDLISKGGQFTIVFFKDAEYAYFNFPELLSLRTALILHLQKNTTIDVR

SEQ ID NO: 43336 - protein, 294 aa, Homo sapiens
MIRCPFLALSATISNPEHLTEWLQSVKWYWKQEDKIIENNTASKRHVGRQAGFPKDYLQVKQSYKVRLVLYGERYNDLEKHVCSIKHGDIHFDHFHPCAALTTDHIERYGFPPDLTLSPRESIQLYDAMFQIWKSWPRAQELCPENFIHFNNKLVIKKMDARKYEESLKAELTSWIKNGNVEQARMVLQNLSPEADLSPENMITMFPLLVEKLRKMEKLPALFFLFKLGAVENAAESVSTFLKKKQETKRPPKADKEAHVMANKLRKVKKSIEKQKIIDEKSQKNQKCGSKPNT

SEQ ID NO: 43337 - protein, 353 aa, Homo sapiens
MQSKRDCELWCERVNPENKAALEAWVRETGIRLVQVNGQRKYGGPPPGWVGSPPPAGSEVFIGRLPQDVYEHQLIPLFQRVGRLYEFRLMMTFSGLNRGFAYARYSSRRGAQAAIATLHNHPLRPSCPLLVCRSTEKCELSVDGLPPNLTRSALLLALQPLGPGLQEARLLPSPGPAPGQIALLKFSSHRAAAMAKKALVEGQSHLCGEQVAVEWLKPDLKQRLRQQLVGPFLRSPQPEGSQLALARDKLGFQGARATLQLLCQRMKLGSPVFLTKCLGIGPAGWHRFWYQVVIPGHPVPFSGLIWVVLTLDGRDGHEVAKDAVSVRLLQALSESGANLLWSAGAEAGTMVKQ

SEQ ID NO: 43338 - protein, 496 aa, Homo sapiens
MFAKATRNFLREVDADGDLIAVSNLNDSDKLQLLSLVTKKKRFWCWQRPKYQFLSLTLGDVLIEDQFPSPVVVESDFVKYEGKFANHVSGTLETALGKVKLNLGGSSRVESQSSFGTLRKQEVDLQQLIRDSAERTINLRNPVLQQVLEGRNEVLCVLTQKITTMQKCVISEHMQVEEKCGGIVGIQTKTVQVSATEDGNVTKDSNVVLEIPAATTIAYGVIELYVKLDGQFEFCLLRGKQGGFENKKRIDSVYLDPLVFREFAFIDMPDAAHGISSQDGPLSVLKQATLLLERNFHPFAELPEPQQTALSDIFQAVLFDDELLMVLEPVCDDLVSGLSPTVAVLGELKPRQQQDLVAFLQLVGCSLQGGCPGPEDAGSKQLFMTAYFLVSALAEMPDSAAALLGTCCKLQIIPTLCHLLRALSDDGVSDLEDPTLTPLKDTERFGIVQRLFASADISLERLKSSVKAVILKDSKVFPLLLCITLNGLCALGREHS

SEQ ID NO: 43339 - protein, 496 aa, Homo sapiens; identical to SEQ ID NO: 43338

SEQ ID NO: 43340 - protein, 332 aa, Homo sapiens
MQKCVISEHMQVEEKCGGIVGIQTKTVQVSATEDGNVTKDSNVVLEIPAATTIAYGVIELYVKLDGQFEFCLLRGKQGGFENKKRIDSVYLDPLVFREFAFIDMPDAAHGISSQDGPLSVLKQATLLLERNFHPFAELPEPQQTALSDIFQAVLFDDELLMVLEPVCDDLVSGLSPTVAVLGELKPRQQQDLVAFLQLVGCSLQGGCPGPEDAGSKQLFMTAYFLVSALAEMPDSAAALLGTCCKLQIIPTLCHLLRALSDDGVSDLEDPTLTPLKDTERFGIVQRLFASADISLERLKSSVKAVILKDSKVFPLLLCITLNGLCALGREHS

SEQ ID NO: 43341 - protein, 332 aa, Homo sapiens; identical to SEQ ID NO: 43340

SEQ ID NO: 43342 - protein, 524 aa, Homo sapiens
MANSAGFLGDLTTEGINKPGFYKGPAGSQVTLSSLGNQTRVLLEEQARHLLNEQEHATMAYYLDEYRGGSVSVEALVMALFKLLNTHAKFSLLSEVRGTISPQDLERFDHLVLRREIESMKARQPPGPGAGDTYSMVSYSDTGSSTGSHGTSTTVSSARNTLDLEETGEAVQGNINALPDVSVDDVRSTSQGLSSFKPLPRPPPLAQGNDLPLGQPRKLGREDLQPPSSMPSCSGTVFSAPQNRSPPAGTAPTPGTSSAQDLPSSPIYASVSPANPSSKRPLDAHLALVNQHPIGPFPRVQSPPHLKSPSAEATVAGGCLLPPSPSGHPDQTGTNQHFVMVEVHRPDSEPDVNEVRALPQTRTASTLSHLSDSGQTLSEDSGVDAGEAEASAPGRGRQSVSTKSRSSKELPRNERPTDGANKPPGLLEPTSTLVRVKKSAATLGIAIEGGANTRQPLPRIVTIQRGGSAHNCGQLKVGHVILEVNGLTLRGKEHREAARIIAEAFKTKDRDYIDFLVTEFNVML

SEQ ID NO: 43343 - protein, 907 aa, Homo sapiens
MNAPLDGLSVSSSSTGSLGSAAGAGGGGGAGLRLLSANVRQLHQALTALLSEAEREQFTHCLNAYHARRNVFDLVRTLRVLLDSPVKRRLLPMLRLVIPRSDQLLFDQYTAEGLYLPATTPYRQPAWGGPDSAGPGEVRLVSLRRAKAHEGLGFSIRGGSEHGVGIYVSLVEPGSLAEKEGLRVGDQILRVNDKSLARVTHAEAVKALKGSKKLVLSVYSAGRIPGGYVTNHIYTWVDPQGRSISPPSGLPQPHGGALRQQEGDRRSTLHLLQGGDEKKVNLVLGDGRSLGLTIRGGAEYGLGIYITGVDPGSEAEGSGLKVGDQILEVNGRSFLNILHDEAVRLLKSSRHLILTVKDVGRLPRARTTVDETKWIASSRIRETMANSAGFLGDLTTEGINKPGFYKGPAGSQVTLSSLGNQTRVLLEEQARHLLNEQEHATMAYYLDEYRGGSVSVEALVMALFKLLNTHAKFSLLSEVRGTISPQDLERFDHLVLRREIESMKARQPPGPGAGDTYSMVSYSDTGSSTGSHGTSTTVSSARNTLDLEETGEAVQGNINALPDVSVDDVRSTSQGLSSFKPLPRPPPLAQGNDLPLGQPRKLGREDLQPPSSMPSCSGTVFSAPQNRSPPAGTAPTPGTSSAQDLPSSPIYASVSPANPSSKRPLDAHLALVNQHPIGPFPRVQSPPHLKSPSAEATVAGGCLLPPSPSGHPDQTGTNQHFVMVEVHRPDSEPDVNEVRALPQTRTASTLSHLSDSGQTLSEDSGVDAGEAEASAPGRGRQSVSTKSRSSKELPRNERPTDGANKPPGLLEPTSTLVRVKKSAATLGIAIEGGANTRQPLPRIVTIQRGGSAHNCGQLKVGHVILEVNGLTLRGKEHREAARIIAEAFKTKDRDYIDFLVTEFNVML

SEQ ID NO: 43344 - protein, 345 aa, Homo sapiens
MNAPLDGLSVSSSSTGSLGSAAGAGGGGGAGLRLLSANVRQLHQALTALLSEAEREQFTHCLNAYHARRNVFDLVRTLRVLLDSPVKRRLLPMLRLVIPRSDQLLFDQYTAEGLYLPATTPYRQPAWGGPDSAGPGEVRLVSLRRAKAHEGLGFSIRGGSEHGVGIYVSLVEPGSLAEKEGLRVGDQILRVNDKSLARVTHAEAVKALKGSKKLVLSVYSAGRIPGGYVTNHIYTWVDPQGRSISPPSGLPQPHGGALRQQEGDRRSTLHLLQGGDEKKVSGVGKGGQPLRHRILPPNPEQQSCLEAARRGWFCPGSVFPQVCTEGWCFFFAFLFDLCSVCYNTG

SEQ ID NO: 43345 - protein, 556 aa, Homo sapiens
MHGSLEALLFLPQVTLSLAHAHLICSNAQLEMCVFPHRFLGDLTTEGINKPGFYKGPAGSQVTLSSLGNQTRVLLEEQARHLLNEQEHATMAYYLDEYRGGSVSVEALVMALFKLLNTHAKFSLLSEVRGTISPQDLERFDHLVLRREIESMKARQPPGPGAGDTYSMVSYSDTGSSTGSHGTSTTVSSARNTLDLEETGEAVQGNINALPDVSVDDVRSTSQGLSSFKPLPRPPPLAQGNDLPLGQPRKLGREDLQPPSSMPSCSGTVFSAPQNRSPPAGTAPTPGTSSAQDLPSSPIYASVSPANPSSKRPLDAHLALVNQHPIGPFPRVQSPPHLKSPSAEATVAGGCLLPPSPSGHPDQTGTNQHFVMVEVHRPDSEPDVNEVRALPQTRTASTLSHLSDSGQTLSEDSGVDAGEAEASAPGRGRQSVSTKSRSSKELPRNERPTDGANKPPGLLEPTSTLVRVKKSAATLGIAIEGGANTRQPLPRIVTIQRGGSAHNCGQLKVGHVILEVNGLTLRGKEHREAARIIAEAFKTKDRDYIDFLVTEFNVML

SEQ ID NO: 43346 - protein, 352 aa, Homo sapiens
MFAAATKSFVKQVGDGGRLVPVPSLSEADKYQPLSLVVKKKRCFLFPRYKFTSTPFTLKDILLGDREISAGISSYQLLNYEDESDVSLYGRRGNHIVNDVGINVAGSDSIAVKASFGIVTKHEVEVSTLLKEITTRKINFDHSLIRQSRSSRKAVLCVVMESIRTTRQCSLSVHAGIRGEAMRFHFMDEQNPKGRDKAIVFPAHTTIAFSVFELFIYLDGAFDLCVTSVSKGGFEREETATFALLYRLRNILFERNRRVMDVISRSQLYLDDLFSDYYDKPLSMTDISLKEGTHIRVNLLNHNIPKGPCILCGMGNFKRETVYGCFQCSVDGQKYVRLHAVPCFDIWHKRMK

SEQ ID NO: 43347 - protein, 352 aa, Homo sapiens; identical to SEQ ID NO: 43346

SEQ ID NO: 43348 - protein, 795 aa, Homo sapiens
MSKRHRLDLGEDYPSGKKRAGTDGKDRDRDRDREDRSKDRDRERDRGDREREREKEKEKELRASTNAMLISAGLPPLKASHSAHSTHSAHSTHSTHSAHSTHAGHAGHTSLPQCINPFTNLPHTPRYYDILKKRLQLPVWEYKDRFTDILVRHQSFVLVGETGSGKTTQIPQWCVEYMRSLPGPKRGVACTQPRRVAAMSVAQRVADEMDVMLGQEVGYSIRFEDCSSAKTILKYMTDGMLLREAMNDPLLERYGVIILDEAHERTLATDILMGVLKEVVRQRSDLKVIVMSATLDAGKFQIYFDNCPLLTIPGRTHPVEIFYTPEPERDYLEAAIRTVIQIHMCEEEEGDLLLFLTGQEEIDEACKRIKREVDDLGPEVGDIKIIPLYSTLPPQQQQRIFEPPPPKKQNGAIGRKVVVSTNIAETSLTIDGVVFVIDPGFAKQKVYNPRIRVESLLVTAISKASAQQRAGRAGRTRPGKCFRLYTEKAYKTEMQDNTYPEILRSNLGSVVLQLKKLGIDDLVHFDFMDPPAPETLMRALELLNYLAALNDDGDLTELGSMMAEFPLDPQLAKMVIASCDYNCSNEVLSITAMLSVPQCFVRPTEAKKAADEAKMRFAHIDGDHLTLLNVYHAFKQNHESVQWCYDNFINYRSLMSADNVRQQLSRIMDRFNLPRRSTDFTSRDYYINIRKALVTGYFMQVAHLERTGHYLTVKDNQVVQLHPSTVLDHKPEWVLYNEFVLTTKNYIRTCTDIKPEWLVKIAPQYYDMSNFPQCEAKRQLDRIIAKLQSKEYSQY

SEQ ID NO: 43349 - protein, 784 aa, Homo sapiens
MSKRHRLDLGEDYPSGKKRAGTDGKDRDRDRERDRGDREREREKEKEKELRASTNAMLISAGLPPLKASHSAHSTHSAHSTHSTHSAHSTHAGHAGHTSLPQCINPFTNLPHTPRYYDILKKRLQLPVWEYKDRFTDILVRHQSFVLVGETGSGKTTQIPQWCVEYMRSLPGPKRGVACTQPRRVAAMSVAQRVADEMDVMLGQEVGYSIRFEDCSSAKTILKYMTDGMLLREAMNDPLLERYGVIILDEAHERTLATDILMGVLKEVVRQRSDLKVIVMSATLDAGKFQIYFDNCPLLTIPGRTHPVEIFYTPEPERDYLEAAIRTVIQIHMCEEEEGDLLLFLTGQEEIDEACKRIKREVDDLGPEVGDIKIIPLYSTLPPQQQQRIFEPPPPKKQNGAIGRKVVVSTNIAETSLTIDGVVFVIDPGFAKQKVYNPRIRVESLLVTAISKASAQQRAGRAGRTRPGKCFRLYTEKAYKTEMQDNTYPEILRSNLGSVVLQLKKLGIDDLVHFDFMDPPAPETLMRALELLNYLAALNDDGDLTELGSMMAEFPLDPQLAKMVIASCDYNCSNEVLSITAMLSVPQCFVRPTEAKKAADEAKMRFAHIDGDHLTLLNVYHAFKQNHESVQWCYDNFINYRSLMSADNVRQQLSRIMDRFNLPRRSTDFTSRDYYINIRKALVTGYFMQVAHLERTGHYLTVKDNQVVQLHPSTVLDHKPEWVLYNEFVLTTKNYIRTCTDIKPEWLVKIAPQYYDMSNFPQCEAKRQLDRIIAKLQSKEYSQY

SEQ ID NO: 43350 - protein, 560 aa, Homo sapiens
MESQPAQECLMQMFLPIEPACFVEWLGTSPSQLGVVMVDEAHERTLHTDILFGLIKDVARFRPELKVLVASATMDTARFSTFFDDAPVFRIPGRRFPVDIFYTKAPEADYLEACVVSVLQIHVTQPPGDILVFLTGQEEIEAACEMLQDRCRRLGSKIRELLVLPIYANLPSDMQARIFQPTPPGARKVVVATNIAETSLTIEGIIYVLDPGFCKQKSYNPRTGMESLTVTPCSKASANQRAGRAGRVAAGKCFRLYTAWAYQHELEETTVPEIQRTSLGNVVLLLKSLGIHDLMHFDFLDPPPYETLLLALEQLYALGALNHLGELTTSGRKMAELPVDPMLSKMILASEKYSCSEEILTVAAMLSVNNSIFYRPKDKVVHADNARVNFFLPGGDHLVLLNVYTQWAESGYSSQWCYENFVQFRSMRRARDVREQLEGLLERVEVGLSSCQGDYIRVRKAITAGYFYHTARLTRSGYRTVKQQQTVFIHPNSSLFEQQPRWLLYHELVLTTKEFMRQVLEIESSWLLEVAPHYYKAKELEDPHAKKMPKKIGKTREELG

SEQ ID NO: 43351 - protein, 1041 aa, Homo sapiens
MATPAGLERWVQDELHSVLGLSERHVAQFLIGTAQRCTSAEEFVQRLRDTDTLDLSGPARDFALRLWNKVPRKAVVEKPARAAEREARALLEKNRSYRLLEDSEESSEETVSRAGSSLQKKRKKRKHLRKKREEEEEEEASEKGKKKTGGSKQQTEKPESEDEWERTERERLQDLEERDAFAERVRQRDKDRTRNVLERSDKKAYEEAQKRLKMAEEDRKAMVPELRKKSRREYLAKREREKLEDLEAELADEEFLFGDVELSRHERQELKYKRRVRDLAREYRAAGEQEKLEATNRYHMPKETRGQPARAVDLVEEESGAPGEEQRRWEEARLGAASLKFGARDAASQEPKYQLVLEEEETIEFVRATQLQGDEEPSAPPTSTQAQQKESIQAVRRSLPVFPFREELLAAIANHQVLIIEGETGSGKTTQIPQYLFEEGYTNKGMKIACTQPRRVAAMSVAARVAREMGVKLGNEVGYSIRFEDCTSERTVLRYMTDGMLLREFLSEPDLASYSVVMVDEAHERTLHTDILFGLIKDVARFRPELKVLVASATMDTARFSTFFDDAPVFRIPGRRFPVDIFYTKAPEADYLEACVVSVLQIHVTQPPGDILVFLTGQEEIEAACEMLQDRCRRLGSKIRELLVLPIYANLPSDMQARIFQPTPPGARKVVVATNIAETSLTIEGIIYVLDPGFCKQKSYNPRTGMESLTVTPCSKASANQRAGRAGRVAAGKCFRLYTAWAYQHELEETTVPEIQRTSLGNVVLLLKSLGIHDLMHFDFLDPPPYETLLLALEQLYALGALNHLGELTTSGRKMAELPVDPMLSKMILASEKYSCSEEILTVAAMLSVNNSIFYRPKDKVVHADNARVNFFLPGGDHLVLLNVYTQWAESGYSSQWCYENFVQFRSMRRARDVREQLEGLLERVEVGLSSCQGDYIRVRKAITAGYFYHTARLTRSGYRTVKQQQTVFIHPNSSLFEQQPRWLLYHELVLTTKEFMRQVLEIESSWLLEVAPHYYKAKELEDPHAKKMPKKIGKTREELG

SEQ ID NO: 43352 - protein, 560 aa, Homo sapiens
MESQPAQECLMQMFLPIEPACFVEWLGTSPSQLGVVMVDEAHERTLHTDILFGLIKDVARFRPELKVLVASATMDTARFSTFFDGAPVFRIPGRRFPVDIFYTKAPEADYLEACVVSVLQIHVTQPPGDILVFLTGQEEIEAACEMLQDRCRRLGSKIRELLVLPIYANLPSDMQARIFQPTPPGARKVVVATNIAETSLTIEGIIYVLDPGFCKQKSYNPRTGMESLTVTPCSKASANQRAGRAGRVAAGKCFRLYTAWAYQHELEETTVPEIQRTSLGNVVLLLKSLGIHDLMHFDFLDPPPYETLLLALEQLYALGALNHLGELTTSGRKMAELPVDPMLSKMILASEKYSCSEEILTVAAMLSVNNSIFYRPKDKVVHADNARVNFFLPGGDHLVLLNVYTQWAESGYSSQWCYENFVQFRSMRRARDVREQLEGLLERVEVGLSSCQGDYIRVRKAITAGYFYHTARLTRSGYRTVKQQQTVFIHPNSSLFEQQPRWLLYHELVLTTKEFMRQVLEIESSWLLEVAPHYYKAKELEDPHAKKMPKKIGKTREELG

SEQ ID NO: 43353 - protein, 1041 aa, Homo sapiens [sequence omitted]

SEQ ID NO: 43354 - protein, 560 aa, Homo sapiens; identical to SEQ ID NO: 43350

SEQ ID NO: 43355 - protein, 295 aa, Homo sapiens
MSEDPRGPKVPRKAVVEKPARAAEREARALLEKNRSYRLLEDSEESSEETVSRAGSSLQKKRKKRKHLRKKREEEEEEEASEKGKKKTGGSKQQTEKPESEDEWERTERERLQDLEERDAFAERVRQRDKDRTRNVLERSDKKAYEEAQKRLKMAEEDRKAMVPELRKKSRREYLAKREREKLEDLEAELADEEFLFGDVELSRHERQELKYKRRVRDLAREYRAAGEQEKLEATNRYHMPKETRGQPARAVDLVEEESGAPGEEQRRWEEARLGAASLKFGARDAASQEPKYQL

SEQ ID NO: 43356 - protein, 1041 aa, Homo sapiens; identical to SEQ ID NO: 43351

SEQ ID NO: 43357 - protein, 1041 aa, Homo sapiens; identical to SEQ ID NO: 43351

SEQ ID NO: 43358 - protein, 1041 aa, Homo sapiens; identical to SEQ ID NO: 43351

SEQ ID NO: 43359 - protein, 295 aa, Homo sapiens; identical to SEQ ID NO: 43355

SEQ ID NO: 43360 - protein, 295 aa, Homo sapiens; identical to SEQ ID NO: 43355

SEQ ID NO: 43361 - protein, 560 aa, Homo sapiens; identical to SEQ ID NO: 43350

SEQ ID NO: 43362 - protein, 295 aa, Homo sapiens; identical to SEQ ID NO: 43355

SEQ ID NO: 43363 - protein, 295 aa, Homo sapiens; identical to SEQ ID NO: 43355

SEQ ID NO: 43364 - protein, 295 aa, Homo sapiens; identical to SEQ ID NO: 43355

SEQ ID NO: 43365 - protein, 295 aa, Homo sapiens; identical to SEQ ID NO: 43355

SEQ ID NO: 43366 - protein, 560 aa, Homo sapiens; identical to SEQ ID NO: 43350

SEQ ID NO: 43367 - protein, 295 aa, Homo sapiens; identical to SEQ ID NO: 43355

SEQ ID NO: 43368 - protein, 669 aa, Homo sapiens
MATPAGLERWVQDELHSVLGLSERHVAQFLIGTAQRCTSAEEFVQRLRDTDTLDLSGPARDFALRLWNKVPRKAVVEKPARAAEREARALLEKNRSYRLLEDSEESSEETVSRAGSSLQKKRKKRKHLRKKREEEEEEEASEKGKKKTGGSKQQTEKPESEDEWERTERERLQDLEERDAFAERVRQRDKDRTRNVLERSDKKAYEEAQKRLKMAEEDRKAMVPELRKKSRREYLAKREREKLEDLEAELADEEFLFGDVELSRHERQELKYKRRVRDLAREYRAAGEQEKLEATNRYHMPKETRGQPARAVDLVEEESGAPGEEQRRWEEARLGAASLKFGARDAASQEPKYQLVLEEEETIEFVRATQLQGDEEPSAPPTSTQAQQKESIQAVRRSLPVFPFREELLAAIANHQVLIIEGETGSGKTTQIPQYLFEEGYTNKGMKIACTQPRRVAAMSVAARVAREMGVKLGNEVGYSIRFEDCTSERTVLRYMTDGMLLREFLSEPDLASYSVVMVDEAHERTLHTDILFGLIKDVARFRPELKVLVASATMDTARFSTFFDDAPVFRIPGRRFPVDIFYTKAPEADYLEACVVSVLQIHVTQPPGDILVFLTGQEEIEAACEMLQDRCRRLGSKIRELLVLPIYANLPSDMQARIFQPTPPGARK

SEQ ID NO: 43369 - protein, 1041 aa, Homo sapiens; identical to SEQ ID NO: 43351

SEQ ID NO: 43370 - protein, 560 aa, Homo sapiens; identical to SEQ ID NO: 43350

SEQ ID NO: 43371 - protein, 560 aa, Homo sapiens; identical to SEQ ID NO: 43350

SEQ ID NO: 43372 - protein, 188 aa, Homo sapiens
MESQPAQECLMQMFLPIEPACFVEWLGTSPSQLGVVMVDEAHERTLHTDILFGLIKDVARFRPELKVLVASATMDTARFSTFFDDAPVFRIPGRRFPVDIFYTKAPEADYLEACVVSVLQIHVTQPPGDILVFLTGQEEIEAACEMLQDRCRRLGSKIRELLVLPIYANLPSDMQARIFQPTPPGARK

SEQ ID NO: 43373 - protein, 1041 aa, Homo sapiens; identical to SEQ ID NO: 43351

SEQ ID NO: 43374 - protein, 147 aa, Homo sapiens
MATPAGLERWVQDELHSVLGLSERHVAQFLIGTAQRCTSAEEFVQRLRDTDTLDLSGPARDFALRLWNKVPRKAVVEKPARAAEREARALLEKNRSYRLLEDSEESSEETVSRAGSSLQKKRKKRKHLRKKREEEEEEEASEKGKKK

SEQ ID NO: 43375 - protein, 1369 aa, Homo sapiens
MGGKNKKHKAPAAAVVRAAVSASRAKSAEAGIAGEAQSKKPVSRPATAAAAAAGSREPRVKQGPKIYSFNSTNDSSGPANLDKSILKVVINNKLEQRIIGVINEHKKQNNDKGMISGRLTAKKLQDLYMALQAFSFKTKDIEDAMTNTLLYGGDLHSALDWLCLNLSDDALPEGFSQEFEEQQPKSRPKFQSPQIQATISPPLQPKTKTYEEDPKSKPKKEEKNMEVNMKEWILRYAEQQNEEEKNENSKSLEEEEKFDPNERYLHLAAKLLDAKEQAATFKLEKNKQGQKEAQEKIRKFQREMETLEDHPVFNPAMKISHQQNERKKPPVATEGESALNFNLFEKSAAATEEEKDKKKEPHDVRNFDYTARSWTGKSPKQFLIDWVRKNLPKSPNPSFEKVPVGRYWKCRVRVIKSEDDVLVVCPTILTEDGMQAQHLGATLALYRLVKGQSVHQLLPPTYRDVWLEWSDAEKKREELNKMETNKPRDLFIAKLLNKLKQQQQQQQQHSENKRENSEDPEESWENLVSDEDFSALSLESANVEDLEPVRNLFRKLQSTPKYQKLLKERQQLPVFKHRDSIVETLKRHRVVVVAGETGSGKSTQVPHFLLEDLLLNEWEASKCNIVCTQPRRISAVSLANRVCDELGCENGPGGRNSLCGYQIRMESRACESTRLLYCTTGVLLRKLQEDGLLSNVSHVIVDEVHERSVQSDFLLIILKEILQKRSDLHLILMSATVDSEKFSTYFTHCPILRISGRSYPVEVFHLEDIIEETGFVLEKDSEYCQKFLEEEEEVTINVTSKAGGIKKYQEYIPVQTGAHADLNPFYQKYSSRTQHAILYMNPHKINLDLILELLAYLDKSPQFRNIEGAVLIFLPGLAHIQQLYDLLSNDRRFYSERYKVIALHSILSTQDQAAAFTLPPPGVRKIVLATNIAETGITIPDVVFVIDTGRTKENKYHESSQMSSLVETFVSKASALQRQGRAGRVRDGFCFRMYTRERFEGFMDYSVPEILRVPLEELCLHIMKCNLGSPEDFLSKALDPPQLQVISNAMNLLRKIGACELNEPKLTPLGQHLAALPVNVKIGKMLIFGAIFGCLDPVATLAAVMTEKSPFTTPIGRKDEADLAKSALAMADSDHLTIYNAYLGWKKARQEGGYRSEITYCRRNFLNRTSLLTLEDVKQELIKLVKAAGFSSSTTSTSWEGNRASQTLSFQEIALLKAVLVAGLYDNVGKIIYTKSVDVTEKLACIVETAQGKAQVHPSSVNRDLQTHGWLLYQEKIRYARVYLRETTLITPFPVLLFGGDIEVQHRERLLSIDGWIYFQAPVKIAVIFKQLRVLIDSVLRKKLENPKMSLENDKILQIITELIKTENN

SEQ ID NO: 43376 - protein, 662 aa, Homo sapiens
MEEEGLECPNSSSEKRYFPESLDSSDGDEEEVLACEDLELNPFDGLPYSSRYYKLLKEREDLPIWKEKYSFMENLLQNQIVIVSGDAKCGKSAQVPQWCAEYCLSIHYQHGGVICTQVHKQTVVQLALRVADEMDVNIGHEVGYVIPFENCCTNETILRYCTDDMLQREMMSNPFLGSYGVIILDDIHERSIATDVLLGLLKDVLLARPELKLIINSSPHLISKLNSYYGNVPVIEVKNKHPVEVVYLSEAQKDSFESILRLIFEIHHSGEKGDIVVFLACEQVYNPRIRANSLVMQPISQSQAEIRKQILGSSSSGKFFCLYTEEFASKDMTPLKPAEMQEANLTSMVLFMKRIDIAGLGHCDFMNRPAPESLMQALEDLDYLAALDNDGNLSEFGIIMSEFPLDPQLSKSILASCEFDCVDEVLTIAAMVTAPNCFSHVPHGAEEAALTCWKTFLHPEGDHFTLISIYKAYQDTTLNSSSEYCVEKWCRDYFLNCSALRMADVIRAELLEIIKRIELPYAEPAFGSKENTLNIKKALLSGYFMQIARDVDGSGNYLMLTHKQVAQLHPLSGYSITKKMPEWVLFHKFSISENNYIRITSEISPELFMQLVPQYYFSNLPPSESKDILQQVVDHLSPVSTMNKEQQMCETCPETEQRCTLQ

SEQ ID NO: 43377 - protein, 743 aa, Homo sapiens
MEEEGLECPNSSSEKRYFPESLDSSDGDEEEVLACEDLELNPFDGLPYSSRYYKLLKEREDLPIWKEKYSFMENLLQNQIVIVSGDAKCGKSAQVPQWCAEYCLSIHYQHGGVICTQVHKQTVVQLALRVADEMDVNIGHEVGYVIPFENCCTNETILRYCTDDMLQREMMSNPFLGSYGVIILDDIHERSIATDVLLGLLKDVLLARPELKLIINSSPHLISKLNSYYGNVPVIEVKNKHPVEVVYLSEAQKDSFESILRLIFEIHHSGEKGDIVVFLACEQDIEKVCETVYQGSNLNPDLGELVVVPLYPKEKCSLFKPLDETEKRCQVYQRRVVLTTSSGEFLIWSNSVRFVIDVGVERRKVYNPRIRANSLVMQPISQSQAEIRKQILGSSSSGKFFCLYTEEFASKDMTPLKPAEMQEANLTSMVLFMKRIDIAGLGHCDFMNRPAPESLMQALEDLDYLAALDNDGNLSEFGIIMSEFPLDPQLSKSILASCEFDCVDEVLTIAAMVTAPNCFSHVPHGAEEAALTCWKTFLHPEGDHFTLISIYKAYQDTTLNSSSEYCVEKWCRDYFLNCSALRMADVIRAELLEIIKRIELPYAEPAFGSKENTLNIKKALLSGYFMQIARDVDGSGNYLMLTHKQVAQLHPLSGYSITKKMPEWVLFHKFSISENNYIRITSEISPELFMQLVPQYYFSNLPPSESKDILQQVVDHLSPVSTMNKEQQMCETCPETEQRCTLQ

SEQ ID NO: 43378 - protein, 367 aa, Homo sapiens
MQPISQSQAEIRKQILGSSSSGKFFCLYTEEFASKDMTPLKPAEMQEANLTSMVLFMKRIDIAGLGHCDFMNRPAPESLMQALEDLDYLAALDNDGNLSEFGIIMSEFPLDPQLSKSILASCEFDCVDEVLTIAAMVTAPNCFSHVPHGAEEAALTCWKTFLHPEGDHFTLISIYKAYQDTTLNSSSEYCVEKWCRDYFLNCSALRMADVIRAELLEIIKRIELPYAEPAFGSKENTLNIKKALLSGYFMQIARDVDGSGNYLMLTHKQVAQLHPLSGYSITKKMPEWVLFHKFSISENNYIRITSEISPELFMQLVPQYYFSNLPPSESKDILQQVVDHLSPVSTMNKEQQMCETCPETEQRCTLQ

SEQ ID NO: 43379 - protein, 112 aa, Homo sapiens
MEEEGLECPNSSSEKRYFPESLDSSDGDEEEVLACEDLELNPFDGLPYSSRYYKLLKEREDLPIWKEKYSFMENLLQNQIVIVSGDAKCGKSAQVPQWCAEYCLSIHYQHGG

SEQ ID NO: 43380 - protein, 707 aa, Homo sapiens
MPEEAGFPPAKRFRPGSGPPSRAGSFPPGRQVVMLLTAGSGGRGGGGGRRQQPPLAQPSASPYPEAVELQRRSLPIFQARGQLLAQLRNLDNAVLIGETGSGKTTQIPQYLYEGGISRQGIIAVTQPRRVAAISLATRVSDEKRTELGKLVGYTVRFDDVTSEDTRIKFLTDGMLLREAISDSLLRKYSCVILDEAHERTIHTDVLFGVVKAAQKRRKELGKLPLKVIVMSATMDVDLFSQYFNGAPVLYLEGRQHPIQVFYTKQPQNDYLHAALVSVFQIHQEAPSSQDILVFLTGQEEIEAMSKTCRDIAKHLPDGCPAMLVLPLYASLPYAQQLRVFQGAPKGYRKVIISTNIAETSITITGIKYVVDTGMVKAKKYNPDSGLEVLAVQRVSKTQAWQRTGRAGREDSGICYRLYTEDEFEKFDKMTVPEIQRCNLASVMLQLLAMKVPNVLTFDFMSKPSPDHIQAAIAQLDLLGALEHKDDQLTLTPMGRKMAAFPLEPKFAKTILMSPKFHCTEEILTIVSLLSVDSVLHNPPSRREEVQGVRKKFISSEGDHMTLLNIYRTFKNLGGNKDWCKENFVNSKNMTLVAEVRAQLRDICLKMSMPIASSRGDVESVRRCLAHSLFMSTAELQPDGTYATTDTHQPVAIHPSSVLFHCKPACVVYTELLYTNKCYMRDLCVIDAQWLYEAAPEYFRRKLRTARN

SEQ ID NO: 43381 - protein, 483 aa, Homo sapiens
MPEEAGFPPAKRFRPGSGPPSRAGSFPPGRQVVMLLTAGSGGRGGGGGRRQQPPLAQPSASPYPEAVELQRRSLPIFQARGQLLAQLRNLDNAVLIGSPFFTGHPGVPHWAGGDRSHEQDVPRHCKAPPRRLPCDAGPSSVRLPALCTAAPSLPRGPKDSGLEVLAVQRVSKTQAWQRTGRAGREDSGICYRLYTEDEFEKFDKMTVPEIQRCNLASVMLQLLAMKVPNVLTFDFMSKPSPDHIQAAIAQLDLLGALEHKDDQLTLTPMGRKMAAFPLEPKFAKTILMSPKFHCTEEILTIVSLLSVDSVLHNPPSRREEVQGVRKKFISSEGDHMTLLNIYRTFKNLGGNKDWCKENFVNSKNMTLVAEVRAQLRDICLKMSMPIASSRGDVESVRRCLAHSLFMSTAELQPDGTYATTDTHQPVAIHPSSVLFHCKPACVVYTELLYTNKCYMRDLCVIDAQWLYEAAPEYFRRKLRTARN

SEQ ID NO: 43382 - protein, 979 aa, Homo sapiens
MSYDYHQNWGRDGGPRSSGGGYGGGPAGGHGGNRGSGGGGGGGGGGRGGRGRHPGHLKGREIGMWYAKKQGQKNKEAERQERAVVHMDERREEQIVQLLNSVQAKNDKESEAQISWFAPEDHGYGTEVSTKNTPCSENKLDIQEKKLINQEKKMFRIRNRSYIDRDSEYLLQENEPDGTLDQKLLEDLQKKKNDLRYIEMQHFREKLPSYGMQKELVNLIDNHQVTVISGETGCGKTTQVTQFILDNYIERGKGSACRIVCTQPRRISAISVAERVAAERAESCGSGNSTGYQIRLQSRLPRKQGSILYCTTGIILQWLQSDPYLSSVSHIVLDEIHERNLQSDVLMTVVKDLLNFRSDLKVILMSATLNAEKFSEYFGNCPMIHIPGFTFPVVEYLLEDVIEKIRYVPEQKEHRSQFKRGFMQGHVNRQEKEEKEAIYKERWPDYVRELRRRYSASTVDVIEMMEDDKVDLNLIVALIRYIVLEEEDGAILVFLPGWDNISTLHDLLMSQVMFKSDKFLIIPLHSLMPTVNQTQVFKRTPPGVRKIVIATNIAETSITIDDVVYVIDGGKIKETHFDTQNNISTMSAEWVSKANAKQRKGRAGRVQPGHCYHLYNGLRASLLDDYQLPEILRTPLEELCLQIKILRLGGIAYFLSRLMDPPSNEAVLLSIRHLMELNALDKQEELTPLGVHLARLPVEPHIGKMILFGALFCCLDPVLTIAASLSFKDPFVIPLGWEEARRRGFRYEKDYCWEYFLSSNTLQMLHNMKGQFAEHLLGAGFVSSRNPKDPESNINSDNEKIIKAVICAGLYPKVAKIRLNLGKKRKMVKVYTKTDGLVAVHPKSVNVEQTDFHYNWLIYHLKMRTSSIYLYDCTEVSPYCLLFFGGDISIQKDNDQETIAVDEWIVFQSPARIAHLVKELRKELDILLQEKIESPHPVDWNDTKSRDCAVLSAIIDLIKTQEKATPRNFPPRFQDGYYS

SEQ ID NO: 43383 - protein, 994 aa, Homo sapiens
MSYDYHQNWGRDGGPRSSGGGYGGGPAGGHGGNRGSGGGGGGGGGGRGGRGRHPGHLKGREIGMWYAKKQGQKNKEAERQERAVVHMDERREEQIVQLLNSVQAKNDKESEAQISWFAPEDHGYGTEVSTKNTPCSENKLDIQEKKLINQEKKMFRIRNRSYIDRDSEYLLQENEPDGTLDQKLLEDLQKKKNDLRYIEMQHFREKLPSYGMQKELVNLIDNHQVTVISGETGCGKTTQVTQFILDNYIERGKGSACRIVCTQPRRISAISVAERVAAERAESCGSGNSTGYQIRLQSRLPRKQGSILYCTTGIILQWLQSDPYLSSVSHIVLDEIHERNLQSDVLMTVVKDLLNFRSDLKVILMSATLNAEKFSEYFGNCPMIHIPGFTFPVVEYLLEDVIEKIRYVPEQKEHRSQFKRGFMQGHVNRQEKEEKEAIYKERWPDYVRELRRRYSASTVDVIEMMEDDKVDLNLIVALIRYIVLEEEDGAILVFLPGWDNISTLHDLLMSQVMFKSVNQTQVFKRTPPGVRKIVIATNIAETSITIDDVVYVIDGGKIKETHFDTQNNISTMSAEWVSKANAKQRKGRAGRVQPGHCYHLYNGLRASLLDDYQLPEILRTPLEELCLQIKILRLGGIAYFLSRLMDPPSNEAVLLSIRHLMELNALDKQEELTPLGVHLARLPVEPHIGKMILFGALFCCLDPVLTIAASLSFKDPFVIPLGKEKIADARRKELAKDTRSDHLTVVNAFEGWEEARRRGFRYEKDYCWEYFLSSNTLQMLHNMKGQFAEHLLGAGFVSSRNPKDPESNINSDNEKIIKAVICAGLYPKVAKIRLNLGKKRKMVKVYTKTDGLVAVHPKSVNVEQTDFHYNWLIYHLKMRTSSIYLYDCTEVSPYCLLFFGGDISIQKDNDQETIAVDEWIVFQSPARIAHLVKELRKELDILLQEKIESPHPVDWNDTKSRDCAVLSAIIDLIKTQEKATPRNFPPRFQDGYYS

SEQ ID NO: 43384 - protein, 1008 aa, Homo sapiens
MSYDYHQNWGRDGGPRSSGGGYGGGPAGGHGGNRGSGGGGGGGGGGRGGRGRHPGHLKGREIGMWYAKKQGQKNKEAERQERAVVHMDERREEQIVQLLNSVQAKNDKESEAQISWFAPEDHGYGTEVSTKNTPCSENKLDIQEKKLINQEKKMFRIRNRSYIDRDSEYLLQENEPDGTLDQKLLEDLQKKKNDLRYIEMQHFREKLPSYGMQKELVNLIDNHQVTVISGETGCGKTTQVTQFILDNYIERGKGSACRIVCTQPRRISAISVAERVAAERAESCGSGNSTGYQIRLQSRLPRKQGSILYCTTGIILQWLQSDPYLSSVSHIVLDEIHERNLQSDVLMTVVKDLLNFRSDLKVILMSATLNAEKFSEYFGNCPMIHIPGFTFPVVEYLLEDVIEKIRYVPEQKEHRSQFKRGFMQGHVNRQEKEEKEAIYKERWPDYVRELRRRYSASTVDVIEMMEDDKVDLNLIVALIRYIVLEEEDGAILVFLPGWDNISTLHDLLMSQVMFKSDKFLIIPLHSLMPTVNQTQVFKRTPPGVRKIVIATNIAETSITIDDVVYVIDGGKIKETHFDTQNNISTMSAEWVSKANAKQRKGRAGRVQPGHCYHLYNGLRASLLDDYQLPEILRTPLEELCLQIKILRLGGIAYFLSRLMDPPSNEAVLLSIRHLMELNALDKQEELTPLGVHLARLPVEPHIGKMILFGALFCCLDPVLTIAASLSFKDPFVIPLGKEKIADARRKELAKDTRSDHLTVVNAFEGWEEARRRGFRYEKDYCWEYFLSSNTLQMLHNMKGQFAEHLLGAGFVSSRNPKDPESNINSDNEKIIKAVICAGLYPKVAKIRLNLGKKRKMVKVYTKTDGLVAVHPKSVNVEQTDFHYNWLIYHLKMRTSSIYLYDCTEVSPYCLLFFGGDISIQKDNDQETIAVDEWIVFQSPARIAHLVKELRKELDILLQEKIESPHPVDWNDTKSRDCAVLSAIIDLIKTQEKATPRNFPPRFQDGYYS

SEQ ID NO: 43385 - protein, 994 aa, Homo sapiens
MSYDYHQNWGRDGGPRSSGGGYGGGPAGGHGGNRGSGGGGGGGGGGRGGRGRHPGHLKGREIGMWYAKKQGQKNKEAERQERAVVHMDERREEQIVQLLNSVQAKNDKESEAQISWFAPEDHGYGTEVSTKNTPCSENKLDIQEKKLINQEKKMFRIRNRSYIDRDSEYLLQENEPDGTLDQKLLEDLQKKKNDLRYIEMQHFREKLPSYGMQKELVNLIDNHQVTVISGETGCGKTTQVTQFILDNYIERGKGSACRIVCTQPRRISAISVAERVAAERAESCGSGNSTGYQIRLQSRLPRKQGSILYCTTGIILQWLQSDPYLSSVSHIVLDEIHERNLQSDVLMTVVKDLLNFRSDLKVILMSATLNAEKFSEYFGNCPMIHIPGFTFPVVEYLLEDVIEKIRYVPEQKEHRSQFKRGFMQGHVNRQEKEEKEAIYKERWPDYVRELRRRYSASTVDVIEMMEDDKVDLNLIVALIRYIVLEEEDGAILVFLPGWDNISTLHDLLMSQVMFKSGTMSQVFKRTPPGVRKIVIATNIAETSITIDDVVYVIDGGKIKETHFDTQNNISTMSAEWVSKANAKQRKGRAGRVQPGHCYHLYNGLRASLLDDYQLPEILRTPLEELCLQIKILRLGGIAYFLSRLMDPPSNEAVLLSIRHLMELNALDKQEELTPLGVHLARLPVEPHIGKMILFGALFCCLDPVLTIAASLSFKDPFVIPLGKEKIADARRKELAKDTRSDHLTVVNAFEGWEEARRRGFRYEKDYCWEYFLSSNTLQMLHNMKGQFAEHLLGAGFVSSRNPKDPESNINSDNEKIIKAVICAGLYPKVAKIRLNLGKKRKMVKVYTKTDGLVAVHPKSVNVEQTDFHYNWLIYHLKMRTSSIYLYDCTEVSPYCLLFFGGDISIQKDNDQETIAVDEWIVFQSPARIAHLVKELRKELDILLQEKIESPHPVDWNDTKSRDCAVLSAIIDLIKTQEKATPRNFPPRFQDGYYS

SEQ ID NO: 43386 - protein, 1227 aa, Homo sapiens
MGDTSEDASIHRLEGTDLDCQVGGLICKSKSAASEQHVFKAPAPRPSLLGLDLLASLKRREREEKDDGEDKKKSKVSSYKDWEESKDDQKDAEEEGGDQAGQNIRKDRHYRSARVETPSHPGGVSEEFWERSRQRERERREHGVYASSKEEKDWKKEKSRDRDYDRKRDRDERDRSRHSSRSERDGGSERSSRRNEPESPRHRPKDAATPSRSTWEEEDSGYGSSRRSQWESPSPTPSYRDSERSHRLSTRDRDRSVRGKYSDDTPLPTPSYKYNEWADDRRHLGSTPRLSRGRGRREEGEEGISFDTEEERQQWEDDQRQADRDWYMMDEGYDEFHNPLAYSSEDYVRRREQHLHKQKQKRISAQRRQINEDNERWETNRMLTSGVVHRLEVDEDFEEDNAAKVHLMVHNLVPPFLDGRIVFTKQPEPVIPVKDATSDLAIIARKGSQTVRKHREQKERKKAQHKHWELAGTKLGDIMGVKKEEEPDKAVTEDGKVDYRTEQKFADHMKRKSEASSEFAKKKSILEQRQYLPIFAVQQELLTIIRDNSIVIVVGETGSGKTTQLTQYLHEDGYTDYGMIGCTQPRRVAAMSVAKRVSEEMGGNLGEEVGYAIRFEDCTSENTLIKYMTDGILLRESLREADLDHYSAIIMDEAHERSLNTDVLFGLLREVVARRSDLKLIVTSATMDAEKFAAFFGNVPIFHIPGRTFPVDILFSKTPQEDYVEAAVKQSLQVHLSGAPGDILIFMPGQEDIEVTSDQIVEHLEELENAPALAVLPIYSQLPSDLQAKIFQKAPDGVRKCIVATNIAETSLTVDGIMFVIDSGYCKLKVFNPRIGMDALQIYPISQANANQRSGRAGRTGPGQCFRLYTQSAYKNELLTTTVPEIQRTNLANVVLLLKSLGVQDLLQFHFMDPPPEDNMLNSMYQLWILGALDNTGGLTSTGRLMVEFPLDPALSKMLIVSCDMGCSSEILLIVSMLSVPAIFYRPKGREEESDQIREKFAVPESDHLTYLNVYLQWKNNNYSTIWCNDHFIHAKAMRKVREVRAQLKDIMVQQRMSLASCGTDWDIVRKCICAAYFHQAAKLKGIGEYVNIRTGMPCHLHPTSSLFGMGYTPDYIVYHELVMTTKEYMQCVTAVDGEWLAELGPMFYSVKQAGKSRQENRRRAKEEASAMEEEMALAEEQLRARRQEQEKRSPLGSVRSTKIYTPGRKEQGEPMTPRRTPARFGL

SEQ ID NO: 43387 - protein, 539 aa, Homo sapiens
MGDTSEDASIHRLEGTDLDCQVGGLICKSKSAASEQHVFKAPAPRPSLLGLDLLASLKRREREEKDDGEDKKKSKVSSYKDWEESKDDQKDAEEEGGDQAKIFQKAPDGVRKCIVATNIAETSLTVDGIMFVIDSGYCKLKVFNPRIGMDALQIYPISQANANQRSGRAGRTGPGQCFRLYTQSAYKNELLTTTVPEIQRTNLANVVLLLKSLGVQDLLQFHFMDPPPEDNMLNSMYQLWILGALDNTGGLTSTGRLMVEFPLDPALSKMLIVSCDMGCSSEILLIVSMLSVPAIFYRPKGREEESDQIREKFAVPESDHLTYLNVYLQWKNNNYSTIWCNDHFIHAKAMRKVREVRAQLKDIMVQQRMSLASCGTDWDIVRKCICAAYFHQAAKLKGIGEYVNIRTGMPCHLHPTSSLFGMGYTPDYIVYHELVMTTKEYMQCVTAVDGEWLAELGPMFYSVKQAGKSRQENRRRAKEEASAMEEEMALAEEQLRARRQEQEKRSPLGSVRSTKIYTPGRKEQGEPMTPRRTPARFGL

SEQ ID NO: 43388 - protein, 779 aa, Homo sapiens
MSRFPAVAGRAPRRQEEGERSRDLQEERLSAVCIADREEKGCTSQEGGTTPTFPIQKQRKKIIQAVRDNSFLIVTGNTGSGKTTQLPKYLYEAGFSQHGMIGVTQPRKVAAISVAQRVAEEMKCTLGSKVGYQVRFDDCSSKETAIKYMTDGCLLKHILGDPNLTKFSVIILDEAHERTLTTDILFGLLKKLFQEKSPNRKEHLKVVVMSATMELAKLSAFFGNCPIFDIPGRLYPVREKFCNLIGPRDRENTAYIQAIVKVTMDIHLNEMAGDILVFLTGQFEIEKSCELLFQMAESVDYDYDVQDTTLDGLLILPCYGSMTTDQQRRIFLPPPPGIRKCVISTNISATSLTIDGIRYVVDGGFVKQLNHNPRLGLDILEVVPISKSEALQRSGRAGRTSSGKCFRIYSKDFWNQCMPDHVIPEIKRTSLTSVVLTLKCLAIHDVIRFPYLDPPNERLILEALKQLYQCDAIDRSGHVTRLGLSMVEFPLPPHLTCAVIKAASLDCEDLLLPIAAMLSVENVFIRPVDPEYQKEAEQRHRELAAKAGGFNDFATLAVIFEQCKSSGAPASWCQKHWIHWRCLFSAFRVEAQLRELIRKLKQQSDFPKETFEGPKHEVLRRCLCAGYFKNVARRSVGRTFCTMDGRGSPVHIHPSSALHEQETKLEWIIFHEVLVTTKVYARIVCPIRYEWVRDLLPKLHEFNAHDLSSVARREVREDARRRWTNKENVKQLKDGISKDVLKKMQRRNDDKSISDARARFLERKQQRTQDHSDTRKETG

SEQ ID NO: 43389 - protein, 722 aa, Homo sapiens
MSRFPAVAGRAPRRQEEGERSRDLQEERLSAVCIADREEKGCTSQEGGTTPTFPIQKQRKKIIQAVRDNSFLIVTGNTGSGKTTQLPKYLYEAGFSQHGMIGVTQPRKVAAISVAQRVAEEMKCTLGSKVGYQVRFDDCSSKETAIKYMTDGCLLKHILGDPNLTKFSVIILDEAHERTLTTDILFGLLKKLFQEKSPNRKEHLKVVVMSATMELAKLSAFFGNCPIFDIPGRLYPVREKFCNLIGPRDRENTAYIQAIVKVTMDIHLNEMAGDILVFLTGQFEIEKSCELLFQMAESVDYDYDVQDTTLDGLLILPCYGSMTTDQQRRIFLPPPPGIRKCVISTNISATSLTIDGIRYVVDGGFVKQLNHNPRLGLDILEVVPISKSEALQRSGRAGRTSSGKCFRIYSKDFWNQCMPDHVIPEIKRTSLTSVVLTLKCLAIHDVIRFPYLDPPNERLILEALKQLYQCDAIDRSGHVTRLGLSMVEFPLPPHLTCAVIKAASLDCEDLLLPIAAMLSVENVFIRPVDPEYQKEAEQRHRELAAKAGGFNDFATLAVIFEQCKSSGAPASWCQKHWIHWRCLFSAFRVEAQLRELIRKLKQQSDFPKETFEGPKHEVLRRCLCAGYFKNVARRSVGRTFCTMDGRGSPVHIHPSSALHEQETKLEWIIFHEVLVTTKVYARIVCPIRYEWVRDLLPKLHEFNAHDLSSVARREVSKIKLFQ

SEQ ID NO: 43390 - protein, 731 aa, Homo sapiens
MIGVTQPRKVAAISVAQRVAEEMKCTLGSKVGYQVRFDDCSSKETAIKYMTDGCLLKHILGDPNLTKFSVIILDEAHERTLTTDILFGLLKKLFQEKSPNRKEHLKVVVMSATMELAKLSAFFGNCPIFDIPGRLYPVREKFCNLIGPRDRENTAYIQAIVKVTMDIHLNEMAGDILVFLTGQFEIEKSCELLFQMAESVDYDYDVQDTTLDGLLILPCYGSMTTVSQTSLTFVTHIQIMKQISENQHSLTGLTIAGITGVSHHARPRNMTCNEKLNQQRRIFLPPPPGIRKCVISTNISATSLTIDGIRYVVDGGFVKQLNHNPRLGLDILEVVPISKSEALQRSGRAGRTSSGKCFRIYSKDFWNQCMPDHVIPEIKRTSLTSVVLTLKCLAIHDVIRFPYLDPPNERLILEALKQLYQCDAIDRSGHVTRLGLSMVEFPLPPHLTCAVIKAASLDCEDLLLPIAAMLSVENVFIRPVDPEYQKEAEQRHRELAAKAGGFNDFATLAVIFEQCKSSGAPASWCQKHWIHWRCLFSAFRVEAQLRELIRKLKQQSDFPKETFEGPKHEVLRRCLCAGYFKNVARRSVGRTFCTMDGRGSPVHIHPSSALHEQETKLEWIIFHEVLVTTKVYARIVCPIRYEWVRDLLPKLHEFNAHDLSSVARREVREDARRRWTNKENVKQLKDGISKDVLKKMQRRNDDKSISDARARFLERKQQRTQDHSDTRKETG

SEQ ID NO: 43391 - protein, 702 aa, Homo sapiens
MSRFPAVAGRAPRRQEEGERSRDLQEERLSAVCIADREEKGCTSQEGGTTPTFPIQKQRKKIIQAETAIKYMTDGCLLKHILGDPNLTKFSVIILDEAHERTLTTDILFGLLKKLFQEKSPNRKEHLKVVVMSATMELAKLSAFFGNCPIFDIPGRLYPVREKFCNLIGPRDRENTAYIQAIVKVTMDIHLNEMAGDILVFLTGQFEIEKSCELLFQMAESVDYDYDVQDTTLDGLLILPCYGSMTTDQQRRIFLPPPPGIRKCVISTNISATSLTIDGIRYVVDGGFVKQLNHNPRLGLDILEVVPISKSEALQRSGRAGRTSSGKCFRIYSKDFWNQCMPDHVIPEIKRTSLTSVVLTLKCLAIHDVIRFPYLDPPNERLILEALKQLYQCDAIDRSGHVTRLGLSMVEFPLPPHLTCAVIKAASLDCEDLLLPIAAMLSVENVFIRPVDPEYQKEAEQRHRELAAKAGGFNDFATLAVIFEQCKSSGAPASWCQKHWIHWRCLFSAFRVEAQLRELIRKLKQQSDFPKETFEGPKHEVLRRCLCAGYFKNVARRSVGRTFCTMDGRGSPVHIHPSSALHEQETKLEWIIFHEVLVTTKVYARIVCPIRYEWVRDLLPKLHEFNAHDLSSVARREVREDARRRWTNKENVKQLKDGISKDVLKKMQRRNDDKSISDARARFLERKQQRTQDHSDTRKETG

SEQ ID NO: 43392 - protein, 1220 aa, Homo sapiens [sequence omitted]

SEQ ID NO: 43393 - protein, 1181 aa, Homo sapiens
MAVAVAMAGALIGSEPGPAEELAKLEYLSLVSKVCTELDNHLGINDKDLAEFVISLAEKNTTFDTFKASLVKNGAEFTDSLISNLLRLIQTMRPPAKPSTSKDPVVKPKTEKEKLKELFPVLCQPDNPSVRTMLDEDDVKVAVDVLKELEALMPSAAGQEKQRDAEHRDRTKKKKRSRSRDRNRDRDRDRERNRDRDHKRRHRSRSRSRSRTRERNKVKSRYRSRSRSQSPPKDRKDRDKYGERNLDRWRDKHVDRPPPEEPTIGDIYNGKVTSIMQFGCFVQLEGLRKRWEGLVHISELRREGRVANVADVVSKGQRVKVKVLSFTGTKTSLSMKDVDQETGEDLNPNRRRNLVGETNEETSMRNPDRPTHLSLVSAPEVEDDSLERKRLTRISDPEKWEIKQMIAANVLSKEEFPDFDEETGILPKVDDEEDEDLEIELVEEEPPFLRGHTKQSMDMSPIKIVKNPDGSLSQAAMMQSALAKERRELKQAQREAEMDSIPMGLNKHWVDPLPDAEGRQIAANMRGIGMMPNDIPEWKKHAFGGNKASYGKKTQMSILEQRESLPIYKLKEQLVQAVHDNQILIVIGETGSGKTTQITQYLAEAGYTSRGKIGCTQPRRVAAMSVAKRVSEEFGCCLGQEVGYTIRFEDCTSPETVIKYMTDGMLLRECLIDPDLTQYAIIMLDEAHERTIHTDVLFGLLKKTVQKRQDMKLIVTSATLDAVKFSQYFYEAPIFTIPGRTYPVEILYTKEPETDYLDASLITVMQIHLTEPPGDILVFLTGQEEIDTACEILYERMKSLGPDVPELIILPVYSALPSEMQTRIFDPAPPGSRKVVIATNIAETSLTIDGIYYVVDPGFVKQKVYNSKTGIDQLVVTPISQAQAKQRAGRAGRTGPGKCYRLYTERAYRDEMLTTNVPEIQRTNLASTVLSLKAMGINDLLSFDFMDAPPMETLITAMEQLYTLGALDDEGLLTRLGRRMAEFPLEPMLCKMLIMSVHLGCSEEMLTIVSMLSVQNVFYRPKDKQALADQKKAKFHQTEGDHLTLLAVYNSWKNNKFSNPWCYENFIQARSLRRAQDIRKQMLGIMDRHKLDVVSCGKSTVRVQKAICSGFFRNAAKKDPQEGYRTLIDQQVVYIHPSSALFNRQPECPKHFLPVVAVAVSLEQCLSKFEDLNKELGLVTC

SEQ ID NO: 43394 - protein, 1270 aa, Homo sapiens
MGDVKNFLYAWCGKRKMTPSYEIRAVGNKNRQKFMCEVQVEGYNYTGMGNSTNKKDAQSNAARDFVNYLVRINEIKSEEVPAFGVASPPPLTDTPDTTANAEGDLPTTMGGPLPPHLALKAENNSEVGASGYGVPGPTWDRGANLKDYYSRKEEQEVQATLESEEVDLNAGLHGNWTLENAKARLNQYFQKEKIQGEYKYTQVGPDHNRSFIAEMTIYIKQLGRRIFAREHGSNKKLAAQSCALSLVRQLYHLGVVEAYSGLTKKKEGETVEPYKVNLSQDLEHQLQNIIQELNLEILPPPEDPSVPVALNIGKLAQFEPSQRQNQVGVVPWSPPQSNWNPWTSSNIDEGPLAFATPEQISMDLKNELMYQLEQDHDLQAILQERELLPVKKFESEILEAISQNSVVIIRGATGCGKTTQVPQFILDDFIQNDRAAECNIVVTQPRRISAVSVAERVAFERGEEPGKSCGYSVRFESILPRPHASIMFCTVGVLLRKLEAGIRGISHVIVDEIHERDINTDFLLVVLRDVVQAYPEVRIVLMSATIDTSMFCEYFFNCPIIEVYGRTYPVQEYFLEDCIQMTHFVPPPKDKKKKDKDDDGGEDDDANCNLICGDEYGPETRLSMSQLNEKETPFELIEALLKYIETLNVPGAVLVFLPGWNLIYTMQKHLEMNPHFGSHRYQILPLHSQIPREEQRKVFDPVPVGVTKVILSTNIAETSITINDVVYVIDSCKQKVKLFTAHNNMTNYATVWASKTNLEQRKGRAGRVRPGFCFHLCSRARFERLETHMTPEMFRTPLHEIALSIKLLRLGGIGQFLAKAIEPPPLDAVIEAEHTLRELDALDANDELTPLGRILAKLPIEPRFGKMMIMGCIFYVGDAICTIAAATCFPEPFINEGKRLGYIHRNFAGNRFSDHVALLSVFQAWDDARMGGEEAEIRFCEHKRLNMATLRMTWEAKVQLKEILINSGFPEDCLLTQVFTNTGPDNNLDVVISLLAFGVYPNVCYHKEKRKILTTEGRNALIHKSSVNCPFSSQDMKYPSPFFVFGEKIRTRAISAKGMTLVTPLQLLLFASKKVQSDGQIVLVDDWIKLQISHEAAACITGLRAAMEALVVEVTKQPAIISQLDPVNERMLNMIRQISRPSAAGINLMIGSTRYGDGPRPPKMARYDNGSGYRRGGSSYSGGGYGGGYSSGGYGSGGYGGSANSFRAGYGAGVGGGYRGVSRGGFRGNSGGDYRGPSGGYRGSGGFQRGGGRGAYGTGYFGQGRGGGGY

SEQ ID NO: 43395 - protein, 599 aa, Homo sapiens
MGDVKNFLYAWCGKRKMTPSYEIRAVGNKNRQKFMCEVQVEGYNYTGMGNSTNKKDAQSNAARDFVNYLVRINEIKSEEVPAFGVASPPPLTDTPDTTANAEGDLPTTMGGPLPPHLALKAENNSEVGASGYGVPGPTWDRGANLKDYYSRKEEQEVQATLESEEVDLNAGLHGNWTLENAKARLNQYFQKEKIQGEYKYTQVGPDHNRSFIAEMTIYIKQLGRRIFAREHGSNKKLAAQSCALSLVRQLYHLGVVEAYSGLTKKKEGETVEPYKVNLSQDLEHQLQNIIQELNLEILPPPEDPSVPVALNIGKLAQFEPSQRQNQVGVVPWSPPQSNWNPWTSSNIDEGPLAFATPEQISMDLKNELMYQLEQDHDLQAILQERELLPVKKFESEILEAISQNSVVIIRGATGCGKTTQVPQFILDDFIQNDRAAECNIVVTQPRRISAVSVAERVAFERGEEPGKSCGYSVRFESILPRPHASIMFCTVGVLLRKLEAGIRGISHVIVDEIHERDINTDFLLVVLRDVVQAYPEVRIVLMSATIDTSMFCEYFFNCPIIEVYGRTYPVQEYFLEDCIQMTHFVPPPKDKKKKDKKKK

SEQ ID NO: 43396 - protein, 398 aa, Homo sapiens
MMLKGITRLISRIHKLDPGRFLHMGTQARQSIAAHLDNQVPVESPRAISRTNENDPAKHGDQHEGQHYNISPQDLETVFPHGLPPRFVMQVKTFSEACLMVRKPALELLHYLKNTSFAYPAIRYLLYGEKGTGKTLSLCHVIHFCAKQDWLILHIPDAHLWVKNCRDLLQSSYNKQRFDQPLEASTWLKNFKTTNERFLNQIKVQEKYVWNKRESTEKGSPLGEVVEQGITRVRNATDAVGIVLKELKRQSSLGMFHLLVAVDGINALWGRTTLKREDKSPIAPEELALVHNLRKMMKNDWHGGAIVSALSQTGSLFKPRKAYLPQELLGKEGFDALDPFIPILVSNYNPKEFESCIQYYLENNWLQHEKAPTEEGKKELLFLSNANPSLLERHCAYL

SEQ ID NO: 43397 - protein, 398 aa, Homo sapiens; identical to SEQ ID NO: 43396

SEQ ID NO: 43398 - protein, 364 aa, Homo sapiens
MMLKGITRLISRIHKLDPGRFLHMGTQARQSIAAHLDNQVPVESPRAISRTNENDPVKTFSEACLMVRKPALELLHYLKNTSFAYPAIRYLLYGEKGTGKTLSLCHVIHFCAKQDWLILHIPDAHLWVKNCRDLLQSSYNKQRFDQPLEASTWLKNFKTTNERFLNQIKVQEKYVWNKRESTEKGSPLGEVVEQGITRVRNATDAVGIVLKELKRQSSLGMFHLLVAVDGINALWGRTTLKREDKSPIAPEELALVHNLRKMMKNDWHGGAIVSALSQTGSLFKPRKAYLPQELLGKEGFDALDPFIPILVSNYNPKEFESCIQYYLENNWLQHEKAPTEEGKKELLFLSNANPSLLERHCAYL

SEQ ID NO: 43399 - protein, 357 aa, Homo sapiens
MMLKGITRLISRIHKAKHGDQHEGQHYNISPQDLETVFPHGLPPRFVMQVKTFSEACLMVRKPALELLHYLKNTSFAYPAIRYLLYGEKGTGKTLSLCHVIHFCAKQDWLILHIPDAHLWVKNCRDLLQSSYNKQRFDQPLEASTWLKNFKTTNERFLNQIKVQEKYVWNKRESTEKGSPLGEVVEQGITRVRNATDAVGIVLKELKRQSSLGMFHLLVAVDGINALWGRTTLKREDKSPIAPEELALVHNLRKMMKNDWHGGAIVSALSQTGSLFKPRKAYLPQELLGKEGFDALDPFIPILVSNYNPKEFESCIQYYLENNWLQHEKAPTEEGKKELLFLSNANPSLLERHCAYL

SEQ ID NO: 43400 - protein, 348 aa, Homo sapiens
MAGLKRRASQVWPEEHGEQEHGLYSLHRMFDIVGTHLTHRDVRVLSFLFVDVIDDHERGLIRNGRDFLLALERQGRCDESNFRQVLQLLRIITRHDLLPYVTLKRRRAVCPDLVDKYLEETSIRYVTPRALSDPEPRPPQPSKTVPPHYPVVCCPTSGPQMCSKRPARGRATLGSQRKRRKSVTPDPKEKQTCGEEVQGFQRWSRLEGEYKELLGHWAVYAIQYIRLRVRAEYCQHETALQGNVFSNKQDPLERQFERFNQANTILKSRDLGSIICDIKFSELTYLDAFWRDYINGSLLEALKGVFITDSLKQAVGHEAIKLLVNVDEEDYELGRQKLLRNLMLQALP

SEQ ID NO: 43401 - protein, 318 aa, Homo sapiens
MAGLKRRASQVWPEEHGEQEHGLYSLHRMFDIVGTHLTHRDVRVLSFLFVDVIDDHERGLIRNGRDFLLALERQGRCDESNFRQVLQLLRIITRHDLLPYVTLKRRRAVCPDLVDKYLEETSIRYVTPRALSDPEPRPPQPSKTVPPHYPVVCCPTSGPQMCSKRPARGRATLGSQRKRRKSVTPDPKEKQTCDIRLRVRAEYCQHETALQGNVFSNKQDPLERQFERFNQANTILKSRDLGSIICDIKFSELTYLDAFWRDYINGSLLEALKGVFITDSLKQAVGHEAIKLLVNVDEEDYELGRQKLLRNLMLQALP

SEQ ID NO: 43402 - protein, 348 aa, Homo sapiens; identical to SEQ ID NO: 43400

SEQ ID NO: 43403 - protein, 318 aa, Homo sapiens; identical to SEQ ID NO: 43401

SEQ ID NO: 43404 - protein, 275 aa, Homo sapiens
MAGLKRRASQVWPEEHGEQEHGLYSLHRMFDIVGTHLTHRDVLQLLRIITRHDLLPYVTLKRRRAVCPDLVDKYLEETSIRYVTPRALSDPEPRPPQPSKTVPPHYPVVCCPTSGPQMCSKRPARGRATLGSQRKRRKSVTPDPKEKQTCDIRLRVRAEYCQHETALQGNVFSNKQDPLERQFERFNQANTILKSRDLGSIICDIKFSELTYLDAFWRDYINGSLLEALKGVFITDSLKQAVGHEAIKLLVNVDEEDYELGRQKLLRNLMLQALP

SEQ ID NO: 43405 - protein, 318 aa, Homo sapiens; identical to SEQ ID NO: 43401

SEQ ID NO: 43406 - protein, 318 aa, Homo sapiens; identical to SEQ ID NO: 43401

SEQ ID NO: 43407 - protein, 102 aa, Homo sapiens
MSSPPEGKLETKAGHPPAVKAGGMRIVQKHPHTGDTKEEKDKDDQEWESPSPPKPTVFISGVIARGDKDFPPAAAQVAHQKPHASMDKHPSPRTQHIQQPRK

SEQ ID NO: 43408 - protein, 370 aa, Homo sapiens
MFQASMRSPNMEPFKQQKVEDFYDIGEELGSGQFAIVKKCREKSTGLEYAAKFIKKRQSRASRRGVSREEIEREVSILRQVLHHNVITLHDVYENRTDVVLILELVSGGELFDFLAQKESLSEEEATSFIKQILDGVNYLHTKKIAHFDLKPENIMLLDKNIPIPHIKLIDFGLAHEIEDGVEFKNIFGTPEFVAPEIVNYEPLGLEADMWSIGVITYILLSGASPFLGDTKQETLANITAVSYDFDEEFFSQTSELAKDFIRKLLVKETRKRLTIQEALRHPWITPVDNQQAMVRRESVVNLENFRKQYVRRRWKLSFSIVSLCNHLTRSLMKKVHLRPDEDLRNCESDTEEDIARRKALHPRRRSSTS

SEQ ID NO: 43409 - protein, 370 aa, Homo sapiens; identical to SEQ ID NO: 43408

SEQ ID NO: 43410 - protein, 81 aa, Homo sapiens
MFQASMRSPNMEPFKQQKVEDFYDIGEELGSGQFAIVKKCREKSTGLEYAAKFIKKRQSRASRRGVSREEIEREVSILRQV

SEQ ID NO: 43411 - protein, 740 aa, Homo sapiens
MATANSIIVLDDDDEDEAAAQPGPSHPLPNAASPGAEAPSSSEPHGARGSSSSGGKKCYKLENEKLFEEFLELCKMQTADHPEVVPFLYNRQQRAHSLFLASAEFCNILSRVLSRARSRPAKLYVYINELCTVLKAHSAKKKLNLAPAATTSNEPSGNNPPTHLSLDPTNAENTASQSPRTRGSRRQIQRLEQLLALYVAEIRRLQEKELDLSELDDPDSAYLQEARLKRKLIRLFGRLCELKDCSSLTGRVIEQRIPYRGTRYPEVNRRIERLINKPGPDTFPDYGDVLRAVEKAAARHSLGLPRQQLQLMAQDAFRDVGIRLQERRHLDLIYNFGCHLTDDYRPGVDPALSDPVLARRLRENRSLAMSRLDEVISKYAMLQDKSEEGERKKRRARLQGTSSHSADTPEASLDSGEGPSGMASQGCPSASRAETDDEDDEESDEEEEEEEEEEEEEATDSEEEEDLEQMQEGQEDDEEEDEEEEAAAGKDGDKSPMSSLQISNEKNLEPGKQISRSSGEQQNKGRIVSPSLLSEEPLAPSSIDAESNGEQPEELTLEEESPVSQLFELEIEALPLDTPSSVETDISSSRKQSEEPFTTVLENGAGMVSSTSFNGGVSPHNWGDSGPPCKKSRKEKKQTGSGPLGNSYVERQRSVHEKNGKKICTLPSPPSPLASLAPVADSSTRVDSPSHGLVTSSLCIPSPARLSQTPHSQPPRPGTCKTSVATQCDPEEIIVLSDSD

SEQ ID NO: 43412 - protein, 740 aa, Homo sapiens; identical to SEQ ID NO: 43411

SEQ ID NO: 43413 - protein, 740 aa, Homo sapiens; identical to SEQ ID NO: 43411

SEQ ID NO: 43414 - protein, 740 aa, Homo sapiens; identical to SEQ ID NO: 43411

SEQ ID NO: 43415 - protein, 130 aa, Homo sapiens
MATANSIIVLDDDDEDEAAAQPGPSHPLPNAASPGAEAPSSSEPHGARGSSSSGGKKCYKLENEKLFEEFLELCKMQTADHPEVVPFLYNRQQRAHSLFLASAEFCNILSRVLSRARSRPAKLYVYINEL

SEQ ID NO: 43416 - protein, 48 aa, Homo sapiens
MATANSIIVLDDDDEDEAAAQPGPSHPLPNAASPGAEAPSSSEPHGAR

SEQ ID NO: 43417 - protein, 130 aa, Homo sapiens; identical to SEQ ID NO: 43415

SEQ ID NO: 43418 - protein, 48 aa, Homo sapiens; identical to SEQ ID NO: 43416

SEQ ID NO: 43419 - protein, 178 aa, Homo sapiens
MATANSIIVLDDDDEDEAAAQPGPSHPLPNAASPGAEAPSSSEPHGARGSSSSGGKKCYKLENEKLFEEFLELCKMQTADHPEVVPFLYNRQQRAHSLFLASAEFCNILSRVLSRARSRPAKLYVYINELCTVLKAHSAKKKLNLAPAATTSNEPSGNNPPTHLSLDPTNAENTASQS

SEQ ID NO: 43420 - protein, 178 aa, Homo sapiens; identical to SEQ ID NO: 43419

SEQ ID NO: 43421 - protein, 740 aa, Homo sapiens; identical to SEQ ID NO: 43411

SEQ ID NO: 43422 - protein, 740 aa, Homo sapiens; identical to SEQ ID NO: 43411

SEQ ID NO: 43423 - protein, 130 aa, Homo sapiens; identical to SEQ ID NO: 43415

SEQ ID NO: 43424 - protein, 178 aa, Homo sapiens; identical to SEQ ID NO: 43419

SEQ ID NO: 43425 - protein, 740 aa, Homo sapiens; identical to SEQ ID NO: 43411

SEQ ID NO: 43426 - protein, 48 aa, Homo sapiens; identical to SEQ ID NO: 43416

SEQ ID NO: 43427 - protein, 130 aa, Homo sapiens; identical to SEQ ID NO: 43415

SEQ ID NO: 43428 - protein, 178 aa, Homo sapiens; identical to SEQ ID NO: 43419

SEQ ID NO: 43429 - protein, 740 aa, Homo sapiens; identical to SEQ ID NO: 43411

SEQ ID NO: 43430 - protein, 48 aa, Homo sapiens; identical to SEQ ID NO: 43416

SEQ ID NO: 43431 - protein, 665 aa, Homo sapiens
MQTADHPEVVPFLYNRQQRAHSLFLASAEFCNILSRVLSRARSRPAKLYVYINELCTVLKAHSAKKKLNLAPAATTSNEPSGNNPPTHLSLDPTNAENTASQSPRTRGSRRQIQRLEQLLALYVAEIRRLQEKELDLSELDDPDSAYLQEARLKRKLIRLFGRLCELKDCSSLTGRVIEQRIPYRGTRYPEVNRRIERLINKPGPDTFPDYGDVLRAVEKAAARHSLGLPRQQLQLMAQDAFRDVGIRLQERRHLDLIYNFGCHLTDDYRPGVDPALSDPVLARRLRENRSLAMSRLDEVISKYAMLQDKSEEGERKKRRARLQGTSSHSADTPEASLDSGEGPSGMASQGCPSASRAETDDEDDEESDEEEEEEEEEEEEEATDSEEEEDLEQMQEGQEDDEEEDEEEEAAAGKDGDKSPMSSLQISNEKNLEPGKQISRSSGEQQNKGRIVSPSLLSEEPLAPSSIDAESNGEQPEELTLEEESPVSQLFELEIEALPLDTPSSVETDISSSRKQSEEPFTTVLENGAGMVSSTSFNGGVSPHNWGDSGPPCKKSRKEKKQTGSGPLGNSYVERQRSVHEKNGKKICTLPSPPSPLASLAPVADSSTRVDSPSHGLVTSSLCIPSPARLSQTPHSQPPRPGTCKTSVATQCDPEEIIVLSDSD

SEQ ID NO: 43432 - protein, 665 aa, Homo sapiens; identical to SEQ ID NO: 43431

SEQ ID NO: 43433 - protein, 665 aa, Homo sapiens; identical to SEQ ID NO: 43431

SEQ ID NO: 43434 - protein, 665 aa, Homo sapiens; identical to SEQ ID NO: 43431

SEQ ID NO: 43435 - protein, 359 aa, Homo sapiens
MKATIILLLLAQVSWAGPFQQRGLFDFMLEDEASGIGPEVPDDRDFEPSLGPVCPFRCQCHLRVVQCSDLGLDKVPKDLPPDTTLLDLQNNKITEIKDGDFKNLKNLHALILVNNKISKVSPGAFTPLVKLERLYLSKNQLKELPEKMPKTLQELRAHENEITKVRKVTFNGLNQMIVIELGTNPLKSSGIENGAFQGMKKLSYIRIADTNITSIPQGLPPSLTELHLDGNKISRVDAASLKGLNNLAKLGLSFNSISAVDNGSLANTPHLRELHLDNNKLTRVPGGLAEHKYIQVVYLHNNNISVVGSSDFCPPGHNTKKASYSGVSLFSNPVQYWEIQPSTFRCVYVRSAIQLGNYK

SEQ ID NO: 43436 - protein, 250 aa, Homo sapiens
MKATIILLLLAQVSWAGPFQQRGLFDFMLEDEASGIGPEVPDDRDFEPSLGPVCPFRCQCHLRVVQCSDLELGTNPLKSSGIENGAFQGMKKLSYIRIADTNITSIPQGLPPSLTELHLDGNKISRVDAASLKGLNNLAKLGLSFNSISAVDNGSLANTPHLRELHLDNNKLTRVPGGLAEHKYIQVVYLHNNNISVVGSSDFCPPGHNTKKASYSGVSLFSNPVQYWEIQPSTFRCVYVRSAIQLGNYK

SEQ ID NO: 43437 - protein, 172 aa, Homo sapiens
MKATIILLLLAQVSWAGPFQQRGLFDFMLEDEASGIGPEVPDDRDFEPSLGPVCPFRCQCHLRVVQCSDLGLDKVPKDLPPDTTLLDLQNNKITEIKDGDFKNLKNLHVVYLHNNNISVVGSSDFCPPGHNTKKASYSGVSLFSNPVQYWEIQPSTFRCVYVRSAIQLGNYK

SEQ ID NO: 43438 - protein, 359 aa, Homo sapiens; identical to SEQ ID NO: 43435

SEQ ID NO: 43439 - protein, 250 aa, Homo sapiens; identical to SEQ ID NO: 43436

SEQ ID NO: 43440 - protein, 212 aa, Homo sapiens
MKATIILLLLAQVSWAGPFQQRGLFDFMLEDEASGIGPEVPDDRDFEPSLGPVCPFRCQCHLRVVQCSDLGLPPSLTELHLDGNKISRVDAASLKGLNNLAKLGLSFNSISAVDNGSLANTPHLRELHLDNNKLTRVPGGLAEHKYIQVVYLHNNNISVVGSSDFCPPGHNTKKASYSGVSLFSNPVQYWEIQPSTFRCVYVRSAIQLGNYK

SEQ ID NO: 43441 - protein, 172 aa, Homo sapiens; identical to SEQ ID NO: 43437

SEQ ID NO: 43442 - protein, 75 aa, Homo sapiens
MKATIILLLLAQVSWAGPFQQRGLFDFMLEDEASGIGPEVPDDRDFEPSLGPVCPFRCQCHLRVVQCSDLGCLPS

SEQ ID NO: 43443 - protein, 212 aa, Homo sapiens; identical to SEQ ID NO: 43440

SEQ ID NO: 43444 - protein, 179 aa, Homo sapiens
MKATIILLLLAQVSWAGPFQQRGLFDFMLEDEASGIGPEVPDDRDFEPSLGPVCPFRCQCHLRVVQCSDLGLDKVPKDLPPDTTLLDLQNNKITEIKDGDFKNLKNLHALILVNNKISKVSPGAFTPLVKLERLYLSKNQLKELPEKMPKTLQELRAHENEITKVRKVTFNGLNQMIVI

SEQ ID NO: 43445 - protein, 119 aa, Homo sapiens
MKATIILLLLAQVSWAGPFQQRGLFDFMLEDEASGIGPEVPDDRDFEPSLGPVCPFRCQCHLRVVQCSDLGLDKVPKDLPPDTTLLDLQNNKITEIKDGDFKNLKNLHALILVNNKISK

SEQ ID NO: 43446 - protein, 174 aa, Homo sapiens
MKATIILLLLAQVSWAGPFQQRGLFDFMLEDEASGIGPEVPDDRDFEPSLGPVCPFRCQCHLRVVQCSDLGLDKVPKDLPPDTTLLDLQNNKITEIKDGDFKNLKNLHALILVNNKISKVSPGAFTPLVKLERLYLSKNQLKELPEKMPKTLQELRAHENEITKVRKVTFNGLN

SEQ ID NO: 43447 - protein, 178 aa, Homo sapiens
MKATIILLLLAQVSWAGPFQQRGLFDFMLEDEASGIGPEVPDDRDFEPSLGPVCPFRCQCHLRVVQCSDLGLDKVPKDLPPDTTLLDLQNNKITEIKDGDFKNLKNLHALILVNNKISKVSPGAFTPLVKLERLYLSKNQLKELPEKMPKTLQELRAHENEITKVRKVTFNGLNQMIV

SEQ ID NO: 43448 - protein, 359 aa, Homo sapiens; identical to SEQ ID NO: 43435

SEQ ID NO: 43449 - protein, 1865 aa, Homo sapiens
MTRWVPTKREEKYGVAFYNYDARGADELSLQIGDTVHILETYEGWYRGYTLRKKSKKGIFPASYIHLKEAIVEGKGQHETVIPGDLPLIQEVTTTLREWSTIWRQLYVQDNREMFRSVRHMIYDLIEWRSQILSGTLPQDELKELKKKVTAKIDYGNRILDLDLVVRDEDGNILDPELTSTISLFRAHEIASKQVEERLQEEKSQKQNIDINRQAKFAATPSLALFVNLKNVVCKIGEDAEVLMSLYDPVESKFISENYLVRWSSSGLPKDIDRLHNLRAVFTDLGSKDLKREKISFVCQIVRVGRMELRDNNTRKLTSGLRRPFGVAVMDVTDIINGKVDDEDKQHFIPFQPVAGENDFLQTVINKVIAAKEVNHKGQGLWVTLKLLPGDIHQIRKEFPHLVDRTTAVARKTGFPEIIMPGDVRNDIYVTLVQGDFDKGSKTTAKNVEVTVSVYDEDGKRLEHVIFPGAGDEAISEYKSVIYYQVKQPRWFETVKVAIPIEDVNRSHLRFTFRHRSSQDSKDKSEKIFALAFVKLMRYDGTTLRDGEHDLIVYKAEAKKLEDAATYLSLPSTKAELEEKGHSATGKSMQSLGSCTISKDSFQISTLVCSTKLTQNVDLLGLLKWRSNTSLLQQNLRQLMKVDGGEVVKFLQDTLDALFNIMMENSESETFDTLVFDALVFIIGLIADRKFQHFNPVLETYIKKHFSATLAYTKLTKVLKNYVDGAEKPGVNEQLYKAMKALESIFKFIVRSRILFNQLYENKGEADFVESLLQLFRSINDMMSSMSDQTVRVKGAALKYLPTIVNDVKLVFDPKELSKMFTEFILNVPMGLLTIQKLYCLIEIVHSDLFTQHDCREILLPMMTDQLKYHLERQEDLEACCQLLSHILEVLYRKDVGPTQRHVQIIMEKLLRTVNRTVISMGRDSELIGNFVACMTAILRQMEDYHYAHLIKTFGKMRTDVVDFLMETFIMFKNLIGKNVYPFDWVIMNMVQNKVFLRAINQYADMLNKKFLDQANFELQLWNNYFHLAVAFLTQESLQLENFSSAKRAKILNKYGDMRRQIGFEIRDMWYNLGQHKIKFIPEMVGPILEMTLIPETELRKATIPIFFDMMQCEFHSTRSFQMFENEIITKLDHEVEGGRGDEQYKVLFDKILLEHCRKHKYLAKTGETFVKLVVRLMERLLDYRTIMHDENKENRMSCTVNVLNFYKEIEREEMYIRYLYKLCDLHKECDNYTEAAYTLLLHAKLLKWSEDVCVAHLTQRDGYQATTQGQLKEQLYQEIIHYFDKGKMWEEAIALGKELAEQYENEMFDYEQLSELLKKQAQFYENIVKVIRPKPDYFAVGYYGQGFPTFLRGKVFIYRGKEYERREDFEARLLTQFPNAEKMKTTSPPGDDIKNSPGQYIQCFTVKPKLDLPPKFHRPVSEQIVSFYRVNEVQRFEYSRPIRKGEKNPDNEFANMWIERTIYTTAYKLPGILRWFEVKSVFMVEISPLENAIETMQLTNDKINSMVQQHLDDPSLPINPLSMLLNGIVDPAVMGGFANYEKAFFTDRYLQEHPEAHEKIEKLKDLIAWQIPFLAEGIRIHGDKVTEALRPFHERMEACFKQLKEKVEKEYGVRIMPSSLDDRRGSRPRSMVRSFTMPSSSRPLSVASVSSLSSDSTPSRPGSDGFALEPLLPKKMHSRSQDKLDKDDLEKEKKDKKKEKRNSKHQEIFEKEFKPTDISLQQSEAVILSETISPLRPQRPKSQVMNVIGSERRFSVSPSSPSSQQTPPPVTPRAKLSFSMQSSLELNGMTGADVADVPPPLPLKGSVADYGNLMENQDLLGSPTPPPPPPHQRHLPPPLPSKTPPPPPPKTTRKQASVDSGIVQ

SEQ ID NO: 43450 - protein, 2186 aa, Homo sapiens
MAGERTRRFTRSLLRPGQAAELRHSAASAAAVAVSSRQQQRQEKPRLLEPLDYETVIEELEKTYRNDPLQDLLFFPSDDFSAATVSWDIRTLYSTVPEDAEHKAENLLVKEACKFYSSQWHVVNYKYEQYSGDIRQLPRAEYKPEKLPSHSFEIDHEDADKDEDTTSHSSSKGGGGAGGTGVFKSGWLYKGNFNSTVNNTVTVRSFKKRYFQLTQLPDNSYIMNFYKDEKISKEPKGCIFLDSCTGVVQNNRLRKYAFELKMNDLTYFVLAAETESDMDEWIHTLNRILQISPEGPLQGRRSTELTDLGLDSLDNSVTCECTPEETDSSENNLHADFAKYLTETEDTVKTTRNMERLNLFSLDPDIDTLKLQKKDLLEPESVIKPFEEKAAKRIMIICKALNSNLQGCVTENENDPITNIEPFFVSVALYDLRDSRKISADFHVDLNHAAVRQMLLGASVALENGNIDTITPRQSEEPHIKGLPEEWLKFPKQAVFSVSNPHSEIVLVAKIEKVLMGNIASGAEPYIKNPDSNKYAQKILKSNRQFCSKLGKYRMPFAWAVRSVFKDNQGNVDRDSRFSPLFRQESSKISTEDLVKLVSDYRRADRISKMQTIPGSLDIAVDNVPLEHPNCVTSSFIPVKPFNMMAQTEPTVEVEEFVYDSTKYCRPYRVYKNQIYIYPKHLKYDSQKCFNKARNITVCIEFKNSDEESAKPLKCIYGKPGGPLFTSAAYTAVLHHSQNPDFSDEVKIELPTQLHEKHHILFSFYHVTCDINAKANAKKKEALETSVGYAWLPLMKHDQIASQEYNIPIATSLPPNYLSFQDSASGKHGGSDIKWVDGGKPLFKVSTFVVSTVNTQDPHVNAFFQECQKREKDMSQSPTSNFIRSCKNLLNVEKIHAIMSFLPIILNQLFKVLVQNEEDEITTTVTRVLTDIVAKCHEEQLDHSVQSYIKFVFKTRACKERTVHEELAKNVTGLLKSNDSTTVKHVLKHSWFFFAIILKSMAQHLIDTNKIQLPRPQRFPESYQNELDNLVMVLSDHVIWKYKDALEETRRANHSVARFLKRCFTFMDRGYVFKMVNNYISMFSSGDLKTLCQYKFDFLQEVCQHEHFIPLCLPIRSANIPDPLTPSESTQELHASDMPEYSVTNEFCRKHFLIGILLREVGFALQEDQDVRHLALAVLKNLMAKHSFDDRYREPRKQAQIASLYMPLYGMLLDNMPRIYLKDLYPFTVNTSNQGSRDDLSTNGGFQSQTAIKHANSVDTSFSKDVLNSIAAFSSIAISTVNHADSRASLASLDSNPSTNEKSSEKTDNCEKIPRPLSLIGSTLRFDKLDQAETRSLLMCFLHIMKTISYETLIAYWQRAPSPEVSDFFSILDVCLQNFRYLGKRNIIRKIAAAFKFVQSTQNNGTLKGSNPSCQTSGLLSQWMHSTSSHEGHKQHRSQTLPIIRGKNALSNPKLLQMLDNTMTSNSNEIDIVHHVDTEANIATEVCLTILDLLSLFTQTHQRQLQQCDCQNSLMKRVFDTYMLFFQVNQSATALKHVFASLRLFVCKFPSAFFQGPADLCGSFCYEVLKCCNHRSRSTQTEASALLYFFMRKNFEFNKQKSIVRSHLQLIKAVSQLIADAGIGGSRFQHSLAITNNFANGDKQMKNSNFPAEVKDLTKRIRTVLMATAQMKEHEKDPEMLVDLQYSLANSYASTPELRRTWLESMAKIHARNGDLSEAAMCYIHIAALIAEYLKRKGYWKVEKICTASLLSEDTHPCDSNSLLTTPSGGSMFSMGWPAFLSITPNIKEEGAMKEDSGMQDTPYNENILVEQLYMCVEFLWKSERYELIADVNKPIIAVFEKQRDFKKLSDLYYDIHRSYLKVAEVVNSEKRLFGRYYRVAFYGQGFFEEEEGKEYIYKEPKLTGLSEISQRLLKLYADKFGADNVKIIQDSNKVNPKDLDPKYAYIQVTYVTPFFEEKEIEDRKTDFEMHHNINRFVFETPFTLSGKKHGGVAEQCKRRTILTTSHLFPYVKKRIQVISQSSTELNPIEVAIDEMSKKVSELNQLCTMEEVDMIRLQLKLQGSVSVKVNAGPMAYARAFLEETNAKKYPDNQVKLLKEIFRQFADACGQALDVNERLIKEDQLEYQEELRSHYKDMLSELSTVMNEQITGRDDLSKRGVDQTCTRVISKATPALPTVSISSSAEV

SEQ ID NO: 43451 - protein, 700 aa, Homo sapiens
MTSNSNEIDIVHHVDTEANIATEVCLTILDLLSLFTQTHQRQLQQCDCQNSLMKRVFDTYMLFFQVNQSATALKHVFASLRLFVCKFPSAFFQGPADLCGSFCYEVLKCCNHRSRSTQTEASALLYFFMRKNFEFNKQKSIVRSHLQLIKAVSQLIADAGIGGSRFQHSLAITNNFANGDKQMKNSNFPAEVKDLTKRIRTVLMATAQMKEHEKDPEMLVDLQYSLANSYASTPELRRTWLESMAKIHARNGDLSEAAMCYIHIAALIAEYLKRKGMFSMGWPAFLSITPNIKEEGAMKEDSGMQDTPYNENILVEQLYMCVEFLWKSERYELIADVNKPIIAVFEKQRDFKKLSDLYYDIHRSYLKVAEVVNSEKRLFGRYYRVAFYGQGVGFFEEEEGKEYIYKEPKLTGLSEISQRLLKLYADKFGADNVKIIQDSNKVNPKDLDPKYAYIQVTYVTPFFEEKEIEDRKTDFEMHHNINRFVFETPFTLSGKKHGGVAEQCKRRTILTTSHLFPYVKKRIQVISQSSTELNPIEVAIDEMSKKVSELNQLCTMEEVDMIRLQLKLQGSVSVKVNAGPMAYARAFLEETNAKKYPDNQVKLLKEIFRQFADACGQALDVNERLIKEDQLEYQEELRSHYKDMLSELSTVMNEQLCRGPCLYSFCSSVSSISLSTVSKSDYGQGRPVKARSGPNLHSSN

SEQ ID NO: 43452 - protein, 2180 aa, Homo sapiens
MSFRGKVFKREPSEFWKKRRTVRRVNQEEIHRFSSQEKPRLLEPLDYETVIEELEKTYRNDPLQDLLFFPSDDFSAATVSWDIRTLYSTVPEDAEHKAENLLVKEACKFYSSQWHVVNYKYEQYSGDIRQLPRAEYKPEKLPSHSFEIDHEDADKDEDTTSHSSSKGGGGAGGTGVFKSGWLYKGNFNSTVNNTVTVRSFKKRYFQLTQLPDNSYIMNFYKDEKISKEPKGCIFLDSCTGVVQNNRLRKYAFELKMNDLTYFVLAAETESDMDEWIHTLNRILQISPEGPLQGRRSTELTDLGLDSLDNSVTCECTPEETDSSENNLHADFAKYLTETEDTVKTTRNMERLNLFSLDPDIDTLKLQKKDLLEPESVIKPFEEKAAKRIMIICKALNSNLQGCVTENENDPITNIEPFFVSVALYDLRDSRKISADFHVDLNHAAVRQMLLGASVALENGNIDTITPRQSEEPHIKGLPEEWLKFPKQAVFSVSNPHSEIVLVAKIEKVLMGNIASGAEPYIKNPDSNKYAQKILKSNRQFCSKLGKYRMPFAWAVRSVFKDNQGNVDRDSRFSPLFRQESSKISTEDLVKLVSDYRRADRISKMQTIPGSLDIAVDNVPLEHPNCVTSSFIPVKPFNMMAQTEPTVEVEEFVYDSTKYCRPYRVYKNQIYIYPKHLKYDSQKCFNKARNITVCIEFKNSDEESAKPLKCIYGKPGGPLFTSAAYTAVLHHSQNPDFSDEVKIELPTQLHEKHHILFSFYHVTCDINAKANAKKKEALETSVGYAWLPLMKHDQIASQEYNIPIATSLPPNYLSFQDSASGKHGGSDIKWVDGGKPLFKVSTFVVSTVNTQDPHVNAFFQECQKREKDMSQSPTSNFIRSCKNLLNVEKIHAIMSFLPIILNQLFKVLVQNEEDEITTTVTRVLTDIVAKCHEEQLDHSVQSYIKFVFKTRACKERTVHEELAKNVTGLLKSNDSTTVKHVLKHSWFFFAIILKSMAQHLIDTNKIQLPRPQRFPESYQNELDNLVMVLSDHVIWKYKDALEETRRANHSVARFLKRCFTFMDRGYVFKMVNNYISMFSSGDLKTLCQYKFDFLQEVCQHEHFIPLCLPIRSANIPDPLTPSESTQELHASDMPEYSVTNEFCRKHFLIGILLREVGFALQEDQDVRHLALAVLKNLMAKHSFDDRYREPRKQAQIASLYMPLYGMLLDNMPRIYLKDLYPFTVNTSNQGSRDDLSTNGGFQSQTAIKHANSVDTSFSKDVLNSIAAFSSIAISTVNHADSRASLASLDSNPSTNEKSSEKTDNCEKIPRPLSLIGSTLRFDKLDQAETRSLLMCFLHIMKTISYETLIAYWQRAPSPEVSDFFSILDVCLQNFRYLGKRNIIRKIAAAFKFVQSTQNNGTLKGSNPSCQTSGLLSQWMHSTSSHEGHKQHRSQTLPIIRGKNALSNPKLLQMLDNTMTSNSNEIDIVHHVDTEANIATEVCLTILDLLSLFTQTHQRQLQQCDCQNSLMKRVFDTYMLFFQVNQSATALKHVFASLRLFVCKFPSAFFQGPADLCGSFCYEVLKCCNHRSRSTQTEASALLYFFMRKNFEFNKQKSIVRSHLQLIKAVSQLIADAGIGGSRFQHSLAITNNFANGDKQMKNSNFPAEVKDLTKRIRTVLMATAQMKEHEKDPEMLVDLQYSLANSYASTPELRRTWLESMAKIHARNGDLSEAAMCYIHIAALIAEYLKRKGYWKVEKICTASLLSEDTHPCDSNSLLTTPSGGSMFSMGWPAFLSITPNIKEEGAMKEDSGMQDTPYNENILVEQLYMCVEFLWKSERYELIADVNKPIIAVFEKQRDFKKLSDLYYDIHRSYLKVAEVVNSEKRLFGRYYRVAFYGQGFFEEEEGKEYIYKEPKLTGLSEISQRLLKLYADKFGADNVKIIQDSNKVNPKDLDPKYAYIQVTYVTPFFEEKEIEDRKTDFEMHHNINRFVFETPFTLSGKKHGGVAEQCKRRTILTTSHLFPYVKKRIQVISQSSTELNPIEVAIDEMSKKVSELNQLCTMEEVDMIRLQLKLQGSVSVKVNAGPMAYARAFLEETNAKKYPDNQVKLLKEIFRQFADACGQALDVNERLIKEDQLEYQEELRSHYKDMLSELSTVMNEQITGRDDLSKRGVDQTCTRVISKATPALPTVSISSSAEV

SEQ ID NO: 43453 - protein, 1830 aa, Homo sapiens
MAPWRKADKERHGVAIYNFQGSGAPQLSLQIGDVVRIQETCGDWYRGYLIKHKMLQGIFPKSFIHIKEVTVEKRRNTENIIPAEIPLAQEVTTTLWEWGSIWKQLYVASKKERFLQVQSMMYDLMEWRSQLLSGTLPKDELKELKQKVTSKIDYGNKILELDLIVRDEDGNILDPDNTSVISLFHAHEEATDKITERIKEEMSKDQPDYAMYSRISSSPTHSLYVFVRNFVCRIGEDAELFMSLYDPNKQTVISENYLVRWGSRGFPKEIEMLNNLKVVFTDLGNKDLNRDKIYLICQIVRVGKMDLKDTGAKKCTQGLRRPFGVAVMDITDIIKGKAESDEEKQHFIPFHPVTAENDFLHSLLGKVIASKGDSGGQGLWVTMKMLVGDIIQIRKDYPHLVDRTTVVARKLGFPEIIMPGDVRNDIYITLLQGDFDKYNKTTQRNVEVIMCVCAEDGKTLPNAICVGAGDKPMNEYRSVVYYQVKQPRWMETVKVAVPIEDMQRIHLRFMFRHRSSLESKDKGEKNFAMSYVKLMKEDGTTLHDGFHDLVVLKGDSKKMEDASAYLTLPSYRHHVENKGATLSRSSSSVGGLSVSSRDVFSISTLVCSTKLTQNVGLLGLLKWRMKPQLLQENLEKLKIVDGEEVVKFLQDTLDALFNIMMEHSQSDEYDILVFDALIYIIGLIADRKFQHFNTVLEAYIQQHFSATLAYKKLMTVLKTYLDTSSRGEQCEPILRTLKALEYVFKFIVRSRTLFSQLYEGKEQMEFEESMRRLFESINNLMKSQYKTTILLQVAALKYIPSVLHDVEMVFDAKLLSQLLYEFYTCIPPVKLQKQKVQSMNEIVQSNLFKKQECRDILLPVITKELKELLEQKDDMQHQVLERKYCVELLNSILEVLSYQDAAFTYHHIQEIMVQLLRTVNRTVITMGRDHILISHFVACMTAILNQMGDQHYSFYIETFQTSSELVDFLMETFIMFKDLIGKNVYPGDWMAMSMVQNRVFLRAINKFAETMNQKFLEHTNFEFQLWNNYFHLAVAFITQDSLQLEQFSHAKYNKILNKYGDMRRLIGFSIRDMWYKLGQNKICFIPGMVGPILEMTLIPEAELRKATIPIFFDMMLCEYQRSGDFKKFENEIILKLDHEVEGGRGDEQYMQLLESILMECAAEHPTIAKSVENFVNLVKGLLEKLLDYRGVMTDESKDNRMSCTVNLLNFYKDNNREEMYIRYLYKLRDLHLDCDNYTEAAYTLLLHTWLLKWSDEQCASQVMQTGQQHPQTHRQLKETLYETIIGYFDKGKMWEEAISLCKELAEQYEMEIFDYELLSQNLIQQAKFYESIMKILRPKPDYFAVGYYGQGFPSFLRNKVFIYRGKEYERREDFQMQLMTQFPNAEKMNTTSAPGDDVKNAPGQYIQCFTVQPVLDEHPRFKNKPVPDQIINFYKSNYVQRFHYSRPVRRGTVDPENEFASMWIERTSFVTAYKLPGILRWFEVVHMSQTTISPLENAIETMSTANEKILMMINQYQSDETLPINPLSMLLNGIVDPAVMGGFAKYEKAFFTEEYVRDHPEDQDKLTHLKDLIAWQIPFLGAGIKIHEKRVSDNLRPFHDRMEECFKNLKMKVEKEYGVREMPDFDDRRVGRPRSMLRSYRQMSIISLASMNSDCSTPSKPTSESFDLELASPKTPRVEQEEPISPGSTLPEVKLRRSKKRTKRSSVVFADEKAAAESDLKRLSRKHEFMSDTNLSEHAAIPLKASVLSQMSFASQSMPTIPALALSVAGIPGLDEANTSPRLSQTFLQLSDGDKKTLTRKKVNQFFKTMLASKSAEEGKQIPDSLSTDL

SEQ ID NO: 43454 - protein, 336 aa, Homo sapiens
MCVCAEDGKTLPVAVPIEDMQRIHLRFMFRHRSSLESKDKGEKNFAMSYVKLMKEDGTTLHDGFHDLVVLKGDSKKMEDASAYLTLPSYRHHVENKGATLSRSSSSVGGLSVSSRDVFSISTLVCSTKLTQNVGLLGLLKWRMKPQLEESMRRLFESINNLMKSQYKTTILLQVAALKYIPSVLHDVEMVFDAKLLSQLLYEFYTCIPPVKLQKQKVQSMNEIVQSNLFKKQECRDILLPVITKELKELLEQKDDMQHQVLERKYCVELLNSILEVLSYQDAAFTYHHIQEIMVQLLRTVNRTVITMGRDHILIGACCNCGFPSSTPHSLIQWLWG

SEQ ID NO: 43455 - protein, 891 aa, Homo sapiens
MTAILNQMGDQHYSFYIETFQTSSELVDFLMETFIMFKDLIGKNVYPGDWMAMSMVQNRVFLRAINKFAETMNQKFLEHTNFEFQLWNNYFHLAVAFITQDSLQLEQFSHAKYNKILNKYGDMRRLIGFSIRDMWYKLGQNKICFIPGMVGPILEMTLIPEAELRKATIPIFFDMMLCEYQRSGDFKKFENEIILKLDHEVEGGRGDEQYMQLLESILMECAAEHPTIAKSVENFVNLVKGLLEKLLDYRGVMTDESKDNRMSCTVNLLNFYKDNNREEMYIRYLYKLRDLHLDCDNYTEAAYTLLLHTWLLKWSDEQCASQVMQTGQQHPQTHRQLKETLYETIIGYFDKGKMWEEAISLCKELAEQYEMEIFDYELLSQNLIQQAKFYESIMKILRPKPDYFAVGYYGQGFPSFLRNKVFIYRGKEYERREDFQMQLMTQFPNAEKMNTTSAPGDDVKNAPGQYIQCFTVQPVLDEHPRFKNKPVPDQIINFYKSNYVQRFHYSRPVRRGTVDPENEFASMWIERTSFVTAYKLPGILRWFEVVHMSQTTISPLENAIETMSTANEKILMMINQYQSDETLPINPLSMLLNGIVDPAVMGGFAKYEKAFFTEEYVRDHPEDQDKLTHLKDLIAWQIPFLGAGIKIHEKRVSDNLRPFHDRMEECFKNLKMKVEKEYGVREMPDFDDRRVGRPRSMLRSYRQMSIISLASMNSDCSTPSKPTSESFDLELASPKTPRVEQEEPISPGSTLPEVKLRRSKKRTKRSSVVFADEKAAAESDLKRLSRKHEFMSDTNLSEHAAIPLKASVLSQMSFASQSMPTIPALALSVAGIPGLDEANTSPRLSQTFLQLSDGDKKTLTRKKVNQFFKTMLASKSAEEGKQIPDSLSTDL

SEQ ID NO: 43456 - protein, 2030 aa, Homo sapiens
MWTPTEEEKYGVVICSFRGSVPQGLVLEIGETVQILEKCEGWYRGVSTKKPNVKGIFPANYIHLKKAIVSNRGQYETVVPLEDSIVTEVTATLQEWASLWKQLYVKHKVDLFYKLRHVMNELIDLRRQLLSGHLTQDQVREVKRHITVRLDWGNEHLGLDLVPRKDFEVVDSDQISVSDLYKMHLSSRQSVQQSTSQVDTMRPRHGETCRMPVPHHFFLSLKSFTYNTIGEDTDVFFSLYDMREGKQISERFLVRLNKNGGPRNPEKIERMCALFTDLSSKDMKRDLYIVAHVIRIGRMLLNDSKKGPPHLHYRRPYGCAVLSILDVLQSLTEVKEEKDFVLKVYTCNNESEWSQIHENIIRKSSAKYSAPSASHGLIISLQLLRGDMEQIRRENPMIFNRGLAITRKLGFPDVIMPGDIRNDLYLTLEKGDFERGGKSVQKNIEVTMYVLYADGEILKDCISLGSGEPNRSSYHSFVLYHSNSPRWGEIIKLPIPIDRFRGSHLRFEFRHCSTKDKGEKKLFGFAFSTLMRDDGTTLSDDIHELYVYKCDENSTFNNHALYLGLPCCKEDYNGCPNIPSSLIFQRSTKESFFISTQLSSTKLTQNVDLLALLKWKAFPDRIMDVLGRLRHVSGEEIVKFLQDILDTLFVILDDNTEKYGLLVFQSLVFIINLLRDIKYFHFRPVMDTYIQKHFAGALAYKELIRCLKWYMDCSAELIRQDHIQEAMRALEYLFKFIVQSRILYSRATCGMEEEQFRSSIQELFQSIRFVLSLDSRNSETLLFTQAALLNSFPTIFDELLQMFTVQEVAEFVRGTLGSMPSTVHIGQSMDVVKLQSIARTVDSRLFSFSESRRILLPVVLHHIHLHLRQQKELLICSGILGSIFSIVKTSSLEADVMEEVEMMVESLLDVLLQTLLTIMSKSHAQEAVRGQRCPQCTAEITGEYVSCLLSLLRQMCDTHFQHLLDNFQSKDELKEFLLKIFCVFRNLMKMSVFPRDWMVMRLLTSNIIVTTVQYLSSALHKNFTETDFDFKVWNSYFSLAVLFINQPSLQLEIITSAKRKKILDKYGDMRVMMAYELFSMWQNLGEHKIHFIPGMIGPFLGVTLVPQPEVRNIMIPIFHDMMDWEQRKNGNFKQVEAELIDKLDSMVSEGKGDESYRELFSLLTQLFGPYPSLLEKVEQETWRETGISFVTSVTRLMERLLDYRDCMKGEETENKKIGCTVNLMNFYKSEINKEEMYIRYIHKLCDMHLQAENYTEAAFTLLLYCELLQWEDRPLREFLHYPSQTEWQRKEGLCRKIIHYFNKGKSWEFGIPLCRELACQYESLYDYQSLSWIRKMEASYYDNIMEQQRLEPEFFRVGFYGRKFPFFLRNKEYVCRGHDYERLEAFQQRMLSEFPQAVAMQHPNHPDDAILQCDAQYLQIYAVTPIPDYVDVLQMDRVPDRVKSFYRVNNVRKFRYDRPFHKGPKDKENEFKSLWIERTTLTLTHSLPGISRWFEVERRELVEVSPLENAIQVVENKNQELRSLISQYQHKQVHGNINLLSMCLNGVIDAAVNGGIARYQEAFFDKDYINKHPGDAEKITQLKELMQEQVHVLGVGLAVHEKFVHPEMRPLHKKLIDQFQMMRASLYHEFPGLDKLSPACSGTSTPRGNVLASHSPMSPESIKMTHRHSPMNLMGTGRHSSSSLSSHASSEAGNMVMLGDGSMGDAPEDLYHHMQLAYPNPRYQGSVTNVSVLSSSQASPSSSSLSSTHSAPSQMITSAPSSARGSPSLPDKYRHAREMMLLLPTYRDRPSSAMYPAAILENGQPPNFQRALFQQVVGACKPCSDPNLSVAEKGHYSLHFDAFHHPLGDTPPALPARTLRKSPLHPIPASPTSPQSGLDGSNSTLSGSASSGVSSLSESNFGHSSEAPPRTDTMDSMPSQAWNADEDLEPPYLPVHYSLSESAVLDSIKAQPCRSHSAPGCVIPQDPMDPPALPPKPYHPRLPALEHDEGVLLREETERPRGLHRKAPLPPGSAKEEQARMAWEHGRGEQ

SEQ ID NO: 43457 - protein, 594 aa, Homo sapiens
MPKWLEETENKKIGCTVNLMNFYKSEINKEEMYIRYIHKLCDMHLQAENYTEAAFTLLLYCELLQWEDRPLREFLHYPSQTEWQRKEGLCRKIIHYFNKGKSWEFGIPLCRELACQYESLYDYQSLSWIRKMEASYYDNIMEQQRLEPEFFRVGFYGRKFPFFLRNKEYVCRGHDYERLEAFQQRMLSEFPQAVAMQHPNHPDDAILQCDAQYLQIYAVTPIPDYVDVLQMDRVPDRVKSFYRVNNVRKFRYDRPFHKGPKDKENEFKSLWIERTTLTLTHSLPGISRWFEVERRELVEVSPLENAIQVVENKNQELRSLISQYQHKQVHGNINLLSMCLNGVIDAAVNGGIARYQEAFFDKDYINKHPGDAEKITQLKELMQEQVHVLGVGLAVHEKFVHPEMRPLHKKLIDQFQMMRASLYHEFPGLDKLSPACSGTSTPRGNVLASHSPMSPESIKMTHRHSPMNLMGTGRHSSSSLSSHASSEAGNMVMLGDGSMGDAPEDLYHHMQLAYPNPRYQGSVTNVSVLSSSQASPSSSSLSSTHSAPSQMITSAPSSARGSPSLPDKYRHAREMMLLLPTYRDRPSSAMYPAA

SEQ ID NO: 43458 - protein, 1925 aa, Homo sapiens
VIASFRGTVPYGLSLEIGDTVQILEKCDGWYRGFALKNPNIKGIFPSSYVHLKNACVKNKGQFEMVIPTEDSVITEMTSTLRDWGTMWKQLYVRNEGDLFHRLWHIMNEILDLRRQVLVGHLTHDRMKDVKRHITARLDWGNEQLGLDLVPRKEYAMVDPEDISITELYRLMEHRHRKKDTPVQASSHHLFVQMKSLMCSNLGEELEVIFSLFDSKENRPISERFFLRLNRNGLPKAPDKPERHCSLFVDLGSSELRKDIYITVHIIRIGRMGAGEKKNACSVQYRRPFGCAVLSIADLLTGETKDDLILKVYMCNTESEWYQIHENIIKKLNARYNLTGSNAGLAVSLQLLHGDIEQIRREYSSVFSHGVSITRKLGFSNIIMPGEMRNDLYITIERGEFEKGGKSVARNVEVTMFIVDSSGQTLKDFISFGSGEPPASEYHSFVLYHNNSPRWSELLKLPIPVDKFRGAHIRFEFRHCSTKEKGEKKLFGFSFVPLMQEDGRTLPDGTHELIVHKCEENTNLQDTTRYLKLPFSKGIFLGNNNQAMKATKESFCITSFLCSTKLTQNGDMLDLLKWRTHPDKITGCLSKLKEIDGSEIVKFLQDTLDTLFGILDENSQKYGSKVFDSLVHIINLLQDSKFHHFKPVMDTYIESHFAGALAYRDLIKVLKWYVDRITEAERQEHIQEVLKAQEYIFKYIVQSRRLFSLATGGQNEEEFRCCIQELLMSVRFFLSQESKGSGALSQSQAVFLSSFPAVYSELLKLFDVREVANLVQDTLGSLPTILHVDDSLQAIKLQCIGKTVESQLYTNPDSRYILLPVVLHHLHIHLQEQKDLIMCARILSNVFCLIKKNSSEKSVLEEIDVIVASLLDILLRTILEITSRPQPSSSAMRFQFQDVTGEFVACLLSLLRQMTDRHYQQLLDSFNTKEELRDFLLQIFTVFRILIRPEMFPKDWTVMRLVANNVIITTVLYLSDALRKNFLNENFDYKIWDSYFYLAVIFINQLCLQLEMFTPSKKKKVLEKYGDMRVTMGCEIFSMWQNLGEHKLHFIPALIGPFLEVTLIPQPDLRNVMIPIFHDMMDWEQRRSGNFKQVEAKLIDKLDSLMSEGKGDETYRELFNSIIPLFGPYPSLLKKIERETWRESGVSLIATVTRLMERLLDYRDCMKMGEVDGKKIGCTVSLLNFYKTELNKEEMYIRYIHKLYDLHLKAQNFTEAAYTLLLYDELLEWSDRPLREFLTYPMQTEWQRKEHLHLTIIQNFDRGKCWENGIILCRKIAEQYESYYDYRNLSKMRMMEASLYDKIMDQQRLEPEFFRVGFYGKKFPFFLRNKEFVCRGHDYERLEAFQQRMLNEFPHAIAMQHANQPDETIFQAEAQYLQIYAVTPIPESQEVLQREGVPDNIKSFYKVNHIWKFRYDRPFHKGTKDKENEFKSLWVERTSLYLVQSLPGISRWFEVEKREVVEMSPLENAIEVLENKNQQLKTLISQCQTRQMQNINPLTMCLNGVIDAAVNGGVSRYQEAFFVKEYILSHPEDGEKIARLRELMLEQAQILEFGLAVHEKFVPQDMRPLHKKLVDQFFVMKSSLGIQEFSACMQASPVHFPNGSPRVCRNSAPASVSPDGTRVIPRRSPLSYPAVNRYSSSSLSSQASAEVSNITGQSESSDEVFNMQPSPSTSSLSSTHSASPNVTSSAPSSARASPLLSDKHKHSRENSCLSPRERPCSAIYPTPVEPSQRMLFNHIGDGALPRSDPNLSAPEKASPARHTTSVSPSPAGRSPLKGSVQSFTPSPVEYHSPGLISNSPVLSGSYSSGISSLSRCSTSETSGFENQVNEQSAPLPVPVPVPVPSYGGEEPVRKESKTPPPYSVYERTLRRPVPLPHSLSIPVTSEPPALPPKPLAARSSHLENGARRTDPGPRPRPLPRKVSQL

SEQ ID NO: 43459 - protein, 1954 aa, Homo sapiens
VIASFRGTVPYGLSLEIGDTVQILEKCDGWYRGFALKNPNIKGIFPSSYVHLKNACVKNKGQFEMVIPTEDSVITEMTSTLRDWGTMWKQLYVRNEGDLFHRLWHIMNEILDLRRQVLVGHLTHDRMKDVKRHITARLDWGNEQLGLDLVPRKEYAMVDPEDISITELYRLMEHRHRKKDTPVQASSHHLFVQMKSLMCSNLGEELEVIFSLFDSKENRPISERFFLRLNRNGLPKAPDKPERHCSLFVDLGSSELRKDIYITVHIIRIGRMGAGEKKNACSVQYRRPFGCAVLSIADLLTGETKDDLILKVYMCNTESEWYQIHENIIKKLNARYNLTGSNAGLAVSLQLLHGDIEQIRREYSSVFSHGVSITRKLGFSNIIMPGEMRNDLYITIERGEFEKGGKSVARNVEVTMFIVDSSGQTLKDFISFGSGEPPASEYHSFVLYHNNSPRWSELLKLPIPVDKFRGAHIRFEFRHCSTKEKGEKKLFGFSFVPLMQEDGRTLPDGTHELIVHKCEENTNLQDTTRYLKLPFSKGIFLGNNNQAMKATKESFCITSFLCSTKLTQNGDMLDLLKWRTHPDKITGCLSKLKEIDGSEIVKFLQDTLDTLFGILDENSQKYGSKVFDSLVHIINLLQDSKFHHFKPVMDTYIESHFAGALAYRDLIKVLKWYVDRITEAERQEHIQEVLKAQEYIFKYIVQSRRLFSLATGGQNEEEFRCCIQELLMSVRFFLSQESKGSGALSQSQAVFLSSFPAVYSELLKLFDVREVANLVQDTLGSLPTILHVDDSLQAIKLQCIGKTVESQLYTNPDSRYILLPVVLHHLHIHLQEQKDLIMCARILSNVFCLIKKNSSEKSVLEEIDVIVASLLDILLRTILEITSRPQPSSSAMRFQFQDVTGEFVACLLSLLRQMTDRHYQQLLDSFNTKEELRDFLLQIFTVFRILIRPEMFPKDWTVMRLVANNVIITTVLYLSDALRKNFLNENFDYKIWDSYFYLAVIFINQLCLQLEMFTPSKKKKVLEKYGDMRVTMGCEIFSMWQNLGEHKLHFIPALIGPFLEVTLIPQPDLRNVMIPIFHDMMDWEQRRSGNFKQVEAKLIDKLDSLMSEGKGDETYRELFNSILLKKIERETWRESGVSLIATVTRLMERLLDYRDCMKMGEVDGKKIGCTVSLLNFYKTELNKEEMYIRYIHKLYDLHLKAQNFTEAAYTLLLYDELLEWSDRPLREFLTYPMQTEWQRKEHLHLTIIQNFDRGKCWENGIILCRKIAEQYESYYDYRNLSKMRMMEASLYDKIMDQQRLEPEFFRVGFYGKKFPFFLRNKEFVCRGHDYERLEAFQQRMLNEFPHAIAMQHANQPDETIFQAEAQYLQIYAVTPIPESQEVLQREGVPDNIKSFYKVNHIWKFRYDRPFHKGTKDKENEFKSLWVERTSLYLVQSLPGISRWFEVEKREVVEMSPLENAIEVLENKNQQLKTLISQCQTRQMQNINPLTMCLNGVIDAAVNGGVSRYQEAFFVKEYILSHPEDGEKIARLRELMLEQAQILEFGLAVHEKFVPQDMRPLHKKLVDQFFVMKSSLGIQEFSACMQASPVHFPNGSPRVCRNSAPASVSPDGTRVIPRRSPLSYPAVNRYSSSSLSSQASAEVSNITGQSESSDEVFNMQPSPSTSSLSSTHSASPNVTSSAPSSARASPLLSDKHKHSRENSCLSPRERPCSAIYPTPVEPSQRMLFNHIGDGALPRSDPNLSAPEKAVNPTPSSWSLDSGKEAKNMSDSGKLISPPVPPRPTQTASPARHTTSVSPSPAGRSPLKGSVQSFTPSPVEYHSPGLISNSPVLSGSYSSGISSLSRCSTSETSGFENQVNEQSAPLPVPVPVPVPSYGGEEPVRKESKTPPPYSVYERTLRRPVPLPHSLSIPVTSEPPALPPKPLAARSSHLENGARRTDPGPRPRPLPRKVSQL

SEQ ID NO: 43460 - protein, 1975 aa, Homo sapiens
MWIPTEHEKYGVVIASFRGTVPYGLSLEIGDTVQILEKCDGWYRGFALKNPNIKGIFPSSYVHLKNACVKNKGQFEMVIPTEDSVITEMTSTLRDWGTMWKQLYVRNEGDLFHRLWHIMNEILDLRRQVLVGHLTHDRMKDVKRHITARLDWGNEQLGLDLVPRKEYAMVDPEDISITELYRLMEHRHRKKDTPVQASSHHLFVQMKSLMCSNLGEELEVIFSLFDSKENRPISERFFLRLNRNGLPKAPDKPERHCSLFVDLGSSELRKDIYITVHIIRIGRMGAGEKKNACSVQYRRPFGCAVLSIADLLTGETKDDLILKVYMCNTESEWYQIHENIIKKLNARYNLTGSNAGLAVSLQLLHGDIEQIRREYSSVFSHGVSITRKLGFSNIIMPGEMRNDLYITIERGEFEKGGKSVARNVEVTMFIVDSSGQTLKDFISFGSGEPPASEYHSFVLYHNNSPRWSELLKLPIPVDKFRGAHIRFEFRHCSTKEKGEKKLFGFSFVPLMQEDGRTLPDGTHELIVHKCEENTNLQDTTRYLKLPFSKGIFLGNNNQAMKATKESFCITSFLCSTKLTQNGDMLDLLKWRTHPDKITGCLSKLKEIDGSEIVKFLQDTLDTLFGILDENSQKYGSKVFDSLVHIINLLQDSKFHHFKPVMDTYIESHFAGALAYRDLIKVLKWYVDRITEAERQEHIQEVLKAQEYIFKYIVQSRRLFSLATGGQNEEEFRCCIQELLMSVRFFLSQESKGSGALSQSQAVFLSSFPAVYSELLKLFDVREVANLVQDTLGSLPTILHVDDSLQAIKLQCIGKTVESQLYTNPDSRYILLPVVLHHLHIHLQEQKDLIMCARILSNVFCLIKKNSSEKSVLEEIDVIVASLLDILLRTILEITSRPQPSSSAMRFQFQDVTGEFVACLLSLLRQMTDRHYQQLLDSFNTKEELRDFLLQIFTVFRILIRPEMFPKDWTVMRLVANNVIITTVLYLSDALRKNFLNENFDYKIWDSYFYLAVIFINQLCLQLEMFTPSKKKKVLEKYGDMRVTMGCEIFSMWQNLGEHKLHFIPALIGPFLEVTLIPQPDLRNVMIPIFHDMMDWEQRRSGNFKQVEAKLIDKLDSLMSEGKGDETYRELFNSIIPLFGPYPSLLKKIERETWRESGVSLIATVTRLMERLLDYRDCMKMGEVDGKKIGCTVSLLNFYKTELNKEEMYIRYIHKLYDLHLKAQNFTEAAYTLLLYDELLEWSDRPLREFLTYPMQTEWQRKEHLHLTIIQNFDRGKCWENGIILCRKIAEQYESYYDYRNLSKMRMMEASLYDKIMDQQRLEPEFFRVGFYGKKFPFFLRNKEFVCRGHDYERLEAFQQRMLNEFPHAIAMQHANQPDETIFQAEAQYLQIYAVTPIPESQEVLQREGVPDNIKSFYKVNHIWKFRYDRPFHKGTKDKENEFKSLWVERTSLYLVQSLPGISRWFEVEKREVVEMSPLENAIEVLENKNQQLKTLISQCQTRQMQNINPLTMCLNGVIDAAVNGGVSRYQEAFFVKEYILSHPEDGEKIARLRELMLEQAQILEFGLAVHEKFVPQDMRPLHKKLVDQFFVMKSSLGIQEFSACMQASPVHFPNGSPRVCRNSAPASVSPDGTRVIPRRSPLSYPAVNRYSSSSLSSQASAEVSNITGQSESSDEVFNMQPSPSTSSLSSTHSASPNVTSSAPSSARASPLLSDKHKHSRENSCLSPRERPCSAIYPTPVEPSQRMLFNHIGDGALPRSDPNLSAPEKAVNPTPSSWSLDSGKEAKNMSDSGKLISPPVPPRPTQTASPARHTTSVSPSPAGRSPLKGSVQSFTPSPVEYHSPGLISNSPVLSGSYSSGISSLSRCSTSETSGFENQVNEQSAPLPVPVPVPVPSYGGEEPVRKESKTPPPYSVYERTLRRPVPLPHSLSIPVTSEPPALPPKPLAARSSHLENGARRTDPGPRPRPLPRKVSQL

SEQ ID NO: 43461 - protein, 1966 aa, Homo sapiens
MWIPTEHEKYGVVIASFRGTVPYGLSLEIGDTVQILEKCDGWYRGFALKNPNIKGIFPSSYVHLKNACVKNKGQFEMVIPTEDSVITEMTSTLRDWGTMWKQLYVRNEGDLFHRLWHIMNEILDLRRQVLVGHLTHDRMKDVKRHITARLDWGNEQLGLDLVPRKEYAMVDPEDISITELYRLMEHRHRKKDTPVQASSHHLFVQMKSLMCSNLGEELEVIFSLFDSKENRPISERFFLRLNRNGLPKAPDKPERHCSLFVDLGSSELRKDIYITVHIIRIGRMGAGEKKNACSVQYRRPFGCAVLSIADLLTGETKDDLILKVYMCNTESEWYQIHENIIKKLNARYNLTGSNAGLAVSLQLLHGDIEQIRREYSSVFSHGVSITRKLGFSNIIMPGEMRNDLYITIERGEFEKGGKSVARNVEVTMFIVDSSGQTLKDFISFGSGEPPASEYHSFVLYHNNSPRWSELLKLPIPVDKFRGAHIRFEFRHCSTKEKGEKKLFGFSFVPLMQEDGRTLPDGTHELIVHKCEENTNLQDTTRYLKLPFSKGIFLGNNNQAMKATKESFCITSFLCSTKLTQNGDMLDLLKWRTHPDKITGCLSKLKEIDGSEIVKFLQDTLDTLFGILDENSQKYGSKVFDSLVHIINLLQDSKFHHFKPVMDTYIESHFAGALAYRDLIKVLKWYVDRITEAERQEHIQEVLKAQEYIFKYIVQSRRLFSLATGGQNEEEFRCCIQELLMSVRFFLSQESKGSGALSQSQAVFLSSFPAVYSELLKLFDVREVANLVQDTLGSLPTILHVDDSLQAIKLQCIGKTVESQLYTNPDSRYILLPVVLHHLHIHLQEQKDLIMCARILSNVFCLIKKNSSEKSVLEEIDVIVASLLDILLRTILEITSRPQPSSSAMRFQFQDVTGEFVACLLSLLRQMTDRHYQQLLDSFNTKEELRDFLLQIFTVFRILIRPEMFPKDWTVMRLVANNVIITTVLYLSDALRKNFLNENFDYKIWDSYFYLAVIFINQLCLQLEMFTPSKKKKVLEKYGDMRVTMGCEIFSMWQNLGEHKLHFIPALIGPFLEVTLIPQPDLRNVMIPIFHDMMDWEQRRSGNFKQVEAKLIDKLDSLMSEGKGDETYRELFNSILLKKIERETWRESGVSLIATVTRLMERLLDYRDCMKMGEVDGKKIGCTVSLLNFYKTELNKEEMYIRYIHKLYDLHLKAQNFTEAAYTLLLYDELLEWSDRPLREFLTYPMQTEWQRKEHLHLTIIQNFDRGKCWENGIILCRKIAEQYESYYDYRNLSKMRMMEASLYDKIMDQQRLEPEFFRVGFYGKKFPFFLRNKEFVCRGHDYERLEAFQQRMLNEFPHAIAMQHANQPDETIFQAEAQYLQIYAVTPIPESQEVLQREGVPDNIKSFYKVNHIWKFRYDRPFHKGTKDKENEFKSLWVERTSLYLVQSLPGISRWFEVEKREVVEMSPLENAIEVLENKNQQLKTLISQCQTRQMQNINPLTMCLNGVIDAAVNGGVSRYQEAFFVKEYILSHPEDGEKIARLRELMLEQAQILEFGLAVHEKFVPQDMRPLHKKLVDQFFVMKSSLGIQEFSACMQASPVHFPNGSPRVCRNSAPASVSPDGTRVIPRRSPLSYPAVNRYSSSSLSSQASAEVSNITGQSESSDEVFNMQPSPSTSSLSSTHSASPNVTSSAPSSARASPLLSDKHKHSRENSCLSPRERPCSAIYPTPVEPSQRMLFNHIGDGALPRSDPNLSAPEKAVNPTPSSWSLDSGKEAKNMSDSGKLISPPVPPRPTQTASPARHTTSVSPSPAGRSPLKGSVQSFTPSPVEYHSPGLISNSPVLSGSYSSGISSLSRCSTSETSGFENQVNEQSAPLPVPVPVPVPSYGGEEPVRKESKTPPPYSVYERTLRRPVPLPHSLSIPVTSEPPALPPKPLAARSSHLENGARRTDPGPRPRPLPRKVSQL

SEQ ID NO: 43462 - protein, 849 aa, Homo sapiens
MKMHSTERIPLFGPYPSLLKKIERETWRESGVSLIATVTRLMERLLDYRDCMKMGEVDGKKIGCTVSLLNFYKTELNKEEMYIRYIHKLYDLHLKAQNFTEAAYTLLLYDELLEWSDRPLREFLTYPMQTEWQRKEHLHLTIIQNFDRGKCWENGIILCRKIAEQYESYYDYRNLSKMRMMEASLYDKIMDQQRLEPEFFRVGFYGKKFPFFLRNKEFVCRGHDYERLEAFQQRMLNEFPHAIAMQHANQPDETIFQAEAQYLQIYAVTPIPESQEVLQREGVPDNIKSFYKVNHIWKFRYDRPFHKGTKDKENEFKSLWVERTSLYLVQSLPGISRWFEVEKREVVEMSPLENAIEVLENKNQQLKTLISQCQTRQMQNINPLTMCLNGVIDAAVNGGVSRYQEAFFVKEYILSHPEDGEKIARLRELMLEQAQILEFGLAVHEKFVPQDMRPLHKKLVDQFFVMKSSLGIQEFSACMQASPVHFPNGSPRVCRNSAPASVSPDGTRVIPRRSPLSYPAVNRYSSSSLSSQASAEVSNITGQSESSDEVFNMQPSPSTSSLSSTHSASPNVTSSAPSSARASPLLSDKHKHSRENSCLSPRERPCSAIYPTPVEPSQRMLFNHIGDGALPRSDPNLSAPEKAVNPTPSSWSLDSGKEAKNMSDSGKLISPPVPPRPTQTASPARHTTSVSPSPAGRSPLKGSVQSFTPSPVEYHSPGLISNSPVLSGSYSSGISSLSRCSTSETSGFENQVNEQSAPLPVPVPVPVPSYGGEEPVRKESKTPPPYSVYERTLRRPVPLPHSLSIPVTSEPPALPPKPLAARSSHLENGARRTDPGPRPRPLPRKVSQL

SEQ ID NO: 43463 - protein, 1105 aa, Homo sapiens
WIPSEKQTFFTVIASFRGTVPYGLSLEIGDTVQILEKCDGWYRGFALKNPNIKGIFPSSYVHLKNACVKNKGQFEMVIPTEDSVITEMTSTLRDWGTMWKQLYVRNEGDLFHRLWHIMNEILDLRRQVLVGHLTHDRMKDVKRHITARLDWGNEQLGLDLVPRKEYAMVDPEDISITELYRLMEHRHRKKDTPVQASSHHLFVQMKSLMCSNLGEELEVIFSLFDSKENRPISERFFLRLNRNGLPKAPDKPERHCSLFVDLGSSELRKDIYITVHIIRIGRMGAGEKKNACSVQYRRPFGCAVLSIADLLTGETKDDLILKVYMCNTESEWYQIHENIIKKLNARYNLTGSNAGLAVSLQLLHGDIEQIRREYSSVFSHGVSITRKLGFSNIIMPGEMRNDLYITIERGEFEKGGKSVARNVEVTMFIVDSSGQTLKDFISFGSGEPPASEYHSFVLYHNNSPRWSELLKLPIPVDKFRGAHIRFEFRHCSTKEKGEKKLFGFSFVPLMQEDGRTLPDGTHELIVHKCEENTNLQDTTRYLKLPFSKGIFLGNNNQAMKATKESFCITSFLCSTKLTQNGDMLDLLKWRTHPDKITGCLSKLKEIDGSEIVKFLQDTLDTLFGILDENSQKYGSKVFDSLVHIINLLQDSKFHHFKPVMDTYIESHFAGALAYRDLIKVLKWYVDRITEAERQEHIQEVLKAQEYIFKYIVQSRRLFSLATGGQNEEEFRCCIQELLMSVRFFLSQESKGSGALSQSQAVFLSSFPAVYSELLKLFDVREVANLVQDTLGSLPTILHVDDSLQAIKLQCIGKTVESQLYTNPDSRYILLPVVLHHLHIHLQEQKDLIMCARILSNVFCLIKKNSSEKSVLEEIDVIVASLLDILLRTILEITSRPQPSSSAMRFQFQDVTGEFVACLLSLLRQMTDRHYQQLLDSFNTKEELRDFLLQIFTVFRILIRPEMFPKDWTVMRLVANNVIITTVLYLSDALRKNFLNENFDYKIWDSYFYLAVIFINQLCLQLEMFTPSKKKKVLEKYGDMRVTMGCEIFSMWQNLGEHKLHFIPALRQENRLNLGGGGCSEPRACHCTPAWATKRDCVSKKKEKKT

SEQ ID NO: 43464 - protein, 2047 aa, Homo sapiens
MAASERRAFAHKINRTVAAEVRKQVSRERSGSPHSSRRCSSSLGVPLTEVVEPLDFEDVLLSRPPDAEPGPLRDLVEFPADDLELLLQPRECRTTEPGIPKDEKLDAQVRAAVEMYIEDWVIVHRRYQYLSAAYSPVTTDTQRERQKGLPRQVFEQDASGDERSGPEDSNDSRRGSGSPEDTPRSSGASSIFDLRNLAADSLLPSLLERAAPEDVDRRNETLRRQHRPPALLTLYPAPDEDEAVERCSRPEPPREHFGQRILVKCLSLKFEIEIEPIFGILALYDVREKKKISENFYFDLNSDSMKGLLRAHGTHPAISTLARSAIFSVTYPSPDIFLVIKLEKVLQQGDISECCEPYMVLKEVDTAKNKEKLEKLRLAAEQFCTRLGRYRMPFAWTAVHLANIVSSAGQLDRDSDSEGERRPAWTDRRRRGPQDRASSGDDACSFSGFRPATLTVTNFFKQEAERLSDEDLFKFLADMRRPSSLLRRLRPVTAQLKIDISPAPENPHFCLSPELLHIKPYPDPRGRPTKEILEFPAREVYAPHTSYRNLLYVYPHSLNFSSRQGSVRNLAVRVQYMTGEDPSQALPVIFGKSSCSEFTREAFTPVVYHNKSPEFYEEFKLHLPACVTENHHLLFTFYHVSCQPRPGTALETPVGFTWIPLLQHGRLRTGPFCLPVSVDQPPPSYSVLTPDVALPGMRWVDGHKGVFSVELTAVSSVHPQDPYLDKFFTLVHVLEEGAFPFRLKDTVLSEGNVEQELRASLAALRLASPEPLVAFSHHVLDKLVRLVIRPPIISGQIVNLGRGAFEAMAHVVSLVHRSLEAAQDARGHCPQLAAYVHYAFRLPGTEPSLPDGAPPVTVQAATLARGSGRPASLYLARSKSISSSNPDLAVAPGSVDDEVSRILASKLLHEELALQWVVSSSAVREAILQHAWFFFQLMVKSMALHLLLGQRLDTPRKLRFPGRFLDDITALVGSVGLEVITRVHKDVELAEHLNASLAFFLSDLLSLVDRGFVFSLVRAHYKQVATRLQSSPNPAALLTLRMEFTRILCSHEHYVTLNLPCCPLSPPASPSPSVSSTTSQSSTFSSQAPDPKVTSMFELSGPFRQQHFLAGLLLTELALALEPEAEGAFLLHKKAISAVHSLLCGHDTDPRYAEATVKARVAELYLPLLSIARDTLPRLHDFAEGPGQRSRLASMLDSDTEGEGDIAGTINPSVAMAIAGGPLAPGSRASISQGPPTASRAGCALSAESSRTLLACVLWVLKNTEPALLQRWATDLTLPQLGRLLDLLYLCLAAFEYKGKKAFERINSLTFKKSLDMKARLEEAILGTIGARQEMVRRSRERSPFGNPENVRWRKSVTHWKQTSDRVDKTKDEMEHEALVEGNLATEASLVVLDTLEIIVQTVMLSEARESVLGAVLKVVLYSLGSAQSALFLQHGLATQRALVSKFPELLFEEDTELCADLCLRLLRHCGSRISTIRTHASASLYLLMRQNFEIGHNFARVKMQVTMSLSSLVGTTQNFSEEHLRRSLKTILTYAEEDMGLRDSTFAEQVQDLMFNLHMILTDTVKMKEHQEDPEMLIDLMYRIARGYQGSPDLRLTWLQNMAGKHAELGNHAEAAQCMVHAAALVAEYLALLEDHRHLPVGCVSFQNISSNVLEESAISDDILSPDEEGFCSGKHFTELGLVGLLEQAAGYFTMGGLYEAVNEVYKNLIPILEAHRDYKKLAAVHGKLQEAFTKIMHQSSGWERVFGTYFRVGFYGAHFGDLDEQEFVYKEPSITKLAEISHRLEEFYTERFGDDVVEIIKDSNPVDKSKLDSQKAYIQITYVEPYFDTYELKDRVTYFDRNYGLRTFLFCTPFTPDGRAHGELPEQHKRKTLLSTDHAFPYIKTRIRVCHREETVLTPVEVAIEDMQKKTRELAFATEQDPPDAKMLQMVLQGSVGPTVNQGPLEVAQVFLAEIPEDPKLFRHHNKLRLCFKDFCKKCEDALRKNKALIGPDQKEYHRELERNYCRLREALQPLLTQRLPQLMAPTPPGLRNSLNRASFRKADL

SEQ ID NO: 43465 - protein, 1386 aa, Homo sapiens [sequence omitted]

SEQ ID NO: 43466 - protein, 1990 aa, Homo sapiens
MATLPSAERRAFALKINRYSSAEIRKQFTLPPNLGQYHRQSISTSGFPSLQLPQFYDPVEPVDFEGLLMTHLNSLDVQLAQELGDFTDDDLDVVFTPKECRTLQPSLPEEGVELDPHVRDCVQTYIREWLIVNRKNQGSPEICGFKKTGSRKDFHKTLPKQTFESETLECSEPAAQAGPRHLNVLCDVSGKGPVTACDFDLRSLQPDKRLENLLQQVSAEDFEKQNEEARRTNRQAELFALYPSVDEEDAVEIRPVPECPKEHLGNRILVKLLTLKFEIEIEPLFASIALYDVKERKKISENFHCDLNSDQFKGFLRAHTPSVAASSQARSAVFSVTYPSSDIYLVVKIEKVLQQGEIGDCAEPYTVIKESDGGKSKEKIEKLKLQAESFCQRLGKYRMPFAWAPISLSSFFNVSTLEREVTDVDSVVGRSSVGERRTLAQSRRLSERALSLEENGVGSNFKTSTLSVSSFFKQEGDRLSDEDLFKFLADYKRSSSLQRRVKSIPGLLRLEISTAPEIINCCLTPEMLPVKPFPENRTRPHKEILEFPTREVYVPHTVYRNLLYVYPQRLNFVNKLASARNITIKIQFMCGEDASNAMPVIFGKSSGPEFLQEVYTAVTYHNKSPDFYEEVKIKLPAKLTVNHHLLFTFYHISCQQKQGASVETLLGYSWLPILLNERLQTGSYCLPVALEKLPPNYSMHSAEKVPLQNPPIKWAEGHKGVFNIEVQAVSSVHTQDNHLEKFFTLCHSLESQVTFPIRVLDQKISEMALEHELKLSIICLNSSRLEPLVLFLHLVLDKLFQLSVQPMVIAGQTANFSQFAFESVVAIANSLHNSKDLSKDQHGRNCLLASYVHYVFRLPEVQRDVPKSGAPTALLDPRSYHTYGRTSAAAVSSKLLQARVMSSSNPDLAGTHSAADEEVKNIMSSKHFHEELALQMVVSTGMVRETVFKYAWFFFELLVKSMAQHVHNMDKRDSFRRTRFSDRFMDDITTIVNVVTSEIAALLVKPQKENEQAEKMNISLAFFLYDLLSLMDRGFVFNLIRHYCSQLSAKLSNLPTLISMRLEFLRILCSHEHYLNLNLFFMNADTAPTSPCPSISSQNSSSCSSFQDQKIASMFDLTSEYRQQHFLTGLLFTELAAALDAEGEGISKVQRKAVSAIHSLLSSHDLDPRCVKPEVKVKIAALYLPLVGIILDALPQLCDFTVADTRRYRTSGSDEEQEGAGAINQNVALAIAGNNFNLKTSGIVLSSLPYKQYNMLNADTTRNLMICFLWIMKNADQSLIRKWIADLPSTQLNRILDLLFICVLCFEYKGKQSSDKVSTQVLQKSRDVKARLEEALLRGEGARGEMMRRRAPGNDRFPGLNENLRWKKEQTHWRQANEKLDKTKAELDQEALISGNLATEAHLIILDMQENIIQASSALDCKDSLLGGVLRVLVNSLNCDQSTTYLTHCFATLRALIAKFGDLLFEEEVEQCFDLCHQVLHHCSSSMDVTRSQACATLYLLMRFSFGATSNFARVKMQVTMSLASLVGRAPDFNEEHLRRSLRTILAYSEEDTAMQMTPFPTQVEELLCNLNSILYDTVKMREFQEDPEMLMDLMYRIAKSYQASPDLRLTWLQNMAEKHTKKKCYTEAAMCLVHAAALVAEYLSMLEDHSYLPVGSVSFQNISSNVLEESVVSEDTLSPDEDGVCAGQYFTESGLVGLLEQAAELFSTGGLYETVNEVYKLVIPILEAHREFRKLTLTHSKLQRAFDSIVNKDHKRMFGTYFRVGFFGSKFGDLDEQEFVYKEPAITKLPEISHRLEAFYGQCFGAEFVEVIKDSTPVDKTKLDPNKAYIQITFVEPYFDEYEMKDRVTYFEKNFNLRRFMYTTPFTLEGRPRGELHEQYRRNTVLTTMHAFPYIKTRISVIQKEEFVLTPIEVAIEDMKKKTLQLAVAINQEPPDAKMLQMVLQGSVGATVNQGPLEVAQVFLAEIPADPKLYRHHNKLRLCFKEFIM

SEQ ID NO: 43467 - protein, 2031 aa, Homo sapiens
MTHLNSLDVQLAQELGDFTDDDLDVVFTPKECRTLQPSLPEEGVELDPHVRDCVQTYIREWLIVNRKNQGSPEICGFKKTGSRKDFHKTLPKQTFESETLECSEPAAQAGPRHLNVLCDVSGKGPVTACDFDLRSLQPDKRLENLLQQVSAEDFEKQNEEARRTNRQAELFALYPSVDEEDAVEIRPVPECPKEHLGNRILVKLLTLKFEIEIEPLFASIALYDVKERKKISENFHCDLNSDQFKGFLRAHTPSVAASSQARSAVFSVTYPSSDIYLVVKIEKVLQQGEIGDCAEPYTVIKESDGGKSKEKIEKLKLQAESFCQRLGKYRMPFAWAPISLSSFFNVSTLEREVTDVDSVVGRSSVGERRTLAQSRRLSERALSLEENGVGSNFKTSTLSVSSFFKQEGDRLSDEDLFKFLADYKRSSSLQRRVKSIPGLLRLEISTAPEIINCCLTPEMLPVKPFPENRTRPHKEILEFPTREVYVPHTVYRNLLYVYPQRLNFVNKLASARNITIKIQFMCGEDASNAMPVIFGKSSGPEFLQEVYTAVTYHNKSPDFYEEVKIKLPAKLTVNHHLLFTFYHISCQQKQGASVETLLGYSWLPILLNERLQTGSYCLPVALEKLPPNYSMHSAEKVPLQNPPIKWAEGHKGVFNIEVQAVSSVHTQDNHLEKFFTLCHSLESQVTFPIRVLDQKISEMALEHELKLSIICLNSSRLEPLVLFLHLVLDKLFQLSVQPMVIAGQTANFSQFAFESVVAIANSLHNSKDLSKDQHGRNCLLASYVHYVFRLPEVQRDVPKSGAPTALLDPRSYHTYGRTSAAAVSSKLLQARVMSSSNPDLAGTHSAADEEVKNIMSSKIADRNCSRMSYYCSGSSDAPSSPAAPRPASKKHFHEELALQMVVSTGMVRETVFKYAWFFFELLVKSMAQHVHNMDKRDSFRRTRFSDRFMDDITTIVNVVTSEIAALLVKPQKENEQAEKMNISLAFFLYDLLSLMDRGFVFNLIRHYCSQLSAKLSNLPTLISMRLEFLRILCSHEHYLNLNLFFMNADTAPTSPCPSISSQNSSSCSSFQDQKIASMFDLTSEYRQQHFLTGLLFTELAAALDAEGEGISKVQRKAVSAIHSLLSSHDLDPRCVKPEVKVKIAALYLPLVGIILDALPQLCDFTVADTRRYRTSGSDEEQEGAGAINQNVALAIAGNNFNLKTSGIVLSSLPYKQYNMLNADTTRNLMICFLWIMKNADQSLIRKWIADLPSTQLNRILDLLFICVLCFEYKGKQSSDKVSTQVLQKSRDVKARLEEALLRGEGARGEMMRRRAPGNDRFPGLNENLRWKKEQTHWRQANEKLDKTKAELDQEALISGNLATEAHLIILDMQENIIQASSALDCKDSLLGGVLRVLVNSLNCDQSTTYLTHCFATLRALIAKFGDLLFEEEVEQCFDLCHQVLHHCSSSMDVTRSQACATLYLLMRFSFGATSNFARVKMQVTMSLASLVGRAPDFNEEHLRRSLRTILAYSEEDTAMQMTPFPTQVEELLCNLNSILYDTVKMREFQEDPEMLMDLMYRIAKSYQASPDLRLTWLQNMAEKHTKKKCYTEAAMCLVHAAALVAEYLSMLEDHSYLPVGSVSFQNISSNVLEESVVSEDTLSPDEDGVCAGQYFTESGLVGLLEQAAELFSTGGLYETVNEVYKLVIPILEAHREFRKLTLTHSKLQRAFDSIVNKDHKRMFGTYFRVGFFGSKFGDLDEQEFVYKEPAITKLPEISHRLEAFYGQCFGAEFVEVIKDSTPVDKTKLDPNKAYIQITFVEPYFDEYEMKDRVTYFEKNFNLRRFMYTTPFTLEGRPRGELHEQYRRNTVLTTMHAFPYIKTRISVIQKEEFVLTPIEVAIEDMKKKTLQLAVAINQEPPDAKMLQMVLQGSVGATVNQGPLEVAQVFLAEIPADPKLYRHHNKLRLCFKEFIMRCGEAVEKNKRLITADQREYQQELKKNYNKLKENLRPMIERKIPELYKPIFRVESQKRDSFHRSSFRKCETQLSQGS

SEQ ID NO: 43468 - protein, 2099 aa, Homo sapiens
MATLPSAERRAFALKINRYSSAEIRKQFTLPPNLGQYHRQSISTSGFPSLQLPQFYDPVEPVDFEGLLMTHLNSLDVQLAQELGDFTDDDLDVVFTPKECRTLQPSLPEEGVELDPHVRDCVQTYIREWLIVNRKNQGSPEICGFKKTGSRKDFHKTLPKQTFESETLECSEPAAQAGPRHLNVLCDVSGKGPVTACDFDLRSLQPDKRLENLLQQVSAEDFEKQNEEARRTNRQAELFALYPSVDEEDAVEIRPVPECPKEHLGNRILVKLLTLKFEIEIEPLFASIALYDVKERKKISENFHCDLNSDQFKGFLRAHTPSVAASSQARSAVFSVTYPSSDIYLVVKIEKVLQQGEIGDCAEPYTVIKESDGGKSKEKIEKLKLQAESFCQRLGKYRMPFAWAPISLSSFFNVSTLEREVTDVDSVVGRSSVGERRTLAQSRRLSERALSLEENGVGSNFKTSTLSVSSFFKQEGDRLSDEDLFKFLADYKRSSSLQRRVKSIPGLLRLEISTAPEIINCCLTPEMLPVKPFPENRTRPHKEILEFPTREVYVPHTVYRNLLYVYPQRLNFVNKLASARNITIKIQFMCGEDASNAMPVIFGKSSGPEFLQEVYTAVTYHNKSPDFYEEVKIKLPAKLTVNHHLLFTFYHISCQQKQGASVETLLGYSWLPILLNERLQTGSYCLPVALEKLPPNYSMHSAEKVPLQNPPIKWAEGHKGVFNIEVQAVSSVHTQDNHLEKFFTLCHSLESQVTFPIRVLDQKISEMALEHELKLSIICLNSSRLEPLVLFLHLVLDKLFQLSVQPMVIAGQTANFSQFAFESVVAIANSLHNSKDLSKDQHGRNCLLASYVHYVFRLPEVQRDVPKSGAPTALLDPRSYHTYGRTSAAAVSSKLLQARVMSSSNPDLAGTHSAADEEVKNIMSSKIADRNCSRMSYYCSGSSDAPSSPAAPRPASKKHFHEELALQMVVSTGMVRETVFKYAWFFFELLVKSMAQHVHNMDKRDSFRRTRFSDRFMDDITTIVNVVTSEIAALLVKPQKENEQAEKMNISLAFFLYDLLSLMDRGFVFNLIRHYCSQLSAKLSNLPTLISMRLEFLRILCSHEHYLNLNLFFMNADTAPTSPCPSISSQNSSSCSSFQDQKIASMFDLTSEYRQQHFLTGLLFTELAAALDAEGEGISKVQRKAVSAIHSLLSSHDLDPRCVKPEVKVKIAALYLPLVGIILDALPQLCDFTVADTRRYRTSGSDEEQEGAGAINQNVALAIAGNNFNLKTSGIVLSSLPYKQYNMLNADTTRNLMICFLWIMKNADQSLIRKWIADLPSTQLNRILDLLFICVLCFEYKGKQSSDKVSTQVLQKSRDVKARLEEALLRGEGARGEMMRRRAPGNDRFPGLNENLRWKKEQTHWRQANEKLDKTKAELDQEALISGNLATEAHLIILDMQENIIQASSALDCKDSLLGGVLRVLVNSLNCDQSTTYLTHCFATLRALIAKFGDLLFEEEVEQCFDLCHQVLHHCSSSMDVTRSQACATLYLLMRFSFGATSNFARVKMQVTMSLASLVGRAPDFNEEHLRRSLRTILAYSEEDTAMQMTPFPTQVEELLCNLNSILYDTVKMREFQEDPEMLMDLMYRIAKSYQASPDLRLTWLQNMAEKHTKKKCYTEAAMCLVHAAALVAEYLSMLEDHSYLPVGSVSFQNISSNVLEESVVSEDTLSPDEDGVCAGQYFTESGLVGLLEQAAELFSTGGLYETVNEVYKLVIPILEAHREFRKLTLTHSKLQRAFDSIVNKDHKRMFGTYFRVGFFGSKFGDLDEQEFVYKEPAITKLPEISHRLEAFYGQCFGAEFVEVIKDSTPVDKTKLDPNKAYIQITFVEPYFDEYEMKDRVTYFEKNFNLRRFMYTTPFTLEGRPRGELHEQYRRNTVLTTMHAFPYIKTRISVIQKEEFVLTPIEVAIEDMKKKTLQLAVAINQEPPDAKMLQMVLQGSVGATVNQGPLEVAQVFLAEIPADPKLYRHHNKLRLCFKEFIMRCGEAVEKNKRLITADQREYQQELKKNYNKLKENLRPMIERKIPELYKPIFRVESQKRDSFHRSSFRKCETQLSQGS

SEQ ID NO: 43469 - protein, 1999 aa, Homo sapiens
MTHLNSLDVQLAQELGDFTDDDLDVVFTPKECRTLQPSLPEEGVELDPHVRDCVQTYIREWLIVNRKNQGSPEICGFKKTGSRKDFHKTLPKQTFESETLECSEPAAQAGPRHLNVLCDVSGKGPVTACDFDLRSLQPDKRLENLLQQVSAEDFEKQNEEARRTNRQAELFALYPSVDEEDAVEIRPVPECPKEHLGNRILVKLLTLKFEIEIEPLFASIALYDVKERKKISENFHCDLNSDQFKGFLRAHTPSVAASSQARSAVFSVTYPSSDIYLVVKIEKVLQQGEIGDCAEPYTVIKESDGGKSKEKIEKLKLQAESFCQRLGKYRMPFAWAPISLSSFFNVSTLEREVTDVDSVVGRSSVGERRTLAQSRRLSERALSLEENGVGSNFKTSTLSVSSFFKQEGDRLSDEDLFKFLADYKRSSSLQRRVKSIPGLLRLEISTAPEIINCCLTPEMLPVKPFPENRTRPHKEILEFPTREVYVPHTVYRNLLYVYPQRLNFVNKLASARNITIKIQFMCGEDASNAMPVIFGKSSGPEFLQEVYTAVTYHNKSPDFYEEVKIKLPAKLTVNHHLLFTFYHISCQQKQGASVETLLGYSWLPILLNERLQTGSYCLPVALEKLPPNYSMHSAEKVPLQNPPIKWAEGHKGVFNIEVQAVSSVHTQDNHLEKFFTLCHSLESQVTFPIRVLDQKISEMALEHELKLSIICLNSSRLEPLVLFLHLVLDKLFQLSVQPMVIAGQTANFSQFAFESVVAIANSLHNSKDLSKDQHGRNCLLASYVHYVFRLPEVQRDVPKSGAPTALLDPRSYHTYGRTSAAAVSSKLLQARVMSSSNPDLAGTHSAADEEVKNIMSSKHFHEELALQMVVSTGMVRETVFKYAWFFFELLVKSMAQHVHNMDKRDSFRRTRFSDRFMDDITTIVNVVTSEIAALLVKPQKENEQAEKMNISLAFFLYDLLSLMDRGFVFNLIRHYCSQLSAKLSNLPTLISMRLEFLRILCSHEHYLNLNLFFMNADTAPTSPCPSISSQNSSSCSSFQDQKIASMFDLTSEYRQQHFLTGLLFTELAAALDAEGEGISKVQRKAVSAIHSLLSSHDLDPRCVKPEVKVKIAALYLPLVGIILDALPQLCDFTVADTRRYRTSGSDEEQEGAGAINQNVALAIAGNNFNLKTSGIVLSSLPYKQYNMLNADTTRNLMICFLWIMKNADQSLIRKWIADLPSTQLNRILDLLFICVLCFEYKGKQSSDKVSTQVLQKSRDVKARLEEALLRGEGARGEMMRRRAPGNDRFPGLNENLRWKKEQTHWRQANEKLDKTKAELDQEALISGNLATEAHLIILDMQENIIQASSALDCKDSLLGGVLRVLVNSLNCDQSTTYLTHCFATLRALIAKFGDLLFEEEVEQCFDLCHQVLHHCSSSMDVTRSQACATLYLLMRFSFGATSNFARVKMQVTMSLASLVGRAPDFNEEHLRRSLRTILAYSEEDTAMQMTPFPTQVEELLCNLNSILYDTVKMREFQEDPEMLMDLMYRIAKSYQASPDLRLTWLQNMAEKHTKKKCYTEAAMCLVHAAALVAEYLSMLEDHSYLPVGSVSFQNISSNVLEESVVSEDTLSPDEDGVCAGQYFTESGLVGLLEQAAELFSTGGLYETVNEVYKLVIPILEAHREFRKLTLTHSKLQRAFDSIVNKDHKRMFGTYFRVGFFGSKFGDLDEQEFVYKEPAITKLPEISHRLEAFYGQCFGAEFVEVIKDSTPVDKTKLDPNKAYIQITFVEPYFDEYEMKDRVTYFEKNFNLRRFMYTTPFTLEGRPRGELHEQYRRNTVLTTMHAFPYIKTRISVIQKEEFVLTPIEVAIEDMKKKTLQLAVAINQEPPDAKMLQMVLQGSVGATVNQGPLEVAQVFLAEIPADPKLYRHHNKLRLCFKEFIMRCGEAVEKNKRLITADQREYQQELKKNYNKLKENLRPMIERKIPELYKPIFRVESQKRDSFHRSSFRKCETQLSQGS

SEQ ID NO: 43470 - protein, 393 aa, Homo sapiens
MKRTRDEVDATLQIAKLNAAELLPAVHCLGFGPGASGAAAGDFCLLELEPTLCQQLEDGHSLVIRGDKDEQAVLCSKDKTYDLKIADTSNMLLFIPGCKTPDQLKKEDSHCNIIHTEIFGFSNNYWELRRRRPKLKKLKKLLMENPYEGPDSQKEKDSNSSKYTTEDLLDQIQASEEEIMTQLQVLNACKIGGYWRILEFDYEMKLLNHVTQLVDSESWSFGKVPLNTCLQELGPLEPEEMIEHCLKCYGKKYVDEGEVYFELDADKICRAAARMLLQNAVKFNLAEFQEVWQQSVPEGMVTSLDQLKGLALVDRHSRPEIIFLLKVDDLPEDNQERFNSLFSLREKWTEEDIAPYIQDLCGEKQTIGALLTKYSHSSMQNGVKVYNSRRPIS

SEQ ID NO: 43471 - protein, 113 aa, Homo sapiens
MSASVVSVISRFLEEYLSSTPQRLKLLDAYLLYILLTGALQFGYCLLVGTFPFNSFLSGFISCVGSFILAVCLRIQINPQNKADFQGISPERAFADFLFASTILHLVVMNFVG

SEQ ID NO: 43472 - protein, 94 aa, Homo sapiens
MRTLAILAAILLVALQAQAEPLQARADEVAAAPEQIAADIPEVVVSLAWDESLAPKHPGSRKNMACYCRIPACIAGERRYGTCIYQGRLWAFCC

SEQ ID NO: 43473 - protein, 94 aa, Homo sapiens; identical to SEQ ID NO: 43472

SEQ ID NO: 43474 - protein, 97 aa, Homo sapiens
MRIIALLAAILLVALQVRAGPLQARGDEAPGQEQRGPEDQDISISFAWDKSSALQVSGSTRGMVCSCRLVFCRRTELRVGNCLIGGVSFTYCCTRVD

SEQ ID NO: 43475 - protein, 94 aa, Homo sapiens
MRTIAILAAILLVALQAQAESLQERADEATTQKQSGEDNQDLAISFAGNGLSALRTSGSQARATCYCRTGRCATRESLSGVCEISGRLYRLCCR

SEQ ID NO: 43476 - protein, 100 aa, Homo sapiens
MRTLTILTAVLLVALQAKAEPLQAEDDPLQAKAYEADAQEQRGANDQDFAVSFAEDASSSLRALGSTRAFTCHCRRSCYSTEYSYGTCTVMGINHRFCCL

SEQ ID NO: 43477 - protein, 68 aa, Homo sapiens
MRTSYLLLFTLCLLLSEMASGGNFLTGLGHRSDHYNCVSSGGQCLYSACPIFTKIQGTCYRGKAKCCK

SEQ ID NO: 43478 - protein, 123 aa, Homo sapiens
MKLLLLALPMLVLLPQVIPAYSGEKKCWNRSGHCRKQCKDGEAVKDTCKNLRACCIPSNEDHRRVPATSPTPLSDSTPGIIDDILTVRFTTDYFEVSSKKDMVEESEAGRGTETSLPNVHHSS

SEQ ID NO: 43479 - protein, 333 aa, Homo sapiens
MSWIKEGELSLWERFCANIIKAGPMPKHIAFIMDGNRRYAKKCQVERQEGHSQGFNKLAETLRWCLNLGILEVTVYAFSIENFKRSKSEVDGLMDLARQKFSRLMEEKEKLQKHGVCIRVLGDLHLLPLDLQELIAQAVQATKNYNKCFLNVCFAYTSRHEISNAVREMAWGVEQGLLDPSDISESLLDKCLYTNRSPHPDILIRTSGEVRLSDFLLWQTSHSCLVFQPVLWPEYTFWNLFEAILQFQMNHSVLQKARDMYAEERKRQQLERDQATVTEQLLREGLQASGDAQLRRTRLHKLSARREERVQGFLQALELKRADWLARLGTASA

SEQ ID NO: 43480 - protein, 334 aa, Homo sapiens
MSWIKEGELSLWERFCANIIKAGPMPKHIAFIMDGNRRYAKKCQVERQEGHSQGFNKLAETLRWCLNLGILEVTVYAFSIENFKRSKSEVDGLMDLARQKFSRLMEEKEKLQKHGVCIRVLGDLHLLPLDLQELIAQAVQATKNYNKCFLNVCFAYTSRHEISNAVREMAWGVEQGLLDPSDISESLLDKCLYTNRSPHPDILIRTSGEVRLSDFLLWQTSHSCLVFQPVLWPEYTFWNLFEAILQFQMNHSVLQQKARDMYAEERKRQQLERDQATVTEQLLREGLQASGDAQLRRTRLHKLSARREERVQGFLQALELKRADWLARLGTASA

SEQ ID NO: 43481 - protein, 171 aa, Homo sapiens
MDLARQKFSRLMEEKEKLQKHGVCIRVLGDLHLLPLDLQELIAQAVQATKNYNNDISESLLDKCLYTNRSPHPDILIRTSGEVRLSDFLLWQQKARDMYAEERKRQQLERDQATVTEQLLREGLQASGDAQLRRTRLHKLSARREERVQGFLQALELKRADWLARLGTASA

SEQ ID NO: 43482 - protein, 166 aa, Homo sapiens
MDGNRRYAKKCQVERQEGHSQGFNKLAETLRWCLNLGILEVTVYAFSIENFKRSKSEVDGLMDLARQKFSRLMEEKEKLQKHGVCIRVLGDLHLLPLDLQELIAQAVQATKNYNKCFLNVCFAYTSRHEISNAVREMAWGVEQGLLDPSRDRFHHIGQASLELLTS

SEQ ID NO: 43483 - protein, 181 aa, Homo sapiens
MEEKEKLQKHGVCIRVLGDLHLLPLDLQELIAQAVQATKNYNKCFLNVCFAYTSRHEISNAVREMAWGVEQGLLDPSDISESLLDKCLYTNRSPHPDILIRTSGEVRLSDFLLWQTSHSCLVFQPVLWPEYTFWNLFEAILQFQMNHSVLQHPGSLLTKAWKKPFQQDGELYGNCSSPKSS

SEQ ID NO: 43484 - protein, 222 aa, Homo sapiens
MSWIKEGELSLWERFCANIIKAGPMPKHIAFIMDGNRRYAKKCQVERQEGHSQGFNKLAETLRWCLNLGILEVTVYAFSIENFKRSKSEVDGLMDLARQKFSRLMEEKEKLQKHGVCIRVLGDLHLLPLDLQELIAQAVQATKNYNKCFLNVCFAYTSRHEISNAVREMAWGVEQGLLDPRYPDDISESLLDKCLYTNRSPHPDILIRTSGEVRLSDFLLWQ

SEQ ID NO: 43485 - protein, 122 aa, Homo sapiens
MSWIKEGELSLWERFCANIIKAGPMPKHIAFIMDGNRRYAKKCQVERQEGHSQGFNKLAETLRWCLNLGILEVTVYAFSIENFKRSKSEVDGLMDLARQKFSRLMEEKEKLQKHGVCIRVLG

SEQ ID NO: 43486 - protein, 71 aa, Homo sapiens
MSWIKEGELSLWERFCANIIKAGPMPKHIAFIMDGNRRYAKKCQVERQEGHSQGFNKLAETLRWCLNLGIL

SEQ ID NO: 43487 - protein, 85 aa, Homo sapiens
MSWIKEGELSLWERFCANIIKAGPMPKHIAFIMDGNRRYAKKCQVERQEGHSQGFNKLAETLRWCLNLGILEVTVYAFSIENFKR

SEQ ID NO: 43488 - protein, 294 aa, Homo sapiens
MSWIKEGELSLWERFCANIIKAGPMPKHIAFIMDGNRRYAKKCQVERQEGHSQGFNKLAETLRWCLNLGILEVTVYAFSIENFKRSKSEVDGLMDLARQKFSRLMEEKCFLNVCFAYTSRHEISNAVREMAWGVEQGLLDPSDISESLLDKCLYTNRSPHPDILIRTSGEVRLSDFLLWQTSHSCLVFQPVLWPEYTFWNLFEAILQFQMNHSVLQKARDMYAEERKRQQLERDQATVTEQLLREGLQASGDAQLRRTRLHKLSARREERVQGFLQALELKRADWLARLGTASA

SEQ ID NO: 43489 - protein, 60 aa, Homo sapiens
MSWIKEGELSLWERFCANIIKAGPMPKHIAFIMDGNRRYAKKCQVERQEGHSQGFNKLAE

SEQ ID NO: 43490 - protein, 131 aa, Homo sapiens
MSWIKEGELSLWERFCANIIKAGPMPKHIAFIMDGNRRYAKKCQVERQEGHSQGFNKLAETLRWCLNLGILEVTVYAFSIENFKRSKSEVDGLMDLARQKFSRLMEEKEKLQKHGVCIRVLGDLHLLPLDL

SEQ ID NO: 43491 - protein, 166 aa, Homo sapiens
MSWIKEGELSLWERFCANIIKAGPMPKHIAFIMDGNRRYAKKCQVERQEGHSQGFNKLAETLRWCLNLGILEVTVYAFSIENFKRSKSEVDGLMDLARQKFSRLMEEKEKLQKHGVCIRVLGDLHLLPLDLQELIAQAVQATKNYNKCFLNVCFAYTSRHEISNAV

SEQ ID NO: 43492 - protein, 302 aa, Homo sapiens
MVWKRLGALVMFPLQMIYLVVKAAVGLVLPAKLRDLSRENVLITGGGRGIGRQLAREFAERGARKIVLWGRTEKCLKETTEEIRQMGTECHYFICDVGNREEVYQTAKAVREKVGDITILVNNAAVVHGKSLMDSDDDALLKSQHINTLGQFWTTKAFLPRMLELQNGHIVCLNSVLALSAIPGAIDYCTSKASAFAFMESLTLGLLDCPGVSATTVLPFHTSTEMFQGMRVRFPNLFPPLKPETVARRTVEAVQLNQALLLLPWTMHALVILKSILPQAALEEIHKFSGTYTCMNTFKGRT

SEQ ID NO: 43493 - protein, 147 aa, Homo sapiens
MGTECHYFICDVGNREEVYQTAKAVREKVGDITILVNNAAVVHGKSLMDSDDDALLKSQHINTLGQFWTTKAFLPRMLELQNGHIVCLNSVLALSAIPGAIDYCTSKASAFAFMESLTLGLLDCPGVSATTVLPFHTSTEMFQGMRV

SEQ ID NO: 43494 - protein, 140 aa, Homo sapiens
MASSGMTRRDPLANKVALVTASTDGIGFAIARRLAQDGAHVVVSSRKQQNVDQAVATLQGEGLSVTGTVCHVGKAEDRERLVATLWMDKEKEESMKETLRIRRLGEPEDCAGIVSFLCSEDASYITGETVVVGGGTPSRL

SEQ ID NO: 43495 - protein, 278 aa, Homo sapiens
MHKAGLLGLCARAWNSVRMASSGMTRRDPLANKVALVTASTDGIGFAIARRLAQDGAHVVVSSRKQQNVDQAVATLQGEGLSVTGTVCHVGKAEDRERLVATAVKLHGGIDILVSNAAVNPFFGSIMDVTEEVWDKTLDINVKAPALMTKAVVPEMEKRGGGSVVIVSSIAAFSPSPGFSPYNVSKTALLGLTKTLAIELAPRNIRVNCLAPGLIKTSFSRMLWMDKEKEESMKETLRIRRLGEPEDCAGIVSFLCSEDASYITGETVVVGGGTPSRL

SEQ ID NO: 43496 - protein, 170 aa, Homo sapiens
MASSGMTRRDPLANKVALVTASTDGIGFAIARRLAQDGAHVVVSSRKQQNVDQAVATLQGEGLSVTGTVCHVGKAEDRERLVATAVKLHGGIDILVSNAAVNPFFGSIMDVTEEVWDKRRLSGDRVFHSSLQSISSLDGQGKRGKHERNPADKKVRRARGLCWHRVFPVL

SEQ ID NO: 43497 - protein, 181 aa, Homo sapiens
MASSGMTRRDPLANKVALVTASTDGIGFAIARRLAQDGAHVVVSSRKQQNVDQAVATLQGEGLSVTGTVCHVGKAEDRERLVATTLDINVKAPALMTKAVVPEMEKRGGGSVVIVSSIAAFSPSPLWMDKEKEESMKETLRIRRLGEPEDCAGIVSFLCSEDASYITGETVVVGGGTPSRL

SEQ ID NO: 43498 - protein, 158 aa, Homo sapiens
MHKAGLLGLCARAWNSVRMASSGMTRRDPLANKVALVTASTDGIGFAIARRLAQDGAHVVVSSRKQQNVDQAVATLQGEGLSVTGTVCHVGKAEDRERLVATLWMDKEKEESMKETLRIRRLGEPEDCAGIVSFLCSEDASYITGETVVVGGGTPSRL

SEQ ID NO: 43499 - protein, 192 aa, Homo sapiens
MHKAGLLGLCARAWNSVRMASSGMTRRDPLANKVALVTASTDGIGFAIARRLAQDGAHVVVSSRKQQNVDQAVATLQGEGLSVTGTVCHVGKAEDRERLVATAVKLHGGIDILVSNAAVNPFFGSIMDVTEEVWDKLWMDKEKEESMKETLRIRRLGEPEDCAGIVSFLCSEDASYITGETVVVGGGTPSRL

SEQ ID NO: 43500 - protein, 226 aa, Homo sapiens
MASSGMTRRDPLANKVALVTASTDGIGFAIARRLAQDGAHVVVSSRKQQNVDQAVATLQGEGLSVTGTVCHVGKAEDRERLVATTLDINVKAPALMTKAVVPEMEKRGGGSVVIVSSIAAFSPSPGFSPYNVSKTALLGLTKTLAIELAPRNIRVNCLAPGLIKTSFSRMLWMDKEKEESMKETLRIRRLGEPEDCAGIVSFLCSEDASYITGETVVVGGGTPSRL

SEQ ID NO: 43501 - protein, 188 aa, Homo sapiens
MHKAGLLGLCARAWNSVRMASSGMTRRDPLANKVALVTASTDGIGFAIARRLAQDGAHVVVSSRKQQNVDQAVATLQGEGLSVTGTVCHVGKAEDRERLVATAVKLHGGIDILVSNAAVNPFFGSIMDVTEEVWDKRRLSGDRVFHSSLQSISSLDGQGKRGKHERNPADKKVRRARGLCWHRVFPVL

SEQ ID NO: 43502 - protein, 199 aa, Homo sapiens
MHKAGLLGLCARAWNSVRMASSGMTRRDPLANKVALVTASTDGIGFAIARRLAQDGAHVVVSSRKQQNVDQAVATLQGEGLSVTGTVCHVGKAEDRERLVATTLDINVKAPALMTKAVVPEMEKRGGGSVVIVSSIAAFSPSPLWMDKEKEESMKETLRIRRLGEPEDCAGIVSFLCSEDASYITGETVVVGGGTPSRL

SEQ ID NO: 43503 - protein, 339 aa, Homo sapiens
MNWELLLWLLVLCALLLLLVQLLRFLRADGDLTLLWAEWQGRRPEWELTDMVVWVTGASSGIGEELAYQLSKLGVSLVLSARRVHELERVKRRCLENGNLKEKDILVLPLDLTDTGSHEAATKAVLQEFGRIDILVNNGGMSQRSLCMDTSLDVYRKLIELNYLGTVSLTKCVLPHMIERKQGKIVTVNSILGIISVPLSIGYCASKHALRGFFNGLRTELATYPGIIVSNICPGPVQSNIVENSLAGEVTKTIGNNGDQSHKMTTSRCVRLMLISMANDLKEVWISEQPFLLVTYLWQYMPTWAWWITNKMGKKRIENFKSGVDADSSYFKIFKTKHD

SEQ ID NO: 43504 - protein, 375 aa, Homo sapiens
MNWELLLWLLVLCALLLLLVQLLRFLRADGDLTLLWAEWQGRRPEWELTDMVVWVTGASSGIGEELAYQLSKLGVSLVLSARRVHELERVKRRCLENGNLKEKDILVLPLDLTDTGSHEAATKAVLQEFGRIDILVNNGGMSQRSLCMDTSLDVYRKLIELNYLGTVSLTKCVLPHMIERKQGKIVTVNSILGIISVPLSIGYCASKHALRGFFNGLRTELATYPGIIVSNICPGPVQSNIVENSLAGEVTKTIGNNGDQSHKMTTSRCVRLMLISMANDLKEVWISEQPFLLVTYLWQYMPTWAWWITRWGRKGLRTLRVVWMQTLLILKSLRQNMTEKSTCTFQATGGRNGKHENSNLLMLLNNQRLICDFTF

SEQ ID NO: 43505 - protein, 289 aa, Homo sapiens
MVVWVTGASSGIGEELAYQLSKLGVSLVLSARRVHELERVKRRCLENGNLKEKDILVLPLDLTDTGSHEAATKAVLQEFGRIDILVNNGGMSQRSLCMDTSLDVYRKLIELNYLGTVSLTKCVLPHMIERKQGKIVTVNSILGIISVPLSIGYCASKHALRGFFNGLRTELATYPGIIVSNICPGPVQSNIVENSLAGEVTKTIGNNGDQSHKMTTSRCVRLMLISMANDLKEVWISEQPFLLVTYLWQYMPTWAWWITNKMGKKRIENFKSGVDADSSYFKIFKTKHD

SEQ ID NO: 43506 - protein, 339 aa, Homo sapiens; identical to SEQ ID NO: 43503

SEQ ID NO: 43507 - protein, 61 aa, Homo sapiens
MNWELLLWLLVLCALLLLLVQLLRFLRADGDLTLLWAEWQGRRPEWELTDMVVWVTGASSG

SEQ ID NO: 43508 - protein, 319 aa, Homo sapiens
MLFWVLGLLILCGFLWTRKGKLKIEDITDKYIFITGCDSGFGNLAARTFDKKGFHVIAACLTESGSTALKAETSERLRTVLLDVTDPENVKRTAQWVKNQVGEKGLWGLINNAGVPGVLAPTDWLTLEDYREPIEVNLFGLISVTLNMLPLVKKAQGRVINVSSVGGRLAIVGGGYTPSKYAVEGFNDSLRRDMKAFGVHVSCIEPGLFKTNLADPVKVIEKKLAIWEQLSPDIKQQYGEGYIEKSLDKLKGNKSYVNMDLSPVVECMDHALTSLFPKTHYAAGKDAKIFWIPLSHMPAALQDFLLLKQKAELANPKAV

SEQ ID NO: 43509 - protein, 319 aa, Homo sapiens; identical to SEQ ID NO: 43508

SEQ ID NO: 43510 - protein, 319 aa, Homo sapiens; identical to SEQ ID NO: 43508

SEQ ID NO: 43511 - protein, 172 aa, Homo sapiens
MLPLVKKAQGRVINVSSVGGRLAIVGGGYTPSKYAVEGFNDSLRRDMKAFGVHVSCIEPGLFKTNLADPVKVIEKKLAIWEQLSPDIKQQYGEGYIEKSLDKLKGNKSYVNMDLSPVVECMDHALTSLFPKTHYAAGKDAKIFWIPLSHMPAALQDFLLLKQKAELANPKAV

SEQ ID NO: 43512 - protein, 319 aa, Homo sapiens; identical to SEQ ID NO: 43508

SEQ ID NO: 43513 - protein, 379 aa, Homo sapiens
MPEGRSHCACSITSLTLLVSLTRVTLDILQKLDPPQPAHWRHHLLVLYKKGVYLSHTGGKMLFWVLGLLILCGFLWTRKGKLKIEDITDKYIFITGCDSGFGNLAARTFDKKGFHVIAACLTESGSTALKAETSERLRTVLLDVTDPENVKRTAQWVKNQVGEKGLWGLINNAGVPGVLAPTDWLTLEDYREPIEVNLFGLISVTLNMLPLVKKAQGRVINVSSVGGRLAIVGGGYTPSKYAVEGFNDSLRRDMKAFGVHVSCIEPGLFKTNLADPVKVIEKKLAIWEQLSPDIKQQYGEGYIEKSLDKLKGNKSYVNMDLSPVVECMDHALTSLFPKTHYAAGKDAKIFWIPLSHMPAALQDFLLLKQKAELANPKAV

SEQ ID NO: 43514 - protein, 319 aa, Homo sapiens; identical to SEQ ID NO: 43508

SEQ ID NO: 43515 - protein, 66 aa, Homo sapiens
MLFWVLGLLILCGFLWTRKGKLKIEDITDKYIFITGCDSGFGNLAARTFDKKGFHVIAACLTESGS

SEQ ID NO: 43516 - protein, 161 aa, Homo sapiens
MGLPQPGLWLKRLWVLLEVAVHVVVGKVLLILFPDRVKRNILAMGEKTGMTRNPHFSHDNWIPTFFSTQYFWFVLKVRWQRLEDTTELGGLAPNCPVVRLSGQRCNIWEFMQGNRPLVLNFGSCTUPSFMFKFDQFKRLIEDFSSIADFLVIYIEEAHASG

SEQ ID NO: 43517 - protein, 249 aa, Homo sapiens
MGLPQPGLWLKRLWVLLEVAVHVVVGKVLLILFPDRVKRNILAMGEKTGMTRNPHFSHDNWIPTFFSTQYFWFVLKVRWQRLEDTTELGGLAPNCPVVRLSGQRCNIWEFMQGNRPLVLNFGSCTUPSFMFKFDQFKRLIEDFSSIADFLVIYIEEAHASDGWAFKNNMDIRNHQNLQDRLQAAHLLLARSPQCPVVVDTMQNQSSQLYAALPERLYIIQEGRILYKGKSGPWNYNPEEVRAVLEKLHS

SEQ ID NO: 43518 - protein, 201 aa, Homo sapiens
MGLPQPGLWLKRLWVLLEVAVHVVVGKVLLILFPDRVKRNILAMGEKTGMTRNPHFSHDNWIPTFFSTQYFWFVLKVRWQRLEDTTELGGLAPNCPVVRLSGQRCNIWEFMQDGWAFKNNMDIRNHQNLQDRLQAAHLLLARSPQCPVVVDTMQNQSSQLYAALPERLYIIQEGRILYKGKSGPWNYNPEEVRAVLEKLHS

SEQ ID NO: 43519 - protein, 120 aa, Homo sapiens
MFKFDQFKRLIEDFSSIADFLVIYIEEAHASDGWAFKNNMDIRNHQNLQDRLQAAHLLLARSPQCPVVVDTMQNQSSQLYAALPERLYIIQEGRILYKGKSGPWNYNPEEVRAVLEKLHS

SEQ ID NO: 43520 - protein, 185 aa, Homo sapiens
MGLPQPGLWLKRLWVLLEVAVHVVVGKVLLILFPDRVKRNILAMGEKTGNRPLVLNFGSCTUPSFMFKFDQFKRLIEDFSSIADFLVIYIEEAHASDGWAFKNNMDIRNHQNLQDRLQAAHLLLARSPQCPVVVDTMQNQSSQLYAALPERLYIIQEGRILYKGKSGPWNYNPEEVRAVLEKLHS

SEQ ID NO: 43521 - protein, 113 aa, Homo sapiens
MGLPQPGLWLKRLWVLLEVAVHVVVGKVLLILFPDRVKRNILAMGEKTGMTRNPHFSHDNWIPTFFSTQYFWFVLKVRWQRLEDTTELGGLAPNCPVVRLSGQRCNIWEFMQG

SEQ ID NO: 43522 - protein, 89 aa, Homo sapiens
MGILSVDLLITLQILPVFFSNCLFLALYDSVILLKHVVLLLSRSKSTRGEWRRMLTSEGLRCVWKSFLLDAYKQLNCPPSGFSKDGHIL

SEQ ID NO: 43523 - protein, 132 aa, Homo sapiens
MGILSVDLLITLQILPVFFSNCLFLALYDSVILLKHVVLLLSRSKSTRGEWRRMLTSEGLRCVWKSFLLDAYKQVKLGEDAPNSSVVHVSSTEGGDNSGNGTQEKIAEGATCHLLDFASPERPLVVNFGSAT

SEQ ID NO: 43524 - protein, 273 aa, Homo sapiens
MGILSVDLLITLQILPVFFSNCLFLALYDSVILLKHVVLLLSRSKSTRGEWRRMLTSEGLRCVWKSFLLDAYKQVKLGEDAPNSSVVHVSSTEGGDNSGNGTQEKIAEGATCHLLDFASPERPLVVNFGSATUPPFTSQLPAFRKLVEEFSSVADFLLVYIDEAHPSDGWAIPGDSSLSFEVKKHQNQEDRCAAAQQLLERFSLPPQCRVVADRMDNNANIAYGVAFERVCIVQRQKIAYLGGKGPFSYNLQEVRHWLEKNFSKRUKKTRLAG

SEQ ID NO: 43525 - protein, 6 aa, Homo sapiens
MGILSV

SEQ ID NO: 43526 - protein, 6 aa, Homo sapiens
MGILSV

SEQ ID NO: 43527 - protein, 55 aa, Homo sapiens
MGILSVDLLITLQILPVFFSNCLFLALYDSVILLKHVVLLLSRSKSTRGEWRRML

SEQ ID NO: 43528 - protein, 309 aa, Homo sapiens
MGILSVDLLITLQILPVFFSNCLFLALYDSVILLKHVVLLLSRSKSTRGEWRRMLTSEGLRCVWKSFLLDAYKQLNCPPSGFSKDGHILULVYEAYKSRLLVYSHLDLWMVKLGEDAPNSSVVHVSSTEGGDNSGNGTQEKIAEGATCHLLDFASPERPLVVNFGSATUPPFTSQLPAFRKLVEEFSSVADFLLVYIDEAHPSDGWAIPGDSSLSFEVKKHQNQEDRCAAAQQLLERFSLPPQCRVVADRMDNNANIAYGVAFERVCIVQRQKIAYLGGKGPFSYNLQEVRHWLEKNFSKRUKKTRLAG

SEQ ID NO: 43529 - protein, 273 aa, Homo sapiens; identical to SEQ ID NO: 43524

SEQ ID NO: 43530 - protein, 304 aa, Homo sapiens
MPRQATSRLVVGEGEGSQGASGPAATMLRSLLLHSLRLCAQTASCLVLFPRFLGTAFMLWLLDFLCIRKHFLGRRRRGQPEPEVELNSEGEEVPPDDPPICVSDDNRLCTLASLKAVWHGQKLDFFKQAHEGGPAPNSEVVLPDGFQSQHILDYAQGNRPLVLNFGSCTUPPFMARMSAFQRLVTKYQRDVDFLIIYIEEAHPSDGWVTTDSPYIIPQHRSLEDRVSAARVLQQGAPGCALVLDTMANSSSSAYGAYFERLYVIQSGTIMYQGGRGPDGYQVSELRTWLERYDEQLHGARPRRV

SEQ ID NO: 43531 - protein, 341 aa, Homo sapiens
MSASAPAAEGEGTPTQPASEKEPEMPGPREESEEEEDEDDEEEEEEEKGKGQKLCEIERIHFFLSKKKTDELRNLHKLLYNRPGTVSSLKKNVGQFSGFPFEKGSVQYKKKEEMLKKFRNAMLKSICEVLDLERSGVNSELVKRILNFLMHPKPSGKPLPKSKKTCSKGSKKERNSSGMARKAKRTKCPEILSDESSSDEDEKKNKEESSDDEDKESEEEPPKKTAKREKPKQKATSKSKKSVKSANVKKADSSTTKKNQNSSKKESESEDSSDDEPLIKKLKKPPTDEELKETIKKLLASANLEEVTMKQICKKVYENYPTYDLTERKDFIKTTVKELIS

SEQ ID NO: 43532 - protein, 375 aa, Homo sapiens
MSASAPAAEGEGTPTQPASEKEPEMPGPREESEEEEDEDDEEEEEEEKEKSLIVEGKREKKKVERLTMQVSSLQREPFTIAQGKGQKLCEIERIHFFLSKKKTDELRNLHKLLYNRPGTVSSLKKNVGQFSGFPFEKGSVQYKKKEEMLKKFRNAMLKSICEVLDLERSGVNSELVKRILNFLMHPKPSGKPLPKSKKTCSKGSKKERNSSGMARKAKRTKCPEILSDESSSDEDEKKNKEESSDDEDKESEEEPPKKTAKREKPKQKATSKSKKSVKSANVKKADSSTTKKNQNSSKKESESEDSSDDEPLIKKLKKPPTDEELKETIKKLLASANLEEVTMKQICKKVYENYPTYDLTERKDFIKTTVKELIS

SEQ ID NO: 43533 - protein, 366 aa, Homo sapiens
MSAANPETPNSTISREASTQSSSAAASQGWVLPEGKIVPNTVFVGGIDARMDETEIGSCFGRYGSVKEVKIITNRTGVSKGYGFVSFVNDVDVQKIVGSQIHFHGKKLKLGPAIRKQKLCARHVQPRPLVVNPPPPPQFQNVWRNPNTETYLQPQITPNPVTQHVQAYSAYPHSPGQVITGCQLLVYNYQEYPTYPDSAFQVTTGYQLPVYNYQPFPAYPSSPFQVTAGYQLPVYNYQAFPAYPSSPFQVTTGYQLPVYNYQAFPAYPSSPFQVTTGYQLPVYNYQAFPAYPSSPFQVTTGYQLPVYNYQAFPAYPNSAVQVTTGYQFHVYNYQMPPQCPVGEQRRNLWTEAYKWWYLVCLIQRRD

SEQ ID NO: 43534 - protein, 534 aa, Homo sapiens
MSAANPETPNSTISREASTQSSSAAASQGWVLPEGKIVPNTVFVGGIDARMDETEIGSCFGRYGSVKEVKIITNRTGVSKGYGFVSFVNDVDVQKIVGSQIHFHGKKLKLGPAIRKQKLCARHVQPRPLVVNPPPPPQFQNVWRNPNTETYLQPQITPNPVTQHVQAYSAYPHSPGQVITGCQLLVYNYQEYPTYPDSAFQVTTGYQLPVYNYQPFPAYPRSPFQVTAGYQLPVYNYQAFPAYPNSPFQVATGYQFPVYNYQPFPAYPSSPFQVTAGYQLPVYNYQAFPAYPNSPFQVATGYQFPVYNYQAFPAYPNSPVQVTTGYQLPVYNYQAFPAYPSSPFQVTTGYQLPVYNYQAFPAYPSSPFQVTTGYQLPVYNYQAFPAYPSSPFQVTTGYQLPVYNYQAFPAYPSSPFQVTTGYQLPVYNYQAFPAYPSSPFQVTTGYQLPVYNYQAFPAYPSSPFQVTTGYQLPVYNYQAFPAYPNSAVQVTTGYQFHVYNYQMPPQCPVGEQRRNLWTEAYKWWYLVCLIQRRD

SEQ ID NO: 43535 - protein, 606 aa, Homo sapiens
MSAANPETPNSTISREASTQSSSAAASQGWVLPEGKIVPNTVFVGGIDARMDETEIGSCFGRYGSVKEVKIITNRTGVSKGYGFVSFVNDVDVQKIVGSQIHFHGKKLKLGPAIRKQKLCARHVQPRPLVVNPPPPPQFQNVWRNPNTETYLQPQITPNPVTQHVQAYSAYPHSPGQVITGCQLLVYNYQEYPTYPDSAFQVTTGYQLPVYNYQPFPAYPRSPFQVTAGYQLPVYNYQAFPAYPNSPFQVATGYQFPVYNYQPFPAYPSSPFQVTAGYQLPVYNYQAFPAYPNSPFQVATGYQFPVYNYQPFPAYPSSPFQVTAGYQLPVYNYQAFPAYPNSPFQVATGYQFPVYNYQAFPAYPNSPVQVTTGYQLPVYNYQAFPAYPNSPVQVTTGYQLPVYNYQAFPAYPSSPFQVTTGYQLPVYNYQAFPAYPSSPFQVTTGYQLPVYNYQAFPAYPSSPFQVTTGYQLPVYNYQAFPAYPSSPFQVTTGYQLPVYNYQAFPAYPSSPFQVTTGYQLPVYNYQAFPAYPSSPFQVTTGYQLPVYNYQAFPAYPNSAVQVTTGYQFHVYNYQMPPQCPVGEQRRNLWTEAYKWWYLVCLIQRRD

SEQ ID NO: 43536 - protein, 486 aa, Homo sapiens
MSAANPETPNSTISREASTQSSSAAASQGWVLPEGKIVPNTVFVGGIDARMDETEIGSCFGRYGSVKEVKIITNRTGVSKGYGFVSFVNDVDVQKIVGSQIHFHGKKLKLGPAIRKQKLCARHVQPRPLVVNPPPPPQFQNVWRNPNTETYLQPQITPNPVTQHVQAYSAYPHSPGQVITGCQLLVYNYQEYPTYPDSAFQVTTGYQLPVYNYQPFPAYPRSPFQVTAGYQLPVYNYQAFPAYPNSPFQVATGYQFPVYNYQPFPAYPSSPFQVTAGYQLPVYNYQAFPAYPNSPFQVATGYQFPVYNYQPFPAYPSSPFQVTAGYQLPVYNYQAFPAYPNSPFQVATGYQFPVYNYQAFPAYPNSPVQVTTGYQLPVYNYQAFPAYPNSPFQVATGYQFPVYNYQAFPAYPNSPVQVTTGYQLPVYNYQAFPAYPNSAVQVTTGYQFHVYNYQMPPQCPVGEQRRNLWTEAYKWWYLVCLIQRRD

SEQ ID NO: 43537 - protein, 558 aa, Homo sapiens
MSAANPETPNSTISREASTQSSSAAASQGWVLPEGKIVPNTVFVGGIDARMDETEIGSCFGRYGSVKEVKIITNRTGVSKGYGFVSFVNDVDVQKIVGSQIHFHGKKLKLGPAIRKQKLCARHVQPRPLVVNPPPPPQFQNVWRNPNTETYLQPQITPNPVTQHVQAYSAYPHSPGQVITGCQLLVYNYQEYPTYPDSAFQVTTGYQLPVYNYQPFPAYPRSPFQVTAGYQLPVYNYQAFPAYPNSPFQVATGYQFPVYNYQPFPAYPSSPFQVTAGYQLPVYNYQAFPAYPNSPFQVATGYQFPVYNYQAFPAYPNSPVQVTTGYQLPVYNYQAFPAYPNSPVQVTTGYQLPVYNYQAFPAYPSSPFQVTTGYQLPVYNYQAFPAYPSSPFQVTTGYQLPVYNYQAFPAYPSSPFQVTTGYQLPVYNYQAFPAYPSSPFQVTTGYQLPVYNYQAFPAYPSSPFQVTTGYQLPVYNYQAFPAYPSSPFQVTTGYQLPVYNYQAFPAYPNSAVQVTTGYQFHVYNYQMPPQCPVGEQRRNLWTEAYKWWYLVCLIQRRD

SEQ ID NO: 43538 - protein, 361 aa, Homo sapiens
MSAANPETPNSTISREASTQSSSAAASQGWVLPEGKIVPNTVFVGGIDARMDETEIGSCFGRYGSVKEVKIITNRTGVSKGYGFVSFVNDVDVQKIVGSQIHFHGKKLKLGPAIRKQKLCARHVQPRPLVVNPPPPPQFQNVWRNPNTETYLQPQITPNPVTQHVQAYSAYPHSPGQVITGCQLLVYNYQEYPTYPDSAFQVTTGYQLPVYNYQPFPAYPRSPFQVTAGYQLPVYNYQAFPAYPNSPFQVATGYQFPVYNYQPFPAYPSSPFQVTAGYQLPVYNYQAFPAYPNSPFQVATGYQFPVYNYQAFPAYPNSPFQVATGYQFPVYNYQAFPAYPNSPVQVTTGYQLPVYNYQMPP

SEQ ID NO: 43539 - protein, 654 aa, Homo sapiens
MSAANPETPNSTISREASTQSSSAAASQGWVLPEGKIVPNTVFVGGIDARMDETEIGSCFGRYGSVKEVKIITNRTGVSKGYGFVSFVNDVDVQKIVGSQIHFHGKKLKLGPAIRKQKLCARHVQPRPLVVNPPPPPQFQNVWRNPNTETYLQPQITPNPVTQHVQAYSAYPHSPGQVITGCQLLVYNYQEYPTYPDSAFQVTTGYQLPVYNYQPFPAYPRSPFQVTAGYQLPVYNYQAFPAYPNSPFQVATGYQFPVYNYQPFPAYPSSPFQVTAGYQLPVYNYQAFPAYPNSPFQVATGYQFPVYNYQPFPAYPSSPFQVTAGYQLPVYNYQAFPAYPNSPFQVATGYQFPVYNYQAFPAYPNSPVQVTTGYQLPVYNYQPFPAYPRSPFQVTAGYQLPVYNYQAFPAYPNSPFQVATGYQFPVYNYQAFPAYPNSPVQVTTGYQLPVYNYQAFPAYPSSPFQVTTGYQLPVYNYQAFPAYPSSPFQVTTGYQLPVYNYQAFPAYPSSPFQVTTGYQLPVYNYQAFPAYPSSPFQVTTGYQLPVYNYQAFPAYPSSPFQVTTGYQLPVYNYQAFPAYPSSPFQVTTGYQLPVYNYQAFPAYPNSAVQVTTGYQFHVYNYQMPPQCPVGEQRRNLWTEAYKWWYLVCLIQRRD

SEQ ID NO: 43540 - protein, 534 aa, Homo sapiens; identical to SEQ ID NO: 43534

SEQ ID NO: 43541 - protein, 438 aa, Homo sapiens
MSAANPETPNSTISREASTQSSSAAASQGWVLPEGKIVPNTVFVGGIDARMDETEIGSCFGRYGSVKEVKIITNRTGVSKGYGFVSFVNDVDVQKIVGSQIHFHGKKLKLGPAIRKQKLCARHVQPRPLVVNPPPPPQFQNVWRNPNTETYLQPQITPNPVTQHVQAYSAYPHSPGQVITGCQLLVYNYQEYPTYPDSAFQVTTGYQLPVYNYQPFPAYPRSPFQVTAGYQLPVYNYQAFPAYPNSPFQVATGYQFPVYNYQAFPAYPNSPFQVATGYQFPVYNYQAFPAYPNSPFQVATGYQFPVYNYQAFPAYPNSPVQVTTGYQLPVYNYQAFPAYPNSPFQVATGYQFPVYNYQAFPAYPNSPVQVTTGYQLPVYNYQAFPAYPNSAVQVTTGYQFHVYNYQMPPQCPVGEQRRNLWTEAYKWWYLVCLIQRRD

SEQ ID NO: 43542 - protein, 390 aa, Homo sapiens
MSAANPETPNSTISREASTQSSSAAASQGWVLPEGKIVPNTVFVGGIDARMDETEIGSCFGRYGSVKEVKIITNRTGVSKGYGFVSFVNDVDVQKIVGSQIHFHGKKLKLGPAIRKQKLCARHVQPRPLVVNPPPPPQFQNVWRNPNTETYLQPQITPNPVTQHVQAYSAYPHSPGQVITGCQLLVYNYQEYPTYPDSAFQVTTGYQLPVYNYQPFPAYPRSPFQVTAGYQLPVYNYQAFPAYPNSPFQVATGYQFPVYNYQPFPAYPSSPFQVTAGYQLPVYNYQAFPAYPNSPFQVATGYQFPVYNYQAFPAYPNSPVQVTTGYQLPVYNYQAFPAYPNSAVQVTTGYQFHVYNYQMPPQCPVGEQRRNLWTEAYKWWYLVCLIQRRD

SEQ ID NO: 43543 - protein, 581 aa, Homo sapiens
MMDETEIGSCFGRYGSVKEVKIITNRTGVSKGYGFVSFVNDVDVQKIVGSQIHFHGKKLKLGPAIRKQKLCARHVQPRPLVVNPPPPPQFQNVWRNPNTETYLQPQITPNPVTQHVQAYSAYPHSPGQVITGCQLLVYNYQEYPTYPDSAFQVTTGYQLPVYNYQPFPAYPRSPFQVTAGYQLPVYNYQAFPAYPNSPFQVATGYQFPVYNYQPFPAYPSSPFQVTAGYQLPVYNYQAFPAYPNSPFQVATGYQFPVYNYQAFPAYPNSPFQVATGYQFPVYNYQAFPAYPNSPVQVTTGYQLPVYNYQPFPAYPRSPFQVTAGYQLPVYNYQAFPAYPNSPFQVATGYQFPVYNYQAFPAYPNSPVQVTTGYQLPVYNYQAFPAYPSSPFQVTTGYQLPVYNYQAFPAYPSSPFQVTTGYQLPVYNYQAFPAYPSSPFQVTTGYQLPVYNYQAFPAYPSSPFQVTTGYQLPVYNYQAFPAYPSSPFQVTTGYQLPVYNYQAFPAYPSSPFQVTTGYQLPVYNYQAFPAYPNSAVQVTTGYQFHVYNYQMPPQCPVGEQRRNLWTEAYKWWYLVCLIQRRD

SEQ ID NO: 43544 - protein, 337 aa, Homo sapiens
MSAANPETPNSTISREASTQSSSAAASQGWVLPEGKIVPNTVFVGGIDARMDETEIGSCFGRYGSVKEVKIITNRTGVSKGYGFVSFVNDVDVQKIVGSQIHFHGKKLKLGPAIRKQKLCARHVQPRPLVVNPPPPPQFQNVWRNPNTETYLQPQITPNPVTQHVQAYSAYPHSPGQVITGCQLLVYNYQEYPTYPDSAFQVTTGYQLPVYNYQPFPAYPRSPFQVTAGYQLPVYNYQAFPAYPNSPFQVATGYQFPVYNYQAFPAYPNSPVQVTTGYQLPVYNYQAFPAYPNSPFQVATGYQFPVYNYQAFPAYPNSPVQVTTGYQLPVYNYQMPP

SEQ ID NO: 43545 - protein, 366 aa, Homo sapiens
MSAANPETPNSTISREASTQSSSAAASQGWVLPEGKIVPNTVFVGGIDARMDETEIGSCFGRYGSVKEVKIITNRTGVSKGYGFVSFVNDVDVQKIVGSQIHFHGKKLKLGPAIRKQKLCARHVQPRPLVVNPPPPPQFQNVWRNPNTETYLQPQITPNPVTQHVQAYSAYPHSPGQVITGCQLLVYNYQEYPTYPDSAFQVTTGYQLPVYNYQPFPAYPRSPFQVTAGYQLPVYNYQAFPAYPNSPVQVTTGYQLPVYNYQAFPAYPNSPVQVTTGYQLPVYNYQAFPAYPNSPVQVTTGYQLPVYNYQAFPAYPNSAVQVTTGYQFHVYNYQMPPQCPVGEQRRNLWTEAYKWWYLVCLIQRRD

SEQ ID NO: 43546 - protein, 438 aa, Homo sapiens
MSAANPETPNSTISREASTQSSSAAASQGWVLPEGKIVPNTVFVGGIDARMDETEIGSCFGRYGSVKEVKIITNRTGVSKGYGFVSFVNDVDVQKIVGSQIHFHGKKLKLGPAIRKQKLCARHVQPRPLVVNPPPPPQFQNVWRNPNTETYLQPQITPNPVTQHVQAYSAYPHSPGQVITGCQLLVYNYQEYPTYPDSAFQVTTGYQLPVYNYQPFPAYPRSPFQVTAGYQLPVYNYQAFPAYPNSPFQVATGYQFPVYNYQAFPAYPNSPVQVTTGYQLPVYNYQAFPAYPNSPFQVATGYQFPVYNYQAFPAYPNSPVQVTTGYQLPVYNYQAFPAYPNSPFQVATGYQFPVYNYQAFPAYPNSPVQVTTGYQLPVYNYQAFPAYPNSAVQVTTGYQFHVYNYQMPPQCPVGEQRRNLWTEAYKWWYLVCLIQRRD

SEQ ID NO: 43547 - protein, 361 aa, Homo sapiens
MSAANPETPNSTISREASTQSSSAAASQGWVLPEGKIVPNTVFVGGIDARMDETEIGSCFGRYGSVKEVKIITNRTGVSKGYGFVSFVNDVDVQKIVGSQIHFHGKKLKLGPAIRKQKLCARHVQPRPLVVNPPPPPQFQNVWRNPNTETYLQPQITPNPVTQHVQAYSAYPHSPGQVITGCQLLVYNYQEYPTYPDSAFQVTTGYQLPVYNYQPFPAYPRSPFQVTAGYQLPVYNYQAFPAYPNSPFQVATGYQFPVYNYQAFPAYPNSPVQVTTGYQLPVYNYQAFPAYPNSPFQVATGYQFPVYNYQAFPAYPNSPVQVTTGYQLPVYNYQAFPAYPNSPVQVTTGYQLPVYNYQMPP

SEQ ID NO: 43548 - protein, 390 aa, Homo sapiens
MSAANPETPNSTISREASTQSSSAAASQGWVLPEGKIVPNTVFVGGIDARMDETEIGSCFGRYGSVKEVKIITNRTGVSKGYGFVSFVNDVDVQKIVGSQIHFHGKKLKLGPAIRKQKLCARHVQPRPLVVNPPPPPQFQNVWRNPNTETYLQPQITPNPVTQHVQAYSAYPHSPGQVITGCQLLVYNYQEYPTYPDSAFQVTTGYQLPVYNYQPFPAYPRSPFQVTAGYQLPVYNYQAFPAYPNSPFQVATGYQFPVYNYQAFPAYPNSPVQVTTGYQLPVYNYQAFPAYPNSPFQVATGYQFPVYNYQAFPAYPNSPVQVTTGYQLPVYNYQAFPAYPNSAVQVTTGYQFHVYNYQMPPQCPVGEQRRNLWTEAYKWWYLVCLIQRRD

SEQ ID NO: 43549 - protein, 315 aa, Homo sapiens
MAAPSCGGDRKARLTPSLPHESTANPETPNSTISREASTQSSSAATSQGYILPEGKIMPNTVFVGGIDVRMDETEIRSFFARYGSVKEVKIITDRTGVSKGYGFVSFFNDVDVQKIVESQINFHGKKLKLGPAIRKQNLCAYHVQPRPLVFNHPPPPQFQNVWTNPNTETYMQPTTTMNPITQYVQAYPTYPNSPVQVITGYQLPVYNYQMPPQWPVGEQRSYVVPPAYSAVNYHCNEVDPGAEVVPNECSVHEATPPSGNGPQKKSVDRSIQTVVSCLFNPENRLRNSVVTQDDYFKDKRVHHFRRSRAMLKSV

SEQ ID NO: 43550 - protein, 295 aa, Homo sapiens
MSTANPETPNSTISREASTQSSSAATSQGYILPEGKIMPNTVFVGGIDVRMDETEIRSFFARYGSVKEVKIITDRTGVSKGYGFVSFFNDVDVQKIVESQINFHGKKLKLGPAIRKQNLCAYHVQPRPLVFNHPPPPQFQNVWTNPNTETYMQPTTTMNPITQYVQAYPTYPNSPVQVITGYQLPVYNYQMPPQWPVGEQRSYVVPPAYSAVNYHCNEVDPGAEVVPNECSVHEATPPSGNGPQKKSVDRSIQTVVSCLFNPENRLRNSVVTQDDYFKDKRVHHFRRSRAMLKSV

SEQ ID NO: 43551 - protein, 761 aa, Homo sapiens
MNWRFVELLYFLFIWGRISVQPSHQEPAGTDQHVSKEFDWLISDRGPFHHSRSYLSFVERHRQGFTTRYKIYREFARWKVRNTAIERRDLVRHPVPLMPEFQRSIRLLGRRPTTQQFIDTIIKKYGTHLLISATLGGEEALTMYMDKSRLDRKSGNATQSVEALHQLASSYFVDRDGTMRRLHEIQISTGAIKVTETRTGPLGCNSYDNLDSVSSVLLQSTESKLHLQGLQIIFPQYLQEKFVQSALSYIMCNGEGEYLCQNSQCRCQCAEEFPQCNCPITDIQIMEYTLANMAKSWAEAYKDLENSDEFKSFMKRLPSNHFLTIGSIHQHWGNDWDLQNRYKLLQSATEAQRQKIQRTARKLFGLSVRCRHNPNHQLPRERTIQQWLARVQSLLYCNENGFWGTFLESQRSCVCHGSTTLCQRPIPCVIGGNNSCAMCSLANISLCGSCNKGYKLYRGRCEPQNVDSERSEQFISFETDLDFQDLELKYLLQKMDSRLYVHTTFISNEIRLDTFFDPRWRKRMSLTLKSNKNRMDFIHMVIGMSMRICQMRNSSLDPMFFVYVNPFSGSHSEGWNMPFGEFGYPRWEKIRLQNSQCYNWTLLLGNRWKTFFETVHIYLRSRTRLPTLLRNETGQGPVDLSDPSKRQFYIKISDVQVFGYSLRFNADLLRSAVQQVNQSYTQGGQFYSSSSVMLLLLDIRDRINRLAPPVAPGKPQLDLFSCMLKHRLKLTNSEIIRVNHALDLYNTEILKQSDQMTAKLC

SEQ ID NO: 43552 - protein, 320 aa, Homo sapiens
MNWRFVELLYFLFIWGRISVQPSHQEPAGTDQHVSKEFDWLISDRGPFHHSRSYLSFVERHRQGFTTRYKIYREFARWKVRNTAIERRDLVRHPVPLMPEFQRSIRLLGRRPTTQQFIDTIIKKYGTHLLISATLGGEEALTMYMDKSRLDRKSGNATQSVEALHQLASSYFVDRDGTMRRLHEIQISTGAIKVTETRTGPLGCNSYDNLDSVSSVLLQSTESKLHLQGLQIIFPQYLQEKFVQSALSYIMCNGEGEYLCQNSQCRCQCAEEFPQCNCPITDIQIMEYTLANMAKSWAEAYKDLENSGRESHSVPLHEWP

SEQ ID NO: 43553 - protein, 761 aa, Homo sapiens; identical to SEQ ID NO: 43551

SEQ ID NO: 43554 - protein, 467 aa, Homo sapiens
MKRIKVPDYKDRSVFGVPLTVNVQRTGQPLPQSIQQAMRYLRNHCLDQVGLFRKSGVKSRIQALRQMNEGAIDCVNYEGQSAYDVADMLKQYFRDLPEPLMTNKLSETFLQIYQYVPKDQRLQAIKAAIMLLPDENREVLQTLLYFLSDVTAAVKENQMTPTNLAVCLAPSLFHLNTLKRENSSPRVMQRKQSLGKPDQKDLNENLAATQGLAHMIAECKKLFQVPEEMSRCRNSYTEQELKPLTLEALGHLGNDDSADYQHFLQDCVDGLFKEVKEKFKGWVSYSTSEQAELSYKKVSEGPPLRLWRSVIEVPAVPEEILKRLLKEQHLWDVDLLDSKVIEILDSQTEIYQYVQNSMAPHPARDYVVLRTWRTNLPKGACALLLTSVDHDRAPVVGVRVNVLLSRYLIEPCGPGKSKLTYMCRVDLRGHMPEWYTKSFGHLCAAEVVKIRDSFSNQNTETKDTKSR

SEQ ID NO: 43555 - protein, 1125 aa, Homo sapiens
MGDPKAHVMARPLRAPLRRSFSDHIRDSTARALDVIWKNTRDRRLAEIEAKEACDWLRATGFPQYAQLYEDFLFPIDISLVKREHDFLDRDAIEALCRRLNTLNKCAVMKLEISPHRKRSDDSDEDEPCAISGKWTFQRDSKRWSRLEEFDVFSPKQDLVPGSPDDSHPKDGPSPGGTLMDLSERQEVSSVRSLSSTGSLPSHAPPSEDAATPRTNSVISVCSSSNLAGNDDSFGSLPSPKELSSFSFSMKGHEKTAKSKTRSLLKRMESLKLKSSHHSKHKAPSKLGLIISGPILQEGMDEEKLKQLNCVEISALNGNRINVPMVRKRSVSNSTQTSSSSSQSETSSAVSTPSPVTRTRSLSACNKRVGMYLEGFDPFNQSTFNNVVEQNFKNRESYPEDTVFYIPEDHKPGTFPKALTNGSFSPSGNNGSVNWRTGSFHGPGHISLRRENSSDSPKELKRRNSSSSMSSRLSIYDNVPGSILYSSSGDLADLENEDIFPELDDILYHVKGMQRIVNQWSEKFSDEGDSDSALDSVSPCPSSPKQIHLDVDNDRTTPSDLDSTGNSLNEPEEPSEIPERRDSGVGASLTRSNRHRLRWHSFQSSHRPSLNSVSLQINCQSVAQMNLLQKYSLLKLTALLEKYTPSNKHGFSWAVPKFMKRIKVPDYKDRSVFGVPLTVNVQRTGQPLPQSIQQAMRYLRNHCLDQVGLFRKSGVKSRIQALRQMNEGAIDCVNYEGQSAYDVADMLKQYFRDLPEPLMTNKLSETFLQIYQYVPKDQRLQAIKAAIMLLPDENREVLQTLLYFLSDVTAAVKENQMTPTNLAVCLAPSLFHLNTLKRENSSPRVMQRKQSLGKPDQKDLNENLAATQGLAHMIAECKKLFQVPEEMSRCRNSYTEQELKPLTLEALGHLGNDDSADYQHFLQDCVDGLFKEVKEKFKGWVSYSTSEQAELSYKKVSEGPPLRLWRSVIEVPAVPEEILKRLLKEQHLWDVDLLDSKVIEILDSQTEIYQYVQNSMAPHPARDYVVLRTWRTNLPKGACALLLTSVDHDRAPVVGVRVNVLLSRYLIEPCGPGKSKLTYMCRVDLRGHMPEWYTKSFGHLCAAEVVKIRDSFSNQNTETKDTKSR

SEQ ID NO: 43556 - protein, 1017 aa, Homo sapiens
MKLEISPHRKRSDDSDEDEPCAISGKWTFQRDSKRWSRLEEFDVFSPKQDLVPGSPDDSHPKDGPSPGGTLMDLSERQEVSSVRSLSSTGSLPSHAPPSEDAATPRTNSVISVCSSSNLAGNDDSFGSLPSPKELSSFSFSMKGHEKTAKSKTRSLLKRMESLKLKSSHHSKHKAPSKLGLIISGPILQEGMDEEKLKQLNCVEISALNGNRINVPMVRKRSVSNSTQTSSSSSQSETSSAVSTPSPVTRTRSLSACNKRVGMYLEGFDPFNQSTFNNVVEQNFKNRESYPEDTVFYIPEDHKPGTFPKALTNGSFSPSGNNGSVNWRTGSFHGPGHISLRRENSSDSPKELKRRNSSSSMSSRLSIYDNVPGSILYSSSGDLADLENEDIFPELDDILYHVKGMQRIVNQWSEKFSDEGDSDSALDSVSPCPSSPKQIHLDVDNDRTTPSDLDSTGNSLNEPEEPSEIPERRDSGVGASLTRSNRHRLRWHSFQSSHRPSLNSVSLQINCQSVAQMNLLQKYSLLKLTALLEKYTPSNKHGFSWAVPKFMKRIKVPDYKDRSVFGVPLTVNVQRTGQPLPQSIQQAMRYLRNHCLDQVGLFRKSGVKSRIQALRQMNEGAIDCVNYEGQSAYDVADMLKQYFRDLPEPLMTNKLSETFLQIYQYVPKDQRLQAIKAAIMLLPDENREVLQTLLYFLSDVTAAVKENQMTPTNLAVCLAPSLFHLNTLKRENSSPRVMQRKQSLGKPDQKDLNENLAATQGLAHMIAECKKLFQVPEEMSRCRNSYTEQELKPLTLEALGHLGNDDSADYQHFLQDCVDGLFKEVKEKFKGWVSYSTSEQAELSYKKVSEGPPLRLWRSVIEVPAVPEEILKRLLKEQHLWDVDLLDSKVIEILDSQTEIYQYVQNSMAPHPARDYVVLRTWRTNLPKGACALLLTSVDHDRAPVVGVRVNVLLSRYLIEPCGPGKSKLTYMCRVDLRGHMPEWYTKSFGHLCAAEVVKIRDSFSNQNTETKDTKSR

SEQ ID NO: 43557 - protein, 323 aa, Homo sapiens
MGNSASRSDFEWVYTDQPHTQRRKEILAKYPAIKALMRPDPRLKWAVLVLVLVQMLACWLVRGLAWRWLLFWAYAFGGCVNHSLTLAIHDISHNAAFGTGRAARNRWLAVFANLPVGVPYAASFKKYHVDHHRYLGGDGLDVDVPTRLEGWFFCTPARKLLWLVLQPFFYSLRPLCVHPKAVTRMEVLNTLVQLAADLAIFALWGLKPVVYLLASSFLGLGLHPISGHFVAEHYMFLKGHETYSYYGPLNWITFNVGYHVEHHDFPSIPGYNLPLVRKIAPEYYDHLPQHHSWVKVLWDFVFEDSLGPYARVKRVYRLAKDGL

SEQ ID NO: 43558 - protein, 737 aa, Homo sapiens
MQPRRAQAPGAQLLPALALLLLLLGAGPRGSSLANPVPAAPLSAPGPCAAQPCRNGGVCTSRPEPDPQHPAPAGEPGYSCTCPAGISGANCQLVADPCASNPCHHGNCSSSSSSSSDGYLCICNEGYEGPNCEQALPSLPATGWTESMAPRQLQPVPATQEPDKILPRSQATVTLPTWQPKTGQKVVEMKWDQVEVIPDIACGNASSNSSAGGRLVSFEVPQNTSVKIRQDATASLILLWKVTATGFQQCSLIDGRSVTPLQASGGLVLLEEMLALGNNHFIGFVNDSVTKSIVALRLTLVVKVSTCVPGESHANDLECSGKGKCTTKPSEATFSCTCEEQYVGTFCEEYDACQRKPCQNNASCIDANEKQDGSNFTCVCLPGYTGELCQSKIDYCILDPCRNGATCISSLSGFTCQCPEGYFGSACEEKVDPCASSPCQNNGTCYVDGVHFTCNCSPGFTGPTCAQLIDFCALSPCAHGTCRSVGTSYKCLCDPGYHGLYCEEEYNECLSAPCLNAATCRDLVNGYECVCLAEYKGTHCELYKDPCANVSCLNGATCDSDGLNGTCICAPGFTGEECDIDINECDSNPCHHGGSCLDQPNGYNCHCPHGWVGANCEIHLQWKSGHMAESLTNMPRHSLYIIIGALCVAFILMLIILIVGICRISRIEYQGSSRPAYEEFYNCRSIDSEFSNAIASIRHARFGKKSRPAMYDVSPIAYEDYSPDDKPLVTLIKTKDL

SEQ ID NO: 43559 - protein, 455 aa, Homo sapiens
MLALGNNHFIGFVNDSVTKSIVALRLTLVVKVSTCVPGESHANDLECSGKGKCTTKPSEATFSCTCEEQYVGTFCEEYDACQRKPCQNNASCIDANEKQDGSNFTCVCLPGYTGELCQSKIDYCILDPCRNGATCISSLSGFTCQCPEGYFGSACEEKVDPCASSPCQNNGTCCSPGFTGPTCAQLIDFCALSPCAHGTCRSVGTSYKCLCDPGYHGLYCEEEYNECLSAPCLNAATCRDLVNGYECVCLAEYKGTHCELYKDPCANVSCLNGATCDSDGLNGTCICAPGFTGEECDIDINECDSNPCHHGGSCLDQPNGYNCHCPHGWVGANCEIHLQWKSGHMAESLTNMPRHSLYIIIGALCVAFILMLIILIVGICRISRIEYQGSSRPAYEEFYNCRSIDSEFSNAIASIRHARFGKKSRPAMYDVSPIAYEDYSPDDKPLVTLIKTKDL

SEQ ID NO: 43560 - protein, 310 aa, Homo sapiens
MTATEALLRVLLLLLAFGHSTYGAECFPACNPQNGFCEDDNVCRCQPGWQGPLCDQCVTSPGCLHGLCGEPGQCICTDGWDGELCDRDVRACSSAPCANNRTCVSLDDGLYECSCAPGYSGKDCQKKDGPCVINGSPCQHGGTCVDDEGRASHASCLCPPGFSGNFCEIVANSCTPNPCENDGVCTDIGGDFRCRCPAGFIDKTCSRPVTNCASSPCQNGGTCLQHTQGQAICFTILGVLTSLVVLGTVGIVFLNKCETWVSNLRYNHMLRKKKNLLLQYNSGEDLAVNIIFPEKIDMTTFSKEAGDEEI

SEQ ID NO: 43561 - protein, 383 aa, Homo sapiens
MTATEALLRVLLLLLAFGHSTYGAECFPACNPQNGFCEDDNVCRCQPGWQGPLCDQCVTSPGCLHGLCGEPGQCICTDGWDGELCDRDVRACSSAPCANNRTCVSLDDGLYECSCAPGYSGKDCQKKDGPCVINGSPCQHGGTCVDDEGRASHASCLCPPGFSGNFCEIVANSCTPNPCENDGVCTDIGGDFRCRCPAGFIDKTCSRPVTNCASSPCQNGGTCLQHTQVSYECLCKPEFTGLTCVKKRALSPQQVTRLPSGYGLAYRLTPGVHELPVQQPEHRILKVSMKELNKKTPLLTEGQAICFTILGVLTSLVVLGTVGIVFLNKCETWVSNLRYNHMLRKKKNLLLQYNSGEDLAVNIIFPEKIDMTTFSKEAGDEEI

SEQ ID NO: 43562 - protein, 97 aa, Homo sapiens
MTATEALLRVLLLLLAFGHSTYGAECFPACNPQNGFCEDDNVCRCQPGWQGPLCDQCVTSPGCLHGLCGEPGQCICTDGWDGELCDRDVRACSSAPC

SEQ ID NO: 43563 - protein, 618 aa, Homo sapiens
MVSPRMSGLLSQTVILALIFLPQTRPAGVFELQIHSFGPGPGPGAPRSPCSARLPCRLFFRVCLKPGLSEEAAESPCALGAALSARGPVYTEQPGAPAPDLPLPDGLLQVPFRDAWPGTFSFIIETWREELGDQIGGPAWSLLARVAGRRRLAAGGPWARDIQRAGAWELRFSYRARCEPPAVGTACTRLCRPRSAPSRCGPGLRPCAPLEDECEAPLVCRAGCSPEHGFCEQPGECRCLEGWTGPLCTVPVSTSSCLSPRGPSSATTGCLVPGPGPCDGNPCANGGSCSETPRSFECTCPRGFYGLRCEVSGVTCADGPCFNGGLCVGGADPDSAYICHCPPGFQGSNCEKRVDRCSLQPCRNGGLCLDLGHALRCRCRAGFAGPRCEHDLDDCAGRACANGGTCVEGGGAHRCSCALGFGGRDCRERADPCAARPCAHGGRCYAHFSGLVCACAPGYMGARCEFPVHPDGASALPAAPPGLRPGDPQRYLLPPALGLLVAAGVAGAALLLVHVRRRGHSQDAGSRLLAGTPEPSVHALPDALNNLRTQEGSGDGPSSSVDWNRPEDVDPQGIYVISAPSIYAREVATPLFPPLHTGRAGQRQHLLFPYPSSILSVK

SEQ ID NO: 43564 - protein, 587 aa, Homo sapiens
MVSPRMSGLLSQTVILALIFLPQTRPAGVFELQIHSFGPGPGPGAPRSPCSARLPCRLFFRVCLKPGLSEEAAESPCALGAALSARGPVYTEQPGAPAPDLPLPDGLLQVPFRDAWPGTFSFIIETWREELGDQIGGPAWSLLARVAGRRRLAAGGPWARDIQRAGAWELRFSYRARCEPPAVGTACTRLCRPRSAPSRCGPGLRPCAPLEDECEAPLVCRAGCSPEHGFCEQPGECRCLEGWTGPLCTVPVSTSSCLSPRGPSSATTGCLVPGPGPCDGNPCANGGSCSETPRSFECTCPRGFYGLRCEVSGVTCADGPCFNGGLCVGGADPDSAYICHCPPGFQGSNCEKRVDRCSLQPCRNGGLCLDLGHALRCRCRAGFAGPRCEHDLDDCAGRACANGGTCVEGGGAHRCSCALGFGGRDCRERADPCAARPCAHGGRCYAHFSGLVCACAPGYMGARCEFPVHPDGASALPAAPPGLRPGDPQRYLLPPALGLLVAAGVAGAALLLVHVRRRGHSQDAGSRLLAGTPEPSVHALPDALNNLRTQEGSGDGPSSSVDWNRPEDVDPQGIYVISAPSIYAREA

SEQ ID NO: 43565 - protein, 685 aa, Homo sapiens
MAAASRSASGWALLLLVALWQQRAAGSGVFQLQLQEFINERGVLASGRPCEPGCRTFFRVCLKHFQAVVSPGPCTFGTVSTPVLGTNSFAVRDDSSGGGRNPLQLPFNFTWPGTFSLIIEAWHAPGDDLRPEALPPDALISKIAIQGSLAVGQNWLLDEQTSTLTRLRYSYRVICSDNYYGDNCSRLCKKRNDHFGHYVCQPDGNLSCLPGWTGEYCQQPICLSGCHEQNGYCSKPAECLCRPGWQGRLCNECIPHNGCRHGTCSTPWQCTCDEGWGGLFCDQDLNYCTHHSPCKNGATCSNSGQRSYTCTCRPGYTGVDCELELSECDSNPCRNGGSCKDQEDGYHCLCPPGYYGLHCEHSTLSCADSPCFNGGSCRERNQGANYACECPPNFTGSNCEKKVDRCTSNPCANGGQCLNRGPSRMCRCRPGFTGTYCELHVSDCARNPCAHGGTCHDLENGLMCTCPAGFSGRRCEVRTSIDACASSPCFNRATCYTDLSTDTFVCNCPYGFVGSRCEFPVGLPPSFPWVAVSLGVGLAVLLVLLGMVAVAVRQLRLRRPDDGSREAMNNLSDFQKDNLIPAAQLKNTNQKKELEVDCGLDKSNCGKQQNHTLDYNLAPGPLGRGTMPGKFPHSDKSLGEKAPLRLHSEKPECRISAICSPRDSMYQSVCLISEERNECVIATEV

SEQ ID NO: 43566 - protein, 740 aa, Homo sapiens
MASHLRPPSPLLVRVYKSGPRVRRKLESYFQSSKSSGGGECTVSTQEHEAPGTFRVEFSERAAKERVLKKGEHQILVDEKPVPIFLVPTENSIKKNTRPQISSLTQSQAETPSGDMHQHEGHIPNAVDSCLQKIFLTVTADLNCNLFSKEQRAYITTLCPSIRKMEGHDGIEKVCGDFQDIERIHQFLSEQFLESEQKQQFSPSMTERKPLSQQERDSCISPSEPETKAEQKSNYFEVPLPYFEYFKYICPDKINSIEKRFGVNIEIQESSPNMVCLDFTSSRSGDLEAARESFASEFQKNTEPLKQECVSLADSKQANKFKQELNHQFTKLLIKEKGGELTLLGTQDDISAAKQKISEAFVKIPVKLFAANYMMNVIEVDSAHYKLLETELLQEISEIEKRYDICSKVSEKGQKTCILFESKDRQVDLSVHAYASFIDAFQHASCQLMREVLLLKSLGKERKHLHQTKFADDFRKRHPNVHFVLNQESMTLTGLPNHLAKAKQYVLKGGGMSSLAGKKLKEGHETPMDIDSDDSKAASPPLKGSVSSEASELDKKEKGICVICMDTISNKKVLPKCKHEFCAPCINKAMSYKPICPTCQTSYGIQKGNQPEGSMVFTVSRDSLPGYESFGTIVITYSMKAGIQTEEHPNPGKRYPGIQRTAYLPDNKEGRKVLKLLYRAFDQKLIFTVGYSRVLGVSDVITWNDIHHKTSRFGGPEMYGYPDPSYLKRVKEELKAKGIE

SEQ ID NO: 43567 - protein, 620 aa, Homo sapiens
MSRPGHGGLMPVNGLGFPPQNVARVVVWEWLNEHSRWRPYTATVCHHIENVLKEDARGSVVLGQVDAQLVPYIIDLQSMHQFRQDTGTMRPVRRNFYDPSSAPGKGIVWEWENDGGAWTAYDMDICITIQNAYEKQHPWLDLSSLGFCYLIYFNSMSQMNRQTRRRRRLRRRLDLAYPLTVGSIPKSQSWPVGASSGQPCSCQQCLLVNSTRAASNAILASQRRKAPPAPPLPPPPPPGGPPGALAVRPSATFTGAALWAAPAAGPAEPAPPPGAPPRSPGAPGGARTPGQNNLNRPGPQRTTSVSARASIPPGVPALPVKNLNGTGPVHPALAGMTGILLCAAGLPVCLTRAPKPILHPPPVSKSDVKPVPGVPGVCRKTKKKHLKKSKNPEDVVRRYMQKVKNPPDEDCTICMERLVTASGYEGVLRHKGVRPELVGRLGRCGHMYHLLCLVAMYSNGNKDGSLQCPTCKAIYGEKTGTQPPGKMEFHLIPHSLPGFPDTQTIRIVYDIPTGIQGPEHPNPGKKFTARGFPRHCYLPNNEKGRKVLRLLITAWERRLIFTIGTSNTTGESDTVVWNEIHHKTEFGSNLTGHGYPDASYLDNVLAELTAQGVSEAAAKA

SEQ ID NO: 43568 - protein, 347 aa, Homo sapiens
MSFVLSRMAACGGTCKNKVTVSKPVWDFLSKETPARLARLREEHRVSILIDGETSDIYVLQLSPQGPPPAPPNGLYLARKALKGLLKEAEKELKKAQRQGELMGCLALGGGGEHPEMHRAGPPPLRAAPLLPPGARGLPPPPPPLPPPLPPRLREEAEEQESTCPICLGEIQNAKTLEKCRHSFCEGCITRALQVKKACPMCGRFYGQLVGNQPQNGRMLVSKDATLLLPSYEKYGTIVIQYVFPPGVQGAEHPNPGVRYPGTTRVAYLPDCPEGNKVLTLFRKAFDQRLTFTIGTSMTTGRPNVITWNDIHHKTSCTGGPQLFGYPDPTYLTRVQEELRAKGITDD

SEQ ID NO: 43569 - protein, 347 aa, Homo sapiens; identical to SEQ ID NO: 43568

SEQ ID NO: 43570 - protein, 347 aa, Homo sapiens; identical to SEQ ID NO: 43568

SEQ ID NO: 43571 - protein, 204 aa, Homo sapiens
MPILSSSGSKMAACGGTCKNKVTVSKPVWDFLSKETPARLARLREEHRVSILIDGETSDIYVLQLSPQGPPPAPPNGLYLARKALKGLLKEAEKELKKAQRQGELMGCLALGGGGEHPEMHRAGPPPLRAAPLLPPGARGLPPPPPPLPPPLPPRLREEAEEQESTCPICLGEIQNAKTLEKCRHSFCEGCITRALQVKKACPM

SEQ ID NO: 43572 - protein, 7 aa, Homo sapiens
MPILSSS

SEQ ID NO: 43573 - protein, 350 aa, Homo sapiens
MPILSSSGSKMAACGGTCKNKVTVSKPVWDFLSKETPARLARLREEHRVSILIDGETSDIYVLQLSPQGPPPAPPNGLYLARKALKGLLKEAEKELKKAQRQGELMGCLALGGGGEHPEMHRAGPPPLRAAPLLPPGARGLPPPPPPLPPPLPPRLREEAEEQESTCPICLGEIQNAKTLEKCRHSFCEGCITRALQVKKACPMCGRFYGQLVGNQPQNGRMLVSKDATLLLPSYEKYGTIVIQYVFPPGVQGAEHPNPGVRYPGTTRVAYLPDCPEGNKVLTLFRKAFDQRLTFTIGTSMTTGRPNVITWNDIHHKTSCTGGPQLFGYPDPTYLTRVQEELRAKGITDD

SEQ ID NO: 43574 - protein, 49 aa, Homo sapiens
MSFVLSRMAACGGTCKNKVTVSKPVWDFLSKETPARLARLREEHRVSIL

SEQ ID NO: 43575 - protein, 711 aa, Homo sapiens
MLDGPLFSEGPDSPRELQDEESGSCLWVQKSKLLVIEVKTISCHYSRRAPSRQPMDFQASHWARGFQNRTCGPRPGSPQPPPRRPWASRVLQEATNWRAGPLAEVRAREQEKRKAASQEREAKETERKRRKAGGARRSPPGRPRPEPRNAPRVAQLAGLPAPLRPERLAPVGRAPRPSAQPQSDPGSAWAGPWGGRRPGPPSYEAHLLLRGSAGTAPRRRWDRPPPYVAPPSYEGPHRTLGTKRGPGNSQVPTSSAPAATPARTDGGRTKKRLDPRIYRDVLGAWGLRQGQGLLGGSPGCGAARARPEPGKGVVEKSLGLAAADLNSGSDSHPQAKATGSAGTEIAPAGSATAAPCAPHPAPRSRHHLKGSREGKEGEQIWFPKCWIPSPKKQPPRHSQTLPRPWAPGGTGWRESLGLGEGAGPETLEGWKATRRAHTLPRSSQGLSRGEGVFVIDATCVVIRSQYVPTPRTQQVQLLPSGVTRVVGDSPSQSKPGKEEGEGATVFPSPCQKRLSSSRLLHQPGGGRGGEAEGGRPGDSTLEERTFRILGLPAPEVNLRDAPTQPGSPEHQALGPAASGAQGRAEGSEVAVVQRRAGRGWARTPGPYAGALREAVSRIRRHTAPDSDTDEAEELSVHSGSSDGSDTEAPGASWRNERTLPEVGNSSPEEDGKTAELSDSVGEILDVISQTEEVLFGVRDIRGTQQGNRKRQ

SEQ ID NO: 43576 - protein, 283 aa, Homo sapiens
MGIWTSGTDIFLSLWEIYVSPRSPGWMDFIQHLGVCCLVALISVGLLSVAACWFLPSIIAAAASWIITCVLLCCSKHARCFILLVFLSCGLREGRNALIAAGTGIVILGHVENIFHNFKGLLDGMTCNLRAKSFSIHFPLLKKYIEAIQWIYGLATPLSVFDDLVSWNQTLAVSLFSPSHVLEAQLNDSKGEVLSVLYQMATTTEVLSSLGQKLLAFAGLSLVLLGTGLFMKRFLGPCGWKYENIYITRQFVQFDERERHQQRPCVLPLNKEERRKFISGFQS

SEQ ID NO: 43577 - protein, 466 aa, Homo sapiens
MLKWPIPGQVALFQILRCRGNSRRTTVTSLTVSQVGQNFTFVLTDIDSKQRFGFCRLSSGAKSCFCILSYLPWFEVFYKLLNILADYTTKRQENQWNELLETLHKLPIPDPGVSVHLSVHSYFTVPDTRELPSIPENRNLTEYFVAVDVNNMLHLYASMLYERRILIICSKLSTLTACIHGSAAMLYPMYWQHVYIPVLPPHLLDYCCAPMPYLIGIHLSLMEKVRNMALDDVVILNVDTNTLETPFDDLQSLPNDVISSLKNRLKKVSTTTGDGVARAFLKAQAAFFGSYRNALKIEPEEPITFCEEAFVSHYRSGAMRQFLQNATQLQLFKQFIDGRLDLLNSGEGFSDVFEEEINMGEYAGSDKLYHQWLSTVRKGSGAILNTVKTKANPAMKTVYKFAKDHAKMGIKEVKNRLKQKDIAENGCAPTPEEQLPKTAPSPLVEAKDPKLREDRRPITVHFGQAL

SEQ ID NO: 43578 - protein, 559 aa, Homo sapiens
MGSRIKQNPETTFEVYVEVAYPRTGGTLSDPEVQRQFPEDYSDQEVLQTLTKFCFPFYVDSLTVSQVGQNFTFVLTDIDSKQRFGFCRLSSGAKSCFCILSYLPWFEVFYKLLNILADYTTKRQENQWNELLETLHKLPIPDPGVSVHLSVHSYFTVPDTRELPSIPENRNLTEYFVAVDVNNMLHLYASMLYERRILIICSKLSTLTACIHGSAAMLYPMYWQHVYIPVLPPHLLDYCCAPMPYLIGIHLSLMEKVRNMALDDVVILNVDTNTLETPFDDLQSLPNDVISSLKNRLKKVSTTTGDGVARAFLKAQAAFFGSYRNALKIEPEEPITFCEEAFVSHYRSGAMRQFLQNATQLQLFKQFIDGRLDLLNSGEGFSDVFEEEINMGEYAGSDKLYHQWLSTVRKGSGAILNTVKTKANPAMKTVYKFAKDHAKMGIKEVKNRLKQKDIAENGCAPTPEEQLPKTAPSPLVEAKDPKLREDRRPITVHFGQVRPPRPHVVKRPKSNIAVEGRRTSVPSPEQNTIATPATLHILQKSITHFAAKFPTRGWTSSSH

SEQ ID NO: 43579 - protein, 1009 aa, Homo sapiens
MGSRIKQNPETTFEVYVEVAYPRTGGTLSDPEVQRQFPEDYSDQEVLQTLTKFCFPFYVDSLTVSQVGQNFTFVLTDIDSKQRFGFCRLSSGAKSCFCILSYLPWFEVFYKLLNILADYTTKRQENQWNELLETLHKLPIPDPGVSVHLSVHSYFTVPDTRELPSIPENRNLTEYFVAVDVNNMLHLYASMLYERRILIICSKLSTLTACIHGSAAMLYPMYWQHVYIPVLPPHLLDYCCAPMPYLIGIHLSLMEKVRNMALDDVVILNVDTNTLETPFDDLQSLPNDVISSLKNRLKKVSTTTGDGVARAFLKAQAAFFGSYRNALKIEPEEPITFCEEAFVSHYRSGAMRQFLQNATQLQLFKQFIDGRLDLLNSGEGFSDVFEEEINMGEYAGSDKLYHQWLSTVRKGSGAILNTVKTKANPAMKTVYKFAKDHAKMGIKEVKNRLKQKDIAENGCAPTPEEQLPKTAPSPLVEAKDPKLREDRRPITVHFGQVRPPRPHVVKRPKSNIAVEGRRTSVPSPEQPQPYRTLRESDSAEGDEAESPEQQVRKSTGPVPAPPDRAASIDLLEDVFSNLDMEAALQPLGQAKSLEDLRAPKDLREQPGTFDYQRLDLGGSERSRGVTVALKLTHPYNKLWSLGQDDMAIPSKPPAASPEKPSALLGNSLALPRRPQNRDSILNPSDKEEVPTPTLGSITIPRPQGRKTPELGIVPPPPIPRPAKLQAAGAALGDVSERLQTDRDRRAALSPGLLPGVVPQGPTELLQPLSPGPGAAGTSSDALLALLDPLSTAWSGSTLPSRPATPNVATPFTPQFSFPPAGTPTPFPQPPLNPFVPSMPAAPPTLPLVSTPAGPFGAPPASLGPAFASGLLLSSAGFCAPHRSQPNLSALSMPNLFGQMPMGTHTSPLQPLGPPAVAPSRIRTLPLARSSARAAETKQGLALRPGDPPLLPPRPPQGLEPTLQPSAPQQARDPFEDLLQKTKQDVSPSPALAPAPDSVEQLRKQWETFE

SEQ ID NO: 43580 - protein, 529 aa, Homo sapiens
MLKWPIPGQVALFQEVLQTLTKFCFPFYVDSLTVSQVGQNFTFVLTDIDSKQRFGFCRLSSGAKSCFCILSYLPWFEVFYKLLNILADYTTKRQENQWNELLETLHKLPIPDPGVSVHLSVHSYFTVPDTRELPSIPENRNLTEYFVAVDVNNMLHLYASMLYERRILIICSKLSTLTACIHGSAAMLYPMYWQHVYIPVLPPHLLDYCCAPMPYLIGIHLSLMEKVRNMALDDVVILNVDTNTLETPFDDLQSLPNDVISSLKNRLKKVSTTTGDGVARAFLKAQAAFFGSYRNALKIEPEEPITFCEEAFVSHYRSGAMRQFLQNATQLQLFKQFIDGRLDLLNSGEGFSDVFEEEINMGEYAGSDKLYHQWLSTVRKGSGAILNTVKTKANPAMKTVYKFAKDHAKMGIKEVKNRLKQKDIAENGCAPTPEEQLPKTAPSPLVEAKDPKLREDRRPITVHFGQVRPPRPHVVKRPKSNIAVEGRRTSVPSPEQNTIATPATLHILQKSITHFAAKFPTRGWTSSSH

SEQ ID NO: 43581 - protein, 1020 aa, Homo sapiens
MRRPGDHGLQDQEVLQTLTKFCFPFYVDSLTVSQVGQNFTFVLTDIDSKQRFGFCRLSSGAKSCFCILSYLPWFEVFYKLLNILADYTTKRQENQWNELLETLHKLPIPDPGVSVHLSVHSYFTVPDTRELPSIPENRNLTEYFVAVDVNNMLHLYASMLYERRILIICSKLSTLTACIHGSAAMLYPMYWQHVYIPVLPPHLLDYCCAPMPYLIGIHLSLMEKVRNMALDDVVILNVDTNTLETPFDDLQSLPNDVISSLKNRLKKVSTTTGDGVARAFLKAQAAFFGSYRNALKIEPEEPITFCEEAFVSHYRSGAMRQFLQNATQLQLFKQFIDGRLDLLNSGEGFSDVFEEEINMGEYAGSDKLYHQWLSTVRKGSGAILNTVKTKANPAMKTVYKFAKDHAKMGIKEVKNRLKQKDIAENGCAPTPEEQLPKTAPSPLVEAKDPKLREDRRPITVHFGQVRPPRPHVVKRPKSNIAVEGRRTSVPSPEHLVKPLRHYAVFLSEDSSDDECQREEGPSSGFTESFFFSAPFEWPQPYRTLRESDSAEGDEAESPEQQVRKSTGPVPAPPDRAASIDLLEDVFSNLDMEAALQPLGQAKSLEDLRAPKDLREQPGTFDYQRLDLGGSERSRGVTVALKLTHPYNKLWSLGQDDMAIPSKPPAASPEKPSALLGNSLALPRRPQNRDSILNPSDKEEVPTPTLGSITIPRPQGRKTPELGIVPPPPIPRPAKLQAAGAALGDVSERLQTDRDRRAALSPGLLPGVVPQGPTELLQPLSPGPGAAGTSSDALLALLDPLSTAWSGSTLPSRPATPNVATPFTPQFSFPPAGTPTPFPQPPLNPFVPSMPAAPPTLPLVSTPAGPFGAPPASLGPAFASGLLLSSAGFCAPHRSQPNLSALSMPNLFGQMPMGTHTSPLQPLGPPAVAPSRIRTLPLARSSARAAETKQGLALRPGDPPLLPPRPPQGLEPTLQPSAPQQARDPFEDLLQKTKQDVSPSPALAPAPDSVEQLRKQWETFE

SEQ ID NO: 43582 - protein, 794 aa, Homo sapiens
MLYPMYWQHVYIPVLPPHLLDYCCAPMPYLIGIHLSLMEKVRNMALDDVVILNVDTNTLETPFDDLQSLPNDVEEPITFCEEAFVSHYRSGAMRQFLQNATQLQLFKQFIDGRLDLLNSGEGFSDVFEEEINMGEYAGSDKLYHQWLSTVRKGSGAILNTVKTKANPAMKTVYKFAKDHAKMGIKEVKNRLKQKDIAENGCAPTPEEQLPKTAPSPLVEAKDPKLREDRRPITVHFGQVRPPRPHVVKRPKSNIAVEGRRTSVPSPEHLVKPLRHYAVFLSEDSSDDECQREEGPSSGFTESFFFSAPFEWPQPYRTLRESDSAEGDEAESPEQQVRKSTGPVPAPPDRAASIDLLEDVFSNLDMEAALQPLGQAKSLEDLRAPKDLREQPGTFDYQRLDLGGSERSRGVTVALKLTHPYNKLWSLGQDDMAIPSKPPAASPEKPSALLGNSLALPRRPQNRDSILNPSDKEEVPTPTLGSITIPRPQGRKTPELGIVPPPPIPRPAKLQAAGAALGDVSERLQTDRDRRAALSPGLLPGVVPQGPTELLQPLSPGPGAAGTSSDALLALLDPLSTAWSGSTLPSRPATPNVATPFTPQFSFPPAGTPTPFPQPPLNPFVPSMPAAPPTLPLVSTPAGPFGAPPASLGPAFASGLLLSSAGFCAPHRSQPNLSALSMPNLFGQMPMGTHTSPLQPLGPPAVAPSRIRTLPLARSSARAAETKQGLALRPGDPPLLPPRPPQGLEPTLQPSAPQQARDPFEDLLQKTKQDVSPSPALAPAPDSVEQLRKQWETFE

SEQ ID NO: 43583 - protein, 396 aa, Homo sapiens
MAAAPREEKRWPQPVFSNPVVLWKFPEDFGDQEILQSVPKFCFPFDVERVSQNQVGQHFTFVLTDIESKQRFGFCRLTSGGTICLCILSYLPWFEVYYKLLNTLADYLAKELENDLNETLRSLYNHPVPKANTPVNLSVHSYFIAPDVTGLPTIPESRNLTEYFVAVDVNNMLQLYASMLHERRIVIISSKLSTLTACIHGSAALLYPMYWQHIYIPVLPPHLLDYCCAPMPYLIGIHSSLIERVKNKSLEDVVMLNVDTNTLESPFSDLNNLPSDVVSALKNKLKKQSTATGDGVARAFLRAQAALFGSYRDALRYKPGEPITFCEESFVKHRSSVMKQFLETAINLQLFKQFIDGRLAKLNAGRGFSDVFEEEITSGGFCGGKDKLQYDYPFSQ

SEQ ID NO: 43584 - protein, 426 aa, Homo sapiens
MDCRTKANPDRTFDLVLKVKCHASENEDPVVLWKFPEDFGDQEILQSVPKFCFPFDVERVSQNQVGQHFTFVLTDIESKQRFGFCRLTSGGTICLCILSYLPWFEVYYKLLNTLADYLAKELENDLNETLRSLYNHPVPKANTPVNLSVNQEIFIACEQVLKDQPALVPHSYFIAPDVTGLPTIPESRNLTEYFVAVDVNNMLQLYASMLHERRIVIISSKLSTLTACIHGSAALLYPMYWQHIYIPVLPPHLLDYCCAPMPYLIGIHSSLIERVKNKSLEDVVMLNVDTNTLESPFSDLNNLPSDVVSALKNKLKKQSTATGDGVARAFLRAQAALFGSYRDALRYKPGEPITFCEESFVKHRSSVMKQFLETAINLQLFKQFIDGRLAKLNAGRGFSDVFEEEITSGGFCGGKDKLQYDYPFSQ

SEQ ID NO: 43585 - protein, 396 aa, Homo sapiens; identical to SEQ ID NO: 43583

SEQ ID NO: 43586 - protein, 755 aa, Homo sapiens
IETKTRANPDRTFDLVLKVKCHASENEDPVVLWKFPEDFGDQEILQSVPKFCFPFDVERVSQNQVGQHFTFVLTDIESKQRFGFCRLTSGGTICLCILSYLPWFEVYYKLLNTLADYLAKELENDLNETLRSLYNHPVPKANTPVNLSVHSYFIAPDVTGLPTIPESRNLTEYFVAVDVNNMLQLYASMLHERRIVIISSKLSTLTACIHGSAALLYPMYWQHIYIPVLPPHLLDYCCAPMPYLIGIHSSLIERVKNKSLEDVVMLNVDTNTLESPFSDLNNLPSDVVSALKNKLKKQSTATGDGVARAFLRAQAALFGSYRDALRYKPGEPITFCEESFVKHRSSVMKQFLETAINLQLFKQFIDGRLAKLNAGRGFSDVFEEEITSGGFCGGNPRSYQQWVHTVKKGGALFNTAMTKATPAVRTAYKFAKNHAKLGLKEVKSKLKHKENEEDYGTCSSSVQYTPVYKLHNEKGGNSEKRKLAQARLKRPLKSLDGALYDDEDDDDIERASKLSSEDGEEASAYLYESDDSVETRVKTPYSGEMDLLGEILDTLSTHSSDQGKLAAAKSLDFFRSMDDIDYKPTNKSNAPSENNLAFLCGGSGDQAEWNLGQDDSALHGKHLPPSPRKRVSSSGLTDSLFILKEENSNKHLGADNVSDPTSGLDFQLTSPEVSQTDKGKTEKRETLSQISDDLLIPGLGRHSSTFVPWEKEGKEAKETSEDIGLLHEVVSLCHMTSDFQQSLNISDKNTNGNQT

SEQ ID NO: 43587 - protein, 775 aa, Homo sapiens
IETKTRANPDRTFDLVLKVKCHASENEDPVVLWKFPEDFGDQEILQSVPKFCFPFDVERVSQNQVGQHFTFVLTDIESKQRFGFCRLTSGGTICLCILSYLPWFEVYYKLLNTLADYLAKELENDLNETLRSLYNHPVPKANTPVNLSVNQEIFIACEQVLKDQPALVPHSYFIAPDVTGLPTIPESRNLTEYFVAVDVNNMLQLYASMLHERRIVIISSKLSTLTACIHGSAALLYPMYWQHIYIPVLPPHLLDYCCAPMPYLIGIHSSLIERVKNKSLEDVVMLNVDTNTLESPFSDLNNLPSDVVSALKNKLKKQSTATGDGVARAFLRAQAALFGSYRDALRYKPGEPITFCEESFVKHRSSVMKQFLETAINLQLFKQFIDGRLAKLNAGRGFSDVFEEEITSGGFCGGNPRSYQQWVHTVKKGGALFNTAMTKATPAVRTAYKFAKNHAKLGLKEVKSKLKHKENEEDYGTCSSSVQYTPVYKLHNEKGGNSEKRKLAQARLKRPLKSLDGALYDDEDDDDIERASKLSSEDGEEASAYLYESDDSVETRVKTPYSGEMDLLGEILDTLSTHSSDQGKLAAAKSLDFFRSMDDIDYKPTNKSNAPSENNLAFLCGGSGDQAEWNLGQDDSALHGKHLPPSPRKRVSSSGLTDSLFILKEENSNKHLGADNVSDPTSGLDFQLTSPEVSQTDKGKTEKRETLSQISDDLLIPGLGRHSSTFVPWEKEGKEAKETSEDIGLLHEVVSLCHMTSDFQQSLNISDKNTNGNQT

SEQ ID NO: 43588 - protein, 415 aa, Homo sapiens
VKHRSSVMKQFLETAINLQLFKQFIDGRLAKLNAGRGFSDVFEEEITSGGFCGGNPRSYQQWVHTVKKGGALFNTAMTKATPAVRTAYKFAKNHAKLGLKEVKSKLKHKENEEDYGTCSSSVQYTPVYKLHNEKGGNSEKRKLAQARLKRPLKSLDGALYDDEDDDDIERASKLSSEDGEEASAYLYESDDSVETRVKTPYSGEMDLLGEILDTLSTHSSDQGKLAAAKSLDFFRSMDDIDYKPTNKSNAPSENNLAFLCGGSGDQAEWNLGQDDSALHGKHLPPSPRKRVSSSGLTDSLFILKEENSNKHLGADNVSDPTSGLDFQLTSPEVSQTDKGKTEKRETLSQISDDLLIPGLGRHSSTFVPWEKEGKEAKETSEDIGLLHEVVSLCHMTSDFQQSLNISDKNTNGNQT

SEQ ID NO: 43589 - protein, 801 aa, Homo sapiens
MESRAEGGSPAVFDWFFEAACPASLQEDPPILRQFPPDFRDQEAMQMVPKFCFPFDVEREPPSPAVQHFTFALTDLAGNRRFGFCRLRAGTQSCLCILSHLPWFEVFYKLLNTVGDLLAQDQVTEAEELLQNLFQQSLSGPQASVGLELGSGVTVSSGQGIPPPTRGNSKPLSCFVAPDSGRLPSIPENRNLTELVVAVTDENIVGLFAALLAERRVLLTASKLSTLTSCVHASCALLYPMRWEHVLIPTLPPHLLDYCCAPMPYLIGVHASLAERVREKALEDVVVLNVDANTLETTFNDVQALPPDVVSLLRLRLRKVALAPGEGVSRLFLKAQALLFGGYRDALVCSPGQPVTFSEEVFLAQKPGAPLQAFHRRAVHLQLFKQFIEARLEKLNKGEGFSDQFEQEITGCGASSGALRSYQLWADNLKKGGGALLHSVKAKTQPAVKNMYRSAKSGLKGVQSLLMYKDGDSVLQRGGSLRAPALPSRSDRLQQRLPITQHFGKNRPLRPSRRRQLEEGTSEPPGAGTPPLSPEDEGCPWAEEALDSSFLGSGEELDLLSEILDSLSMGAKSAGSLRPSQSLDCCHRGDLDSCFSLPNIPRWQPDDKKLPEPEPQPLSLPSLQNASSLDATSSSKDSRSQLIPSESDQEVTSPSQSSTASADPSIWGDPKPSPLTEPLILHLTPSHKAAEDSTAQENPTPWLSTAPTEPSPPESPQILAPTKPNFDIAWTSQPLDPSSDPSSLEDPRARPPKALLAERAHLQPREEPGALNSPATPTSNCQKSQPSSRPRVADLKKCFEG

SEQ ID NO: 43590 - protein, 757 aa, Homo sapiens
MQMVPKFCFPFDVEREPPSPAVQHFTFALTDLAGNRRFGFCRLRAGTQSCLCILSHLPWFEVFYKLLNTVGDLLAQDQVTEAEELLQNLFQQSLSGPQASVGLELGSGVTVSSGQGIPPPTRGNSKPLSCFVAPDSGRLPSIPENRNLTELVVAVTDENIVGLFAALLAERRVLLTASKLSTLTSCVHASCALLYPMRWEHVLIPTLPPHLLDYCCAPMPYLIGVHASLAERVREKALEDVVVLNVDANTLETTFNDVQALPPDVVSLLRLRLRKVALAPGEGVSRLFLKAQALLFGGYRDALVCSPGQPVTFSEEVFLAQKPGAPLQAFHRRAVHLQLFKQFIEARLEKLNKGEGFSDQFEQEITGCGASSGALRSYQLWADNLKKGGGALLHSVKAKTQPAVKNMYRSAKSGLKGVQSLLMYKDGDSVLQRGGSLRAPALPSRSDRLQQRLPITQHFGKNRPLRPSRRRQLEEGTSEPPGAGTPPLSPEDEGCPWAEEALDSSFLGSGEELDLLSEILDSLSMGAKSAGSLRPSQSLDCCHRGDLDSCFSLPNIPRWQPDDKKLPEPEPQPLSLPSLQNASSLDATSSSKDSRSQLIPSESDQEVTSPSQSSTASADPSIWGDPKPSPLTEPLILHLTPSHKAAEDSTAQENPTPWLSTAPTEPSPPESPQILAPTKPNFDIAWTSQPLDPSSDPSSLEDPRARPPKALLAERAHLQPREEPGALNSPATPTSNCQKSQPSSRPRVADLKKCFEG

SEQ ID NO: 43591 - protein, 730 aa, Homo sapiens
MLFNSVLRQPQLGVLRNGWSSQYPLQSLLTGYQCSGNDEHTSYGETGVPVPPFGCTFSSAPNMEHVLAVANEEGFVRLYNTESQSFRKKCFKEWMAHWNAVFDLAWVPGELKLVTAAGDQTAKFWDVKAGELIGTCKGHQCSLKSVAFSKFEKAVFCTGGRDGNIMVWDTRCNKKDGFYRQVNQISGAHNTSDKQTPSKPKKKQNSKGLAPSVDFQQSVTVVLFQDENTLVSAGAVDGIIKVWDLRKNYTAYRQEPIASKSFLYPGSSTRKLGYSSLILDSTGSTLFANCTDDNIYMFNMTGLKTSPVAIFNGHQNSTFYVKSSLSPDDQFLVSGSSDEAAYIWKVSTPWQPPTVLLGHSQEVTSVCWCPSDFTKIATCSDDNTLKIWRLNRGLEEKPGGDKLSTVGWASQKKKESRPGLVTVTSSQSTPAKAPRAKCNPSNSSPSSAACAPSCAGDLPLPSNTPTFSIKTSPAKARSPINRRGSVSSVSPKPPSSFKMSIRNWVTRTPSSSPPITPPASETKIMSPRKALIPVSQKSSQAEACSESRNRVKRRLDSSCLESVKQKCVKSCNCVTELDGQVENLHLDLCCLAGNQEDLSKDSLGPTKSSKIEGAGTSISEPPSPISPYASESCGTLPLPLRPCGEGSEMVGKENSSPENKNWLLAMAAKRKAENPSPRSPSSQTPNSRRQSGKKLPSPVTITPSSMRKICTYFHRKSQEDFCGPEHSTEL

SEQ ID NO: 43592 - protein, 409 aa, Homo sapiens
MLFNSVLRQPQLGVLRNGWSSQYPLQSLLTGYQCSGNDEHTSYGETGVPVPPFGCTFSSDDNTLKIWRLNRGLEEKPGGDKLSTVGWASQKKKESRPGLVTVTSSQSTPAKAPRAKCNPSNSSPSSAACAPSCAGDLPLPSNTPTFSIKTSPAKARSPINRRGSVSSVSPKPPSSFKMSIRNWVTRTPSSSPPITPPASETKIMSPRKALIPVSQKSSQAEACSESRNRVKRRLDSSCLESVKQKCVKSCNCVTELDGQVENLHLDLCCLAGNQEDLSKDSLGPTKSSKIEGAGTSISEPPSPISPYASESCGTLPLPLRPCGEGSEMVGKENSSPENKNWLLAMAAKRKAENPSPRSPSSQTPNSRRQSGKKLPSPVTITPSSMRKICTYFHRKSQEDFCGPEHSTEL

SEQ ID NO: 43593 - protein, 688 aa, Homo sapiens
MLFNSVLRQPQLGVLRNAPNMEHVLAVANEEGFVRLYNTESQSFRKKCFKEWMAHWNAVFDLAWVPGELKLVTAAGDQTAKFWDVKAGELIGTCKGHQCSLKSVAFSKFEKAVFCTGGRDGNIMVWDTRCNKKDGFYRQVNQISGAHNTSDKQTPSKPKKKQNSKGLAPSVDFQQSVTVVLFQDENTLVSAGAVDGIIKVWDLRKNYTAYRQEPIASKSFLYPGSSTRKLGYSSLILDSTGSTLFANCTDDNIYMFNMTGLKTSPVAIFNGHQNSTFYVKSSLSPDDQFLVSGSSDEAAYIWKVSTPWQPPTVLLGHSQEVTSVCWCPSDFTKIATCSDDNTLKIWRLNRGLEEKPGGDKLSTVGWASQKKKESRPGLVTVTSSQSTPAKAPRAKCNPSNSSPSSAACAPSCAGDLPLPSNTPTFSIKTSPAKARSPINRRGSVSSVSPKPPSSFKMSIRNWVTRTPSSSPPITPPASETKIMSPRKALIPVSQKSSQAEACSESRNRVKRRLDSSCLESVKQKCVKSCNCVTELDGQVENLHLDLCCLAGNQEDLSKDSLGPTKSSKIEGAGTSISEPPSPISPYASESCGTLPLPLRPCGEGSEMVGKENSSPENKNWLLAMAAKRKAENPSPRSPSSQTPNSRRQSGKKLPSPVTITPSSMRKICTYFHRKSQEDFCGPEHSTEL

SEQ ID NO: 43594 - protein, 497 aa, Homo sapiens
MKISILLMFLWGLSCALPVTRYQNNESEDSEEWKGHLAQAPTPPLANEDPSDSTQSEEGLGSDDHQYIYRLAGGFSRSTGKGGDDKDDDEDDSGDDTFGDDDSGPGPKDRQEGGNSRLGSDEDSDDTIQASEESAPQGQDSAQDTTSESRELDNEDRVDSKPEGGDSTQESESEEHWVGGGSDGESSHGDGSELDDEGMQSDDPESIRSERGNSRMNSAGMKSKESGENSEQANTQDSGGSQLLEHPSRKIFRKSRISEEDDRSELDDNNTMEEVKSDSTENSNSRDTGLSQPRRDSKGDSQEDSKENLSQEESQNVDGPSSESSQEANLSSQENSSESQEEVVSESRGDNPDPTTSYVEDQEDSDSSEEDSSHTLSHSKSESREEQADSESSESLNFSEESPESPEDENSSSQEGLQSHSSSAESQSEESHSEEDDSDSQDSSRSKEDSNSTESKSSSEEDGQLKNIEIESRKLTVDAYHNKPIGDQDDNDCQDGY

SEQ ID NO: 43595 - protein, 513 aa, Homo sapiens
MKISILLMFLWGLSCALPVTRYQNNESEDSEEWKGHLAQAPTPPLESSESSEGSKVSSEEQANEDPSDSTQSEEGLGSDDHQYIYRLAGGFSRSTGKGGDDKDDDEDDSGDDTFGDDDSGPGPKDRQEGGNSRLGSDEDSDDTIQASEESAPQGQDSAQDTTSESRELDNEDRVDSKPEGGDSTQESESEEHWVGGGSDGESSHGDGSELDDEGMQSDDPESIRSERGNSRMNSAGMKSKESGENSEQANTQDSGGSQLLEHPSRKIFRKSRISEEDDRSELDDNNTMEEVKSDSTENSNSRDTGLSQPRRDSKGDSQEDSKENLSQEESQNVDGPSSESSQEANLSSQENSSESQEEVVSESRGDNPDPTTSYVEDQEDSDSSEEDSSHTLSHSKSESREEQADSESSESLNFSEESPESPEDENSSSQEGLQSHSSSAESQSEESHSEEDDSDSQDSSRSKEDSNSTESKSSSEEDGQLKNIEIESRKLTVDAYHNKPIGDQDDNDCQDGY

SEQ ID NO: 43596 - protein, 1301 aa, Homo sapiens
MKIITYFCIWAVAWAIPVPQSKPLERHVEKSMNLHLLARSNVSVQDELNASGTIKESGVLVHEGDRGRQENTQDGHKGEGNGSKWAEVGGKSFSTYSTLANEEGNIEGWNGDTGKAETYGHDGIHGKEENITANGIQGQVSIIDNAGATNRSNTNGNTDKNTQNGDVGDAGHNEDVAVVQEDGPQVAGSNNSTDNEDEIIENSCRNEGNTSEITPQINSKRNGTKEAEVTPGTGEDAGLDNSDGSPSGNGADEDEDEGSGDDEDEEAGNGKDSSNNSKGQEGQDHGKEDDHDSSIGQNSDSKEYYDPEGKEDPHNEVDGDKTSKSEENSAGIPEDNGSQRIEDTQKLNHRESKRVENRITKESETHAVGKSQDKGIEIKGPSSGNRNITKEVGKGNEGKEDKGQHGMILGKGNVKTQGEVVNIEGPGQKSEPGNKVGHSNTGSDSNSDGYDSYDFDDKSMQGDDPNSSDESNGNDDANSESDNNSSSRGDASYNSDESKDNGNGSDSKGAEDDDSDSTSDTNNSDSNGNGNNGNDDNDKSDSGKGKSDSSDSDSSDSSNSSDSSDSSDSDSSDSNSSSDSDSSDSDSSDSSDSDSSDSSNSSDSSDSSDSSDSSDSSDSSDSKSDSSKSESDSSDSDSKSDSSDSNSSDSSDNSDSSDSSNSSNSSDSSDSSDSSDSSSSSDSSNSSDSSDSSDSSNSSESSDSSDSSDSDSSDSSDSSNSNSSDSDSSNSSDSSDSSNSSDSSDSSDSSNSSDSSDSSDSSNSSDSSDSSDSSDSSDSSNSSDSNDSSNSSDSSDSSNSSDSSNSSDSSDSSDSSDSDSSNSSDSSNSSDSSDSSNSSDSSDSSDSSDGSDSDSSNRSDSSNSSDSSDSSDSSNSSDSSDSSDSNESSNSSDSSDSSNSSDSDSSDSSNSSDSSDSSNSSDSSESSNSSDNSNSSDSSNSSDSSDSSDSSNSSDSSNSSDSSNSSDSSDSNSSDSSDSSNSSDSSDSSDSSDSSDSSDSSNSSDSSDSSDSSDSSNSSDSSNSSDSSNSSDSSDSSDSSDSSDSSDSSDSSDSSNSSDSSDSSDSSDSSDSSDSSDSSDSSESSDSSDSSNSSDSSDSSDSSDSSDSSDSSDSSDSSDSSNSSDSSDSSDSSDSSDSSNSSDSSDSSESSDSSDSSDSSDSSDSSDSSDSSDSSDSSNSSDSSDSSDSSDSSDSSDSSDSSDSSDSSDSSDSSDSSDSSDSSDSSDSSDSNESSDSSDSSDSSDSSNSSDSSDSSDSSDSTSDSNDESDSQSKSGNGNNNGSDSDSDSEGSDSNHSTSDD

SEQ ID NO: 43597 - protein, 1301 aa, Homo sapiens; identical to SEQ ID NO: 43596

SEQ ID NO: 43598 - protein, 260 aa, Homo sapiens [sequence omitted]

SEQ ID NO: 43599 - protein, 15 aa, Homo sapiens
MATPPKRSCPSFSAS

SEQ ID NO: 43600 - protein, 277 aa, Homo sapiens
MAAGRLFLSRLRAPFSSMAKSPLEGVSSSRGLHAGRGPRRLSIEGNIAVGKSTFVKLLTKTYPEWHVATEPVATWQNIQAAGTQKACTAQSLGNLLDMMYREPARWSYTFQTFSFLSRLKVQLEPFPEKLLQARKPVQIFERSVYSDRYIFAKNLFENGSLSDIEWHIYQDWHSFLLWEFASRITLHGFIYLQASPQVCLKRLYQRAREEEKGIELAYLEQLHGQHEAWLIHKTTKLHFEALMNIPVLVLDVNDDFSEEVTKQEDLMREVNTFVKNL

SEQ ID NO: 43601 - protein, 239 aa, Homo sapiens
MAAGRLFLSRLRAPFSSMAKSPLEGVSSSRGLHAGRGPRRLSIEGNIACTAQSLGNLLDMMYREPARWSYTFQTFSFLSRLKVQLEPFPEKLLQARKPVQIFERSVYSDRYIFAKNLFENGSLSDIEWHIYQDWHSFLLWEFASRITLHGFIYLQASPQVCLKRLYQRAREEEKGIELAYLEQLHGQHEAWLIHKTTKLHFEALMNIPVLVLDVNDDFSEEVTKQEDLMREVNTFVKNL

SEQ ID NO: 43602 - protein, 189 aa, Homo sapiens
MAAGRLFLSRLRAPFSSMAKSPLEGVSSSRGLHAGRGPRRLSIEGNIAVGKSTFVKLLTKTYPEWHVATEPVATWQNIQAAGTQKACTAQSLGNLLDMMYREPARWSYTFQTFSFLSRLKVQLEPFPEKLLQARKPVQIFERSVYSDRLHFEALMNIPVLVLDVNDDFSEEVTKQEDLMREVNTFVKNL

SEQ ID NO: 43603 - protein, 255 aa, Homo sapiens
MAAGRLFLSRLRAPFSSMAKSPLEGVSSSRGLHAGRGPRRLSIEGNIGNILKQIRMRAPIQETACTAQSLGNLLDMMYREPARWSYTFQTFSFLSRLKVQLEPFPEKLLQARKPVQIFERSVYSDRYIFAKNLFENGSLSDIEWHIYQDWHSFLLWEFASRITLHGFIYLQASPQVCLKRLYQRAREEEKGIELAYLEQLHGQHEAWLIHKTTKLHFEALMNIPVLVLDVNDDFSEEVTKQEDLMREVNTFVKNL

SEQ ID NO: 43604 - protein, 369 aa, Homo sapiens
MEGSLEREAPAGALAAVLKHSSTLPPESTQVRGYDFNRGVNYRALLEAFGTTGFQATNFGRAVQQVNAMIEKKLEPLSQDEDQHADLTQSRRPLTSCTIFLGYTSNLISSGIRETIRYLVQHNMVDVLVTTAGGVEEDLIKCLAPTYLGEFSLRGKELRENGINRIGNLLVPNENYCKFEDWLMPILDQMVMEQNTEGVKWTPSKMIARLGKEINNPESVYYWAQKNHIPVFSPALTDGSLGDMIFFHSYKNPGLVLDIVEDLRLINTQAIFAKCTGMIILGGGVVKHHIANANLMRNGADYAVYINTAQEFDGSDSGARPDEAVSWGKIRVDAQPVKVYADASLVFPLLVAETFAQKMDAFMHEKNED

SEQ ID NO: 43605 - protein, 322 aa, Homo sapiens
MEGSLEREAPAGALAAVLKHSSTLPPESTQVRGYDFNRGVNYRALLEAFGTTGFQATNFGRAVQQVNAMIEKKLEPLSQDEDQHADLTQSRRPLTSCTIFLGYTSNLISSGIRETIRYLVQHNMVDVLVTTAGGVEEDLIKCLAPTYLGEFSLRGKELRENGINRIGNLLVPNENYCKFEDWLMPILDQMVMEQNTEGVKWTPSKMIARLGKEINNPESVYYWAQKNHIPVFSPALTDGSLGDMIFFHSYKNPGLVLDIVEAQEFDGSDSGARPDEAVSWGKIRVDAQPVKVYADASLVFPLLVAETFAQKMDAFMHEKNED

SEQ ID NO: 43606 - protein, 327 aa, Homo sapiens
MPIIPAFWEAEAGGSREEEFETSLANMIEKKLEPLSQDEDQHADLTQSRRPLTSCTIFLGYTSNLISSGIRETIRYLVQHNMVDVLVTTAGGVEEDLIKCLAPTYLGEFSLRGKELRENGINRIGNLLVPNENYCKFEDWLMPILDQMVMEQNTEGVKWTPSKMIARLGKEINNPESVYYWAQKNHIPVFSPALTDGSLGDMIFFHSYKNPGLVLDIVEDLRLINTQAIFAKCTGMIILGGGVVKHHIANANLMRNGADYAVYINTAQEFDGSDSGARPDEAVSWGKIRVDAQPVKVYADASLVFPLLVAETFAQKMDAFMHEKNED

SEQ ID NO: 43607 - protein, 153 aa, Homo sapiens
MPQLCTRASSSEIPGRLLTTLQSAQGQKFLHFAKSDSFLDDIFAAWMAQRLKTHLLTETWQRKRQELPSNCSLPYHVYNIKAIKLSRHSYFSSYQDHAKWCISQKGTKNRWTCIGDLNRSPHQAFRSGGFICTQNWQIYQAFQGLVLYYESCK

SEQ ID NO: 43608 - protein, 361 aa, Homo sapiens
MKQKMMARLLRTSFALLFLGLFGVLGAATISCRNEEGKAVDWFTFYKLPKRQNKESGETGLEYLYLDSTTRSWRKSEQLMNDTKSVLGRTLQQLYEAYASKSNNTAYLIYNDGVPKPVNYSRKYGHTKGLLLWNRVQGFWLIHSIPQFPPIPEEGYDYPPTGRRNGQSGICITFKYNQYEAIDSQLLVCNPNVYSCSIPATFHQELIHMPQLCTRASSSEIPGRLLTTLQSAQGQKFLHFAKSDSFLDDIFAAWMAQRLKTHLLTETWQRKRQELPSNCSLPYHVYNIKAIKLSRHSYFSSYQDHAKWCISQKGTKNRWTCIGDLNRSPHQAFRSGGFICTQNWQIYQAFQGLVLYYESCK

SEQ ID NO: 43609 - protein, 360 aa, Homo sapiens
MIPLLLAALLCVPAGALTCYGDSGQPVDWFVVYKLPALRGSGEAAQRGLQYKYLDESSGGWRDGRALINSPEGAVGRSLQPLYRSNTSQLAFLLYNDQPPQPSKAQDSSMRGHTKGVLLLDHDGGFWLVHSVPNFPPPASSAAYSWPHSACTYGQTLLCVSFPFAQFSKMGKQLTYTYPWVYNYQLEGIFAQEFPDLENVVKGHHVSQEPWNSSITLTSQAGAVFQSFAKFSKFGDDLYSGWLAAALGTNLQVQFWHKTVGILPSNCSDIWQVLNVNQIAFPGPAGPSFNSTEDHSKWCVSPKGPWTCVGDMNRNQGEEQRGGGTLCAQLPALWKAFQPLVKNYQPCNGMARKPSRAYKI

SEQ ID NO: 43610 - protein, 305 aa, Homo sapiens
MIPLLLAALLCVPAGALTCYGDSGQPVDWFVVYKLPALRGSGEAAQRGLQYKYLDESSGGWRDGRALINSPEGAVGRSLQPLYRSNTSQLAFLLYNDQPPQPSKAQDSSMRGHTKGKQLTYTYPWVYNYQLEGIFAQEFPDLENVVKGHHVSQEPWNSSITLTSQAGAVFQSFAKFSKFGDDLYSGWLAAALGTNLQVQFWHKTVGILPSNCSDIWQVLNVNQIAFPGPAGPSFNSTEDHSKWCVSPKGPWTCVGDMNRNQGEEQRGGGTLCAQLPALWKAFQPLVKNYQPCNGMARKPSRAYKI

SEQ ID NO: 43611 - protein, 302 aa, Homo sapiens
MHYPTALLFLILANGAQAFRICAFNAQRLTLAKVAREQVMDTLVRILARCDIMVLQEVVDSSGSAIPLLLRELNRFDGSGPYSTLSSPQLGRSTYMETYVYFYRSHKTQVLSSYVYNDEDDVFAREPFVAQFSLPSNVLPSLVLVPLHTTPKAVEKELNALYDVFLEVSQHWQSKDVILLGDFNADCASLTKKRLDKLELRTEPGFHWVIADGEDTTVRASTHCTYDRVVLHGERCRSLLHTAAAFDFPTSFQLTEEEALNISDHYPVEVELKLSQAHSVQPLSLTVLLLLSLLSPQLCPAA

SEQ ID NO: 43612 - protein, 302 aa, Homo sapiens; identical to SEQ ID NO: 43611

SEQ ID NO: 43613 - protein, 302 aa, Homo sapiens; identical to SEQ ID NO: 43611

SEQ ID NO: 43614 - protein, 302 aa, Homo sapiens; identical to SEQ ID NO: 43611

SEQ ID NO: 43615 - protein, 302 aa, Homo sapiens; identical to SEQ ID NO: 43611

SEQ ID NO: 43616 - protein, 302 aa, Homo sapiens; identical to SEQ ID NO: 43611

SEQ ID NO: 43617 - protein, 104 aa, Homo sapiens
MHYPTALLFLILANGAQAFRICAFNAQRLTLAKVAREQVMDTLVRILARCDIMVLQEVVDSSGSAIPLLLRELNRFDGSGPYSTLSSPQLGRSTYMETYVYFYR

SEQ ID NO: 43618 - protein, 26 aa, Homo sapiens
MHYPTALLFLILANGAQAFRICAFNA

SEQ ID NO: 43619 - protein, 208 aa, Homo sapiens
MHYPTALLFLILANGAQAFRICAFNAQRLTLAKVAREQVMDTLVRILARCDIMVLQEVVDSSGSAIPLLLRELNRFDGSGPYSTLSSPQLGRSTYMETYVYFYRSHKTQVLSSYVYNDEDDVFAREPFVAQFSLPSNVLPSLVLVPLHTTPKAVEKELNALYDVFLEVSQHWQSKDVILLGDFNADCASLTKKRLDKLELRTEPGFHW

SEQ ID NO: 43620 - protein, 305 aa, Homo sapiens
MSRELAPLLLLLLSIHSALAMRICSFNVRSFGESKQEDKNAMDVIVKVIKRCDIILVMEIKDSNNRICPILMEKLNRNSRRGITYNYVISSRLGRNTYKEQYAFLYKEKLVSVKRSYHYHDYQDGDADVFSREPFVVWFQSPHTAVKDFVIIPLHTTPETSVKEIDELVEVYTDVKHRWKAENFIFMGDFNAGCSYVPKKAWKNIRLRTDPRFVWLIGDQEDTTVKKSTNCAYDRIVLRGQEIVSSVVPKSNSVFDFQKAYKLTEEEALDVSDHFPVEFKLQSSRAFTNSKKSVTLRKKTKSKRS

SEQ ID NO: 43621 - protein, 305 aa, Homo sapiens; identical to SEQ ID NO: 43620

SEQ ID NO: 43622 - protein, 288 aa, Homo sapiens
MSRELAPLLLLLLSIHSALAMRICSFNVRSFGESKQEDKNAMDVIVKVIKRCDIILVMEIKDSNNRICPILMEKLNRNSRRGITYNYVISSRLGRNTYKEQYAFLYKEKLVSVKRSYHYHDYQDGDADVFSREPFVVWFQSPHTAVKDFVIIPLHTTPETSVKEIDELVEVYTDVKHRWKAENFIFMGDFNAGCSYVPKKAWKNIRLRTDPRFVWLIGDQEDTTVKKSTNCAYDRIVLRGQEIVSSVVPKSNSVFDFQKAYKLTEEEVRLPSCLSMPLSWKDELAWAT

SEQ ID NO: 43623 - protein, 100 aa, Homo sapiens
MSRELAPLLLLLLSIHSALAMRICSFNVRSFGESKQEDKNAMDVIVKVIKRCDIILVMEIKDSNNRICPILMEKLNRNSRRGITYNYVISSRLGRNTYKE

SEQ ID NO: 43624 - protein, 275 aa, Homo sapiens
MSRELAPLLLLLLSIHSALAMRICSFNVRSFGESKQEDKNAMDVIVKVIKRCDIILVMEIKDSNNRICPILMEKLNREKLVSVKRSYHYHDYQDGDADVFSREPFVVWFQSPHTAVKDFVIIPLHTTPETSVKEIDELVEVYTDVKHRWKAENFIFMGDFNAGCSYVPKKAWKNIRLRTDPRFVWLIGDQEDTTVKKSTNCAYDRIVLRGQEIVSSVVPKSNSVFDFQKAYKLTEEEALDVSDHFPVEFKLQSSRAFTNSKKSVTLRKKTKSKRS

SEQ ID NO: 43625 - protein, 250 aa, Homo sapiens
MTPLCPRPALCYHFLTSLLRSAMQNARTAEGRSRGTLRARPAPRPAAQHGIPRPLSSAGRLSQGCRGASTVGAAGWKGELPKAGGSPAPGPETPAISPSKRARPAEVGGMQLRFARLSEHATAPTRGSARAAGYDLYSAYDYTIPPMEKAVVKTDIQIALPSGCYGRVAPRSGLAAKHFIDVGAGVIDEDYRGNVGVVLFNFGKEKFEVKKGDRIAQLICERIFYPEIEEVQALDDTERGSGGFGSTGKN

SEQ ID NO: 43626 - protein, 252 aa, Homo sapiens
MTPLCPRPALCYHFLTSLLRSAMQNARGARQRAEAAVLSGPGPPLGRAAQHGIPRPLSSAGRLSQGCRGASTVGAAGWKGELPKAGGSPAPGPETPAISPSKRARPAEVGGMQLRFARLSEHATAPTRGSARAAGYDLYSAYDYTIPPMEKAVVKTDIQIALPSGCYGRVAPRSGLAAKHFIDVGAGVIDEDYRGNVGVVLFNFGKEKFEVKKGDRIAQLICERIFYPEIEEVQALDDTERGSGGFGSTGKN

SEQ ID NO: 43627 - protein, 164 aa, Homo sapiens
MPCSEETPAISPSKRARPAEVGGMQLRFARLSEHATAPTRGSARAAGYDLYSAYDYTIPPMEKAVVKTDIQIALPSGCYGRVAPRSGLAAKHFIDVGAGVIDEDYRGNVGVVLFNFGKEKFEVKKGDRIAQLICERIFYPEIEEVQALDDTERGSGGFGSTGKN

SEQ ID NO: 43628 - protein, 141 aa, Homo sapiens
MQLRFARLSEHATAPTRGSARAAGYDLYSAYDYTIPPMEKAVVKTDIQIALPSGCYGRVAPRSGLAAKHFIDVGAGVIDEDYRGNVGVVLFNFGKEKFEVKKGDRIAQLICERIFYPEIEEVQALDDTERGSGGFGSTGKN

SEQ ID NO: 43629 - protein, 351 aa, Homo sapiens
MPLRKHRQHFKKYGNCFTAGEAVDWLYDLLRNNSNFGPEVTRQQTIQLLRKFLKNHVIEDIKGRWGSENVDDNNQLFRFPATSPLKTLPRRTPKRHGLHLSQENGEKIKHEIINEDQENAIDNRELSQEDVEEVWRYVILIYLQTILGVPSLEEVINPKQVIPQYIMYNMANTSKRGVVILQNKSDDLPHWVLSAMKCLANWPRSNDMNNPTYVGFERDVFRTIADYFLDLPEPLLTFEYYELFVNILGNFKDFRSSIPVVCGYITVSDRSSGIHKIQDDPQSSKFLHLNNLNSFKSTECLLLSLLHREKNKEESDSTERLQISNPGFQERCAKKMQLVNLRNRRACCNLI

SEQ ID NO: 43630 - protein, 527 aa, Homo sapiens
MESQGVPPGPYRATKLWNEVTTSFRAGMPLRKHRQHFKKYGNCFTAGEAVDWLYDLLRNNSNFGPEVTRQQTIQLLRKFLKNHVIEDIKGRWGSENVDDNNQLFRFPATSPLKTLPRRYPELRKNNIENFSKDKDSIFKLRNLSRRTPKRHGLHLSQENGEKIKHEIINEDQENAIDNRELSQEDVEEVWRYVILIYLQTILGVPSLEEVINPKQVIPQYIMYNMANTSKRGVVILQNKSDDLPHWVLSAMKCLANWPRSNDMNNPTYVGFERDVFRTIADYFLDLPEPLLTFEYYELFVNILGLLQPHLERVAIDALQLCCLLLPPPNRRKLQLLMRMISRMSQNVDMPKLHDAMGTRSLMIHTFSRCVLCCAEEVDLDELLAGRLVSFLMDHHQEILQVPSYLQTAVEKHLDYLKKGHIENPGDGLFAPLPTYSYCKQISAQEFDEQKVSTSQAAIAELLENIIKNRSLPLKEKRKKLKQFQKEYPLIYQKRFPTTESEAALFGDKPTIKQPMLILRKPKFRSLR

SEQ ID NO: 43631 - protein, 811 aa, Homo sapiens
MESQGVPPGPYRATKLWNEVTTSFRAGMPLRKHRQHFKKYGNCFTAGEAVDWLYDLLRNNSNFGPEVTRQQTIQLLRKFLKNHVIEDIKGRWGSENVDDNNQLFRFPATSPLKTLPRRYPELRKNNIENFSKDKDSIFKLRNLSRRTPKRHGLHLSQENGEKIKHEIINEDQENAIDNRELSQEDVEEVWRYVILIYLQTILGVPSLEEVINPKQVIPQYIMYNMANTSKRGVVILQNKSDDLPHWVLSAMKCLANWPRSNDMNNPTYVGFERDVFRTIADYFLDLPEPLLTFEYYELFVNILVVCGYITVSDRSSGIHKIQDDPQSSKFLHLNNLNSFKSTECLLLSLLHREKNKEESDSTERLQISNPGFQERCAKKMQLVNLRNRRVSANDIMGGSCHNLIGLSNMHDLSSNSKPRCCSLEGIVDVPGNSSKEASSVFHQSFPNIEGQNNKLFLESKPKQEFLLNLHSEENIQKPFSAGFKRTSTLTVQDQEELCNGKCKSKQLCRSQSLLLRSSTRRNSYINTPVAEIIMKPNVGQGSTSVQTAMESELGESSATINKRLCKSTIELSENSLLPASSMLTGTQSLLQPHLERVAIDALQLCCLLLPPPNRRKLQLLMRMISRMSQNVDMPKLHDAMGTRSLMIHTFSRCVLCCAEEVDLDELLAGRLVSFLMDHHQEILQVPSYLQTAVEKHLDYLKKGHIENPGDGLFAPLPTYSYCKQISAQEFDEQKVSTSQAAIAELLENIIKNRSLPLKEKRKKLKQFQKEYPLIYQKRFPTTESEAALFGDKPTIKQPMLILRKPKFRSLR

SEQ ID NO: 43632 - protein, 529 aa, Homo sapiens
MEHRIVGPGPYRATRLWNETVELFRAKMPLRKHRCRFKSYEHCFTAAEAVDWLHELLRCSQNFGPEVTRKQTVQLLKKFLKNHVIEDIKGKWGEEDFEDNRHLYRFPPSSPLKPYPKKPPNQKDVIKFPEWNDLPPGTSQENIPVRPVVMNSEMWYKRHSIAIGEVPACRLVHRRQLTEANVEEIWKSMTLSYLQKILGLDSLEEVLDVKLVNSKFIIHNVYSVSKQGVVILDDKSKELPHWVLSAMKCLANWPNCSDLKQPMYLGFEKDVFKTIADYYGHLKEPLLTFHLFDAFVSVLGLLQKEKVAVEAFQICCLLLPPENRRKLQLLMRMMARICLNKEMPPLCDGFGTRTLMVQTFSRCILCSKDEVDLDELLAARLVTFLMDNYQEILKVPLALQTSIEERVAHLRRVQIKYPGADMDITLSAPSFCRQISPEEFEYQRSYGSQEPLAALLEEVITDAKLSNKEKKKKLKQFQKSYPEVYQERFPTPESAALLFPEKPKPKPQLLMWALKKPFQPFQRTRSFRM

SEQ ID NO: 43633 - protein, 467 aa, Homo sapiens
MEHRIVGPGPYRATRLWNETVELFRAKMPLRKHRCRFKSYEHCFTAAEAVDWLHELLRCSQNFGPEVTRKQTVQLLKKFLKNHVIEDIKGKWGEEDFEDNRHLYRFPPSSPLKPYPKKPPNQKDVIKFPEWNDLPPGTSQENIPVRPVVMNSEMWYKRHSIAIGEVPACRLVHRRQLTEANVEEIWKSMTLSYLQKILGLDSLEEVLDVKLVNSKFIIHNVYSVSKQGVVILDDKSKELPHWVLSAMKCLANWPNCSDLKQPMYLGFEKDVFKTIADYYGHLKEPLLTFHLFDAFVSVLGLLQKEKVAVEAFQICCLLLPPENRRKLQLLMRMMARICLNKEMPPLCDGFGTRTLMVQTFSRCILCSKDEVDLDELLAARLVTFLMDNYQEILKVPLALQTSIEERVAHLRRVQFQKSYPEVYQERFPTPESAALLFPEKPKPKPQLLMWALKKPFQPFQRTRSFRM

SEQ ID NO: 43634 - protein, 440 aa, Homo sapiens
MPLRKHRCRFKSYEHCFTAAEAVDWLHELLRCSQNFGPEVTRKQTVQLLKKFLKNHVIEDIKGKWGEEDFEDNRHLYRFPPSSPLKPYPKKPPNQKDVIKFPEWNDLPPGTSQENIPVRPVVMNSEMWYKRHSIAIGEVPACRLVHRRQLTEANVEEIWKSMTLSYLQKILGLDSLEEVLDVKLVNSKFIIHNVYSVSKQGVVILDDKSKELPHWVLSAMKCLANWPNCSDLKQPMYLGFEKDVFKTIADYYGHLKEPLLTFHLFDAFVSVLGLLQKEKVAVEAFQICCLLLPPENRRKLQLLMRMMARICLNKEMPPLCDGFGTRTLMVQTFSRCILCSKDEVDLDELLAARLVTFLMDNYQEILKVPLALQTSIEERVAHLRRVQFQKSYPEVYQERFPTPESAALLFPEKPKPKPQLLMWALKKPFQPFQRTRSFRM

SEQ ID NO: 43635 - protein, 1581 aa, Homo sapiens
MRTTKVYKLVIHKKGFGGSDDELVVNPKVFPHIKLGDIVEIAHPNDEYSPLLLQVKSLKEDLQKETISVDQTVTQVFRLRPYQDVYVNVVDPKDVTLDLVELTFKDQYIGRGDMWRLKKSLVSTCAYITQKVEFAGIRAQAGELWVKNEKVMCGYISEDTRVVFRSTSAMVYIFIQMSCEMWDFDIYGDLYFEKAVNGFLADLFTKWKEKNCSHEVTVVLFSRTFYDAKSVDEFPEINRASIRQDHKGRFYEDFYKVVVQNERREEWTSLLVTIKKLFIQYPVLVRLEQAEGFPQGDNSTSAQGNYLEAINLSFNVFDKHYINRNFDRTGQMSVVITPGVGVFEVDRLLMILTKQRMIDNGIGVDLVCMGEQPLHAVPLFKLHNRSAPRDSRLGDDYNIPHWINHSFYTSKSQLFCNSFTPRIKLAGKKPASEKAKNGRDTSLGSPKESENALPIQVDYDAYDAQVFRLPGPSRAQCLTTCRSVRERESHSRKSASSCDVSSSPSLPSRTLPTEEVRSQASDDSSLGKSANILMIPHPHLHQYEVSSSLGYTSTRDVLENMMEPPQRDSSAPGRFHVGSAESMLHVRPGGYTPQRALINPFAPSRMPMKLTSNRRRWMHTFPVGPSGEAIQIHHQTRQNMAELQGSGQRDPTHSSAELLELAYHEAAGRHSNSRQPGDGMSFLNFSGTEELSVGLLSNSGAGMNPRTQNKDSLEDSVSTSPDPILTLSAPPVVPGFCCTVGVDWKSLTTPACLPLTTDYFPDRQGLQNDYTEGCYDLLPEADIDRRDEDGVQMTAQQVFEEFICQRLMQGYQIIVQPKTQKPNPAVPPPLSSSPLYSRGLVSRNRPEEEDQYWLSMGRTFHKVTLKDKMITVTRYLPKYPYESAQIHYTYSLCPSHSDSEFVSCWVEFSHERLEEYKWNYLDQYICSAGSEDFSLIESLKFWRTRFLLLPACVTATKRITEGEAHCDIYGDRPRADEDEWQLLDGFVRFVEGLNRIRRRHRSDRMMRKGTAMKGLQMTGPISTHSLESTAPPVGKKGTSALSALLEMEASQKCLGEQQAAVHGGKSSAQSAESSSVAMTPTYMDSPRKVSVDQTATPMLDGTSLGICTGQSMDRGNSQTFGNSQNIGEQGYSSTNSSDSSSQQLVASSLTSSSTLTEILEAMKHPSTGVQLLSEQKGLSPYCFISAEVVHWLVNHVEGIQTQAMAIDIMQKMLEEQLITHASGEAWRTFIYGFYFYKIVTDKEPDRVAMQQPATTWHTAGVDDFASFQRKWFEVAFVAEELVHSEIPAFLLPWLPSRPASYASRHSSFSRSFGGRSQAAALLAATVPEQRTVTLDVDVNNRTDRLEWCSCYYHGNFSLNAAFEIKLHWMAVTAAVLFEMVQGWHRKATSCGFLLVPVLEGPFALPSYLYGDPLRAQLFIPLNISCLLKEGSEHLFDSFEPETYWDRMHLFQEAIAHRFGFVQDKYSASAFNFPAENKPQYIHVTGTVFLQLPYSKRKFSGQQRRRRNSTSSTNQNMFCEERVGYNWAYNTMLTKTWRSSATGDEKFADRLLKDFTDFCINRDNRLVTFWTSCLEKMHASAP

SEQ ID NO: 43636 - protein, 1229 aa, Homo sapiens
MRTTKVYKLVIHKKGFGGSDDELVVNPKVFPHIKLGDIVEIAHPNDEYSPLLLQVKSLKEDLQKETISVDQTVTQVFRLRPYQDVYVNVVDPKDVTLDLVELTFKDQYIGRGDMWRLKKSLVSTCAYITQKVEFAGIRAQAGELWVKNEKVMCGYISEDTRVVFRSTSAMVYIFIQMSCEMWDFDIYGDLYFEKAVNGFLADLFTKWKEKNCSHEVTVVLFSRTFYDAKSVDEFPEINRASIRQDHKGRFYEDFYKVVVQNERREEWTSLLVTIKKLFIQYPVLVRLEQAEGFPQGDNSTSAQGNYLEAINLSFNVFDKHYINRNFDRTGQMSVVITPGVGVFEVDRLLMILTKQRMIDNGIGVDLVCMGEQPLHAVPLFKLHNRSAPRDSRLGDDYNIPHWINHSFYTSKSQLFCNSFTPRIKLAGKKPASEKAKNGRDTSLGSPKESENALPIQVDYDAYDAQVFRLPGPSRAQCLTTCRSVRERESHSRKSASSCDVSSSPSLPSRTLPTEEVRSQASDDSSLGKSANILMIPHPHLHQYEVSSSLGYTSTRDVLENMMEPPQRDSSAPGRFHVGSAESMLHVRPGGYTPQRALINPFAPSRMPMKLTSNRRRWMHTFPVGMNPRTQNKDSLEDSVSTSPDPILTLSAPPVVPGFCCTVGVDWKSLTTPACLPLTTDYFPDRQGLQNDYTEGCYDLLPEADIDRRDEDGVQMTAQQVFEEFICQRLMQGYQIIVQPKTQKPNPAVPPPLSSSPLYSRGLVSRNRPEEEDQYWLSMGRTFHKVTLKDKMITVTRYLPKYPYESAQIHYTYSLCPSHSDSEFVSCWVEFSHERLEEYKWNYLDQYICSAGSEDFSLIESLKFWRTRFLLLPACVTATKRITEGEAHCDIYGDRPRADEDEWQLLDGFVRFVEGLNRIRRRHRSDRMMRKGTAMKGLQMTGPISTHSLESTAPPVGKKGTSALSALLEMEASQKCLGEQQAAVHGGKSSAQSAESSSVAMTPTYMDSPRKDGAFFMEFVRSPRTASSAFYPQVSVDQTATPMLDGTSLGICTGQSMDRGNSQTFGNSQNIGEQGYSSTNSSDSSSQQLVASSLTSSSTLTEILEAMKHPSTGVQLLSEQKGLSPYCFISAEVVHWLVNHVEGIQTQAMAIDIMQWPCSSPPPPGTQQEWTTSPASSASGLRWPLWQKSSCTLRFLPFSCPGCLAGQPPMQVGTAPLAEVLEDGARRQHF

SEQ ID NO: 43637 - protein, 1503 aa, Homo sapiens
MRTTKVYKLVIHKKGFGGSDDELVVNPKVFPHIKLGDIVEIAHPNDEYSPLLLQVKSLKEDLQKETISVDQTVTQVFRLRPYQDVYVNVVDPKDVTLDLVELTFKDQYIGRGDMWRLKKSLVSTCAYITQKVEFAGIRAQAGELWVKNEKVMCGYISEDTRVVFRSTSAMVYIFIQMSCEMWDFDIYGDLYFEKAVNGFLADLFTKWKEKNCSHEVTVVLFSRTFYDAKSVDEFPEINRASIRQDHKGRFYEDFYKVVVQNERREEWTSLLVTIKKLFIQYPVLVRLEQAEGFPQGDNSTSAQGNYLEAINLSFNVFDKHYINRNFDRTGQMSVVITPGVGVFEVDRLLMILTKQRMIDNGIGVDLVCMGEQPLHAVPLFKLHNRSAPRDSRLGDDYNIPHWINHSFYTSKSQLFCNSFTPRIKLAGKKPASEKAKNGRDTSLGSPKESENALPIQVDYDAYDAQVFRLPGPSRAQCLTTCRSVRERESHSRKSASSCDVSSSPSLPSRTLPTEEVRSQASDDSSLGKSANILMIPHPHLHQYEVSSSLGYTSTRDVLENMMEPPQRDSSAPGRFHVGSAESMLHVRPGGYTPQRALINPFAPSRMPMKLTSNRRRWMHTFPVETSCFYLSIGMNPRTQNKDSLEDSVSTSPDPMPGFCCTVGVDWKSLTTPACLPLTTDYFPDRQGLQNDYTEGCYDLLPEADIDRRDEDGVQMTAQQVFEEFICQRLMQGYQIIVQPKTQKPNPAVPPPLSSSPLYSRGLVSRNRPEEEDQYWLSMGRTFHKVTLKDKMITVTRYLPKYPYESAQIHYTYSLCPSHSDSEFVSCWVEFSHERLEEYKWNYLDQYICSAGSEDFSLIESLKFWRTRFLLLPACVTATKRITEGEAHCDIYGDRPRADEDEWQLLDGFVRFVEGLNRIRRRHRSDRMMRKGTAMKGLQMTGPISTHSLESTAPPVGKKGTSALSALLEMEASQKCLGEQQAAVHGGKSSAQSAESSSVAMTPTYMDSPRKVSVDQTATPMLDGTSLGICTGQSMDRGNSQTFGNSQNIGEQGYSSTNSSDSSSQQLVASSLTSSSTLTEILEAMKHPSTGVQLLSEQKGLSPYCFISAEVVHWLVNHVEGIQTQAMAIDIMQKMLEEQLITHASGEAWRTFIYGFYFYKIVTDKEPDRVAMQQPATTWHTAGVDDFASFQRKWFEVAFVAEELVHSEIPAFLLPWLPSRPASYASRHSSFSRSFGGRSQAAALLAATVPEQRTVTLDVDVNNRTDRLEWCSCYYHGNFSLNAAFEIKLHWMAVTAAVLFEMVQGWHRKATSCGFLLVPVLEGPFALPSYLYGDPLRAQLFIPLNISCLLKEGSEHLFDSFEPETYWDRMHLFQEAIAHRFGFVQDKYSASAFNFPAENKPQYIHVTGTVFLQLPYSKRKFSGQQRRRRNSTSSTNQNMFCEERVGYNWAYNTMLTKTWRSSATGDEKFADRLLKDFTDFCINRDNRLVTFWTSCLEKMHASAP

SEQ ID NO: 43638 - protein, 559 aa, Homo sapiens
MRTTKVYKLVIHKKGFGGSDDELVVNPKVFPHIKLGDIVEIAHPNDEYSPLLLQVKSLKEDLQKETISVDQTVTQVFRLRPYQDVYVNVVDPKDVTLDLVELTFKDQYIGRGDMWRLKKSLVSTCAYITQKVEFAGIRAQAGELWVKNEKVMCGYISEDTRVVFRSTSAMVYIFIQMSCEMWDFDIYGDLYFEKAVNGFLADLFTKWKEKNCSHEVTVVLFSRTFYDAKSVDEFPEINRASIRQDHKGRFYEDFYKVVVQNERREEWTSLLVTIKKLFIQYPVLVRLEQAEGFPQGDNSTSAQGNYLEAINLSFNVFDKHYINRNFDRTGQMSVVITPGVGVFEVDRLLMILTKQRMIDNGIGVDLVCMGEQPLHAVPLFKLHNRSAPRDSRLGDDYNIPHWINHSFYTSKSQLFCNSFTPRIKLAGKKPASEKAKNGRDTSLGSPKESENALPIQVDYDAYDAQVFRLPGPSRAQCLTTCRSVRERESHSRKSASSCDVSSSPSLPSRTLPTEEVRSQASDDSSLGKSANILMIPHPHLHQYEVSSSLGYTSTREHLG

SEQ ID NO: 43639 - protein, 1552 aa, Homo sapiens
MRTTKVYKLVIHKKGFGGSDDELVVNPKVFPHIKLGDIVEIAHPNDEYSPLLLQVKSLKEDLQKETISVDQTVTQVFRLRPYQDVYVNVVDPKDVTLDLVELTFKDQYIGRGDMWRLKKSLVSTCAYITQKVEFAGIRAQAGELWVKNEKVMCGYISEDTRVVFRSTSAMVYIFIQMSCEMWDFDIYGDLYFEKAVNGFLADLFTKWKEKNCSHEVTVVLFSRTFYDAKSVDEFPEINRASIRQDHKGRFYEDFYKVVVQNERREEWTSLLVTIKKLFIQYPVLVRLEQAEGFPQGDNSTSAQGNYLEAINLSFNVFDKHYINRNFDRTGQMSVVITPGVGVFEVDRLLMILTKQRMIDNGIGVDLVCMGEQPLHAVPLFKLHNRSAPRDSRLGDDYNIPHWINHSFYTSKSQLFCNSFTPRIKLAGKKPASEKAKNGRDTSLGSPKESENALPIQVDYDAYDAQVFRLPGPSRAQCLTTCRSVRERESHSRKSASSCDVSSSPSLPSRTLPTEEVRSQASDDSSLGKSANILMIPHPHLHQYEVSSSLGYTSTRDVLENMMEPPQRDSSAPGRFHVGSAESMLHVRPGGYTPQRALINPFAPSRMPMKLTSNRRRWMHTFPVGPSGEAIQIHHQTRQNMAELQGSGQRDPTHSSAELLELAYHEAAGRHSNSRQPGDGMSFLNFSGTEELSVGLLSNSGAGMNPRTQNKDSLEDSVSTSPDPILTLSAPPVVPGFCCTVGVDWKSLTTPACLPLTTDYFPDRQGLQNDYTEGCYDLLPEADIDRRDEDGVQMTAQQVFEEFICQRLMQGYQIIVQPKTQKPNPAVPPPLSSSPLYSRGLVSRNRPEEEDQYWLSMGRTFHKVTLKDKMITVTRYLPKYPYESAQIHYTYSLCPSHSDSEFVSCWVEFSHERLEEYKWNYLDQYICSAGSEDFSLIESLKFWRTRFLLLPACVTATKRITEGEAHCDIYGDRPRADEDEWQLLDGFVRFVEGLNRIRRRHRSDRMMRKGTAMKGLQMTGPISTHSLESTAPPVGKKGTSALSALLEMEASQKCLGEQQAAVHGGKSSAQSAESSSVAMTPTYMDSPRKDGAFFMEFVRSPRTASSAFYPQVSVDQTATPMLDGTSLGICTGQSMDRGNSQTFGNSQNIGEQGYSSTNSSDSSSQQLVASSLTSSSTLTEILEAMKHPSTGVQLLSEQKGLSPYCFISAEVVHWLVNHVEGIQTQAMAIDIMQKMLEEQLITHASGEAWRTFIYGFYFYKIVTDKEPDRVAMQQPATTWHTAGVDDFASFQRKWFEVAFVAEELVHSEIPAFLLPWLPSRPASYASRHSSFSRSFGGRSQAAALLAATVPEQRTVTLDVDVNNRTDRLEWCSCYYHGNFSLNAAFEIKLHWMAVTAAVLFEMVQGWHRKATSCGFLLVPVLEGPFALPSYLYGDPLRAQLFIPLNISCLLKEGSEHLFDSLGLYKINILPLLLTSLLRTSLSISTLQEQCFCSCPTPSASSQGSSGGGGTPPAPPTRTCSARSGSATTGPTTPCSPKHGAPAPQGMKSLLIGC

SEQ ID NO: 43640 - protein, 1572 aa, Homo sapiens
MRTTKVYKLVIHKKGFGGSDDELVVNPKVFPHIKLGDIVEIAHPNDEYSPLLLQVKSLKEDLQKETISVDQTVTQVFRLRPYQDVYVNVVDPKDVTLDLVELTFKDQYIGRGDMWRLKKSLVSTCAYITQKVEFAGIRAQAGELWVKNEKVMCGYISEDTRVVFRSTSAMVYIFIQMSCEMWDFDIYGDLYFEKAVNGFLADLFTKWKEKNCSHEVTVVLFSRTFYDAKSVDEFPEINRASIRQDHKGRFYEDFYKVVVQNERREEWTSLLVTIKKLFIQYPVLVRLEQAEGFPQGDNSTSAQGNYLEAINLSFNVFDKHYINRNFDRTGQMSVVITPGVGVFEVDRLLMILTKQRMIDNGIGVDLVCMGEQPLHAVPLFKLHNRSAPRDSRLGDDYNIPHWINHSFYTSKSQLFCNSFTPRIKLAGKKPASEKAKNGRDTSLGSPKESENALPIQVDYDAYDAQVFRLPGPSRAQCLTTCRSVRERESHSRKSASSCDVSSSPSLPSRTLPTEEVRSQASDDSSLGKSANILMIPHPHLHQYEVSSSLGYTSTRDVLENMMEPPQRDSSAPGRFHVGSAESMLHVRPGGYTPQRALINPFAPSRMPMKLTSNRRRWMHTFPVGPSGEAIQIHHQTRQNMAELQGSGQRDPTHSSAELLELAYHEAAGRHSNSRQPGDGMSFLNFSGTEELSVGLLSNSGAGMNPRTQNKDSLEDSVSTSPDPMPGFCCTVGVDWKSLTTPACLPLTTDYFPDRQGLQNDYTEGCYDLLPEADIDRRDEDGVQMTAQQVFEEFICQRLMQGYQIIVQPKTQKPNPAVPPPLSSSPLYSRGLVSRNRPEEEDQYWLSMGRTFHKVTLKDKMITVTRYLPKYPYESAQIHYTYSLCPSHSDSEFVSCWVEFSHERLEEYKWNYLDQYICSAGSEDFSLIESLKFWRTRFLLLPACVTATKRITEGEAHCDIYGDRPRADEDEWQLLDGFVRFVEGLNRIRRRHRSDRMMRKGTAMKGLQMTGPISTHSLESTAPPVGKKGTSALSALLEMEASQKCLGEQQAAVHGGKSSAQSAESSSVAMTPTYMDSPRKVSVDQTATPMLDGTSLGICTGQSMDRGNSQTFGNSQNIGEQGYSSTNSSDSSSQQLVASSLTSSSTLTEILEAMKHPSTGVQLLSEQKGLSPYCFISAEVVHWLVNHVEGIQTQAMAIDIMQKMLEEQLITHASGEAWRTFIYGFYFYKIVTDKEPDRVAMQQPATTWHTAGVDDFASFQRKWFEVAFVAEELVHSEIPAFLLPWLPSRPASYASRHSSFSRSFGGRSQAAALLAATVPEQRTVTLDVDVNNRTDRLEWCSCYYHGNFSLNAAFEIKLHWMAVTAAVLFEMVQGWHRKATSCGFLLVPVLEGPFALPSYLYGDPLRAQLFIPLNISCLLKEGSEHLFDSFEPETYWDRMHLFQEAIAHRFGFVQDKYSASAFNFPAENKPQYIHVTGTVFLQLPYSKRKFSGQQRRRRNSTSSTNQNMFCEERVGYNWAYNTMLTKTWRSSATGDEKFADRLLKDFTDFCINRDNRLVTFWTSCLEKMHASAP

SEQ ID NO: 43641 - protein, 1572 aa, Homo sapiens; identical to SEQ ID NO: 43640

SEQ ID NO: 43642 - protein, 45 aa, Homo sapiens
MRTTKVYKLVIHKKGFGGSDDELVVNPKVFPHIKLGDIVEIAHPN

SEQ ID NO: 43643 - protein, 1503 aa, Homo sapiens
MRTTKVYKLVIHKKGFGGSDDELVVNPKVFPHIKLGDIVEIAHPNDEYSPLLLQVKSLKEDLQKETISVDQTVTQVFRLRPYQDVYVNVVDPKDVTLDLVELTFKDQYIGRGDMWRLKKSLVSTCAYITQKVEFAGIRAQAGELWVKNEKVMCGYISEDTRVVFRSTSAMVYIFIQMSCEMWDFDIYGDLYFEKAVNGFLADLFTKWKEKNCSHEVTVVLFSRTFYDAKSVDEFPEINRASIRQDHKGRFYEDFYKVVVQNERREEWTSLLVTIKKLFIQYPVLVRLEQAEGFPQGDNSTSAQGNYLEAINLSFNVFDKHYINRNFDRTGQMSVVITPGVGVFEVDRLLMILTKQRMIDNGIGVDLVCMGEQPLHAVPLFKLHNRSAPRDSRLGDDYNIPHWINHSFYTSKSQLFCNSFTPRIKLAGKKPASEKAKNGRDTSLGSPKESENALPIQVDYDAYDAQVFRLPGPSRAQCLTTCRSVRERESHSRKSASSCDVSSSPSLPSRTLPTEEVRSQASDDSSLGKSANILMIPHPHLHQYEVSSSLGYTSTRDVLENMMEPPQRDSSAPGRFHVGSAESMLHVRPGGYTPQRALINPFAPSRMPMKLTSNRRRWMHTFPVGMNPRTQNKDSLEDSVSTSPDPILTLSAPPVVPGFCCTVGVDWKSLTTPACLPLTTDYFPDRQGLQNDYTEGCYDLLPEADIDRRDEDGVQMTAQQVFEEFICQRLMQGYQIIVQPKTQKPNPAVPPPLSSSPLYSRGLVSRNRPEEEDQYWLSMGRTFHKVTLKDKMITVTRYLPKYPYESAQIHYTYSLCPSHSDSEFVSCWVEFSHERLEEYKWNYLDQYICSAGSEDFSLIESLKFWRTRFLLLPACVTATKRITEGEAHCDIYGDRPRADEDEWQLLDGFVRFVEGLNRIRRRHRSDRMMRKGTAMKGLQMTGPISTHSLESTAPPVGKKGTSALSALLEMEASQKCLGEQQAAVHGGKSSAQSAESSSVAMTPTYMDSPRKVSVDQTATPMLDGTSLGICTGQSMDRGNSQTFGNSQNIGEQGYSSTNSSDSSSQQLVASSLTSSSTLTEILEAMKHPSTGVQLLSEQKGLSPYCFISAEVVHWLVNHVEGIQTQAMAIDIMQKMLEEQLITHASGEAWRTFIYGFYFYKIVTDKEPDRVAMQQPATTWHTAGVDDFASFQRKWFEVAFVAEELVHSEIPAFLLPWLPSRPASYASRHSSFSRSFGGRSQAAALLAATVPEQRTVTLDVDVNNRTDRLEWCSCYYHGNFSLNAAFEIKLHWMAVTAAVLFEMVQGWHRKATSCGFLLVPVLEGPFALPSYLYGDPLRAQLFIPLNISCLLKEGSEHLFDSFEPETYWDRMHLFQEAIAHRFGFVQDKYSASAFNFPAENKPQYIHVTGTVFLQLPYSKRKFSGQQRRRRNSTSSTNQNMFCEERVGYNWAYNTMLTKTWRSSATGDEKFADRLLKDFTDFCINRDNRLVTFWTSCLEKMHASAP

SEQ ID NO: 43644 - protein, 664 aa, Homo sapiens
MRTTKVYKLVIHKKGFGGSDDELVVNPKVFPHIKLGDIVEIAHPNDEYSPLLLQVKSLKEDLQKETISVDQTVTQVFRLRPYQDVYVNVVDPKVSTCAYITQKVEFAGIRAQAGELWVKNEKVMCGYISEDTRVVFRSTSAMVYIFIQMSCEMWDFDIYGDLYFEKAVNGFLADLFTKWKEKNCSHEVTVVLFSRTFYDAKSVDEFPEINRASIRQDHKGRFYEDFYKVVVQNERREEWTSLLVTIKKLFIQYPVLVRLEQAEGFPQGDNSTSAQGNYLEAINLSFNVFDKHYINRNFDRTGQMSVVITPGVGVFEVDRLLMILTKQRMIDNGIGVDLVCMGEQPLHAVPLFKLHNRSAPRDSRLGDDYNIPHWINHSFYTSKSQLFCNSFTPRIKLAGKKPASEKAKNGRDTSLGSPKESENALPIQVDYDAYDAQVFRLPGPSRAQCLTTCRSVRERESHSRKSASSCDVSSSPSLPSRTLPTEEVRSQASDDSSLGKSANILMIPHPHLHQYEVSSSLGYTSTRDVLENMMEPPQRDSSAPGRFHVGSAESMLHVRPGGYTPQRALINPFAPSRMPMKLTSNRRRWMHTFPVGMNPRTQNKDSLEDSVSTSPDPSKRGQLTGERGRQGVWGGQSMRKQEEALWEVSGPEVHIPLGYGKAMW

SEQ ID NO: 43645 - protein, 420 aa, Homo sapiens
MKHPSTGVQLLSEQKGLSPYCFISAEVVHWLVNHVEGIQTQAMAIDIMQKMLEEQLITHASGEAWRTFIYGFYFYKIVTDKEPDRVAMQQPATTWHTAGVDDFASFQRKWFEVAFVAEELVHSEIPAFLLPWLPSRPASYASRHSSFSRSFGGRSQAAALLAATVPEQRTVTLDVDVNNRTDRLEWCSCYYHGNFSLNAAFEIKLHWMAVTAAVLFEMVQGWHRKATSCGFLLVPVLEGPFALPSYLYGDPLRAQLFIPLNISCLLKEGSEHLFDSFEPETYWDRMHLFQEAIAHRFGFVQDKYSASAFNFPAENKPQYIHVTGTVFLQLPYSKRKFSGQQRRRRNSTSSTNQNMFCEERVGYNWAYNTMLTKTWRSSATGDEKFADRLLKDFTDFCINRDNRLVTFWTSCLEKMHASAP

SEQ ID NO: 43646 - protein, 1594 aa, Homo sapiens
MRTTKVYKLVIHKKGFGGSDDELVVNPKVFPHIKLGDIVEIAHPNDEYSPLLLQVKSLKEDLQKETISVDQTVTQVFRLRPYQDVYVNVVDPKDVTLDLVELTFKDQYIGRGDMWRLKKSLVSTCAYITQKVEFAGIRAQAGELWVKNEKVMCGYISEDTRVVFRSTSAMVYIFIQMSCEMWDFDIYGDLYFEKAVNGFLADLFTKWKEKNCSHEVTVVLFSRTFYDAKSVDEFPEINRASIRQDHKGRFYEDFYKVVVQNERREEWTSLLVTIKKLFIQYPVLVRLEQAEGFPQGDNSTSAQGNYLEAINLSFNVFDKHYINRNFDRTGQMSVVITPGVGVFEVDRLLMILTKQRMIDNGIGVDLVCMGEQPLHAVPLFKLHNRSAPRDSRLGDDYNIPHWINHSFYTSKSQLFCNSFTPRIKLAGKKPASEKAKNGRDTSLGSPKESENALPIQVDYDAYDAQVFRLPGPSRAQCLTTCRSVRERESHSRKSASSCDVSSSPSLPSRTLPTEEVRSQASDDSSLGKSANILMIPHPHLHQYEVSSSLGYTSTRDVLENMMEPPQRDSSAPGRFHVGSAESMLHVRPGGYTPQRALINPFAPSRMPMKLTSNRRRWMHTFPVGPSGEAIQIHHQTRQNMAELQGSGQRDPTHSSAELLELAYHEAAGRHSNSRQPGDGMSFLNFSGTEELSVGLLSNSGAGMNPRTQNKDSLEDSVSTSPDPMPGFCCTVGVDWKSLTTPACLPLTTDYFPDRQGLQNDYTEGCYDLLPEADIDRRDEDGVQMTAQQVFEEFICQRLMQGYQIIVQPKTQKPNPAVPPPLSSSPLYSRGLVSRNRPEEEDQYWLSMGRTFHKVTLKDKMITVTRYLPKYPYESAQIHYTYSLCPSHSDSEFVSCWVEFSHERLEEYKWNYLDQYICSAGSEDFSLIESLKFWRTRFLLLPACVTATKRITEGEAHCDIYGDRPRADEDEWQLLDGFVRFVEGLNRIRRRHRSDRMMRKGTAMKGLQMTGPISTHSLESTAPPVGKKGTSALSALLEMEASQKCLGEQQAAVHGGKSSAQSAESSSVAMTPTYMDSPRKDGAFFMEFVRSPRTASSAFYPQVSVDQTATPMLDGTSLGICTGQSMDRGNSQTFGNSQNIGEQGYSSTNSSDSSSQQLVASSLTSSSTLTEILEAMKHPSTGVQLLSEQKGLSPYCFISAEVVHWLVNHVEGIQTQAMAIDIMQKMLEEQLITHASGEAWRTFIYGFYFYKIVTDKEPDRVAMQQPATTWHTAGVDDFASFQRKWFEVAFVAEELVHSEIPAFLLPWLPSRPASYASRHSSFSRSFGGRSQAAALLAATVPEQRTVTLDVDVNNRTDRLEWCSCYYHGNFSLNAAFEIKLHWMAVTAAVLFEMVQGWHRKATSCGFLLVPVLEGPFALPSYLYGDPLRAQLFIPLNISCLLKEGSEHLFDSFEPETYWDRMHLFQEAIAHRFGFVQDKYSASAFNFPAENKPQYIHVTGTVFLQLPYSKRKFSGQQRRRRNSTSSTNQNMFCEERVGYNWAYNTMLTKTWRSSATGDEKFADRLLKDFTDFCINRDNRLVTFWTSCLEKMHASAP

SEQ ID NO: 43647 - protein, 511 aa, Homo sapiens
MATVQEKAAALNLSALHSPAHRPPGFSVAQKPFGATYVWSSIINTLQTQVEVKKRRHRLKRHNDCFVGSEAVDVIFSHLIQNKYFGDVDIPRAKVVRVCQALMDYKVFEAVPTKVFGKDKKPTFEDSSCSLYRFTTIPNQDSQLGKENKLYSPARYADALFKSSDIRSASLEDLWENLSLKPANSPHVNISATLSPQVINEVWQEETIGRLLQLVDLPLLDSLLKQQEAVPKIPQPKRQSTMVNSSNYLDRGILKAYSDSQEDEWLSAAIDCLEYLPDQMVVEISRSFPEQPDRTDLVKELLFDAIGRYYSSREPLLNHLSDVHNGIAELLVNGKTEIALEATQLLLKLLDFQNREEFRRLLYFMAVAANPSEFKLQKESDNRMVVKRIFSKAIVDNKNLSKGKTDLLVLFLMDHQKDVFKIPGTLHKIVSVKLMAIQNGRDPNRDAGYIYCQRIDQRDYSNNTEKTTKDELLNLLKTLDEDSKLSAKEKKKLLGQFYKCHPDIFIEHFGD

SEQ ID NO: 43648 - protein, 502 aa, Homo sapiens
MRGLCEFYWQEFGIKGFSVAQKPFGATYVWSSIINTLQTQVEVKKRRHRLKRHNDCFVGSEAVDVIFSHLIQNKYFGDVDIPRAKVVRVCQALMDYKVFEAVPTKVFGKDKKPTFEDSSCSLYRFTTIPNQDSQLGKENKLYSPARYADALFKSSDIRSASLEDLWENLSLKPANSPHVNISATLSPQVINEVWQEETIGRLLQLVDLPLLDSLLKQQEAVPKIPQPKRQSTMVNSSNYLDRGILKAYSDSQEDEWLSAAIDCLEYLPDQMVVEISRSFPEQPDRTDLVKELLFDAIGRYYSSREPLLNHLSDVHNGIAELLVNGKTEIALEATQLLLKLLDFQNREEFRRLLYFMAVAANPSEFKLQKESDNRMVVKRIFSKAIVDNKNLSKGKTDLLVLFLMDHQKDVFKIPGTLHKIVSVKLMAIQNGRDPNRDAGYIYCQRIDQRDYSNNTEKTTKDELLNLLKTLDEDSKLSAKEKKKLLGQFYKCHPDIFIEHFGD

SEQ ID NO: 43649 - protein, 409 aa, Homo sapiens
MEEGGSTGSAGSDSSTSGSGGAQQRELERMAEVLVTGEQLRLRLHEEKVIKDRRHHLKTYPNCFVAKELIDWLIEHKEASDRETAIKLMQKLADRGIIHHVCDEHKEFKDVKLFYRFRKDDGTFPLDNEVKAFMRGQRLYEKLMSPENTLLQPREEEGVKYERTFMASEFLDWLVQEGEATTRKEAEQLCHRLMEHGIIQHVSNKHPFVDSNLLYQFRMNFRRRRRLMELLNEKSPSSQETHDSPFCLRKQSHDNRKSTSFMSVSPSKEIKIVSAVRRSSMSSCGSSGYFSSSPTLSSSPPVLCNPKSVLKRPVTSEELLTPGAPYARKTFTIVGDAVGWGFVVRGSKPCHIQAVDPSGPAAAAGMKVCQFVVSVNGLNVLHVDYRTVSNLILTGPRTIVMEVMEELEC

SEQ ID NO: 43650 - protein, 958 aa, Homo sapiens [sequence omitted]

SEQ ID NO: 43651 - protein, 958 aa, Homo sapiens [sequence omitted]

SEQ ID NO: 43652 - protein, 166 aa, Homo sapiens
MRTHTRGAPSVFFIYLLCFVSAYITDENPEVMIPFTNANYDSHPMLYFSRAEVAELQLRAASSHEHIAARLTEAVHTMLSSPLEYLPPWDPKDYSARWNEIFGNNLGALAMFCVLYPENIEARDMAKDYMERMAAQPSWLVKDAPWDEVPLAHSLVGFATAYDFLY

SEQ ID NO: 43653 - protein, 958 aa, Homo sapiens [sequence omitted]

SEQ ID NO: 43654 - protein, 977 aa, Homo sapiens
MGSFEDGLAALEIWRSDATMRTHTRGAPSVFFIYLLCFVSAYITDENPEVMIPFTNANYDSHPMLYFSRAEVAELQLRAASSHEHIAARLTEAVHTMLSSPLEYLPPWDPKDYSARWNEIFGNNLGALAMFCVLYPENIEARDMAKDYMERMAAQPSWLVKDAPWDEVPLAHSLVGFATAYDFLYNYLSKTQQEKFLEVIANASGYMYETSYRRGWGFQYLHNHQPTNCMALLTGSLVLMNQGYLQEAYLWTKQVLTIMEKSLVLLREVTDGSLYEGVAYGSYTTRSLFQYMFLVQRHFNINHFGHPWLKQHFAFMYRTILPGFQRTVAIADSNYNWFYGPESQLVFLDKFVMRNGSGNWLADQIRRNRVVEGPGTPSKGQRWCTLHTEFLWYDGSLKSVPPPDFGTPTLHYFEDWGVVTYGSALPAEINRSFLSFKSGKLGGRAIYDIVHRNKYKDWIKGWRNFNAGHEHPDQNSFTFAPNGVPFITEALYGPKYTFFNNVLMFSPAVSKSCFSPWVGQVTEDCSSKWSKYKHDLAASCQGRVVAAEEKNGVVFIRGEGVGAYNPQLNLKNVQRNLILLHPQLLLLVDQIHLGEESPLETAASFFHNVDVPFEETVVDGVHGAFIRQRDGLYKMYWMDDTGYSEKATFASVTYPRGYPYNGTNYVNVTMHLRSPITRAAYLFIGPSIDVQSFTVHGDSQQLDVFIATSKHAYATYLWTGEATGQSAFAQVIADRHKILFDRNSAIKSSIVPEVKDYAAIVEQNLQHFKPVFQLLEKQILSRVRNTASFRKTAERLLRFSDKRQTEEAIDRIFAISQQQQQQSKSKKNRRAGKRYKFVDAVPDIFAQIEVNEKKIRQKAQILAQKELPIDEDEEMKDLLDFADVTYEKHKNGGLIKGRFGQARMVTTTHSRAPSLSASYTRLFLILNIAIFFVMLAMQLTYFQRAQSLHGQRCLYAVLLIDSCILLWLYSSCSQSQC

SEQ ID NO: 43655 - protein, 189 aa, Homo sapiens
MAALKGRQVYWATAGKISGWTWPHAPRRPHVLLLNGIGVGGALGSIDELLCQALSNGLNVPEGSLTSTCAQQPDGLIHTAKWGHVHSLSSHSPGAPNACGVLPGTTVDDGVHQDLQRVLACEQVYDLEGMLDDAHSHELLAVVAAVHHHGVSKALHNGTLSFVEAFGGIPPCTVRIFRRWFGCLGDLEI

SEQ ID NO: 43656 - protein, 1222 aa, Homo sapiens
MPKGGAPPWIMALMFTGHLLFLALLMFAFSTFEESVSNYSEWAVFTDDIDQFKTQKVQDFRPNQKLKKSMLHPSLYFDAGEIQAMRQKSRASHLHLFRAIRSAVTVMLSNPTYYLPPPKHADFAAKWNEIYGNNLPPLALYCLLCPEDKVAFEFVLEYMDRMVGYKDWLVENAPGDEVPIGHSLTGFATAFDFLYNLLDNHRRQKYLEKIWVITEEMYEYSKVRSWGKQLLHNHQATNMIALLTGALVTGVDKGSKANIWKQAVVDVMEKTMFLLNHIVDGSLDEGVAYGSYTAKSVTQYVFLAQRHFNINNLDNNWLKMHFWFYYATLLPGFQRTVGIADSNYNWFYGPESQLVFLDKFILKNGAGNWLAQQIRKHRPKDGPMVPSTAQRWSTLHTEYIWYDPQLTPQPPADYGTAKIHTFPNWGVVTYGAGLPNTQTNTFVSFKSGKLGGRAVYDIVHFQPYSWIDGWRSFNPGHEHPDQNSFTFAPNGQVFVSEALYGPKLSHLNNVLVFAPSPSSQCNKPWEGQLGECAQWLKWTGEEVGDAAGEIITASQHGEMVFVSGEAVSAYSSAMRLKSVYRALLLLNSQTLLVVDHIERQEDSPINSVSAFFHNLDIDFKYIPYKFMNRYNGAMMDVWDAHYKMFWFDHHGNSPMASIQEAEQAAEFKKRWTQFVNVTFQMEPTITRIAYVFYGPYINVSSCRFIDSSNPGLQISLNVNNTEHVVSIVTDYHNLKTRFNYLGFGGFASVADQGQITRFGLGTQAIVKPVRHDRIIFPFGFKFNIAVGLILCISLVILTFQWRFYLSFRKLMRWILILVIALWFIELLDVWSTCSQPICAKWTRTEAEGSKKSLSSEGHHMDLPDVVITSLPGSGAEILKQLFFNSSDFLYIRVPTAYIDIPETELEIDSFVDACEWKVSDIRSGHFRLLRGWLQSLVQDTKLHLQNIHLHEPNRGKLAQYFAMNKDKKRKFKRRESLPEQRSQMKGAFDRDAEYIRALRRHLVYYPSARPVLSLSSGSWTLKLHFFQEVLGASMRALYIVRDPRAWIYSMLYNSKPSLYSLKNVPEHLAKLFKIEGGKGKCNLNSGYAFEYEPLRKELSKSKSNAVSLLSHLWLANTAAALRINTDLLPTSYQLVKFEDIVHFPQKTTERIFAFLGIPLSPASLNQILFATSTNLFYLPYEGEISPTNTNVWKQNLPRDEIKLIENICWTLMDRLGYPKFMD

SEQ ID NO: 43657 - protein, 1212 aa, Homo sapiens
MALMFTGHLLFLALLMFAFSTFEESVSNYSEWAVFTDDIDQFKTQKVQDFRPNQKLKKSMLHPSLYFDAGEIQAMRQKSRASHLHLFRAIRSAVTVMLSNPTYYLPPPKHADFAAKWNEIYGNNLPPLALYCLLCPEDKVAFEFVLEYMDRMVGYKDWLVENAPGDEVPIGHSLTGFATAFDFLYNLLDNHRRQKYLEKIWVITEEMYEYSKVRSWGKQLLHNHQATNMIALLTGALVTGVDKGSKANIWKQAVVDVMEKTMFLLNHIVDGSLDEGVAYGSYTAKSVTQYVFLAQRHFNINNLDNNWLKMHFWFYYATLLPGFQRTVGIADSNYNWFYGPESQLVFLDKFILKNGAGNWLAQQIRKHRPKDGPMVPSTAQRWSTLHTEYIWYDPQLTPQPPADYGTAKIHTFPNWGVVTYGAGLPNTQTNTFVSFKSGKLGGRAVYDIVHFQPYSWIDGWRSFNPGHEHPDQNSFTFAPNGQVFVSEALYGPKLSHLNNVLVFAPSPSSQCNKPWEGQLGECAQWLKWTGEEVGDAAGEIITASQHGEMVFVSGEAVSAYSSAMRLKSVYRALLLLNSQTLLVVDHIERQEDSPINSVSAFFHNLDIDFKYIPYKFMNRYNGAMMDVWDAHYKMFWFDHHGNSPMASIQEAEQAAEFKKRWTQFVNVTFQMEPTITRIAYVFYGPYINVSSCRFIDSSNPGLQISLNVNNTEHVVSIVTDYHNLKTRFNYLGFGGFASVADQGQITRFGLGTQAIVKPVRHDRIIFPFGFKFNIAVGLILCISLVILTFQWRFYLSFRKLMRWILILVIALWFIELLDVWSTCSQPICAKWTRTEAEGSKKSLSSEGHHMDLPDVVITSLPGSGAEILKQLFFNSSDFLYIRVPTAYIDIPETELEIDSFVDACEWKVSDIRSGHFRLLRGWLQSLVQDTKLHLQNIHLHEPNRGKLAQYFAMNKDKKRKFKRRESLPEQRSQMKGAFDRDAEYIRALRRHLVYYPSARPVLSLSSGSWTLKLHFFQEVLGASMRALYIVRDPRAWIYSMLYNSKPSLYSLKNVPEHLAKLFKIEGGKGKCNLNSGYAFEYEPLRKELSKSKSNAVSLLSHLWLANTAAALRINTDLLPTSYQLVKFEDIVHFPQKTTERIFAFLGIPLSPASLNQILFATSTNLFYLPYEGEISPTNTNVWKQNLPRDEIKLIENICWTLMDRLGYPKFMD

SEQ ID NO: 43658 - protein, 201 aa, Homo sapiens
MDLSLLWVLLPLVTMAWGQYGDYGYPYQQYHDYSDDGWVNLNRQGFSYQCPQGQVIVAVRSIFSKKEGSDRQWNYACMPTPQSLGEPTECWWEEINRAGMEWYQTCSNNGLVAGFQSRYFESVLDREWQFYCCRYSKRCPYSCWLTTEYPGHYGEEMDMISYNYDYYIRGATTTFSAVERDRQWKFIMCRMTEYDCEFANV

SEQ ID NO: 43659 - protein, 110 aa, Homo sapiens
MRFMTLLFLTALAGALVCAYDPEAASAPGSGNPCHEASAAQKENAGEDPGLARQAPKPRKQRSSLLEKGLDGAKKAVGGLGKLGKDAVEDLESVGKGAVHDVKDVLDSVL

SEQ ID NO: 43660 - protein, 396 aa, Homo sapiens
MALLTNLLPLCCLALLALPAQSCGPGRGPVGRRRYARKQLVPLLYKQFVPGVPERTLGASGPAEGRVARGSERFRDLVPNYNPDIIFKDEENSGADRLMTERCKERVNALAIAVMNMWPGVRLRVTEGWDEDGHHAQDSLHYEGRALDITTSDRDRNKYGLLARLAVEAGFDWVYYESRNHVHVSVKADNSLAVRAGGCFPGNATVRLWSGERKGLRELHRGDWVLAADASGRVVPTPVLLFLDRDLQRRASFVAVETEWPPRKLLLTPWHLVFAARGPAPAPGDFAPVFARRLRAGDSVLAPGGDALRPARVARVAREEAVGVFAPLTAHGTLLVNDVLASCYAVLESHQWAHRAFAPLRLLHALGALLPGGAVQPTGMHWYSRLLYRLAEELLG

SEQ ID NO: 43661 - protein, 470 aa, Homo sapiens
MSQAYSSSQRVSSYRRTFGGAPGFPLGSPLSSPVFPRAGFGSKGSSSSVTSRVYQVSRTSGGAGGLGSLRASRLGTTRTPSSYGAGELLDFSLADAVNQEFLTTRTNEKVELQELNDRFANYIEKVRFLEQQNAALAAEVNRLKGREPTRVAELYEEELRELRRQVEVLTNQRARVDVERDNLLDDLQRLKAKLQEEIQLKEEAENNLAAFRADVDAATLARIDLERRIESLNEEIAFLKKVHEEEIRELQAQLQEQQVQVEMDMSKPDLTAALRDIRAQYETIAAKNISEAEEWYKSKVSDLTQAANKNNDALRQAKQEMMEYRHQIQSYTCEIDALKGTNDSLMRQMRELEDRFASEASGYQDNIARLEEEIRHLKDEMARHLREYQDLLNVKMALDVEIATYRKLLEGEESRINLPIQTYSALNFRETSPEQRGSEVHTKKTVMIKTIETRDGEVVSEATQQQHEVL

SEQ ID NO: 43662 - protein, 840 aa, Homo sapiens
MALASAAPGSIFCKQLLFSLLVLTLLCDACQKVYLRVPSHLQAETLVGKVNLEECLKSASLIRSSDPAFRILEDGSIYTTHDLILSSERKSFSIFLSDGQRREQQEIKVVLSARENKSPKKRHTKDTALKRSKRRWAPIPASLMENSLGPFPQHVQQIQSDAAQNYTIFYSISGPGVDKEPFNLFYIEKDTGDIFCTRSIDREKYEQFALYGYATTADGYAPEYPLPLIIKIEDDNDNAPYFEHRVTIFTVPENCRSGTSVGKVTATDLDEPDTLHTRLKYKILQQIPDHPKHFSIHPDTGVITTTTPFLDREKCDTYQLIMEVRDMGGQPFGLFNTGTITISLEDENDNPPSFTETSYVTEVEENRIDVEILRMKVQDQDLPNTPHSKAVYKILQGNENGNFIISTDPNTNEGVLCVVKPLNYEVNRQVILQVGVINEAQFSKAASSQTPTMCTTTVTVKIIDSDEGPECHPPVKVIQSQDGFPAGQELLGYKALDPEISSGEGLRYQKLGDEDNWFEINQHTGDLRTLKVLDRESKFVKNNQYNISVVAVDAVGRSCTGTLVVHLDDYNDHAPQIDKEVTICQNNEDFAVLKPVDPDGPENGPPFQFFLDNSASKNWNIEEKDGKTAILRQRQNLDYNYYSVPIQIKDRHGLVATHMLTVRVCDCSTPSECRMKDKSTRDVRPNVILGRWAILAMVLGSVLLLCILFTCFCVTAKRTVKKCFPEDIAQQNLIVSNTEGPGEEVTEANIRLPMQTSNICDTSMSVGTVGGQGIKTQQSFEMVKGGYTLDSNKGGGHQTLESVKGVGQGDTGRYAYTDWQSFTQPRLGEESIRGHTLIKN

SEQ ID NO: 43663 - protein, 894 aa, Homo sapiens
MALASAAPGSIFCKQLLFSLLVLTLLCDACQKVYLRVPSHLQAETLVGKVNLEECLKSASLIRSSDPAFRILEDGSIYTTHDLILSSERKSFSIFLSDGQRREQQEIKVVLSARENKSPKKRHTKDTALKRSKRRWAPIPASLMENSLGPFPQHVQQIQSDAAQNYTIFYSISGPGVDKEPFNLFYIEKDTGDIFCTRSIDREKYEQFALYGYATTADGYAPEYPLPLIIKIEDDNDNAPYFEHRVTIFTVPENCRSGTSVGKVTATDLDEPDTLHTRLKYKILQQIPDHPKHFSIHPDTGVITTTTPFLDREKCDTYQLIMEVRDMGGQPFGLFNTGTITISLEDENDNPPSFTETSYVTEVEENRIDVEILRMKVQDQDLPNTPHSKAVYKILQGNENGNFIISTDPNTNEGVLCVVKPLNYEVNRQVILQVGVINEAQFSKAASSQTPTMCTTTVTVKIIDSDEGPECHPPVKVIQSQDGFPAGQELLGYKALDPEISSGEGLRYQKLGDEDNWFEINQHTGDLRTLKVLDRESKFVKNNQYNISVVAVDAVGRSCTGTLVVHLDDYNDHAPQIDKEVTICQNNEDFAVLKPVDPDGPENGPPFQFFLDNSASKNWNIEEKDGKTAILRQRQNLDYNYYSVPIQIKDRHGLVATHMLTVRVCDCSTPSECRMKDKSTRDVRPNVILGRWAILAMVLGSVLLLCILFTCFCVTAKRTVKKCFPEDIAQQNLIVSNTEGPGEEVTEANIRLPMQTSNICDTSMSVGTVGGQGIKTQQSFEMVKGGYTLDSNKGGGHQTLESVKGVGQGDTGRYAYTDWQSFTQPRLGEKVYLCGQDEEHKHCEDYVCSYNYEGKGSLAGSVGCCSDRQEEEGLEFLDHLEPKFRTLAKTCIKK

SEQ ID NO: 43664 - protein, 896 aa, Homo sapiens
MAAAGPRRSVRGAVCLHLLLTLVIFSRAGEACKKVILNVPSKLEADKIIGRVNLEECFRSADLIRSSDPDFRVLNDGSVYTARAVALSDKKRSFTIWLSDKRKQTQKEVTVLLEHQKKVSKTRHTRETVLRRAKRRWAPIPCSMQENSLGPFPLFLQQVESDAAQNYTVFYSISGRGVDKEPLNLFYIERDTGNLFCTRPVDREEYDVFDLIAYASTADGYSADLPLPLPIRVEDENDNHPVFTEAIYNFEVLESSRPGTTVGVVCATDRDEPDTMHTRLKYSILQQTPRSPGLFSVHPSTGVITTVSHYLDREVVDKYSLIMKVQDMDGQFFGLIGTSTCIITVTDSNDNAPTFRQNAYEAFVEENAFNVEILRIPIEDKDLINTANWRVNFTILKGNENGHFKISTDKETNEGVLSVVKPLNYEENRQVNLEIGVNNEAPFARDIPRVTALNRALVTVHVRDLDEGPECTPAAQYVRIKENLAVGSKINGYKAYDPENRNGNGLRYKKLHDPKGWITIDEISGSIITSKILDREVETPKNELYNITVLAIDKDDRSCTGTLAVNIEDVNDNPPEILQEYVVICKPKMGYTDILAVDPDEPVHGAPFYFSLPNTSPEISRLWSLTKVNDTAARLSYQKNAGFQEYTIPITVKDRAGQAATKLLRVNLCECTHPTQCRATSRSTGVILGKWAILAILLGIALLFSVLLTLVCGVFGATKGKRFPEDLAQQNLIISNTEAPGDDRVCSANGFMTQTTNNSSQGFCGTMGSGMKNGGQETIEMMKGGNQTLESCRGAGHHHTLDSCRGGHTEVDNCRYTYSEWHSFTQPRLGEKLHRCNQNEDRMPSQDYVLTYNYEGRGSPAGSVGCCSEKQEEDGLDFLNNLEPKFITLAEACTKR

SEQ ID NO: 43665 - protein, 839 aa, Homo sapiens
MAAAGPRRSVRGAVCLHLLLTLVIFSRAGEACKKVILNVPSKLEADKIIGRVNLEECFRSADLIRSSDPDFRVLNDGSVYTARAVALSDKKRSFTIWLSDKRKQTQKEVTVLLEHQKKVSKTRHTRETVLRRAKRRWAPIPCSMQENSLGPFPLFLQQVESDAAQNYTVFYSISGRGVDKEPLNLFYIERDTGNLFCTRPVDREEYDVFDLIAYASTADGYSADLPLPLPIRVEDENDNHPVFTEAIYNFEVLESSRPGTTVGVVCATDRDEPDTMHTRLKYSILQQTPRSPGLFSVHPSTGVITTVSHYLDREVVDKYSLIMKVQDMDGQFFGLIGTSTCIITVTDSNDNAPTFRQNAYEAFVEENAFNVEILRIPIEDKDLINTANWRVNFTILKGNENGHFKISTDKETNEGVLSVVKPLNYEENRQVNLEIGVNNEAPFARDIPRVTALNRALVTVHVRDLDEGPECTPAAQYVRIKENLAVGSKINGYKAYDPENRNGNGLRYKKLHDPKGWITIDEISGSIITSKILDREVETPKNELYNITVLAIDKDDRSCTGTLAVNIEDVNDNPPEILQEYVVICKPKMGYTDILAVDPDEPVHGAPFYFSLPNTSPEISRLWSLTKVNDTAARLSYQKNAGFQEYTIPITVKDRAGQAATKLLRVNLCECTHPTQCRATSRSTGVILGKWAILAILLGIALLFSVLLTLVCGVFGATKGKRFPEDLAQQNLIISNTEAPGDDRVCSANGFMTQTTNNSSQGFCGTMGSGMKNGGQETIEMMKGGNQTLESCRGAGHHHTLDSCRGGHTEVDNCRYTYSEWHSFTQPRLGEESIRGHTG

SEQ ID NO: 43666 - protein, 1049 aa, Homo sapiens
MDWSFFRVVAMLFIFLVVVEVNSEFRIQVRDYNTKNGTIKWHSIRRQKREWIKFAAACREGEDNSKRNPIAKIHSDCAANQQVTYRISGVGIDQPPYGIFVINQKTGEINITSIVDREVTPFFIIYCRALNSMGQDLERPLELRVRVLDINDNPPVFSMATFAGQIEENSNANTLVMILNATDADEPNNLNSKIAFKIIRQEPSDSPMFIINRNTGEIRTMNNFLDREQYGQYALAVRGSDRDGGADGMSAECECNIKILDVNDNIPYMEQSSYTIEIQENTLNSNLLEIRVIDLDEEFSANWMAVIFFISGNEGNWFEIEMNERTNVGILKVVKPLDYEAMQSLQLSIGVRNKAEFHHSIMSQYKLKASAISVTVLNVIEGPVFRPGSKTYVVTGNMGSNDKVGDFVATDLDTGRPSTTVRYVMGNNPADLLAVDSRTGKLTLKNKVTKEQYNMLGGKYQGTILSIDDNLQRTCTGTININIQSFGNDDRTNTEPNTKITTNTGRQESTSSTNYDTSTTSTDSSQVYSSEPGNGAKDLLSDNVHFGPAGIGLLIMGFLVLGLVPFLMICCDCGGAPRSAAGFEPVPECSDGAIHSWAVEGPQPEPRDITTVIPQIPPDNANIIECIDNSGVYTNEYGGREMQDLGGGERMTGFELTEGVKTSGMPEICQEYSGTLRRNSMRECREGGLNMNFMESYFCQKAYAYADEDEGRPSNDCLLIYDIEGVGSPAGSVGCCSFIGEDLDDSFLDTLGPKFKKLADISLGKESYPDLDPSWPPQSTEPVCLPQETEPVVSGHPPISPHFGTTTVISESTYPSGPGVLHPKPILDPLGYGNVTVTESYTTSDTLKPSVHVHDNRPASNVVVTERVVGPISGADLHGMLEMPDLRDGSNVIVTERVIAPSSSLPTSLTIHHPRESSNVVVTERVIQPTSGMIGSLSMHPELANAHNVIVTERVVSGAGVTGISGTTGISGGIGSSGLVGTSMGAGSGALSGAGISGGGIGLSSLGGTASIGHMRSSSDHHFNQTIGSASPSTARSRITKYSTVQYSK

SEQ ID NO: 43667 - protein, 1118 aa, Homo sapiens
MARSPGRAYALLLLLICFNVGSGLHLQVLSTRNENKLLPKHPHLVRQKRAWITAPVALREGEDLSKKNPIAKIHSDLAEERGLKITYKYTGKGITEPPFGIFVFNKDTGELNVTSILDREETPFFLLTGYALDARGNNVEKPLELRIKVLDINDNEPVFTQDVFVGSVEELSAAHTLVMKINATDADEPNTLNSKISYRIVSLEPAYPPVFYLNKDTGEIYTTSVTLDREEHSSYTLTVEARDGNGEVTDKPVKQAQVQIRILDVNDNIPVVENKVLEGMVEENQVNVEVTRIKVFDADEIGSDNWLANFTFASGNEGGYFHIETDAQTNEGIVTLIKEVDYEEMKNLDFSVIVANKAAFHKSIRSKYKPTPIPIKVKVKNVKEGIHFKSSVISIYVSESMDRSSKGQIIGNFQAFDEDTGLPAHARYVKLEDRDNWISVDSVTSEIKLAKLPDFESRYVQNGTYTVKIVAISEDYPRKTITGTVLINVEDINDNCPTLIEPVQTICHDAEYVNVTAEDLDGHPNSGPFSFSVIDKPPGMAEKWKIARQESTSVLLQQSEKKLGRSEIQFLISDNQGFSCPEKQVLTLTVCECLHGSGCREAQHDSYVGLGPAAIALMILAFLLLLLVPLLLLMCHCGKGAKGFTPIPGTIEMLHPWNNEGAPPEDKVVPSFLPVDQGGSLVGRNGVGGMAKEATMKGSSSASIVKGQHEMSEMDGRWEEHRSLLSGRATQFTGATGAIMTTETTKTARATGASRDMAGAQAAAVALNEEFLRNYFTDKAASYTEEDENHTAKDCLLVYSQEETESLNASIGCCSFIEGELDDRFLDDLGLKFKTLAEVCLGQKIDINKEIEQRQKPATETSMNTASHSLCEQTMVNSENTYSSGSSFPVPKSLQEANAEKVTQEIVTERSVSSRQAQKVATPLPDPMASRNVIATETSYVTGSTMPPTTVILGPSQPQSLIVTERVYAPASTLVDQPYANEGTVVVTERVIQPHGGGSNPLEGTQHLQDVPYVMVRERESFLAPSSGVQPTLAMPNIAVGQNVTVTERVLAPASTLQSSYQIPTENSMTARNTTVSGAGVPGPLPDFGLEESGHSNSTITTSSTRVTKHSTVQHSYS

SEQ ID NO: 43668 - protein, 1040 aa, Homo sapiens
MDWLFFRNICLLIILMVVMEVNSEFIVEVKEFDIENGTTKWQTVRRQKREWIKFAAACREGEDNSKRNPIAKIRSDCESNQKITYRISGVGIDRPPYGVFTINPRTGEINITSVVDREITPLFLIYCRALNSRGEDLERPLELRVKVMDINDNAPVFSQSVYTASIEENSDANTLVVKLCATDADEENHLNSKIAYKIVSQEPSGAPMFILNRYTGEVCTMSSFLDREQHSMYNLVVRGSDRDGAADGLSSECDCRIKVLDVNDNFPTLEKTSYSASIEENCLSSELIRLQAIDLDEEGTDNWLAQYLILSGNDGNWFDIQTDPQTNEGILKVVKMLDYEQAPNIQLSIGVKNQADFHYSVASQFQMHPTPVRIQVVDVREGPAFHPSTMAFSVREGIKGSSLLNYVLGTYTAIDLDTGNPATDVRYIIGHDAGSWLKIDSRTGEIQFSREFDKKSKYIINGIYTAEILAIDDGSGKTATGTICIEVPDINDYCPNIFPERRTICIDSPSVLISVNEHSYGSPFTFCVVDEPPGIADMWDVRSTNATSAILTAKQVLSPGFYEIPILVKDSYNRACELAQMVQLYACDCDDNHMCLDSGAAGIYTEDITGDTYGPVTEDQAGVSNVGLGPAGIGMMVLGILLLILAPLLLLLCCCKQRQPEGLGTRFAPVPEGGEGVMQSWRIEGAHPEDRDVSNICAPMTASNTQDRMDSSEIYTNTYAAGGTVEGGVSGVELNTGMGTAVGLMAAGAAGASGAARKRSSTMGTLRDYADADINMAFLDSYFSEKAYAYADEDEGRPANDCLLIYDHEGVGSPVGSIGCCSWIVDDLDESCMETLDPKFRTLAEICLNTEIEPFPSHQACIPISTDLPLLGPNYFVNESSGLTPSEVEFQEEMAASEPVVHGDIIVTETYGNADPCVQPTTIIFDPQLAPNVVVTEAVMAPVYDIQGNICVPAELADYNNVIYAERVLASPGVPDMSNSSTTEGCMGPVMSGNILVGPEIQVMQMMSPDLPIGQTVGSTSPMTSRHRVTRYSNIHYTQQ

SEQ ID NO: 43669 - protein, 1059 aa, Homo sapiens
MDWLFFRNICLLIILMVVMEVNSEFIVEVKEFDIENGTTKWQTVRRQKREWIKFAAACREGEDNSKRNPIAKIRSDCESNQKITYRISGVGIDRPPYGVFTINPRTGEINITSVVDREITPLFLIYCRALNSRGEDLERPLELRVKVMDINDNAPVFSQSVYTASIEENSDANTLVVKLCATDADEENHLNSKIAYKIVSQEPSGAPMFILNRYTGEVCTMSSFLDREQHSMYNLVVRGSDRDGAADGLSSECDCRIKVLDVNDNFPTLEKTSYSASIEENCLSSELIRLQAIDLDEEGTDNWLAQYLILSGNDGNWFDIQTDPQTNEGILKVVKMLDYEQAPNIQLSIGVKNQADFHYSVASQFQMHPTPVRIQVVDVREGPAFHPSTMAFSVREGIKGSSLLNYVLGTYTAIDLDTGNPATDVRYIIGHDAGSWLKIDSRTGEIQFSREFDKKSKYIINGIYTAEILAIDDGSGKTATGTICIEVPDINDYCPNIFPERRTICIDSPSVLISVNEHSYGSPFTFCVVDEPPGIADMWDVRSTNATSAILTAKQVLSPGFYEIPILVKDSYNRACELAQMVQLYACDCDDNHMCLDSGAAGIYTEDITGDTYGPVTEDQAGVSNVGLGPAGIGMMVLGILLLILAPLLLLLCCCKQRQPEGLGTRFAPVPEGGEGVMQSWRIEGAHPEDRLFSAYALPGGGGTADGGGSVLGRCALQATPALLNQHPPFSEIYTNTYAAGGTVEGGVSGVELNTGMGTAVGLMAAGAAGASGAARKRSSTMGTLRDYADADINMAFLDSYFSEKAYAYADEDEGRPANDCLLIYDHEGVGSPVGSIGCCSWIVDDLDESCMETLDPKFRTLAEICLNTEIEPFPSHQACIPISTDLPLLGPNYFVNESSGLTPSEVEFQEEMAASEPVVHGDIIVTETYGNADPCVQPTTIIFDPQLAPNVVVTEAVMAPVYDIQGNICVPAELADYNNVIYAERVLASPGVPDMSNSSTTEGCMGPVMSGNILVGPEIQVMQMMSPDLPIGQTVGSTSPMTSRHRVTRYSNIHYTQQ

SEQ ID NO: 43670 - protein, 165 aa, Homo sapiens
MASGVQVADEVCRIFYDMKVRKCSTPEEIKKRKKAVIFCLSADKKCIIVEEGKEILVGDVGVTITDPFKHFVGMLPEKDCRYALYDASFETKESRKEELMFFLWAPELAPLKSKMIYASSKDAIKKKFQGIKHECQANGPEDLNRACIAEKLGGSLIVAFEGCPV

SEQ ID NO: 43671 - protein, 148 aa, Homo sapiens
MKVRKCSTPEEIKKRKKAVIFCLSADKKCIIVEEGKEILVGDVGVTITDPFKHFVGMLPEKDCRYALYDASFETKESRKEELMFFLWAPELAPLKSKMIYASSKDAIKKKFQGIKHECQANGPEDLNRACIAEKLGGSLIVAFEGCPV

SEQ ID NO: 43672 - protein, 298 aa, Homo sapiens
MSDANLDSSKKNFLEGEVDDEESVILTLVPVKDDANMEQMEPSVSSTSDVKLEKPKKYNPGHLLQTNEQFTAPQKARCKIPALPLPTILPPINKVCRDTLRDWCQQLGLSTNGKKIEVYLRLHRHAYPEQRQDMPEMSQETRLQRCSRKRKAVTKRARLQRSYEMNERAEETNTVEVITSAPGAMLASWARIAARAVQPKALNSCSIPVSVEAFLMQASGVRWCVVHGRLLSADTKGWVRLQFHAGQAWVPTTHRRMISLFLLPACIFPSPGIEDNMLCPDCAKRNKKMMKRLMTVEK

SEQ ID NO: 43673 - protein, 159 aa, Homo sapiens
MDPSQFNPTYIPGSPQMLTEENSRDDSGASQISSETLIKNLSNLTINASSESVSPLSEALLRRESVGAAVLREIEDEWLYSRRGVRTLLSVQREKMARLRYMLLGGVRTHERRPTNKEPKGVKKESRPFKCPCSFCVSNGWDPSENARIGNQDTKPLQP

SEQ ID NO: 43674 - protein, 304 aa, Homo sapiens
MLRGSASSTSMEKAKGKEWTSTEKSREEDQQASNQPNSIALPGTSAKRTKEKMSIKGSKVLCPKKKAEHTDNPRPQKKIPIPPLPSKLPPVNLIHRDILRAWCQQLKLSSKGQKLDAYKRLCAFAYPNQKDFPSTAKEAKIRKSLQKKLKVEKGETSLQSSETHPPEVALPPVGEPPALENSTALLEGVNTVVVTTSAPEALLASWARISARARTPEAVESPQEASGVRWCVVHGKSLPADTDGWVHLQFHAGQAWVPEKQEGRVSALFLLPASNFPPPHLEDNMLCPKCVHRNKVLIKSLQWE

SEQ ID NO: 43675 - protein, 116 aa, Homo sapiens
MGTLPARRHIPPWVKVPEDLKDPEVFQVQTRLLKAIFGPDGSRIPYIEQVSKAMLELKALESSDLTEVVVYGSYLYKLRTKWMLQSMAEWHRQRQERGMLKLAEAMNALELGPWMK

SEQ ID NO: 43676 - protein, 367 aa, Homo sapiens
MSSTLAKIAEIEAEMARTQKNKATAHHLGLLKARLAKLRRELITPKGGGGGGPGEGFDVAKTGDARIGFVGFPSVGKSTLLSNLAGVYSEVAAYEFTTLTTVPGVIRYKGAKIQLLDLPGIIEGAKDGKGRGRQVIAVARTCNLILIVLDVLKPLGHKKIIENELEGFGIRLNSKPPNIGFKKKDKGGINLTATCPQSELDAETVKSILAEYKIHNADVTLRSDATADDLIDVVEGNRVYIPCIYVLNKIDQISIEELDIIYKVPHCVPISAHHRWNFDDLLEKIWDYLKLVRIYTKPKGQLPDYTSPVVLPYSRTTVEDFCMKIHKNLIKEFKYALVWGLSVKHNPQKVGKDHTLEDEDVIQIVKK

SEQ ID NO: 43677 - protein, 364 aa, Homo sapiens
MGILEKISEIEKEIARTQKNKATEYHLGLLKAKLAKYRAQLLEPSKSASSKGEGFDVMKSGDARVALIGFPSVGKSTFLSLMTSTASEAASYEFTTLTCIPGVIEYKGANIQLLDLPGIIEGAAQGKGRGRQVIAVARTADVIIMMLDATKGEVQRSLLEKELESVGIRLNKHKPNIYFKPKKGGGISFNSTVTLTQCSEKLVQLILHEYKIFNAEVLFREDCSPDEFIDVIVGNRVYMPCLYVYNKIDQISMEEVDRLARKPNSVVISCGMKLNLDYLLEMLWEYLALTCIYTKKRGQRPDFTDAIILRKGASVEHVCHRIHRSLASQFKYALVWGTSTKYSPQRVGLTHTMEHEDVIQIVKK

SEQ ID NO: 43678 - protein, 343 aa, Homo sapiens
MGILEKISEIEKEIARTQKNKATEYHLGLLKAKLAKYRAQLLEPSKSASSKGEGFDVMKSGDARVALIGFPSVGKSTFLSLMTSTASEAASYEFTTLTCIPGVIEYKGANIQLLDLPGIIEGAAQGKGRGRQVIAVARTADVIIMMLDATKGEVQRSLLEKELESVGIRLNKHKPNIYFKPKKGGGISFNSTVTLTQCSEKLVQLILHEYKIFNAEVLFREDCSPDEFIDVIVGNRVYMPCLYVYNKIDQISMEEVDRLARKPNSVVISCGMKLNLDYLLEMLWEYLALTCIYTKKRGQRPDFTDAIILRKGASVEHVCHRIHRSLASQFKAPAPSTVRSGWA

SEQ ID NO: 43679 - protein, 678 aa, Homo sapiens
MELRSYQWEVIMPALEGKNIIIWLPTGAGKTRAAAYVAKRHLETVDGAKVVVLVNRVHLVTQHGEEFRRMLDGRWTVTTLSGDMGPRAGFGHLARCHDLLICTAELLQMALTSPEEEEHVELTVFSLIVVDECHHTHKDTVYNVIMSQYLELKLQRAQPLPQVLGLTASPGTGGASKLDGAINHVLQLCANLDTWCIMSPQNCCPQLQEHSQQPCKQYNLCHRRSQDPFGDLLKKLMDQIHDHLEMPELSRKFGTQMYEQQVVKLSEAAALAGLQEQRVYALHLRRYNDALLIHDTVRAVDALAALQDFYHREHVTKTQILCAERRLLALFDDRKNELAHLATHGPENPKLEMLEKILQRQFSSSNSPRGIIFTRTRQSAHSLLLWLQQQQGLQTVDIRAQLLIGAGNSSQSTHMTQRDQQEVIQKFQDGTLNLLVATSVAEEGLDIPHCNVVVRYGLLTNEISMVQARGRARADQSVYAFVATEGSRELKRELINEALETLMEQAVAAVQKMDQAEYQAKIRDLQQAALTKRAAQAAQRENQRQQFPVEHVQLLCINCMVAVGHGSDLRKVEGTHHVNVNPNFSNYYNVSRDPVVINKVFKDWKPGGVISCRNCGEVWGLQMIYKSVKLPVLKVRSMLLETPQGRIQAKKWSRVPFSVPDFDFLQHCAENLSDLSLD

SEQ ID NO: 43680 - protein, 302 aa, Homo sapiens
MELRSYQWEVIMPALEGKNIIIWLPTGAGKTRAAAYVAKRHLETVDGAKVVVLVNRVHLVTQHGEEFRRMLDGRWTVTTLSGDMGPRAGFGHLARCHDLLICTAELLQMALTSPEEEEHVELTVFSLIVVDECHHTHKDTVYNVIMSQYLELKLQRAQPLPQVLGLTASPGTGGASKLDGAINHVLQLCANLDTWCIMSPQNCCPQLQEHSQQPCKQYNLCHRRSQDPFGDLLKKLMDQIHDHLEMPELSRKFGTQMYEQQVVKLSEAAALAGLQEQRVYALHLRRYNDALLIHDTVRAVDA

SEQ ID NO: 43681 - protein, 487 aa, Homo sapiens
MELRSYQWEVIMPALEGKNIIIWLPTGAGKTRAAAYVAKRHLETVDGAKVVVLVNRVHLVTQHGEEFRRMLDGRWTVTTLSGDMGPRAGFGHLARCHHTHKDTVYNVIMSQYLELKLQRAQPLPQVLGLTASPGTGGASKLDGAINHVLQLCANLDTWCIMSPQNCCPQLQEHSQQPCKQYNLCHRRSQDPFGDLLKKLMDQIHDHLEMPELSRKFGTQMYEQQVVKLSEAAALAGLQEQRVYALHLRRYNDALLIHDTVRAVDALAALQDFYHREHVTKTQILCAERRLLALFDDRKNELAHLATHGPENPKLEMLEKILQRQFSSSNSPRGIIFTRTRQSAHSLLLWLQQQQGLQTVDIRAQLLIGAGNSSQSTHMTQRDQQEVIQKFQDGTLNLLVATSVAEEGLDIPHCNVVVRYGLLTNEISMVQARGRARADQSVYAFVATEGSRELKRELINEALETLMEQAVAAVQKMDQAEYQAKELL

SEQ ID NO: 43682 - protein, 156 aa, Homo sapiens
MELRSYQWEVIMPALEGKNIIIWLPTGAGKTRAAAYVAKRHLETVDGAKVVVLVNRVHLVTQHGEEFRRMLDGRWTVTTLSGDMGPRAGFGHLARCHDLLICTAELLQMALTSPEEEEHVELTVFSLIVVDECHHTHKDTVYNVIMSQYLELKLQR

SEQ ID NO: 43683 - protein, 735 aa, Homo sapiens
MAKERGLISPSDFAQLQKYMEYSTKKVSDVLKLFEDGEMAKYVQGDAIGYEGFQQFLKIYLEVDNVPRHLSLALFQSFETGHCLNETNVTKDVVCLNDVSCYFSLLEGGRPEDKLEFTFKLYDTDRNGILDSSEVDKIILQMMRVAEYLDWDVSELRPILQEMMKEIDYDGSGSVSQAEWVRAGATTVPLLVLLGLEMTLKDDGQHMWRPKRFPRPVYCNLCESSIGLGKQGLSCNLCKYTVHDQCAMKALPCEVSTYAKSRKDIGVQSHVWVRGGCESGRCDRCQKKIRIYHSLTGLHCVWCHLEIHDDCLQAVGHECDCGLLRDHILPPSSIYPSVLASGPDRKNSKTSQKTMDDLNLSTSEALRIDPVPNTHPLLVFVNPKSGGKQGQRVLWKFQYILNPRQVFNLLKDGPEIGLRLFKDVPDSRILVCGGDGTVGWILETIDKANLPVLPPVAVLPLGTGNDLARCLRWGGGYEGQNLAKILKDLEMSKVVHMDRWSVEVIPQQTEEKSDPVPFQIINNYFSIGVDASIAHRFHIMREKYPEKFNSRMKNKLWYFEFATSESIFSTCKKLEESLTVEICGKPLDLSNLSLEGIAVLNIPSMHGGSNLWGDTRRPHGDIYGINQALGATAKVITDPDILKTCVPDLSDKRLEVVGLEGAIEMGQIYTKLKNAGRRLAKCSEITFHTTKTLPMQIDGEPWMQTPCTIKITHKNQMPMLMGPPPRSTNFFGFLS

SEQ ID NO: 43684 - protein, 735 aa, Homo sapiens; identical to SEQ ID NO: 43683

SEQ ID NO: 43685 - protein, 247 aa, Homo sapiens
MAKERGLISPSDFAQLQKYMEYSTKKVSDVLKLFEDGEMAKYVQGDAIGYEGFQQFLKIYLEVDNVPRHLSLALFQSFETGHCLNETNVTKDVVCLNDVSCYFSLLEGGRPEDKLEFTFKLYDTDRNGILDSSEVDKIILQMMRVAEYLDWDVSELRPILQEMMKEIDYDGSGSVSQAEWVRAGATTVPLLVLLGLEMTLKDDGQHMWRPKRFPRPVYCNLCESSIGLGKQGLSCNRPITCVGARRL

SEQ ID NO: 43686 - protein, 116 aa, Homo sapiens
MAKERGLISPSDFAQLQKYMEYSTKKVSDVLKLFEDGEMAKYVQGDAIGYEGFQQFLKIYLEVDNVPRHLSLALFQSFETGHCLNETNVTKDVVCLNDVSCYFSLLEGGRPEDKLE

SEQ ID NO: 43687 - protein, 58 aa, Homo sapiens
MAKERGLISPSDFAQLQKYMEYSTKKVSDVLKLFEDGEMAKYVQGDAIGYEGFQQFLK

SEQ ID NO: 43688 - protein, 21 aa, Homo sapiens
MAKERGLISPSDFAQLQKYME

SEQ ID NO: 43689 - protein, 147 aa, Homo sapiens
MAKERGLISPSDFAQLQKYMEYSTKKVSDVLKLFEDGEMAKYVQGDAIGYEGFQQFLKIYLEVDNVPRHLSLALFQSFETGHCLNETNVTKDVVCLNDVSCYFSLLEGGRPEDKLEFTFKLYDTDRNGILDSSEVDKIILQMMRVAE

SEQ ID NO: 43690 - protein, 735 aa, Homo sapiens; identical to SEQ ID NO: 43683

SEQ ID NO: 43691 - protein, 133 aa, Homo sapiens
MAKERGLISPSDFAQLQKYMEYSTKKVSDVLKLFEDGEMAKYVQGDAIGYEGFQQFLKIYLEVDNVPRHLSLALFQSFETGHCLNETNVTKDVVCLNDVSCYFSLLEGGRPEDKLEFTFKLYDTDRNGILDSS

SEQ ID NO: 43692 - protein, 107 aa, Homo sapiens
MAKERGLISPSDFAQLQKYMEYSTKKVSDVLKLFEDGEMAKYVQGDAIGYEGFQQFLKIYLEVDNVPRHLSLALFQSFETGHCLNETNVTKDVVCLNDVSCYFSLLE

SEQ ID NO: 43693 - protein, 44 aa, Homo sapiens
MAKERGLISPSDFAQLQKYMEYSTKKVSDVLKLFEDGEMAKYVQ

SEQ ID NO: 43694 - protein, 44 aa, Homo sapiens; identical to SEQ ID NO: 43693

SEQ ID NO: 43695 - protein, 133 aa, Homo sapiens; identical to SEQ ID NO: 43691

SEQ ID NO: 43696 - protein, 44 aa, Homo sapiens; identical to SEQ ID NO: 43693

SEQ ID NO: 43697 - protein, 804 aa, Homo sapiens
MTNQEKWAHLSPSEFSQLQKYAEYSTKKLKDVLEEFHGNGVLAKYNPEGKLVVLGNTIDFEGFKLFMKTFLEAELPDDFTAHLFMSFSNKFPHSSPMVKSKPALLSGGLRMNKGAITPPRTTSPANTCSPEVIHLKDIVCYLSLLERGRPEDKLEFMFRLYDTDGNGFLDSSELENIISQMMHVAEYLEWDVTELNPILHEMMEEIDYDHDGTVSLEEWIQGGMTTIPLLVLLGLENNVKDDGQHVWRLKHFNKPAYCNLCLNMLIGVGKQGLCCSFCKYTVHERCVARAPPSCIKTYVKSKRNTDVMHHYWVEGNCPTKCDKCHKTVKCYQGLTGLHCVWCQITLHNKCASHLKPECDCGPLKDHILPPTTICPVVLQTLPTSGVSVPEERQSTVKKEKSGSQQPNKVIDKNKMQRANSVTVDGQGLQVTPVPGTHPLLVFVNPKSGGKQGERIYRKFQYLLNPRQVYSLSGNGPMPGLNFFRDVPDFRVLACGGDGTVGWVLDCIEKANVGKHPPVAILPLGTGNDLARCLRWGGGYEGENLMKILKDIENSTEIMLDRWKFEVIPNDKDEKGDPVPYSIINNYFSIGVDASIAHRFHIMREKHPEKFNSRMKNKFWYFEFGTSETFSATCKKLHESVEIECDGVQIDLINISLEGIAILNIPSMHGGSNLWGESKKRRSHRRIEKKGSDKRTTVTDAKELKFASQDLSDQLLEVVGLEGAMEMGQIYTGLKSAGRRLAQCSCVVIRTSKSLPMQIDGEPWMQTPCTIKITHKNQAPMLMGPPPKTGLFCSLVKRTRNRSKE

SEQ ID NO: 43698 - protein, 804 aa, Homo sapiens [sequence omitted]

SEQ ID NO: 43699 - protein, 803 aa, Homo sapiens
MTNQEKWAHLSPSEFSQLQKYAEYSTKKLKDVLEEFHGNGVLAKYNPEGKQDILNQTIDFEGFKLFMKTFLEAELPDDFTAHLFMSFSNKFPHSSPMVKSKPALLSGGLRMNKGAITPPRTTSPANTCSPEVIHLKDIVCYLSLLERGRPEDKLEFMFRLYDTDGNGFLDSSELENIISQMMHVAEYLEWDVTELNPILHEMMEEIDYDHDGTVSLEEWIQGGMTTIPLLVLLGLENNVKDDGQHVWRLKHFNKPAYCNLCLNMLIGVGKQGLCCSFCKYTVHERCVARAPPSCIKTYVKSKRNTDVMHHYWVEGNCPTKCDKCHKTVKCYQGLTGLHCVWCQITLHNKCASHLKPECDCGPLKDHILPPTTICPVVLTLPTSGVSVPEERQSTVKKEKSGSQQPNKVIDKNKMQRANSVTVDGQGLQVTPVPGTHPLLVFVNPKSGGKQGERIYRKFQYLLNPRQVYSLSGNGPMPGLNFFRDVPDFRVLACGGDGTVGWVLDCIEKANVGKHPPVAILPLGTGNDLARCLRWGGGYEGENLMKILKDIENSTEIMLDRWKFEVIPNDKDEKGDPVPYSIINNYFSIGVDASIAHRFHIMREKHPEKFNSRMKNKFWYFEFGTSETFSATCKKLHESVEIECDGVQIDLINISLEGIAILNIPSMHGGSNLWGESKKRRSHRRIEKKGSDKRTTVTDAKELKFASQDLSDQLLEVVGLEGAMEMGQIYTGLKSAGRRLAQCSCVVIRTSKSLPMQIDGEPWMQTPCTIKITHKNQAPMLMGPPPKTGLFCSLVKRTRNRSKE

SEQ ID NO: 43700 - protein, 804 aa, Homo sapiens [sequence omitted]

SEQ ID NO: 43701 - protein, 773 aa, Homo sapiens
MTNQEKWAHLSPSEFSQLQKYAEYSTKKLKDVLEEFHGNGVLAKYNPEGKQDILNQTIDFEGFKLFMKTFLEAELPDDFTAHLFMSFSNKFPHSSPMVKSKPALLSGGLRMNKGAITPPRTTSPANTCSPEVIHLKDIVCYLSLLERGRPEDKLEFMFRLYDTDGNGFLDSSELENIISQMMHVAEYLEWDVTELNPILHEMMEEIDYDHDGTVSLEEWIQGGMTTIPLLVLLGLENNVKDDGQHVWRLKHFNKPAYCNLCLNMLIGVGKQGLCCSFCKYTVHERCVARAPPSCIKTYVKSKRNTDVMHHYWVEGNCPTKCDKCHKTVKCYQGLTGLHCVWCQITLHNKCASHLKPECDCGPLKDHILPPTTICPVVLQTLPTSGVSVPEERQSTVKKEKSGSQQPNKVIDKNKMQRANSVTVDGQGLQVTPVPGTHPLLVFVNPKSGGKQGERIYRKFQYLLNPRQVYSLSGNGPMPGLNFFRDVPDFRVLACGGDGTVGWVLDCIEKANVGKHPPVAILPLGTGNDLARCLRWGGGYEGENLMKILKDIENSTEIMLDRWKFEVIPNDKDEKGDPVPYSIINNYFSIGVDASIAHRFHIMREKHPEKFNSRMKNKFWYFEFGTSETFSATCKKLHESVEIECDGVQIDLINISLEGIAILNIPSMHGGSNLWGESKKRRSHRRIEKKGSDKRTTVTDAKELKFASQDLSDQLLEVVGLEGAMEMGQIYTGLKSAGRRLAQCSCVVIRTSKSLPMQIDGEPWMQTPCTVSTE

SEQ ID NO: 43702 - protein, 796 aa, Homo sapiens
MTNQEKWAHLSPSEFSQLQKYAEYSTKKLKDVLEEFHGNGVLAKYNPEGTIDFEGFKLFMKTFLEAELPDDFTAHLFMSFSNKFPHSSPMVKSKPALLSGGLRMNKGAITPPRTTSPANTCSPEVIHLKDIVCYLSLLERGRPEDKLEFMFRLYDTDGNGFLDSSELENIISQMMHVAEYLEWDVTELNPILHEMMEEIDYDHDGTVSLEEWIQGGMTTIPLLVLLGLENNVKDDGQHVWRLKHFNKPAYCNLCLNMLIGVGKQGLCCSFCKYTVHERCVARAPPSCIKTYVKSKRNTDVMHHYWVEGNCPTKCDKCHKTVKCYQGLTGLHCVWCQITLHNKCASHLKPECDCGPLKDHILPPTTICPVVLTLPTSGVSVPEERQSTVKKEKSGSQQPNKVIDKNKMQRANSVTVDGQGLQVTPVPGTHPLLVFVNPKSGGKQGERIYRKFQYLLNPRQVYSLSGNGPMPGLNFFRDVPDFRVLACGGDGTVGWVLDCIEKANVGKHPPVAILPLGTGNDLARCLRWGGGYEGENLMKILKDIENSTEIMLDRWKFEVIPNDKDEKGDPVPYSIINNYFSIGVDASIAHRFHIMREKHPEKFNSRMKNKFWYFEFGTSETFSATCKKLHESVEIECDGVQIDLINISLEGIAILNIPSMHGGSNLWGESKKRRSHRRIEKKGSDKRTTVTDAKELKFASQDLSDQLLEVVGLEGAMEMGQIYTGLKSAGRRLAQCSCVVIRTSKSLPMQIDGEPWMQTPCTIKITHKNQAPMLMGPPPKTGLFCSLVKRTRNRSKE

SEQ ID NO: 43703 - protein, 75 aa, Homo sapiens
MTNQEKWAHLSPSEFSQLQKYAEYSTKKLKDVLEEFHGNGVLAKYNPEGKQDILNQTIDFEGFKLFMKTFLEAEL

SEQ ID NO: 43704 - protein, 785 aa, Homo sapiens
MTNQEKWAHLSPSEFSQLQKYAEYSTKKLKDVLEEFHGNGVLAKYNPEGTIDFEGFKLFMKTFLEAELPDDFTAHLFMSFSNKFPHSSPMVKSKPALLSGGLRMNKGAITPPRTTSPANTCSPEVIHLKDIVCYLSLLERGRPEDKLEFMFRLYDTDGNGFLDSSELENIISQMMHVAEYLEWDVTELNPILHEMMEEIDYDHDGTVSLEEWIQGGMTTIPLLVLLGLENNVKDDGQHVWRLKHFNKPAYCNLCLNMLIGVGKQGLCCSFCKYTVHERCVARAPPSCIKTYVKSKRNTDVMHHYWVEGNCPTKCDKCHKTVKCYQGLTGLHCVWCQITLHNKCASHLKPECDCGPLKDHILPPTTICPVVLERQSTVKKEKSGSQQPNKVIDKNKMQRANSVTVDGQGLQVTPVPGTHPLLVFVNPKSGGKQGERIYRKFQYLLNPRQVYSLSGNGPMPGLNFFRDVPDFRVLACGGDGTVGWVLDCIEKANVGKHPPVAILPLGTGNDLARCLRWGGGYEGENLMKILKDIENSTEIMLDRWKFEVIPNDKDEKGDPVPYSIINNYFSIGVDASIAHRFHIMREKHPEKFNSRMKNKFWYFEFGTSETFSATCKKLHESVEIECDGVQIDLINISLEGIAILNIPSMHGGSNLWGESKKRRSHRRIEKKGSDKRTTVTDAKELKFASQDLSDQLLEVVGLEGAMEMGQIYTGLKSAGRRLAQCSCVVIRTSKSLPMQIDGEPWMQTPCTIKITHKNQAPMLMGPPPKTGLFCSLVKRTRNRSKE

SEQ ID NO: 43705 - protein, 1214 aa, Homo sapiens
MAAAAGAPPPGPPQPPPPPPPEESSDSEPEAEPGSPQKLIRKVSTSGQIRQKTIIKEGMLTKQNNSFQRSKRRYFKLRGRTLYYAKTAKSIIFDEVDLTDASVAESSTKNVNNSFTVITPCRKLILCADNRKEMEDWIAALKTVQNREHFEPTQYSMDHFSGMHNWYACSHARPTYCNVCREALSGVTSHGLSCEVCKFKAHKRCAVRATNNCKWTTLASIGKDIIEDADGIAMPHQWLEGNLPVSAKCTVCDKTCGSVLRLQDWRCLWCKAMVHTSCKESLLTKCPLGLCKVSVIPPTALNSIDSDGFWKASCPPSCTSPLLVFVNSKSGDNQGVKFLRRFKQLLNPAQVFDLMNGGPHLGLRLFQKFDTFRILVCGGDGSVGWVLSEIDSLNLHKQCQLGVLPLGTGNDLARVLGWGSACDDDTQLPQILEKLERASTKMLDRWSVMAYEAKLPRQASSSTVTEDFSEDSEVQQILFYEDSVAAHLSKILTSDQHSVVISSAKVLCETVKDFVARVGKAYEKTTESSEESEVMAKKCSVLKEKLDSLLKTLDDESQASSSLPNPPPTIAEEAEDGDGSGSICGSTGDRLVASACPARPQIFRPREQLMLRANSLKKAIRQIIEHTEKAVDEQNAQTQEQEGFVLGLSESEEKMDHRVCPPLSHSESFGVPKGRSQRKVSKSPCEKLISKGSLSLGSSASLPPQPGSRDGLPALNTKILYPNVRAGMSGSLPGGSVISRLLINADPFNSEPETLEYYTEKCVMNNYFGIGLDAKISLDFNNKRDEHPEKCRSRTKNMMWYGVLGTKELLHRTYKNLEQKVLLECDGRPIPLPSLQGIAVLNIPSYAGGTNFWGGTKEDDTFAAPSFDDKILEVVAVFGSMQMAVSRVIRLQHHRIAQCRTVKISILGDEGVPVQVDGEAWVQPPGYIRIVHKNRAQTLTRDRAFESTLKSWEDKQKCELPRPPSCSLHPEMLSEEEATQMDQFGQAAGVLIHSIREIAQSHRDMEQELAHAVNASSKSMDRVYGKPRTTEGLNCSFVLEMVNNFRALRSETELLLSGKMALQLDPPQKEQLGSALAEMDRQLRRLADTPWLCQSAEPGDEESVMLDLAKRSRSGKFRLVTKFKKEKNNKNKEAHSSLGAPVHLWGTEEVAAWLEHLSLCEYKDIFTRHDIRGSELLHLERRDLKDLGVTKVGHMKRILCGIKELSRSAPAVEA

SEQ ID NO: 43706 - protein, 1170 aa, Homo sapiens
MNMFLYFQTIIKEGMLTKQNNSFQRSKRRYFKLRGRTLYYAKTAKSIIFDEVDLTDASVAESSTKNVNNSFTVITPCRKLILCADNRKEMEDWIAALKTVQNREHFEPTQYSMDHFSGMHNWYACSHARPTYCNVCREALSGVTSHGLSCEVCKFKAHKRCAVRATNNCKWTTLASIGKDIIEDADGIAMPHQWLEGNLPVSAKCTVCDKTCGSVLRLQDWRCLWCKAMVHTSCKESLLTKCPLGLCKVSVIPPTALNSIDSDGFWKASCPPSCTSPLLVFVNSKSGDNQGVKFLRRFKQLLNPAQVFDLMNGGPHLGLRLFQKFDTFRILVCGGDGSVGWVLSEIDSLNLHKQCQLGVLPLGTGNDLARVLGWGSACDDDTQLPQILEKLERASTKMLDRWSVMAYEAKLPRQASSSTVTEDFSEDSEVQQILFYEDSVAAHLSKILTSDQHSVVISSAKVLCETVKDFVARVGKAYEKTTESSEESEVMAKKCSVLKEKLDSLLKTLDDESQASSSLPNPPPTIAEEAEDGDGSGSICGSTGDRLVASACPARPQIFRPREQLMLRANSLKKAIRQIIEHTEKAVDEQNAQTQEQEGFVLGLSESEEKMDHRVCPPLSHSESFGVPKGRSQRKVSKSPCEKLISKGSLSLGSSASLPPQPGSRDGLPALNTKILYPNVRAGMSGSLPGGSVISRLLINADPFNSEPETLEYYTEKCVMNNYFGIGLDAKISLDFNNKRDEHPEKCRSRTKNMMWYGVLGTKELLHRTYKNLEQKVLLECDGRPIPLPSLQGIAVLNIPSYAGGTNFWGGTKEDDTFAAPSFDDKILEVVAVFGSMQMAVSRVIRLQHHRIAQCRTVKISILGDEGVPVQVDGEAWVQPPGYIRIVHKNRAQTLTRDRAFESTLKSWEDKQKCELPRPPSCSLHPEMLSEEEATQMDQFGQAAGVLIHSIREIAQSHRDMEQELAHAVNASSKSMDRVYGKPRTTEGLNCSFVLEMVNNFRALRSETELLLSGKMALQLDPPQKEQLGSALAEMDRQLRRLADTPWLCQSAEPGDEESVMLDLAKRSRSGKFRLVTKFKKEKNNKNKEAHSSLGAPVHLWGTEEVAAWLEHLSLCEYKDIFTRHDIRGSELLHLERRDLKDLGVTKVGHMKRILCGIKELSRSAPAVEA

SEQ ID NO: 43707 - protein, 567 aa, Homo sapiens
MEAERRPAPGSPSEGLFADGHLILWTLCSVLLPVFITFWCSLQRSRRQLHRRDIFRKSKHGWRDTDLFSQPTYCCVCAQHILQGAFCDCCGLRVDEGCLRKADKRFQCKEIMLKNDTKVLDAMPHHWIRGNVPLCSYCMVCKQQCGCQPKLCDYRCIWCQKTVHDECMKNSLKNEKCDFGEFKNLIIPPSYLTSINQMRKDKKTDYEVLASKLGKQWTPLIILANSRSGTNMGEGLLGEFRILLNPVQVFDVTKTPPIKALQLCTLLPYYSARVLVCGGDGTVGWVLDAVDDMKIKGQEKYIPQVAVLPLGTGNDLSNTLGWGTGYAGEIPVAQVLRNVMEADGIKLDRWKVQVTNKGYYNLRKPKEFTMNNYFSVGPDALMALNFHAHREKAPSLFSSRILNKAVYLFYGTKDCLVQECKDLNKKVELELDGERVALPSLEGIIVLNIGYWGGGCRLWEGMGDETYPLARHDDGLLEVVGVYGSFHCAQIQVKLANPFRIGQAHTVRLILKCSMMPMQVDGEPWAQGPCTVTITHKTHAMMLYFSGEQTDDDISSTSDQEDIKATE

SEQ ID NO: 43708 - protein, 791 aa, Homo sapiens
MGEERWVSLTPEEFDQLQKYSEYSSKKIKDALTEFNEGGSLKQYDPHEPISYDVFKLFMRAYLEVDLPQPLSTHLFLAFSQKPRHETSDHPTEGASNSEANSADTNIQNADNATKADEACAPDTESNMAEKQAPAEDQVAATPLEPPVPRSSSSESPVVYLKDVVCYLSLLETGRPQDKLEFMFRLYDSDENGLLDQAEMDCIVNQMLHIAQYLEWDPTELRPILKEMLQGMDYDRDGFVSLQEWVHGGMTTIPLLVLLGMDDSGSKGDGRHAWTMKHFKKPTYCNFCHIMLMGVRKQGLCCTYCKYTVHERCVSRNIPGCVKTYSKAKRSGEVMQHAWVEGNSSVKCDRCHKSIKCYQSVTARHCVWCRMTFHRKCELSTLCDGGELRDHILLPTSICPITRDRPGEKSDGCVSAKGELVMQYKIIPTPGTHPLLVLVNPKSGGRQGERILRKFHYLLNPKQVFNLDNGGPTPGLNFFRDTPDFRVLACGGDGTVGWILDCIDKANFAKHPPVAVLPLGTGNDLARCLRWGGGYEGGSLTKILKDIEQSPLVMLDRWHLEVIPREEVENGDQVPYSIMNNYFSIGVDASIAHRFHVMREKHPEKFNSRMKNKLWYFEFGTSETFAATCKKLHDHIELECDGVGVDLSNIFLEGIAILNIPSMYGGTNLWGENKKNRAVIRESRKGVTDPKELKFCVQDLSDQLLEVVGLEGAMEMGQIYTGLKSAGRRLAQCASVTIRTNKLLPMQVDGEPWMQPCCTIKITHKNQAPMMMGPPQKSSFFSLRRKSRSKD

SEQ ID NO: 43709 - protein, 766 aa, Homo sapiens
MGEERWVSLTPEEFDQLQKYSEYSSKKIKDALTEFNEGGSLKQYDPHEPISYDVFKLFMRAYLEVDLPQPLSTHLFLAFSQKPRHETSDHPTEGASNSEANSADTNIQNADNATKADEACAPDTESNMAEKQAPAEDQVAATPLEPPVPRSSSSESPVVYLKDVVCYLSLLETGRPQDKLEFMFRLYDSDENGLLDQAEMDCIVNQMLHIAQYLEWDPTELRPILKEMLQGMDYDRDGFVSLQEWVHGGMTTIPLLVLLGMDDSGSKGDGRHAWTMKHFKKPTYCNFCHIMLMGVRKQGLCCTYCKYTVHERCVSRNIPGCVKTYSKAKRSGEVMQHAWVEGNSSVKCDRCHKSIKCYQSVTARHCVWCRMTFHRKCELSTLCDGGELRDHILLPTSICPITRDRPGEKSDGCVSAKGELVMQYKIIPTPGTHPLLVLVNPKSGGRQGERLNFFRDTPDFRVLACGGDGTVGWILDCIDKANFAKHPPVAVLPLGTGNDLARCLRWGGGYEGGSLTKILKDIEQSPLVMLDRWHLEVIPREEVENGDQVPYSIMNNYFSIGVDASIAHRFHVMREKHPEKFNSRMKNKLWYFEFGTSETFAATCKKLHDHIELECDGVGVDLSNIFLEGIAILNIPSMYGGTNLWGENKKNRAVIRESRKGVTDPKELKFCVQDLSDQLLEVVGLEGAMEMGQIYTGLKSAGRRLAQCASVTIRTNKLLPMQVDGEPWMQPCCTIKITHKNQAPMMMGPPQKSSFFSLRRKSRSKD

SEQ ID NO: 43710 - protein, 752 aa, Homo sapiens
MGEERWVSLTPEEFDQLQKYSEYSSKKIKDALTEFNEGGSLKQYDPHEPISYDVFKLFMRAYLEVDLPQPLSTHLFLAFSQKPRHETSDHPTEGASNSEANSADTNIQNADNATKADEACAPDTESNMAEKQAPAEDQVAATPLEPPVPRSSSSESPVVYLKDVVCYLSLLETGRPQDKLEFMFRLYDSDENGLLDQAEMDCIVNQMLHIAQYLEWDPTELRPILKEMLQGMDYDRDGFVSLQEWVHGGMTTIPLLVLLGMDDSGSKGDGRHAWTMKHFKKPTYCNFCHIMLMGVRKQGLCCTYCKYTVHERCVSRNIPGCVKTYSKAKRSGEFHRKCELSTLCDGGELRDHILLPTSICPITRDRPGEKSDGCVSAKGELVMQYKIIPTPGTHPLLVLVNPKSGGRQGERILRKFHYLLNPKQVFNLDNGGPTPGLNFFRDTPDFRVLACGGDGTVGWILDCIDKANFAKHPPVAVLPLGTGNDLARCLRWGGGYEGGSLTKILKDIEQSPLVMLDRWHLEVIPREEVENGDQVPYSIMNNYFSIGVDASIAHRFHVMREKHPEKFNSRMKNKLWYFEFGTSETFAATCKKLHDHIELECDGVGVDLSNIFLEGIAILNIPSMYGGTNLWGENKKNRAVIRESRKGVTDPKELKFCVQDLSDQLLEVVGLEGAMEMGQIYTGLKSAGRRLAQCASVTIRTNKLLPMQVDGEPWMQPCCTIKITHKNQAPMMMGPPQKSSFFSLRRKSRSKD

SEQ ID NO: 43711 - protein, 605 aa, Homo sapiens
SLKMGEERWVSLTPEEFDQLQKYSEYSSKKIKDALTEFNEGGSLKQYDPHEPISYDVFKLFMRAYLEVDLPQPLSTHLFLAFSQKPRHETSDHPTEGASNSEANSADTNIQNADNATKADEACAPDTESNMAEKQAPAEDQVAATPLEPPVPRSSSSESPVVYLKDVVCYLSLLETGRPQDKLEFMFRLYDSDENGLLDQAEMDCIVNQMLHIAQYLEWDPTELRPILKEMLQGMDYDRDGFVSLQEWVHGGMTTIPLLVLLGMDDSGSKGDGRHAWTMKHFKKPTYCNFCHIMLMGVRKQGLCCTYCKYTVHERCVSRNIPGCVKTYSKAKRSGEFHRKCELSTLCDGGELRDHILLPTSICPITRDRPGEKSDGCVSAKGELVMQYKIIPTPGTHPLLVLVNPKSGGRQGERILRKFHYLLNPKQVFNLDNGGPTPGLNFFRDTPDFRVLACGGDGTVGWILDCIDKANFAKHPPVAVLPLGTGNDLARCLRWGGGYEGGSLTKILKDIEQSPLVMLDRWHLEVIPREEVENGDQVPYSIMNNYFSIGVDASIAHRFHVMREKHPEKFNSRMKNKLWYFEFGTSETFAATCKKLHDHIELEWC

SEQ ID NO: 43712 - protein, 732 aa, Homo sapiens
MGEERWVSLTPEEFDQLQKYSEYSSKKIKDALTEFNEGGSLKQYDPHEPISYDVFKLFMRAYLEVDLPQPLSTHLFLAFSQKPRHETSDHPTEGASNSEANSADTNIQNADNATKADEACAPDTESNMAEKQAPAEDQVAATPLEPPVPRSSSSESPVVYLKDVVCYLSLLETGRPQDKLEFMFRLYDSDENGLLDQAEMDCIVNQMLHIAQYLEWDPTELRPILKEMLQGMDYDRDGFVSLQEWVHGGMTTIPLLVLLGMDDSGSKGDGRHAWTMKHFKKPTYCNFCHIMLMGVRKQGLCCTYCKYTVHERCVSRNIPGCVKTYSKAKRSGEFHRKCELSTLCDGGELRDHILLPTSICPITRYKIIPTPGTHPLLVLVNPKSGGRQGERILRKFHYLLNPKQVFNLDNGGPTPGLNFFRDTPDFRVLACGGDGTVGWILDCIDKANFAKHPPVAVLPLGTGNDLARCLRWGGGYEGGSLTKILKDIEQSPLVMLDRWHLEVIPREEVENGDQVPYSIMNNYFSIGVDASIAHRFHVMREKHPEKFNSRMKNKLWYFEFGTSETFAATCKKLHDHIELECDGVGVDLSNIFLEGIAILNIPSMYGGTNLWGENKKNRAVIRESRKGVTDPKELKFCVQDLSDQLLEVVGLEGAMEMGQIYTGLKSAGRRLAQCASVTIRTNKLLPMQVDGEPWMQPCCTIKITHKNQAPMMMGPPQKSSFFSLRRKSRSKD

SEQ ID NO: 43713 - protein, 1065 aa, Homo sapiens
MDAAGRGCHLLPLPAARGPARAPAAAAAAAASPPGPCSGAACAPSAAAGAGAMNPSSSAGEEKGATGGSSSSGSGAGSCCLGAEGGADPRGAGSAAAAGAAALDEPAAAGQKEKDEALEEKLRNLTFRKQVSYRKAISRAGLQHLAPAHPLSLPVANGPAKEPRATLDWSENAVNGEHLWLETNVSGDLCYLGEENCQVRFAKSALRRKCAVCKIVVHTACIEQLEKINFRCKPTFREGGSRSPRENFVRHHWVHRRRQEGKCKQCGKGFQQKFSFHSKEIVAISCSWCKQAFHNKVTCFMLHHIEEPCSLGAHAAVIVPPTWIIKVKKPQNSLKASNRKKKRTSFKRKASKRGMEQENKGRPFVIKPISSPLMKPLLVFVNPKSGGNQGTKVLQMFMWYLNPRQVFDLSQEGPKDALELYRKVPNLRILACGGDGTVGWILSILDELQLSPQPPVGVLPLGTGNDLARTLNWGGGYTDEPVSKILCQVEDGTVVQLDRWNLHVERNPDLPPEELEDGVCKLPLNVFNNYFSLGFDAHVTLEFHESREANPEKFNSRFRNKMFYAGAAFSDFLQRSSRDLSKHVKVVCDGTDLTPKIQELKFQCIVFLNIPRYCAGTMPWGNPGDHHDFEPQRHDDGYIEVIGFTMASLAALQVGGHGERLHQCREVMLLTYKSIPMQVDGEPCRLAPAMIRISLRNQANMVQKSKRRTSMPLLNDPQSVPDRLRIRVNKISLQDYEGFHYDKEKLREASISDWLRTIAGELVQSFGAIPLGILVVRGDCDLETCRMYIDRLQEDLQSVSSGSQRVHYQDHETSFPRALSAQRLSPRWCFLDDRSQEHLHFVMEISQDEIFILDPDMVVSQPAGTPPGMPDLVVEQASGISDWWNPALRKRMLSDSGLGMIAPYYEDSDLKDLSHSRVLQSPVSSEDHAILQAVIAGDLMKLIESYKNGGSLLIQGPDHCSLLHYAAKTGNGEIVKYILDHGPSELLDMADSETGETALHKAACQRNRAVCQLLVDAGASLRKTDSKGKTPQERAQQAGDPDLAAYLESRQNYKVIGHEDLETAV

SEQ ID NO: 43714 - protein, 1068 aa, Homo sapiens
MDAAGRGCHLLPLPAARGPARAPAAAAAAAASPPGPCSGAACAPSAAAGAGAMNPSSSAGEEKGATGGSSSSGSGAGSCCLGAEGGADPRGAGSAAAAGAAALDEPAAAGQKEKDEALEEKLRNLTFRKQVSYRKAISRAGLQHLAPAHPLSLPVANGPAKEPRATLDWSENAVNGEHLWLETNVSGDLCYLGEENCQVRFAKSALRRKCAVCKIVVHTACIEQLEKINFRCKPTFREGGSRSPRENFVRHHWVHRRRQEGKCKQCGKGFQQKFSFHSKEIVAISCSWCKQAFHNKVTCFMLHHIEEPCSLGAHAAVIVPPTWIIKVKKPQNSLKASNRKKKRTSFKRKASKRGMEQENKGRPFVIKPISSPLMKPLLVFVNPKSGGNQGTKVLQMFMWYLNPRQVFDLSQEGPKDALELYRKVPNLRILACGGDGTVGWILSILDELQLSPQPPVGVLPLGTGNDLARTLNWGGGYTDEPVSKILCQVEDGTVVQLDRWNLHVERNPDLPPEELEDGVCKLPLNVFNNYFSLGFDAHVTLEFHESREANPEKFNSRFRNKMFYAGAAFSDFLQRSSRDLSKHVKVVCDGTDLTPKIQELKFQCIVFLNIPRYCAGTMPWGNPGDHHDFEPQRHDDGYIEVIGFTMASLAALQVGGHGERLHQCREVMLLTYKSIPMQVDGEPCRLAPAMIRISLRNQANMVQKSKRRTSMPLLNDIHQVQTADLRRVSAPPGSFTIPQSVPDRLRIRVNKISLQDYEGFHYDKEKLREASIPLGILVVRGDCDLETCRMYIDRLQEDLQSVSSGSQRVHYQDHETSFPRALSAQRLSPRWCFLDDRSQEHLHFVMEISQDEIFILDPDMVVSQPAGTPPGMPDLVVEQASGISDWWNPALRKRMLSDSGLGMIAPYYEDSDLKDLSHSRVLQSPVSSEDHAILQAVIAGDLMKLIESYKNGGSLLIQGPDHCSLLHYAAKTGNGEIVKYILDHGPSELLDMADSETGETALHKAACQRNRAVCQLLVDAGASLRKTDSKGKTPQERAQQAGDPDLAAYLESRQNYKVIGHEDLETAV

SEQ ID NO: 43715 - protein, 982 aa, Homo sapiens
MNPSSSAGEEKGATGGSSSSGSGAGSCCLGAEGGADPRGAGSAAAAGAAALDEPAAAGQKEKDEALEEKLRNLTFRKQVSYRKAISRAGLQHLAPAHPLSLPVANGPAKEPRATLDWSENAVNGEHLWLETNVSGDLCYLGEENCQVRFAKSALRRKCAVCKIVVHTACIEQLEKINFRCKPTFREGGSRSPRENFVRHHWVHRRRQEGKCKQCGKGFQQKFSFHSKEIVAISCSWCKQAFHNKVTCFMLHHIEEPCSLGAHAAVIVPPTWIIKVKKPQNSLKASNRKKKRTSFKRKASKRGMEQENKGRPFVIKPISSPLMKPLLVFVNPKSGGNQGTKVLQMFMWYLNPRQVFDLSQEGPKDALELYRKVPNLRILACGGDGTVGWILSILDELQLSPQPPVGVLPLGTGNDLARTLNWGGGYTDEPVSKILCQVEDGTVVQLDRWNLHVERNPDLPPEELEDGVCKLPLNVFNNYFSLGFDAHVTLEFHESREANPEKFNSRFRNKMFYAGAAFSDFLQRSSRDLSKHVKVVCDGTDLTPKIQELKFQCIVFLNIPRYCAGTMPWGNPGDHHDFEPQRHDDGYIEVIGFTMASLAALQVGGHGERLHQCREVMLLTYKSIPMQVDGEPCRLAPAMIRISLRNQANMVQKSKRRTSMPLLNDPQSVPDRLRIRVNKISLQDYEGFHYDKEKLREASISDWLRTIAGELVQSFGAIPLGILVVRGDCDLETCRMYIDRLQEDLQSVSSGSQRVHYQDHETSFPRALSAQRLSPRWCFLDATSADRFYRIDRSQEHLHFVMEISQDEIFILDPDMVVSQPAGTPPGMPDLVVEQASGSPVSSEDHAILQAVIAGDLMKLIESYKNGGSLLIQGPDHCSLLHYAAKTGNGEIVKYILDHGPSELLDMADSETGETALHKAACQRNRAVCQLLVDAGASLRKTDSKGKTPQERAQQAGDPDLAAYLESRQNYKVIGHEDLETAV

SEQ ID NO: 43716 - protein, 942 aa, Homo sapiens
MAAAAEPGARAWLGGGSPRPGSPACSPVLGSGGRARPGPGPGPGPERAGVRAPGPAAAPGHSFRKVTLTKPTFCHLCSDFIWGLAGFLCDVCNFMSHEKCLKHVRIPCTSVAPSLVRVPVAHCFGPRGLHKRKFCAVCRKVLEAPALHCEVCELHLHPDCVPFACSDCRQCHQDGHQDHDTHHHHWREGNLPSGARCEVCRKTCGSSDVLAGVRCEWCGVQAHSLCSAALAPECGFGRLRSLVLPPACVRLLPGGFSKTQSFRIVEAAEPGEGGDGADGSAAVGPGRETQATPESGKQTLKIFDGDDAVRRSQFRLVTVSRLAGAEEVLEAALRAHHIPEDPGHLELCRLPPSSQACDAWAGGKAGSAVISEEGRSPGSGEATPEAWVIRALPRAQEVLKIYPGWLKVGVAYVSVRVTPKSTARSVVLEVLPLLGRQAESPESFQLVEVAMGCRHVQRTMLMDEQPLLDRLQDIRQMSVRQVSQTRFYVAESRDVAPHVSLFVGGLPPGLSPEEYSSLLHEAGATKATVVSVSHIYSSQGAVVLDVACFAEAERLYMLLKDMAVRGRLLTALVLPDLLHAKLPPDSCPLLVFVNPKSGGLKGRDLLCSFRKLLNPHQVFDLTNGGPLPGLHLFSQVPCFRVLVCGGDGTVGWVLGALEETRYRLACPEPSVAILPLGTGNDLGRVLRWGAGYSGEDPFSVLLSVDEADAVLMDRWTILLDAHEAGSAENDTADAEPPKIVQMSNYCGIGIDAELSLDFHQAREEEPGKFTSRLHNKGVYVRVGLQKISHSRSLHKQIRLQVERQEVELPSIEGLIFINIPSWGSGADLWGSDSDTRFEKPRMDDGLLEVVGVTGVVHMGQVQGGLRSGIRIAQGSYFRVTLLKATPVQVDGEPWVQAPGHMIISAAGPKVHMLRKAKQKPRRAGTTRDARADAAPAPESDPR

SEQ ID NO: 43717 - protein, 543 aa, Homo sapiens
MPGMVLFGRRWAIASDDLVFPGFFELVVRVLWWIGILTLYLMHRGKLDCAGGALLSSYLIVLMILLAVVICTVSAIMCVSMRGTICNPGPRKSMSKLLYIRLALFFPEMVWASLGAAWVADGVQCDRTVVNGIIATVVVRTQIWCPATLRRASPCFISNRTISGTTKSLPRWSAMPQGAPSCRSRTTDYDLVGGDQLNCHFGSILHTTGLQYRDFIHVSFHDKVYELPFLVALDHRKESVVVAVRGTMSLQDVLTDLSAESEVLDVECEVQDRLAHKGISQAARYVYQRLINDGILSQAFSIAPEYRLVIVGHSLGGGAAALLATMLRAAYPQVRCYAFSPPRGLWSKALQEYSQSFIVSLVLGKDVIPRLSVTNLEDLKRRILRVVAHCNKPKYKILLHGLWYELFGGNPNNLPTELDGGDQEVLTQPLLGEQSLLTRWSPAYSFSSDSPLDSSPKYPPLYPPGRIIHLQEEGASGRFGCCSAAHYSAKWSHEAEFSKILIGPKMLTDHMPDILMRALDSVVSDRAACVSCPAQGVSSVDVA

SEQ ID NO: 43718 - protein, 1042 aa, Homo sapiens
MPGIVVFRRRWSVGSDDLVLPAIFLFLLHTTWFVILSVVLFGLVYNPHEACSLNLVDHGRGYLGILLSCMIAEMAIIWLSMRGGILYTEPRDSMQYVLYVRLAILVIEFIYAIVGIVWLTQYYTSCNDLTAKNVTLGMVVCNWVVILSVCITVLCVFDPTGRTFVKLRATKRRQRNLRTYNLRHRLEEGQATSWSRRLKVFLCCTRTKDSQSDAYSEIAYLFAEFFRDLDIVPSDIIAGLVLLRQRQRAKRNAVLDEANNDILAFLSGMPVTRNTKYLDLKNSQEMLRYKEVCYYMLFALAAYGWPMYLMRKPACGLCQLARSCSCCLCPARPRFAPGVTIEEDNCCGCNAIAIRRHFLDENMTAVDIVYTSCHDAVYETPFYVAVDHDKKKVVISIRGTLSPKDALTDLTGDAERLPVEGHHGTWLGHKGMVLSAEYIKKKLEQEMVLSQAFGRDLGRGTKHYGLIVVGHSLGAGTAAILSFLLRPQYPTLKCFAYSPPGGLLSEDAMEYSKEFVTAVVLGKDLVPRIGLSQLEGFRRQLLDVLQRSTKPKWRIIVGATKCIPKSELPEEVEVTTLASTRLWTHPSDLTIALSASTPLYPPGRIIHVVHNHPAEQCCCCEQEEPTYFAIWGDNKAFNEVIISPAMLHEHLPYVVMEGLNKVLENYNKGKTALLSAAKVMVSPTEVDLTPELIFQQQPLPTGPPMPTGLALELPTADHRNSSVRSKSQSEMSLEGFSEGRLLSPVVAAAARQDPVELLLLSTQERLAAELQARRAPLATMESLSDTESLYSFDSRRSSGFRSIRGSPSLHAVLERDEGHLFYIDPAIPEENPSLSSRTELLAADSLSKHSQDTQPLEAALGSGGVTPERPPSAAANDEEEEVGGGGGGPASRGELALHNGRLGDSPSPQVLEFAEFIDSLFNLDSKSSSFQDLYCMVVPESPTSDYAEGPKSPSQQEILLRAQFEPNLVPKPPRLFAGSADPSSGISLSPSFPLSSSGELMDLTPTGLSSQECLAADKIRTSTPTGHGASPAKQDELVISAR

SEQ ID NO: 43719 - protein, 672 aa, Homo sapiens
MPGMVLFGRRWAIASDDLVFPGFFELVVRVLWWIGILTLYLMHRGKLDCAGGALLSSYLIVLMILLAVVICTVSAIMCVSMRGTICNPGPRKSMSKLLYIRLALFFPEMVWASLGAAWVADGVQCDRTVVNGIIATVVVSWIIIAATVVSIIIVFDPLGGKMAPYSSAGPSHLDSHDSSQLLNGLKTAATSVWETRIKLLCCCIGKDDHTRVAFSSTAELFSTYFSDTDLVPSDIAAGLALLHQQQDNIRNNQEPAQVVCHAPGSSQEADLDAELENCHHYMQFAAAAYGWPLYIYRNPLTGLCRIGGDCCRSRTTDYDLVGGDQLNCHFGSILHTTGLQYRDFIHVSFHDKVYELPFLVALDHRKESVVVAVRGTMSLQDVLTDLSAESEVLDVECEVQDRLAHKGISQAARYVYQRLINDGILSQAFSIAPEYRLVIVGHSLGGGAAALLATMLRAAYPQVRCYAFSPPRGLWSKALQEYSQSFIVSLVLGKDVIPRLSVTNLEDLKRRILRVVAHCNKPKYKILLHGLWYELFGGNPNNLPTELDGGDQEVLTQPLLGEQSLLTRWSPAYSFSSDSPLDSSPKYPPLYPPGRIIHLQEEGASGRFGCCSAAHYSAKWSHEAEFSKILIGPKMLTDHMPDILMRALDSVVSDRAACVSCPAQGVSSVDVA

SEQ ID NO: 43720 - protein, 220 aa, Homo sapiens
MYCVSHHVCQHERTQIWCPATLRRASPCFISNRTISGTTKSLPRWSAMPQGAPSCRSRTTDYDLVGGDQLNCHFGSILHTTGLQYRDFIHVSFHDKVYELPFLVALDHRKESVVVAVRGTMSLQDVLTDLSAESEVLDVECEVQDRLAHKGISQAARYVYQRLINDGILSQAFSIAPEYRLVIVGHSLGGGAAALLATMLRAAYPQVRCYAFSPPRGLWR

SEQ ID NO: 43721 - protein, 379 aa, Homo sapiens
MYCVSHHVCQHESWIIIAATVVSIIIVFDPLGGKMAPYSSAGPSHLDSHDSSQLLNGLKTAATSVWETRIKLLCCCIGKDDHTRVAFSSTAELFSTYFSDTDLVPSDIAAGLALLHQQQDNIRNNQEPAQVVCHAPGSSQEADLDAELENCHHYMQFAAAAYGWPLYIYRNPLTGLCRIGGDCCRSRTTDYDLVGGDQLNCHFGSILHTTGLQYRDFIHVSFHDKVYELPFLVALDHRKESVVVAVRGTMSLQDVLTDLSAESEVLDVECEVQDRLAHKGISQAARYVYQRLINDGILSQAFSIAPEYRLVIVGHSLGGGAAALLATMLRAAYPQQSSAGIFSELHRVTRPGEGCDSQAQCDQLGRSEEKNLASGRALQ

SEQ ID NO: 43722 - protein, 267 aa, Homo sapiens
MPGMVLFGRRWAIASDDLVFPGFFELVVRVLWWIGILTLYLMHRGKLDCAGGALLSSYLIVLMILLAVVICTVSAIMCVSMRGTICNPGPRKSMSKLLYIRLALFFPEMVWASLGAAWVADGVQCDRTVVNGIIATVVVSWIIIAATVVSIIIVFDPLGGKMAPYSSAGPSHLDSHDSSQLLNGLKTAATSVWETRIKLLCCCIGKDDHTRVAFSSTAELFSTYFSDTDLVPSDIAAGLALLHQQQDNTRATGNCPRNDGLTLLSLN

SEQ ID NO: 43723 - protein, 488 aa, Homo sapiens
MGDRGSSRRRRTGSRPSSHGGGGPAAAEEEVRDAAAGPDVGAAGDAPAPAPNKDGDAGVGSGHWELRCHRLQDSLFSSDSGFSNYRGILNWCVVMLILSNARLFLENLIKYGILVDPIQVVSLFLKDPYSWPAPCLVIAANVFAVAAFQVEKRLAVGALTEQAGLLLHVANLATILCFPAAVVLLVESITPVGSLLALMAHTILFLKLFSYRDVNSWCRRARAKAASAGKKASSAAAPHTVSYPDNLTYRDLYYFLFAPTLCYELNFPRSPRIRKRFLLRRILEMLFFTQLQVGLIQQWMVPTIQNSMKPFKDMDYSRIIERLLKLAVPNHLIWLIFFYWLFHSCLNAVAELMQFGDREFYRDWWNSESVTYFWQNWNIPVHKWCIRHFYKPMLRRGSSKWMARTGVFLASAFFHEYLVSVPLRMFRLWAFTGMMAQIPLAWFVGRFFQGNYGNAAVWLSLIIGQPIAVLMYVHDYYVLNYEAPAAEA

SEQ ID NO: 43724 - protein, 388 aa, Homo sapiens
MKTLIAAYSGVLRGERQAEADRSQRSHGGPALSREGSGRWGTGSSILSALQDLFSVTWLNRSKVEKQLQVISVLQWVLSFLVLGVACSAILMYIFCTDCWLIAVLYFTWLVFDWNTPKKGGRRSQWVRNWAVWRYFRDYFPIQLVKTHNLLTTRNYIFGYHPHGIMGLGAFCNFSTEATEVSKKFPGIRPYLATLAGNFRMPVLREYLMSGGICPVSRDTIDYLLSKNGSGNAIIIVVGGAAESLSSMPGKNAVTLRNRKGFVKLALRHGADLVPIYSFGENEVYKQVIFEEGSWGRWVQKKFQKYIGFAPCIFHGRGLFSSDTWGLVPYSKPITTVVGEPITIPKLEHPTQQDIDLYHTMYMEALVKLFDKHKTKFGLPETEVLEVN

SEQ ID NO: 43725 - protein, 345 aa, Homo sapiens
MKTLIAAYSGVLRGERQAEADRSQRSHGGPALSREGSGRWGVACSAILMYIFCTDCWLIAVLYFTWLVFDWNTPKKGGRRSQWVRNWAVWRYFRDYFPIQLVKTHNLLTTRNYIFGYHPHGIMGLGAFCNFSTEATEVSKKFPGIRPYLATLAGNFRMPVLREYLMSGGICPVSRDTIDYLLSKNGSGNAIIIVVGGAAESLSSMPGKNAVTLRNRKGFVKLALRHGADLVPIYSFGENEVYKQVIFEEGSWGRWVQKKFQKYIGFAPCIFHGRGLFSSDTWGLVPYSKPITTVVGEPITIPKLEHPTQQDIDLYHTMYMEALVKLFDKHKTKFGLPETEVLEVN

SEQ ID NO: 43726 - protein, 1101 aa, Homo sapiens
MEQPGAAASGAGGGSEEPGGGRSNKRSAGNRAANEEETKNKPKLNIQIKTLADDVRDRITSFRKSTVKKEKPLIQHPIDSQVAMSEFPAAQPLYDERSLNLSEKEVLDLFEKMMEDMNLNEEKKAPLRNKDFTTKREMVVQYISATAKSGGLKNSKHECTLSSQEYVHELRSGISDEKLLNCLESLRVSLTSNPVSWVNNFGHEGLGLLLDELEKLLDKKQQENIDKKNQYKLIQCLKAFMNNKFGLQRILGDERSLLLLARAIDPKQPNMMTEIVKILSAICIVGEENILDKLLGAITTAAERNNRERFSPIVEGLENQEALQLQVACMQFINALVTSPYELDFRIHLRNEFLRSGLKTMLPDLKEKENDELDIQLKVFDENKEDDLTELSHRLNDIRAEMDDMNEVYHLLYNMLKDTAAENYFLSILQHFLLIRNDYYIRPQYYKIIEECVSQIVLHCSGMDPDFKYRQRLDIDLTHLIDSCVNKAKVEESEQKAAEFSKKFDEEFTARQEAQAELQKRDEKIKELEAEIQQLRTQAQVLSSSSGIPGPPAAPPLPGVGPPPPPPAPPLPGGAPLPPPPPPLPGMMGIPPPPPPPLLFGGPPPPPPLGGVPPPPGISLNLPYGMKQKKMYKPEVSMKRINWSKIEPTELSENCFWLRVKEDKFENPDLFAKLALNFATQIKVQKNAEALEEKKTGPTKKKVKELRILDPKTAQNLSIFLGSYRMPYEDIRNVILEVNEDMLSEALIQNLVKHLPEQKILNELAELKNEYDDLCEPEQFGVVMSSVKMLQPRLSSILFKLTFEEHINNIKPSIIAVTLACEELKKSESFNRLLELVLLVGNYMNSGSRNAQSLGFKINFLCKIRDTKSADQKTTLLHFIADICEEKYRDILKFPEELEHVESASKVSAQILKSNLASMEQQIVHLERDIKKFPQAENQHDKFVEKMTSFTKTAREQYEKLSTMHNNMMKLYENLGEYFIFDSKTVSIEEFFGDLNNFRTLFLEAVRENNKRREMEEKTRRAKLAKEKAEQEKLERQKKKKQLIDINKEGDETGVMDNLLEALQSGAAFRDRRKRIPRNPDNRRVPLERSRSRHNGAISSK

SEQ ID NO: 43727 - protein, 1096 aa, Homo sapiens [sequence omitted]

SEQ ID NO: 43728 - protein, 1096 aa, Homo sapiens
MEQPGAAASGAGGGSEEPGGGRSNKRSAGNRAANEEETKNKPKLNIQIKTLADDVRDRITSFRKSTVKKEKPLIQHPIDSQVAMSEFPAAQPLYDERSLNLSEKEVLDLFEKMMEDMNLNEEKKAPLRNKDFTTKREMVVQYISATAKSGGLKNSKHECTLSSQEYVHELRSGISDEKLLNCLESLRVSLTSNPVSWVNNFGHEGLGLLLDELEKLLDKKQQENIDKKNQYKLIQCLKAFMNNKFGLQRILGDERSLLLLARAIDPKQPNMMTEIVKILSAICIVGEENILDKLLGAITTAAERNNRERFSPIVEGLENQEALQLQVACMQFINALVTSPYELDFRIHLRNEFLRSGLKTMLPDLKEKENDELDIQLKVFDENKEDDLTELSHRLNDIRAEMDDMNEVYHLLYNMLKDTAAENYFLSILQHFLLIRNDYYIRPQYYKIIEECVSQIVLHCSGMDPDFKYRQRLDIDLTHLIDSCVNKAKVEESEQKAAEFSKKFDEEFTARQEAQAELQKRDEKIKELEAEIQQLRTQAQVLSSSSGIPGPPAAPPLPGVGPPPPPPAPPLPGGAPLPPPPPPLPGMMGIPPPPPPPLLFGGPPPPPPLGGVPPPPGISLNLPYGMKQKKMYKPEVSMKRINWSKIEPTELSENCFWLRVKEDKFENPDLFAKLALNFATQIKVQKNAEALEEKKTGPTKKKVKELRILDPKTAQNLSIFLGSYRMPYEDIRNVILEVNEDMLSEALIQNLVKHLPEQKILNELAELKNEYDDLCEPEQFGVVMSSVKMLQPRLSSILFKLTFEEHINNIKPSIIAVTLACEELKKSESFNRLLELVLLVGNYMNSGSRNAQSLGFKINFLCKIRDTKSADQKTTLLHFIADICEEKYRDILKFPEELEHVESASKVSAQILKSNLASMEQQIVHLERDIKKFPQAENQHDKFVEKMTSFTKTAREQYEKLSTMHNNMMKLYENLGEYFIFDSKTVSIEEFFGDLNNFRTLFLEAVRENNKRREMEEKTRRAKLAKEKAEQEKLERQKKKKQLIDINKEGDETGVMDNLLEALQSGAAFRDRRKRIPRNPVVNHPCATRANPRSAT

SEQ ID NO: 43729 - protein, 1097 aa, Homo sapiens
MEQPGAAASGAGGGSEEPGGGRSNKRSAGNRAANEEETKNKPKLRDRITSFRKSTVKKEKPLIQHPIDSQVAMSEFPAAQPLYDERSLNLSEKEVLDLFEKMMEDMNLNEEKKAPLRNKDFTTKREMVVQYISATAKSVISSHIKGGLKNSKHECTLSSQEYVHELRSGISDEKLLNCLESLRVSLTSNPVSWVNNFGHEGLGLLLDELEKLLDKKQQENIDKKNQYKLIQCLKAFMNNKFGLQRILGDERSLLLLARAIDPKQPNMMTEIVKILSAICIVGEENILDKLLGAITTAAERNNRERFSPIVEGLENQEALQLQVACMQFINALVTSPYELDFRIHLRNEFLRSGLKTMLPDLKEKENDELDIQLKVFDENKEDDLTELSHRLNDIRAEMDDMNEVYHLLYNMLKDTAAENYFLSILQHFLLIRNDYYIRPQYYKIIEECVSQIVLHCSGMDPDFKYRQRLDIDLTHLIDSCVNKAKVEESEQKAAEFSKKFDEEFTARQEAQAELQKRDEKIKELEAEIQQLRTQAQVLSSSSGIPGPPAAPPLPGVGPPPPPPAPPLPGGAPLPPPPPPLPGMMGIPPPPPPPLLFGGPPPPPPLGGVPPPPGISLNLPYGMKQKKMYKPEVSMKRINWSKIEPTELSENCFWLRVKEDKFENPDLFAKLALNFATQIKVQKNAEALEEKKTGPTKKKVKELRILDPKTAQNLSIFLGSYRMPYEDIRNVILEVNEDMLSEALIQNLVKHLPEQKILNELAELKNEYDDLCEPEQFGVVMSSVKMLQPRLSSILFKLTFEEHINNIKPSIIAVTLACEELKKSESFNRLLELVLLVGNYMNSGSRNAQSLGFKINFLCKIRDTKSADQKTTLLHFIADICEEKYRDILKFPEELEHVESASKVSAQILKSNLASMEQQIVHLERDIKKFPQAENQHDKFVEKMTIFTKTAREQYEKLSTMHNNMMKLYENLGEYFIFDSKTVSIEEFFGDLNNFRTLFLEAVRENNKRREMEEKTRRAKLAKEKAEQEKLERQKKKKQLIDINKEGDETGVMDNLLEALQSGAAFRDRRKRIPRNPDNRRVPLERSRSRHNGAISSK

SEQ ID NO: 43730 - protein, 1101 aa, Homo sapiens [sequence omitted]

SEQ ID NO: 43731 - protein, 1103 aa, Homo sapiens [sequence omitted]

SEQ ID NO: 43732 - protein, 244 aa, Homo sapiens
MELFLAGRRVLVTGAGKGIGRGTVQALHATGARVVAVSRTQADLDSLVRECPGIEPVCVDLGDWEATERALGSVGPVDLLVNNAAVALLQPFLEVTKEAFDRSFEVNLRAVIQVSQIVARGLIARGVPGAIVNVSSQCSQRAVTNHSVYCSTKGALDMLTKVMALELGPHKIRVNAVNPTVVMTSMGQATWSDPHKAKTMLNRIPLGKFAEVEHVVNAILFLLSDRSGMTTGSTLPVEGGFWAC

SEQ ID NO: 43733 - protein, 1922 aa, Homo sapiens
MKSPALQPLSMAGLQLMTPASSPMGPFFGLPWQQEAIHDNIYTPRKYQVELLEAALDHNTIVCLNTGSGKTFIAVLLTKELSYQIRGDFSRNGKRTVFLVNSANQVAQQVSAVRTHSDLKVGEYSNLEVNASWTKERWNQEFTKHQVLIMTCYVALNVLKNGYLSLSDINLLVFDECHLAILDHPYREIMKLCENCPSCPRILGLTASILNGKCDPEELEEKIQKLEKILKSNAETATDLVVLDRYTSQPCEIVVDCGPFTDRSGLYERLLMELEEALNFINDCNISVHSKERDSTLISKQILSDCRAVLVVLGPWCADKVAGMMVRELQKYIKHEQEELHRKFLLFTDTFLRKIHALCEEHFSPASLDLKFVTPKVIKLLEILRKYKPYERQQFESVEWYNNRNQDNYVSWSDSEDDDEDEEIEEKEKPETNFPSPFTNILCGIIFVERRYTAVVLNRLIKEAGKQDPELAYISSNFITGHGIGKNQPRNKQMEAEFRKQEEVLRKFRAHETNLLIATSIVEEGVDIPKCNLVVRFDLPTEYRSYVQSKGRARAPISNYIMLADTDKIKSFEEDLKTYKAIEKILRNKCSKSVDTGETDIDPVMDDDDVFPPYVLRPDDGGPRVTINTAIGHINRYCARLPSDPFTHLAPKCRTRELPDGTFYSTLYLPINSPLRASIVGPPMSCVRLAERVVALICCEKLHKIGELDDHLMPVGKETVKYEEELDLHDEEETSVPGRPGSTKRRQCYPKAIPECLRDSYPRPDQPCYLYVIGMVLTTPLPDELNFRRRKLYPPEDTTRCFGILTAKPIPQIPHFPVYTRSGEVTISIELKKSGFMLSLQMLELITRLHQYIFSHILRLEKPALEFKPTDADSAYCVLPLNVVNDSSTLDIDFKFMEDIEKSEARIGIPSTKYTKETPFVFKLEDYQDAVIIPRYRNFDQPHRFYVADVYTDLTPLSKFPSPEYETFAEYYKTKYNLDLTNLNQPLLDVDHTSSRLNLLTPRHLNQKGKALPLSSAEKRKAKWESLQNKQILVPELCAIHPIPASLWRKAVCLPSILYRLHCLLTAEELRAQTASDAGVGVRSLPADFRYPNLDFGWKKSIDSKSFISISNSSSAENDNYCKHSTIVPENAAHQGANRTSSLENHDQMSVNCRTLLSESPGKLHVEVSADLTAINGLSYNQNLANGSYDLANRDFCQGNQLNYYKQEIPVQPTTSYSIQNLYSYENQPQPSDECTLLSNKYLDGNANKSTSDGSPVMAVMPGTTDTIQVLKGRMDSEQSPSIGYSSRTLGPNPGLILQALTLSNASDGFNLERLEMLGDSFLKHAITTYLFCTYPDAHEGRLSYMRSKKVSNCNLYRLGKKKGLPSRMVVSIFDPPVNWLPPGYVVNQDKSNTDKWEKDEMTKDCMLANGKLDEDYEEEDEEEESLMWRAPKEEADYEDDFLEYDQEHIRFIDNMLMGSGAFVKKISLSPFSTTDSAYEWKMPKKSSLGSMPFSSDFEDFDYSSWDAMCYLDPSKAVEEDDFVVGFWNPSEENCGVDTGKQSISYDLHTEQCIADKSIADCVEALLGCYLTSCGERAAQLFLCSLGLKVLPVIKRTDREKALCPTRENFNSQQKNLSVSCAAASVASSRSSVLKDSEYGCLKIPPRCMFDHPDADKTLNHLISGFENFEKKINYRFKNKAYLLQAFTHASYHYNTITDCYQRLEFLGDAILDYLITKHLYEDPRQHSPGVLTDLRSALVNNTIFASLAVKYDYHKYFKAVSPELFHVIDDFVQFQLEKNEMQGMDSELRRSEEDEEKEEDIEVPKAMGDIFESLAGAIYMDSGMSLETVWQVYYPMMRPLIEKFSANVPRSPVRELLEMEPETAKFSPAERTYDGKVRVTVEVVGKGKFKGVGRSYRIAKSAAARRALRSLKANQPQVPNS

SEQ ID NO: 43734 - protein, 1922 aa, Homo sapiens; identical to SEQ ID NO: 43733

SEQ ID NO: 43735 - protein, 1922 aa, Homo sapiens; identical to SEQ ID NO: 43733

SEQ ID NO: 43736 - protein, 1922 aa, Homo sapiens; identical to SEQ ID NO: 43733

SEQ ID NO: 43737 - protein, 70 aa, Homo sapiens
MKSPALQPLSMAGLQLMTPASSPMGPFFGLPWQQEAIHDNIYTPRKYQVELLEAALDHNTIVCLNTGSGK

SEQ ID NO: 43738 - protein, 70 aa, Homo sapiens; identical to SEQ ID NO: 43737

SEQ ID NO: 43739 - protein, 1829 aa, Homo sapiens
MKSPALQPLSMAGLQLMTPASSPMGPFFGLPWQQEAIHDNIYTPRKYQVELLEAALDHNTIVCLNTGSGKTFIAVLLTKELSYQIRGDFSRNGKRTVFLVNSANQVAQQVSAVRTHSDLKVGEYSNLEVNASWTKERWNQEFTKHQVLIMTCYVALNVLKNGYLSLSDINLLVFDECHLAILDHPYREIMKLCENCPSCPRILGLTASILNGKCDPEELEEKIQKLEKILKSNAETATDLVVLDRYTSQPCEIVVDCGPFTDRSGLYERLLMELEEALNFINDCNISVHSKERDSTLISKQILSDCRAVLVVLGPWCADKVAGMMVRELQKYIKHEQEELHRKFLLFTDTFLRKIHALCEEHFSPASLDLKFVTPKVIKLLEILRKYKPYERQQFESVEWYNNRNQDNYVSWSDSEDDDEDEEIEEKEKPETNFPSPFTNILCGIIFVERRYTAVVLNRLIKEAGKQDPELAYISSNFITGHGIGKNQPRNKQMEAEFRKQEEVLRKFRAHETNLLIATSIVEEGVDIPKCNLVVRFDLPTEYRSYVQSKGRARAPISNYIMLADTDKIKSFEEDLKTYKAIEKILRNKCSKSVDTGETDIDPVMDDDDVFPPYVLRPDDGGPRVTINTAIGHINRYCARLPSDPFTHLAPKCRTRELPDGTFYSTLYLPINSPLRASIVGPPMSCVRLAERVVALICCEKLHKIGELDDHLMPVGKETVKYEEELDLHDEEETSVPGRPGSTKRRQCYPKAIPECLRDSYPRPDQPCYLYVIGMVLTTPLPDELNFRRRKLYPPEDTTRCFGILTAKPIPQIPHFPVYTRSGEVTISIELKKSGFMLSLQMLELITRLHQYIFSHILRLEKPALEFKPTDADSAYCVLPLNVVNDSSTLDIDFKFMEDIEKSEARIGIPSTKYTKETPFVFKLEDYQDAVIIPRYRNFDQPHRFYVADVYTDLTPLSKFPSPEYETFAEYYKTKYNLDLTNLNQPLLDVDHTSSRLNLLTPRHLNQKGKALPLSSAEKRKAKWESLQNKQILVPELCAIHPIPASLWRKAVCLPSILYRLHCLLTAEELRAQTASDAGVGVRSLPADFRYPNLDFGWKKSIDSKSFISISNSSSAENDNYCKHSTIVPENAAHQGANRTSSLENHDQMSVNCRTLLSESPGKLHVEVSADLTAINGLSYNQNLANGSYDLANRDFCQGNQLNYYKQEIPVQPTTSYSIQNLYSYENQPQPSDECTLLSNKYLDGNANKSTSDGSPVMAVMPGTTDTIQVLKGRMDSEQSPSIGYSSRTLGPNPGLILQALTLSNASDGFNLERLEMLGDSFLKHAITTYLFCTYPDAHEGRLSYMRSKKVSNCNLYRLGKKKGLPSRMVVSIFDPPVNWLPPGYVVNQDKSNTDKWEKDEMTKDCMLANGKLDEDYEEEDEEEESLMWRAPKEEADYEDDFLEYDQEHIRFIDNMLMGSGAFVKKISLSPFSTTDSAYEWKMPKKSSLGSMPFSSDFEDFDYSSWDAMCYLDPSKAVEEDDFVVGFWNPSEENCGVDTGKQSISYDLHTEQCIADKSIADCVEALLGCYLTSCGERAAQLFLCSLGLKVLPVIKRTDREKALCPTRENFNSQQKNLSVSCAAASVASSRSSVLKDSEYGCLKIPPRCMFDHPDADKTLNHLISGFENFEKKINYRFKNKAYLLQAFTHASYHYNTITDCYQRLEFLGDAILDYLITKHLYEDPRQHSPGVLTDLRSALVNNTIFASLAVKYDYHKYFKAVSPELFHVIDDFVQFQLEKNEMQGMDSEKSFLQMYPVPLCENCLKWNQKLPNLARLRELTTGRSESLWK

SEQ ID NO: 43740 - protein, 820 aa, Homo sapiens
MLAWESDHFLRILAENDNYCKHSTIVPENAAHQGANRTSSLENHDQMSVNCRTLLSESPGKLHVEVSADLTAINGLSYNQNLANGSYDLANRDFCQGNQLNYYKQEIPVQPTTSYSIQNLYSYENQPQPSDECTLLSNKYLDGNANKSTSDGSPVMAVMPGTTDTIQVLKGRMDSEQSPSIGYSSRTLGPNPGLILQALTLSNASDGFNLERLEMLGDSFLKHAITTYLFCTYPDAHEGRLSYMRSKKVSNCNLYRLGKKKGLPSRMVVSIFDPPVNWLPPGYVVNQDKSNTDKWEKDEMTKDCMLANGKLDEDYEEEDEEEESLMWRAPKEEADYEDDFLEYDQEHIRFIDNMLMGSGAFVKKISLSPFSTTDSAYEWKMPKKSSLGSMPFSSDFEDFDYSSWDAMCYLDPSKAVEEDDFVVGFWNPSEENCGVDTGKQSISYDLHTEQCIADKSIADCVEALLGCYLTSCGERAAQLFLCSLGLKVLPVIKRTDREKALCPTRENFNSQQKNLSVSCAAASVASSRSSVLKDSEYGCLKIPPRCMFDHPDADKTLNHLISGFENFEKKINYRFKNKAYLLQAFTHASYHYNTITDCYQRLEFLGDAILDYLITKHLYEDPRQHSPGVLTDLRSALVNNTIFASLAVKYDYHKYFKAVSPELFHVIDDFVQFQLEKNEMQGMDSELRRSEEDEEKEEDIEVPKAMGDIFESLAGAIYMDSGMSLETVWQVYYPMMRPLIEKFSANVPRSPVRELLEMEPETAKFSPAERTYDGKVRVTVEVVGKGKFKGVGRSYRIAKSAAARRALRSLKANQPQVPNS

SEQ ID NO: 43741 - protein, 266 aa, Homo sapiens
MMALGAAGATRVFVAMVAAALGGHPLLGVSATLNSVLNSNAIKNLPPPLGGAAGHPGSAVSAAPGILYPGGNKYQTIDNYQPYPCAEDEECGTDEYCASPTRGGDAGVQICLACRKRRKRCMRHAMCCPGNYCKNGICVSSDQNHFRGEIEETITESFGNDHSTLDGYSRRTTLSSKMYHTKGQEGSVCLRSSDCASGLCCARHFWSKICKPVLKEGQVCTKHRRKGSHGLEIFQRCYCGEGLSCRIQKDHHQASNSSRLHTCQRH

SEQ ID NO: 43742 - protein, 224 aa, Homo sapiens
MVAAVLLGLSWLCSPLGALVLDFNNIRSSADLHGARKGSQCLSDTDCNTRKFCLQPRDEKPFCATCRGLRRRCQRDAMCCPGTLCVNDVCTTMEDATPILERQLDEQDGTHAEGTTGHPVQENQPKRKPSIKKSQGRKGQEGESCLRTFDCGPGLCCARHFWTKICKPVLLEGQVCSRRGHKDTAQAPEIFQRCDCGPGLLCRSQLTSNRQHARLRVCQKIEKL

SEQ ID NO: 43743 - protein, 139 aa, Homo sapiens [sequence omitted]

SEQ ID NO: 43744 - protein, 242 aa, Homo sapiens
MGEASPPAPARRHLLVLLLLLSTLVIPSAAAPIHDADAQESSLGLTGLQSLLQGFSRLFLKGNLLRGIDSLFSAPMDFRGLPGNYHKEENQEHQLGNNTLSSHLQIDKMTDNKTGEVLISENVVASIQPAEGSFEGDLKVPRMEEKEALVPIQKATDSFHTELHPRVAFWIIKLPRRRSHQDALEGGHWLSEKRHRLQAIRDGLRKGTHKDVLEEGTESSSHSRLSPRKTHLLYILRPSRQL

SEQ ID NO: 43745 - protein, 199 aa, Homo sapiens
MGEASPPAPARRHLLVLLLLLSTLVIPSAAAPIHDADAQESSLGLTGLQSLLQGFSRLFLKGNLLRGIDSLFSAPMDFRGLPGNYHKEENQEHQLGNNTLSSHLQIDKVPRMEEKEALVPIQKATDSFHTELHPRVAFWIIKLPRRRSHQDALEGGHWLSEKRHRLQAIRDGLRKGTHKDVLEEGTESSSHSRLSPRKT

SEQ ID NO: 43746 - protein, 631 aa, Homo sapiens
MALRKELLKSIWYAFTALDVEKSGKVSKSQLKVLSHNLYTVLHIPHDPVALEEHFRDDDDGPVSSQGYMPYLNKYILDKVEEGAFVKEHFDELCWTLTAKKNYRADSNGNSMLSNQDAFRLWCLFNFLSEDKYPLIMVPDEVEYLLKKVLSSMSLEVSLGELEELLAQEAQVAQTTGGLSVWQFLELFNSGRCLRGVGRDTLSMAIHEVYQELIQDVLKQGYLWKRGHLRRNWAERWFQLQPSCLCYFGSEECKEKRGIIPLDAHCCVEVLPDRDGKRCMFCVKTANRTYEMSASDTRQRQEWTAAIQMAIRLQAEGKTSLHKDLKQKRREQREQRERRRAAKEEELLRLQQLQEEKERKLQELELLQEAQRQAERLLQEEEERRRSQHRELQQALEGQLREAEQARASMQAEMELKEEEAARQRQRIKELEEMQQRLQEALQLEVKARRDEESVRIAQTRLLEEEEEKLKQLMQLKEEQERYIERAQQEKEELQQEMAQQSRSLQQAQQQLEEVRQNRQRADEDVEAAQRKLRQASTNVKHWNVQMNRLMHPIEPGDKRPVTSSSFSGFQPPLLAHRDSSLKRLTRWGSQGNRTPSPNSNEQQKSLNGGDEAPAPASTPQEDKLDPAPEN

SEQ ID NO: 43747 - protein, 184 aa, Homo sapiens
MALRKELLKSIWYAFTALDVEKSGKVSKSQLKVLSHNLYTVLHIPHDPVALEEHFRDDDDGPVSSQGYMPYLNKYILDKDAFRLWCLFNFLSEDKYPLIMVPDEVEYLLKKVLSSMSLEVSLGELEELLAQEAQVAQTTGGLSVWQFLELFNSGRCLRGVGRDTLSMAIHEVYQELIQDVLKQG

SEQ ID NO: 43748 - protein, 130 aa, Homo sapiens
  VARIANT 1: note = MOD_RES - Any amino acid
XRDDDDGPVSSQGYMPYLNKYILDKDAFRLWCLFNFLSEDKYPLIMVPDEVEYLLKKVLSSMSLEVSLGELEELLAQEAQVAQTTGGLSVWQFLELFNSGRCLRGVGRDTLSMAIHEVYQELIQDVLKQG

SEQ ID NO: 43749 - protein, 376 aa, Homo sapiens
MICPPRPPKVLGLQVLPDRDGKRCMFCVKTANRTYEMSASDTRQRQEWTAAIQMAIRLQAEGKTSLHKDLKQKRREQREQRERRRAAKEEELLRLQQLQEEKERKLQELELLQEAQRQAERLLQEEEERRRSQHRELQQALEGQLREAEQARASMQAEMELKEEEAARQRQRIKELEEMQQRLQEALQLEVKARRDEESVRIAQTRLLEEEEEKLKQLMQLKEEQERYIERAQQEKEELQQEMAQQSRSLQQAQQQLEEVRQNRQRADEDVEAAQRKLRQASTNVKHWNVQMNRLMHPIEPGDKRPVTSSSFSGFQPPLLAHRDSSLKRLTRWGSQGNRTPSPNSNEQQKSLNGGDEAPAPASTPQEDKLDPAPEN

SEQ ID NO: 43750 - protein, 235 aa, Homo sapiens
MTQVTEKSTEHPEKTTSTTEKTTRTPEKPTLYSEKTICTKGKNTPVPEKPTENLGNTTLTTETIKAPVKSTENPEKTAAVTKTIKPSVKVTGDKSLTTTSSHLNKTEVTHQVPTGSFTLITSRTKLSSITSEATGNESHPYLNKDGSQKGIHAGQMGENDSFPAWAIVIVVLVAVILLLVFLGLIFLVSYMMRTRRTLTQNTQYNDAEDEGGPNSYPVYLMEQQNLGMGQIPSPR

SEQ ID NO: 43751 - protein, 507 aa, Homo sapiens
PLANEKTTLSPAEPTENGERTPFTNEKTTPSSAEPTEHGERTPLANEITTPSRAEPTEHGERIANEKATPSPAKPTEHGETTVNEDTTPSSAEPTENGERTPLANENTTTSPTESTEHGERTANEKTTPSPAEPTEHGERTPSANEKTIPSPAKPTEHEEMTPSANENTTPSPVKPTEHGEKTTLANEKITLSPEGPTEHGAKTTSANEKITPSLAKPTEHGERTTSPNDKITSSAAESTEHRDRATSANVITPAPAEPIKHAKRTTLAHEKMTQVTEKSTEHPEKTTSTTEKTTRTPEKPTLYSEKTICTKGKNTPVPEKPTENLGNTTLTTETIKAPVKSTENPEKTAAVTKTIKPSVKVTGDKSLTTTSSHLNKTEVTHQVPTGSFTLITSRTKLSSITSEATGNESHPYLNKDGSQKGIHAGQMGENDSFPAWAIVIVVLVAVILLLVFLGLIFLVSYMMRTRRTLTQNTQYNDAEDEGGPNSYPVYLMEQQNLGMGQIPSPR

SEQ ID NO: 43752 - protein, 507 aa, Homo sapiens
PLANEKTTLSPAEPTENGERTPFTNEKTTPSSAEPTEHGERTPLANEITTPSRAEPTEHGERIANEKATPSPAKPTEHGETTVNEDTTPSSAEPTENGERTPLANENTTTSPTESTEHGERTANEKTTPSPAEPTEHGERTPSANEKTIPSPAKPTEHEEMTPSANENTTPSPVKPTEHGEKTTLANEKITLSPEGPTEHGAKTTSANEKITPSLAKPTEHGERTTSPNDKITSSAAESTEHRDRATSANVITPAPAEPIKHAKRTTLAHEKMTQVTEKSTEHPEKTTSTTEKTTRTPEKPTLYSEKTICTKGKNTPVPEKPTENLGNTTLTTETIKAPVKSTENPEKTAAVTKTIKPSVKVTGDKSLTTTSSHLNKTEVTHQVPTGSFTLITSRTKLSSITSEATGNKSHPYLNKDGSQKGIHAGQMGENDSFPAWAIVIVVLVAVILLLVFLGLIFLVSYMMRTRRTLTQNTQYNDAEDEGGPNSYPVYLMEQQNLGMGQIPSPR

SEQ ID NO: 43753 - protein, 507 aa, Homo sapiens; identical to SEQ ID NO: 43751

SEQ ID NO: 43754 - protein, 517 aa, Homo sapiens
MAQPVHSLCSAFGLQCCLLFLLASWGAGATTFQEYQKTGELSTSDHIFPLTPGLVYSIPFDHIVLHSGQRPPELPKSTEIHEQKRHCNTTRHSKPTDKPTGNSKTIDHKSSTDNHEAPPTSEENSSNQGKDPMIRNQRSVDPADSTTTHKESAGKKHITPAPKSKINCRKSTTGKSTVTRKSDKTGRPLEKSMSTLDKTSTSSHKTTTSFHNSGNSQTKQKSTSFPEKITAASKTTYKTTGTPEESEKTEDSRTTVASDKLLTKTTKNIQETISANELTQSLAEPTEHGGRTANENNTPSPAEPTENRERTANENKKTICTKGKNTPVPEKPTENLGNTTLTTETIKAPVKSTENPEKTAAVTKTIKPSVKVTGDKSLTTTSSHLNKTEVTHQVPTGSFTLITSRTKLSSITSEATGNESHPYLNKDGSQKGIHAGQMGENDSFPAWAIVIVVLVAVILLLVFLGLIFLVSYMMRTRRTLTQNTQYNDAEDEGGPNSYPVYLMEQQNLGMGQIPSPR

SEQ ID NO: 43755 - protein, 517 aa, Homo sapiens; identical to SEQ ID NO: 43754

SEQ ID NO: 43756 - protein, 517 aa, Homo sapiens; identical to SEQ ID NO: 43754

SEQ ID NO: 43757 - protein, 1393 aa, Homo sapiens [sequence omitted]

SEQ ID NO: 43758 - protein, 889 aa, Homo sapiens
MAQPVHSLCSAFGLQCCLLFLLASWGAGATTFQEYQKTGELSTSDHIFPLTPGLVYSIPFDHIVLHSGQRPPELPKSTEIHEQKRHCNTTRHSKPTDKPTGNSKTIDHKSSTDNHEAPPTSEENSSNQGKDPMIRNQRSVDPADSTTTHKESAGKKHITPAPKSKINCRKSTTGKSTVTRKSDKTGRPLEKSMSTLDKTSTSSHKTTTSFHNSGNSQTKQKSTSFPEKITAASKTTYKTTGTPEESEKTEDSRTTVASDKLLTKTTKNIQETISANELTQSLAEPTEHGGRTANENNTPSPAEPTENRERTANENTTLSPAEPTENRERTANENTAPFPAGPTENREMTANENTTLFPAEPTEHGERTANENTTPSPAEPTEHGERTANENTTPSPAEPTEHGERTPFANDKTTSSSAESTEHGERTPLANENTTPSPAEPTENRERTANENTTPSPAGPTENRETTANEKTTLSPVEPTENRETTANEKTTPSPAEPTENGQRTPFANEKTTSSSAEPTEHGERTPLANENTTPSPAEPTENRERTANEKTTPSPAEPTENGDRTPLANEKTTPSLAEPTENGQRTPFANEKTTSSSAEPTEHEERTPLANENTTPSPAEPTENRERTANENTTPSPAGPTENREMTANEKTTLFPAEPTENRERTANEKTTSSPAEPTENGQRTPFANEKTTSSSAEPTEHGERTPLANENTTLSPAGPTENRERTANEKTTPFPAEPTENRERTANENTTPSPAQPTENGDRTPLANEKTTPSLAEPTENGKRTPFANEKTTSSSAEPTEHAERTPLANENTTSSPAEPTENRERTANEKTTQFPAEPTENRESTANEKTTPFPAEPTENREWTANENTTLSPAEPTEHEEMTPLA

SEQ ID NO: 43759 - protein, 550 aa, Homo sapiens
MVPKADSGAFLLLFLLVLTVTEPLRPELRCNPGQFACRSGTIQCIPLPWQCDGWATCEDESDEANCPEVTGEVRPHHGKEAVDPRQGRARGGDPSHFHAVNVAQPVRFSSFLGKCPTGWHHYEGTASCYRVYLSGENYWDAAQTCQRLNGSLATFSTDQELRFVLAQEWDQPERSFGWKDQRKLWVGYQYVITGRNRSLEGRWEVAFKGSSEVFLPPDPIFASAMSENDNVFCAQLQCFHFPTLRHHDLHSWHAESCYEKSSFLCKRSQTCVDIKDNVVDEGFYFTPKGDDPCLSCTCHGGEPEMCVAALCERPQGCQQYRKDPKECCKFMCLDPDGNSLFDSMASGMRLVVSCISSFLILSLLLFMVHRLRQRRRERIESLIGANLHHFNLGRRIPGFDYGPDGFGTGLTPLHLSDDGEGGTFHFHDPPPPYTAYKYPDIGQPDDPPPPYEASIHPDSVFYDPADDDAFEPVEVSLPAPGDGGSEGALLRRLEQPLPTAGASLADLEDSADSSSALLVPPDPAQSGSTPAAEALPGGGRHSRSSLNTVV

SEQ ID NO: 43760 - protein, 327 aa, Homo sapiens
MVPKADSGAFLLLFLLVLTVTEPLRPELRCNPGQFACRSGTIQCIPLPWQCDGWATCEDESDEANCPEVTGEVRPHHGKEAVDPRQGRARGGDPSHFHAVNVAQPVRFSSFLGKCPTGWHHYEGTASCYRVYLSGENYWDAAQTCQRLNGSLATFSTDQELRFVLAQEWDQPERSFGWKDQRKLWVGYQYVITGRNRSLEGRWEVAFKGSSEVFLPPDPIFASAMSENDNVFCAQLQCFHFPTLRHHDLHSWHAESCYEKSSFLCKRSQTCVDIKDNVVDEGFYFTPKGDDPCLSCTCHGGEPEMCVAALCERPQGCSPLSCTARAT

SEQ ID NO: 43761 - protein, 509 aa, Homo sapiens
MVPKADSGAFLLLFLLVLTVTEPLRPEVTGEVRPHHGKEAVDPRQGRARGGDPSHFHAVNVAQPVRFSSFLGKCPTGWHHYEGTASCYRVYLSGENYWDAAQTCQRLNGSLATFSTDQELRFVLAQEWDQPERSFGWKDQRKLWVGYQYVITGRNRSLEGRWEVAFKGSSEVFLPPDPIFASAMSENDNVFCAQLQCFHFPTLRHHDLHSWHAESCYEKSSFLCKRSQTCVDIKDNVVDEGFYFTPKGDDPCLSCTCHGGEPEMCVAALCERPQGCQQYRKDPKECCKFMCLDPDGNSLFDSMASGMRLVVSCISSFLILSLLLFMVHRLRQRRRERIESLIGANLHHFNLGRRIPGFDYGPDGFGTGLTPLHLSDDGEGGTFHFHDPPPPYTAYKYPDIGQPDDPPPPYEASIHPDSVFYDPADDDAFEPVEVSLPAPGDGGSEGALLRRLEQPLPTAGASLADLEDSADSSSALLVPPDPAQSGSTPAAEALPGGGRHSRSSLNTVV

SEQ ID NO: 43762 - protein, 269 aa, Homo sapiens
MVPKADSGAFLLLFLLVLTVTEPLRPELRCNPGQFACRSGTIQCIPLPWQCDGWATCEDESDEANCPEVTGEVRPHHGKEAVDPRQGRARGGDPSHFHAVNVAQPVRFSRKCPTGWHHYEGTASCYRVYLSGENYWDAAQTCQRLNGSLATFSTDQELRFVLAQEWDQPERSFGWKDQRKLWVGYQYVITGRNRSLEGRWEVAFKDWGVSDTMVHRRLLCPCVGTLHTHLKLGARFRRVPVRLGGALSRRSPRPTPACEPRLGAKTLQV

SEQ ID NO: 43763 - protein, 220 aa, Homo sapiens
MERYAGALEEVADGARQQERHYQLLSALQSLVKELPSSFQQRLSYTTLSDLALALLDGTVFEIVQGLLEIQHLTEKSLYNQRLRLQNEHRVLRQALRQKHQEAQQACRPHNLPVLQAAQQRELEAVEHRIREEQRAMDQKIVLELDRKVADQQSTLEKAGVAGFYVTTNPQELMLQMNLLELIRKLQQRGCWAGKAALGLGGPWQLPAAQCDQKGSPVPP

SEQ ID NO: 43764 - protein, 220 aa, Homo sapiens
MERYAAALEEVADGARQQERHYQLLSALQSLVKELPSSFQQRLSYTTLSDLALALLDGTVFEIVQGLLEIQHLTEKSLYNQRLRLQNEHRVLRQALRQKHQEAQQACRPHNLPVVQAAQQRELEAVEHRIREEQRAMDQKIILELDRKVADQQSTLEKAGVAGFYVTTNPQELMLQMNLLELIRKLQQRGCRAGNAALGLGGPWQSPAAQCDQKGSPVPP

SEQ ID NO: 43765 - protein, 773 aa, Homo sapiens
METDESPSPLPCGPAGEAVMESRARPFQALPREQSPPPPLQTSSGAEVMDVGSGGDGQSELPAEDPFNFYGASLLSKGSFSKGRLLIDPNCSGHSPRTARHAPAVRKFSPDLKLLKDVKISVSFTESCRSKDRKVLYTGAERDVRAECGLLLSPVSGDVHACPFGGSVGDGVGIGGESADKKDEENELDQEKRVEYAVLDELEDFTDNLELDEEGAGGFTAKAIVQRDRVDEEALNFPYEDDFDNDVDALLEEGLCAPKKRRTEEKYGGDSDHPSDGETSVQPMMTKIKTVLKSRGRPPTEPLPDGWIMTFHNSGVPVYLHRESRVVTWSRPYFLGTGSIRKHDPPLSSIPCLHYKKMKDNEEREQSSDLTPSGDVSPVKPLSRSAELEFPLDEPDSMGADPGPPDEKDPLGAEAAPGALGQVKAKVEVCKDESVDLEEFRSYLEKRFDFEQVTVKKFRTWAERRQFNREMKRKQAESERPILPANQKLITLSVQDAPTKKEFVINPNGKSEVCILHEYMQRVLKVRPVYNFFECENPSEPFGASVTIDGVTYGSGTASSKKLAKNKAARATLEILIPDFVKQTSEEKPKDSEELEYFNHISIEDSRVYELTSKAGLLSPYQILHECLKRNHGMGDTSIKFEVVPGKNQKSEYVMACGKHTVRGWCKNKRVGKQLASQKILQLLHPHVKNWGSLLRMYGRESSKMVKQETSDKSVIELQQYAKKNKPNLHILSKLQEEMKRLAEEREETRKKPKMSIVASAQPGGEPLCTVDV

SEQ ID NO: 43766 - protein, 740 aa, Homo sapiens
METDESPSPLPCGPAGEAVMESRARPFQALPREQSPPPPLQTSSGAEVMDVGSGGDGQSELPAEDPFNFYGASLLSKGSFSKGRLLIDPNCSGHSPRTARHAPAVRKFSPDLKLLKDVKISVSFTESCRSKDRKVLYTGAERDVRAECGLLLSPVSGDVHACPFGGSVGDGVGIGGESADKKDEENELDQEKRVEYAVLDELEDFTDNLELDEEGAGGFTAKAIVQRDRVDEEALNFPYEDDFDNDVDALLEEGLCAPKKRRTEEKYGGDSDHPSDGETSVQPMMTKIKTVLKSRGRPPTEPLPDGWIMTFHNSGVPVYLHRESRVVTWSRPYFLGTGSIRKHDPPLSSIPCLHYKKMKDNEEREQSSDLTPSGDVSPVKPLSRSAELEFPLDEPDSMGADPGPPDEKDPLGAEAAPGALGQVKAKVEVCKDESVDLEEFRSYLEKRFDFEQVTVKKFRTWAERRQFNREMKRKQAESERPILPANQKLITLSVQDAPTKKEFVINPNGKSEVCILHEYMQRVLKVRPVYNFFECARATLEILIPDFVKQTSEEKPKDSEELEYFNHISIEDSRVYELTSKAGLLSPYQILHECLKRNHGMGDTSIKFEVVPGKNQKSEYVMACGKHTVRGWCKNKRVGKQLASQKILQLLHPHVKNWGSLLRMYGRESSKMVKQETSDKSVIELQQYAKKNKPNLHILSKLQEEMKRLAEEREETRKKPKMSIVASAQPGGEPLCTVDV

SEQ ID NO: 43767 - protein, 740 aa, Homo sapiens; identical to SEQ ID NO: 43766

SEQ ID NO: 43768 - protein, 125 aa, Homo sapiens
METDESPSPLPCGPAGEAVMESRARPFQALPREQSPPPPLQTSSGAEVMDVGSGGDGQSELPAEDPFNFYGASLLSKGSFSKGRLLIDPNCSGHSPRTARHAPAVRKFSPDLKLLKDVKISVSFT

SEQ ID NO: 43769 - protein, 187 aa, Homo sapiens
MVGSLNCIVAVSQNMGIGKNGDLPWPPLRNEFRYFQRMTTTSSVEGKQNLVIMGKKTWFSIPEKNRPLKGRINLVLSRELKEPPQGAHFLSRSLDDALKLTEQPELANKVDMVWIVGGSSVYKEAMNHPGHLKLFVTRIMQDFESDTFFPEIDLEKYKLLPEYPGVLSDVQEEKGIKYKFEVYEKND

SEQ ID NO: 43770 - protein, 187 aa, Homo sapiens; identical to SEQ ID NO: 43769

SEQ ID NO: 43771 - protein, 320 aa, Homo sapiens
MAAVRMLRTWSRNAGKLICVRYFQTCGNVHVLKPNYVCFFGYPSFKYSHPHHFLKTTAALRGQVVQFKLSDIGEGIREVTVKEWYVKEGDTVSQFDSICEVQSDKASVTITSRYDGVIKKLYYNLDDIAYVGKPLVDIETEALKDSEEDVVETPAVSHDEHTHQEIKGRKTLATPAVRRLAMENNIKLSEVVGSGKDGRILKEDILNYLEKQTGAILPPSPKVEIMPPPPKPKDMTVPILVSKPPVFTGKDKTEPIKGFQKAMVKTMSAALKIPHFGYCDEIDLTELVKLREELKPIAFARGIKLSFMPFFLKYYFSWKS

SEQ ID NO: 43772 - protein, 482 aa, Homo sapiens
MAAVRMLRTWSRNAGKLICVRYFQTCGNVHVLKPNYVCFFGYPSFKYSHPHHFLKTTAALRGQVVQFKLSDIGEGIREVTVKEWYVKEGDTVSQFDSICEVQSDKASVTITSRYDGVIKKLYYNLDDIAYVGKPLVDIETEALKDSEEDVVETPAVSHDEHTHQEIKGRKTLATPAVRRLAMENNIKLSEVVGSGKDGRILKEDILNYLEKQTGAILPPSPKVEIMPPPPKPKDMTVPILVSKPPVFTGKDKTEPIKGFQKAMVKTMSAALKIPHFGYCDEIDLTELVKLREELKPIAFARGIKLSFMPFFLKAASLGLLQFPILNASVDENCQNITYKASHNIGIAMDTEQGLIVPNVKNVQICSIFDIATELNRLQKLGSVSQLSTTDLTGGTFTLSNIGSIGGTFAKPVIMPPEVAIGALGSIKAIPRFNQKGEVYKAQIMNVSWSADHRVIDGATMSRFSNLWKSYLENPAFMLLDLK

SEQ ID NO: 43773 - protein, 301 aa, Homo sapiens
MENNIKLSEVVGSGKDGRILKEDILNYLEKQTGAILPPSPKVEIMPPPPKPKDMTVPILVSKPPVFTGKDKTEPIKGFQKAMVKTMSAALKIPHFGYCDEIDLTELVKLREELKPIAFARGIKLSFMPFFLKAASLGLLQFPILNASVDENCQNITYKASHNIGIAMDTEQGLIVPNVKNVQICSIFDIATELNRLQKLGSVSQLSTTDLTGGTFTLSNIGSIGGTFAKPVIMPPEVAIGALGSIKAIPRFNQKGEVYKAQIMNVSWSADHRVIDGATMSRFSNLWKSYLENPAFMLLDLK

SEQ ID NO: 43774 - protein, 509 aa, Homo sapiens
MQSWSRVYCSLAKRGHFNRISHGLQGLSAVPLRTYADQPIDADVTVIGSGPGGYVAAIKAAQLGFKTVCIEKNETLGGTCLNVGCIPSKALLNNSHYYHMAHGKDFASRGIEMSEVRLNLDKMMEQKSTAVKALTGGIAHLFKQNKVVHVNGYGKITGKNQVTATKADGGTQVIDTKNILIATGSEVTPFPGITIDEDTIVSSTGALSLKKVPEKMVVIGAGVIGVELGSVWQRLGADVTAVEFLGHVGGVGIDMEISKNFQRILQKQGFKFKLNTKVTGATKKSDGKIDVSIEAASGGKAEVITCDVLLVCIGRRPFTKNLGLEELGIELDPRGRIPVNTRFQTKIPNIYAIGDVVAGPMLAHKAEDEGIICVEGMAGGAVHIDYNCVPSVIYTHPEVAWVGKSEEQLKEEGIEYKVGKFPFAANSRAKTNADTDGMVKILGQKSTDRVLGAHILGPGAGEMVNEAALALEYGASCEDIARVCHAHPTLSEAFREANLAASFGKSINF

SEQ ID NO: 43775 - protein, 509 aa, Homo sapiens; identical to SEQ ID NO: 43774

SEQ ID NO: 43776 - protein, 461 aa, Homo sapiens
MQSWSRVYCSLAKRGHFNRISHGLQGLSAVPLRTYADQPIDADVTVIGSGPGGYVAAIKAAQLGFKTVCIEKNETLGGTCLNVGCIPSKALLNNSHYYHMAHGKDFASRGIEMSEVRLNLDKMMEQKSTAVKALTGGIAHLFKQNKIDEDTIVSSTGALSLKKVPEKMVVIGAGVIGVELGSVWQRLGADVTAVEFLGHVGGVGIDMEISKNFQRILQKQGFKFKLNTKVTGATKKSDGKIDVSIEAASGGKAEVITCDVLLVCIGRRPFTKNLGLEELGIELDPRGRIPVNTRFQTKIPNIYAIGDVVAGPMLAHKAEDEGIICVEGMAGGAVHIDYNCVPSVIYTHPEVAWVGKSEEQLKEEGIEYKVGKFPFAANSRAKTNADTDGMVKILGQKSTDRVLGAHILGPGAGEMVNEAALALEYGASCEDIARVCHAHPTLSEAFREANLAASFGKSINF

SEQ ID NO: 43777 - protein, 486 aa, Homo sapiens
MQSWSRVYCSLAKRGHFNRISHGLQGLSAVPLRTYADQPIDADVTVIGSGPGGYVAAIKAAQLGFKALLNNSHYYHMAHGKDFASRGIEMSEVRLNLDKMMEQKSTAVKALTGGIAHLFKQNKVVHVNGYGKITGKNQVTATKADGGTQVIDTKNILIATGSEVTPFPGITIDEDTIVSSTGALSLKKVPEKMVVIGAGVIGVELGSVWQRLGADVTAVEFLGHVGGVGIDMEISKNFQRILQKQGFKFKLNTKVTGATKKSDGKIDVSIEAASGGKAEVITCDVLLVCIGRRPFTKNLGLEELGIELDPRGRIPVNTRFQTKIPNIYAIGDVVAGPMLAHKAEDEGIICVEGMAGGAVHIDYNCVPSVIYTHPEVAWVGKSEEQLKEEGIEYKVGKFPFAANSRAKTNADTDGMVKILGQKSTDRVLGAHILGPGAGEMVNEAALALEYGASCEDIARVCHAHPTLSEAFREANLAASFGKSINF

SEQ ID NO: 43778 - protein, 410 aa, Homo sapiens
MAHGKDFASRGIEMSEVRLNLDKMMEQKSTAVKALTGGIAHLFKQNKVVHVNGYGKITGKNQVTATKADGGTQVIDTKNILIATGSEVTPFPGITIDEDTIVSSTGALSLKKVPEKMVVIGAGVIGVELGSVWQRLGADVTAVEFLGHVGGVGIDMEISKNFQRILQKQGFKFKLNTKVTGATKKSDGKIDVSIEAASGGKAEVITCDVLLVCIGRRPFTKNLGLEELGIELDPRGRIPVNTRFQTKIPNIYAIGDVVAGPMLAHKAEDEGIICVEGMAGGAVHIDYNCVPSVIYTHPEVAWVGKSEEQLKEEGIEYKVGKFPFAANSRAKTNADTDGMVKILGQKSTDRVLGAHILGPGAGEMVNEAALALEYGASCEDIARVCHAHPTLSEAFREANLAASFGKSINF

SEQ ID NO: 43779 - protein, 459 aa, Homo sapiens
MLIYVAAIKAAQLGFKTVCIEKNETLGGTCLNVGCIPSKALLNNSHYYHMAHGKDFASRGIEMSEVRLNLDKMMEQKSTAVKALTGGIAHLFKQNKVVHVNGYGKITGKNQVTATKADGGTQVIDTKNILIATGSEVTPFPGITIDEDTIVSSTGALSLKKVPEKMVVIGAGVIGVELGSVWQRLGADVTAVEFLGHVGGVGIDMEISKNFQRILQKQGFKFKLNTKVTGATKKSDGKIDVSIEAASGGKAEVITCDVLLVCIGRRPFTKNLGLEELGIELDPRGRIPVNTRFQTKIPNIYAIGDVVAGPMLAHKAEDEGIICVEGMAGGAVHIDYNCVPSVIYTHPEVAWVGKSEEQLKEEGIEYKVGKFPFAANSRAKTNADTDGMVKILGQKSTDRVLGAHILGPGAGEMVNEAALALEYGASCEDIARVCHAHPTLSEAFREANLAASFGKSINF

SEQ ID NO: 43780 - protein, 647 aa, Homo sapiens
MWRVCARRAQNVAPWAGLEARWTALQEVPGTPRVTSRSGPAPARRNSVTTGYGGVRALCGWTPSSGATPRNRLLLQLLGSPGRRYYSLPPHQKVPLPSLSPTMQAGTIARWEKKEGDKINEGDLIAEVETDKATVGFESLEECYMAKILVAEGTRDVPIGAIICITVGKPEDIEAFKNYTLDSSAAPTPQAAPAPTPAATASPPTPSAQAPGSSYPPHMQVLLPALSPTMTMGTVQRWEKKVGEKLSEGDLLAEIETDKATIGFEVQEEGYLAKILVPEGTRDVPLGTPLCIIVEKEADISAFADYRPTEVTDLKPQVPPPTPPPVAAVPPTPQPLAPTPSAPCPATPAGPKGRVFVSPLAKKLAVEKGIDLTQVKGTGPDGRITKKDIDSFVPSKVAPAPAAVVPPTGPGMAPVPTGVFTDIPISNIRRVIAQRLMQSKQTIPHYYLSIDVNMGEVLLVRKELNKILEGRSKISVNDFIIKASALACLKVPEANSSWMDTVIRQNHVVDVSVAVSTPAGLITPIVFNAHIKGVETIANDVVSLATKAREGKLQPHEFQGGTFTISNLGMFGIKNFSAIINPPQACILAIGASEDKLVPADNEKGFDVASMMSVTLSCDHRVVDGAVGAQWLAEFRKYLEKPITMLL

SEQ ID NO: 43781 - protein, 225 aa, Homo sapiens
MWRVCARRAQNVAPWAGLEARWTALQEVPGTPRVTSRSGPAPARRNSVTTGYGGVRALCGWTPSSGATPRNRLLLQLLGSPGRRYYSLPPHQKVPLPSLSPTMQAGTIARWEKKEGDKINEGDLIAEVETDKATVGKPEDIEAFKNYTLDSSAAPTPQAAPAPTPAATASPPTPSAQAPGSSYPPHMQVLLPALSPTMTMGTVQRWEKKVGEKLSEGDLLAEMSL

SEQ ID NO: 43782 - protein, 418 aa, Homo sapiens
MQAGTIARWEKKEGDKINEGDLLAEIETDKATIGFEVQEEGYLAKILVPEGTRDVPLGTPLCIIVEKEADISAFADYRPTEVTDLKPQVPPPTPPPVAAVPPTPQPLAPTPSAPCPATPAGPKGRVFVSPLAKKLAVEKGIDLTQVKGTGPDGRITKKDIDSFVPSKVAPAPAAVVPPTGPGMAPVPTGVFTDIPISNIRRVIAQRLMQSKQTIPHYYLSIDVNMGEVLLVRKELNKILEGRSKISVNDFIIKASALACLKVPEANSSWMDTVIRQNHVVDVSVAVSTPAGLITPIVFNAHIKGVETIANDVVSLATKAREGKLQPHEFQGGTFTISNLGMFGIKNFSAIINPPQACILAIGASEDKLVPADNEKGFDVASMMSVTLSCDHRVVDGAVGAQWLAEFRKYLEKPITMLL

SEQ ID NO: 43783 - protein, 367 aa, Homo sapiens
MTWLQSKPQRLQNLSQREMSGGRKTSVQVPSPANGVIEALLVPDGGKVEGGTPLFTLRKTGAAPAKAKPAEAPAAAAPKAEPTAAAVPPPAAPIPTQMPPVPSPSQPPSGKPVSAVKPTVAPPLAEPGAGKGLRSEHREKMNRMRQRIAQRLKEAQNTCAMLTTFNEIDMSNIQEMRARHKEAFLKKHNLKLGFMSAFVKASAFALQEQPVVNAVIDDTTKEVVYRDYIDISVAVATPRGLVVPVIRNVEAMNFADIERTITELGEKARKNELAIEDMDGGTFTISNGGVFGSLFGTPIINPPQSAILGMHGIFDRPVAIGGKVEVRPMMYVALTYDHRLIDGREAVTFLRKIKAAVEDPRVLLLDL

SEQ ID NO: 43784 - protein, 453 aa, Homo sapiens
MLSRSRCVSRAFSRSLSAFQKGNCPLGRRSLPGVSLCQGPGYPNSRKVVINNSVFSVRFFRTTAVCKDDLVTVKTPAFAESVTEGDVRWEKAVGDTVAEDEVVCEIETDKTSVQVPSPANGVIEALLVPDGGKVEGGTPLFTLRKTGAAPAKAKPAEAPAAAAPKAEPTAAAVPPPAAPIPTQMPPVPSPSQPPSGKPVSAVKPTVAPPLAEPGAGKGLRSEHREKMNRMRQRIAQRLKEAQNTCAMLTTFNEIDMSNIQEMRARHKEAFLKKHNLKLGFMSAFVKASAFALQEQPVVNAVIDDTTKEVVYRDYIDISVAVATPRGLVVPVIRNVEAMNFADIERTITELGEKARKNELAIEDMDGGTFTISNGGVFGSLFGTPIINPPQSAILGMHGIFDRPVAIGGKVEVRPMMYVALTYDHRLIDGREAVTFLRKIKAAVEDPRVLLLDL

SEQ ID NO: 43785 - protein, 395 aa, Homo sapiens
MAWRHLKKRAQDAVIILGGGGLLFASYLMATGDERFYAEHLMPTLQGLLDPESAHRLAVRFTSLGLLPRARFQDSDMLEVRVLGHKFRNPVGIAAGFDKHGEAVDGLYKMGFGFVEIGSVTPKPQEGNPRPRVFRLPEDQAVINRYGFNSHGLSVVEHRLRARQQKQAKLTEDGLPLGVNLGKNKTSVDAAEDYAEGVRVLGPLADYLVVNVSSPNTAGLRSLQGKAELRRLLTKVLQERDGLRRVHRPAVLVKIAPDLTSQDKEDIASVVKELGIDGLIVTNTTVSRPAGLQGALRSETGGLSGKPLRDLSTQTIREMYALTQGRVPIIGVGGVSSGQDALEKIRAGASLVQLYTALTFWGPPVVGKVKRELEALLKEQGFGGVTDAIGADHRR

SEQ ID NO: 43786 - protein, 519 aa, Homo sapiens
MAAPSRLLIRGGRVVNDDFSEVADVLVEDGVVRALGHDLLPPGGAPAGLRVLDAAGKLVLPGGIDTHTHMQFPFMGSRSIDDFHQGTKAALSGGTTMIIDFAIPQKGGSLIEAFETWRSWADPKVCCDYSLHVAVTWWSDQVKEEMKILVQDKGVNSFKMFMAYKDLYMVTDLELYEAFSRCKEIGAIAQVHAENGDLIAEGAKKMLALGITGPEGHELCRPEAVEAEATLRAITIASAVNCPLYIVHVMSKSAAKVIADARRDGKVVYGEPIAASLGTDGTHYWNKEWHHAAHHVMGPPLRPDPSTPDFLMNLLANDDLTTTGTDNCTFNTCQKALGKDDFTKIPNGVNGVEDRMSVIWEKGVHSGKMDENRFVAVTSTNAAKIFNLYPRKGRIAVGSDADIVIWDPKGTRTISAKTHHQAVNFNIFEGMVCHGVPLVTISRGKVVYEAGVFSVTAGDGKFIPRKPFAEYIYKRIKQRDRTCTPTPVERAPYKGEVATLKSRVTKEDATAGTRKQAHP

SEQ ID NO: 43787 - protein, 572 aa, Homo sapiens
MSYQGKKNIPRITSDRLLIKGGKIVNDDQSFYADIYMEDGLIKQIGENLIVPGGVKTIEAHSRMVIPGGIDVHTRFQMPDQGMTSADDFFQGTKAALAGGTTMIIDHVVPEPGTSLLAAFDQWREWADSKSCCDYSLHVDISEWHKGIQEEMEALVKDHGVNSFLVYMAFKDRFQLTDCQIYEVLSVIRDIGAIAQVHAENGDIIAEEQQRILDLGITGPEGHVLSRPEEVEAEAVNRAITIANQTNCPLYITKVMSKSSAEVIAQARKKGTVVYGEPITASLGTDGSHYWSKNWAKAAAFVTSPPLSPDPTTPDFLNSLLSCGDLQVTGSAHCTFNTAQKAVGKDNFTLIPEGTNGTEERMSVIWDKAVVTGKMDENQFVAVTSTNAAKVFNLYPRKGRIAVGSDADLVIWDPDSVKTISAKTHNSSLEYNIFEGMECRGSPLVVISQGKIVLEDGTLHVTEGSGRYIPRKPFPDFVYKRIKARSRLAELRGVPRGLYDGPVCEVSVTPKTVTPASSAKTSPAKQQAPPVRNLHQSGFSLSGAQIDDNIPRRTTQRIVAPPGGRANITSLG

SEQ ID NO: 43788 - protein, 536 aa, Homo sapiens
MEDGLIKQIGENLIVPGGVKTIEAHSRMVIPGGIDVHTRFQMPDQGMTSADDFFQGTKAALAGGTTMIIDHVVPEPGTSLLAAFDQWREWADSKSCCDYSLHVDISEWHKGIQEEMEALVKDHGVNSFLVYMAFKDRFQLTDCQIYEVLSVIRDIGAIAQVHAENGDIIAEEQQRILDLGITGPEGHVLSRPEEVEAEAVNRAITIANQTNCPLYITKVMSKSSAEVIAQARKKGTVVYGEPITASLGTDGSHYWSKNWAKAAAFVTSPPLSPDPTTPDFLNSLLSCGDLQVTGSAHCTFNTAQKAVGKDNFTLIPEGTNGTEERMSVIWDKAVVTGKMDENQFVAVTSTNAAKVFNLYPRKGRIAVGSDADLVIWDPDSVKTISAKTHNSSLEYNIFEGMECRGSPLVVISQGKIVLEDGTLHVTEGSGRYIPRKPFPDFVYKRIKARSRLAELRGVPRGLYDGPVCEVSVTPKTVTPASSAKTSPAKQQAPPVRNLHQSGFSLSGAQIDDNIPRRTTQRIVAPPGGRANITSLG

SEQ ID NO: 43789 - protein, 572 aa, Homo sapiens; identical to SEQ ID NO: 43787

SEQ ID NO: 43790 - protein, 536 aa, Homo sapiens; identical to SEQ ID NO: 43788

SEQ ID NO: 43791 - protein, 198 aa, Homo sapiens
MSVIWDKAVVTGKMDENQFVAVTSTNAAKVFNLYPRKGRIAVGSDADLVIWDPDSVKTIFEGMECRGSPLVVISQGKIVLEDGTLHVTEGSGRYIPRKPFPDFVYKRIKARSRLAELRGVPRGLYDGPVCEVSVTPKTVTPASSAKTSPAKQQAPPVRNLHQSGFSLSGAQIDDNIPRRTTQRIVAPPGGRANITSLG

SEQ ID NO: 43792 - protein, 684 aa, Homo sapiens
MASGRRGWDSSHEDDLPVYLARPGTTDQVPRQKYGGMFCNVEGAFESKTLDFDALSVGQRGAKTPRSGQGSDRGSGSRPGIEGDTPRRGQGREESREPAPASPAPAGVEIRSATGKEVLQNLGPKDKSDRLLIKGGRIVNDDQSFYADIYMEDGLIKQIGDNLIVPGGVKTIEANGKMVIPGGIDVHTHFQMPYKGMTTVDDFFQGTKAALAGGTTMIIDHVVPEPESSLTEAYEKWREWADGKSCCDYALHVDITHWNDSVKQEVQNLIKDKGVNSFMVYMAYKDLYQVSNTELYEIFTCLGELGAIAQVHAENGDIIAQEQTRMLEMGITGPEGHVLSRPEELEAEAVFRAITIASQTNCPLYVTKVMSKSAADLISQARKKGNVVFGEPITASLGIDGTHYWSKNWAKAAAFVTSPPLSPDPTTPDYINSLLASGDLQLSGSAHCTFSTAQKAIGKDNFTAIPEGTNGVEERMSVIWDKAVATGKMDENQFVAVTSTNAAKIFNLYPRKGRISVGSDSDLVIWDPDAVKIVSAKNHQSAAEYNIFEGMELRGAPLVVICQGKIMLEDGNLHVTQGAGRFIPCSPFSDYVYKRIKARRKMADLHAVPRGMYDGPVFDLTTTPKGGTPAGSARGSPTRPNPPVRNLHQSGFSLSGTQVDEGVRSASKRIVAPPGGRSNITSLS

SEQ ID NO: 43793 - protein, 570 aa, Homo sapiens
MSYQGKKNIPRITSDRLLIKGGRIVNDDQSFYADIYMEDGLIKQIGDNLIVPGGVKTIEANGKMVIPGGIDVHTHFQMPYKGMTTVDDFFQGTKAALAGGTTMIIDHVVPEPESSLTEAYEKWREWADGKSCCDYALHVDITHWNDSVKQEVQNLIKDKGVNSFMVYMAYKDLYQVSNTELYEIFTCLGELGAIAQVHAENGDIIAQEQTRMLEMGITGPEGHVLSRPEELEAEAVFRAITIASQTNCPLYVTKVMSKSAADLISQARKKGNVVFGEPITASLGIDGTHYWSKNWAKAAAFVTSPPLSPDPTTPDYINSLLASGDLQLSGSAHCTFSTAQKAIGKDNFTAIPEGTNGVEERMSVIWDKAVATGKMDENQFVAVTSTNAAKIFNLYPRKGRISVGSDSDLVIWDPDAVKIVSAKNHQSAAEYNIFEGMELRGAPLVVICQGKIMLEDGNLHVTQGAGRFIPCSPFSDYVYKRIKARRKMADLHAVPRGMYDGPVFDLTTTPKGGTPAGSARGSPTRPNPPVRNLHQSGFSLSGTQVDEGVRSASKRIVAPPGGRSNITSLS

SEQ ID NO: 43794 - protein, 92 aa, Homo sapiens
MSYQGKKNIPRITSDRLLIKGGRIVNDDQSFYADIYMEDGLIKQIGDNLIVPGGVKTIEANGKMVIPGGIDVHTHFQMPYKGMTTVDDFFQG

SEQ ID NO: 43795 - protein, 196 aa, Homo sapiens [sequence omitted]

SEQ ID NO: 43796 - protein, 572 aa, Homo sapiens
MSFQGKKSIPRITSDRLLIRGGRIVNDDQSFYADVHVEDGLIKQIGENLIVPGGIKTIDAHGLMVLPGGVDVHTRLQMPVLGMTPADDFCQGTKAALAGGTTMILDHVFPDTGVSLLAAYEQWRERADSAACCDYSLHVDITRWHESIKEELEALVKEKGVNSFLVFMAYKDRCQCSDSQMYEIFSIIRDLGALAQVHAENGDIVEEEQKRLLELGITGPEGHVLSHPEEVEAEAVYRAVTIAKQANCPLYVTKVMSKGAADAIAQAKRRGVVVFGEPITASLGTDGSHYWSKNWAKAAAFVTSPPVNPDPTTADHLTCLLSSGDLQVTGSAHCTFTTAQKAVGKDNFALIPEGTNGIEERMSMVWEKCVASGKMDENEFVAVTSTNAAKIFNFYPRKGRVAVGSDADLVIWNPKATKIISAKTHNLNVEYNIFEGVECRGAPAVVISQGRVALEDGKMFVTPGAGRFVPRKTFPDFVYKRIKARNRLAEIHGVPRGLYDGPVHEVMVPAKPGSGAPARASCPGKISVPPVRNLHQSGFSLSGSQADDHIARRTAQKIMAPPGGRSNITSLS

SEQ ID NO: 43797 - protein, 412 aa, Homo sapiens
MPVLGMTPADDFCQGTKAALAGGTTMILDHVFPDTGVSLLAAYEQWRERADSAACCDYSLHVDITRWHESIKEELEALVKEKGVNSFLVFMAYKDRCQCSDSQMYEIFSIIRDLGALAQVHAENGDIVEEVEAEAVYRAVTIAKQANCPLYVTKVMSKGAADAIAQAKRRGVVVFGEPITASLGTDGSHYWSKNWAKAAAFVTSPPVNPDPTTADHLTCLLSSGDLQVTGSAHCTFTTAQKAVGKDNFALIPEGTNGIEERMSMVWEKCVASGKMDENEFVAVTSTNAAKIFNFYPRKGRVAVGSDADLVIWNPKATKIISAKTHNLLAEIHGVPRGLYDGPVHEVMVPAKPGSGAPARASCPGKISVPPVRNLHQSGFSLSGSQADDHIARRTAQKIMAPPGGRSNITSLS

SEQ ID NO: 43798 - protein, 412 aa, Homo sapiens; identical to SEQ ID NO: 43797

SEQ ID NO: 43799 - protein, 564 aa, Homo sapiens
MLANSASVRILIKGGKVVNDDCTHEADVYIENGIIQQVGRELMIPGGAKVIDATGKLVIPGGIDTSTHFHQTFMNATCVDDFYHGTKAALVGGTTMIIGHVLPDKETSLVDAYEKCRGLADPKVCCDYALHVGITWWAPKVKAEMETLVREKGVNSFQMFMTYKDLYMLRDSELYQVLHACKDIGAIARVHAENGELVAEGAKEALDLGITGPEGIEISRPEELEAEATHRVITIANRTHCPIYLVNVSSISAGDVIAAAKMQGKVVLAETTTAHATLTGLHYYHQDWSHAAAYVTVPPLRLDTNTSTYLMSLLANDTLNIVASDHRPFTTKQKAMGKEDFTKIPHGVSGVQDRMSVIWERGVVGGKMDENRFVAVTSSNAAKLLNLYPRKGRIIPGADADVVVWDPEATKTISASTQVQGGDFNLYENMRCHGVPLVTISRGRVVYENGVFMCAEGTGKFCPLRSFPDTVYKKLVQREKTLKVRGVDRTPYLGDVAVVVHPGKKEMGTPLADTPTRPVTRHGGMRDLHESSFSLSGSQIDDHVPKRASARILAPPGGRSSGIW

SEQ ID NO: 43800 - protein, 564 aa, Homo sapiens; identical to SEQ ID NO: 43799

SEQ ID NO: 43801 - protein, 190 aa, Homo sapiens
MLANSASVRILIKGGKVVNDDCTHEADVYIENGIIQQVGRELMIPGGAKVIDATGKLVIPGGIDTSTHFHQTFMNATCVDDFYHGTKAALVGGTTMIIGHVLPDKETSLVDAYEKCRGLADPKVCCDYALHVGITWWAPKVKAEMETLVREKGVNSFQMFMTYKDLYMLRDSELYQVLHACKDIGAIARV

SEQ ID NO: 43802 - protein, 174 aa, Homo sapiens
MLANSASVRILIKGGKVVNDDCTHEADVYIENGIIQQVGRELMIPGGAKVIDATGKLVIPGGIDTSTHFHQTFMNATCVDDFYHGTKAALVGGTTMIIGHVLPDKETSLVDAYEKCRGLADPKVCCDYALHVGITWWAPKVKAEMETLVREKGVNSFQMFMTYKDLYMLRDSEL

SEQ ID NO: 43803 - protein, 165 aa, Homo sapiens
MLANSASVRILIKGGKVVNDDCTHEADVYIENGIIQQVGRELMIPGGAKVIDATGKLVIPGGIDTSTHFHQTFMNATCVDDFYHGTKAALVGGTTMIIGHVLPDKETSLVDAYEKCRGLADPKVCCDYALHVGITWWAPKVKAEMETLVREKGVNSFQMFMTYKD

SEQ ID NO: 43804 - protein, 173 aa, Homo sapiens
MAPVLSKDSADIESILALNPRTQTHATLRSTSAKKLDKKHWKRNPDKNCFNCEKLENNFDDIKHTTLGERGALREAMRCLKCADAPCQKSCPTNLDIKSFITSIANKNYYGAAKMIFSDNPLGLTCGMVCPTSDLCVGGCNLYATEEGPINIGGLQQFATETLILAFSLMNHL

SEQ ID NO: 43805 - protein, 1025 aa, Homo sapiens [sequence omitted]

SEQ ID NO: 43806 - protein, 156 aa, Homo sapiens
MAPVLSKDSADIENCEKLENNFDDIKHTTLGERGALREAMRCLKCADAPCQKSCPTNLDIKSFITSIANKNYYGAAKMIFSDNPLGLTCGMVCPTSDLCVGGCNLYATEEGPINIGGLQQFATEVNGLLHFQNSVSLWFQKTANISFLSCGSLQDA

SEQ ID NO: 43807 - protein, 493 aa, Homo sapiens
MILNSLSLCYHNKLILAPMVRVGTLPMRLLALDYGADIVYCEELIDLKMIQCKRVVNEVLSTVDFVAPDDRVVFRTCEREQNRVVFQMGTSDAERALAVARLVENDVAGIDVNMGCPKQYSTKGGMGAALLSDPDKIEKILSTLVKGTRRPVTCKIRILPSLEDTLSLVKRIERTGIAAIAVHGRKREERPQHPVSCEVIKAIADTLSIPVIANGGSHDHIQQYSDIEDFRQATAASSVMVARAAMWNPSIFLKEGLRPLEEVMQKYIRYAVQYDNHYTNTKYCLCQMLREQLESPQGRLLHAAQSSREICEAFGLGAFYEETTQELDAQQARLSAKTSEQTGEPAEDTSGVIKMAVKFDRRAYPAQITPKMCLLEWCRREKLAQPVYETVQRPLDRLFSSIVTVAEQKYQSTLWDKSKKLAEQAAAIVCLRSQGLPEGRLGEESPSLHKRKREAPDQDPGGPRAQELAQPGDLCKKPFVALGSGEESPLEGW

SEQ ID NO: 43808 - protein, 493 aa, Homo sapiens; identical to SEQ ID NO: 43807

SEQ ID NO: 43809 - protein, 458 aa, Homo sapiens
MILNSLSLCYHNKLILAPMVRVGTLPMRLLALDYGADIVYCEELIDLKMIQCKRVVNEVLSTVDFVAPDDRVVFRTCEREQNRVVFQMGGMGAALLSDPDKIEKILSTLVKGTRRPVTCKIRILPSLEDTLSLVKRIERTGIAAIAVHGRKREERPQHPVSCEVIKAIADTLSIPVIANGGSHDHIQQYSDIEDFRQATAASSVMVARAAMWNPSIFLKEGLRPLEEVMQKYIRYAVQYDNHYTNTKYCLCQMLREQLESPQGRLLHAAQSSREICEAFGLGAFYEETTQELDAQQARLSAKTSEQTGEPAEDTSGVIKMAVKFDRRAYPAQITPKMCLLEWCRREKLAQPVYETVQRPLDRLFSSIVTVAEQKYQSTLWDKSKKLAEQAAAIVCLRSQGLPEGRLGEESPSLHKRKREAPDQDPGGPRAQELAQPGDLCKKPFVALGSGEESPLEGW

SEQ ID NO: 43810 - protein, 285 aa, Homo sapiens
MAGLGHPAAFGRATHAVVRALPESLGQHALRSAKGEEVDVARAERQHQLYVGVLGSKLGLQVVELPADESLPDCVFVEDVAVVCEETALITRPGAPSRRKEVDMMKEALEKLQLNIVEMKDENATLDGGDVLFTGREFFVGLSKRTNQRGAEILADTFKDYAVSTVPVADGLHLKSFCSMAGPNLIAIGSSESAQKALKIMQQMSDHRYDKLTVPDDIAANCIYLNIPNKGHVLLHRTPEEYPESAKVYEKLKDHMLIPVSMSELEKVDGLLTCCSVLINKKVDS

SEQ ID NO: 43811 - protein, 192 aa, Homo sapiens
MWLYGLGQVDMMKEALEKLQLNIVEMKDENATLDGGDVLFTGREFFVGLSKRTNQRGAEILADTFKDYAVSTVPVADGLHLKSFCSMAGPNLIAIGSSESAQKALKIMQQMSDHRYDKLTVPDDIAANCIYLNIPNKGHVLLHRTPEEYPESAKVYEKLKDHMLIPVSMSELEKVDGLLTCCSVLINKKVDS

SEQ ID NO: 43812 - protein, 182 aa, Homo sapiens
MMKEALEKLQLNIVEMKDENATLDGGDVLFTGREFFVGLSKRTNQRGAEILADTFKDYAVSTVPVADGLHLKSFCSMAGPNLIAIGSSESAQKALKIMQQMSDHRYDKLTVPDDIAANCIYLNIPNKGHVLLHRTPEEYPESAKVYEKLKDHMLIPVSMSELEKVDGLLTCCSVLINKKVDS

SEQ ID NO: 43813 - protein, 285 aa, Homo sapiens; identical to SEQ ID NO: 43810

SEQ ID NO: 43814 - protein, 185 aa, Homo sapiens
MVDMMKEALEKLQLNIVEMKDENATLDGGDVLFTGREFFVGLSKRTNQRGAEILADTFKDYAVSTVPVADGLHLKSFCSMAGPNLIAIGSSESAQKALKIMQQMSDHRYDKLTVPDDIAANCIYLNIPNKGHVLLHRTPEEYPESAKVYEKLKDHMLIPVSMSELEKVDGLLTCCSVLINKKVDS

SEQ ID NO: 43815 - protein, 285 aa, Homo sapiens
MGTPGEGLGRCSHALIRGVPESLASGEGAGAGLPALDLAKAQREHGVLGGKLRQRLGLQLLELPPEESLPLGPLLGDTAVIQGDTALITRPWSPARRPEVDGVRKALQDLGLRIVEIGDENATLDGTDVLFTGREFFVGLSKWTNHRGAEIVADTFRDFAVSTVPVSGPSHLRGLCGMGGPRTVVAGSSDAAQKAVRAMAVLTDHPYASLTLPDDAAADCLFLRPGLPGVPPFLLHRGGGDLPNSQEALQKLSDVTLVPVSCSELEKAGAGLSSLCLVLSTRPHS

SEQ ID NO: 43816 - protein, 285 aa, Homo sapiens; identical to SEQ ID NO: 43815

SEQ ID NO: 43817 - protein, 285 aa, Homo sapiens; identical to SEQ ID NO: 43815

SEQ ID NO: 43818 - protein, 285 aa, Homo sapiens; identical to SEQ ID NO: 43815

SEQ ID NO: 43819 - protein, 285 aa, Homo sapiens; identical to SEQ ID NO: 43815

SEQ ID NO: 43820 - protein, 285 aa, Homo sapiens; identical to SEQ ID NO: 43815

SEQ ID NO: 43821 - protein, 285 aa, Homo sapiens; identical to SEQ ID NO: 43815

SEQ ID NO: 43822 - protein, 188 aa, Homo sapiens
  VARIANT 1: note = MOD_RES - Any amino acid
XRRPEVDGVRKALQDLGLRIVEIGDENATLDGTDVLFTGREFFVGLSKWTNHRGAEIVADTFRDFAVSTVPVSGPSHLRGLCGMGGPRTVVAGSSDAAQKAVRMTQLLTVSFFVLGCLVCPLSSCTVEVGICPTARRHCRSSLMSPWYLCPAQNWRRLAPGSAPSAWCSAHAPTAEGLALGYCWPGVG

SEQ ID NO: 43823 - protein, 188 aa, Homo sapiens; identical to SEQ ID NO: 43822
  VARIANT 1: note = MOD_RES - Any amino acid

SEQ ID NO: 43824 - protein, 285 aa, Homo sapiens; identical to SEQ ID NO: 43815

SEQ ID NO: 43825 - protein, 285 aa, Homo sapiens; identical to SEQ ID NO: 43815

SEQ ID NO: 43826 - protein, 285 aa, Homo sapiens; identical to SEQ ID NO: 43815

SEQ ID NO: 43827 - protein, 236 aa, Homo sapiens
MGTPGEGLGRCSHALIRGVPESLASGEGAGAGLPALDLAKAQREHGVLGGKLRQRLGLQLLELPPEESLPLGPLLGDTAVIQGDTALITRPWSPARRPEVDGVRKALQDLGLRIVEIGDENATLDGTDVLFTGREFFVGLSKWTNHRGAEIVADTFRDFAVSTVPVSGPSHLRGLCGMGGPRTVVAGSSDAAQKAVRAMAVLTDHPYASLTLPDDAAADCLFLRPGLPGVPPFLLH

SEQ ID NO: 43828 - protein, 226 aa, Homo sapiens
MGTPGEGLGRCSHALIRGVPESLASGEGAGAGLPALDLAKAQREHGVLGGKLRQRLGLQLLELPPEESLPLGPLLGDTAVIQGDTALITRPWSPARRPEVDGVRKALQDLGLRIVEIGDENATLDGTDVLFTGREFFVGLSKWTNHRGAEIVADTFRDFAVSTVPVSGPSHLRGLCGMGGPRTVVAGSSDAAQKAVRAMAVLTDHPYASLTLPDDAAADCLFLRPG

SEQ ID NO: 43829 - protein, 236 aa, Homo sapiens; identical to SEQ ID NO: 43827

SEQ ID NO: 43830 - protein, 285 aa, Homo sapiens; identical to SEQ ID NO: 43815

SEQ ID NO: 43831 - protein, 285 aa, Homo sapiens; identical to SEQ ID NO: 43815

SEQ ID NO: 43832 - protein, 285 aa, Homo sapiens; identical to SEQ ID NO: 43815

SEQ ID NO: 43833 - protein, 226 aa, Homo sapiens; identical to SEQ ID NO: 43828

SEQ ID NO: 43834 - protein, 285 aa, Homo sapiens; identical to SEQ ID NO: 43815

SEQ ID NO: 43835 - protein, 226 aa, Homo sapiens; identical to SEQ ID NO: 43828

SEQ ID NO: 43836 - protein, 226 aa, Homo sapiens; identical to SEQ ID NO: 43828

SEQ ID NO: 43837 - protein, 285 aa, Homo sapiens; identical to SEQ ID NO: 43815

SEQ ID NO: 43838 - protein, 226 aa, Homo sapiens; identical to SEQ ID NO: 43828

SEQ ID NO: 43839 - protein, 188 aa, Homo sapiens; identical to SEQ ID NO: 43822
  VARIANT 1: note = MOD_RES - Any amino acid

SEQ ID NO: 43840 - protein, 188 aa, Homo sapiens; identical to SEQ ID NO: 43822
  VARIANT 1: note = MOD_RES - Any amino acid

SEQ ID NO: 43841 - protein, 226 aa, Homo sapiens; identical to SEQ ID NO: 43828

SEQ ID NO: 43842 - protein, 285 aa, Homo sapiens; identical to SEQ ID NO: 43815

SEQ ID NO: 43843 - protein, 236 aa, Homo sapiens; identical to SEQ ID NO: 43827

SEQ ID NO: 43844 - protein, 236 aa, Homo sapiens; identical to SEQ ID NO: 43827

SEQ ID NO: 43845 - protein, 285 aa, Homo sapiens; identical to SEQ ID NO: 43815

SEQ ID NO: 43846 - protein, 225 aa, Homo sapiens
MGTPGEGLGRCSHALIRGVPESLASGEGAGAGLPALDLAKAQREHGVLGGKLRQRLGLQLLELPPEESLPLGPLLGDTAVIQGDTALITRPWSPARRPEVDGVRKALQDLGLRIVEIGDENATLDGTDVLFTGREFFVGLSKWTNHRGAEIVADTFRDFAVSTVPVSGPSHLRGLCGMGGPRTVVAGSSDAAQKAVRAMAVLTDHPYASLTLPDDAAADCLFLRP

SEQ ID NO: 43847 - protein, 285 aa, Homo sapiens; identical to SEQ ID NO: 43815

SEQ ID NO: 43848 - protein, 188 aa, Homo sapiens; identical to SEQ ID NO: 43822
  VARIANT 1: note = MOD_RES - Any amino acid

SEQ ID NO: 43849 - protein, 188 aa, Homo sapiens; identical to SEQ ID NO: 43822
  VARIANT 1: note = MOD_RES - Any amino acid

SEQ ID NO: 43850 - protein, 285 aa, Homo sapiens; identical to SEQ ID NO: 43815

SEQ ID NO: 43851 - protein, 236 aa, Homo sapiens; identical to SEQ ID NO: 43827

SEQ ID NO: 43852 - protein, 188 aa, Homo sapiens; identical to SEQ ID NO: 43822
  VARIANT 1: note = MOD_RES - Any amino acid

SEQ ID NO: 43853 - protein, 285 aa, Homo sapiens; identical to SEQ ID NO: 43815

SEQ ID NO: 43854 - protein, 285 aa, Homo sapiens; identical to SEQ ID NO: 43815

SEQ ID NO: 43855 - protein, 236 aa, Homo sapiens; identical to SEQ ID NO: 43827

SEQ ID NO: 43856 - protein, 236 aa, Homo sapiens; identical to SEQ ID NO: 43827

SEQ ID NO: 43857 - protein, 866 aa, Homo sapiens
MLRPGAQLLRGLLLRSCPLQGSPGRPRSVCGREGEEKPPLSAETQWKDRAETVIIGGGCVGVSLAYHLAKAGMKDVVLLEKSELTAGSTWHAAGLTTYFHPGINLKKIHYDSIKLYEKLEEETGQVVGFHQPGSIRLATTPVRVDEFKYQMTRTGWHATEQYLIEPEKIQEMFPLLNMNKVLAGLYNPGDGHIDPYSLTMALAAGARKCGALLKYPAPVTSLKARSDGTWDVETPQGSMRANRIVNAAGFWAREVGKMIGLEHPLIPVQHQYVVTSTISEVKALKRELPVLRDLEGSYYLRQERDGLLFGPYESQEKMKVQDSWVTNGVPPGFGKELFESDLDRIMEHIKAAMEMVPVLKKADIINVVNGPITYSPDILPMVGPHQGVRNYWVAIGFGYGIIHAGGVGKYLSDWILHGEPPFDLIELDPNRYGKWTTTQYTEAKARESYGFNNIVGYPKEERFAGRPTQRVSGLYQRLESKCSMGFHAGWEQPHWFYKPGQDTQYRPSFRRTNWFEPVGSEYKQVMQRVAVTDLSPFGKFNIKGQDSIRLLDHLFANVIPKVGFTNISHMLTPKGRVYAELTVSHQSPGEFLLITGSGSELHDLRWIEEEAVKGGYDVEIKNITDELGVLGVAGPQARKVLQKLTSEDLSDDVFKFLQTKSLKVSNIPVTAIRISYTGELGWELYHRREDSVALYDAIMNAGQEEGIDNFGTYAMNALRLEKAFRAWGLEMNCDTNPLEAGLEYFVKLNKPADFIGKQALKQIKAKGLKRRLVCLTLATDDVDPEGNESIWYNGKVVGNTTSGSYSYSIQKSLAFAYVPVQLSEVGQQVEVELLGKNYPAVIIQEPLVLTEPTRNRLQKKGGKDKT

SEQ ID NO: 43858 - protein, 573 aa, Homo sapiens
MERQSRNSDNWRWLCWCESGLSPGQSRDERCGPAGEIRAHGWIYLARRFWAREVGKMIGLEHPLIPVQHQYVVTSTISEVKALKRELPVLRDLEGSYYLRQERDGLLFGPYESQEKMKVQDSWVTNGVPPGFGKELFESDLDRIMEHIKAAMEMVPVLKKADIINVVNGPITYSPDILPMVGPHQGVRNYWVAIGFGYGIIHAGGVGKYLSDWILHGEPPFDLIELDPNRYGKWTTTQYTEAKARESYGFNNIVGYPKEERFAGRPTQRVSGLYQRLESKCSMGFHAGWEQPHWFYKPGQDTQYRPSFRRTNWFEPVGSEYKQVMQRVAVTDLSPFGKFNIKGQDSIRLLDHLFANVIPKVGFTNISHMLTPKGRVYAELTVSHQSPGEFLLITGSGSELHDLRWIEEEAVKGGYDVEIKNITDELGVLGVAGPQARKVLQKLTSEDLSDDVFKFLQTKSLKVSNIPVTAIRISYTGELGWELYHRREDSVALYDAIMNAGQEEGIDNFGTYAMNALRLEKAFRAWGLEMNCDTNPLEAGLEYFVKLNKDQNSCFAHFKEENGWVSRWAIRPY

SEQ ID NO: 43859 - protein, 613 aa, Homo sapiens
YLIEPEKIQEMFPLLNMNKVLAGLYNPGDGHIDPYSLTMALAAGARKCGALLKYPAPVTSLKARSDGTWDVETPQGSMRANRIVNAAGFWAREVGKMIGLEHPLIPVQHQYVVTSTISEVKALKRELPVLRDLEGSYYLRQERDGLLFGPYESQEKMKVQDSWVTNGVPPGFGKELFESDLDRIMEHIKAAMEMVPVLKKADIINVVNGPITYSPDILPMVGPHQGVRNYWVAIGFGYGIIHAGGVGKYLSDWILHGEPPFDLIELDPNRYGKWTTTQYTEAKARESYGFNNIVGYPKEERFAGRPTQRVSGLYQRLESKCSMGFHAGWEQPHWFYKPGQDTQYRPSFRRTNWFEPVGSEYKQVMQRVAVTDLSPFGKFNIKGQDSIRLLDHLFANVIPKVGFTNISHMLTPKGRVYAELTVSHQSPGEFLLITGSGSELHDLRWIEEEAVKGGYDVEIKNITDELGVLGVAGPQARKVLQKLTSEDLSDDVFKFLQTKSLKVSNIPVTAIRISYTGELGWELYHRREDSVALYDAIMNAGQEEGIDNFGTYAMNALRLEKAFRAWGLEMNCDTNPLEAGLEYFVKLNKDQNSCFAHFKEENGWVSRWAIRPY

SEQ ID NO: 43860 - protein, 624 aa, Homo sapiens
MTRTGWHATEQYLIEPEKIQEMFPLLNMNKVLAGLYNPGDGHIDPYSLTMALAAGARKCGALLKYPAPVTSLKARSDGTWDVETPQGSMRANRIVNAAGFWAREVGKMIGLEHPLIPVQHQYVVTSTISEVKALKRELPVLRDLEGSYYLRQERDGLLFGPYESQEKMKVQDSWVTNGVPPGFGKELFESDLDRIMEHIKAAMEMVPVLKKADIINVVNGPITYSPDILPMVGPHQGVRNYWVAIGFGYGIIHAGGVGKYLSDWILHGEPPFDLIELDPNRYGKWTTTQYTEAKARESYGFNNIVGYPKEERFAGRPTQRVSGLYQRLESKCSMGFHAGWEQPHWFYKPGQDTQYRPSFRRTNWFEPVGSEYKQVMQRVAVTDLSPFGKFNIKGQDSIRLLDHLFANVIPKVGFTNISHMLTPKGRVYAELTVSHQSPGEFLLITGSGSELHDLRWIEEEAVKGGYDVEIKNITDELGVLGVAGPQARKVLQKLTSEDLSDDVFKFLQTKSLKVSNIPVTAIRISYTGELGWELYHRREDSVALYDAIMNAGQEEGIDNFGTYAMNALRLEKAFRAWGLEMNCDTNPLEAGLEYFVKLNKDQNSCFAHFKEENGWVSRWAIRPY

SEQ ID NO: 43861 - protein, 394 aa, Homo sapiens
MWSCWRNQSSRLDLPGTQYGIIHAGGVGKYLSDWILHGEPPFDLIELDPNRYGKWTTTQYTEAKARESYGFNNIVGYPKEERFAGRPTQRVSGLYQRLESKCSMGFHAGWEQPHWFYKPGQDTQYRPSFRRTNWFEPVGSEYKQVMQRVAVTDLSPFGKFNIKGQDSIRLLDHLFANVIPKVGFTNISHMLTPKGRVYAELTVSHQSPGEFLLITGSGSELHDLRWIEEEAVKGGYDVEIKNITDELGVLGVAGPQARKVLQKLTSEDLSDDVFKFLQTKSLKVSNIPVTAIRISYTGELGWELYHRREDSVALYDAIMNAGQEEGIDNFGTYAMNALRLEKAFRAWGLEMNCDTNPLEAGLEYFVKLNKDQNSCFAHFKEENGWVSRWAIRPY

SEQ ID NO: 43862 - protein, 1576 aa, Homo sapiens
MAERGLEPSPAAVAALPPEVRAQLAELELELSEGDITQKGYEKKRSKLLSPYSPQTQETDSAVQKELRNQTPAPSAAQTSAPSKYHRTRSGGARDERYRSDIHTEAVQAALAKHKEQKMALPMPTKRRSTFVQSPADACTPPDTSSASEDEGSLRRQAALSAALQQSLQNAESWINRSIQGSSTSSSASSTLSHGEVKGTSGSLADVFANTRIENFSAPPDVTTTTSSSSSSSSIRPANIDLPPSGIVKGMHKGSNRSSLMDTADGVPVSSRVSTKIQQLLNTLKRPKRPPLKEFFVDDSEEIVEVPQPDPNQPKPEGRQMTPVKGEPLGVICNWPPALESALQRWGTTQAKCSCLTALDMTGKPVYTLTYGKLWSRSLKLAYTLLNKLGTKNEPVLKPGDRVALVYPNNDPVMFMVAFYGCLLAEVIPVPIEVPLTRKDAGGQQIGFLLGSCGIALALTSEVCLKGLPKTQNGEIVQFKGWPRLKWVVTDSKYLSKPPKDWQPHISPAGTEPAYIEYKTSKEGSVMGVTVSRLAMLSHCQALSQACNYSEGETIVNVLDFKKDAGLWHGMFANVMNKMHTISVPYSVMKTCPLSWVQRVHAHKAKVALVKCRDLHWAMMAHRDQRDVSLSSLRMLIVTDGANPWSVSSCDAFLSLFQSHGLKPEAICPCATSAEAMTVAIRRPGVPGAPLPGRAILSMNGLSYGVIRVNTEDKNSALTVQDVGHVMPGGMMCIVKPDGPPQLCKTDEIGEICVSSRTGGMMYFGLAGVTKNTFEVIPVNSAGSPVGDVPFIRSGLLGFVGPGSLVFVVGKMDGLLMVSGRRHNADDIVATGLAVESIKTVYRGRIAVFSVSVFYDERIVVVAEQRPDASEEDSFQWMSRVLQAIDSIHQVGVYCLALVPANTLPKTPLGGIHISQTKQLFLEGSLHPCNILMCPHTCVTNLPKPRQKQPGVGPASVMVGNLVAGKRIAQAAGRDLGQIEENDLVRKHQFLAEILQWRAQATPDHVLFMLLNAKGTTVCTASCLQLHKRAERIASVLGDKGHLNAGDNVVLLYPPGIELIAAFYGCLYAGCIPVTVRPPHAQNLTATLPTVRMIVDVSKAACILTSQTLMRLLRSREAAAAVDVKTWPTIIDTDDLPRKRLPQLYKPPTPEMLAYLDFSVSTTGMLTGVKMSHSAVNALCRAIKLQCELYSSRQIAICLDPYCGLGFALWCLCSVYSGHQSVLIPPMELENNLFLWLSTVNQYKIRDTFCSYSVMELCTKGLGNQVEVLKTRGINLSCVRTCVVVAEERPRVALQQSFSKLFKDIGLSPRAVSTTFGSRVNVAICLQGTSGPDPTTVYVDLKSLRHDRVRLVERGAPQSLLLSESGKILPGVKVVIVNPETKGPVGDSHLGEIWVNSPHTASGYYTIYDSETLQADHFNTRLSFGDAAQTLWARTGYLGFVRRTELTAATGERHDALYVVGALDETLELRGLRYHPIDIETSVSRIHRSIAECAVFTWTNLLVVVVELCGSEQEALDLVPLVTNVVLEEHYLIVGVVVVVDPGVIPINSRGEKQRMHLRDSFLADQLDPIYVAYNM

SEQ ID NO: 43863 - protein, 392 aa, Homo sapiens
MAERGLEPSPAAVAALPPEVRAQLAELELELSEGDITQKGYEKKRSKLLSPYSPQTQETDSAVQKELRNQTPAPSAAQTSAPSKYHRTRSGGARDERYRSEFSLVRIYSEDIHTEAVQAALAKHKEQKMALPMPTKRRSTFVQSPADACTPPDTSSASEDEGSLRRQAALSAALQQSLQNAESWINRSIQGSSTSSSASSTLSHGEVKGTSGSLADVFANTRIENFSAPPDVTTTTSSSSSSSSIRPANIDLPPSGIVKGMHKGSNRSSLMDTADGVPVSSRVSTKIQQLLNTLKRPKRPPLKEFFVDDSEEIVEVPQPDPNQPKPEGRQMTPVKGEPLGVICNWPPALESALQRWGTTQAKCSCLTALDMTGKPVYTLTYGESARFQILLS

SEQ ID NO: 43864 - protein, 1556 aa, Homo sapiens
MADRSLEGMALPLEVRARLAELELELSEGDITQKGYEKKRSKLIGAYLPQPPRVDQALPQERRAPVTPSSASRYHRRRSSGSRDERYRSDVHTEAVQAALAKHKERKMAVPMPSKRRSLVVQTSMDAYTPPDTSSGSEDEGSVQGDSQGTPTSSQGSINMEHWISQAIHGSTTSTTSSSSTQSGGSGAAHRLADVMAQTHIENHSAPPDVTTYTSEHSIQVERPQGSTGSRTAPKYGNAELMETGDGVPVSSRVSAKIQQLVNTLKRPKRPPLREFFVDDFEELLEVQQPDPNQPKPEGAQMLAMRGEQLGVVTNWPPSLEAALQRWGTISPKAPCLTTMDTNGKPLYILTYGKLWTRSMKVAYSILHKLGTKQEPMVRPGDRVALVFPNNDPAAFMAAFYGCLLAEVVPVPIEVPLTRKDAGSQQIGFLLGSCGVTVALTSDACHKGLPKSPTGEIPQFKGWPKLLWFVTESKHLSKPPRDWFPHIKDANNDTAYIEYKTCKDGSVLGVTVTRTALLTHCQALTQACGYTEAETIVNVLDFKKDVGLWHGILTSVMNMMHVISIPYSLMKVNPLSWIQKVCQYKAKVACVKSRDMHWALVAHRDQRDINLSSLRMLIVADGANPWSISSCDAFLNVFQSKGLRQEVICPCASSPEALTVAIRRPTDDSNQPPGRGVLSMHGLTYGVIRVDSEEKLSVLTVQDVGLVMPGAIMCSVKPDGVPQLCRTDEIGELCVCAVATGTSYYGLSGMTKNTFEVFPMTSSGAPISEYPFIRTGLLGFVGPGGLVFVVGKMDGLMVVSGRRHNADDIVATALAVEPMKFVYRGRIAVFSVTVLHDERIVIVAEQRPDSTEEDSFQWMSRVLQAIDSIHQVGVYCLALVPANTLPKTPLGGIHLSETKQLFLEGSLHPCNVLMCPHTCVTNLPKPRQKQPEIGPASVMVGNLVSGKRIAQASGRDLGQIEDNDQARKFLFLSEVLQWRAQTTPDHILYTLLNCRGAIANSLTCVQLHKRAEKIAVMLMERGHLQDGDHVALVYPPGIDLIAAFYGCLYAGCVPITVRPPHPQNIATTLPTVKMIVEVSRSACLMTTQLICKLLRSREAAAAVDVRTWPLILDTDDLPKKRPAQICKPCNPDTLAYLDFSVSTTGMLAGVKMSHAATSAFCRSIKLQCELYPSREVAICLDPYCGLGFVLWCLCSVYSGHQSILIPPSELETNPALWLLAVSQYKVRDTFCSYSVMELCTKGLGSQTESLKARGLDLSRVRTCVVVAEERPRIALTQSFSKLFKDLGLHPRAVSTSFGCRVNLAICLQGTSGPDPTTVYVDMRALRHDRVRLVERGSPHSLPLMESGKILPGVRIIIANPETKGPLGDSHLGEIWVHSAHNASGYFTIYGDESLQSDHFNSRLSFGDTQTIWARTGYLGFLRRTELTDANGERHDALYVVGALDEAMELRGMRYHPIDIETSVIRAHKSVTECAVFTWTNLLVVVVELDGSEQEALDLVPLVTNVVLEEHYLIVGVVVVVDIGVIPINSRGEKQRMHLRDGFLADQLDPIYVAYNM

SEQ ID NO: 43865 - protein, 656 aa, Homo sapiens
MAVPMPSKRRSLVVQTSMDAYTPPDTSSGSEDEGSVQGDSQGTPTSSQGSINMEHWISQAIHGSTTSTTSSSSTQSGGSGAAHRLADVMAQTHIENHSAPPDVTTYTSEHSIQVERPQGSTGSRTAPKYGNAELMETGDGVPVSSRVSAKIQQLVNTLKRPKRPPLREFFVDDFEELLEVQQPDPNQPKPEGAQMLAMRGEQLGVVTNWPPSLEAALQRWGTISPKAPCLTTMDTNGKPLYILTYGKLWTRSMKVAYSILHKLGTKQEPMVRPGDRVALVFPNNDPAAFMAAFYGCLLAEVVPVPIEVPLTRKDAGSQQIGFLLGSCGVTVALTSDACHKGLPKSPTGEIPQFKGWPKLLWFVTESKHLSKPPRDWFPHIKDANNDTAYIEYKTCKDGSVLGVTVTRTALLTHCQALTQACGYTEAETIVNVLDFKKDVGLWHGILTSVMNMMHVISIPYSLMKVNPLSWIQKVCQYKAKVACVKSRDMHWALVAHRDQRDINLSSLRMLIVADGANPWSISSCDAFLNVFQSKGLRQEVICPCASSPEALTVAIRRPTDDSNQPPGRGVLSMHGLTYGVIRVDSEEKLSVLTVQDVGLVMPGAIMCSVKPDGVPQLCRTDEIGELCVCAVATGTSYYGLSGMTKNTFEHTSNKGK

SEQ ID NO: 43866 - protein, 198 aa, Homo sapiens
MSHAATSAFCRSIKLQCELYPSREVAICLDPYCGLGFVLWCLCSVYSGHQSILIPPSELETNPALWLLAVSQYKVRDTFCSYSVMELCTKGLGSQTESLKARGLDLSRVRTCVVVAEERPRIALTQSFSKLFKDLGLHPRAVSTSFGCRVNLAICLQCWDYRHEPPRPAPKCFKMVYKEGVRSVGEDKIREKRTKTWR

SEQ ID NO: 43867 - protein, 231 aa, Homo sapiens
  VARIANT 1: note = MOD_RES - Any amino acid
XETIVNVLDFKKDVGLWHGILTSVMNMMHVISIPYSLMKVNPLSWIQKVCQYKAKVACVKSRDMHWALVAHRDQRDINLSSLRMLIVADGANPWSISSCDAFLNVFQSKGLRQEVICPCASSPEALTVAIRRPTDDSNQPPGRGVLSMHGLTYGVIRVDSEEKLSVLTVQDVGLVMPGAIMCSVKPDGVPQLCRTDEIGELCVCAVATGTSYYGLSGMTKNTFEHTSNKGK

SEQ ID NO: 43868 - protein, 187 aa, Homo sapiens
MADRSLEGMALPLEVRARLAELELELSEGDITQKGYEKKRSKLIGAYLPQPPTANGAAVVRCRLQHSEGAPRRTFRSAHIGVCDVREAAARERVASTAGNRPLFYFRFGVDQALPQERRAPVTPSSASRYHRRRSSGSRDERYRSDVHTEAVQAALAKHKERKMAVPMPSKRRSLVVQTSMDAYTPP

SEQ ID NO: 43869 - protein, 155 aa, Homo sapiens
  VARIANT 1: note = MOD_RES - Any amino acid
XVYSGHQSILIPPSELETNPALWLLAVSQYKVRDTFCSYSVMELCTKGLGSQTESLKARGLDLSRVRTCVVVAEERPRIALTQSFSKLFKDLGLHPRAVSTSFGCRVNLAICLQCWDYRHEPPRPAPKCFKMVYKEGVRSVGEDKIREKRTKTWR

SEQ ID NO: 43870 - protein, 481 aa, Homo sapiens
IWVSRSACLMTTQLICKLLRSREAAAAVDVRTWPLILDTDDLPKKRPAQICKPCNPDTLAYLDFSVSTTGMLAGVKMSHAATSAFCRSIKLQCELYPSREVAICLDPYCGLGFVLWCLCSVYSGHQSILIPPSELETNPALWLLAVSQYKVRDTFCSYSVMELCTKGLGSQTESLKARGLDLSRVRTCVVVAEERPRIALTQSFSKLFKDLGLHPRAVSTSFGCRVNLAICLQGTSGPDPTTVYVDMRALRHDRVRLVERGSPHSLPLMESGKILPGVRIIIANPETKGPLGDSHLGEIWVHSAHNASGYFTIYGDESLQSDHFNSRLSFGDTQTIWARTGYLGFLRRTELTDANGERHDALYVVGALDEAMELRGMRYHPIDIETSVIRAHKSVTECAVFTWTNLLVVVVELDGSEQEALDLVPLVTNVVLEEHYLIVGVVVVVDIGVIPINSRGEKQRMHLRDGFLADQLDPIYVAYNM

SEQ ID NO: 43871 - protein, 371 aa, Homo sapiens
MHGLTYGVIRVDSEEKLSVLTVQDVGLVMPGAIMCSVKPDGVPQLCRTDEIGELCVCAVATGTSYYGLSGMTKNTFEVFPMTSSGAPISEYPFIRTGLLGFVGPGGLVFVVGKMDGLMVVSGRRHNADDIVATALAVEPMKFVYRGRIAVFSVTVLHDERIVIVAEQRPDSTEEDSFQWMSRVLQAIDSIHQVGVYCLALVPANTLPKTPLGGIHLSETKQLFLEGSLHPCNVLMCPHTCVTNLPKPRQKQPEIGPASVMVGNLVSGKRIAQASGRDLGQIEDNDQARKFLFLSEVLQWRAQTTPDHILYTLLNCRVRRGAGLPWLLASRGLAWFLGALLLLSLNPFASVLWEFFLCFAILTETFVPRDCF

SEQ ID NO: 43872 - protein, 411 aa, Homo sapiens
MWSGWWLWPLVAVCTADFFRDEAERIMRDSPVIDGHNDLPWQLLDMFNNRLQDERANLTTLAGTHTNIPKLRAGFVGGQFWSVYTPCDTQNKDAVRRTLEQMDVVHRMCRMYPETFLYVTSSAGIRQAFREGKVASLIGVEGGHSIDSSLGVLRALYQLGMRYLTLTHSCNTPWADNWLVDTGDSEPQSQGLSPFGQRVVKELNRLGVLIDLAHVSVATMKATLQLSRAPVIFSHSSAYSVCASRRNVPDDVLRLVKQTDSLVMVNFYNNYISCTNKANLSQVADHLDHIKEVAGARAVGFGGDFDGVPRVPEGLEDVSKYPDLIAELLRRNWTEAEVKGALADNLLRVFEAVEQASNLTQAPEEEPIPLDQLGGSCRTHYGYSSGASSLHRHWGLLLASLAPLVLCLSLL

SEQ ID NO: 43873 - protein, 411 aa, Homo sapiens; identical to SEQ ID NO: 43872

SEQ ID NO: 43874 - protein, 411 aa, Homo sapiens; identical to SEQ ID NO: 43872

SEQ ID NO: 43875 - protein, 126 aa, Homo sapiens
MQPSGLEGPGTFGRWPLLSLLLLLLLLQPVTCAYTTPGPPRALTTLGAPRAHTMPGTYAPSTTLSSPSTQGLQEQARALMRDFPLVDGSGQPMCHARPRTGMPCASPWSRLTSYAACVPPILSWSL

SEQ ID NO: 43876 - protein, 399 aa, Homo sapiens
MQPSGLEGPGTFGRWPLLSLLLLLLLLQPVTCAYTTPGPPRALFWSAYVPCQTQDRDALRLTLEQIDLIRRMCASYSELELVTSAKALNDTQKLACLIGVEGGHSLDNSLSILPTFYMLGVRYLTLTHTCNTPWAESSAKGVHSFYNNISGLTDFGEKVVAEMNRLGMMVDLSHVSDAVARRALEVSQAPVIFSHSAARGVCNSARNVPDDILQLLKKNGGVVMVSLSMGVIQCNPSANVSTVADHFDHIKAVIGSKFIGIGGDYDGAGKFPQGLEDVSTYPVLIEELLSRGWSEEELQGVLRGNLLRVFRQVEKVQEENKWQSPLEDKFPDEQLSSSCHSDLSRLRQRQSLTSGQELTEIPIHWTAKLPAKWSVSESSPHMAPVLAVVATFPVLILWL

SEQ ID NO: 43877 - protein, 486 aa, Homo sapiens
MQPSGLEGPGTFGRWPLLSLLLLLLLLQPVTCAYTTPGPPRALTTLGAPRAHTMPGTYAPSTTLSSPSTQGLQEQARALMRDFPLVDGHNDLPLVLRQVYQKGLQDVNLRNFSYGQTSLDRLRDGLVGAQFWSAYVPCQTQDRDALRLTLEQIDLIRRMCASYSELELVTSAKALNDTQKLACLIGVEGGHSLDNSLSILPTFYMLGVRYLTLTHTCNTPWAESSAKGVHSFYNNISGLTDFGEKVVAEMNRLGMMVDLSHVSDAVARRALEVSQAPVIFSHSAARGVCNSARNVPDDILQLLKKNGGVVMVSLSMGVIQCNPSANVSTVADHFDHIKAVIGSKFIGIGGDYDGAGKFPQGLEDVSTYPVLIEELLSRGWSEEELQGVLRGNLLRVFRQVEKVQEENKWQSPLEDKFPDEQLSSSCHSDLSRLRQRQSLTSGQELTEIPIHWTAKLPAKWSVSESSPHMAPVLAVVATFPVLILWL

SEQ ID NO: 43878 - protein, 486 aa, Homo sapiens; identical to SEQ ID NO: 43877

SEQ ID NO: 43879 - protein, 513 aa, Homo sapiens
MIRTPLSASAHRLLLPGSRGRPPRNMQPTGREGSRALSRRYLRRLLLLLLLLLLRQPVTRAETTPGAPRALSTLGSPSLFTTPGVPSALTTPGLTTPGTPKTLDLRGRAQALMRSFPLVDGHNDLPQVLRQRYKNVLQDVNLRNFSHGQTSLDRLRDGLVGAQFWSASVSCQSQDQTAVRLALEQIDLIHRMCASYSELELVTSAEGLNSSQKLACLIGVEGGHSLDSSLSVLRSFYVLGVRYLTLTFTCSTPWAESSTKFRHHMYTNVSGLTSFGEKVVEELNRLGMMIDLSYASDTLIRRVLEVSQAPVIFSHSAARAVCDNLLNVPDDILQLLKKNGGIVMVTLSMGVLQCNLLANVSTVADHFDHIRAVIGSEFIGIGGNYDGTGRFPQGLEDVSTYPVLIEELLSRSWSEEELQGVLRGNLLRVFRQVEKVREESRAQSPVEAEFPYGQLSTSCHSHLVPQNGHQATHLEVTKQPTNRVPWRSSNASPYLVPGLVAAATIPTFTQWLC

SEQ ID NO: 43880 - protein, 789 aa, Homo sapiens
MRKVESRGEGGREELGSNSPPQRNWKGIAIALLVILVVCSLITMSVILLTPDELTNSSETRLSLEDLFRKDFVLHDPEARWINDTDVVYKSENGHVIKLNIETNATTLLLENTTFVTFKASRHSVSPDLKYVLLAYDVKQIFHYSYTASYVIYNIHTREVWELNPPEVEDSVLQYAAWGVQGQQLIYIFENNIYYQPDIKSSSLRLTSSGKEEIIFNGIADWLYEEELLHSHIAHWWSPDGERLAFLMINDSLVPTMVIPRFTGALYPKGKQYPYPKAGQVNPTIKLYVVNLYGPTHTLELMPPDSFKSREYYITMVKWVSNTKTVVRWLNRAQNISILTVCETTTGACSKKYEMTSDTWLSQQNEEPVFSRDGSKFFMTVPVKQGGRGEFHHVAMFLIQSKSEQITVRHLTSGNWEVIKILAYDETTQKIYFLSTESSPRGRQLYSASTEGLLNRQCISCNFMKEQCTYFDASFSPMNQHFLLFCEGPRVPVVSLHSTDNPAKYFILESNSMLKEAILKKKIGKPEIKILHIDDYELPLQLSLPKDFMDRNQYALLLIMDEEPGGQLVTDKFHIDWDSVLIDMDNVIVARFDGRGSGFQGLKILQEIHRRLGSVEVKDQITAVKFLLKLPYIDSKRLSIFGKGYGGYIASMILKSDEKLFKCGSVVAPITDLKLYASAFSERYLGMPSKEESTYQAASVLHNVHGLKEENILIIHGTADTKVHFQHSAELIKHLIKAGVNYTMQVYPDEGHNVSEKSKYHLYSTILKFFSDCLKEEISVLPQEPEEDE

SEQ ID NO: 43881 - protein, 800 aa, Homo sapiens
MTAAKQEPQPTPGARASQAQPADQELGSNSPPQRNWKGIAIALLVILVVCSLITMSVILLTPDELTNSSETRLSLEDLFRKDFVLHDPEARWINDTDVVYKSENGHVIKLNIETNATTLLLENTTFVTFKASRHSVSPDLKYVLLAYDVKQIFHYSYTASYVIYNIHTREVWELNPPEVEDSVLQYAAWGVQGQQLIYIFENNIYYQPDIKSSSLRLTSSGKEEIIFNGIADWLYEEELLHSHIAHWWSPDGERLAFLMINDSLVPTMVIPRFTGALYPKGKQYPYPKAGQVNPTIKLYVVNLYGPTHTLELMPPDSFKSREYYITMVKWVSNTKTVVRWLNRAQNISILTVCETTTGACSKKYEMTSDTWLSQQNEEPVFSRDGSKFFMTVPVKQGGRGEFHHVAMFLIQSKSEQITVRHLTSGNWEVIKILAYDETTQKIYFLSTESSPRGRQLYSASTEGLLNRQCISCNFMKEQCTYFDASFSPMNQHFLLFCEGPRVPVVSLHSTDNPAKYFILESNSMLKEAILKKKIGKPEIKILHIDDYELPLQLSLPKDFMDRNQYALLLIMDEEPGGQLVTDKFHIDWDSVLIDMDNVIVARFDGRGSGFQGLKILQEIHRRLGSVEVKDQITAVKFLLKLPYIDSKRLSIFGKGYGGYIASMILKSDEKLFKCGSVVAPITDLKLYASAFSERYLGMPSKEESTYQAASVLHNVHGLKEENILIIHGTADTKVHFQHSAELIKHLIKAGVNYTMQVYPDEGHNVSEKSKYHLYSTILKFFSDCLKEEISVLPQEPEEDE

SEQ ID NO: 43882 - protein, 796 aa, Homo sapiens
MNQTASVSHHIKCQPSKTIKELGSNSPPQRNWKGIAIALLVILVVCSLITMSVILLTPDELTNSSETRLSLEDLFRKDFVLHDPEARWINDTDVVYKSENGHVIKLNIETNATTLLLENTTFVTFKASRHSVSPDLKYVLLAYDVKQIFHYSYTASYVIYNIHTREVWELNPPEVEDSVLQYAAWGVQGQQLIYIFENNIYYQPDIKSSSLRLTSSGKEEIIFNGIADWLYEEELLHSHIAHWWSPDGERLAFLMINDSLVPTMVIPRFTGALYPKGKQYPYPKAGQVNPTIKLYVVNLYGPTHTLELMPPDSFKSREYYITMVKWVSNTKTVVRWLNRAQNISILTVCETTTGACSKKYEMTSDTWLSQQNEEPVFSRDGSKFFMTVPVKQGGRGEFHHVAMFLIQSKSEQITVRHLTSGNWEVIKILAYDETTQKIYFLSTESSPRGRQLYSASTEGLLNRQCISCNFMKEQCTYFDASFSPMNQHFLLFCEGPRVPVVSLHSTDNPAKYFILESNSMLKEAILKKKIGKPEIKILHIDDYELPLQLSLPKDFMDRNQYALLLIMDEEPGGQLVTDKFHIDWDSVLIDMDNVIVARFDGRGSGFQGLKILQEIHRRLGSVEVKDQITAVKFLLKLPYIDSKRLSIFGKGYGGYIASMILKSDEKLFKCGSVVAPITDLKLYASAFSERYLGMPSKEESTYQAASVLHNVHGLKEENILIIHGTADTKVHFQHSAELIKHLIKAGVNYTMQVYPDEGHNVSEKSKYHLYSTILKFFSDCLKEEISVLPQEPEEDE

SEQ ID NO: 43883 - protein, 97 aa, Homo sapiens
MSVILLTPDELTNSSETRLSLEDLFRKDFVLHDPEARWINDTDVVYKSENGHVIKLNIETNATTLLLENTTFVTFKASRHSVSPDLKYVLLAYDVKQ

SEQ ID NO: 43884 - protein, 600 aa, Homo sapiens
LSILILTSNELTNSSETRLSLEDLFRKDFVLHDPEARWINDTDVVYKSENGHVIKLNIETNATTLLLENTTFVTFKASRHSVSPDLKYVLLAYDVKQIFHYSYTASYVIYNIHTREVWELNPPEVEDSVLQYAAWGVQGQQLIYIFENNIYYQPDIKSSSLRLTSSGKEEIIFNGIADWLYEEELLHSHIAHWWSPDGERLAFLMINDSLVPTMVIPRFTGALYPKGKQYPYPKAGQVNPTIKLYVVNLYGPTHTLELMPPDSFKSREYYITMVKWVSNTKTVVRWLNRAQNISILTVCETTTGACSKKYEMTSDTWLSQQNEEPVFSRDGSKFFMTVPVKQGGRGEFHHVAMFLIQSKSEQITVRHLTSGNWEVIKILAYDETTQKIYFLSTESSPRGRQLYSASTEGLLNRQCISCNFMKEQCTYFDASFSPMNQHFLLFCEGPRVPVVSLHSTDNPAKYFILESNSMLKEAILKKKIGKPEIKILHIDDYELPLQLSLPKDFMDRNQYALLLIMDEEPGGQLVTDKFHIDWDSVLIDMDNVIVARFDGRGSGFQGLKILQEIHRRLGSVEVKDQITAVKFLLKLPYIDSKRLSIFGK

SEQ ID NO: 43885 - protein, 746 aa, Homo sapiens
MSVILLTPDELTNSSETRLSLEDLFRKDFVLHDPEARWINDTDVVYKSENGHVIKLNIETNATTLLLENTTFVTFKASRHSVSPDLKYVLLAYDVKQIFHYSYTASYVIYNIHTREVWELNPPEVEDSVLQYAAWGVQGQQLIYIFENNIYYQPDIKSSSLRLTSSGKEEIIFNGIADWLYEEELLHSHIAHWWSPDGERLAFLMINDSLVPTMVIPRFTGALYPKGKQYPYPKAGQVNPTIKLYVVNLYGPTHTLELMPPDSFKSREYYITMVKWVSNTKTVVRWLNRAQNISILTVCETTTGACSKKYEMTSDTWLSQQNEEPVFSRDGSKFFMTVPVKQGGRGEFHHVAMFLIQSKSEQITVRHLTSGNWEVIKILAYDETTQKIYFLSTESSPRGRQLYSASTEGLLNRQCISCNFMKEQCTYFDASFSPMNQHFLLFCEGPRVPVVSLHSTDNPAKYFILESNSMLKEAILKKKIGKPEIKILHIDDYELPLQLSLPKDFMDRNQYALLLIMDEEPGGQLVTDKFHIDWDSVLIDMDNVIVARFDGRGSGFQGLKILQEIHRRLGSVEVKDQITAVKFLLKLPYIDSKRLSIFGKGYGGYIASMILKSDEKLFKCGSVVAPITDLKLYASAFSERYLGMPSKEESTYQAASVLHNVHGLKEENILIIHGTADTKVHFQHSAELIKHLIKAGVNYTMQVYPDEGHNVSEKSKYHLYSTILKFFSDCLKEEISVLPQEPEEDE

SEQ ID NO: 43886 - protein, 317 aa, Homo sapiens
MADTQYILPNDIGVSSLDCREAFRLLSPTERLYAYHLSRAAWYGGLAVLLQTSPEAPYIYALLSRLFRAQDPDQLRQHALAEGLTEEEYQAFLVYAAGVYSNMGNYKSFGDTKFVPNLPKEKLERVILGSEAAQQHPEEVRGLWQTCGELMFSLEPRLRHLGLGKEGITTYFSGNCTMEDARVRLDRSKIRSVGKPALERFLRRLQVLKSTGDVAGGRALYEGYATVTDAPPECFLTLRDTVLLRKESRKLIVQPNTRLEGSDVQLLEYEASAAGLIRSFSERFPEDGPELEEILTQLATADARFWKGPSEAPSGQA

SEQ ID NO: 43887 - protein, 737 aa, Homo sapiens
MADTQYILPNDIGVSSLDCREAFRLLSPTERLYAYHLSRAAWYGGLAVLLQTSPEAPYIYALLSRLFRAQDPDQLRQHALAEGLTEEEYQAFLVYAAGVYSNMGNYKSFGDTKFVPNLPKEKLERVILGSEAAQQHPEEVRGLWQTCGELMFSLEPRLRHLGLGKEGITTYFSGNCTMEDAKLAQDFLDSQNLSAYNTRLFKEVDGEGKPYYEVRLASVLGSEPSLDSEVTSKLKSYEFRGSPFQVTRGDYAPILQKVVEQLEKAKAYAANSHQGQMLAQYIESFTQGSIEAHKRGSRFWIQDKGPIVESYIGFIESYRDPFGSRGEFEGFVAVVNKAMSAKFERLVASAEQLLKELPWPPTFEKDKFLTPDFTSLDVLTFAGSGIPAGINIPNYDDLRQTEGFKNVSLGNVLAVAYATQREKLTFLEEDDKDLYILWKGPSFDVQVGLHELLGHGSGKLFVQDEKGAFNFDQETVINPETGEQIQSWYRSGETWDSKFSTIASSYEECRAESVGLYLCLHPQVLEIFGFEGADAEDVIYVNWLNMVRAGLLALEFYTPEAFNWRQAHMQARFVILRVLLEAGEGLVTITPTTGSDGRPDARVRLDRSKIRSVGKPALERFLRRLQVLKSTGDVAGGRALYEGYATVTDAPPECFLTLRDTVLLRKESRKLIVQPNTRLEGSDVQLLEYEASAAGLIRSFSERFPEDGPELEEILTQLATADARFWKGPSEAPSGQA

SEQ ID NO: 43888 - protein, 737 aa, Homo sapiens; identical to SEQ ID NO: 43887

SEQ ID NO: 43889 - protein, 90 aa, Homo sapiens
MADTQYILPNDIGVSSLDCREAFRLLSPTERLYAYHLSRAAWYGGLAVLLQTSPEAPYIYALLSRLFRAQDPDQLRQHALAEGLTEEEYQ

SEQ ID NO: 43890 - protein, 201 aa, Homo sapiens
MADTQYILPNDIGVSSLDCREAFRLLSPTERLYAYHLSRAAWYGGLAVLLQTSPEAPYIYALLSRLFRAQDPDQLRQHALAEGLTEEEYQAFLVYAAGVYSNMGNYKSFGDTKFVPNLPKEKLERVILGSEAAQQHPEEVRGLWQTCGELMFSLEPRLRHLGLGKEGITTYFSGNCTMEDAKLAQDFLDSQNLSAYNTRLF

SEQ ID NO: 43891 - protein, 757 aa, Homo sapiens
MGEPEAGSEFANGAAAAAGPMADTQYILPNDIGVSSLDCREAFRLLSPTERLYAYHLSRAAWYGGLAVLLQTSPEAPYIYALLSRLFRAQDPDQLRQHALAEGLTEEEYQAFLVYAAGVYSNMGNYKSFGDTKFVPNLPKEKLERVILGSEAAQQHPEEVRGLWQTCGELMFSLEPRLRHLGLGKEGITTYFSGNCTMEDAKLAQDFLDSQNLSAYNTRLFKEVDGEGKPYYEVRLASVLGSEPSLDSEVTSKLKSYEFRGSPFQVTRGDYAPILQKVVEQLEKAKAYAANSHQGQMLAQYIESFTQGSIEAHKRGSRFWIQDKGPIVESYIGFIESYRDPFGSRGEFEGFVAVVNKAMSAKFERLVASAEQLLKELPWPPTFEKDKFLTPDFTSLDVLTFAGSGIPAGINIPNYDDLRQTEGFKNVSLGNVLAVAYATQREKLTFLEEDDKDLYILWKGPSFDVQVGLHELLGHGSGKLFVQDEKGAFNFDQETVINPETGEQIQSWYRSGETWDSKFSTIASSYEECRAESVGLYLCLHPQVLEIFGFEGADAEDVIYVNWLNMVRAGLLALEFYTPEAFNWRQAHMQARFVILRVLLEAGEGLVTITPTTGSDGRPDARVRLDRSKIRSVGKPALERFLRRLQVLKSTGDVAGGRALYEGYATVTDAPPECFLTLRDTVLLRKESRKLIVQPNTRLEGSDVQLLEYEASAAGLIRSFSERFPEDGPELEEILTQLATADARFWKGPSEAPSGQA

SEQ ID NO: 43892 - protein, 756 aa, Homo sapiens
MGEPEAGSEFANGAAAAGPMADTQYILPNDIGVSSLDCREAFRLLSPTERLYAYHLSRAAWYGGLAVLLQTSPEAPYIYALLSRLFRAQDPDQLRQHALAEGLTEEEYQAFLVYAAGVYSNMGNYKSFGDTKFVPNLPKEKLERVILGSEAAQQHPEEVRGLWQTCGELMFSLEPRLRHLGLGKEGITTYFSGNCTMEDAKLAQDFLDSQNLSAYNTRLFKEVDGEGKPYYEVRLASVLGSEPSLDSEVTSKLKSYEFRGSPFQVTRGDYAPILQKVVEQLEKAKAYAANSHQGQMLAQYIESFTQGSIEAHKRGSRFWIQDKGPIVESYIGFIESYRDPFGSRGEFEGFVAVVNKAMSAKFERLVASAEQLLKELPWPPTFEKDKFLTPDFTSLDVLTFAGSGIPAGINIPNYDDLRQTEGFKNVSLGNVLAVAYATQREKLTFLEEDDKDLYILWKGPSFDVQVGLHELLGHGSGKLFVQDEKGAFNFDQETVINPETGEQIQSWYRSGETWDSKFSTIASSYEECRAESVGLYLCLHPQVLEIFGFEGADAEDVIYVNWLNMVRAGLLALEFYTPEAFNWRQAHMQARFVILRVLLEAGEGLVTITPTTGSDGRPDARVRLDRSKIRSVGKPALERFLRRLQVLKSTGDVAGGRALYEGYATVTDAPPECFLTLRDTVLLRKESRKLIVQPNTRLEGSDVQLLEYEASAAGLIRSFSERFPEDGPELEEILTQLATADARFWKGPSEAPSGQA

SEQ ID NO: 43893 - protein, 737 aa, Homo sapiens; identical to SEQ ID NO: 43887

SEQ ID NO: 43894 - protein, 635 aa, Homo sapiens
MGNYKSFGDTKFVPNLPKEKLERVILGSEAAQQHPEEVRGLWQTCGELMFSLEPRLRHLGLGKEGITTYFSGNCTMEDAKLAQDFLDSQNLSAYNTRLFKEVDGEGKPYYEVRLASVLGSEPSLDSEVTSKLKSYEFRGSPFQVTRGDYAPILQKVVEQLEKAKAYAANSHQGQMLAQYIESFTQGSIEAHKRGSRFWIQDKGPIVESYIGFIESYRDPFGSRGEFEGFVAVVNKAMSAKFERLVASAEQLLKELPWPPTFEKDKFLTPDFTSLDVLTFAGSGIPAGINIPNYDDLRQTEGFKNVSLGNVLAVAYATQREKLTFLEEDDKDLYILWKGPSFDVQVGLHELLGHGSGKLFVQDEKGAFNFDQETVINPETGEQIQSWYRSGETWDSKFSTIASSYEECRAESVGLYLCLHPQVLEIFGFEGADAEDVIYVNWLNMVRAGLLALEFYTPEAFNWRQAHMQARFVILRVLLEAGEGLVTITPTTGSDGRPDARVRLDRSKIRSVGKPALERFLRRLQVLKSTGDVAGGRALYEGYATVTDAPPECFLTLRDTVLLRKESRKLIVQPNTRLEGSDVQLLEYEASAAGLIRSFSERFPEDGPELEEILTQLATADARFWKGPSEAPSGQA

SEQ ID NO: 43895 - protein, 803 aa, Homo sapiens
MTTAKEPSASGKSVQQQEQELVGSNPPQRNWKGIAIALLVILVICSLIVTSVILLTPAEDNSLSQKKKVTVEDLFSEDFKIHDPEAKWISDTEFIYREQKGTVRLWNVETNTSTVLIEGKKIESLRAIRYEISPDREYALFSYNVEPIYQHSYTGYYVLSKIPHGDPQSLDPPEVSNAKLQYAGWGPKGQQLIFIFENNIYYCAHVGKQAIRVVSTGKEGVIYNGLSDWLYEEEILKTHIAHWWSPDGTRLAYAAINDSRVPIMELPTYTGSIYPTVKPYHYPKAGSENPSISLHVIGLNGPTHDLEMMPPDDPRMREYYITMVKWATSTKVAVTWLNRAQNVSILTLCDATTGVCTKKHEDESEAWLHRQNEEPVFSKDGRKFFFIRAIPQGGRGKFYHITVSSSQPNSSNDNIQSITSGDWDVTKILAYDEKGNKIYFLSTEDLPRRRQLYSANTVGNFNRQCLSCDLVENCTYFSASFSHSMDFFLLKCEGPGVPMVTVHNTTDKKKMFDLETNEHVKKAINDRQMPKVEYRDIEIDDYNLPMQILKPATFTDTTHYPLLLVVDGTPGSQSVAEKFEVSWETVMVSSHGAVVVKCDGRGSGFQGTKLLHEVRRRLGLLEEKDQMEAVRTMLKEQYIDRTRVAVFGKDYGGYLSTYILPAKGENQGQTFTCGSALSPITDFKLYASAFSERYLGLHGLDNRAYEMTKVAHRVSALEEQQFLIIHPTADEKIHFQHTAELITQLIRGKANYSLQIYPDESHYFTSSSLKQHLYRSIINFFVECFRIQDKLLTVTAKEDEEED

SEQ ID NO: 43896 - protein, 865 aa, Homo sapiens
MASLYQRFTGKINTSRSFPAPPEASHLLGGQGPEEDGGAGAKPLGPRAQAAAPRERGGGGGGAGGRPRFQYQARSDGDEEDELVGSNPPQRNWKGIAIALLVILVICSLIVTSVILLTPAEDNSLSQKKKVTVEDLFSEDFKIHDPEAKWISDTEFIYREQKGTVRLWNVETNTSTVLIEGKKIESLRAIRYEISPDREYALFSYNVEPIYQHSYTGYYVLSKIPHGDPQSLDPPEVSNAKLQYAGWGPKGQQLIFIFENNIYYCAHVGKQAIRVVSTGKEGVIYNGLSDWLYEEEILKTHIAHWWSPDGTRLAYAAINDSRVPIMELPTYTGSIYPTVKPYHYPKAGSENPSISLHVIGLNGPTHDLEMMPPDDPRMREYYITMVKWATSTKVAVTWLNRAQNVSILTLCDATTGVCTKKHEDESEAWLHRQNEEPVFSKDGRKFFFIRAIPQGGRGKFYHITVSSSQPNSSNDNIQSITSGDWDVTKILAYDEKGNKIYFLSTEDLPRRRQLYSANTVGNFNRQCLSCDLVENCTYFSASFSHSMDFFLLKCEGPGVPMVTVHNTTDKKKMFDLETNEHVKKAINDRQMPKVEYRDIEIDDYNLPMQILKPATFTDTTHYPLLLVVDGTPGSQSVAEKFEVSWETVMVSSHGAVVVKCDGRGSGFQGTKLLHEVRRRLGLLEEKDQMEAVRTMLKEQYIDRTRVAVFGKDYGGYLSTYILPAKGENQGQTFTCGSALSPITDFKLYASAFSERYLGLHGLDNRAYEMTKVAHRVSALEEQQFLIIHPTADEKIHFQHTAELITQLIRGKANYSLQIYPDESHYFTSSSLKQHLYRSIINFFVECFRIQDKLLTVTAKEDEEED

SEQ ID NO: 43897 - protein, 801 aa, Homo sapiens
MKEKAMIKTAKMQGNVMELVGSNPPQRNWKGIAIALLVILVICSLIVTSVILLTPAEDNSLSQKKKVTVEDLFSEDFKIHDPEAKWISDTEFIYREQKGTVRLWNVETNTSTVLIEGKKIESLRAIRYEISPDREYALFSYNVEPIYQHSYTGYYVLSKIPHGDPQSLDPPEVSNAKLQYAGWGPKGQQLIFIFENNIYYCAHVGKQAIRVVSTGKEGVIYNGLSDWLYEEEILKTHIAHWWSPDGTRLAYAAINDSRVPIMELPTYTGSIYPTVKPYHYPKAGSENPSISLHVIGLNGPTHDLEMMPPDDPRMREYYITMVKWATSTKVAVTWLNRAQNVSILTLCDATTGVCTKKHEDESEAWLHRQNEEPVFSKDGRKFFFIRAIPQGGRGKFYHITVSSSQPNSSNDNIQSITSGDWDVTKILAYDEKGNKIYFLSTEDLPRRRQLYSANTVGNFNRQCLSCDLVENCTYFSASFSHSMDFFLLKCEGPGVPMVTVHNTTDKKKMFDLETNEHVKKAINDRQMPKVEYRDIEIDDYNLPMQILKPATFTDTTHYPLLLVVDGTPGSQSVAEKFEVSWETVMVSSHGAVVVKCDGRGSGFQGTKLLHEVRRRLGLLEEKDQMEAVRTMLKEQYIDRTRVAVFGKDYGGYLSTYILPAKGENQGQTFTCGSALSPITDFKLYASAFSERYLGLHGLDNRAYEMTKVAHRVSALEEQQFLIIHPTADEKIHFQHTAELITQLIRGKANYSLQIYPDESHYFTSSSLKQHLYRSIINFFVECFRIQDKLLTVTAKEDEEED

SEQ ID NO: 43898 - protein, 758 aa, Homo sapiens
MTTAKEPSASGKSVQQQEQELVGSNPPQRNWKGIAIALLVILVICSLIVTSVILLTPAEDNSLSQKKKVTVEDLFSEDFKIHDPEAKWISDTEFIYREQKGTVRLWNVETNTSTVLIEGKKIESLRAIRYEISPDREYALFSYNVEPIFIFENNIYYCAHVGKQAIRVVSTGKEGVIYNGLSDWLYEEEILKTHIAHWWSPDGTRLAYAAINDSRVPIMELPTYTGSIYPTVKPYHYPKAGSENPSISLHVIGLNGPTHDLEMMPPDDPRMREYYITMVKWATSTKVAVTWLNRAQNVSILTLCDATTGVCTKKHEDESEAWLHRQNEEPVFSKDGRKFFFIRAIPQGGRGKFYHITVSSSQPNSSNDNIQSITSGDWDVTKILAYDEKGNKIYFLSTEDLPRRRQLYSANTVGNFNRQCLSCDLVENCTYFSASFSHSMDFFLLKCEGPGVPMVTVHNTTDKKKMFDLETNEHVKKAINDRQMPKVEYRDIEIDDYNLPMQILKPATFTDTTHYPLLLVVDGTPGSQSVAEKFEVSWETVMVSSHGAVVVKCDGRGSGFQGTKLLHEVRRRLGLLEEKDQMEAVRTMLKEQYIDRTRVAVFGKDYGGYLSTYILPAKGENQGQTFTCGSALSPITDFKLYASAFSERYLGLHGLDNRAYEMTKVAHRVSALEEQQFLIIHPTADEKIHFQHTAELITQLIRGKANYSLQIYPDESHYFTSSSLKQHLYRSIINFFVECFRIQDKLLTVTAKEDEEED

SEQ ID NO: 43899 - protein, 882 aa, Homo sapiens
MAAAMETEQLGVEIFETADCEENIESQDRPKLEPFYVERYSWSQLKKLLADTRKYHGYMMAKAPHDFMFVKRNDPDGPHSDRIYYLAMSGENRENTLFYSEIPKTINRAAVLMLSWKPLLDLFQATLDYGMYSREEELLRERKRIGTVGIASYDYHQGSGTFLFQAGSGIYHVKDGGPQGFTQQPLRPNLVETSCPNIRMDPKLCPADPDWIAFIHSNDIWISNIVTREERRLTYVHNELANMEEDARSAGVATFVLQEEFDRYSGYWWCPKAETTPSGGKILRILYEENDESEVEIIHVTSPMLETRRADSFRYPKTGTANPKVTFKMSEIMIDAEGRIIDVIDKELIQPFEILFEGVEYIARAGWTPEGKYAWSILLDRSQTRLQIVLISPELFIPVEDDVMERQRLIESVPDSVTPLIIYEETTDIWINIHDIFHVFPQSHEEEIEFIFASECKTGFRHLYKITSILKESKYKRSSGGLPAPSDFKCPIKEEIAITSGEWEVLGRHGSNIQVDEVRRLVYFEGTKDSPLEHHLYVVSYVNPGEVTRLTDRGYSHSCCISQHCDFFISKYSNQKNPHCVSLYKLSSPEDDPTCKTKEFWATILDSAGPLPDYTPPEIFSFESTTGFTLYGMLYKPHDLQPGKKYPTVLFIYGGPQVQLVNNRFKGVKYFRLNTLASLGYVVVVIDNRGSCHRGLKFEGAFKYKMGQIEIDDQVEGLQYLASRYDFIDLDRVGIHGWSYGGYLSLMALMQRSDIFRVAIAGAPVTLWIFYDTGYTERYMGHPDQNEQGYYLGSVAMQAEKFPSEPNRLLLLHGFLDENVHFAHTSILLSFLVRAGKPYDLQIYPQERHSIRVPESGEHYELHLLHYLQENLGSRIAALKVI

SEQ ID NO: 43900 - protein, 849 aa, Homo sapiens
MWKRSEQMKIKSGKCNMAAAMETEQLGVEIFETADCEENIESQDRPKLEPFYVERYSWSQLKKLLADTRKYHGYMMAKAPHDFMFVKRNDPDGPHSDRIYYLAMSGENRENTLFYSEIPKTINRAAVLMLSWKPLLDLFQATLDYGMYSREEELLRERKRIGTVGIASYDYHQGSGTFLFQAGSGIYHVKDGGPQGFTQQPLRPNLVETSCPNIRMDPKLCPADPDWIAFIHSNDIWISNIVTREERRLTYVHNELANMEEDARSAGVATFVLQEEFDRYSGYWWCPKAETTPSGGKILRILYEENDESEVEIIHVTSPMLETRRADSFRYPKTGTANPKVTFKMSEIMIDAEGRIIDVIDKELIQPFEILFEGVEYIARAGWTPEGKYAWSILLDRSQTRLQIVLISPELFIPVEDDVMERQRLIESVPDSVTPLIIYEETTDIWINIHDIFHVFPQSHEEEIEFIFASECKTGFRHLYKITSILKESKYKRSSGGLPAPSDFKCPIKEEIAITSGEWEVLGRHGSNIQVDEVRRLVYFEGTKDSPLEHHLYVVSYVNPGEVTRLTDRGYSHSCCISQHCDFFISKYSNQKNPHCVSLYKLSSPEDDPTCKTKEFWATILDSAGPLPDYTPPEIFSFESTTGFTLYGMLYKPHDLQPGKKYPTVLFIYGGPQGQIEIDDQVEGLQYLASRYDFIDLDRVGIHGWSYGGYLSLMALMQRSDIFRVAIAGAPVTLWIFYDTGYTERYMGHPDQNEQGYYLGSVAMQAEKFPSEPNRLLLLHGFLDENVHFAHTSILLSFLVRAGKPYDLQIYPQERHSIRVPESGEHYELHLLHYLQENLGSRIAALKVI

SEQ ID NO: 43901 - protein, 847 aa, Homo sapiens
MWKRSEQMKIKSGKCNMAAAMETEQLGVEIFETADCEENIESQDRPKLEPFYVERYSWSQLKKLLADTRKYHGYMMAKAPHDFMFVKRNDPDGPHSDRIYYLAMSGENRENTLFYSEIPKTINRAAVLMLSWKPLLDLFQATLDYGMYSREEELLRERKRIGTVGIASYDYHQGSGTFLFQAGSGIYHVKDGGPQGFTQQPLRPNLVETSCPNIRMDPKLCPADPDWIAFIHSNDIWISNIVTREERRLTYVHNELANMEEDARSAGVATFVLQEEFDRYSGYWWCPKAETTPSGGKILRILYEENDESEVEIIHVTSPMLETRRADSFRYPKTGTANPKVTFKMSEIMIDAEGRIIDVIDKELIQPFEILFEGVEYIARAGWTPEGKYAWSILLDRSQTRLQIVLISPELFIPVEDDVMERQRLIESVPDSVTPLIIYEETTDIWINIHDIFHVFPQSHEEEIEFIFASECKTGFRHLYKITSILKESKYKRSSGGLPAPSDFKCPIKEEIAITSGEWEVLGRHGSNIQVDEVRRLVYFEGTKDSPLEHHLYVVSYVNPGEVTRLTDRGYSHSCCISQHCDFFISKYSNQKNPHCVSLYKLSSPEDDPTCKTKEFWATILDSAGPLPDYTPPEIFSFESTTGFTLYGMLYKPHDLQPGKKYPTVLFIYGGPQVQLVNNRFKGVKYFRLNTLASLGYVVVVIDNRGSCHRGLKFEGAFKYKMVAIAGAPVTLWIFYDTGYTERYMGHPDQNEQGYYLGSVAMQAEKFPSEPNRLLLLHGFLDENVHFAHTSILLSFLVRAGKPYDLQIYPQERHSIRVPESGEHYELHLLHYLQENLGSRIAALKVI

SEQ ID NO: 43902 - protein, 725 aa, Homo sapiens
MWKRSEQMKIKSGKCNMAAAMETEQLGVEIFETADCEENIESQDRPKLEPFYVERYSWSQLKKLLADTRKYHGYMMAKAPHDFMFVKRNDPDGPHSDRIYYLAMSGENRENTLFYSEIPKTINRAAVLMLSWKPLLDLFQATLDYGMYSREEELLRERKRIGTVGIASYDYHQGSGTFLFQAGSGIYHVKDGGPQGFTQQPLRPNLVETSCPNIRMDPKLCPADPDWIAFIHSNDIWISNIVTREERRLTYVHNELANMEEDARSAGVATFVLQEEFDRYSGYWWCPKAETTPSGGKILRILYEENDESEVEIIHVTSPMLETRRADSFRYPKTGTANPKVTFKMSEIMIDAEGRIQVDEVRRLVYFEGTKDSPLEHHLYVVSYVNPGEVTRLTDRGYSHSCCISQHCDFFISKYSNQKNPHCVSLYKLSSPEDDPTCKTKEFWATILDSAGPLPDYTPPEIFSFESTTGFTLYGMLYKPHDLQPGKKYPTVLFIYGGPQVQLVNNRFKGVKYFRLNTLASLGYVVVVIDNRGSCHRGLKFEGAFKYKMGQIEIDDQVEGLQYLASRYDFIDLDRVGIHGWSYGGYLSLMALMQRSDIFRVAIAGAPVTLWIFYDTGYTERYMGHPDQNEQGYYLGSVAMQAEKFPSEPNRLLLLHGFLDENVHFAHTSILLSFLVRAGKPYDLQIYPQERHSIRVPESGEHYELHLLHYLQENLGSRIAALKVI

SEQ ID NO: 43903 - protein, 898 aa, Homo sapiens
MWKRSEQMKIKSGKCNMAAAMETEQLGVEIFETADCEENIESQDRPKLEPFYVERYSWSQLKKLLADTRKYHGYMMAKAPHDFMFVKRNDPDGPHSDRIYYLAMSGENRENTLFYSEIPKTINRAAVLMLSWKPLLDLFQATLDYGMYSREEELLRERKRIGTVGIASYDYHQGSGTFLFQAGSGIYHVKDGGPQGFTQQPLRPNLVETSCPNIRMDPKLCPADPDWIAFIHSNDIWISNIVTREERRLTYVHNELANMEEDARSAGVATFVLQEEFDRYSGYWWCPKAETTPSGGKILRILYEENDESEVEIIHVTSPMLETRRADSFRYPKTGTANPKVTFKMSEIMIDAEGRIIDVIDKELIQPFEILFEGVEYIARAGWTPEGKYAWSILLDRSQTRLQIVLISPELFIPVEDDVMERQRLIESVPDSVTPLIIYEETTDIWINIHDIFHVFPQSHEEEIEFIFASECKTGFRHLYKITSILKESKYKRSSGGLPAPSDFKCPIKEEIAITSGEWEVLGRHGSNIQVDEVRRLVYFEGTKDSPLEHHLYVVSYVNPGEVTRLTDRGYSHSCCISQHCDFFISKYSNQKNPHCVSLYKLSSPEDDPTCKTKEFWATILDSAGPLPDYTPPEIFSFESTTGFTLYGMLYKPHDLQPGKKYPTVLFIYGGPQVQLVNNRFKGVKYFRLNTLASLGYVVVVIDNRGSCHRGLKFEGAFKYKMGQIEIDDQVEGLQYLASRYDFIDLDRVGIHGWSYGGYLSLMALMQRSDIFRVAIAGAPVTLWIFYDTGYTERYMGHPDQNEQGYYLGSVAMQAEKFPSEPNRLLLLHGFLDENVHFAHTSILLSFLVRAGKPYDLQIYPQERHSIRVPESGEHYELHLLHYLQENLGSRIAALKVI

SEQ ID NO: 43904 - protein, 782 aa, Homo sapiens
MAAAMETEQLGVEIFETADCEENIESQDRPKLEPFYVERYSWSQLKKLLADTRKYHGYMMAKAPHDFMFVKRNDPDGPHSDRIYYLAMSGENRENTLFYSEIPKTINRAAVLMLSWKPLLDLFQATLDYGMYSREEELLRERKRIGTVGIASYDYHQGSGTFLFQAGSGIYHVKDGGPQGFTQQPLRPNLVETSCPNIRMDPKLCPADPDWIAFIHSNDIWISNIVTREERRLTYVHNELANMEEDARSAGVATFVLQEEFDRYSGYWWCPKAETTPSGGKILRILYEENDESEVEIIHVTSPMLETRRADSFRYPKTGTANPKVTFKMSEIMIDAEGRIIDVIDKELIQPFEILFEGVEYIARAGWTPEGKYAWSILLDRSQTRLQIVLISPELFIPVEDDVMERQRLIESVPDSVTPLIIYEETTDIWINIHDIFHVFPQSHEEEIEFIFASECKTGFRHLYKITSILKESKYKRSSGGLPAPSDFKCPIKEEIAITSGEWEVLGRHGSNIQVDEVRRLVYFEGTKDSPLEHHLYVVSYVNPGEVTRLTDRGYSHSCCISQHCDFFISKYSNQKNPHCVSLYKLSSPEDDPTCKTKEFWATILDSAGPLPDYTPPEIFSFESTTGFTLYGMLYKPHDLQPGKKYPTVLFIYGGPQVAIAGAPVTLWIFYDTGYTERYMGHPDQNEQGYYLGSVAMQAEKFPSEPNRLLLLHGFLDENVHFAHTSILLSFLVRAGKPYDLQIYPQERHSIRVPESGEHYELHLLHYLQENLGSRIAALKVI

SEQ ID NO: 43905 - protein, 898 aa, Homo sapiens; identical to SEQ ID NO: 43903

SEQ ID NO: 43906 - protein, 1222 aa, Homo sapiens
MSEAPRFFVGPEDTEINPGNYRHFFHHADEDDEEEDDSPPERQIVVGICSMAKKSKSKPMKEILERISLFKYITVVVFEEEVILNEPVENWPLCDCLISFHSKGFPLDKAVAYAKLRNPFVINDLNMQYLIQDRREVYSILQAEGILLPRYAILNRDPNNPKECNLIEGEDHVEVNGEVFQKPFVEKPVSAEDHNVYIYYPTSAGGGSQRLFRKIGSRSSVYSPESNVRKTGSYIYEEFMPTDGTDVKVYTVGPDYAHAEARKSPALDGKVERDSEGKEVRYPVILNAREKLIAWKVCLAFKQTVCGFDLLRANGQSYVCDVNGFSFVKNSMKYYDDCAKILGNIVMRELAPQFHIPWSIPLEAEDIPIVPTTSGTMMELRCVIAVIRHGDRTPKQKMKMEVRHQKFFDLFEKCDGYKSGKLKLKKPKQLQEVLDIARQLLMELGQNNDSEIEENKPKLEQLKTVLEMYGHFSGINRKVQLTYLPHGCPKTSSEEEDSRREEPSLLLVLKWGGELTPAGRVQAEELGRAFRCMYPGGQGDYAGFPGCGLLRLHSTYRHDLKIYASDEGRVQMTAAAFAKGLLALEGELTPILVQMVKSANMNGLLDSDSDSLSSCQQRVKARLHEILQKDRDFTAEDYEKLTPSGSISLIKSMHLIKNPVKTCDKVYSLIQSLTSQIRHRMEDPKSSDIQLYHSETLELMLRRWSKLEKDFKTKNGRYDISKIPDIYDCIKYDVQHNGSLKLENTMELYRLSKALADIVIPQEYGITKAEKLEIAKGYCTPLVRKIRSDLQRTQDDDTVNKLHPVYSRGVLSPERHVRTRLYFTSESHVHSLLSILRYGALCNESKDEQWKRAMDYLNVVNELNYMTQIVIMLYEDPNKDLSSEERFHVELHFSPGAKGCEEDKNLPSGYGYRPASRENEGRRPFKIDNDDEPHTSKRDEVDRAVILFKPMVSEPIHIHRKSPLPRSRKTATNDEESPLSVSSPEGTGTWLHYTSGVGTGRRRRRSGEQITSSPVSPKSLAFTSSIFGSWQQVVSENANYLRTPRTLVEQKQNPTVGSHCAGLFSTSVLGGSSSAPNLQDYARTHRKKLTSSGCIDGFELYSMVPSICPLETLHNALSLKQVDEFLASIASPSSDVPRKTAEISSTALRSSPIMRKKVSLNTYTPAKILPTPPATLKSTKASSKPATSGPSSAVVPNTSSRKKNITSKTETHEHKKNTGKKK

SEQ ID NO: 43907 - protein, 1243 aa, Homo sapiens
MSEAPRFFVGPEDTEINPGNYRHFFHHADEDDEEEDDSPPERQIVVGICSMAKKSKSKPMKEILERISLFKYITVVVFEEEVILNEPVENWPLCDCLISFHSKGFPLDKAVAYAKLRNPFVINDLNMQYLIQDRREVYSILQAEGILLPRYAILNRDPNNPKECNLIEGEDHVEVNGEVFQKPFVEKPVSAEDHNVYIYYPTSAGGGSQRLFRKIGSRSSVYSPESNVRKTGSYIYEEFMPTDGTDVKVYTVGPDYAHAEARKSPALDGKVERDSEGKEVRYPVILNAREKLIAWKVCLAFKQTVCGFDLLRANGQSYVCDVNGFSFVKNSMKYYDDCAKILGNIVMRELAPQFHIPWSIPLEAEDIPIVPTTSGTMMELRCVIAVIRHGDRTPKQKMKMEVRHQKFFDLFEKCDGYKSGKLKLKKPKQLQEVLDIARQLLMELGQNNDSEIEENKPKLEQLKTVLEMYGHFSGINRKVQLTYLPHGCPKTSSEEEDSRREEPSLLLVLKWGGELTPAGRVQAEELGRAFRCMYPGGQGDYAGFPGCGLLRLHSTYRHDLKIYASDEGRVQMTAAAFAKGLLALEGELTPILVQMVKSANMNGLLDSDSDSLSSCQQRVKARLHEILQKDRDFTAEDYEKLTPSGSISLIKSMHLIKNPVKTCDKVYSLIQSLTSQIRHRMEDPKSSDIQLYHSETLELMLRRWSKLEKDFKTKNGRYDISKIPDIYDCIKYDVQHNGSLKLENTMELYRLSKALADIVIPQEYGITKAEKLEIAKGYCTPLVRKIRSDLQRTQDDDTVNKLHPVYSRGVLSPERHVRTRLYFTSESHVHSLLSILRYGALCNESKDEQWKRAMDYLNVVNELNYMTQIVIMLYEDPNKDLSSEERFHVELHFSPGAKGCEEDKNLPSGYGYRPASRENEGRRPFKIDNDDEPHTSKRDEVDRAVILFKPMVSEPIHIHRKSPLPRSRKTATNDEESPLSVSSPEGTGTWLHYTSGVGTGRRRRRSGEQITSSPVSPKSLAFTSSIFGSWQQVVSENANYLRTPRTLVEQKQNPTVGSHCAGLFSTSVLGGSSSAPNLQDYARTHRKKLTSSGCIDDATRGSAVKRFSISFARHPTNGFELYSMVPSICPLETLHNALSLKQVDEFLASIASPSSDVPRKTAEISSTALRSSPIMRKKVSLNTYTPAKILPTPPATLKSTKASSKPATSGPSSAVVPNTSSRKKNITSKTETHEHKKNTGKKK

SEQ ID NO: 43908 - protein, 1222 aa, Homo sapiens; identical to SEQ ID NO: 43906

SEQ ID NO: 43909 - protein, 1278 aa, Homo sapiens
MSEAPRFFVGPEDTEINPGNYRHFFHHADEDDEEEDDSPPERQIVVGICSMAKKSKSKPMKEILERISLFKYITVVVFEEEVILNEPVENWPLCDCLISFHSKGFPLDKAVAYAKLRNPFVINDLNMQYLIQDRREVYSILQAEGILLPRYAILNRDPNNPKECNLIEGEDHVEVNGEVFQKPFVEKPVSAEDHNVYIYYPTSAGGGSQRLFRKIGSRSSVYSPESNVRKTGSYIYEEFMPTDGTDVKVYTVGPDYAHAEARKSPALDGKVERDSEGKEVRYPVILNAREKLIAWKVCLAFKQTVCGFDLLRANGQSYVCDVNGFSFVKNSMKYYDDCAKILGNIVMRELAPQFHIPWSIPLEAEDIPIVPTTSGTMMELRCVIAVIRHGDRTPKQKMKMEVRHQKFFDLFEKCDGYKSGKLKLKKPKQLQEVLDIARQLLMELGQNNDSEIEENKPKLEQLKTVLEMYGHFSGINRKVQLTYLPHGCPKTSSEEEDSRREEPSLLLVLKWGGELTPAGRVQAEELGRAFRCMYPGGQGDYAGFPGCGLLRLHSTYRHDLKIYASDEGRVQMTAAAFAKGLLALEGELTPILVQMVKSANMNGLLDSDSDSLSSCQQRVKARLHEILQKDRDFTAEDYEKLTPSGSISLIKSMHLIKNPVKTCDKVYSLIQSLTSQIRHRMEDPKSSDIQLYHSETLELMLRRWSKLEKDFKTKNGRYDISKIPDIYDCIKYDVQHNGSLKLENTMELYRLSKALADIVIPQEYGITKAEKLEIAKGYCTPLVRKIRSDLQRTQDDDTVNKLHPVYSRGVLSPERHVRTRLYFTSESHVHSLLSILRYGALCNDHDSQNEDGGMVKEMESKDEQWKRAMDYLNVVNELNYMTQIVIMLYEDPNKDLSSEERFHVELHFSPGAKGCEEDKNLPSGYGYRPASRENEGRRPFKIDNDDEPHTSKRDEVDRAVILFKPMVSEPIHIHRKSPLPRSRKTATNDEESPLSVSSPEGTGTWLHYTSGVGTGRRRRRSGEQITSSPVSPKSLAFTSSIFGSWQQVVSENANYLRTPRTLVEQKQNPTVGSHCAGLFSTSVLGGSSSAPNLQDYARTHRKKLTSSGCIDDATRGSAVKRFSISFARHPTNEHLHLYRCWSVSSVEFLGSSGFELYSMVPSICPLETLHNALSLKQVDEFLASIASPSSDVPRKTAEISSTALRSSPIMRKKVSLNTYTPAKILPTPPATLKSTKASSKPATSGPSSAVVPNTSSRKKNITSKTETHEHKKNTGKKK

SEQ ID NO: 43910 - protein, 58 aa, Homo sapiens
MSEAPRFFVGPEDTEINPGNYRHFFHHADEDDEEEDDSPPERQIVVGICSMAKKSKSK

SEQ ID NO: 43911 - protein, 958 aa, Homo sapiens
MLKSKTFLKKTRAGGVMKIVREHYLRDDIGCGAPGCAACGGAHEGPALEPQPQDPASSVCPQPHYLLPDTNVLLHQIDVLEDPAIRNVIVLQTVLQEVRNRSAPVYKRIRDVTNNQEKHFYTFTNEHHRETYVEQEQGENANDRNDRAIRVAAKWYNEHLKKMSADNQLQVIFITNDRRNKEKAIEEGIPAFTCEEYVKSLTANPELIDRLACLSEEGNEIESGKIIFSEHLPLSKLQQGIKSGTYLQGTFRASRENYLEATVWIHGDNEENKEIILQGLKHLNRAVHEDIVAVELLPKSQWVAPSSVVLHDEGQNEEDVEKEEETERMLKTAVSEKMLKPTGRVVGIIKRNWRPYCGMLSKSDIKESRRHLFTPADKRIPRIRIETRQASTLEGRRIIVAIDGWPRNSRYPNGHFVRNLGDVGEKETETEVLLLEHDVPHQPFSQAVLSFLPKMPWSITEKDMKNREDLRHLCICSVDPPGCTDIDDALHCRELENGNLEVGVHIADVSHFIRPGNALDQESARRGTTVYLCEKRIDMVPELLSSNLCSLKCDVDRLAFSCIWEMNHNAEILKTKFTKSVINSKASLTYAEAQLRIDSANMNDDITTSLRGLNKLAKILKKRRIEKGALTLSSPEVRFHMDSETHDPIDLQTKELRETNSMVEEFMLLANISVAKKIHEEFSEHALLRKHPAPPPSNYEILVKAARSRNLEIKTDTAKSLAESLDQAESPTFPYLNTLLRILATRCMMQAVYFCSGMDNDFHHYGLASPIYTHFTSPIRRYADVIVHRLLAVAIGADCTYPELTDKHKLADICKNLNFRHKMAQYAQRASVAFHTQLFFKSKGIVSEEAYILFVRKNAIVVLIPKYGLEGTVFFEEKDKPNPQLIYDDEIPSLKIEDTVFHVFDKVKVKIMLDSSNLQHQKIRMSLVEPQIPGISIPTDTSNMDLNGPKKKKMKLGK

SEQ ID NO: 43912 - protein, 796 aa, Homo sapiens
MSADNQLQVIFITNDRRNKEKAIEEGIPAFTCEEYVKSLTANPELIDRLACLSEEGNEIESGKIIFSEHLPLSKLQQGIKSGTYLQGTFRASRENYLEATVWIHGDNEENKEIILQGLKHLNRAVHEDIVAVELLPKSQWVAPSSVVLHDEGQNEEDVEKEEETERMLKTAVSEKMLKPTGRVVGIIKRNWRPYCGMLSKSDIKESRRHLFTPADKRIPRIRIETRQASTLEGRRIIVAIDGWPRNSRYPNGHFVRNLGDVGEKETETEVLLLEHDVPHQPFSQAVLSFLPKMPWSITEKDMKNREDLRHLCICSVDPPGCTDIDDALHCRELENGNLEVGVHIADVSHFIRPGNALDQESARRGTTVYLCEKRIDMVPELLSSNLCSLKCDVDRLAFSCIWEMNHNAEILKTKFTKSVINSKASLTYAEAQLRIDSANMNDDITTSLRGLNKLAKILKKRRIEKGALTLSSPEVRFHMDSETHDPIDLQTKELRETNSMVEEFMLLANISVAKKIHEEFSEHALLRKHPAPPPSNYEILVKAARSRNLEIKTDTAKSLAESLDQAESPTFPYLNTLLRILATRCMMQAVYFCSGMDNDFHHYGLASPIYTHFTSPIRRYADVIVHRLLAVAIGADCTYPELTDKHKLADICKNLNFRHKMAQYAQRASVAFHTQLFFKSKGIVSEEAYILFVRKNAIVVLIPKYGLEGTVFFEEKDKPNPQLIYDDEIPSLKIEDTVFHVFDKVKVKIMLDSSNLQHQKIRMSLVEPQIPGISIPTDTSNMDLNGPKKKKMKLGK

SEQ ID NO: 43913 - protein, 928 aa, Homo sapiens
MLKSKTFLKKTRAGGVMKIVREHYLRDDIGCGAPGCAACGGAHEGPALEPQPQDPASSVCPQPHYLLPDTNVLLHQIVSAWRPGTWASVASSLRLPGSLETYVEQEQGENANDRNDRAIRVAAKWYNEHLKKMSADNQLQVIFITNDRRNKEKAIEEGIPAFTCEEYVKSLTANPELIDRLACLSEEGNEIESGKIIFSEHLPLSKLQQGIKSGTYLQGTFRASRENYLEATVWIHGDNEENKEIILQGLKHLNRAVHEDIVAVELLPKSQWVAPSSVVLHDEGQNEEDVEKEEETERMLKTAVSEKMLKPTGRVVGIIKRNWRPYCGMLSKSDIKESRRHLFTPADKRIPRIRIETRQASTLEGRRIIVAIDGWPRNSRYPNGHFVRNLGDVGEKETETEVLLLEHDVPHQPFSQAVLSFLPKMPWSITEKDMKNREDLRHLCICSVDPPGCTDIDDALHCRELENGNLEVGVHIADVSHFIRPGNALDQESARRGTTVYLCEKRIDMVPELLSSNLCSLKCDVDRLAFSCIWEMNHNAEILKTKFTKSVINSKASLTYAEAQLRIDSANMNDDITTSLRGLNKLAKILKKRRIEKGALTLSSPEVRFHMDSETHDPIDLQTKELRETNSMVEEFMLLANISVAKKIHEEFSEHALLRKHPAPPPSNYEILVKAARSRNLEIKTDTAKSLAESLDQAESPTFPYLNTLLRILATRCMMQAVYFCSGMDNDFHHYGLASPIYTHFTSPIRRYADVIVHRLLAVAIGADCTYPELTDKHKLADICKNLNFRHKMAQYAQRASVAFHTQLFFKSKGIVSEEAYILFVRKNAIVVLIPKYGLEGTVFFEEKDKPNPQLIYDDEIPSLKIEDTVFHVFDKVKVKIMLDSSNLQHQKIRMSLVEPQIPGISIPTDTSNMDLNGPKKKKMKLGK

SEQ ID NO: 43914 - protein, 971 aa, Homo sapiens
MQTACQAVQHQRGRRQYNKLRNLLKDARHDCILFANEFQQCCYLPRERGESMEKWQTRSIYNAAVWYYHHCQDRMPIVMVTEDEEAIQQYGSETEGVFVITFKNYLDNFWPDLKAAHELCDSILQSRRERENESQESHGKEYPEHLPLEVLEAGIKSGRYIQGILNVNKHRAQIEAFVRLQGASSKDSDLVSDILIHGMKARNRSIHGDVVVVELLPKNEWKGRTVALCENDCDDKASGESPSEPMPTGRVVGILQKNWRDYVVTFPSKEEVQSQGKNAQKILVTPWDYRIPKIRISTQQAETLQDFRVVVRIDSWESTSVYPNGHFVRVLGRIGDLEGEIATILVENSISVIPFSEAQMCEMPVNTPESPWKVSPEEEQKRKDLRKSHLVFSIDPKGCEDVDDTLSVRTLNNGNLELGVHIADVTHFVAPNSYIDIEARTRATTYYLADRRYDMLPSVLSADLCSLLGGVDRYAVSIMWELDKASYEIKKVWYGRTIIRSAYKLFYEAAQELLDGNLSVVDDIPEFKDLDEKSRQAKLEELVWAIGKLTDIARHVRAKRDGCGALELEGVEVCVQLDDKKNIHDLIPKQPLEVHETVAECMILANHWVAKKIWESFPHQALLRQHPPPHQEFFSELRECAKAKGFFIDTRSNKTLADSLDNANDPHDPIVNRLLRSMATQAMSNALYFSTGSCAEEEFHHYGLALDKYTHFTSPIRRYSDIVVHRLLMAAISKDKKMEIKGNLFSNKDLEELCRHINNRNQAAQHSQKQSTELFQCMYFKDKDPATEERCISDGVIYSIRTNGVLLFIPRFGIKGAAYLKNKDGLVISCGPDSCSEWKPGSLQRFQNKITSTTTDGESVTFHLFDHVTVRISIQASRCHSDTIRLEIISNKPYKIPNTELIHQSSPLLKSELVKEVTKSVEEAQLAQEVKVNIIQEEYQEYRQTKGRSLYTLLEEIRDLALLDVSNNYGI

SEQ ID NO: 43915 - protein, 1054 aa, Homo sapiens
MLQKREKVLLLRTFQGRTLRIVREHYLRPCVPCHSPLCPQPAACSHDGKLLSSDVTHYVIPDWKVVQDYLEILEFPELKGIIFMQTACQAVQHQRGRRQYNKLRNLLKDARHDCILFANEFQQCCYLPRERGESMEKWQTRSIYNAAVWYYHHCQDRMPIVMVTEDEEAIQQYGSETEGVFVITFKNYLDNFWPDLKAAHELCDSILQSRRERENESQESHGKEYPEHLPLEVLEAGIKSGRYIQGILNVNKHRAQIEAFVRLQGASSKDSDLVSDILIHGMKARNRSIHGDVVVVELLPKNEWKGRTVALCENDCDDKASGESPSEPMPTGRVVGILQKNWRDYVVTFPSKEEVQSQGKNAQKILVTPWDYRIPKIRISTQQAETLQDFRVVVRIDSWESTSVYPNGHFVRVLGRIGDLEGEIATILVENSISVIPFSEAQMCEMPVNTPESPWKVSPEEEQKRKDLRKSHLVFSIDPKGCEDVDDTLSVRTLNNGNLELGVHIADVTHFVAPNSYIDIEARTRATTYYLADRRYDMLPSVLSADLCSLLGGVDRYAVSIMWELDKASYEIKKVWYGRTIIRSAYKLFYEAAQELLDGNLSVVDDIPEFKDLDEKSRQAKLEELVWAIGKLTDIARHVRAKRDGCGALELEGVEVCVQLDDKKNIHDLIPKQPLEVHETVAECMILANHWVAKKIWESFPHQALLRQHPPPHQEFFSELRECAKAKGFFIDTRSNKTLADSLDNANDPHDPIVNRLLRSMATQAMSNALYFSTGSCAEEEFHHYGLALDKYTHFTSPIRRYSDIVVHRLLMAAISKDKKMEIKGNLFSNKDLEELCRHINNRNQAAQHSQKQSTELFQCMYFKDKDPATEERCISDGVIYSIRTNGVLLFIPRFGIKGAAYLKNKDGLVISCGPDSCSEWKPGSLQRFQNKITSTTTDGESVTFHLFDHVTVRISIQASRCHSDTIRLEIISNKPYKIPNTELIHQSSPLLKSELVKEVTKSVEEAQLAQEVKVNIIQEEYQEYRQTKGRSLYTLLEEIRDLALLDVSNNYGI

SEQ ID NO: 43916 - protein, 253 aa, Homo sapiens
MEKWQTRSIYNAAVWYYHHCQDRMPIVMVTEDEEAIQQYGSETEGVFVITFKNYLDNFWPDLKAAHELCDSILQSRRERENESQESHGKEYPEHLPLEVLEAGIKSGRYIQGILNVNKHRAQIEAFVRLQGASSKDSDLVSDILIHGMKARNRSIHGDVVVVELLPKNEWKGRTVALCENDCDDKASGESPSEPMPTGLQGGRAHRFLGVNICVSKWTFCACFRKNRRSGRGNCNHPGGKQYFSYSFLRSSDV

SEQ ID NO: 43917 - protein, 150 aa, Homo sapiens
MEKWQTRSIYNAAVWYYHHCQDRMPIVMVTEDEEAIQQYGSETEGVFVITFKNYLDNFWPDLKAAHELCDSILQSRRERENESQESHGKEYPEHLPLEVLEAGIKSGRYIQGILNVNKHRAQIEAFVRLQGASSKDSDLVSDILIHGMKA

SEQ ID NO: 43918 - protein, 57 aa, Homo sapiens
MQTACQAVQHQRGRRQYNKLRNLLKDARHDCILFANEFQQCCYLPRERGESMEKWQT

SEQ ID NO: 43919 - protein, 97 aa, Homo sapiens
MQTACQAVQHQRGRRQYNKLRNLLKDARHDCILFANEFQQCCYLPRERGESMEKWQTRSIYNAAVWYYHHCQDRMPIVMVTEDEEAIQQYGSETEGV

SEQ ID NO: 43920 - protein, 103 aa, Homo sapiens
MQTACQAVQHQRGRRQYNKLRNLLKDARHDCILFANEFQQCCYLPRERGESMEKWQTRSIYNAAVWYYHHCQDRMPIVMVTEDEEAIQQYGSETEGVFVITFK

SEQ ID NO: 43921 - protein, 603 aa, Homo sapiens
MSHPDYRMNLRPLGTPRGVSAVAGPHDIGASPGDKKSKNRSTRGKKKSIFETYMSKEDVSEGLKRGTLIQGVLRINPKKFHEAFIPSPDGDRDIFIDGVVARNRALNGDLVVVKLLPEEHWKVVKPESNDKETEAAYESDIPEELCGHHLPQQSLKSYNDSPDVIVEAQFDGSDSEDGHGITQNVLVDGVKKLSVCVSEKGREDGDAPVTKDETTCISQDTRALSEKSLQRSAKVVYILEKKHSRAATGFLKLLADKNSELFRKYALFSPSDHRVPRIYVPLKDCPQDFVARPKDYANTLFICRIVDWKEDCNFALGQLAKSLGQAGEIEPETEGILTEYGVDFSDFSSEVLECLPQGLPWTIPPEEFSKRRDLRKDCIFTIDPSTARDLDDALSCKPLADGNFKVGVHIADVSYFVPEGSDLDKVAAERATSVYLVQKVVPMLPRLLCEELCSLNPMSDKLTFSVIWTLTPEGKILDEWFGRTIIRSCTKLSYEHAQSMIESPTEKIPAKELPPISPEHSSEEVHQQNADKDGAAHLQASHSPSAEDAEAQPSTEERLPETRGICDRDPDTRLFFLQQQSRVLEAKPQNTIRVEEQTTQLQI

SEQ ID NO: 43922 - protein, 885 aa, Homo sapiens
MSHPDYRMNLRPLGTPRGVSAVAGPHDIGASPGDKKSKNRSTRGKKKSIFETYMSKEDVSEGLKRGTLIQGVLRINPKKFHEAFIPSPDGDRDIFIDGVVARNRALNGDLVVVKLLPEEHWKVVKPESNDKETEAAYESDIPEELCGHHLPQQSLKSYNDSPDVIVEAQFDGSDSEDGHGITQNVLVDGVKKLSVCVSEKGREDGDAPVTKDETTCISQDTRALSEKSLQRSAKVVYILEKKHSRAATGFLKLLADKNSELFRKYALFSPSDHRVPRIYVPLKDCPQDFVARPKDYANTLFICRIVDWKEDCNFALGQLAKSLGQAGEIEPETEGILTEYGVDFSDFSSEVLECLPQGLPWTIPPEEFSKRRDLRKDCIFTIDPSTARDLDDALSCKPLADGNFKVGVHIADVSYFVPEGSDLDKVAAERATSVYLVQKVVPMLPRLLCEELCSLNPMSDKLTFSVIWTLTPEGKILDEWFGRTIIRSCTKLSYEHAQSMIESPTEKIPAKELPPISPEHSSEEVHQAVLNLHGIAKQLRQQRFVDGALRLDQLKLAFTLDHETGLPQGCHIYEYRESNKLVEEFMLLANMAVAHKIHRAFPEQALLRRHPPPQTRMLSDLVEFCDQMGLPVDFSSAGALNKSLTQTFGDDKYSLARKEVLTNMCSRPMQMALYFCSGLLQDPAQFRHYALNVPLYTHFTSPIRRFADVLVHRLLAAALGYRERLDMAPDTLQKQADHCNDRRMASKRVQELSTSLFFAVLVKESGPLESEAMVMGILKQAFDVLVLRYGVQKRIYCNALALRSHHFQKVGKKPELTLVWEPEDMEQEPAQQVITIFSLVEVVLQAESTALKYSAILKRPGTQGHLGPEKEEEESDGEPEDSSTS

SEQ ID NO: 43923 - protein, 356 aa, Homo sapiens
MSHPDYRMNLRPLGTPRGVSAVAGPHDIGASPGDKKSKNRSTRGKKKSIFETYMSKEDVSEGLKRGTLIQGVLRINPKKFHEAFIPSPDGDRDIFIDGVVARNRALNGDLVVVKLLPEEHWKVVKPESNDKETEAAYESDIPEELCGHHLPQQSLKSYNDSPDVIVEAQFDGSDSEDGHGITQNVLVDGVKKLSVCVSEKDNEIEAQRSSWAYPVSHRKSEERMVMHRLQKMRPPAFHKTQELYRRNPCKDQQRWFTSWRKNILEQQPASSNSWLIRTANCLGNTPCFLPQTTECLEFMCLSRTVPRTLWHGLKIMPTHCSSAALWTGRRTAILPWGSWLRVLGRLVKLSLKQKEY

SEQ ID NO: 43924 - protein, 885 aa, Homo sapiens; identical to SEQ ID NO: 43922

SEQ ID NO: 43925 - protein, 249 aa, Homo sapiens
MSHPDYRMNLRPLGTPRGVSAVAGPHDIGASPGDKKSKNRSTRGKKKSIFETYMSKEDVSEGLKRGTLIQGVLRINPKKFHEAFIPSPDGDRDIFIDGVVARNRALNGDLVVVKLLPEEHWKVVKPESNDKETEAAYESDIPEELCGHHLPQQSLKSYNDSPDVIVEAQFDGSDSEDGHGITQNVLVDGVKKLSVCVSEKGREDGDAPVTKDETTCISQDTRALSEKSLQRSAKVIAYRFSPRVQMAFT

SEQ ID NO: 43926 - protein, 675 aa, Homo sapiens
MSHPDYRMNLRPLGTPRGVSAVAGPHDIGASPGDKKSKNRSTRGKKKSIFETYMSKEDVSEGLKRGTLIQGVLRINPKKFHEAFIPSPDGDRDIFIDGVVARNRALNGDLVVVKLLPEEHWKVVKPESNDKETEAAYESDIPEELCGHHLPQQSLKSYNDSPDVIVEAQFDGSDSEDGHGITQNVLVDGVKKLSVCVSEKGREDGDAPVTKDETTCISQDTRALSEKSLQRSAKVVYILEKKHSRAATGFLKLLADKNSELFRKYALFSPSDHRVPRIYVPLKDCPQDFVARPKDYANTLFICRIVDWKEDCNFALGQLAKSLGQAGEIEPETEGILTEYGVDFSDFSSEVLECLPQGLPWTIPPEEFSKRRDLRKDCIFTIDPSTARDLDDALSCKPLADGNFKVGVHIADVSYFVPEGSDLDKVAAERATSVYLVQKVVPMLPRLLCEELCSLNPMSDKLTFSVIWTLTPEGKILDEWFGRTIIRSCTKLSYEHAQSMIESPTEKIPAKELPPISPEHSSEEVHQAVLNLHGIAKQLRQQRFVDGALRLDQLKLAFTLDHETGLPQGCHIYEYRESNKLVEEFMLLANMAVAHKIHRAFPEQALLRRHPPPQTRMLSDLVEFCDQMGLPVDFSSAGALNKSLTQTFGDDKYSLARKEVLTNMCSRLPVPPHWL

SEQ ID NO: 43927 - protein, 144 aa, Homo sapiens
MSHPDYRMNLRPLGTPRGVSAVAGPHDIGASPGDKKSKNRSTRGKKKSIFETYMSKEDVSEGLKRGTLIQGVLRINPKKFHEAFIPSPDGDRDIFIDGVVARNRALNGDLVVVKLLPEEHWKVVKPESNDKETEAAYESDIPEE

SEQ ID NO: 43928 - protein, 619 aa, Homo sapiens
MSHPDYRMNLRPLGTPRGVSAVAGPHDIGASPGDKKSKNRSTRGKKKSIFETYMSKEDVSEGLKRGTLIQGVLRINPKKFHEAFIPSPDGDRDIFIDGVVARNRALNGDLVVVKLLPEEHWKVVKPESNDKETEAAYESDIPEELCGHHLPQQSLKSYNDSPDVIVEAQFDGSDSEDGHGITQNVLVDGVKKLSVCVSEKGREDGDAPVTKDETTCISQDTRALSEKSLQRSAKVVYILEKKHSRAATGFLKLLADKNSELFRKYALFSPSDHRVPRIYVPLKDCPQDFVARPKDYANTLFICRIVDWKEDCNFALGQLAKSLGQAGEIEPETEGILTEYGVDFSDFSSEVLECLPQGLPWTIPPEEFSKRRDLRKDCIFTIDPSTARDLDDALSCKPLADGNFKVGVHIADVSYFVPEGSDLDKVAAERATSVYLVQKVVPMLPRLLCEELCSLNPMSDKLTFSVIWTLTPEGKILDEWFGRTIIRSCTKLSYEHAQSMIESPTEKIPAKELPPISPEHSSEEVHQAVLNLHGIAKQLRQQRFVDGALRLDQLKLAFTLDHETGLPQGCHIYEYRESNKPCCAGTPRPKQGCSVTWWNSATRWGCPWTSAPQEPSMKA

SEQ ID NO: 43929 - protein, 204 aa, Homo sapiens
MSTETELQVAVKTSAKKDSRKKGQDRSEATLIKRFKGEGVRYKAKLIGIDEVSAARGDKLCQDSMMKLKGVVAGARSKGEHKQKIFLTISFGGIKIFDEKTGALQHHHAVHEISYIAKDITDHRAFGYVCGKEGNHRFVAIKTAQAAEPVILDLRDLFQLIYELKQREELEKKAQKDKQCEQAVYQVPTSQKKEGVYDVPKSQP

SEQ ID NO: 43930 - protein, 213 aa, Homo sapiens
MSTETELQVAVKTSAKKDSRKKGQDRSEATLIKRFKGEGVRYKAKLIGIDEVSAARGDKLCQDSMMKLKGVVAGARSKGEHKQKIFLTISFGGIKIFDEKTGALQHHHAVHEISYIAKDITDHRAFGYVCGKEGNHRFVAIKTAQAAEPVILDLRDLFQLIYELKQREELEKKAQKDKQCEQAVYQTILEEDVEDPVYQVISETSRGFRFKSD

SEQ ID NO: 43931 - protein, 588 aa, Homo sapiens
MSTETELQVAVKTSAKKDSRKKGQDRSEATLIKRFKGEGVRYKAKLIGIDEVSAARGDKLCQDSMMKLKGVVAGARSKGEHKQKIFLTISFGGIKIFDEKTGALQHHHAVHEISYIAKDITDHRAFGYVCGKEGNHRFVAIKTAQAAEPVILDLRDLFQLIYELKQREELEKKAQKDKQCEQAVYQTILEEDVEDPVYQYIVFEAGHEPIRDPETEENIYQVPTSQKKEGVYDVPKSQPVSNGYSFEDFEERFAAATPNRNLPTDFDEIFEATKAVTQLELFGDMSTPPDITSPPTPATPGDAFIPSSSQTLPASADVFSSVPFGTAAVPSGYVAMGAVLPSFWGQQPLVQQQMVMGAQPPVAQVMPGAQPIAWGQPGLFPATQQPWPTVAGQFPPAAFMPTQTVMPLPAAMFQGPLTPLATVPGTSDSTRSSPQTDKPRQKMGKETFKDFQMAQPPPVPSRKPDQPSLTCTSEAFSSYFNKVGVAQDTDDCDDFDISQLNLTPVTSTTPSTNSPPTPAPRQSSPSKSSASHASDPTTDDIFEEGFESPSKSEEQEAPDGSQASSNSDPFGEPSGEPSGDNISPQAGS

SEQ ID NO: 43932 - protein, 239 aa, Homo sapiens
MSTETELQVAVKTSAKKDSRKKGQDRSEATLIKRFKGEGVRYKAKLIGIDEVSAARGDKLCQDSMMKLKGVVAGARSKGEHKQKIFLTISFGGIKIFDEKTGVPTSQKKEGVYDVPKSQPVSNGYSFEDFEERFAAATPNRNLPTDFDEIFEATKAVTQLELFGDMSTPPDITSPPTPATPGDAFIPSSSQTLPASADVFSSVPFGTAAVPSGYVAMGAVLPSFWGQQPLVQQQMVMGA

SEQ ID NO: 43933 - protein, 555 aa, Homo sapiens
MSTETELQVAVKTSAKKDSRKKGQDRSEATLIKRFKGEGVRYKAKLIGIDEVSAARGDKLCQDSMMKLKGVVAGARSKGEHKQKIFLTISFGGIKIFDEKTGALQHHHAVHEISYIAKDITDHRAFGYVCGKEGNHRFVAIKTAQAAEPVILDLRDLFQLIYELKQREELEKKAQKDKQCEQAVYQTILEEDVEDPVYQYIVFEAGHEPIRDPETEENIYQVPTSQKKEGVYDVPKSQPVSAVTQLELFGDMSTPPDITSPPTPATPGDAFIPSSSQTLPASADVFSSVPFGTAAVPSGYVAMGAVLPSFWGQQPLVQQQMVMGAQPPVAQVMPGAQPIAWGQPGLFPATQQPWPTVAGQFPPAAFMPTQTVMPLPAAMFQGPLTPLATVPGTSDSTRSSPQTDKPRQKMGKETFKDFQMAQPPPVPSRKPDQPSLTCTSEAFSSYFNKVGVAQDTDDCDDFDISQLNLTPVTSTTPSTNSPPTPAPRQSSPSKSSASHASDPTTDDIFEEGFESPSKSEEQEAPDGSQASSNSDPFGEPSGEPSGDNISPQAGS

SEQ ID NO: 43934 - protein, 555 aa, Homo sapiens; identical to SEQ ID NO: 43933

SEQ ID NO: 43935 - protein, 555 aa, Homo sapiens; identical to SEQ ID NO: 43933

SEQ ID NO: 43936 - protein, 537 aa, Homo sapiens
MSTETELQVAVKTSAKKDSRKKGQDRSEATLIKRFKGEGVRYKAKLIGIDEVSAARGDKLCQDSMMKLKGVVAGARSKGEHKQKIFLTISFGGIKIFDEKTGALQHHHAVHEISYIAKDITDHRAFGYVCGKEGNHRFVAIKTAQAAEPVILDLRDLFQLIYELKQREELEKKAQKDKQCEQAVYQVPTSQKKEGVYDVPKSQPVSNGYSFEDFEERFAAATPAVTQLELFGDMSTPPDITSPPTPATPGDAFIPSSSQTLPASADVFSSVPFGTAAVPSGYVAMGAVLPSFWGQQPLVQQQMVMGAQPPVAQVMPGAQPIAWGQPGLFPATQQPWPTVAGQFPPAAFMPTQTVMPLPAAMFQGPLTPLATVPGTSDSTRSSPQTDKPRQKMGKETFKDFQMAQPPPVPSRKPDQPSLTCTSEAFSSYFNKVGVAQDTDDCDDFDISQLNLTPVTSTTPSTNSPPTPAPRQSSPSKSSASHASDPTTDDIFEEGFESPSKSEEQEAPDGSQASSNSDPFGEPSGEPSGDNISPQAGS

SEQ ID NO: 43937 - protein, 553 aa, Homo sapiens
MSTETELQVAVKTSAKKDSRKKGQDRSEATLIKRFKGEGVRYKAKLIGIDEVSAARGDKLCQDSMMKLKGVVAGARSKGEHKQKIFLTISFGGIKIFDEKTGALQHHHAVHEISYIAKDITDHRAFGYVCGKEGNHRFVAIKTAQAAEPVILDLRDLFQLIYELKQREELEKKAQKDKQCEQAVYQVPTSQKKEGVYDVPKSQPVSNGYSFEDFEERFAAATPNRNLPTDFDEIFEATKAVTQLELFGDMSTPPDITSPPTPATPGDAFIPSSSQTLPASADVFSSVPFGTAAVPSGYVAMGAVLPSFWGQQPLVQQQMVMGAQPPVAQVMPGAQPIAWGQPGLFPATQQPWPTVAGQFPPAAFMPTQTVMPLPAAMFQGPLTPLATVPGTSDSTRSSPQTDKPRQKMGKETFKDFQMAQPPPVPSRKPDQPSLTCTSEAFSSYFNKVGVAQDTDDCDDFDISQLNLTPVTSTTPSTNSPPTPAPRQSSPSKSSASHASDPTTDDIFEEGFESPSKSEEQEAPDGSQASSNSDPFGEPSGEPSGDNISPQAGS

SEQ ID NO: 43938 - protein, 469 aa, Homo sapiens
MSTETELQVAVKTSAKKDSRKKGQDRSEATLIKRFKGEGVRYKAKLIGIDEVSAARGDKLCQDSMMKLKGVVAGARSKGEHKQKIFLTISFGGIKIFDEKTGVPTSQKKEGVYDVPKSQPVSNGYSFEDFEERFAAATPNRNLPTDFDEIFEATKAVTQLELFGDMSTPPDITSPPTPATPGDAFIPSSSQTLPASADVFSSVPFGTAAVPSGYVAMGAVLPSFWGQQPLVQQQMVMGAQPPVAQVMPGAQPIAWGQPGLFPATQQPWPTVAGQFPPAAFMPTQTVMPLPAAMFQGPLTPLATVPGTSDSTRSSPQTDKPRQKMGKETFKDFQMAQPPPVPSRKPDQPSLTCTSEAFSSYFNKVGVAQDTDDCDDFDISQLNLTPVTSTTPSTNSPPTPAPRQSSPSKSSASHASDPTTDDIFEEGFESPSKSEEQEAPDGSQASSNSDPFGEPSGEPSGDNISPQAGS

SEQ ID NO: 43939 - protein, 770 aa, Homo sapiens
MSNEVETSATNGQPDQQAAPKAPSKKEKKKGPEKTDEYLLARFKGDGVKYKAKLIGIDDVPDARGDKMSQDSMMKLKGMAAAGRSQGQHKQRIWVNISLSGIKIIDEKTGVIEHEHPVNKISFIARDVTDNRAFGYVCGGEGQHQFFAIKTGQQAEPLVVDLKDLFQVIYNVKKKEEEKKKIEEASKAVENGSEALMILDDQTNKLKSGVDQMDLFGDMSTPPDLNSPTESKDILLVDLNSEIDTNQNSLRENPFLTNGITSCSLPRPTPQASFLPENAFSANLNFFPTPNPDPFRDDPFTQPDQSTPSSFDSLKSPDQKKENSSSSSTPLSNGPLNGDVDYFGQQFDQISNRTGKQEAQAGPWPFSSSQTQPAVRTQNGVSEREQNGFSVKSSPNPFVGSPPKGLSIQNGVKQDLESSVQSSPHDSIAIIPPPQSTKPGRGRRTAKSSANDLLASDIFAPPVSEPSGQASPTGQPTALQPNPLDLFKTSAPAPVGPLVGLGGVTVTLPQAGPWNTASLVFNQSPSMAPGAMMGGQPSGFSQPVIFGTSPAVSGWNQPSPFAASTPPPVPVVWGPSASVAPNAWSTTSPLGNPFQSNIFPAPAVSTQPPSMHSSLLVTPPQPPPRAGPPKDISSDAFTALDPLGDKEIKDVKEMFKDFQLRQPPAVPARKGEQTSSGTLSAFASYFNSKVGIPQENADHDDFDANQLLNKINEPPKPAPRQVSLPVTKSTDNAFENPFFKDSFGSSQASVASSQPVSSEMYRDPFGNPFA

SEQ ID NO: 43940 - protein, 552 aa, Homo sapiens
MSNEVETSATNGQPDQQAAPKAPSKKEKKKGPEKTDEYLLARFKGDGVKYKAKLIGIDDVPDARGDKMSQDSMMKLKGMAAAGRSQGQHKQRIWVNISLSGIKIIDEKTGVIEHEHPVNKISFIARDVTDNRAFGYVCGGEGQHQFFAIKTGQQAEPLVVDLKDLFQVIYNVKKKEEEKKKIEEASKAVENGSEALMILDDQTNKLKSGVDQMDLFGDMSTPPDLNSPTSSANDLLASDIFAPPVSEPSGQASPTGQPTALQPNPLDLFKTSAPAPVGPLVGLGGVTVTLPQAGPWNTASLVFNQSPSMAPGAMMGGQPSGFSQPVIFGTSPAVSGWNQPSPFAASTPPPVPVVWGPSASVAPNAWSTTSPLGNPFQSNIFPAPAVSTQPPSMHSSLLVTPPQPPPRAGPPKDISSDAFTALDPLGDKEIKDVKEMFKDFQLRQPPAVPARKGEQTSSGTLSAFASYFNSKVGIPQENADHDDFDANQLLNKINEPPKPAPRQVSLPVTKSTDNAFENPFFKDSFGSSQASVASSQPVSSEMYRDPFGNPFA

SEQ ID NO: 43941 - protein, 67 aa, Homo sapiens
MSNEVETSATNGQPDQQAAPKAPSKKEKKKGPEKTDEYLLARFKGDGVKYKAKLIGIDDVPDARGDK

SEQ ID NO: 43942 - protein, 76 aa, Homo sapiens
MSNEVETSATNGQPDQQAAPKAPSKKEKKKGPEKTDEYLLARFKGDGVKYKAKLIGIDDVPDARGDKMSQDSMMKL

SEQ ID NO: 43943 - protein, 39 aa, Homo sapiens
MSNEVETSATNGQPDQQAAPKAPSKKEKKKGPEKTDEYL

SEQ ID NO: 43944 - protein, 749 aa, Homo sapiens
MSNEVETSATNGQPDQQAAPKAPSKKEKKKGPEKTDEYLLARFKGDGVKYKAKLIGIDDVPDARGDKMSQDSMMKLKGMAAAGRSQGQHKQRIWVNISLSGIKIIDEKTGVIEHEHPVNKISFIARDVTDNRAFGYVCGGEGQHQFFAIKTGQQAEPLVVDLKDLFQVIYNVKKKEEEKKKIEEASKAVENGSEALMILDDQTNKLKSESKDILLVDLNSEIDTNQNSLRENPFLTNGITSCSLPRPTPQASFLPENAFSANLNFFPTPNPDPFRDDPFTQPDQSTPSSFDSLKSPDQKKENSSSSSTPLSNGPLNGDVDYFGQQFDQISNRTGKQEAQAGPWPFSSSQTQPAVRTQNGVSEREQNGFSVKSSPNPFVGSPPKGLSIQNGVKQDLESSVQSSPHDSIAIIPPPQSTKPGRGRRTAKSSANDLLASDIFAPPVSEPSGQASPTGQPTALQPNPLDLFKTSAPAPVGPLVGLGGVTVTLPQAGPWNTASLVFNQSPSMAPGAMMGGQPSGFSQPVIFGTSPAVSGWNQPSPFAASTPPPVPVVWGPSASVAPNAWSTTSPLGNPFQSNIFPAPAVSTQPPSMHSSLLVTPPQPPPRAGPPKDISSDAFTALDPLGDKEIKDVKEMFKDFQLRQPPAVPARKGEQTSSGTLSAFASYFNSKVGIPQENADHDDFDANQLLNKINEPPKPAPRQVSLPVTKSTDNAFENPFFKDSFGSSQASVASSQPVSSEMYRDPFGNPFA

SEQ ID NO: 43945 - protein, 855 aa, Homo sapiens
MILIPRMLLVLFLLLPILSSAKAQVNPAICRYPLGMSGGQIPDEDITASSQWSESTAAKYGRLDSEEGDGAWCPEIPVEPDDLKEFLQIDLHTLHFITLVGTQGRHAGGHGIEFAPMYKINYSRDGTRWISWRNRHGKQVLDGNSNPYDIFLKDLEPPIVARFVRFIPVTDHSMNVCMRVELYGCVWLDGLVSYNAPAGQQFVLPGGSIIYLNDSVYDGAVGYSMTEGLGQLTDGVSGLDDFTQTHEYHVWPGYDYVGWRNESATNGYIEIMFEFDRIRNFTTMKVHCNNMFAKGVKIFKEVQCYFRSEASEWEPNAISFPLVLDDVNPSARFVTVPLHHRMASAIKCQYHFADTWMMFSEITFQSDAAMYNNSEALPTSPMAPTTYDPMLKVDDSNTRILIGCLVAIIFILLAIIVIILWRQFWQKMLEKASRRMLDDEMTVSLSLPSDSSMFNNNRSSSPSEQGSNSTYDRIFPLRPDYQEPSRLIRKLPEFAPGEEESGCSGVVKPVQPSGPEGVPHYAEADIVNLQGVTGGNTYSVPAVTMDLLSGKDVAVEEFPRKLLTFKEKLGEGQFGEVHLCEVEGMEKFKDKDFALDVSANQPVLVAVKMLRADANKNARNDFLKEIKIMSRLKDPNIIHLLAVCITDDPLCMITEYMENGDLNQFLSRHEPPNSSSSDVRTVSYTNLKFMATQIASGMKYLSSLNFVHRDLATRNCLVGKNYTIKIADFGMSRNLYSGDYYRIQGRAVLPIRWMSWESILLGKFTTASDVWAFGVTLWETFTFCQEQPYSQLSDEQVIENTGEFFRDQGRQTYLPQPAICPDSVYKLMLSCWRRDTKNRPSFQEIHLLLLQQGDE

SEQ ID NO: 43946 - protein, 855 aa, Homo sapiens; identical to SEQ ID NO: 43945

SEQ ID NO: 43947 - protein, 148 aa, Homo sapiens
MILIPRMLLVLFLLLPILSSAKAQVNPAICRYPLGMSGGQIPDEDITASSQWSESTAAKYGRLDSEEGDGAWCPEIPVEPDDLKEFLQIDLHTLHFITLVGTQGRHAGGHGIEFAPMYKINYSRDGTRWISWRNRHGKQVLDGNSNPY

SEQ ID NO: 43948 - protein, 171 aa, Homo sapiens
  VARIANT 1: note = MOD_RES - Any amino acid
XIFILLAIIVIILWRQFWQKMLEKASRRMLDDEMTVSLSLPSDSSMFNNNRSSSPSEQGSNSTYDRIFPLRPDYQEPSRLIRKLPEFAPGEEESGCSGVVKPVQPSGPEGVPHYAEADIVNLQGVTGGNTYSVPAVTMDLLSGKDVAVEEFPRKLLTFKEKLGEGQFGEVS

SEQ ID NO: 43949 - protein, 130 aa, Homo sapiens
MILIPRMLLVLFLLLPILSSAKAQVNPAICRYPLGMSGGQIPDEDITASSQWSESTAAKYGRLDSEEGDGAWCPEIPVEPDDLKEFLQIDLHTLHFITLVGTQGRHAGGHGIEFAPMYKINYSRDGTRWI

SEQ ID NO: 43950 - protein, 166 aa, Homo sapiens
LKVDDSNTRILIGCLVAIIFILLAIIVIILWRQFWQKMLEKASRRMLDDEMTVSLSLPSDSSMFNNNRSSSPSEQGSNSTYDRIFPLRPDYQEPSRLIRKLPEFAPGEEESGEDDVVGRVSREKPQQASGRYDTPAPSSLHLFLVSANLLRSPHSLSRFGLPLLLA

SEQ ID NO: 43951 - protein, 148 aa, Homo sapiens; identical to SEQ ID NO: 43947

SEQ ID NO: 43952 - protein, 800 aa, Homo sapiens
MNYIFGNNTLLYSRGSRGGNTSSSHGSAGPKQKHWAKKGSSDELQAEPEPSRWQQIVAFFTRRHSFIDCISVATSSTQANPPPVLVNTDSLETPTYVNGTDADYEYEEITLERGNSGLGFSIAGGTDNPHIGDDSSIFITKIITGGAAAQDGRLRVNDCILRVNEVDVRDVTHSKAVEALKEAGSIVRLYVKRRKPVSEKIMEIKLIKGPKGLGFSIAGGVGNQHIPGDNSIYVTKIIEGGAAHKDGKLQIGDKLLAVNNVCLEEVTHEEAVTALKNTSDFVYLKVAKPTSMYMNDGYAPPDITNSSSQPVDNHVSPSSFLGQTPASPARYSPVSKAVLGDDEITREPRKVVLHRGSTGLGFNIVGGEDGEGIFISFILAGGPADLSGELRKGDRIISVNSVDLRAASHEQAAAALKNAGQAVTIVAQYRPEEYSRFEAKIHDLREQMMNSSISSGSGSLRTSQKRSLYVRALFDYDKTKDSGLPSQGLNFKFGDILHVINASDDEWWQARQVTPDGESDEVGVIPSKRRVEKKERARLKTVKFNSKTRDKGEIPDDMGSKGLKHVTSNASDSESSYLILITDEYGCSKGGQEEYVLSYEPVNQQEVNYTRPVIILGPMKDRINDDLISEFPDKFGSCVPHTTRPKRDYEVDGRDYHFVTSREQMEKDIQEHKFIEAGQYNNHLYGTSVQSVREVAEKGKHCILDVSGNAIKRLQIAQLYPISIFIKPKSMENIMEMNKRLTEEQARKTFERAMKLEQEFTEHFTAIVQGDTLEDIYNQVKQIIEEQSGSYIWVPAKEKL

SEQ ID NO: 43953 - protein, 788 aa, Homo sapiens
MNYIFGNNTLLYSRGSRGGNTSSSHGSAGPKQKHWAKKGSSDELQAEPEPSRWQQIVAFFTRRHSFIDCISVATSSTQANPPPVLVNTDSLETPTYVNGTDADYEYEEITLERGNSGLGFSIAGGTDNPHIGDDSSIFITKIITGGAAAQDGRLRVNDCILRVNEVDVRDVTHSKAVEALKEAGSIVRLYVKRRKPVSEKIMEIKLIKGPKGLGFSIAGGVGNQHIPGDNSIYVTKIIEGGAAHKDGKLQIGDKLLAVNNVCLEEVTHEEAVTALKNTSDFVYLKVAKPTSMYMNDGYAPPDITNSSSQPVDNHVSPSSFLGQTPASPARYSPVSKAVLGDDEITREPRKVVLHRGSTGLGFNIVGGEDGEGIFISFILAGGPADLSGELRKGDRIISVNSVDLRAASHEQAAAALKNAGQAVTIVAQYRPEEYSRFEAKIHDLREQMMNSSISSGSGSLRTSQKRSLYVRALFDYDKTKDSGLPSQGLNFKFGDILHVINASDDEWWQARQVTPDGESDEVGVIPSKRRVEKKERARLKTVKFNSKTRDKGEIPDDMGSKGLKHVTSNASDSESSYRGQEEYVLSYEPVNQQEVNYTRPVIILGPMKDRINDDLISEFPDKFGSCVPHTTRPKRDYEVDGRDYHFVTSREQMEKDIQEHKFIEAGQYNNHLYGTSVQSVREVAEKGKHCILDVSGNAIKRLQIAQLYPISIFIKPKSMENIMEMNKRLTEEQARKTFERAMKLEQEFTEHFTAIVQGDTLEDIYNQVKQIIEEQSGSYIWVPAKEKL

SEQ ID NO: 43954 - protein, 512 aa, Homo sapiens
MERARKFSGSGLAMGLGSASASAWRRASQRWAWPLRSLRPGGDAREPRKIILHKGSTGLGFNIVGGEDGEGIFVSFILAGGPADLSGELRRGDRILSVNGVNLRNATHEQAAAALKRAGQSVTIVAQYRPEEYSRFESKIHDLREQMMNSSMSSGSGSLRTSEKRSLYVRALFDYDRTRDSCLPSQGLSFSYGDILHVINASDDEWWQARLVTPHGESEQIGVIPSKKRVEKKERARLKTVKFHARTGMIESNRSIKTKRKKSFRLSRKFPFYKSKENMAQESSIQEQGVTSNTSDSESSSKGQEDAILSYEPVTRQEIHYARPVIILGPMKDRVNDDLISEFPHKFGSCVPHTTRPRRDNEVDGQDYHFVVSREQMEKDIQDNKFIEAGQFNDNLYGTSIQSVRAVAERGKHCILDVSGNAIKRLQQAQLYPIAIFIKPKSIEALMEMNRRQTYEQANKIYDKAMKLEQEFGEYFTAIVQGDSLEEIYNKIKQIIEDQSGHYIWVPSPEKL

SEQ ID NO: 43955 - protein, 1006 aa, Homo sapiens
EEEAGDLVQPGISFPGPAEEDLDPQYSWSPTQHFNEERYSPAPRSMKGLSGSRTQPPLCSGHTCGLAPPEDCEHLHHGPDARPPYLLSPADSCPGGRHRCSPRSSVHSECVMMPVVLGDHVSSSTFPRMHYSSHYDTRDDCAVAHAGAKINRIPANLLDQFEKQLPLHRDGFHTLQYQRTSAAAEQRSESPGRIRHLVHSVQKLFTKSHSLEGSSKSNANGTKADGRADDHHHAHHAKHSKRSKSKERKPEGKPRPGMSSWWSSDDNLDSDSTYRTPSVLNRHHLGPVAHCYPDALQSPFGDLSLKTSKSNNDVKCSACEGLALTPDAKYLKRSSWSTLTVSQAKEAYRKSSLNLDKPLLHQDAKPALRPCHYLQVPQDEWGGYPTGGKDEEIPCRRMRSGSYIKAMGDEESGESDSSPKTSPKSAILPEPLLKSIGQRPLGEHQTQTYLQAASDVPVGHSLDPAANYNSPKFRSRNQSYMRAVSTLSQASCVSQVSEAEINGQFESVCESVFSEVESQAMDALDLPGCFRTRSHSYLRAIQAGYSQDDECIPMMTPSDITSTIRSTAAVSYTNYKKTPPPVPPRTTSKPLISVTAQSSTESTQDAYQDSRAQRMSPWPQDSRGLYNSTDSLDSNKAMNLALETAAAQRHLPESQSSSVRTSDKAILVSKAEELLKSRCSSIGIQVETATDSDTESRGLREYHSVGVQVEDEKRHGRFKRSNSVTAAVQADLELEGFPGHITTEDKGLQFGSSFQRHSEPSTPTQYSAVRTVRTQGLFSYREDYRTQVDTSTLPPPDPWLEPAIDTVETGRMSPCRRDGSWFLKLLHAETKRMEGWCKEMEREAEENDLSEEILGKIRSAVGSAQLLMSQKFQQFYWLCQQNMDPSAMPRPTSQDLAGYWDMLQLSIEDVSMKFDELQRLRLNDWKMMESPERKEERKVPPPIPKKPPKGKFPITREKSLDLPDRQRQEARRRLMAAKRAASFRQNSASERADSIEIYIPEAQTRL

SEQ ID NO: 43956 - protein, 975 aa, Homo sapiens
MKGLSGSRTQPPLCSGHTCGLAPPEDCEHLHHGPDARPPYLLSPADSCPGGRHRCSPRSSVHSECVMMPVVLGDHVSSSTFPRMHYSSHYDTRDDCAVAHAGAKINRIPANLLDQFEKQLPLHRDGFHTLQYQRTSAAAEQRSESPGRIRHLVHSVQKLFTKSHSLEGSSKSNANGTKADGRADDHHHAHHAKHSKRSKSKERKPEGKPRPGMSSWWSSDDNLDSDSTYRTPSVLNRHHLGPVAHCYPDALQSPFGDLSLKTSKSNNDVKCSACEGLALTPDAKYLKRSSWSTLTVSQAKEAYRKSSLNLDKPLLHQDAKPALRPCHYLQVPQDEWGGYPTGGKDEEIPCRRMRSGSYIKAMGDEESGESDSSPKTSPKSAILPEPLLKSIGQRPLGEHQTQTYLQAASDVPVGHSLDPAANYNSPKFRSRNQSYMRAVSTLSQASCVSQVSEAEINGQFESVCESVFSEVESQAMDALDLPGCFRTRSHSYLRAIQAGYSQDDECIPMMTPSDITSTIRSTAAVSYTNYKKTPPPVPPRTTSKPLISVTAQSSTESTQDAYQDSRAQRMSPWPQDSRGLYNSTDSLDSNKAMNLALETAAAQRHLPESQSSSVRTSDKAILVSKAEELLKSRCSSIGIQDSEFPEHQPYPRSDVETATDSDTESRGLREYHSVGVQVEDEKRHGRFKRSNSVTAAVQADLELEGFPGHITTEDKGLQFGSSFQRHSEPSTPTQYSAVRTVRTQGLFSYREDYRTQVDTSTLPPPDPWLEPAIDTVETGRMSPCRRDGSWFLKLLHAETKRMEGWCKEMEREAEENDLSEEILGKIRSAVGSAQLLMSQKFQQFYWLCQQNMDPSAMPRPTSQDLAGYWDMLQLSIEDVSMKFDELQRLRLNDWKMMESPERKEERKVPPPIPKKPPKGKFPITREKSLDLPDRQRQEARRRLMAAKRAASFRQNSASERADSIEIYIPEAQTRL

SEQ ID NO: 43957 - protein, 978 aa, Homo sapiens
  VARIANT 1: note = MOD_RES - Any amino acid
XPTQHFNEERYSPAPRSMKGLSGSRTQPPLCSGHTCGLAPPEDCEHLHHGPDARPPYLLSPADSCPGGRHRCSPRSSVHSECVMMPVVLGDHVSSSTFPRMHYSSHYDTRDDCAVAHAGAKINRIPANLLDQFEKQLPLHRDGFHTLQYQRTSAAAEQRSESPGRIRHLVHSVQKLFTKSHSLEGSSKSNANGTKADGRADDHHHAHHAKHSKRSKSKERKPEGKPRPGMSSWWSSDDNLDSDSTYRTPSVLNRHHLGPVAHCYPDALQSPFGDLSLKTSKSNNDVKCSACEGLALTPDAKYLKRSSWSTLTVSQAKEAYRKSSLNLDKPLLHQDAKPALRPCHYLQVPQDEWGGYPTGGKDEEIPCRRMRSGSYIKAMGDEESGESDSSPKTSPKSAILPEPLLKSIGQRPLGEHQTQTYLQAASDVPVGHSLDPAANYNSPKFRSRNQSYMRAVSTLSQASCVSQVSEAEINGQFESVCESVFSEVESQAMDALDLPGCFRTRSHSYLRAIQAGYSQDDECIPMMTPSDITSTIRSTAAVSYTNYKKTPPPVPPRTTSKPLISVTAQSSTESTQDAYQDSRAQRMSPWPQDSRGLYNSTDSLDSNKAMNLALETAAAQRHLPESQSSSVRTSDKAILVSKAEELLKSRCSSIGIQVETATDSDTESRGLREYHSVGVQVEDEKRHGRFKRSNSVTAAVQADLELEGFPGHITTEDKGLQFGSSFQRHSEPSTPTQYSAVRTVRTQGLFSYREDYRTQVDTSTLPPPDPWLEPAIDTVETGRMSPCRRDGSWFLKLLHAETKRMEGWCKEMEREAEENDLSEEILGKIRSAVGSAQLLMSQKFQQFYWLCQQNMDPSAMPRPTSQDLAGYWDMLQLSIEDVSMKFDELQRLRLNDWKMMESPERKEERKVPPPIPKKPPKGKFPITREKSLDLPDRQRQEARRRLMAAKRAASFRQNSASERADSIEIYIPEAQTRL

SEQ ID NO: 43958 - protein, 853 aa, Homo sapiens
MPVRKQDTQRALHLLEEYRSKLSQTEDRQLRSSIERVINIFQSNLFQALIDIQEFYEVTLLDNPKCIDRSKPSEPIQPVNTWEISSLPSSTVTSETLPSSLSPSVEKYRYQDEDTPPQEHISPQITNEVIGPELVHVSEKNLSEIENVHGFVSHSHISPIKVNGTDADYEYEEITLERGNSGLGFSIAGGTDNPHIGDDSSIFITKIITGGAAAQDGRLRVNDCILRVNEVDVRDVTHSKAVEALKEAGSIVRLYVKRRKPVSEKIMEIKLIKGPKGLGFSIAGGVGNQHIPGDNSIYVTKIIEGGAAHKDGKLQIGDKLLAVNNVCLEEVTHEEAVTALKNTSDFVYLKVAKPTSMYMNDGYAPPDITNSSSQPVDNHVSPSSFLGQTPASPARYSPVSKAVLGDDEITREPRKVVLHRGSTGLGFNIVGGEDGEGIFISFILAGGPADLSGELRKGDRIISVNSVDLRAASHEQAAAALKNAGQAVTIVAQYRPEEYSRFEAKIHDLREQMMNSSISSGSGSLRTSQKRSLYVRALFDYDKTKDSGLPSQGLNFKFGDILHVINASDDEWWQARQVTPDGESDEVGVIPSKRRVEKKERARLKTVKFNSKTRDKGEIPDDMGSKGLKHVTSNASDSESSYRGQEEYVLSYEPVNQQEVNYTRPVIILGPMKDRINDDLISEFPDKFGSCVPHTTRPKRDYEVDGRDYHFVTSREQMEKDIQEHKFIEAGQYNNHLYGTSVQSVREVAEKGKHCILDVSGNAIKRLQIAQLYPISIFIKPKSMENIMEMNKRLTEEQARKTFERAMKLEQEFTEHFTAIVQGDTLEDIYNQVKQIIEEQSGSYIWVPAKEKL

SEQ ID NO: 43959 - protein, 926 aa, Homo sapiens
MPVRKQDTQRALHLLEEYRSKLSQTEDRQLRSSIERVINIFQSNLFQALIDIQEFYEVTLLDNPKCIDRSKPSEPIQPVNTWEISSLPSSTVTSETLPSSLSPSVEKYRYQDEDTPPQEHISPQITNEVIGPELVHVSEKNLSEIENVHGFVSHSHISPIKPTEAVLPSPPTVPVIPVLPVPAENTVILPTIPQANPPPVLVNTDSLETPTYVNGTDADYEYEEITLERGNSGLGFSIAGGTDNPHIGDDSSIFITKIITGGAAAQDGRLRVNDCILRVNEVDVRDVTHSKAVEALKEAGSIVRLYVKRRKPVSEKIMEIKLIKGPKGLGFSIAGGVGNQHIPGDNSIYVTKIIEGGAAHKDGKLQIGDKLLAVNNVCLEEVTHEEAVTALKNTSDFVYLKVAKPTSMYMNDGYAPPDITNSSSQPVDNHVSPSSFLGQTPASPARYSPVSKAVLGDDEITREPRKVVLHRGSTGLGFNIVGGEDGEGIFISFILAGGPADLSGELRKGDRIISVNSVDLRAASHEQAAAALKNAGQAVTIVAQYRPEEYSRFEAKIHDLREQMMNSSISSGSGSLRTSQKRSLYVRALFDYDKTKDSGLPSQGLNFKFGDILHVINASDDEWWQARQVTPDGESDEVGVIPSKRRVEKKERARLKTVKFNSKTRDKGQSFNDKRKKNLFSRKFPFYKNKDQSEQETSDADQHVTSNASDSESSYRGQEEYVLSYEPVNQQEVNYTRPVIILGPMKDRINDDLISEFPDKFGSCVPHTTRPKRDYEVDGRDYHFVTSREQMEKDIQEHKFIEAGQYNNHLYGTSVQSVREVAEKGKHCILDVSGNAIKRLQIAQLYPISIFIKPKSMENIMEMNKRLTEEQARKTFERAMKLEQEFTEHFTAIVQGDTLEDIYNQVKQIIEEQSGSYIWVPAKEKL

SEQ ID NO: 43960 - protein, 893 aa, Homo sapiens
MPVRKQDTQRALHLLEEYRSKLSQTEDRQLRSSIERVINIFQSNLFQALIDIQEFYEVTLLDNPKCIDRSKPSEPIQPVNTWEISSLPSSTVTSETLPSSLSPSVEKYRYQDEDTPPQEHISPQITNEVIGPELVHVSEKNLSEIENVHGFVSHSHISPIKANPPPVLVNTDSLETPTYVNGTDADYEYEEITLERGNSGLGFSIAGGTDNPHIGDDSSIFITKIITGGAAAQDGRLRVNDCILRVNEVDVRDVTHSKAVEALKEAGSIVRLYVKRRKPVSEKIMEIKLIKGPKGLGFSIAGGVGNQHIPGDNSIYVTKIIEGGAAHKDGKLQIGDKLLAVNNVCLEEVTHEEAVTALKNTSDFVYLKVAKPTSMYMNDGYAPPDITNSSSQPVDNHVSPSSFLGQTPASPARYSPVSKAVLGDDEITREPRKVVLHRGSTGLGFNIVGGEDGEGIFISFILAGGPADLSGELRKGDRIISVNSVDLRAASHEQAAAALKNAGQAVTIVAQYRPEEYSRFEAKIHDLREQMMNSSISSGSGSLRTSQKRSLYVRALFDYDKTKDSGLPSQGLNFKFGDILHVINASDDEWWQARQVTPDGESDEVGVIPSKRRVEKKERARLKTVKFNSKTRDKGQSFNDKRKKNLFSRKFPFYKNKDQSEQETSDADQHVTSNASDSESSYRGQEEYVLSYEPVNQQEVNYTRPVIILGPMKDRINDDLISEFPDKFGSCVPHTTRPKRDYEVDGRDYHFVTSREQMEKDIQEHKFIEAGQYNNHLYGTSVQSVREVAEKGKHCILDVSGNAIKRLQIAQLYPISIFIKPKSMENIMEMNKRLTEEQARKTFERAMKLEQEFTEHFTAIVQGDTLEDIYNQVKQIIEEQSGSYIWVPAKEKL

SEQ ID NO: 43961 - protein, 917 aa, Homo sapiens
MPVRKQDTQRALHLLEEYRSKLSQTEDRQLRSSIERVINIFQSNLFQALIDIQEFYEVTLLDNPKCIDRSKPSEPIQPVNTWEISSLPSSTVTSETLPSSLSPSVEKYRYQDEDTPPQEHISPQITNEVIGPELVHVSEKNLSEIENVHGFVSHSHISPIKPTEAVLPSPPTVPVIPVLPVPAENTVILPTIPQANPPPVLVNTDSLETPTYVNGTDADYEYEEITLERGNSGLGFSIAGGTDNPHIGDDSSIFITKIITGGAAAQDGRLRVNDCILRVNEVDVRDVTHSKAVEALKEAGSIVRLYVKRRKPVSEKIMEIKLIKGPKGLGFSIAGGVGNQHIPGDNSIYVTKIIEGGAAHKDGKLQIGDKLLAVNNVCLEEVTHEEAVTALKNTSDFVYLKVAKPTSMYMNDGYAPPDITNSSSQPVDNHVSPSSFLGQTPASPARYSPVSKAVLGDDEITREPRKVVLHRGSTGLGFNIVGGEDGEGIFISFILAGGPADLSGELRKGDRIISVNSVDLRAASHEQAAAALKNAGQAVTIVAQYRPEEYSRFEAKIHDLREQMMNSSISSGSGSLRTSQKRSLYVRALFDYDKTKDSGLPSQGLNFKFGDILHVINASDDEWWQARQVTPDGESDEVGVIPSKRRVEKKERARLKTVKFNSKTRDKGEIPDDMGSKGLKHVTSNASDSESSYLILITDEYGCSKGRGQEEYVLSYEPVNQQEVNYTRPVIILGPMKDRINDDLISEFPDKFGSCVPHTTRPKRDYEVDGRDYHFVTSREQMEKDIQEHKFIEAGQYNNHLYGTSVQSVREVAEKGKHCILDVSGNAIKRLQIAQLYPISIFIKPKSMENIMEMNKRLTEEQARKTFERAMKLEQEFTEHFTAIVQGDTLEDIYNQVKQIIEEQSGSYIWVPAKEKL

SEQ ID NO: 43962 - protein, 891 aa, Homo sapiens
MPVRKQDTQRALHLLEEYRSKLSQTEDRQLRSSIERVINIFQSNLFQALIDIQEFYEVTLLDNPKCIDRSKPSEPIQPVNTWEISSLPSSTVTSETLPSSLSPSVEKYRYQDEDTPPQEHISPQITNEVIGPELVHVSEKNLSEIENVHGFVSHSHISPIKPTEAVLPSPPTVPVIPVLPVPAENTVILPTIPQANPPPVLVNTDSLETPTYVNGTDADYEYEEITLERGNSGLGFSIAGGTDNPHIGDDSSIFITKIITGGAAAQDGRLRVNDCILRVNEVDVRDVTHSKAVEALKEAGSIVRLYVKRRKPVSEKIMEIKLIKGPKGLGFSIAGGVGNQHIPGDNSIYVTKIIEGGAAHKDGKLQIGDKLLAVNNVCLEEVTHEEAVTALKNTSDFVYLKVAKPTSMYMNDGYAPPDITNSSSQPVDNHVSPSSFLGQTPASPARYSPVSKAVLGDDEITREPRKVVLHRGSTGLGFNIVGGEDGEGIFISFILAGGPADLSGELRKGDRIISVNSVDLRAASHEQAAAALKNAGQAVTIVAQYRPEEYSRFEAKIHDLREQMMNSSISSGSGSLRTSQKRSLYVRALFDYDKTKDSGLPSQGLNFKFGDILHVINASDDEWWQARQVTPDGESDEVGVIPSKRRVEKKERARLKTVKFNSKTRDKGEIPDDMGSKGLIGGQEEYVLSYEPVNQQEVNYTRPVIILGPMKDRINDDLISEFPDKFGSCVPHTTRPKRDYEVDGRDYHFVTSREQMEKDIQEHKFIEAGQYNNHLYGTSVQSVREVAEKGKHCILDVSGNAIKRLQIAQLYPISIFIKPKSMENIMEMNKRLTEEQARKTFERAMKLEQEFTEHFTAIVQGDTLEDIYNQVKQIIEEQSGSYIWVPAKEKL

SEQ ID NO: 43963 - protein, 208 aa, Homo sapiens
MPVRKQDTQRALHLLEEYRSKLSQTEDRQLRSSIERVINIFQSNLFQALIDIQEFYEVTLLDNPKCIDRSKPSEPIQPVNTWEISSLPSSTVTSETLPSSLSPSVEKYRYQDEDTPPQEHISPQITNEVIGPELVHVSEKNLSEIENVHGFVSHSHISPIKPTEAVLPSPPTVPVIPVLPVPAENTVILPTIPQANPPPVLVNTDSLE

SEQ ID NO: 43964 - protein, 871 aa, Homo sapiens
MPVRKQDTQRALHLLEEYRSKLSQTEDRQLRSSIERVINIFQSNLFQALIDIQEFYEVTLLDNPKCIDRSKPSEPIQPVNTWEISSLPSSTVTSETLPSSLSPSVEKYRYQDEDTPPQEHISPQITNEVIGPELVHVSEKNLSEIENVHGFVSHSHISPIKANPPPVLVNTDSLETPTYVNGTDADYEYEEITLERGNSGLGFSIAGGTDNPHIGDDSSIFITKIITGGAAAQDGRLRVNDCILRVNEVDVRDVTHSKAVEALKEAGSIVRLYVKRRKPVSEKIMEIKLIKGPKGLGFSIAGGVGNQHIPGDNSIYVTKIIEGGAAHKDGKLQIGDKLLAVNNVCLEEVTHEEAVTALKNTSDFVYLKVAKPTSMYMNDGYAPPDITNSSSQPVDNHVSPSSFLGQTPASPARYSPVSKAVLGDDEITREPRKVVLHRGSTGLGFNIVGGEDGEGIFISFILAGGPADLSGELRKGDRIISVNSVDLRAASHEQAAAALKNAGQAVTIVAQYRPEEYSRFEAKIHDLREQMMNSSISSGSGSLRTSQKRSLYVRALFDYDKTKDSGLPSQGLNFKFGDILHVINASDDEWWQARQVTPDGESDEVGVIPSKRRVEKKERARLKTVKFNSKTRDKGEIPDDMGSKGLKHVTSNASDSESSYRGQEEYVLSYEPVNQQEVNYTRPVIILGPMKDRINDDLISEFPDKFGSCVPHTTRPKRDYEVDGRDYHFVTSREQMEKDIQEHKFIEAGQYNNHLYGTSVQSVREVAEKGKHCILDVSGNAIKRLQIAQLYPISIFIKPKSMENIMEMNKRLTEEQARKTFERAMKLEQEFTEHFTAIVQGDTLEDIYNQVKQIIEEQSGSYIWVPAKEKL

SEQ ID NO: 43965 - protein, 106 aa, Homo sapiens
MPVRKQDTQRALHLLEEYRSKLSQTEDRQLRSSIERVINIFQSNLFQALIDIQEFYEVTLLDNPKCIDRSKPSEPIQPVNTWEISSLPSSTVTSETLPSSLSPSVE

SEQ ID NO: 43966 - protein, 370 aa, Homo sapiens
MPVRKQDTQRALHLLEEYRSKLSQTEDRQLRSSIERVINIFQSNLFQALIDIQEFYEVTLLDNPKCIDRSKPSEPIQPVNTWEISSLPSSTVTSETLPSSLSPSVEKYRYQDEDTPPQEHISPQITNEVIGPELVHVSEKNLSEIENVHGFVSHSHISPIKVNGTDADYEYEEITLERGNSGLGFSIAGGTDNPHIGDDSSIFITKIITGGAAAQDGRLRVNDCILRVNEVDVRDVTHSKAVEALKEAGSIVRLYVKRRKPVSEKIMEIKLIKGPKGLGFSIAGGVGNQHIPGDNSIYVTKIIEGGAAHKDGKLQIGDKLLAVNNVCLEEVTHEEAVTALKNTSDFVYLKVAKPTSMYMNDGYAPPDITN

SEQ ID NO: 43967 - protein, 904 aa, Homo sapiens
MPVRKQDTQRALHLLEEYRSKLSQTEDRQLRSSIERVINIFQSNLFQALIDIQEFYEVTLLDNPKCIDRSKPSEPIQPVNTWEISSLPSSTVTSETLPSSLSPSVEKYRYQDEDTPPQEHISPQITNEVIGPELVHVSEKNLSEIENVHGFVSHSHISPIKPTEAVLPSPPTVPVIPVLPVPAENTVILPTIPQANPPPVLVNTDSLETPTYVNGTDADYEYEEITLERGNSGLGFSIAGGTDNPHIGDDSSIFITKIITGGAAAQDGRLRVNDCILRVNEVDVRDVTHSKAVEALKEAGSIVRLYVKRRKPVSEKIMEIKLIKGPKGLGFSIAGGVGNQHIPGDNSIYVTKIIEGGAAHKDGKLQIGDKLLAVNNVCLEEVTHEEAVTALKNTSDFVYLKVAKPTSMYMNDGYAPPDITNSSSQPVDNHVSPSSFLGQTPASPARYSPVSKAVLGDDEITREPRKVVLHRGSTGLGFNIVGGEDGEGIFISFILAGGPADLSGELRKGDRIISVNSVDLRAASHEQAAAALKNAGQAVTIVAQYRPEEYSRFEAKIHDLREQMMNSSISSGSGSLRTSQKRSLYVRALFDYDKTKDSGLPSQGLNFKFGDILHVINASDDEWWQARQVTPDGESDEVGVIPSKRRVEKKERARLKTVKFNSKTRDKGEIPDDMGSKGLKHVTSNASDSESSYRGQEEYVLSYEPVNQQEVNYTRPVIILGPMKDRINDDLISEFPDKFGSCVPHTTRPKRDYEVDGRDYHFVTSREQMEKDIQEHKFIEAGQYNNHLYGTSVQSVREVAEKGKHCILDVSGNAIKRLQIAQLYPISIFIKPKSMENIMEMNKRLTEEQARKTFERAMKLEQEFTEHFTAIVQGDTLEDIYNQVKQIIEEQSGSYIWVPAKEKL

SEQ ID NO: 43968 - protein, 154 aa, Homo sapiens
MPVRKQDTQRALHLLEEYRSKLSQTEDRQLRSSIERVINIFQSNLFQALIDIQEFYEVTLLDNPKCIDRSKPSEPIQPVNTWEISSLPSSTVTSETLPSSLSPSVEKYRYQDEDTPPQEHISPQITNEVIGPELVHVSEKNLSEIENVHGFVSH

SEQ ID NO: 43969 - protein, 853 aa, Homo sapiens; identical to SEQ ID NO: 43958

SEQ ID NO: 43970 - protein, 36 aa, Homo sapiens
MPVRKQDTQRALHLLEEYRSKLSQTEDRQLRSSIER

SEQ ID NO: 43971 - protein, 123 aa, Homo sapiens
MPVRKQDTQRALHLLEEYRSKLSQTEDRQLRSSIERVINIFQSNLFQALIDIQEFYEVTLLDNPKCIDRSKPSEPIQPVNTWEISSLPSSTVTSETLPSSLSPSVEKYRYQDEDTPPQEHISP

SEQ ID NO: 43972 - protein, 904 aa, Homo sapiens; identical to SEQ ID NO: 43967

SEQ ID NO: 43973 - protein, 893 aa, Homo sapiens; identical to SEQ ID NO: 43960

SEQ ID NO: 43974 - protein, 909 aa, Homo sapiens
MNAYLTKQHSCSRGSDGMDAVRSAPTLIRDAHCACGWQRNCQGLGYSSQTMPSSGPGGPASNRTGGSSFNRTLWDSVRKSPHKTSTKGKGTCGEHCTCPHGWFSPAQASPAPIIVNTDTLDTIPYVNGTEIEYEFEEITLERGNSGLGFSIAGGTDNPHIGDDPGIFITKIIPGGAAAEDGRLRVNDCILRVNEVDVSEVSHSKAVEALKEAGSIVRLYVRRRRPILETVVEIKLFKGPKGLGFSIAGGVGNQHIPGDNSIYVTKIIDGGAAQKDGRLQVGDRLLMVNNYSLEEVTHEEAVAILKNTSEVVYLKVGKPTTIYMTDPYGPPDITHSYSPPMENHLLSGNNGTLEYKTSLPPISPGRYSPIPKHMLVDDDYTRPPEPVYSTVNKLCDKPASPRHYSPVECDKSFLLSAPYSHYHLGLLPDSEMTSHSQHSTATRQPSMTLQRAVSLEGEPRKVVLHKGSTGLGFNIVGGEDGEGIFVSFILAGGPADLSGELQRGDQILSVNGIDLRGASHEQAAAALKGAGQTVTIIAQYQPEDYARFEAKIHDLREQMMNHSMSSGSGSLRTNQKRSLYVRAMFDYDKSKDSGLPSQGLSFKYGDILHVINASDDEWWQARRVMLEGDSEEMGVIPSKRRVERKERARLKTVKFNAKPGVIDSKGSFNDKRKKSFIFSRKFPFYKNKEQSEQETSDPERGQEDLILSYEPVTRQEINYTRPVIILGPMKDRINDDLISEFPDKFGSCVPHTTRPKRDYEVDGRDYHFVISREQMEKDIQEHKFIEAGQYNDNLYGTSVQSVRFVAERGKHCILDVSGNAIKRLQVAQLYPIAIFIKPRSLEPLMEMNKRLTEEQAKKTYDRAIKLEQEFGEYFTAIVQGDTLEDIYNQCKLVIEEQSGPFIWIPSKEKL

SEQ ID NO: 43975 - protein, 791 aa, Homo sapiens
MQHAFIPASPAPIIVNTDTLDTIPYVNGTEIEYEFEEITLERGNSGLGFSIAGGTDNPHIGDDPGIFITKIIPGGAAAEDGRLRVNDCILRVNEVDVSEVSHSKAVEALKEAGSIVRLYVRRRRPILETVVEIKLFKGPKGLGFSIAGGVGNQHIPGDNSIYVTKIIDGGAAQKDGRLQVGDRLLMVNNYSLEEVTHEEAVAILKNTSEVVYLKVGKPTTIYMTDPYGPPDITHSYSPPMENHLLSGNNGTLEYKTSLPPISPGRYSPIPKHMLVDDDYTRPPEPVYSTVNKLCDKPASPRHYSPVECDKSFLLSAPYSHYHLGLLPDSEMTSHSQHSTATRQPSMTLQRAVSLEGEPRKVVLHKGSTGLGFNIVGGEDGEGIFVSFILAGGPADLSGELQRGDQILSVNGIDLRGASHEQAAAALKGAGQTVTIIAQYQPEDYARFEAKIHDLREQMMNHSMSSGSGSLRTNQKRSLYVRAMFDYDKSKDSGLPSQGLSFKYGDILHVINASDDEWWQARRVMLEGDSEEMGVIPSKRRVERKERARLKTVKFNAKPGVIDSKGDIPGLGDDGYGTKTLRGQEDLILSYEPVTRQEINYTRPVIILGPMKDRINDDLISEFPDKFGSCVPHTTRPKRDYEVDGRDYHFVISREQMEKDIQEHKFIEAGQYNDNLYGTSVQSVRFVAERGKHCILDVSGNAIKRLQVAQLYPIAIFIKPRSLEPLMEMNKRLTEEQAKKTYDRAIKLEQEFGEYFTAIVQGDTLEDIYNQCKLVIEEQSGPFIWIPSKEKL

SEQ ID NO: 43976 - protein, 975 aa, Homo sapiens
MGIFKSSLFQALLDIQEFYEVTLLNSQKSCEQKIEEANQVLQKWEKTSLLAPCHDRLQKSSELTDCSGSKENASCIEQNKENQSFENETDETTTQNQGRCPAQNCSVEAPAWMPVHHCTKYRYQDEDAPHDHSLPRLTHEVRGPELVHVSEKNLSQIENVHGYVLQSHISPLKASPAPIIVNTDTLDTIPYVNGTEIEYEFEEITLERGNSGLGFSIAGGTDNPHIGDDPGIFITKIIPGGAAAEDGRLRVNDCILRVNEVDVSEVSHSKAVEALKEAGSIVRLYVRRRRPILETVVEIKLFKGPKGLGFSIAGGVGNQHIPGDNSIYVTKIIDGGAAQKDGRLQVGDRLLMVNNYSLEEVTHEEAVAILKNTSEVVYLKVGKPTTIYMTDPYGPPDITHSYSPPMENHLLSGNNGTLEYKTSLPPISPGRYSPIPKHMLVDDDYTRPPEPVYSTVNKLCDKPASPRHYSPVECDKSFLLSAPYSHYHLGLLPDSEMTSHSQHSTATRQPSMTLQRAVSLEGEPRKVVLHKGSTGLGFNIVGGEDGEGIFVSFILAGGPADLSGELQRGDQILSVNGIDLRGASHEQAAAALKGAGQTVTIIAQYQPEDYARFEAKIHDLREQMMNHSMSSGSGSLRTNQKRSLYVRAMFDYDKSKDSGLPSQGLSFKYGDILHVINASDDEWWQARRVMLEGDSEEMGVIPSKRRVERKERARLKTVKFNAKPGVIDSKGSFNDKRKKSFIFSRKFPFYKNKEQSEQETSDPERGQEDLILSYEPVTRQEINYTRPVIILGPMKDRINDDLISEFPDKFGSCVPHTTRPKRDYEVDGRDYHFVISREQMEKDIQEHKFIEAGQYNDNLYGTSVQSVRFVAERGKHCILDVSGNAIKRLQVAQLYPIAIFIKPRSLEPLMEMNKRLTEEQAKKTYDRAIKLEQEFGEYFTAIVQGDTLEDIYNQCKLVIEEQSGPFIWIPSKEKL

SEQ ID NO: 43977 - protein, 334 aa, Homo sapiens
MMNHSMSSGSGSLRTNQKRSLYVRAMFDYDKSKDSGLPSQGLSFKYGDILHVINASDDEWWQARRVMLEGDSEEMGVIPSKRRVERKERARLKTVKFNAKPGVIDSKGDIPGLGDDGYGTKTLRGQEDLILSYEPVTRQEINYTRPVIILGPMKDRINDDLISEFPDKFGSCVPHTTRPKRDYEVDGRDYHFVISREQMEKDIQEHKFIEAGQYNDNLYGTSVQSVRFVAERGKHCILDVSGNAIKRLQVAQLYPIAIFIKPRSLEPLMEMNKRLTEEQAKKTYDRAIKLEQEFGEYFTAIVQGDTLEDIYNQCKLVIEEQSGPFIWIPSKEKL

SEQ ID NO: 43978 - protein, 870 aa, Homo sapiens
MFFACYCALRTNVKKYRYQDEDAPHDHSLPRLTHEVRGPELVHVSEKNLSQIENVHGYVLQSHISPLKASPAPIIVNTDTLDTIPYVNGTEIEYEFEEITLERGNSGLGFSIAGGTDNPHIGDDPGIFITKIIPGGAAAEDGRLRVNDCILRVNEVDVSEVSHSKAVEALKEAGSIVRLYVRRRRPILETVVEIKLFKGPKGLGFSIAGGVGNQHIPGDNSIYVTKIIDGGAAQKDGRLQVGDRLLMVNNYSLEEVTHEEAVAILKNTSEVVYLKVGKPTTIYMTDPYGPPDITHSYSPPMENHLLSGNNGTLEYKTSLPPISPGRYSPIPKHMLVDDDYTRPPEPVYSTVNKLCDKPASPRHYSPVECDKSFLLSAPYSHYHLGLLPDSEMTSHSQHSTATRQPSMTLQRAVSLEGEPRKVVLHKGSTGLGFNIVGGEDGEGIFVSFILAGGPADLSGELQRGDQILSVNGIDLRGASHEQAAAALKGAGQTVTIIAQYQPEDYARFEAKIHDLREQMMNHSMSSGSGSLRTNQKRSLYVRAMFDYDKSKDSGLPSQGLSFKYGDILHVINASDDEWWQARRVMLEGDSEEMGVIPSKRRVERKERARLKTVKFNAKPGVIDSKGSFNDKRKKSFIFSRKFPFYKNKEQSEQETSDPERGQEDLILSYEPVTRQEINYTRPVIILGPMKDRINDDLISEFPDKFGSCVPHTTRPKRDYEVDGRDYHFVISREQMEKDIQEHKFIEAGQYNDNLYGTSVQSVRFVAERGKHCILDVSGNAIKRLQVAQLYPIAIFIKPRSLEPLMEMNKRLTEEQAKKTYDRAIKLEQEFGEYFTAIVQGDTLEDIYNQCKLVIEEQSGPFIWIPSKEKL

SEQ ID NO: 43979 - protein, 348 aa, Homo sapiens
MMNHSMSSGSGSLRTNQKRSLYVRAMFDYDKSKDSGLPSQGLSFKYGDILHVINASDDEWWQARRVMLEGDSEEMGVIPSKRRVERKERARLKTVKFNAKPGVIDSKGDIPGLGDDGYGTKTLKHVSSNASDSESSYRGQEDLILSYEPVTRQEINYTRPVIILGPMKDRINDDLISEFPDKFGSCVPHTTRPKRDYEVDGRDYHFVISREQMEKDIQEHKFIEAGQYNDNLYGTSVQSVRFVAERGKHCILDVSGNAIKRLQVAQLYPIAIFIKPRSLEPLMEMNKRLTEEQAKKTYDRAIKLEQEFGEYFTAIVQGDTLEDIYNQCKLVIEEQSGPFIWIPSKEKL

SEQ ID NO: 43980 - protein, 749 aa, Homo sapiens
MQRPSVSRAENYQLLWDTIASLKQCEQAMQHAFIPVNGTEIEYEFEEITLERGNSGLGFSIAGGTDNPHIGDDPGIFITKIIPGGAAAEDGRLRVNDCILRVNEVDVSEVSHSKAVEALKEAGSIVRLYVRRRRPILETVVEIKLFKGPKGLGFSIAGGVGNQHIPGDNSIYVTKIIDGGAAQKDGRLQVGDRLLMVNNYSLEEVTHEEAVAILKNTSEVVYLKVGKPTTIYMTDPYGPPDITHSYSPPMENHLLSGNNGTLEYKTSLPPISPGRYSPIPKHMLVDDDYTSHSQHSTATRQPSMTLQRAVSLEGEPRKVVLHKGSTGLGFNIVGGEDGEGIFVSFILAGGPADLSGELQRGDQILSVNGIDLRGASHEQAAAALKGAGQTVTIIAQYQPEDYARFEAKIHDLREQMMNHSMSSGSGSLRTNQKRSLYVRAMFDYDKSKDSGLPSQGLSFKYGDILHVINASDDEWWQARRVMLEGDSEEMGVIPSKRRVERKERARLKTVKFNAKPGVIDSKGDIPGLGDDGYGTKTLRGQEDLILSYEPVTRQEINYTRPVIILGPMKDRINDDLISEFPDKFGSCVPHTTRPKRDYEVDGRDYHFVISREQMEKDIQEHKFIEAGQYNDNLYGTSVQSVRFVAERGKHCILDVSGNAIKRLQVAQLYPIAIFIKPRSLEPLMEMNKRLTEEQAKKTYDRAIKLEQEFGEYFTAIVQGDTLEDIYNQCKLVIEEQSGPFIWIPSKEKL

SEQ ID NO: 43981 - protein, 334 aa, Homo sapiens; identical to SEQ ID NO: 43977

SEQ ID NO: 43982 - protein, 866 aa, Homo sapiens
MFFACYCALRTNVKKYRYQDEDAPHDHSLPRLTHEVRGPELVHVSEKNLSQIENVHGYVLQSHISPLKASPAPIIVNTDTLDTIPYVNGTEIEYEFEEITLERGNSGLGFSIAGGTDNPHIGDDPGIFITKIIPGGAAAEDGRLRVNDCILRVNEVDVSEVSHSKAVEALKEAGSIVRLYVRRRRPILETVVEIKLFKGPKGLGFSIAGGVGNQHIPGDNSIYVTKIIDGGAAQKDGRLQVGDRLLMVNNYSLEEVTHEEAVAILKNTSEVVYLKVGKPTTIYMTDPYGPPDITHSYSPPMENHLLSGNNGTLEYKTSLPPISPGRYSPIPKHMLVDDDYTRPPEPVYSTVNKLCDKPASPRHYSPVECDKSFLLSAPYSHYHLGLLPDSEMTSHSQHSTATRQPSMTLQRAVSLEGEPRKVVLHKGSTGLGFNIVGGEDGEGIFVSFILAGGPADLSGELQRGDQILSVNGIDLRGASHEQAAAALKGAGQTVTIIAQYQPEDYARFEAKIHDLREQMMNHSMSSGSGSLRTNQKRSLYVRAMFDYDKSKDSGLPSQGLSFKYGDILHVINASDDEWWQARRVMLEGDSEEMGVIPSKRRVERKERARLKTVKFNAKPGVIDSKGDIPGLGDDGYGTKTLKHVSSNASDSESSYRGQEDLILSYEPVTRQEINYTRPVIILGPMKDRINDDLISEFPDKFGSCVPHTTRPKRDYEVDGRDYHFVISREQMEKDIQEHKFIEAGQYNDNLYGTSVQSVRFVAERGKHCILDVSGNAIKRLQVAQLYPIAIFIKPRSLEPLMEMNKRLTEEQAKKTYDRAIKLEQEFGEYFTAIVQGDTLEDIYNQCKLVIEEQSGPFIWIPSKEKL

SEQ ID NO: 43983 - protein, 94 aa, Homo sapiens
MMNHSMSSGSGSLRTNQKRSLYVRAMFDYDKSKDSGLPSQGLSFKYGDILHVINASDDEWWQARRVMLEGDSEEMGVIPSKRRVERKERARLKT

SEQ ID NO: 43984 - protein, 852 aa, Homo sapiens
MFFACYCALRTNVKKYRYQDEDAPHDHSLPRLTHEVRGPELVHVSEKNLSQIENVHGYVLQSHISPLKASPAPIIVNTDTLDTIPYVNGTEIEYEFEEITLERGNSGLGFSIAGGTDNPHIGDDPGIFITKIIPGGAAAEDGRLRVNDCILRVNEVDVSEVSHSKAVEALKEAGSIVRLYVRRRRPILETVVEIKLFKGPKGLGFSIAGGVGNQHIPGDNSIYVTKIIDGGAAQKDGRLQVGDRLLMVNNYSLEEVTHEEAVAILKNTSEVVYLKVGKPTTIYMTDPYGPPDITHSYSPPMENHLLSGNNGTLEYKTSLPPISPGRYSPIPKHMLVDDDYTRPPEPVYSTVNKLCDKPASPRHYSPVECDKSFLLSAPYSHYHLGLLPDSEMTSHSQHSTATRQPSMTLQRAVSLEGEPRKVVLHKGSTGLGFNIVGGEDGEGIFVSFILAGGPADLSGELQRGDQILSVNGIDLRGASHEQAAAALKGAGQTVTIIAQYQPEDYARFEAKIHDLREQMMNHSMSSGSGSLRTNQKRSLYVRAMFDYDKSKDSGLPSQGLSFKYGDILHVINASDDEWWQARRVMLEGDSEEMGVIPSKRRVERKERARLKTVKFNAKPGVIDSKGDIPGLGDDGYGTKTLRGQEDLILSYEPVTRQEINYTRPVIILGPMKDRINDDLISEFPDKFGSCVPHTTRPKRDYEVDGRDYHFVISREQMEKDIQEHKFIEAGQYNDNLYGTSVQSVRFVAERGKHCILDVSGNAIKRLQVAQLYPIAIFIKPRSLEPLMEMNKRLTEEQAKKTYDRAIKLEQEFGEYFTAIVQGDTLEDIYNQCKLVIEEQSGPFIWIPSKEKL

SEQ ID NO: 43985 - protein, 620 aa, Homo sapiens [sequence omitted]

SEQ ID NO: 43986 - protein, 975 aa, Homo sapiens; identical to SEQ ID NO: 43976

SEQ ID NO: 43987 - protein, 975 aa, Homo sapiens
FGFIVSVHFQSYLNIQEFYEVTLLNSQKSCEQKIEEANQVLQKWEKTSLLAPCHDRLQKSSELTDCSGSKENASCIEQNKENQSFENETDETTTQNQGRCPAQNCSVEAPAWMPVHHCTKYRYQDEDAPHDHSLPRLTHEVRGPELVHVSEKNLSQIENVHGYVLQSHISPLKASPAPIIVNTDTLDTIPYVNGTEIEYEFEEITLERGNSGLGFSIAGGTDNPHIGDDPGIFITKIIPGGAAAEDGRLRVNDCILRVNEVDVSEVSHSKAVEALKEAGSIVRLYVRRRRPILETVVEIKLFKGPKGLGFSIAGGVGNQHIPGDNSIYVTKIIDGGAAQKDGRLQVGDRLLMVNNYSLEEVTHEEAVAILKNTSEVVYLKVGKPTTIYMTDPYGPPDITHSYSPPMENHLLSGNNGTLEYKTSLPPISPGRYSPIPKHMLVDDDYTRPPEPVYSTVNKLCDKPASPRHYSPVECDKSFLLSAPYSHYHLGLLPDSEMTSHSQHSTATRQPSMTLQRAVSLEGEPRKVVLHKGSTGLGFNIVGGEDGEGIFVSFILAGGPADLSGELQRGDQILSVNGIDLRGASHEQAAAALKGAGQTVTIIAQYQPEDYARFEAKIHDLREQMMNHSMSSGSGSLRTNQKRSLYVRAMFDYDKSKDSGLPSQGLSFKYGDILHVINASDDEWWQARRVMLEGDSEEMGVIPSKRRVERKERARLKTVKFNAKPGVIDSKGSFNDKRKKSFIFSRKFPFYKNKEQSEQETSDPERGQEDLILSYEPVTRQEINYTRPVIILGPMKDRINDDLISEFPDKFGSCVPHTTRPKRDYEVDGRDYHFVISREQMEKDIQEHKFIEAGQYNDNLYGTSVQSVRFVAERGKHCILDVSGNAIKRLQVAQLYPIAIFIKPRSLEPLMEMNKRLTEEQAKKTYDRAIKLEQEFGEYFTAIVQGDTLEDIYNQCKLVIEEQSGPFIWIPSKEKL

SEQ ID NO: 43988 - protein, 849 aa, Homo sapiens
MHKHQHCCKCPECYEVTRLAALRRLEPPGYGDWQVPDPYGPGGGNGASAGYGGYSSQTLPSQAGATPTPRTKAKLIPTGRDVGPVPPKPVPGKSTPKLNGSGPSWWPECTCTNRDWYEQARPAPLLVNPETLKHSLSVNGSDGMFKYEEIVLERGNSGLGFSIAGGIDNPHVPDDPGIFITKIIPGGAAAMDGRLGVNDCVLRVNEVDVSEVVHSRAVEALKEAGPVVRLVVRRRQPPPETIMEVNLLKGPKGLGFSIAGGIGNQHIPGDNSIYITKIIEGGAAQKDGRLQIGDRLLAVNNTNLQDVRHEEAVASLKNTSDMVYLKVAKPGSLHLNDMYAPPDYASTFTALADNHISHNSSLGYLGAVESKVSYPAPPQVPPTRYSPIPRHMLAEEDFTREPRKIILHKGSTGLGFNIVGGEDGEGIFVSFILAGGPADLSGELRRGDRILSVNGVNLRNATHEQAAAALKRAGQSVTIVAQYRPEEYSRFESKIHDLREQMMNSSMSSGSGSLRTSEKRSLYVRALFDYDRTRDSCLPSQGLSFSYGDILHVINASDDEWWQARLVTPHGESEQIGVIPSKKRVEKKERARLKTVKFHARTGMIESNRDFPGLSDDYYGAKNLKGVTSNTSDSESSSKGQEDAILSYEPVTRQEIHYARPVIILGPMKDRVNDDLISEFPHKFGSCVPHTTRPRRDNEVDGQDYHFVVSREQMEKDIQDNKFIEAGQFNDNLYGTSIQSVRAVAERGKHCILDVSGNAIKRLQQAQLYPIAIFIKPKSIEALMEMNRRQTYEQANKIYDKAMKLEQEFGEYFTAIVQGDSLEEIYNKIKQIIEDQSGHYIWVPSPEKL

SEQ ID NO: 43989 - protein, 817 aa, Homo sapiens
MHKHQHCCKCPECYEVTRLAALRRLEPPGYGDWQVPDPYGPGGGNGASAGYGGYSSQTLPSQAGATPTPRTKAKLIPTGRDVGPVPPKPVPGKSTPKLNGSGPSWWPECTCTNRDWYEQVNGSDGMFKYEEIVLERGNSGLGFSIAGGIDNPHVPDDPGIFITKIIPGGAAAMDGRLGVNDCVLRVNEVDVSEVVHSRAVEALKEAGPVVRLVVRRRQPPPETIMEVNLLKGPKGLGFSIAGGIGNQHIPGDNSIYITKIIEGGAAQKDGRLQIGDRLLAVNNTNLQDVRHEEAVASLKNTSDMVYLKVAKPGSLHLNDMYAPPDYASTFTALADNHISHNSSLGYLGAVESKVSYPAPPQVPPTRYSPIPRHMLAEEDFTREPRKIILHKGSTGLGFNIVGGEDGEGIFVSFILAGGPADLSGELRRGDRILSVNGVNLRNATHEQAAAALKRAGQSVTIVAQYRPEEYSRFESKIHDLREQMMNSSMSSGSGSLRTSEKRSLYVRALFDYDRTRDSCLPSQGLSFSYGDILHVINASDDEWWQARLVTPHGESEQIGVIPSKKRVEKKERARLKTVKFHARTGMIESNRDFPGLSDDYYGAKNLKGQEDAILSYEPVTRQEIHYARPVIILGPMKDRVNDDLISEFPHKFGSCVPHTTRPRRDNEVDGQDYHFVVSREQMEKDIQDNKFIEAGQFNDNLYGTSIQSVRAVAERGKHCILDVSGNAIKRLQQAQLYPIAIFIKPKSIEALMEMNRRQTYEQANKIYDKAMKLEQEFGEYFTAIVQGDSLEEIYNKIKQIIEDQSGHYIWVPSPEKL

SEQ ID NO: 43990 - protein, 366 aa, Homo sapiens
MMNSSMSSGSGSLRTSEKRSLYVRALFDYDRTRDSCLPSQGLSFSYGDILHVINASDDEWWQARLVTPHGESEQIGVIPSKKRVEKKERARLKTVKFHARTGMIESNRSIKTKRKKSFRLSRKFPFYKSKENMAQESSIQEQGVTSNTSDSESSSKGQEDAILSYEPVTRQEIHYARPVIILGPMKDRVNDDLISEFPHKFGSCVPHTTRPRRDNEVDGQDYHFVVSREQMEKDIQDNKFIEAGQFNDNLYGTSIQSVRAVAERGKHCILDVSGNAIKRLQQAQLYPIAIFIKPKSIEALMEMNRRQTYEQANKIYDKAMKLEQEFGEYFTAIVQGDSLEEIYNKIKQIIEDQSGHYIWVPSPEKL

SEQ ID NO: 43991 - protein, 767 aa, Homo sapiens
MSQRPRAPRSALWLLAPPLLRWAPPLLTVLHSDLFQALLDILDYYEASLSESQKYRYQDEDTPPLEHSPAHLPNQANSPPVIVNTDTLEAPGYELQVNGTEGEMEYEEITLERGNSGLGFSIAGGTDNPHIGDDPSIFITKIIPGGAAAQDGRLRVNDSILFVNEVDVREVTHSAAVEALKEAGSIVRLYVMRRKPPAEKVMEIKLIKGPKGLGFSIAGGVGNQHIPGDNSIYVTKIIEGGAAHKDGRLQIGDKILAVNSVGLEDVMHEDAVAALKNTYDVVYLKVAKPSNAYLSDSYAPPDITTSYSQHLDNEISHSSYLGTDYPTAMTPTSPRRYSPVAKDLLGEEDIPREPRRIVIHRGSTGLGFNIVGGEDGEGIFISFILAGGPADLSGELRKGDQILSVNGVDLRNASHEQAAIALKNAGQTVTIIAQYKPEEYSRFEAKIHDLREQLMNSSLGSGTASLRSNPKRGFYIRALFDYDKTKDCGFLSQALSFRFGDVLHVIDASDEEWWQARRVHSDSETDDIGFIPSKRRVERREWSRLKAKDWGSSSGSQGREDSVLSYETVTQMEVHYARPIIILGPTKDRANDDLLSEFPDKFGSCVPHTTRPKREYEIDGRDYHFVSSREKMEKDIQAHKFIEAGQYNSHLYGTSVQSVREVAEQGKHCILDVSANAVRRLQAAHLHPIAIFIRPRSLENVLEINKRITEEQARKAFDRATKLEQEFTECFSAIVEGDSFEEIYHKVKRVIEDLSGPYIWVPARERL

SEQ ID NO: 43992 - protein, 721 aa, Homo sapiens
MDCLCIVTTKKYRYQDEDTPPLEHSPAHLPNQANSPPVIVNTDTLEAPGYVNGTEGEMEYEEITLERGNSGLGFSIAGGTDNPHIGDDPSIFITKIIPGGAAAQDGRLRVNDSILFVNEVDVREVTHSAAVEALKEAGSIVRLYVMRRKPPAEKVMEIKLIKGPKGLGFSIAGGVGNQHIPGDNSIYVTKIIEGGAAHKDGRLQIGDKILAVNSVGLEDVMHEDAVAALKNTYDVVYLKVAKPSNAYLSDSYAPPDITTSYSQHLDNEISHSSYLGTDYPTAMTPTSPRRYSPVAKDLLGEEDIPREPRRIVIHRGSTGLGFNIVGGEDGEGIFISFILAGGPADLSGELRKGDQILSVNGVDLRNASHEQAAIALKNAGQTVTIIAQYKPEEYSRFEAKIHDLREQLMNSSLGSGTASLRSNPKRGFYIRALFDYDKTKDCGFLSQALSFRFGDVLHVIDASDEEWWQARRVHSDSETDDIGFIPSKRRVERREWSRLKAKDWGSSSGSQGREDSVLSYETVTQMEVHYARPIIILGPTKDRANDDLLSEFPDKFGSCVPHTTRPKREYEIDGRDYHFVSSREKMEKDIQAHKFIEAGQYNSHLYGTSVQSVREVAEQGKHCILDVSANAVRRLQAAHLHPIAIFIRPRSLENVLEINKRITEEQARKAFDRATKLEQEFTECFSAIVEGDSFEEIYHKVKRVIEDLSGPYIWVPARERL

SEQ ID NO: 43993 - protein, 664 aa, Homo sapiens
MEYEEITLERGNSGLGFSIAGGTDNPHIGDDPSIFITKIIPGGAAAQDGRLRVNDSILFVNEVDVREVTHSAAVEALKEAGSIVRLYVMRRKPPAEKVMEIKLIKGPKGLGFSIAGGVGNQHIPGDNSIYVTKIIEGGAAHKDGRLQIGDKILAVNSVGLEDVMHEDAVAALKNTYDVVYLKVAKPSNAYLSDSYAPPDITTSYSQHLDNEISHSSYLGTDYPTAMTPTSPRRYSPVAKDLLGEEDIPREPRRIVIHRGSTGLGFNIVGGEDGEGIFISFILAGGPADLSGELRKGDQILSVNGVDLRNASHEQAAIALKNAGQTVTIIAQYKPEEYSRFEAKIHDLREQLMNSSLGSGTASLRSNPKRGFYIRALFDYDKTKDCGFLSQALSFRFGDVLHVIDASDEEWWQARRVHSDSETDDIGFIPSKRRVERREWSRLKAKDWGSSSGSQGREDSVLSYETVTQMEVHYARPIIILGPTKDRANDDLLSEFPDKFGSCVPHTTRPKREYEIDGRDYHFVSSREKMEKDIQAHKFIEAGQYNSHLYGTSVQSVREVAEQGKHCILDVSANAVRRLQAAHLHPIAIFIRPRSLENVLEINKRITEEQARKAFDRATKLEQEFTECFSAIVEGDSFEEIYHKVKRVIEDLSGPYIWVPARERL

SEQ ID NO: 43994 - protein, 724 aa, Homo sapiens
MDCLCIVTTKKYRYQDEDTPPLEHSPAHLPNQANSPPVIVNTDTLEAPGYVLQVNGTEGEMEYEEITLERGNSGLGFSIAGGTDNPHIGDDPSIFITKIIPGGAAAQDGRLRVNDSILFVNEVDVREVTHSAAVEALKEAGSIVRLYVMRRKPPAEKVMEIKLIKGPKGLGFSIAGGVGNQHIPGDNSIYVTKIIEGGAAHKDGRLQIGDKILAVNSVGLEDVMHEDAVAALKNTYDVVYLKVAKPSNAYLSDSYAPPDITTSYSQHLDNEISHSSYLGTDYPTAMTPTSPRRYSPVAKDLLGEEDIPREPRRIVIHRGSTGLGFNIVGGEDGEGIFISFILAGGPADLSGELRKGDQILSVNGVDLRNASHEQAAIALKNAGQTVTIIAQYKPEEYSRFEAKIHDLREQLMNSSLGSGTASLRSNPKRGFYIRALFDYDKTKDCGFLSQALSFRFGDVLHVIDASDEEWWQARRVHSDSETDDIGFIPSKRRVERREWSRLKAKDWGSSSGSQGREDSVLSYETVTQMEVHYARPIIILGPTKDRANDDLLSEFPDKFGSCVPHTTRPKREYEIDGRDYHFVSSREKMEKDIQAHKFIEAGQYNSHLYGTSVQSVREVAEQGKHCILDVSANAVRRLQAAHLHPIAIFIRPRSLENVLEINKRITEEQARKAFDRATKLEQEFTECFSAIVEGDSFEEIYHKVKRVIEDLSGPYIWVPARERL

SEQ ID NO: 43995 - protein, 767 aa, Homo sapiens
MSQRPRAPRSALWLLAPPLLRWAPPLLTVLHSDLFQALLDILDYYEASLSESQKYRYQDEDTPPLEHSPAHLPNQANSPPVIVNTDTLEAPGYVLQVNGTEGEMEYEEITLERGNSGLGFSIAGGTDNPHIGDDPSIFITKIIPGGAAAQDGRLRVNDSILFVNEVDVREVTHSAAVEALKEAGSIVRLYVMRRKPPAEKVMEIKLIKGPKGLGFSIAGGVGNQHIPGDNSIYVTKIIEGGAAHKDGRLQIGDKILAVNSVGLEDVMHEDAVAALKNTYDVVYLKVAKPSNAYLSDSYAPPDITTSYSQHLDNEISHSSYLGTDYPTAMTPTSPRRYSPVAKDLLGEEDIPREPRRIVIHRGSTGLGFNIVGGEDGEGIFISFILAGGPADLSGELRKGDQILSVNGVDLRNASHEQAAIALKNAGQTVTIIAQYKPEEYSRFEAKIHDLREQLMNSSLGSGTASLRSNPKRGFYIRALFDYDKTKDCGFLSQALSFRFGDVLHVIDASDEEWWQARRVHSDSETDDIGFIPSKRRVERREWSRLKAKDWGSSSGSQGREDSVLSYETVTQMEVHYARPIIILGPTKDRANDDLLSEFPDKFGSCVPHTTRPKREYEIDGRDYHFVSSREKMEKDIQAHKFIEAGQYNSHLYGTSVQSVREVAEQGKHCILDVSANAVRRLQAAHLHPIAIFIRPRSLENVLEINKRITEEQARKAFDRATKLEQEFTECFSAIVEGDSFEEIYHKVKRVIEDLSGPYIWVPARERL

SEQ ID NO: 43996 - protein, 667 aa, Homo sapiens
MSQRPRAPRSALWLLAPPLLRWAPPLLTVLHSDLFQALLDILDYYEASLSESQKYRYQDEDTPPLEHSPAHLPNQANSPPVIVNTDTLEAPGYELQVNGTEGEMEYEEITLERGNSGLGFSIAGGTDNPHIGDDPSIFITKIIPGGAAAQDGRLRVNDSILFVNEVDVREVTHSAAVEALKEAGSIVRLYVMRRKPPAEKVMEIKLIKGPKGLGFSIAGGVGNQHIPGDNSIYVTKIIEGGAAHKDGRLQIGDKILAVNSVGLEDVMHEDAVAALKNTYDVVYLKVAKPSNAYLSDSYAPPDITTSYSQHLDNEISHSSYLGTDYPTAMTPTSPRRYSPVAKDLLGEEDIPREPRRIVIHRGSTGLGFNIVGGEDGEGIFISFILAGGPADLSGELRKGDQILSVNGVDLRNASHEQAAIALKNAGQTVTIIAQYKPEEYSRFEAKIHDLREQLMNSSLGSGTASLRSNPKRGFYIRALFDYDKTKDCGFLSQALSFRFGDVLHVIDASDEEWWQARRVHSDSETDDIGFIPSKRRVERREWSRLKAKDWGSSSGSQGREDSVLSYETVTQMEVHYARPIIILGPTKDRANDDLLSEFPDKFGSCVPHTTRPKREYEIDGRDYHFVSSREKMEKDIQAHKFIEAGQYNSHLYGTSVQSVREVAEQRD

SEQ ID NO: 43997 - protein, 1579 aa, Homo sapiens
MEPQRRELLAQCQQSLAQAMTEVEAVLGLLEAAGALSPGERRQLDEEAGGAKAELLLKLLLAKERDHFQDLRAALEKTQPHLLPILYLNGVVGPPQPAEGAGSTYSVLSTMPSDSESSSSLSSVGTTGKAPSPPPLLTDQQVNEKVENLSIQLRLMTRERNELRKRLAFATHGTAFDKRPYHRLNPDYERLKIQCVRAMSDLQSLQNQHTNALKRCEEVAKETDFYHTLHSRLLSDQTRLKDDVDMLRRENGQLLRERNLLQQSWEDMKRLHEEDQKEIGDLRAQQQQVLKHNGSSEILNKLYDTAMDKLEVVKKDYDALRKRYSEKVAIHNADLSRLEQLGEENQRLLKQTEMLTQQRDTAIQLQHQCALSLRRFEAIHHELNKATAQNKDLQWEMELLQSELTELRTTQVKTAKESEKYREERDAVYSEYKLIMSERDQVISELDKLQTEVELAESKLKSSTSEKKAANEEMEALRQIKDTVTMDAGRANKEVEILRKQCKALCQELKEALQEADVAKCRRDWAFQERDKIVAERDSIRTLCDNLRRERDRAVSELAEALRSLDDTRKQKNDVSRELKELKEQMESQLEKEARFRQLMAHSSHDSAIDTDSMEWETEVVEFERETEDIDLKALGFDMAEGVNEPCFPGDCGIFVTKVDKGSIADGRLRVNDWLLRINDVDLINKDKKQAIKALLNGEGAINMVVRRRKSLGGKVVTPLHINLSGQKDSGISLENGVYAAAVLPGSPAAKEGSLAVGDRIVAINGIALDNKSLNECESLLRSCQDSLTLSLLKEQKCVPASGELSPELQEWAPYSPGHSSRHSNPPLYPSRPSVGTVPRSLTPSTTVSSILRNPIYTVRSHRVGPCSSPPAARDAGPQGLHPSVQHQGRLSLDLSHRTCSDYSEMRATHGSNSLPSSARLGSSSNLQFKAERIKIPSTPRYPRSVVGSERGSVSHSECSTPPQSPLNIDTLSSCSQSQTSASTLPRIAVNPASLGERRKDRPYVEEPRHVKVQKGSEPLGISIVSGEKGGIYVSKVTVGSIAHQAGLEYGDQLLEFNGINLRSATEQQARLIIGQQCDTITILAQYNPHVHQLSSHSRSSSHLDPAGTHSTLQGSGTTTPEHPSVIDPLMEQDEGPSTPPAKQSSSRIAGDANKKTLEPRVVFIKKSQLELGVHLCGGNLHGVFVAEVEDDSPAKGPDGLVPGDLILEYGSLDVRNKTVEEVYVEMLKPRDGVRLKVQYRPEEFTKAKGLPGDSFYIRALYDRLADVEQELSFKKDDILYVDDTLPQGTFGSWMAWQLDENAQKIQRGQIPSKYVMDQEFSRRLSMSEVKDDNSATKTLSAAARRSFFRRKHKHKRSGSKDGKDLLALDAFSSDSIPLFEDSVSLAYQRVQKVDCTALRPVLILGPLLDVVKEMLVNEAPGKFCRCPLEVMKASQQAIERGVKDCLFVDYKRRSGHFDVTTVASIKEITEKNRHCLLDIAPHAIERLHHMHIYPIVIFIHYKSAKHIKEQRDPIYLRDKVTQRHSKEQFEAAQKLEQEYSRYFTGVIQGGALSSICTQILAMVNQEQNKVLWIPACPL

SEQ ID NO: 43998 - protein, 1919 aa, Homo sapiens
MEPQRRELLAQCQQSLAQAMTEVEAVLGLLEAAGALSPGERRQLDEEAGGAKAELLLKLLLAKERDHFQDLRAALEKTQPHLLPILYLNGVVGPPQPAEGAGSTYSVLSTMPSDSESSSSLSSVGTTGKAPSPPPLLTDQQVNEKVENLSIQLRLMTRERNELRKRLAFATHGTAFDKRPYHRLNPDYERLKIQCVRAMSDLQSLQNQHTNALKRCEEVAKETDFYHTLHSRLLSDQTRLKDDVDMLRRENGQLLRERNLLQQSWEDMKRLHEEDQKEIGDLRAQQQQVLKHNGSSEILNKLYDTAMDKLEVVKKDYDALRKRYSEKVAIHNADLSRLEQLGEENQRLLKQTEMLTQQRDTAIQLQHQCALSLRRFEAIHHELNKATAQNKDLQWEMELLQSELTELRTTQVKTAKESEKYREERDAVYSEYKLIMSERDQVISELDKLQTEVELAESKLKSSTSEKKAANEEMEALRQIKDTVTMDAGRANKEVEILRKQCKALCQELKEALQEADVAKCRRDWAFQERDKIVAERDSIRTLCDNLRRERDRAVSELAEALRSLDDTRKQKNDVSRELKELKEQMESQLEKEARFRQLMAHSSHDSAIDTDSMEWETEVVEFERETEDIDLKALGFDMAEGVNEPCFPGDCGIFVTKVDKGSIADGRLRVNDWLLRINDVDLINKDKKQAIKALLNGEGAINMVVRRRKSLGGKVVTPLHINLSGQKDSGISLENGVYAAAVLPGSPAAKEGSLAVGDRIVAINGIALDNKSLNECESLLRSCQDSLTLSLLKVFPQSSSWSGQNIFENIKDSDKMLSFRAHGPEVQAHNKRNLIQHNNSTQTDIFYTDRLEDRKEPGPPGGSSSFLHKPFPGGPLQVCPQACPSASERSLSSFRSDASGDRGFGLVDVRGRRPLLPFETEVGPCGVGEASLDKADSEGSNSGGTWPKAMLSSTAVPEKLSVYKKPKQRKSIFDPNTFKRPQTPPKIDYLLPGPGPAHSPQPSKRAGPLTPPKPPRRSDSIKFQHRLETSSESEATLVGSSPSTSPPSALPPDVDPGEPMHASPPRKARVRIASSYYPEGDGDSSHLPAKKSCDEDLTSQKVDELGQKRRRPKSAPSFRPKLAPVVIPAQFLEEQKCVPASGELSPELQEWAPYSPGHSSRHSNPPLYPSRPSVGTVPRSLTPSTTVSSILRNPIYTVRSHRVGPCSSPPAARDAGPQGLHPSVQHQGRLSLDLSHRTCSDYSEMRATHGSNSLPSSARLGSSSNLQFKAERIKIPSTPRYPRSVVGSERGSVSHSECSTPPQSPLNIDTLSSCSQSQTSASTLPRIAVNPASLGERRKDRPYVEEPRHVKVQKGSEPLGISIVSGEKGGIYVSKVTVGSIAHQAGLEYGDQLLEFNGINLRSATEQQARLIIGQQCDTITILAQYNPHVHQLSSHSRSSSHLDPAGTHSTLQGSGTTTPEHPSVIDPLMEQDEGPSTPPAKQSSSRIAGDANKKTLEPRVVFIKKSQLELGVHLCGGNLHGVFVAEVEDDSPAKGPDGLVPGDLILEYGSLDVRNKTVEEVYVEMLKPRDGVRLKVQYRPEEFTKAKGLPGDSFYIRALYDRLADVEQELSFKKDDILYVDDTLPQGTFGSWMAWQLDENAQKIQRGQIPSKYVMDQEFSRRLSMSEVKDDNSATKTLSAAARRSFFRRKHKHKRSGSKDGKDLLALDAFSSDSIPLFEDSVSLAYQRVQKVDCTALRPVLILGPLLDVVKEMLVNEAPGKFCRCPLEVMKASQQAIERGVKDCLFVDYKRRSGHFDVTTVASIKEITEKNRHCLLDIAPHAIERLHHMHIYPIVIFIHYKSAKHIKEQRDPIYLRDKVTQRHSKEQFEAAQKLEQEYSRYFTGVIQGGALSSICTQILAMVNQEQNKVLWIPACPL

SEQ ID NO: 43999 - protein, 683 aa, Homo sapiens
MEPQRRELLAQCQQSLAQAMTEVEAVLGLLEAAGALSPGERRQLDEEAGGAKAELLLKLLLAKERDHFQDLRAALEKTQPHLLPILYLNGVVGPPQPAEGAGSTYSVLSTMPSDSESSSSLSSVGTTVKHLREQMESQLEKEARFRQLMAHSSHDSAIDTDSMEWETEVVEFERETEDIDLKALGFDMAEGVNEPCFPGDCGIFVTKVDKGSIADGRLRVNDWLLRINDVDLINKDKKQAIKALLNGEGAINMVVRRRKSLGGKVVTPLHINLSGQKDSGISLENGVYAAAVLPGSPAAKEGSLAVGDRIVAINGIALDNKSLNECESLLRSCQDSLTLSLLKVFPQSSSWSGQNIFENIKDSDKMLSFRAHGPEVQAHNKRNLIQHNNSTQTDIFYTDRLEDRKEPGPPGGSSSFLHKPFPGGPLQVCPQACPSASERSLSSFRSDASGDRGFGLVDVRGRRPLLPFETEVGPCGVGEASLDKADSEGSNSGGTWPKAMLSSTAVPEKLSVYKKPKQRKSIFDPNTFKRPQTPPKIDYLLPGPGPAHSPQPSKRAGPLTPPKPPRRSDSIKFQHRLETSSESEATLVGSSPSTSPPSALPPDVDPGEPMHASPPRKARVRIASSYYPEGDGDSSHLPAKKSCDEDLTSQKVDELGQKRRRPKSAPSFRPKLAPVVIPAQFLE

SEQ ID NO: 44000 - protein, 880 aa, Homo sapiens
GAINMVVRRRKSLGGKVVTPLHINLSGQKDSGISLENGVYAAAVLPGSPAAKEGSLAVGDRIVAINGIALDNKSLNECESLLRSCQDSLTLSLLKEQKCVPASGELSPELQEWAPYSPGHSSRHSNPPLYPSRPSVGTVPRSLTPSTTVSSILRNPIYTVRSHRVGPCSSPPAARDAGPQGLHPSVQHQGRLSLDLSHRTCSDYSEMRATHGSNSLPSSARLGSSSNLQFKAERIKIPSTPRYPRSVVGSERGSVSHSECSTPPQSPLNIDTLSSCSQSQTSASTLPRIAVNPASLGERRKDRPYVEEPRHVKVQKGSEPLGISIVSGEKGGIYVSKVTVGSIAHQAGLEYGDQLLEFNGINLRSATEQQARLIIGQQCDTITILAQYNPHVHQLSSHSRSSSHLDPAGTHSTLQGSGTTTPEHPSVIDPLMEQDEGPSTPPAKQSSSRIAGDANKKTLEPRVVFIKKSQLELGVHLCGGNLHGVFVAEVEDDSPAKGPDGLVPGDLILEYGSLDVRNKTVEEVYVEMLKPRDGVRLKVQYRPEEFTKAKGLPGDSFYIRALYDRLADVEQELSFKKDDILYVDDTLPQGTFGSWMAWQLDENAQKIQRGQIPSKYVMDQEFSRRLSMSEVKDDNSATKTLSAAARRSFFRRKHKHKRSGSKDGKDLLALDAFSSDSIPLFEDSVSLAYQRVQKVDCTALRPVLILGPLLDVVKEMLVNEAPGKFCRCPLEVMKASQQAIERGVKDCLFVDYKRRSGHFDVTTVASIKEITEKNRHCLLDIAPHAIERLHHMHIYPIVIFIHYKSAKHIKEQRDPIYLRDKVTQRHSKEQFEAAQKLEQEYSRYFTGVIQGGALSSICTQILAMVNQEQNKVLWIPACPL

SEQ ID NO: 44001 - protein, 1078 aa, Homo sapiens
MAPRKRGGRGISFIFCCFRNNDHPEITYRLRNDSNFALQTMEPALPMPPVEELDVMFSELVDELDLTDKHREAMFALPAEKKWQIYCSKKKDQEENKGATSWPEFYIDQLNSMAARKSLLALEKEEEEERSKTIESLKTALRTKPMRFVTRFIDLDGLSCILNFLKTMDYETSESRIHTSLIGCIKALMNNSQGRAHVLAHSESINVIAQSLSTENIKTKVAVLEILGAVCLVPGGHKKVLQAMLHYQKYASERTRFQTLINDLDKSTGRYRDEVSLKTAIMSFINAVLSQGAGVESLDFRLHLRYEFLMLGIQPVIDKLREHENSTLDRHLDFFEMLRNEDELEFAKRFELVHIDTKSATQMFELTRKRLTHSEAYPHFMSILHHCLQMPYKRSGNTVQYWLLLDRIIQQIVIQNDKGQDPDSTPLENFNIKNVVRMLVNENEVKQWKEQAEKMRKEHNELQQKLEKKERECDAKTQEKEEMMQTLNKMKEKLEKETTEHKQVKQQVADLTAQLHELSRRAVCASIPGGPSPGAPGGPFPSSVPGSLLPPPPPPPLPGGMLPPPPPPLPPGGPPPPPGPPPLGAIMPPPGAPMGLALKKKSIPQPTNALKSFNWSKLPENKLEGTVWTEIDDTKVFKILDLEDLERTFSAYQRQQDFFVNSNSKQKEADAIDDTLSSKLKVKELSVIDGRRAQNCNILLSRLKLSNDEIKRAILTMDEQEDLPKDMLEQLLKFVPEKSDIDLLEEHKHELDRMAKADRFLFEMSRINHYQQRLQSLYFKKKFAERVAEVKPKVEAIRSGSEEVFRSGALKQLLEVVLAFGNYMNKGQRGNAYGFKISSLNKIADTKSSIDKNITLLHYLITIVENKYPSVLNLNEELRDIPQAAKVNMTELDKEISTLRSGLKAVETELEYQKSQPPQPGDKFVSVVSQFITVASFSFSDVEDLLAEAKDLFTKAVKHFGEEAGKIQPDEFFGIFDQFLQAVSEAKQENENMRKKKEEEERRARMEAQLKEQRERERKMRKAKENSEESGEFDDLVSALRSGEVFDKDLSKLKRNRKRITNQMTDSSRERPITKLNF

SEQ ID NO: 44002 - protein, 882 aa, Homo sapiens
MAPRKRGGRGISFIFCCFRNNDHPEITYRLRNDSNFALQTMEPALPMPPVEELDVMFSELVDELDLTDKHREAMFALPAEKKWQIYCSKKKDQEENKGATSWPEFYIDQLNSMAARKSLLALEKEEEEERSKTIESLKTALRTKPMRFVTRFIDLDGLSCILNFLKTMDYETSESRIHTSLIGCIKALMNNSQGRAHVLAHSESINVIAQSLSTENIKTKVAVLEILGAVCLVPGGHKKVLQAMLHYQKYASERTRFQTLINDLDKSTGRYRDEVSLKTAIMSFINAVLSQGAGVESLDFRLHLRYEFLMLGIQPVIDKLREHENSTLDRHLDFFEMLRNEDELEFAKRFELVHIDTKSATQMFELTRKRLTHSEAYPHFMSILHHCLQMPYKRSGNTVQYWLLLDRIIQQIVIQNDKGQDPDSTPLENFNIKNVVRMLVNENEVKQWKEQAEKMRKEHNELQQKLEKKERECDAKTQEKEEMMQTLNKMKEKLEKETTEHKQVKQQVADLTAQLHELSRRAVCASIPGGPSPGAPGGPFPSSVPGSLLPPPPPPPLPGGMLPPPPPPLPPGGPPPPPGPPPLGAIMPPPGAPMGLALKKKSIPQPTNALKSFNWSKLPENKLEGTVWTEIDDTKVFKILDLEDLERTFSAYQRQQDFFVNSNSKQKEADAIDDTLSSKLKVKELSVIDGRRAQNCNILLSRLKLSNDEIKRAILTMDEQEDLPKDMLEQLLKFVPEKSDIDLLEEHKHELDRMAKADRFLFEMSRINHYQQRLQSLYFKKKFAERVAFGNYMNKGQRGNAYGFKISSLNKIADTKSSIDKNITLLHYLITIVENKYPSVLNLNEELRDIPQAAKVKSWNIRSLSPHSPEISLCLLSASSSQ

SEQ ID NO: 44003 - protein, 1068 aa, Homo sapiens
MAPRKRGGRGISFIFCCFRNNDHPEITYRLRNDSNFALQTMEPALPMPPVEELDVMFSELVDELDLTDKHREAMFALPAEKKWQIYCSKKKDQEENKGATSWPEFYIDQLNSMAARKSLLALEKEEEEERSKTIESLKTALRTKPMRFVTRFIDLDGLSCILNFLKTMDYETSESRIHTSLIGCIKALMNNSQGRAHVLAHSESINVIAQSLSTENIKTKVAVLEILGAVCLVPGGHKKVLQAMLHYQKYASERTRFQTLINDLDKSTGRYRDEVSLKTAIMSFINAVLSQGAGVESLDFRLHLRYEFLMLGIQPVIDKLREHENSTLDRHLDFFEMLRNEDELEFAKRFELVHIDTKSATQMFELTRKRLTHSEAYPHFMSILHHCLQMPYKRSGNTVQYWLLLDRIIQQIVIQNDKGQDPDSTPLENFNIKNVVRMLVNENEVKQWKEQAEKMRKEHNELQQKLEKKERECDAKTQEKEEMMQTLNKMKEKLEKETTEHKQVKQQVADLTAQLHELSRRAVCASIPGGPSPGAPGGPFPSSVPGSLLPPPPPPPLPGGMLPPPPPPLPPGGPPPPPGPPPLGAIMPPPGAPMGLALKKKSIPQPTNALKSFNWSKLPENKLEGTVWTEIDDTKVFKILDLEDLERTFSAYQRQQKEADAIDDTLSSKLKVKELSVIDGRRAQNCNILLSRLKLSNDEIKRAILTMDEQEDLPKDMLEQLLKFVPEKSDIDLLEEHKHELDRMAKADRFLFEMSRINHYQQRLQSLYFKKKFAERVAEVKPKVEAIRSGSEEVFRSGALKQLLEVVLAFGNYMNKGQRGNAYGFKISSLNKIADTKSSIDKNITLLHYLITIVENKYPSVLNLNEELRDIPQAAKVNMTELDKEISTLRSGLKAVETELEYQKSQPPQPGDKFVSVVSQFITVASFSFSDVEDLLAEAKDLFTKAVKHFGEEAGKIQPDEFFGIFDQFLQAVSEAKQENENMRKKKEEEERRARMEAQLKEQRERERKMRKAKENSEESGEFDDLVSALRSGEVFDKDLSKLKRNRKRITNQMTDSSRERPITKLNF

SEQ ID NO: 44004 - protein, 1078 aa, Homo sapiens; identical to SEQ ID NO: 44001

SEQ ID NO: 44005 - protein, 1068 aa, Homo sapiens
MAPRKRSHHGLGFLCCFGGSDIPEINLRDNHPLQFMEFSSPIPNAEELNIRFAELVDELDLTDKNREAMFALPPEKKWQIYCSKKKEQEDPNKLATSWPDYYIDRINSMAAMQSLYAFDEEETEMRNQVVEDLKTALRTQPMRFVTRFIELEGLTCLLNFLRSMDHATCESRIHTSLIGCIKALMNNSQGRAHVLAQPEAISTIAQSLRTENSKTKVAVLEILGAVCLVPGGHKKVLQAMLHYQVYAAERTRFQTLLNELDRSLGRYRDEVNLKTAIMSFINAVLNAGAGEDNLEFRLHLRYEFLMLGIQPVIDKLRQHENAILDKHLDFFEMVRNEDDLELARRFDMVHIDTKSASQMFELIHKKLKYTEAYPCLLSVLHHCLQMPYKRNGGYFQQWQLLDRILQQIVLQDERGVDPDLAPLENFNVKNIVNMLINENEVKQWRDQAEKFRKEHMELVSRLERKERECETKTLEKEEMMRTLNKMKDKLARESQELRQARGQVAELVAQLSELSTGPVSSPPPPGGPLTLSSSMTTNDLPPPPPPLPFACCPPPPPPPLPPGGPPTPPGAPPCLGMGLPLPQDPYPSSDVPLRKKRVPQPSHPLKSFNWVKLNEERVPGTVWNEIDDMQVFRILDLEDFEKMFSAYQRHQKELGSTEDIYLASRKVKELSVIDGRRAQNCIILLSKLKLSNEEIRQAILKMDEQEDLAKDMLEQLLKFIPEKSDIDLLEEHKHEIERMARADRFLYEMSRIDHYQQRLQALFFKKKFQERLAEAKPKVEAILLASRELVRSKRLRQMLEVILAIGNFMNKGQRGGAYGFRVASLNKIADTKSSIDRNISLLHYLIMILEKHFPDILNMPSELQHLPEAAKVNLAELEKEVGNLRRGLRAVEVELEYQRRQVREPSDKFVPVMSDFITVSSFSFSELEDQLNEARDKFAKALMHFGEHDSKMQPDEFFGIFDTFLQAFSEARQDLEAMRRRKEEEERRARMEAMLKEQRERERWQRQRKVLAAGSSLEEGGEFDDLVSALRSGEVFDKDLCKLKRSRKRSGSQALEVTRERAINRLNY

SEQ ID NO: 44006 - protein, 1068 aa, Homo sapiens; identical to SEQ ID NO: 44005

SEQ ID NO: 44007 - protein, 132 aa, Homo sapiens
MAPRKRSHHGLGFLCCFGGSDIPEINLRDNHPLQFMEFSSPIPNAEELNIRFAELVDELDLTDKNREAMFALPPEKKWQIYCSKKKVPSLTPLATSQGSWHGVALAALACSCIHLMFITCQPCSRCWRNNSE

SEQ ID NO: 44008 - protein, 1067 aa, Homo sapiens
MAPRKRSHHGLGFLCCFGGSDIPEINLRDNHPLQFMEFSSPIPNAEELNIRFAELVDELDLTDKNREAMFALPPEKKWQIYCSKKKEQEDPNKLATSWPDYYIDRINSMAAMQSLYAFDEEETEMRNQVVEDLKTALRTQPMRFVTRFIELEGLTCLLNFLRSMDHATCESRIHTSLIGCIKALMNNSQGRAHVLAQPEAISTIAQSLRTENSKTKVAVLEILGAVCLVPGGHKKVLQAMLHYQVYAAERTRFQTLLNELDRSLGRYRDEVNLKTAIMSFINAVLNAGAGEDNLEFRLHLRYEFLMLGIQPVIDKLRQHENAILDKHLDFFEMVRNEDDLELARRFDMVHIDTKSASQMFELIHKKLKYTEAYPCLLSVLHHCLQMPYKRNGGYFQQWQLLDRILQQIVLQDERGVDPDLAPLENFNVKNIVNMLINENEVKQWRDQAEKFRKEHMELVSRLERKERECETKTLEKEEMMRTLNKMKDKLARESQELRQARGQVAELVAQLSELSTGPVSSPPPPGGPLTLSSSMTTNDLPPPPPPLPFACCPPPPPPPLPPGGPPTPPGAPPCLGMGLPLPQDPYPSSDVPLRKKRVPQPSHPLKSFNWVKLNEERVPGTVWNEIDDMQVFRILDLEDFEKMFSAYQRHQKELGSTEDIYLASRKVKELSVIDGRRAQNCIILLSKLKLSNEEIRQAILKMDEQEDLAKDMLEQLLKFIPEKSDIDLLEEHKHEIERMARADRFLYEMSRIDHYQQRLQALFFKKKFQERLAEAKPKVEAILLASRELVRSKRLRQMLEVILAIGNFMNKGQRGGAYGFRVASLNKIADTKSSIDRNISLLHYLIMILEKHFPDILNMPSELQHLPEAAKVNLAELEKEVGNLRRGLRAVEVLEYQRRQVREPSDKFVPVMSDFITVSSFSFSELEDQLNEARDKFAKALMHFGEHDSKMQPDEFFGIFDTFLQAFSEARQDLEAMRRRKEEEERRARMEAMLKEQRERERWQRQRKVLAAGSSLEEGGEFDDLVSALRSGEVFDKDLCKLKRSRKRSGSQALEVTRERAINRLNY

SEQ ID NO: 44009 - protein, 353 aa, Homo sapiens
MGALLCDHRSCRPISLTVAKCWDPTPRSYFTVPRADPVRPIDPAAWLSHTAALTGALPRYELEEAPLTVKSDMSAVVRVMQLPDSGLEIRDRMWLKITIANAVIGADVVDWLYTHVEGFKERREARKYASSLLKHGFLRHTVNKITFSEQCYYVFGDLCSNLATLNLNSGSSGTSDQDTLAPLPHPAAPWPLGQGYPYQYPGPPPCFPPAYQDPGFSYGSGSTGSQQSEGSKSSGSTRSSRRAPGREKERRAAGAGGSGSESDHTAPSGVGSSWRERPAGQLSRGSSPRSQASATAPGLPPPHPTTKAYTVVGGPPGGPPVRELAAVPPELTGSRQSFQKAMGNPCEFFVDIM

SEQ ID NO: 44010 - protein, 444 aa, Homo sapiens
MAETKIIYHMDEEETPYLVKLPVAPERVTLADFKNVLSNRPVHAYKFFFKSMDQDFGVVKEEIFDDNAKLPCFNGRVVSWLVLAEGAHSDAGSQGTDSHTDLPPPLERTGGIGDSRPPSFHPNVASSRDGMDNETGTESMVSHRRERARRRNREEAARTNGHPRGDRRRDVGLPPDSASTALSSELESSSFVDSDEDGSTSRLSSSTEQSTSSRLIRKYASSLLKHGFLRHTVNKITFSEQCYYVFGDLCSNLATLNLNSGSSGTSDQDTLAPLPHPAAPWPLGQGYPYQYPGPPPCFPPAYQDPGFSYGSGSTGSQQSEGSKSSGSTRSSRRAPGREKERRAAGAGGSGSESDHTAPSGVGSSWRERPAGQLSRGSSPRSQASATAPGLPPPHPTTKAYTVVGGPPGGPPVRELAAVPPELTGSRQSFQKAMGNPCEFFVDIM

SEQ ID NO: 44011 - protein, 695 aa, Homo sapiens
MAETKIIYHMDEEETPYLVKLPVAPERVTLADFKNVLSNRPVHAYKFFFKSMDQDFGVVKEEIFDDNAKLPCFNGRVVSWLVLAEGAHSDAGSQGTDSHTDLPPPLERTGGIGDSRPPSFHPNVASSRDGMDNETGTESMVSHRRERARRRNREEAARTNGHPRGDRRRDVGLPPDSASTALSSELESSSFVDSDEDGSTSRLSSSTEQSTSSRLIRKHKRRRRKQRLRQADRASSFSSITDSTMSLNIVTVTLNMERHHFLGISIVGQSNDRGDGGIYIGSIMKGGAVAADGRIEPGDMLLQVNDVNFENMSNDDAVRVLREIVSQTGPISLTVAKCWDPTPRSYFTVPRADPVRPIDPAAWLSHTAALTGALPRYGTSPCSSAVTRTSSSSLTSSVPGAPQLEEAPLTVKSDMSAVVRVMQLPDSGLEIRDRMWLKITIANAVIGADVVDWLYTHVEGFKERREARKYASSLLKHGFLRHTVNKITFSEQCYYVFGDLCSNLATLNLNSGSSGTSDQDTLAPLPHPAAPWPLGQGYPYQYPGPPPCFPPAYQDPGFSYGSGSTGSQQSEGSKSSGSTRSSRRAPGREKERRAAGAGGSGSESDHTAPSGVGSSWRERPAGQLSRGSSPRSQASATAPGLPPPHPTTKAYTVVGGPPGGPPVRELAAVPPELTGSRQSFQKAMGNPCEFFVDIM

SEQ ID NO: 44012 - protein, 670 aa, Homo sapiens
MAETKIIYHMDEEETPYLVKLPVAPERVTLADFKNVLSNRPVHAYKFFFKSMDQDFGVVKEEIFDDNAKLPCFNGRVVSWLVLAEGAHSDAGSQGTDSHTDLPPPLERTGGIGDSRPPSFHPNVASSRDGMDNETGTESMVSHRRERARRRNREEAARTNGHPRGDRRRDVGLPPDSASTALSSELESSSFVDSDEDGSTSRLSSSTEQSTSSRLIRKHKRRRRKQRLRQADRASSFSSITDSTMSLNIVTVTLNMERHHFLGISIVGQSNDRGDGGIYIGSIMKGGAVAADGRIEPGDMLLQVNDVNFENMSNDDAVRVLREIVSQTGPISLTVAKCWDPTPRSYFTVPRADPVRPIDPAAWLSHTAALTGALPRYELEEAPLTVKSDMSAVVRVMQLPDSGLEIRDRMWLKITIANAVIGADVVDWLYTHVEGFKERREARKYASSLLKHGFLRHTVNKITFSEQCYYVFGDLCSNLATLNLNSGSSGTSDQDTLAPLPHPAAPWPLGQGYPYQYPGPPPCFPPAYQDPGFSYGSGSTGSQQSEGSKSSGSTRSSRRAPGREKERRAAGAGGSGSESDHTAPSGVGSSWRERPAGQLSRGSSPRSQASATAPGLPPPHPTTKAYTVVGGPPGGPPVRELAAVPPELTGSRQSFQKAMGNPCEFFVDIM

SEQ ID NO: 44013 - protein, 716 aa, Homo sapiens
MGETKIIYHLDGQETPYLVKLPLPAERVTLADFKGVLQRPSYKFFFKSMDDDFGVVKEEISDDNAKLPCFNGRVVSWLVSAEGSHPDPAPFCADNPSELPPPMERTGGIGDSRPPSFHPHAGGGSQENLDNDTETDSLVSAQRERPRRRDGPEHATRLNGTAKGERRREPGGYDSSSTLMSSELETTSFFDSDEDDSTSRFSSSTEQSSASRLMRRHKRRRRKQKVSRIERSSSFSSITDSTMSLNIITVTLNMEKYNFLGISIVGQSNERGDGGIYIGSIMKGGAVAADGRIEPGDMLLQVNEINFENMSNDDAVRVLREIVHKPGPITLTVAKCWDPSPRGCFTLPRSEPIRPIDPAAWVSHTAAMTGTFPAYGMSPSLSTITSTSSSITSSIPDTERLDDFHLSIHSDMAAIVKAMASPESGLEVRDRMWLKITIPNAFIGSDVVDWLYHNVEGFTDRREARKYASNLLKAGFIRHTVNKITFSEQCYYIFGDLCGNMANLSLHDHDGSSGASDQDTLAPLPHPGAAPWPMAFPYQYPPPPHPYNPHPGFPELGYSYGGGSASSQHSEGSRSSGSNRSGSDRRKEKDPKAGDSKSGGSGSESDHTTRSSLRGPRERAPSERSGPAASEHSHRSHHSLASSLRSHHTHPSYGPPGVPPLYGPPMLMMPPPPAAMGPPGAPPGRDLASVPPELTASRQSFRMAMGNPSEFFVDVM

SEQ ID NO: 44014 - protein, 723 aa, Homo sapiens
MGETKIIYHLDGQETPYLVKLPLPAERVTLADFKGVLQRPSYKFFFKSMDDDFGVVKEEISDDNAKLPCFNGRVVSWLVSAEGSHPDPAPFCADNPSELPPPMERTGGIGDSRPPSFHPHAGGGSQENLDNDTETDSLVSAQRERPRRRDGPEHATRLNGTAKGERRREPGGYDSSSTLMSSELETTSFFDSDEDDSTSRFSSSTEQSSASRLMRRHKRRRRKQKVSRIERSSSFSSITDSTMSLNIITVTLNMEKYNFLGISIVGQSNERGDGGIYIGSIMKGGAVAADGRIEPGDMLLQVNEINFENMSNDDAVRVLREIVHKPGPITLTVAKCWDPSPRGCFTLPRSEPIRPIDPAAWVSHTAAMTGTFPAYGMSPSLSTITSTSSSITSSIPDTERLDDFHLSIHSDMAAIVKAMASPESGLEVRDRMWLKITIPNAFIGSDVVDWLYHNVEGFTDRREARKYASNLLKAGFIRHTVNKITFSEQCYYIFGDLCGNMANLSLHDHDGSSGASDQDTLAPLPHPGAAPWPMAFPYQYPPPPHPYNPHPGFPELGYSYGGGSASSQHSEGSRSSGSNRSGSDRRKEKDPKAGDSKSGGSGSESDHTTRSSLRGPRERAPSERSGPAASEHSHRSHHSLASSLRSHHTHPSYGPPGVPPLYGPPMLMMPPPPAAMGPPGAPPGRDLASVPPELTASRQSFRMAMGNPSEFFVDVMVLRGWGA

SEQ ID NO: 44015 - protein, 699 aa, Homo sapiens
MGETKIIYHLDGQETPYLVKLPLPAERVTLADFKGVLQRPSYKFFFKSMDDDFGVVKEEISDDNAKLPCFNGRVVSWLVSAEGSHPDPAPFCADNPSELPPPMERTGGIGDSRPPSFHPHAGGGSQENLDNDTETDSLVSAQRERPRRRDGPEHATRLNGTAKGERRREPGGYDSSSTLMSSELETTSFFDSDEDDSTSRFSSSTEQSSASRLMRRHKRRRRKQKVSRIERSSSFSSITDSTMSLNIITVTLNMEKYNFLGISIVGQSNERGDGGIYIGSIMKGGAVAADGRIEPGDMLLQVNEINFENMSNDDAVRVLREIVHKPGPITLTVAKCWDPSPRGCFTLPRTMTGTFPAYGMSPSLSTITSTSSSITSSIPDTERLDDFHLSIHSDMAAIVKAMASPESGLEVRDRMWLKITIPNAFIGSDVVDWLYHNVEGFTDRREARKYASNLLKAGFIRHTVNKITFSEQCYYIFGDLCGNMANLSLHDHDGSSGASDQDTLAPLPHPGAAPWPMAFPYQYPPPPHPYNPHPGFPELGYSYGGGSASSQHSEGSRSSGSNRSGSDRRKEKDPKAGDSKSGGSGSESDHTTRSSLRGPRERAPSERSGPAASEHSHRSHHSLASSLRSHHTHPSYGPPGVPPLYGPPMLMMPPPPAAMGPPGAPPGRDLASVPPELTASRQSFRMAMGNPSEFFVDVM

SEQ ID NO: 44016 - protein, 104 aa, Homo sapiens
MPEAHMQPAKLQTSLPTTDHGSKKPVSCYLPPLSNAHPMCIEVQNAQNCSSAAATLEPSIISDTCFYKPITKDQLSSRSELNTVRLKCLNSLRGWKILNQLSLT

SEQ ID NO: 44017 - protein, 478 aa, Homo sapiens
MGSRWSSEEERQPLLGPGLGPGLGASWRSREAAAAALPAAVPGPGRVYGRRWLVLLLFSLLAFVQGLVWNTWGPIQNSARQAYGFSSWDIALLVLWGPIGFLPCFAFMWLLDKRGLRITVLLTSFLMVLGTGLRCIPISDLILKRRLIHGGQMLNGLAGPTVMNAAPFLSTTWFSADERATATAIASMLSYLGGACAFLVGPLVVPAPNGTSPLLAAESSRAHIKDRIEAVLYAEFGVVCLIFSATLAYFPPRPPLPPSVAAASQRLSYRRSVCRLLSNFRFLMIALAYAIPLGVFAGWSGVLDLILTPAHVSQVDAGWIGFWSIVGGCVVGIAMARFADFIRGMLKLILLLLFSGATLSSTWFTLTCLNSITHLPLTTVTLYASCILLGVFLNSSVPIFFELFVETVYPVPEGITCGVVTFLSNMFMGVLLFFLTFYHTELSWFNWCLPGSCLLSLLLILCFRESYDRLYLDVVVSV

SEQ ID NO: 44018 - protein, 547 aa, Homo sapiens
MPGGGPQGAPAAAGGGGVSHRAGSRDCLPPAACFRRRRLARRPGYMRSSTGPGIGFLSPAVGTLFRFPGGVSGEESHHSESRARQCGLDSRGLLVRSPVSKSAAAPTVTSVRGTSAHFGIQLRGGTRLPDRLSWPCGPGSAGWQQEFAAMDSSETLDASWEAACSDGARRVRAAGSLPSAELSSNSCSPGCGPEVPPTPPGSHSAFTSSFSFIRLSLGSAGERGEAEGCPPSREAESHCQSPQEMGAKAASLDGPHEDPRCLSRPFSLLATRVSADLAQAARNSSRPERDMHSLPDMDPGSSSSLDPSLAGCGGDGSSGSGDAHSWDTLLRKWEPVLRDCLLRNRRQMEVISLRLKLQKLQEDAVENDDYDKAETLQQRLEDLEQEKISLHFQLPSRQPALSSFLGHLAAQVQAALRRGATQQASGDDTHTPLRMEPRLLEPTAQDSLHVSITRRDWLLQEKQQLQKEIEALQARMFVLEAKDQQLRREIEEQEQQLQWQGCDLTPLVGQLSLGQLQEVSKALQDTLASAGQIPFHAEPPETIRRCV

SEQ ID NO: 44019 - protein, 369 aa, Homo sapiens
MPGGGPQGAPAAAGGGGVSHRAGSRDCLPPAACFRRRRLARRPGYMRSSTGPGIGFLSPAVGTLFRFPGGVSGEESHHSESRARQCGLDSRGLLVRSPVSKSAAAPTVTSVRGTSAHFGIQLRGGTRLPDRLSWPCGPGSAGWQQEFAAMDSSETLDASWEAACSDGARRVRAAGSLPSAELSSNSCSPGCGPEVPPTPPGSHSAFTSSFSFIRLSLGSAGERGEAEGCPPSREAESHCQSPQEMGAKAASLDGPHEDPRCLSRPFSLLATRVSADLAQAARNSSRPERDMHSLPDMDPGSSSSLDPSLAGCGGDGSSGSGDAHSWDTLLRKWEPVLRDCLLRNRRQMELEPIALDPPWKPRHPEPNSY

SEQ ID NO: 44020 - protein, 238 aa, Homo sapiens
MDSSETLDASWEAACSDGARRVRAAGSLPSAELSSNSCSPGCGPEVPPTPPGSHSAFTSSFSFIRLSLGSAGERGEAEGCPPSREAESHCQSPQEMGAKAASLDGPHEDPRCLSRPFSLLATRVSADLAQAARNSSRPERDMHSLPDMDPGSSSSLDPSLAGCGGDGSSGSGDAHSWDTLLRKWEPVLRDCLLRNRRQMEVISLRLKLQKLQEDAVENDDYDKAGTNCFGSTMEASTS

SEQ ID NO: 44021 - protein, 755 aa, Homo sapiens
MPGGGPQGAPAAAGGGGVSHRAGSRDCLPPAACFRRRRLARRPGYMRSSTGPGIGFLSPAVGTLFRFPGGVSGEESHHSESRARQCGLDSRGLLVRSPVSKSAAAPTVTSVRGTSAHFGIQLRGGTRLPDRLSWPCGPGSAGWQQEFAAMDSSETLDASWEAACSDGARRVRAAGSLPSAELSSNSCSPGCGPEVPPTPPGSHSAFTSSFSFIRLSLGSAGERGEAEGCPPSREAESHCQSPQEMGAKAASLDGPHEDPRCLSRPFSLLATRVSADLAQAARNSSRPERDMHSLPDMDPGSSSSLDPSLAGCGGDGSSGSGDAHSWDTLLRKWEPVLRDCLLRNRRQMEVISLRLKLQKLQEDAVENDDYDKAETLQQRLEDLEQEKISLHFQLPSRQPALSSFLGHLAAQVQAALRRGATQQASGDDTHTPLRMEPRLLEPTAQDSLHVSITRRDWLLQEKQQLQKEIEALQARMFVLEAKDQQLRREIEEQEQQLQWQGCDLTPLVGQLSLGQLQEVSKALQDTLASAGQIPFHAEPPETIRSLQERIKSLNLSLKEITTKVCMSEKFCSTLRKKVNDIETQLPALLEAKMHAISGNHFWTAKDLTEEIRSLTSEREGLEGLLSKLLVLSSRNVKKLGSVKEDYNRLRREVEHQETAYDGVSLCRPVWSAVVRSCSLQPLPPEFKQFSCLSLRSSWDYRCPPPCLANFVFLVEMGFYHVDQTGLKLLTSSDPPSSASQSAGITDMSHCAWPLQ

SEQ ID NO: 44022 - protein, 678 aa, Homo sapiens
MPGGGPQGAPAAAGGGGVSHRAGSRDCLPPAACFRRRRLARRPGYMRSSTGPGIGFLSPAVGTLFRFPGGVSGEESHHSESRARQCGLDSRGLLVRSPVSKSAAAPTVTSVRGTSAHFGIQLRGGTRLPDRLSWPCGPGSAGWQQEFAAMDSSETLDASWEAACSDGARRVRAAGSLPSAELSSNSCSPGCGPEVPPTPPGSHSAFTSSFSFIRLSLGSAGERGEAEGCPPSREAESHCQSPQEMGAKAASLDGPHEDPRCLSRPFSLLATRVSADLAQAARNSSRPERDMHSLPDMDPGSSSSLDPSLAGCGGDGSSGSGDAHSWDTLLRKWEPVLRDCLLRNRRQMEVISLRLKLQKLQEDAVENDDYDKAETLQQRLEDLEQEKISLHFQLPSRQPALSSFLGHLAAQVQAALRRGATQQASGDDTHTPLRMEPRLLEPTAQDSLHVSITRRDWLLQEKQQLQKEIEALQARMFVLEAKDQQLRREIEEQEQQLQWQGCDLTPLVGQLSLGQLQEVSKALQDTLASAGQIPFHAEPPETIRSLQERIKSLNLSLKEITTKVCMSEKFCSTLRKKVNDIETQLPALLEAKMHAISGNHFWTAKDLTEEIRSLTSEREGLEGLLSKLLVLSSRNVKKLGSVKEDYNRLRREVEHQETAYGYKYCDAESWTQRSQQLA

SEQ ID NO: 44023 - protein, 832 aa, Homo sapiens
MPGGGPQGAPAAAGGGGVSHRAGSRDCLPPAACFRRRRLARRPGYMRSSTGPGIGFLSPAVGTLFRFPGGVSGEESHHSESRARQCGLDSRGLLVRSPVSKSAAAPTVTSVRGTSAHFGIQLRGGTRLPDRLSWPCGPGSAGWQQEFAAMDSSETLDASWEAACSDGARRVRAAGSLPSAELSSNSCSPGCGPEVPPTPPGSHSAFTSSFSFIRLSLGSAGERGEAEGCPPSREAESHCQSPQEMGAKAASLDGPHEDPRCLSRPFSLLATRVSADLAQAARNSSRPERDMHSLPDMDPGSSSSLDPSLAGCGGDGSSGSGDAHSWDTLLRKWEPVLRDCLLRNRRQMEVISLRLKLQKLQEDAVENDDYDKAETLQQRLEDLEQEKISLHFQLPSRQPALSSFLGHLAAQVQAALRRGATQQASGDDTHTPLRMEPRLLEPTAQDSLHVSITRRDWLLQEKQQLQKEIEALQARMFVLEAKDQQLRREIEEQEQQLQWQGCDLTPLVGQLSLGQLQEVSKALQDTLASAGQIPFHAEPPETIRSLQERIKSLNLSLKEITTKVCMSEKFCSTLRKKVNDIETQLPALLEAKMHAISGNHFWTAKDLTEEIRSLTSEREGLEGLLSKLLVLSSRNVKKLGSVKEDYNRLRREVEHQETAYETSVKENTMKYMETLKNKLCSCKCPLLGKVWEADLEACRLLIQSLQLQEARGSLSVEDERQMDDLEGAAPPIPPRLHSEDKRKTPLKESYILSAELGEKCEDIGKKLLYLEDQLHTAIHSHDEDLIHSLRRELQMVKETLQAMILQLQPAKEAGEREAAASCMTAGVHEAQA

SEQ ID NO: 44024 - protein, 886 aa, Homo sapiens
MPGGGPQGAPAAAGGGGVSHRAGSRDCLPPAACFRRRRLARRPGYMRSSTGPGIGFLSPAVGTLFRFPGGVSGEESHHSESRARQCGLDSRGLLVRSPVSKSAAAPTVTSVRGTSAHFGIQLRGGTRLPDRLSWPCGPGSAGWQQEFAAMDSSETLDASWEAACSDGARRVRAAGSLPSAELSSNSCSPGCGPEVPPTPPGSHSAFTSSFSFIRLSLGSAGERGEAEGCPPSREAESHCQSPQEMGAKAASLDGPHEDPRCLSRPFSLLATRVSADLAQAARNSSRPERDMHSLPDMDPGSSSSLDPSLAGCGGDGSSGSGDAHSWDTLLRKWEPVLRDCLLRNRRQMEVISLRLKLQKLQEDAVENDDYDKVETGFHYVGQAGLELLTSSNPPASASQSAGITAETLQQRLEDLEQEKISLHFQLPSRQPALSSFLGHLAAQVQAALRRGATQQASGDDTHTPLRMEPRLLEPTAQDSLHVSITRRDWLLQEKQQLQKEIEALQARMFVLEAKDQQLRREIEEQEQQLQWQGCDLTPLVGQLSLGQLQEVSKALQDTLASAGQIPFHAEPPETIRSLQERIKSLNLSLKEITTKVCMSEKFCSTLRKKVNDIETQLPALLEAKMHAISGNHFWTAKDLTEEIRSLTSEREGLEGLLSKLLVLSSRNVKKLGSVKEDYNRLRREVEHQETAYETSVKENTMKYMETLKNKLCSCKCPLLGKVWEADLEACRLLIQSLQLQEARGSLSVEDERQMDDLEGAAPPIPPRLHSEDKRKTPLKVLEEWKTHLIPSLHCAGGEQKEESYILSAELGEKCEDIGKKLLYLEDQLHTAIHSHDEDLIHSLRRELQMVKETLQAMILQLQPAKEAGEREAAASCMTAGVHEAQA

SEQ ID NO: 44025 - protein, 206 aa, Homo sapiens
  VARIANT 1: note = MOD_RES - Any amino acid
XNHFWTAKDLTEEIRSLTSEREGLEGLLSKLLVLSSRNVKKLGSVKEDYNRLRREVEHQETAYETSVKENTMKYMETLKNKLCSCKCPLLGKVWEADLEACRLLIQSLQLQEARGSLSVEDERQMDDLEGAAPPIPPRLHSEDKRKTPLKVLEEWKTHLIPSLHCAGGEQKEVCPFHMASRGDPYSKGCFGTMLQMGTINIGKASH

SEQ ID NO: 44026 - protein, 92 aa, Homo sapiens
MKYMETLKNKLCSCKCPLLGKVWEADLEACRLLIQSLQLQEARGSLSVEDERQMDDLEGAAPPIPPRLHSEDKRKTPLKVLEEWKTHLIPSL

SEQ ID NO: 44027 - protein, 854 aa, Homo sapiens [sequence omitted]

SEQ ID NO: 44028 - protein, 732 aa, Homo sapiens
MPGGGPQGAPAAAGGGGVSHRAGSRDCLPPAACFRRRRLARRPGYMRSSTGPGIGFLSPAVGTLFRFPGGVSGEESHHSESRARQCGLDSRGLLVRSPVSKSAAAPTVTSVRGTSAHFGIQLRGGTRLPDRLSWPCGPGSAGWQQEFAAMDSSETLDASWEAACSDGARRVRAAGSLPSAELSSNSCSPGCGPEVPPTPPGSHSAFTSSFSFIRLSLGSAGERGEAEGCPPSREAESHCQSPQEMGAKAASLDGPHEDPRCLSRPFSLLATRVSADLAQAARNSSRPERDMHSLPDMDPGSSSSLDPSLAGCGGDGSSGSGDAHSWDTLLRKWEPVLRDCLLRNRRQMEVISLRLKLQKLQEDAVENDDYDKAETLQQRLEDLEQEKISLHFQLPSRQPALSSFLGHLAAQVQAALRRGATQHLQERIKSLNLSLKEITTKVCMSEKFCSTLRKKVNDIETQLPALLEAKMHAISGNHFWTAKDLTEEIRSLTSEREGLEGLLSKLLVLSSRNVKKLGSVKEDYNRLRREVEHQETAYETSVKENTMKYMETLKNKLCSCKCPLLGKVWEADLEACRLLIQSLQLQEARGSLSVEDERQMDDLEGAAPPIPPRLHSEDKRKTPLKVLEEWKTHLIPSLHCAGGEQKEESYILSAELGEKCEDIGKKLLYLEDQLHTAIHSHDEDLIHSLRRELQMVKETLQAMILQLQPAKEAGEREAAASCMTAGVHEAQA

SEQ ID NO: 44029 - protein, 609 aa, Homo sapiens
MPGGGPQGAPAAAGGGGVSHRAGSRDCLPPAACFRRRRLARRPGYMRSSTGPGIGFLSPAVGTLFRFPGGVSGEESHHSESRARQCGLDSRGLLVRSPVSKSAAAPTVTSVRGTSAHFGIQLRGGTRLPDRLSWPCGPGSAGWQQEFAAMDSSETLDASWEAACSDGARRVRAAGSLPSAELSSNSCSPGCGPEVPPTPPGSHSAFTSSFSFIRLSLGSAGERGEAEGCPPSREAESHCQSPQEMGAKAASLDGPHEDPRCLSRPFSLLATRVSADLAQAARNSSRPERDMHSLPDMDPGSSSSLDPSLAGCGGDGSSGSGDAHSWDTLLRKWEPVLRDCLLRNRRQMEVISLRLKLQKLQEDAVENDDYDKAETLQQRLEDLEQEKISLHFQLPSRQPALSSFLGHLAAQVQAALRRGATQQASGDDTHTPLRMEPRLLEPTAQDSLHVSITRRDWLLQEKQQLQKEIEALQARMFVLEAKDQQLRREIEEQEQQLQWQGCDLTPLVGQLSLGQLQEVSKALQDTLASAGQIPFHAEPPETIRREVRHQTAPCRNHQLEKPVINIWAFHLRRKICLFQADGLQHGSAEVKHLKETSVEPAGSTASRKE

SEQ ID NO: 44030 - protein, 695 aa, Homo sapiens
MPGGGPQGAPAAAGGGGVSHRAGSRDCLPPAACFRRRRLARRPGYMRSSTGPGIGFLSPAVGTLFRFPGGVSGEESHHSESRARQCGLDSRGLLVRSPVSKSAAAPTVTSVRGTSAHFGIQLRGGTRLPDRLSWPCGPGSAGWQQEFAAMDSSETLDASWEAACSDGARRVRAAGSLPSAELSSNSCSPGCGPEVPPTPPGSHSAFTSSFSFIRLSLGSAGERGEAEGCPPSREAESHCQSPQEMGAKAASLDGPHEDPRCLSRPFSLLATRVSADLAQAARNSSRPERDMHSLPDMDPGSSSSLDPSLAGCGGDGSSGSGDAHSWDTLLRKWEPVLRDCLLRNRRQMEVISLRLKLQKLQEDAVENDDYDKAETLQQRLEDLEQEKISLHFQLPSRQPALSSFLGHLAAQVQAALRRGATQQASGDDTHTPLRMEPRLLEPTAQDSLHVSITRRDWLLQEKQQLQKEIEALQARMFVLEAKDQQLRREIEEQEQQLQWQGCDLTPLVGQLSLGQLQEVSKALQDTLASAGQIPFHAEPPETIRSLQERIKSLNLSLKEITTKVCMSEKFCSTLRKKVNDIETQLPALLEAKMHAISGNHFWTAKDLTEEIRSLTSEREGLEGLLSKLLVLSSRNVKKLGSVKEDYNRLRREVEHQETAYAASVHCLGKCGKLTWKLVDCLSRAYSSRKPGEACL

SEQ ID NO: 44031 - protein, 559 aa, Homo sapiens
MPGGGPQGAPAAAGGGGVSHRAGSRDCLPPAACFRRRRLARRPGYMRSSTGPGIGFLSPAVGTLFRFPGGVSGEESHHSESRARQCGLDSRGLLVRSPVSKSAAAPTVTSVRGTSAHFGIQLRGGTRLPDRLSWPCGPGSAGWQQEFAAMDSSETLDASWEAACSDGARRVRAAGSLPSAELSSNSCSPGCGPEVPPTPPGSHSAFTSSFSFIRLSLGSAGERGEAEGCPPSREAESHCQSPQEMGAKAASLDGPHEDPRCLSRPFSLLATRVSADLAQAARNSSRPERDMHSLPDMDPGSSSSLDPSLAGCGGDGSSGSGDAHSWDTLLRKWEPVLRDCLLRNRRQMEVISLRLKLQKLQEDAVENDDYDKAETLQQRLEDLEQEKISLHFQLPSRQPALSSFLGHLAAQVQAALRRGATQQASGDDTHTPLRMEPRLLEPTAQDSLHVSITRRDWLLQEKQQLQKEIEALQARMFVLEAKDQQLRREIEEQEQQLQWQGCDLTPLVGQLSLGQLQEVSKALQDTLASAGQIPFHAEPPETIRRNKCEGKYYEVHGNT

SEQ ID NO: 44032 - protein, 579 aa, Homo sapiens
MPGGGPQGAPAAAGGGGVSHRAGSRDCLPPAACFRRRRLARRPGYMRSSTGPGIGFLSPAVGTLFRFPGGVSGEESHHSESRARQCGLDSRGLLVRSPVSKSAAAPTVTSVRGTSAHFGIQLRGGTRLPDRLSWPCGPGSAGWQQEFAAMDSSETLDASWEAACSDGARRVRAAGSLPSAELSSNSCSPGCGPEVPPTPPGSHSAFTSSFSFIRLSLGSAGERGEAEGCPPSREAESHCQSPQEMGAKAASLDGPHEDPRCLSRPFSLLATRVSADLAQAARNSSRPERDMHSLPDMDPGSSSSLDPSLAGCGGDGSSGSGDAHSWDTLLRKWEPVLRDCLLRNRRQMEVISLRLKLQKLQEDAVENDDYDKAETLQQRLEDLEQEKISLHFQLPSRQPALSSFLGHLAAQVQAALRRGATQQASGDDTHTPLRMEPRLLEPTAQDSLHVSITRRDWLLQEKQQLQKEIEALQARMFVLEAKDQQLRREIEEQEQQLQWQGCDLTPLVGQLSLGQLQEVSKALQDTLASAGQIPFHAEPPETIRSLQERIKSLNLSLKEITTKETISGRLKTSPRRLDH

SEQ ID NO: 44033 - protein, 129 aa, Homo sapiens
MTMTTMPESLNSPVSGKAVFMEFGPPNQQMSPSPMSHGHYSMHCLHSAGHSQPDGAYSSASSFSRPLGYPYVNSVSSHASSPYISSVQSYPGSASLAQSRLEDPGQDLVPKQAIQVQEADEAGWGGSGG

SEQ ID NO: 44034 - protein, 171 aa, Homo sapiens
MTMTTMPESLNSPVSGKAVFMEFGPPNQQMSPSPMSHGHYSMHCLHSAGHSQPDGAYSSASSFSRPLGYPYVNSVSSHASSPYISSVQSYPGSASLAQSRLEDPGADSEKSTVVEGGEVRFNGKGKKIRKPRTIYSSLQLQALNRRFQQTQYLALPERAELAASLGLTQTQ

SEQ ID NO: 44035 - protein, 255 aa, Homo sapiens
MTMTTMPESLNSPVSGKAVFMEFGPPNQQMSPSPMSHGHYSMHCLHSAGHSQPDGAYSSASSFSRPLGYPYVNSVSSHASSPYISSVQSYPGSASLAQSRLEDPGADSEKSTVVEGGEVRFNGKGKKIRKPRTIYSSLQLQALNRRFQQTQYLALPERAELAASLGLTQTQVKIWFQNKRSKFKKLMKQGGAALEGSALANGRALSAGSPPVPPGWNPNSSSGKGSGGNAGSYIPSYTSWYPSAHQEAMQQPQLM

SEQ ID NO: 44036 - protein, 187 aa, Homo sapiens
MTMTTMPESLNSPVSGKAVFMEFGPPNQQMSPSPMSHGHYSMHCLHSAGHSQPDGAYSSASSFSRPLGYPYVNSVSSHASSPYISSVQSYPGSASLAQSRLEDPGADSEKSTVVEGGEVRFNGKGKKIRKPRTIYSSLQLQALNRRFQQTQYLALPERAELAASLGLTQTQVKIWFQNKRSKFKKLM

SEQ ID NO: 44037 - protein, 328 aa, Homo sapiens
MTGVFDSLVADMHSTQIAASSTYHQHQQPPSGGGAGPGGNSSSSSSLHKPQESPTLPVSTATDSSYYTNQQHPAGGGGGGGSPYAHMGSYQYQASGLNNVPYSAKSSYDLGYTAAYTSYAPYGTSSSPANNEPEKEDLEPEIRIVNGKPKKVRKPRTIYSSFQLAALQRRFQKTQYLALPERAELAASLGLTQTQVKIWFQNRRSKFKKMWKSGEIPSEQHPGASASPPCASPPVSAPASWDFGVPQRMAGGGGPGSGGSGAGSSGSSPSSAASAFLGNYPWYHQTSGSASHLQATAPLLHPTQTPQPHHHHHHHGGGGAPVSAGTIF

SEQ ID NO: 44038 - protein, 217 aa, Homo sapiens
MTGVFDSLVADMHSTQIAASSTYHQHQQPPSGGGAGPGGNSSSSSSLHKPQESPTLPVSTATDSSYYTNQQHPAGGGGGGGSPYAHMGSYQYQASGLNNVPYSAKSSYDLGYTAAYTSYAPYGTSSSPANNEPEKEDLEPEIRIVNGKPKKVRKPRTIYSSFQLAALQRRFQKTQYLALPERAELAASLGLTQTQVGLAPCRGEESAGLRWLGSRRV

SEQ ID NO: 44039 - protein, 287 aa, Homo sapiens
MSGSFDRKLSSILTDISSSLSCHAGSKDSPTLPESSVTDLGYYSAPQHDYYSGQPYGQTVNPYTYHHQFNLNGLAGTGAYSPKSEYTYGASYRQYGAYREQPLPAQDPVSVKEEPEAEVRMVNGKPKKVRKPRTIYSSYQLAALQRRFQKAQYLALPERAELAAQLGLTQTQVKIWFQNRRSKFKKLYKNGEVPLEHSPNNSDSMACNSPPSPALWDTSSHSTPAPARSQLPPPLPYSASPSYLDDPTNSWYHAQNLSGPHLQQQPPQPATLHHASPGPPPNPGAVY

SEQ ID NO: 44040 - protein, 240 aa, Homo sapiens
MTSLPCPLPGRDASKAVFPDLAPVPSVAAAYPLGLSPTTAASPNLSYSRPYGHLLSYPYTEPANPGDSYLSCQQPAALSQPLCGPAEHPQELEADSEKPRLSPEPSERRPQAPAKKLRKPRTIYSSLQLQHLNQRFQHTQYLALPERAQLAAQLGLTQTQVKIWFQNKRSKYKKLLKQNSGGQEGDFPGRTFSVSPCSPPLPSLWDLPKAGTLPTSGYGNSFGAWYQHHSSDVLASPQMM

SEQ ID NO: 44041 - protein, 168 aa, Homo sapiens
MKLSVLPPRSLLAPYTVLCCPPDSEKPRLSPEPSERRPQAPAKKLRKPRTIYSSLQLQHLNQRFQHTQYLALPERAQLAAQLGLTQTQVKIWFQNKRSKYKKLLKQNSGGQEGDFPGRTFSVSPCSPPLPSLWDLPKAGTLPTSGYGNSFGAWYQHHSSDVLASPQMM

SEQ ID NO: 44042 - protein, 289 aa, Homo sapiens
MTGVFDRRVPSIRSGDFQAPFQTSAAMHHPSQESPTLPESSATDSDYYSPTGGAPHGYCSPTSASYGKALNPYQYQYHGVNGSAGSYPAKAYADYSYASSYHQYGGAYNRVPSATNQPEKEVTEPEVRMVNGKPKKVRKPRTIYSSFQLAALQRRFQKTQYLALPERAELAASLGLTQTQVKIWFQNKRSKIKKIMKNGEMPPEHSPSSSDPMACNSPQSPAVWEPQGSSRSLSHHPHAHPPTSNQSPASSYLENSASWYTSAASSINSHLPPPGSLQHPLALASGTLY

SEQ ID NO: 44043 - protein, 265 aa, Homo sapiens
MMTMTTMADGLEGQDSSKSAFMEFGQQQQQQHSPAMAGAHYPLHCLHSAAAAAAAGSHHHHHHQHHHHGSPYASGGGNSYNHRSLAAYPYMSHSQHSPYLQSYHNSSAAAQTRGDDTDQQKTTVIENGEIRFNGKGKKIRKPRTIYSSLQLQALNHRFQQTQYLALPERAELAASLGLTQTQVKIWFQNKRSKFKKLLKQGSNPHESDPLQGSAALSPRSPALPPVWDVSASAKGVSMPPNSYMPGYSHWYSSPHQDTMQRPQMM

SEQ ID NO: 44044 - protein, 293 aa, Homo sapiens
MMTMTTMADGLEGQDSSKSAFMEFGQQQQQQQQQQQQQQQQQQQPPPPPPPPPQPHSQQSSPAMAGAHYPLHCLHSAAAAAAAGSHHHHHHQHHHHGSPYASGGGNSYNHRSLAAYPYMSHSQHSPYLQSYHNSSAAAQTRGDDTDQQKTTVIENGEIRFNGKGKKIRKPRTIYSSLQLQALNHRFQQTQYLALPERAELAASLGLTQTQVKIWFQNKRSKFKKLLKQGSNPHESDPLQGSAALSPRSPALPPVWDVSASAKGVSMPPNSYMPGYSHWYSSPHQDTMQRPQMM

SEQ ID NO: 44045 - protein, 3027 aa, Homo sapiens
MNLHQVLTGAVNPGDHCFSVGSIGDQRFTAYASGCDIVILGSDFERLQIIPGAKHGNIQVGCVDCSMQQGKIAASYGNVISIFEPVNLPKQKKNLELYSQWQKSGQFFLESIAHNITWDPTGSRLLTGSSYLQLWSNTNLEKPTEDENLNKTDLNFGDWKCIWHCKTASQVHLMKFSPDGEFFATAGKDDCLLKVWYNVENWRTAVTSPDGSSEKQSQGEIDFSFVYLAHPRAVNGFSWRKTSKYMPRASVCNVLLTCCKDNVCRLWVETFLPNDCLLYGGDCSHWTESINLTNNFKRNASSKERVQNALEVNLRHFRRGRRRSLALVAHTGYLPHQQDPHHVHRNTPLHANALCHFHIAASINPATDIPLLPSITSLSLNENEEKTGPFVVHWLNNKELHFTLSMEVFLQQLRKSFEQPSSEASVEDSNQADVKSDEETDDGVDDLKINPEKKELGCDKMVPNSSFTSLSSAAIDHQIEVLLSEWSKNADMLFSIHPMDGSLLVWHVDWLDEYQPGMFRQVQVSFVSRIPVAFPTGDANSLCKSIMMYACTKNVDLAIQQGKQKPSGLTRSTSMLISSGHNKSSNSLKLSIFTPNVMMISKHADGSLNQWLVSFAEESAFSTVLSISHKSRYCGHRFHLNDLACHSVLPLLLTTSHHNALRTPDVDNPEQPFDALNIEECSLTQQNKSTVDVAFQDPSAVYSELILWRVDPVGPLSFSGGVSELARINSLHVSAFSNVAWLPTLIPSYCLGAYCNSPSACFVASDGQYLRLYEAVIDAKKLLSELSNPEISKYVGEVFNIVSQQSTARPGCIIALDPITKLHGRKTQLLHVFEEDFILNNLEKKSLGKDSILSNAGSSPNGFSEKFYLIVIECTQDNRSLLHMWNLHLKSIPVSLDEKVDTKLSEAVWQPEEHYSSSPEKILSPFSQKYQACRANLQSTSRLTLFSEMVYSQELHLPEGVEIISIKPSAGHLSSSSIYPACSAPYLLATSCSDEKVRFWRCRVTDGESATSKNGKIDLAYIWEEWPLLIEDGLQSNSSITVPGRPVEVSCAHTNRLAVAYKQPASNSRSSQDFVMHVSIFECESTGGSCWVLEQTIHLDELSTVLDSGISVDSNLVAYNKQDMYLSSKENITSNTKHLVHLDWMSREDGSHILTVGIGSKLFMYGPLAGKVQDQTGKETLAFPLWESTKVVPLSKFVLLRSVDLVSSVDGSPPFPVSLSWVRDGILVVGMDCEMHVYCQWQPSSKQEPVITDSYSGSTPSITSLIKQSNSSSGLHPPKKTLTRSMTSLAQKICGKKTAFDPSVDMEDSGLFEAAHVLSPTLPQYHPLQLLELMDLGKVRRAKAILSHLVKCIAGEVVALNEAESNHERRLRSLTISASGSTTRDPQAFNKAENTDYTEIDSVPPLPLYALLAADDDSCYSSLEKSSNESTLSKSNQLSKESYDELFQTQLLMTDTHMLETDEENTKPRVIDLSQYSPTYFGPEHAQVLSGHLLHSSLPGLSRMEQMSLMALADTIATTSTDIGESRDRSQGGETLDECGLKFLLAVRLHTFLTTSLPAYRAQLLHQGLSTSHFAWAFHSVAEEELLNMLPAMQKDDPTWSELRAMGVGWWVRNTRILRKCIEKVAKAAFYRKNDPLDAAIFYLAMKKKAVIWGLYRAEKNTRMTQFFGHNFEDERWRKAALKNAFSLLGKQRFEHSAAFFLLAGCLRDAIEVCLEKLNDIQLALVIARLYESEFDTSAAYKSILRKKVLGIDSPVSELCSLNINMHHDPFLRSMAYWILEDYSGALETLIKQPIRENDDQVLSASNPTVFNFYNYLRTHPLLLRRHFGSSDTFSTHMSLTGKSGLAGTINLSERRLFFTTASAHLKAGCPMLALEVLSKMPKVIKKTRPFYRASSFLDTSKDCSPSSPLKLDAREDKSSAVDWSQSLINGFGSSSEGSSEKQSNSTLSFDWSQPSVVFQDDSLELKWDSDNDEENEDVPISMKELKPLQRKTDKKLDDISSNYTESFSTLDENDLLNPSEDIIAVQLKFRACLKILTVELRTLSTGYEIDGGKLRYQLYHWLEKEVIALQRTCDFCSDAEELQSAFGRNEDEFGLNEDAEDLPHQTKVKQLRENFQEKRQWLLKYQSLLRMFLSYCILHGSHGGGLASVRMELILLLQESQQETSEPLFSSPLSEQTSVPLLFACTANAKTVVANPLLHLSNLTHDILHAIINFDSPPHPDIQSNKVYVMHTLAASLSACIYQCLCGSHNYSSFQTNQFTGMVYQTVLLPHRPSLKTGSLDEALTPNTSPAQWPGITCLIRLLNSSGEEAQSGLTVLLCEILTAVYLSLFIHGLATHSSNELFRIVAHPLNEKMWSAVFGGGAHVPSKEQTHSKTLPVSSLVEEGEKQNKRFRPSKMSCRESAPLTPSSAPVSQESLAVKEKFIPPELSIWDYFIAKPFLPSSQSRAEYDSEESLGSDDDDNDDDDDVLASDFHLQEHSNSNSYSWSLMRLAMVQLVLNNLKTFYPFAGHDLAELPVSSPLCHAVLKTLQCWEQVLLRRLEIHGGPPQNYIASHTAEESLSAGPAILRHKALLEPTNTPFKSKHHLALSVKRLWQYLVKQEEIQETFIKNIFTKKRCLNEIEADLGYPGGKARIIHKESDIITAFAVNKANRNCIAIASSHDVQELDVSGILATQVYTWVDDDIEVETKGSEDFLVIHARDDLTAVQGTTPYTHSNPGTPINMPWLGSTQTGRGASVMIKKAINNVRRMTSHPTLPYYLTGAQDGSVRMFEWGHSQQITCFRSGGNSRVTRMRFNYQGNKFGIVDADGYLSLYQTNWKCCPVTGSMPKPYLTWQCHNKTANDFVFVSSSSLIATAGLSTDNRNVCLWDTLVAPANSLVHAFTCHDSGATVLAYAPKHQLLISGGRKGFTYVFDLCQRQQRQLFQSHDSPVKAVAVDPTEEYFVTGSAEGNIKIWSLSTFGLLHTFVSEHARQSIFRNIGTGVMQIETGPANHIFSCGADGTMKMRILPDQFSPLNEVLKNDVKFML

SEQ ID NO: 44046 - protein, 589 aa, Homo sapiens
MNLHQVLTGAVNPGDHCFSVGSIGDQRFTAYASGCDIVILGSDFERLQIIPGAKHGNIQVGCVDCSMQQGKIAASYGNVISIFEPVNLPKQKKNLELYSQWQKSGQFFLESIAHNITWDPTGSRLLTGSSYLQLWSNTNLEKPTEDENLNKTDLNFGDWKCIWHCKTASQVHLMKFSPDGEFFATAGKDDCLLKVWYNVENWRTAVTSPDGSSEKQSQGEIDFSFVYLAHPRAVNGFSWRKTSKYMPRASVCNVLLTCCKDNVCRLWVETFLPNDCLLYGGDCSHWTESINLTNNFKRNASSKERVQNALEVNLRHFRRGRRRSLALVAHTGYLPHQQDPHHVHRNTPLHANALCHFHIAASINPATDIPLLPSITSLSLNENEEKTGPFVVHWLNNKELHFTLSMEVFLQQLRKSFEQPSSEASVEDSNQADVKSDEETDDGVDDLKINPEKKELGCDKMVPNSSFTSLSSAAIDHQIEVLLSEWSKNADMLFSIHPMDGSLLVWHVDWLDEYQPGMFRQVQVSFVSRIPVAFPTGDANSLCKSIMMYACTKNVDLAIQQGKQKPSGLTRSTSMLISSGHNKSSNSLK

SEQ ID NO: 44047 - protein, 3048 aa, Homo sapiens
MNLHQVLTGAVNPGDHCFSVGSIGDQRFTAYASGCDIVILGSDFERLQIIPGAKHGNIQVGCVDCSMQQGKIAASYGNVISIFEPVNLPKQKKNLELYSQWQKSGQFFLESIAHNITWDPTGSRLLTGSSYLQLWSNTNLEKPTEDENLNKTDLNFGDWKCIWHCKTASQVHLMKFSPDGEFFATAGKDDCLLKVWYNVENWRTAVTSPDGSSEKQSQGEIDFSFVYLAHPRAVNGFSWRKTSKYMPRASVCNVLLTCCKDNVCRLWVETFLPNDCLLYGGDCSHWTESINLTNNFKRNASSKERVQNALEVNLRHFRRGRRRSLALVAHTGYLPHQQDPHHVHRNTPLHANALCHFHIAASINPATDIPLLPSITSLSLNENEEKTGPFVVHWLNNKELHFTLSMEVFLQQLRKSFEQPSSEASVEDSNQADVKSDEETDDGVDDLKINPEKKELGCDKMVPNSSFTSLSSAAIDHQIEVLLSEWSKNADMLFSIHPMDGSLLVWHVDWLDEYQPGMFRQVQVSFVSRIPVAFPTGDANSLCKSIMMYACTKNVDLAIQQGKQKPSGLTRSTSMLISSGHNKSSNSLKLSIFTPNVMMISKHADGSLNQWLVSFAEESAFSTVLSISHKSRYCGHRFHLNDLACHSVLPLLLTTSHHNALRTPDVDNPEQPFDALNIEECSLTQQNKSTVDVAFQDPSAVYSELILWRVDPVGPLSFSGGVSELARINSLHVSAFSNVAWLPTLIPSYCLGAYCNSPSACFVASDGQYLRLYEAVIDAKKLLSELSNPEISKYVGEVFNIVSQQSTARPGCIIALDPITKLHGRKTQLLHVFEEDFILNNLEKKSLGKDSILSNAGSSPNGFSEKFYLIVIECTQDNRSLLHMWNLHLKSIPVSLDEKVDTKLSEAVWQPEEHYSSSPEKILSPFSQKYQACRANLQSTSRLTLFSEMVYSQELHLPEGVEIISIKPSAGHLSSSSIYPACSAPYLLATSCSDEKVRFWRCRVTDGESATSKNGKIDLAYIWEEWPLLIEDGLQSNSSITVPGRPVEVSCAHTNRLAVAYKQPASNSRSSQDFVMHVSIFECESTGGSCWVLEQTIHLDELSTVLDSGISVDSNLVAYNKQDMYLSSKENITSNTKHLVHLDWMSREDGSHILTVGIGSKLFMYGPLAGKVQDQTGKETLAFPLWESTKVVPLSKFVLLRSVDLVSSVDGSPPFPVSLSWVRDGILVVGMDCEMHVYCQWQPSSKQEPVITDSYSGSTPSITSLIKQSNSSSGLHPPKKTLTRSMTSLAQKICGKKTAFDPSVDMEDSGLFEAAHVLSPTLPQYHPLQLLELMDLGKVRRAKAILSHLVKCIAGEVVALNEAESNHERRLRSLTISASGSTTRDPQAFNKAENTDYTEIDSVPPLPLYALLAADDDSCYSSLEKSSNESTLSKSNQLSKESYDELFQTQLLMTDTHMLETDEENTKPRVIDLSQYSPTYFGPEHAQVLSGHLLHSSLPGLSRMEQMSLMALADTIATTSTDIGESRDRSQGGETLDECGLKFLLAVRLHTFLTTSLPAYRAQLLHQGLSTSHFAWAFHSVAEEELLNMLPAMQKDDPTWSELRAMGVGWWVRNTRILRKCIEKVAKAAFYRKNDPLDAAIFYLAMKKKAVIWGLYRAEKNTRMTQFFGHNFEDERWRKAALKNAFSLLGKQRFEHSAAFFLLAGCLRDAIEVCLEKLNDIQLALVIARLYESEFDTSAAYKSILRKKVLGIDSPVSELCSLNINMHHDPFLRSMAYWILEDYSGALETLIKQPIRENDDQVLSASNPTVFNFYNYLRTHPLLLRRHFGSSDTFSTHMSLTGKSGLAGTINLSERRLFFTTASAHLKAGCPMLALEVLSKMPKVIKKTRPFYRASSFLDTSKDCSPSSPLKLDAREDKSSAVDWSQSLINGFGSSSEGSSEKQSNSTLSFDWSQPSVVFQDDSLELKWDSDNDEENEDVPISMKELKPLQRKTDKKLDDISSNYTESFSTLDENDLLNPSEDIIAVQLKFRACLKILTVELRTLSTGYEIDGGKLRYQLYHWLEKEVIALQRTCDFCSDAEELQSAFGRNEDEFGLNEDAEDLPHQTKVKQLRENFQEKRQWLLKYQSLLRMFLSYCILHGSHGGGLASVRMELILLLQESQQETSEPLFSSPLSEQTSVPLLFACTANAKTVVANPLLHLSNLTHDILHAIINFDSPPHPDIQSNKVYVMHTLAASLSACIYQCLCGSHNYSSFQTNQFTGMVYQTVLLPHRPSLKTGSLDEALTPNTSPAQWPGITCLIRLLNSSGEEAQSGLTVLLCEILTAVYLSLFIHGLATHSSNELFRIVAHPLNEKMWSAVFGGGAHVPSKEQTHSKTLPVSSLVEEGEKQNKRFRPSKMSCRESAPLTPSSAPVSQESLAVKEKFIPPELSIWDYFIAKPFLPSSQSRAEYDSEESLGSDDDDNDDDDDVLASDFHLQEHSNSNSYSWSLMRLAMVQLVLNNLKTFYPFAGHDLAELPVSSPLCHAVLKTLQCWEQVLLRRLEIHGGPPQNYIASHTAEESLSAGPAILRHKALLEPTNTPFKSKHHLALSVKRLWQYLVKQEEIQETFIKNIFTKKRCLNESLEDNSETIKNSMMEEPNINKIEADLGYPGGKARIIHKESDIITAFAVNKANRNCIAIASSHDVQELDVSGILATQVYTWVDDDIEVETKGSEDFLVIHARDDLTAVQGTTPYTHSNPGTPINMPWLGSTQTGRGASVMIKKAINNVRRMTSHPTLPYYLTGAQDGSVRMFEWGHSQQITCFRSGGNSRVTRMRFNYQGNKFGIVDADGYLSLYQTNWKCCPVTGSMPKPYLTWQCHNKTANDFVFVSSSSLIATAGLSTDNRNVCLWDTLVAPANSLVHAFTCHDSGATVLAYAPKHQLLISGGRKGFTYVFDLCQRQQRQLFQSHDSPVKAVAVDPTEEYFVTGSAEGNIKIWSLSTFGLLHTFVSEHARQSIFRNIGTGVMQIETGPANHIFSCGADGTMKMRILPDQFSPLNEVLKNDVKFML

SEQ ID NO: 44048 - protein, 3036 aa, Homo sapiens
MHLHQVLTGAVNPGDNCYSVGSVGDVPFTAYGSGCDIVILANDFECVQIIPGAKHGNIQVSCVECSNQQGRIAASYGNAVCIFEPLGINSHKRNCQLKCQWLKTGQFFLSSVTYNLAWDPQDNRLLTATDSIQLWAPPGDDILEEEEEIDNTVPPVLNDWKCVWQCKTSVSVHLMEWSPDGEYFATAGKDDCLLKVWYPMTGWKSSIIPQDHHEVKRRQSSTQFSFVYLAHPRAVTGFSWRKTSKYMPRGSVCNVLLTSCHDGVCRLWAETLLPEDCLLGEQICETTTSSIASSLSHAGRHKDRIQHALETIHHLKNLRKGQRRSSVLVTHAELMPDQTAMHEVQRHISHHANALCHFHIAASINPATDIPNVLVGTAFNVDDGNGGFVVHWLNNKEFHFTSSTEVFMHQLRKLSDKQVDHENDDADREDEEHSQEDRERGLHMKLDHDLSLDRESEAGTGSSEHEDGEREGSPRTYSRLSVPMPLPTVLLDRKIETLLTEWNKNPDMLFTIHPVDGTFLVWHVKYLDEYNPGIFRQVQVSFSSRIPVAFPSGDASSLSKNIMMYACINATKDSHHTLLHQEGMSVGSPHGSQPHSRSHSTHMNILAPTVMMISKHIDGSLNQWAVTFADKSAFTTVLTVSHKFRYCGHRFHLNDLACHSVLPLLLTSSHHNALLTPELDCQWDSDNKLSRLMDPVKHIKGSSKQPLRNAATRTFHDPNAIYSELILWRVDPIGPLSYTGGVSELARINSLHTSAFSNVAWLPTLIPSYCLGTYCNSASACFVASDGKNLRLYQAVVDARKLLDELSDPESSKLIGEVFNIVSQQSTARPGCIIELDAITNQCGSNTQLLHVFQEDFIIGYKPHKEDMEKKETEIFFQPSQGYRPPPFSEKFFLVVIEKDSNNNSILHMWHLHLKSVQACLAKASEGASSESLLSVPGQKNVDSSPETSPSVSPMPHSSSIANLQTASKLILSSRLVYSQPLDLPESVEVIRATPSAGHLSSSSIYPVCLAPYLVVTTCSDNKVRFWKCCMEANPECNKSDEKEIYHWKRWPLMNDEGEDNSSTVSIVGRPVAVSCSYTGRLAVAYKQPIHHNGFVSKEFSMHVCIFECESTGGSEWVLEQTIHLDDLVKVGSVLDSRVSVDSNLFVYSKSDALLSKDRYLIPNIKHLVHLDWVSKEDGSHILTVGVGANIFMYGRLSGIVTEQTNSKDGVAVITLPLGGSIKQGVKSRWVLLRSIDLVSSVDGTPSLPVSLSWVRDGILVVGMDCEMHVYAQWKHAVKFGDTEADSSNAEEAAMQDHSTFKSNMLARKSVVEGTAISDDVFCSPTVIQDGGLFEAAHVLSPTLPQYHPTQLLELMDLGKVRRAKAILSHLVKCIAGEVAIVRDPDAGEGTKRHLSRTISVSGSTAKETVTVGKDGTRDYTEIDSIPPLPLYALLAADQDTSYRISEESTKIPQSYEDQTVSQPEDQYSELFQIQDIPTDDIDLEPEKRENKSKVINLSQYGPAYFGQEHARVLSSHLMHSSLPGLTRLEQMFLVALADTVATTSTELDESRDKSCSGRDTLDECGLRYLLAMRLHTCLLTSLPPLYRVQLLHQGVSTCHFAWAFHSEAEEELINMIPAIQRGDPQWSELRAMGIGWWVRNINTLRRCIEKVAKASFQRNNDALDAALFYLSMKKKAVVWGLFRSQHDEKMTTFFSHNFNEDRWRKAALKNAFSLLGKQRFEQSAAFFLLAGSLKDAIEVCLEKMEDIQLAMVIARLYESEFETSSTYISILNQKILGCQKDGSGFSCKRLHPDPFLRSLAYWVMKDYTRALDTLLEQTPKEDDEHQVIIKSCNPVAFSFYNYLRTHPLLIRRNLASPEGTLATLGLKTEKNFVDKINLIERKLFFTTANAHFKVGCPVLALEVLSKIPKVTKTSALSAKKDQPDFISHRMDDVPSHSKALSDGNGSSGIEWSNVTSSQYDWSQPIVKVDEEPLNLDWGEDHDSALDEEEDDAVGLVMKSTDAREKDKQSDQKASDPNMLLTPQEEDDPEGDTEVDVIAEQLKFRACLKILMTELRTLATGYEVDGGKLRFQLYNWLEKEIAALHEICNHESVIKEYSSKTYSKVESDLLDQEEMVDKPDIGSYERHQIERRRLQAKREHAERRKSWLQKNQDLLRVFLSYCSLHGAQGGGLASVRMELKFLLQESQQETTVKQLQSPLPLPTTLPLLSASIASTKTVIANPVLYLNNHIHDILYTIVQMKTPPHPSIEDVKVHTLHSLAASLSASIYQALCDSHSYSQTEGNQFTGMAYQGLLLSDRRRLRTESIEEHATPNSSPAQWPGVSSLINLLSSAQDEDQPKLNILLCEAVVAVYLSLLIHALATNSSSELFRLAAHPLNNRMWAAVFGGGVKLVVKPRRQSENISAPPVLSEDIDKHRRRFNMRMLVPGRPVKDATPPPVPAERPSYKEKFIPPELSMWDYFVAKPFLPLSDSGVIYDSDESIHSDEEDDAFFSDTQIQEHQDPNSYSWALLHLTMVKLALHNVKNFFPIAGLEFSELPVTSPLGIAVIKNLENWEQILQEKMDQFEGPPPNYINTYPTDLSVGAGPAILRNKAMLEPENTPFKSRDSSAFPVKRLWHFLVKQEVLQETFIRYIFTKKRKQSEVEADLGYPGGKAKVIHKESDMIMAFSVNKANCNEIVLASTHDVQELDVTSLLACQSYIWIGEEYDRESKSSDDVDYRGSTTTLYQPSATSYSASQVHPPSSLPWLGTGQTSTGASVLMKRNLHNVKRMTSHPVHQYYLTGAQDGSVRMFEWTRPQQLVCFRQAGNARVTRLYFNSQGNKCGVADGEGFLSIWQVNQTASNPKPYMSWQCHSKATSDFAFITSSSLVATSGHSNDNRNVCLWDTLISPGNSLIHGFTCHDHGATVLQYAPKQQLLISGGRKGHVCIFDIRQRQLIHTFQAHDSAIKALALDPYEEYFTTGSAEGNIKVWRLTGHGLIHSFKSEHAKQSIFRNIGAGVMQIDIIQGNRLFSCGADGTLKTRVLPNAFNIPNRILDIL

SEQ ID NO: 44049 - protein, 602 aa, Homo sapiens
MWDYFVAKPFLPLSDSGVIYDSDESIHSDEEDDAFFSDTQIQEHQDPNSYSWALLHLTMVKLALHNVKNFFPIAGLEFSELPVTSPLGIAVIKNLENWEQILQEKMDQFEGPPPNYINTYPTDLSVGAGPAILRNKAMLEPENTPFKSRDSSAFPVKRLWHFLVKQEVLQETFIRYIFTKKRKQSESIEEHVEQVNQNCIAEDCHIKVEADLGYPGGKAKVIHKESDMIMAFSVNKANCNEIVLASTHDVQELDVTSLLACQSYIWIGEEYDRESKSSDDVDYRGSTTTLYQPSATSYSASQVHPPSSLPWLGTGQTSTGASVLMKRNLHNVKRMTSHPVHQYYLTGAQDGSVRMFEWTRPQQLVCFRQAGNARVTRLYFNSQGNKCGVADGEGFLSIWQVNQTASNPKPYMSWQCHSKATSDFAFITSSSLVATSGHSNDNRNVCLWDTLISPGNSLIHGFTCHDHGATVLQYAPKQQLLISGGRKGHVCIFDIRQRQLIHTFQAHDSAIKALALDPYEEYFTTGSAEGNIKVWRLTGHGLIHSFKSEHAKQSIFRNIGAGVMQIDIIQGNRLFSCGADGTLKTRVLPNAFNIPNRILDIL

SEQ ID NO: 44050 - protein, 2400 aa, Homo sapiens
MHLHQVLTGAVNPGDNCYSVGSVGDVPFTAYGSGCDIVILANDFECVQIIPGAKHGNIQVSCVECSNQQGRIAASYGNAVCIFEPLGINSHKRNCQLKCQWLKTGQFFLSSVTYNLAWDPQDNRLLTATDSIQLWAPPGDDILEEEEEIDNTVPPVLNDWKCVWQCKTSVSVHLMEWSPDGEYFATAGKDDCLLKVWYPMTGWKSSIIPQDHHEVKRRQSSTQFSFVYLAHPRAVTGFSWRKTSKYMPRGSVCNVLLTSCHDGVCRLWAETLLPEDCLLGEQICETTTSSIASSLSHAGRHKDRIQHALETIHHLKNLRKGQRRSSVLVTHAELMPDQTAMHEVQRHISHHANALCHFHIAASINPATDIPNVLVGTAFNVDDGNGGFVVHWLNNKEFHFTSSTEVFMHQLRKLSDKQVDHENDDADREDEEHSQEDRERGLHMKLDHDLSLDRESEAGTGSSEHEDGEREGSPRTYSRLSVPMPLPTVLLDRKIETLLTEWNKNPDMLFTIHPVDGTFLVWHVKYLDEYNPGIFRQVQVSFSSRIPVAFPSGDASSLSKNIMMYACINATKDSHHTLLHQEGMSVGSPHGSQPHSRSHSTHMNILAPTVMMISKHIDGSLNQWAVTFADKSAFTTVLTVSHKFRYCGHRFHLNDLACHSVLPLLLTSSHHNALLTPELDCQWDSDNKLSRLMDPVKHIKGSSKQPLRNAATRTFHDPNAIYSELILWRVDPIGPLSYTGGVSELARINSLHTSAFSNVAWLPTLIPSYCLGTYCNSASACFVASDGKNLRLYQAVVDARKLLDELSDPESSKLIGEVFNIVSQQSTARPGCIIELDAITNQCGSNTQLLHVFQEDFIIGYKPHKEDMEKKETEIFFQPSQGYRPPPFSEKFFLVVIEKDSNNNSILHMWHLHLKSVQACLGRDTLDECGLRYLLAMRLHTCLLTSLPPLYRVQLLHQGVSTCHFAWAFHSEAEEELINMIPAIQRGDPQWSELRAMGIGWWVRNINTLRRCIEKVAKASFQRNNDALDAALFYLSMKKKAVVWGLFRSQHDEKMTTFFSHNFNEDRWRKAALKNAFSLLGKQRFEQSAAFFLLAGSLKDAIEVCLEKMEDIQLAMVIARLYESEFETSSTYISILNQKILGCQKDGSGFSCKRLHPDPFLRSLAYWVMKDYTRALDTLLEQTPKEDDEHQVIIKSCNPVAFSFYNYLRTHPLLIRRNLASPEGTLATLGLKTEKNFVDKINLIERKLFFTTANAHFKVGCPVLALEVLSKIPKVTKTSALSAKKDQPDFISHRMDDVPSHSKALSDGNGSSGIEWSNVTSSQYDWSQPIVKVDEEPLNLDWGEDHDSALDEEEDDAVGLVMKSTDAREKDKQSDQKASDPNMLLTPQEEDDPEGDTEVDVIAEQLKFRACLKILMTELRTLATGYEVDGGKLRFQLYNWLEKEIAALHEICNHESVIKEYSSKTYSKVESDLLDQEEMVDKPDIGSYERHQIERRRLQAKREHAERRKSWLQKNQDLLRVFLSYCSLHGAQGGGLASVRMELKFLLQESQQETTVKQLQSPLPLPTTLPLLSASIASTKTVIANPVLYLNNHIHDILYTIVQMKTPPHPSIEDVKVHTLHSLAASLSASIYQALCDSHSYSQTEGNQFTGMAYQGLLLSDRRRLRTESIEEHATPNSSPAQWPGVSSLINLLSSAQDEDQPKLNILLCEAVVAVYLSLLIHALATNSSSELFRLAAHPLNNRMWAAVFGGGVKLVVKPRRQSENISAPPVLSEDIDKHRRRFNMRMLVPGRPVKDATPPPVPAERPSYKEKFIPPELSMWDYFVAKPFLPLSDSGVIYDSDESIHSDEEDDAFFSDTQIQEHQDPNSYSWALLHLTMVKLALHNVKNFFPIAGLEFSELPVTSPLGIAVIKNLENWEQILQEKMDQFEGPPPNYINTYPTDLSVGAGPAILRNKAMLEPENTPFKSRDSSAFPVKRLWHFLVKQEVLQETFIRYIFTKKRKQSEVEADLGYPGGKAKVIHKESDMIMAFSVNKANCNEIVLASTHDVQELDVTSLLACQSYIWIGEEYDRESKSSDDVDYRGSTTTLYQPSATSYSASQVHPPSSLPWLGTGQTSTGASVLMKRNLHNVKRMTSHPVHQYYLTGAQDGSVRMFEWTRPQQLVCFRQAGNARVTRLYFNSQGNKCGVADGEGFLSIWQVNQTASNPKPYMSWQCHSKATSDFAFITSSSLVATSGHSNDNRNVCLWDTLISPGNSLIHGFTCHDHGATVLQYAPKQQLLISGGRKGHVCIFDIRQRQLIHTFQAHDSAIKALALDPYEEYFTTGSAEGNIKVWRLTGHGLIHSFKSEHAKQSIFRNIGAGVMQIDIIQGNRLFSCGADGTLKTRVLPNAFNIPNRILDIL

SEQ ID NO: 44051 - protein, 3037 aa, Homo sapiens
MHLHQVLTGAVNPGDNCYSVGSVGDVPFTAYGSGCDIVILANDFECVQIIPGAKHGNIQVSCVECSNQQGRIAASYGNAVCIFEPLGINSHKRNCQLKCQWLKTGQFFLSSVTYNLAWDPQDNRLLTATDSIQLWAPPGDDILEEEEEIDNTVPPVLNDWKCVWQCKTSVSVHLMEWSPDGEYFATAGKDDCLLKVWYPMTGWKSSIIPQDHHEVKRRQSSTQFSFVYLAHPRAVTGFSWRKTSKYMPRGSVCNVLLTSCHDGVCRLWAETLLPEDCLLGEQICETTTSSIASSLSHAGRHKDRIQHALETIHHLKNLRKGQRRSSVLVTHAELMPDQTAMHEVQRHISHHANALCHFHIAASINPATDIPNVLVGTAFNVDDGNGGFVVHWLNNKEFHFTSSTEVFMHQLRKLSDKQVDHENDDADREDEEHSQEDRERGLHMKLDHDLSLDRESEAGTGSSEHEDGEREGSPRTYSRLSVPMPLPTVLLDRKIETLLTEWNKNPDMLFTIHPVDGTFLVWHVKYLDEYNPGIFRQVQVSFSSRIPVAFPSGDASSLSKNIMMYACINATKDSHHTLLHQEGMSVGSPHGSQPHSRSHSTHMNILAPTVMMISKHIDGSLNQWAVTFADKSAFTTVLTVSHKFRYCGHRFHLNDLACHSVLPLLLTSSHHNALLTPELDCQWDSDNKLSRLMDPVKHIKGSSKQPLRNAATRTFHDPNAIYSELILWRVDPIGPLSYTGGVSELARINSLHTSAFSNVAWLPTLIPSYCLGTYCNSASACFVASDGKNLRLYQAVVDARKLLDELSDPESSKLIGEVFNIVSQQSTARPGCIIELDAITNQCGSNTQLLHVFQEDFIIGYKPHKEDMEKKETEIFFQPSQGYRPPPFSEKFFLVVIEKDSNNNSILHMWHLHLKSVQACLAKASEGASSESLLSVPGQKNVDSSPETSPSVSPMPHSSSIANLQTASKLILSSRLVYSQPLDLPESVEVIRATPSAGHLSSSSIYPVCLAPYLVVTTCSDNKVRFWKCCMEANPECNKSDEKEIYHWKRWPLMNDEGEDNSSTVSIVGRPVAVSCSYTGRLAVAYKQPIHHNGFVSKEFSMHVCIFECESTGGSEWVLEQTIHLDDLVKVGSVLDSRVSVDSNLFVYSKSDALLSKDRYLIPNIKHLVHLDWVSKEDGSHILTVGVGANIFMYGRLSGIVTEQTNSKDGVAVITLPLGGSIKQGVKSRWVLLRSIDLVSSVDGTPSLPVSLSWVRDGILVVGMDCEMHVYAQWKHAVKFGDTEADSSNAEEAAMQDHSTFKSNMLARKSVVEGTAISDDVFCSPTVIQDGGLFEAAHVLSPTLPQYHPTQLLELMDLGKVRRAKAILSHLVKCIAGEVAIVRDPDAGEGTKRHLSRTISVSGSTAKETVTVGKDGTRDYTEIDSIPPLPLYALLAADQDTSYRISEESTKIPQSYEDQTVSQPEDQYSELFQIQDIPTDDIDLEPEKRENKSKVINLSQYGPAYFGQEHARVLSSHLMHSSLPGLTRLEQMFLVALADTVATTSTELDESRDKSCSGRDTLDECGLRYLLAMRLHTCLLTSLPPLYRVQLLHQGVSTCHFAWAFHSEAEEELINMIPAIQRGDPQWSELRAMGIGWWVRNINTLRRCIEKVAKASFQRNNDALDAALFYLSMKKKAVVWGLFRSQHDEKMTTFFSHNFNEDRWRKAALKNAFSLLGKQRFEQSAAFFLLAGSLKDAIEVCLEKMEDIQLAMVIARLYESEFETSSTYISILNQKILGCQKDGSGFSCKRLHPDPFLRSLAYWVMKDYTRALDTLLEQTPKEDDEHQVIIKSCNPVAFSFYNYLRTHPLLIRRNLASPEGTLATLGLKTEKNFVDKINLIERKLFFTTANAHFKVGCPVLALEVLSKIPKVTKTSALSAKKDQPDFISHRMDDVPSHSKALSDGNGSSGIEWSNVTSSQYDWSQPIVKVDEEPLNLDWGEDHDSALDEEEDDAVGLVMKSTDAREKDKQSDQKASDPNMLLTPQEEDDPEGDTEVDVIAEQLKFRACLKILMTELRTLATGYEVDGGKLRFQLYNWLEKEIAALHEICNHESVIKEYSSKTYSKVESDLLDQEEMVDKPDIGSYERHQIERRRLQAKREHAERRKSWLQKNQDLLRVFLSYCSLHGAQGGGLASVRMELKFLLQESQQETTVKQLQSPLPLPTTLPLLSASIASTKTVIANPVLYLNNHIHDILYTIVQMKTPPHPSIEDVKVHTLHSLAASLSASIYQALCDSHSYSSQTEGNQFTGMAYQGLLLSDRRRLRTESIEEHATPNSSPAQWPGVSSLINLLSSAQDEDQPKLNILLCEAVVAVYLSLLIHALATNSSSELFRLAAHPLNNRMWAAVFGGGVKLVVKPRRQSENISAPPVLSEDIDKHRRRFNMRMLVPGRPVKDATPPPVPAERPSYKEKFIPPELSMWDYFVAKPFLPLSDSGVIYDSDESIHSDEEDDAFFSDTQIQEHQDPNSYSWALLHLTMVKLALHNVKNFFPIAGLEFSELPVTSPLGIAVIKNLENWEQILQEKMDQFEGPPPNYINTYPTDLSVGAGPAILRNKAMLEPENTPFKSRDSSAFPVKRLWHFLVKQEVLQETFIRYIFTKKRKQSEVEADLGYPGGKAKVIHKESDMIMAFSVNKANCNEIVLASTHDVQELDVTSLLACQSYIWIGEEYDRESKSSDDVDYRGSTTTLYQPSATSYSASQVHPPSSLPWLGTGQTSTGASVLMKRNLHNVKRMTSHPVHQYYLTGAQDGSVRMFEWTRPQQLVCFRQAGNARVTRLYFNSQGNKCGVADGEGFLSIWQVNQTASNPKPYMSWQCHSKATSDFAFITSSSLVATSGHSNDNRNVCLWDTLISPGNSLIHGFTCHDHGATVLQYAPKQQLLISGGRKGHVCIFDIRQRQLIHTFQAHDSAIKALALDPYEEYFTTGSAEGNIKVWRLTGHGLIHSFKSEHAKQSIFRNIGAGVMQIDIIQGNRLFSCGADGTLKTRVLPNAFNIPNRILDIL

SEQ ID NO: 44052 - protein, 1616 aa, Homo sapiens
MPARTAPARVPTLAVPAISLPDDVRRRLKDLERDSLTEKECVKEKLNLLHEFLQTEIKNQLCDLETKLRKEELSEEGYLAKVKSLLNKDLSLENGAHAYNREVNGRLENGNQARSEARRVGMADANSPPKPLSKPRTPRRSKSDGEAKPEPSPSPRITRKSTRQTTITSHFAKGPAKRKPQEESERAKSDESIKEEDKDQDEKRRRVTSRERVARPLPAEEPERAKSGTRTEKEEERDEKEEKRLRSQTKEPTPKQKLKEEPDREARAGVQADEDEDGDEKDEKKHRSQPKDLAAKRRPEEKEPEKVNPQISDEKDEDEKEEKRRKTTPKEPTEKKMARAKTVMNSKTHPPKCIQCGQYLDDPDLKYGQHPPDAVDEPQMLTNEKLSIFDANESGFESYEALPQHKLTCFSVYCKHGHLCPIDTGLIEKNIELFFSGSAKPIYDDDPSLEGGVNGKNLGPINEWWITGFDGGEKALIGFSTSFAEYILMDPSPEYAPIFGLMQEKIYISKIVVEFLQSNSDSTYEDLINKIETTVPPSGLNLNRFTEDSLLRHAQFVVEQVESYDEAGDSDEQPIFLTPCMRDLIKLAGVTLGQRRAQARRQTIRHSTREKDRGPTKATTTKLVYQIFDTFFAEQIEKDDREDKENAFKRRRCGVCEVCQQPECGKCKACKDMVKFGGSGRSKQACQERRCPNMAMKEADDDEEVDDNIPEMPSPKKMHQGKKKKQNKNRISWVGEAVKTDGKKSYYKKVCIDAETLEVGDCVSVIPDDSSKPLYLARVTALWEDSSNGQMFHAHWFCAGTDTVLGATSDPLELFLVDECEDMQLSYIHSKVKVIYKAPSENWAMEGGMDPESLLEGDDGKTYFYQLWYDQDYARFESPPKTQPTEDNKFKFCVSCARLAEMRQKEIPRVLEQLEDLDSRVLYYSATKNGILYRVGDGVYLPPEAFTFNIKLSSPVKRPRKEPVDEDLYPEHYRKYSDYIKGSNLDAPEPYRIGRIKEIFCPKKSNGRPNETDIKIRVNKFYRPENTHKSTPASYHADINLLYWSDEEAVVDFKAVQGRCTVEYGEDLPECVQVYSMGGPNRFYFLEAYNAKSKSFEDPPNHARSPGNKGKGKGKGKGKPKSQACEPSEPEIEIKLPKLRTLDVFSGCGGLSEGFHQAGISDTLWAIEMWDPAAQAFRLNNPGSTVFTEDCNILLKLVMAGETTNSRGQRLPQKGDVEMLCGGPPCQGFSGMNRFNSRTYSKFKNSLVVSFLSYCDYYRPRFFLLENVRNFVSFKRSMVLKLTLRCLVRMGYQCTFGVLQAGQYGVAQTRRRAIILAAAPGEKLPLFPEPLHVFAPRACQLSVVVDDKKFVSNITRLSSGPFRTITVRDTMSDLPEVRNGASALEISYNGEPQSWFQRQLRGAQYQPILRDHICKDMSALVAARMRHIPLAPGSDWRDLPNIEVRLSDGTMARKLRYTHHDRKNGRSSSGALRGVCSCVEAGKACDPAARQFNTLIPWCLPHTGNRHNHWAGLYGRLEWDGFFSTTVTNPEPMGKQGRVLHPEQHRVVSVRECARSQGFPDTYRLFGNILDKHRQVGNAVPPPLAKAIGLEIKLCMLAKARESASAKIKEEEAAKD

SEQ ID NO: 44053 - protein, 1632 aa, Homo sapiens
MPARTAPARVPTLAVPAISLPDDVRRRLKDLERDSLTEKECVKEKLNLLHEFLQTEIKNQLCDLETKLRKEELSEEGYLAKVKSLLNKDLSLENGAHAYNREVNGRLENGNQARSEARRVGMADANSPPKPLSKPRTPRRSKSDGEAKRSRDPPASASQVTGIRAEPSPSPRITRKSTRQTTITSHFAKGPAKRKPQEESERAKSDESIKEEDKDQDEKRRRVTSRERVARPLPAEEPERAKSGTRTEKEEERDEKEEKRLRSQTKEPTPKQKLKEEPDREARAGVQADEDEDGDEKDEKKHRSQPKDLAAKRRPEEKEPEKVNPQISDEKDEDEKEEKRRKTTPKEPTEKKMARAKTVMNSKTHPPKCIQCGQYLDDPDLKYGQHPPDAVDEPQMLTNEKLSIFDANESGFESYEALPQHKLTCFSVYCKHGHLCPIDTGLIEKNIELFFSGSAKPIYDDDPSLEGGVNGKNLGPINEWWITGFDGGEKALIGFSTSFAEYILMDPSPEYAPIFGLMQEKIYISKIVVEFLQSNSDSTYEDLINKIETTVPPSGLNLNRFTEDSLLRHAQFVVEQVESYDEAGDSDEQPIFLTPCMRDLIKLAGVTLGQRRAQARRQTIRHSTREKDRGPTKATTTKLVYQIFDTFFAEQIEKDDREDKENAFKRRRCGVCEVCQQPECGKCKACKDMVKFGGSGRSKQACQERRCPNMAMKEADDDEEVDDNIPEMPSPKKMHQGKKKKQNKNRISWVGEAVKTDGKKSYYKKVCIDAETLEVGDCVSVIPDDSSKPLYLARVTALWEDSSNGQMFHAHWFCAGTDTVLGATSDPLELFLVDECEDMQLSYIHSKVKVIYKAPSENWAMEGGMDPESLLEGDDGKTYFYQLWYDQDYARFESPPKTQPTEDNKFKFCVSCARLAEMRQKEIPRVLEQLEDLDSRVLYYSATKNGILYRVGDGVYLPPEAFTFNIKLSSPVKRPRKEPVDEDLYPEHYRKYSDYIKGSNLDAPEPYRIGRIKEIFCPKKSNGRPNETDIKIRVNKFYRPENTHKSTPASYHADINLLYWSDEEAVVDFKAVQGRCTVEYGEDLPECVQVYSMGGPNRFYFLEAYNAKSKSFEDPPNHARSPGNKGKGKGKGKGKPKSQACEPSEPEIEIKLPKLRTLDVFSGCGGLSEGFHQAGISDTLWAIEMWDPAAQAFRLNNPGSTVFTEDCNILLKLVMAGETTNSRGQRLPQKGDVEMLCGGPPCQGFSGMNRFNSRTYSKFKNSLVVSFLSYCDYYRPRFFLLENVRNFVSFKRSMVLKLTLRCLVRMGYQCTFGVLQAGQYGVAQTRRRAIILAAAPGEKLPLFPEPLHVFAPRACQLSVVVDDKKFVSNITRLSSGPFRTITVRDTMSDLPEVRNGASALEISYNGEPQSWFQRQLRGAQYQPILRDHICKDMSALVAARMRHIPLAPGSDWRDLPNIEVRLSDGTMARKLRYTHHDRKNGRSSSGALRGVCSCVEAGKACDPAARQFNTLIPWCLPHTGNRHNHWAGLYGRLEWDGFFSTTVTNPEPMGKQGRVLHPEQHRVVSVRECARSQGFPDTYRLFGNILDKHRQVGNAVPPPLAKAIGLEIKLCMLAKARESASAKIKEEEAAKD

SEQ ID NO: 44054 - protein, 1619 aa, Homo sapiens
MPARTAPARVPTLAVPAISLPDDVRRRLKDLERDSLTEKECVKEKLNLLHEFLQTEIKNQLCDLETKLRKEELSEEGYLAKVKSLLNKDLSLENGAHAYNREVNGRLENGNQARSEARRVGMADANSPPKPLSKPRTPRRSKSDGEAKPEPSPSPRITRKSTRQTTITSHFAKGPAKRKPQEESERAKSDESIKEEDKDQDEKRRRVTSRERVARPLPAEEPERAKSGTRTEKEEERDEKEEKRLRSQTKEPTPKQKLKEEPDREARAGVQADEDEDGDEKDEKKHRSQPKDLAAKRRPEEKEPEKVNPQISDEKDEDEKEEKRRKTTPKEPTEKKMARAKTVMNSKTHPPKCIQCGQYLDDPDLKYGQHPPDAVDEPQMLTNEKLSIFDANESGFESYEALPQHKLTCFSVYCKHGHLCPIDTGLIEKNIELFFSGSAKPIYDDDPSLEGGVNGKNLGPINEWWITGFDGGEKALIGFSTSFAEYILMDPSPEYAPIFGLMQEKIYISKIVVEFLQSNSDSTYEDLINKIETTVPPSGLNLNRFTEDSLLRHAQFVVEQVESYDEAGDSDEQPIFLTPCMRDLIKLAGVTLGQRRAQARRQTIRHSTREKDRGPTKATTTKLVYQIFDTFFAEQIEKDDREDKENAFKRRRCGVCEVCQQPECGKCKACKDMVKFGGSGRSKQACQERRCPNMAMKEADDDEEVDDNIPEMPSPKKMHQGKKKKQNKNRISWVGEAVKTDGKKSYYKKVCIDAETLEVGDCVSVIPDDSSKPLYLARVTALWEDSSNGQMFHAHWFCAGTDTVLGATSDPLELFLVDECEDMQLSYIHSKVKVIYKAPSENWAMEGGMDPESLLEGDDGKTYFYQLWYDQDYARFESPPKTQPTEDNKFKFCVSCARLAEMRQKEIPRVLEQLEDLDSRVLYYSATKNGILYRVGDGVYLPPEAFTFNIKLSSPVKRPRKEPVDEDLYPEHYRKYSDYIKGSNLDAPEPYRIGRIKEIFCPKKSNGRPNETDIKIRVNKFYRPENTHKSTPASYHADINLLYWSDEEAVVDFKAVQGRCTVEYGEDLPECVQVYSMGGPNRFYFLEAYNAKSKSFEDPPNHARSPGNKGKGKGKGKGKPKSQACEPSEPEIEIKLPKLRTLDVFSGCGGLSEGFHQAGISDTLWAIEMWDPAAQAFRLNNPGSTVFTEDCNILLKLVMAGETTNSRGQRLPQKGDVEMLCGGPPCQGFSGMNRFNSRTYSKFKNSLVVSFLSYCDYYRPRFFLLENVRNFVSFKRSMVLKLTLRCLVRMGYQCTFGVLQAGQYGVAQTRRRAIILAAAPGEKLPLFPEPLHVFAPRACQLSVVVDDKKFVSNITRLSSGPFRTITVRDTMSDLPEVRNGASALEISYNGEPQSWFQRQLRGAQYQPILRDHICKDMSALVAARMRHIPLAPGSDWRDLPNIEVRLSDGTMARKLRYTHHDRKNGRSSSGALRGVCSCVEGGSSGKACDPAARQFNTLIPWCLPHTGNRHNHWAGLYGRLEWDGFFSTTVTNPEPMGKQGRVLHPEQHRVVSVRECARSQGFPDTYRLFGNILDKHRQVGNAVPPPLAKAIGLEIKLCMLAKARESASAKIKEEEAAKD

SEQ ID NO: 44055 - protein, 1484 aa, Homo sapiens
GSCHSPASASQVAGTTAEPSPSPRITRKSTRQTTITSHFAKGPAKRKPQEESERAKSDESIKEEDKDQDEKRRRVTSRERVARPLPAEEPERAKSGTRTEKEEERDEKEEKRLRSQTKEPTPKQKLKEEPDREARAGVQADEDEDGDEKDEKKHRSQPKDLAAKRRPEEKEPEKVNPQISDEKDEDEKEEKRRKTTPKEPTEKKMARAKTVMNSKTHPPKCIQCGQYLDDPDLKYGQHPPDAVDEPQMLTNEKLSIFDANESGFESYEALPQHKLTCFSVYCKHGHLCPIDTGLIEKNIELFFSGSAKPIYDDDPSLEGGVNGKNLGPINEWWITGFDGGEKALIGFSTSFAEYILMDPSPEYAPIFGLMQEKIYISKIVVEFLQSNSDSTYEDLINKIETTVPPSGLNLNRFTEDSLLRHAQFVVEQVESYDEAGDSDEQPIFLTPCMRDLIKLAGVTLGQRRAQARRQTIRHSTREKDRGPTKATTTKLVYQIFDTFFAEQIEKDDREDKENAFKRRRCGVCEVCQQPECGKCKACKDMVKFGGSGRSKQACQERRCPNMAMKEADDDEEVDDNIPEMPSPKKMHQGKKKKQNKNRISWVGEAVKTDGKKSYYKKVCIDAETLEVGDCVSVIPDDSSKPLYLARVTALWEDSSNGQMFHAHWFCAGTDTVLGATSDPLELFLVDECEDMQLSYIHSKVKVIYKAPSENWAMEGGMDPESLLEGDDGKTYFYQLWYDQDYARFESPPKTQPTEDNKFKFCVSCARLAEMRQKEIPRVLEQLEDLDSRVLYYSATKNGILYRVGDGVYLPPEAFTFNIKLSSPVKRPRKEPVDEDLYPEHYRKYSDYIKGSNLDAPEPYRIGRIKEIFCPKKSNGRPNETDIKIRVNKFYRPENTHKSTPASYHADINLLYWSDEEAVVDFKAVQGRCTVEYGEDLPECVQVYSMGGPNRFYFLEAYNAKSKSFEDPPNHARSPGNKGKGKGKGKGKPKSQACEPSEPEIEIKLPKLRTLDVFSGCGGLSEGFHQAGISDTLWAIEMWDPAAQAFRLNNPGSTVFTEDCNILLKLVMAGETTNSRGQRLPQKGDVEMLCGGPPCQGFSGMNRFNSRTYSKFKNSLVVSFLSYCDYYRPRFFLLENVRNFVSFKRSMVLKLTLRCLVRMGYQCTFGVLQAGQYGVAQTRRRAIILAAAPGEKLPLFPEPLHVFAPRACQLSVVVDDKKFVSNITRLSSGPFRTITVRDTMSDLPEVRNGASALEISYNGEPQSWFQRQLRGAQYQPILRDHICKDMSALVAARMRHIPLAPGSDWRDLPNIEVRLSDGTMARKLRYTHHDRKNGRSSSGALRGVCSCVEAGKACDPAARQFNTLIPWCLPHTGNRHNHWAGLYGRLEWDGFFSTTVTNPEPMGKQGRVLHPEQHRVVSVRECARSQGFPDTYRLFGNILDKHRQVGNAVPPPLAKAIGLEIKLCMLAKARESASAKIKEEEAAKD

SEQ ID NO: 44056 - protein, 912 aa, Homo sapiens
MPAMPSSGPGDTSSSAAEREEDRKDGEEQEEPRGKEERQEPSTTARKVGRPGRKRKHPPVESGDTPKDPAVISKSPSMAQDSGASELLPNGDLEKRSEPQPEEGSPAGGQKGGAPAEGEGAAETLPEASRAVENGCCTPKEGRGAPAEAGKEQKETNIESMKMEGSRGRLRGGLGWESSLRQRPMPRLTFQAGDPYYISKRKRDEWLARWKREAEKKAKVIAGMNAVEENQGPGESQKVEEASPPAVQQPTDPASPTVATTPEPVGSDAGDKNATKAGDDEPEYEDGRGFGIGELVWGKLRGFSWWPGRIVSWWMTGRSRAAEGTRWVMWFGDGKFSVVCVEKLMPLSSFCSAFHQATYNKQPMYRKAIYEVLQVASSRAGKLFPVCHDSDESDTAKAVEVQNKPMIEWALGGFQPSGPKGLEPPEEEKNPYKEVYTDMWVEPEAAAYAPPPPAKKPRKSTAEKPKVKEIIDERTRERLVYEVRQKCRNIEDICISCGSLNVTLEHPLFVGGMCQNCKNCFLECAYQYDDDGYQSYCTICCGGREVLMCGNNNCCRCFCVECVDLLVGPGAAQAAIKEDPWNCYMCGHKGTYGLLRRREDWPSRLQMFFANNHDQEFDPPKVYPPVPAEKRKPIRVLSLFDGIATGLLVLKDLGIQVDRYIASEVCEDSITVGMVRHQGKIMYVGDVRSVTQKHIQEWGPFDLVIGGSPCNDLSIVNPARKGLYEGTGRLFFEFYRLLHDARPKEGDDRPFFWLFENVVAMGVSDKRDISRFLESNPVMIDAKEVSAAHRARYFWGNLPGMNRPLASTVNDKLELQECLEHGRIAKFSKVRTITTRSNSIKQGKDQHFPVFMNEKEDILWCTEMERVFGFPVHYTDVSNMSRLARQRLLGRSWSVPVIRHLFAPLKEYFACV

SEQ ID NO: 44057 - protein, 912 aa, Homo sapiens; identical to SEQ ID NO: 44056

SEQ ID NO: 44058 - protein, 723 aa, Homo sapiens
MGILERVVRRNGRVDRSLKDECDTAEKKAKVIAGMNAVEENQGPGESQKVEEASPPAVQQPTDPASPTVATTPEPVGSDAGDKNATKAGDDEPEYEDGRGFGIGELVWGKLRGFSWWPGRIVSWWMTGRSRAAEGTRWVMWFGDGKFSVVCVEKLMPLSSFCSAFHQATYNKQPMYRKAIYEVLQVASSRAGKLFPVCHDSDESDTAKAVEVQNKPMIEWALGGFQPSGPKGLEPPEEEKNPYKEVYTDMWVEPEAAAYAPPPPAKKPRKSTAEKPKVKEIIDERTRERLVYEVRQKCRNIEDICISCGSLNVTLEHPLFVGGMCQNCKNCFLECAYQYDDDGYQSYCTICCGGREVLMCGNNNCCRCFCVECVDLLVGPGAAQAAIKEDPWNCYMCGHKGTYGLLRRREDWPSRLQMFFANNHDQEFDPPKVYPPVPAEKRKPIRVLSLFDGIATGLLVLKDLGIQVDRYIASEVCEDSITVGMVRHQGKIMYVGDVRSVTQKHIQEWGPFDLVIGGSPCNDLSIVNPARKGLYEGTGRLFFEFYRLLHDARPKEGDDRPFFWLFENVVAMGVSDKRDISRFLESNPVMIDAKEVSAAHRARYFWGNLPGMNRPLASTVNDKLELQECLEHGRIAKFSKVRTITTRSNSIKQGKDQHFPVFMNEKEDILWCTEMERVFGFPVHYTDVSNMSRLARQRLLGRSWSVPVIRHLFAPLKEYFACV

SEQ ID NO: 44059 - protein, 689 aa, Homo sapiens
MNAVEENQGPGESQKVEEASPPAVQQPTDPASPTVATTPEPVGSDAGDKNATKAGDDEPEYEDGRGFGIGELVWGKLRGFSWWPGRIVSWWMTGRSRAAEGTRWVMWFGDGKFSVVCVEKLMPLSSFCSAFHQATYNKQPMYRKAIYEVLQVASSRAGKLFPVCHDSDESDTAKAVEVQNKPMIEWALGGFQPSGPKGLEPPEEEKNPYKEVYTDMWVEPEAAAYAPPPPAKKPRKSTAEKPKVKEIIDERTRERLVYEVRQKCRNIEDICISCGSLNVTLEHPLFVGGMCQNCKNCFLECAYQYDDDGYQSYCTICCGGREVLMCGNNNCCRCFCVECVDLLVGPGAAQAAIKEDPWNCYMCGHKGTYGLLRRREDWPSRLQMFFANNHDQEFDPPKVYPPVPAEKRKPIRVLSLFDGIATGLLVLKDLGIQVDRYIASEVCEDSITVGMVRHQGKIMYVGDVRSVTQKHIQEWGPFDLVIGGSPCNDLSIVNPARKGLYEGTGRLFFEFYRLLHDARPKEGDDRPFFWLFENVVAMGVSDKRDISRFLESNPVMIDAKEVSAAHRARYFWGNLPGMNRPLASTVNDKLELQECLEHGRIAKFSKVRTITTRSNSIKQGKDQHFPVFMNEKEDILWCTEMERVFGFPVHYTDVSNMSRLARQRLLGRSWSVPVIRHLFAPLKEYFACV

SEQ ID NO: 44060 - protein, 166 aa, Homo sapiens
MPAMPSSGPGDTSSSAAEREEDRKDGEEQEEPRGKEERQEPSTTARKVGRPGRKRKHPPVESGDTPKDPAVISKSPSMAQDSGASELLPNGDLEKRSEPQPEEGSPAGGQKGGAPAEGEGAAETLPEASRAVENGCCTPKEGRGAPAEAGESSAPGAASSGPTSIP

SEQ ID NO: 44061 - protein, 845 aa, Homo sapiens
MEPSPEPPSLESMKGDTRHLNGEEDAGGREDSILVNGACSDQSSDSPPILEAIRTPEIRGRRSSSRLSKREVSSLLSYTQDLTGDGDGEDGDGSDTPVMPKLFRETRTRSESPAVRTRNNNSVSSRERHRPSPRSTRGRQGRNHVDESPVEFPATRSLRRRATASAGTPWPSPPSSYLTIDLTDDTEDTHGTPQSSSTPYARLAQDSQQGGMESPQVEADSGDGDSSEYQDGKEFGIGDLVWGKIKGFSWWPAMVVSWKATSKRQAMSGMRWVQWFGDGKFSEVSADKLVALGLFSQHFNLATFNKLVSYRKAMYHALEKARVRAGKTFPSSPGDSLEDQLKPMLEWAHGGFKPTGIEGLKPNNTQPENKTRRRTADDSATSDYCPAPKRLKTNCYNNGKDRGDEDQSREQMASDVANNKSSLEDGCLSCGRKNPVSFHPLFEGGLCQTCRDRFLELFYMYDDDGYQSYCTVCCEGRELLLCSNTSCCRCFCVECLEVLVGTGTAAEAKLQEPWSCYMCLPQRCHGVLRRRKDWNVRLQAFFTSDTGLEYEAPKLYPAIPAARRRPIRVLSLFDGIATGYLVLKELGIKVGKYVASEVCEESIAVGTVKHEGNIKYVNDVRNITKKNIEEWGPFDLVIGGSPCNDLSNVNPARKGLYEGTGRLFFEFYHLLNYSRPKEGDDRPFFWMFENVVAMKVGDKRDISRFLECNPVMIDAIKVSAAHRARYFWGNLPGMNRPVIASKNDKLELQDCLEYNRIAKLKKVQTITTKSNSIKQGKNQLFPVVMNGKEDVLWCTELERIFGFPVHYTDVSNMGRGARQKLLGRSWSVPVIRHLFAPLKDYFACE

SEQ ID NO: 44062 - protein, 853 aa, Homo sapiens
MKGDTRHLNGEEDAGGREDSILVNGACSDQSSDSPPILEAIRTPEIRGRRSSSRLSKREVSSLLSYTQDLTGDGDGEDGDGSDTPVMPKLFRETRTRSESPAVRTRNNNSVSSRERHRPSPRSTRGRQGRNHVDESPVEFPATRSLRRRATASAGTPWPSPPSSYLTIDLTDDTEDTHGTPQSSSTPYARLAQDSQQGGMESPQVEADSGDGDSSEYQDGKEFGIGDLVWGKIKGFSWWPAMVVSWKATSKRQAMSGMRWVQWFGDGKFSEVSADKLVALGLFSQHFNLATFNKLVSYRKAMYHALEKARVRAGKTFPSSPGDSLEDQLKPMLEWAHGGFKPTGIEGLKPNNTQPVVNKSKVRRAGSRKLESRKYENKTRRRTADDSATSDYCPAPKRLKTNCYNNGKDRGDEDQSREQMASDVANNKSSLEDGCLSCGRKNPVSFHPLFEGGLCQTCRDRFLELFYMYDDDGYQSYCTVCCEGRELLLCSNTSCCRCFCVECLEVLVGTGTAAEAKLQEPWSCYMCLPQRCHGVLRRRKDWNVRLQAFFTSDTGLEYEAPKLYPAIPAARRRPIRVLSLFDGIATGYLVLKELGIKVGKYVASEVCEESIAVGTVKHEGNIKYVNDVRNITKKNIEEWGPFDLVIGGSPCNDLSNVNPARKGLYEGTGRLFFEFYHLLNYSRPKEGDDRPFFWMFENVVAMKVGDKRDISRFLECNPVMIDAIKVSAAHRARYFWGNLPGMNRPVIASKNDKLELQDCLEYNRIAKLKKVQTITTKSNSIKQGKNQLFPVVMNGKEDVLWCTELERIFGFPVHYTDVSNMGRGARQKLLGRSWSVPVIRHLFAPLKDYFACE

SEQ ID NO: 44063 - protein, 792 aa, Homo sapiens
MKGDTRHLNGEEDAGGREDSILVNGACSDQSSDSPPILEAIRTPEIRGRRSSSRLSKREVSSLLSYTQDLTGDGDGEDGDGSDTPVMPKLFRETRTRSESPAVRTRNNNSVSSRERHRPSPRSTRGRQGRNHVDESPVEFPATRSLRRRATASAGTPWPSPPSSYLTIDLTDDTEDTHGTPQSSSTPYARLAQDSQQGGMESPQVEADSGDGDSSEYQDGKEFGIGDLVWGKIKGFSWWPAMVVSWKATSKRQAMSGMRWVQWFGDGKFSEVSADKLVALGLFSQHFNLATFNKLVSYRKAMYHALEKARVRAGKTFPSSPGDSLEDQLKPMLEWAHGGFKPTGIEGLKPNNTQPENKTRRRTADDSATSDYCPAPKRLKTNCYNNGKDRGDEDQSREQMASDVANNKSSLEDGCLSCGRKNPVSFHPLFEGGLCQTCRDRFLELFYMYDDDGYQSYCTVCCEGRELLLCSNTSCCRCFCVECLEVLVGTGTAAEAKLQEPWSCYMCLPQRCHGVLRRRKDWNVRLQAFFTSDTGLEYEAPKLYPAIPAARRRPIRVLSLFDGIATGYLVLKELGIKVGKYVASEVCEESIAVGTVKHEGNIKYVNDVRNITKKNIEEWGPFDLVIGGSPCNDLSNVNPARKGLYEGTGRLFFEFYHLLNYSRPKEGDDRPFFWMFENVVAMKVGDKRDISRFLECNPVMIDAIKVSAAHRARYFWGNLPGMNRPVIASKNDKLELQDCLEYNRIAKDLWLSCALHRRVQHGPWCPPEAAGKVLERACHPTPLRPSEGLLCM

SEQ ID NO: 44064 - protein, 770 aa, Homo sapiens
MKGDTRHLNGEEDAGGREDSILVNGACSDQSSDSPPILEAIRTPEIRGRRSSSRLSKREVSSLLSYTQDLTGDGDGEDGDGSDTPVMPKLFRETRTRSESPAVRTRNNNSVSSRERHRPSPRSTRGRQGRNHVDESPVEFPATRSLRRRATASAGTPWPSPPSSYLTIDLTDDTEDTHGTPQSSSTPYARLAQDSQQGGMESPQVEADSGDGDSSEYQDGKEFGIGDLVWGKIKGFSWWPAMVVSWKATSKRQAMSGMRWVQWFGDGKFSEVSADKLVALGLFSQHFNLATFNKLVSYRKAMYHALEKARVRAGKTFPSSPGDSLEDQLKPMLEWAHGGFKPTGIEGLKPNNTQPENKTRRRTADDSATSDYCPAPKRLKTNCYNNGKDRGDEDQSREQMASDVANNKSSLEDGCLSCGRKNPVSFHPLFEGGLCQTCRDRFLELFYMYDDDGYQSYCTVCCEGRELLLCSNTSCCRCFCVECLEVLVGTGTAAEAKLQEPWSCYMCLPQRCHGVLRRRKDWNVRLQAFFTSDTGLEYEAPKLYPAIPAARRRPIRVLSLFDGIATGYLVLKELGIKVGKYVASEVCEESIAVGTVKHEGNIKYVNDVRNITKKNIEEWGPFDLVIGGSPCNDLSNVNPARKGLYEGTGRLFFEFYHLLNYSRPKEGDDRPFFWMFENVVAMKVGDKRDISRFLECNPVMIDAIKVSAAHRARYFWGNLPGMNRIFGFPVHYTDVSNMGRGARQKLLGRSWSVPVIRHLFAPLKDYFACE

SEQ ID NO: 44065 - protein, 833 aa, Homo sapiens
MKGDTRHLNGEEDAGGREDSILVNGACSDQSSDSPPILEAIRTPEIRGRRSSSRLSKREVSSLLSYTQDLTGDGDGEDGDGSDTPVMPKLFRETRTRSESPAVRTRNNNSVSSRERHRPSPRSTRGRQGRNHVDESPVEFPATRSLRRRATASAGTPWPSPPSSYLTIDLTDDTEDTHGTPQSSSTPYARLAQDSQQGGMESPQVEADSGDGDSSEYQDGKEFGIGDLVWGKIKGFSWWPAMVVSWKATSKRQAMSGMRWVQWFGDGKFSEVSADKLVALGLFSQHFNLATFNKLVSYRKAMYHALEKARVRAGKTFPSSPGDSLEDQLKPMLEWAHGGFKPTGIEGLKPNNTQPENKTRRRTADDSATSDYCPAPKRLKTNCYNNGKDRGDEDQSREQMASDVANNKSSLEDGCLSCGRKNPVSFHPLFEGGLCQTCRDRFLELFYMYDDDGYQSYCTVCCEGRELLLCSNTSCCRCFCVECLEVLVGTGTAAEAKLQEPWSCYMCLPQRCHGVLRRRKDWNVRLQAFFTSDTGLEYEAPKLYPAIPAARRRPIRVLSLFDGIATGYLVLKELGIKVGKYVASEVCEESIAVGTVKHEGNIKYVNDVRNITKKNIEEWGPFDLVIGGSPCNDLSNVNPARKGLYEGTGRLFFEFYHLLNYSRPKEGDDRPFFWMFENVVAMKVGDKRDISRFLECNPVMIDAIKVSAAHRARYFWGNLPGMNRPVIASKNDKLELQDCLEYNRIAKLKKVQTITTKSNSIKQGKNQLFPVVMNGKEDVLWCTELERIFGFPVHYTDVSNMGRGARQKLLGRSWSVPVIRHLFAPLKDYFACE

SEQ ID NO: 44066 - protein, 332 aa, Homo sapiens
MKGDTRHLNGEEDAGGREDSILVNGACSDQSSDSPPILEAIRTPEIRGRRSSSRLSKREVSSLLSYTQDLTGDGDGEDGDGSDTPVMPKLFRETRTRSESPASLRRRATASAGTPWPSPPSSYLTIDLTDDTEDTHGTPQSSSTPYARLAQDSQQGGMESPQVEADSGDGDSSEYQDGKEFGIGDLVWGKIKGFSWWPAMVVSWKATSKRQAMSGMRWVQWFGDGKFSEVSADKLVALGLFSQHFNLATFNKLVSYRKAMYHALERTRLEDAQLTTQPPLTTAPHPSASRQIAITTAKTEGMKIRAENKWLQMLPTTRAAWKEKPRVLPPSL

SEQ ID NO: 44067 - protein, 728 aa, Homo sapiens
MKGDTRHLNGEEDAGGREDSILVNGACSDQSSDSPPILEAIRTPEIRGRRSSSRLSKREVSSLLSYTQDLTGDGDGEDGDGSDTPVMPKLFRETRTRSESPASLRRRATASAGTPWPSPPSSYLTIDLTDDTEDTHGTPQSSSTPYARLAQDSQQGGMESPQVEADSGDGDSSEYQDGKEFGIGDLVWGKIKGFSWWPAMVVSWKATSKRQAMSGMRWVQWFGDGKFSEVSADKLVALGLFSQHFNLATFNKLVSYRKAMYHALEKARVRAGKTFPSSPGDSLEDQLKPMLEWAHGGFKPTGIEGLKPNNTQPENKTRRRTADDSATSDYCPAPKRLKTNCYNNGKDRGDEDQSREQMASDVANNKSSLEDGCLSCGRKNPVSFHPLFEGGLCQTCRDRFLELFYMYDDDGYQSYCTVCCEGRELLLCSNTSCCRCFCVECLEVLVGTGTAAEAKLQEPWSCYMCLPQRCHGVLRRRKDWNVRLQAFFTSDTGLEYEAPKLYPAIPAARRRPIRVLSLFDGIATGYLVLKELGIKVGKYVASEVCEESIAVGTVKHEGNIKYVNDVRNITKKNIEEWGPFDLVIGGSPCNDLSNVNPARKGLYEGTGRLFFEFYHLLNYSRPKEGDDRPFFWMFENVVAMKVGDKRDISRFLECNPVMIDAIKVSAAHRARYFWGNLPGMNRIFGFPVHYTDVSNMGRGARQKLLGRSWSVPVIRHLFAPLKDYFACE

SEQ ID NO: 44068 - protein, 694 aa, Homo sapiens
MKGDTRHLNGEEDAGGREDSILVNGACSDQSSDSPPILEAIRTPEIRGRRSSSRLSKREVSSLLSYTQSLRRRATASAGTPWPSPPSSYLTIDLTDDTEDTHGTPQSSSTPYARLAQDSQQGGMESPQVEADSGDGDSSEYQDGKEFGIGDLVWGKIKGFSWWPAMVVSWKATSKRQAMSGMRWVQWFGDGKFSEVSADKLVALGLFSQHFNLATFNKLVSYRKAMYHALEKARVRAGKTFPSSPGDSLEDQLKPMLEWAHGGFKPTGIEGLKPNNTQPENKTRRRTADDSATSDYCPAPKRLKTNCYNNGKDRGDEDQSREQMASDVANNKSSLEDGCLSCGRKNPVSFHPLFEGGLCQTCRDRFLELFYMYDDDGYQSYCTVCCEGRELLLCSNTSCCRCFCVECLEVLVGTGTAAEAKLQEPWSCYMCLPQRCHGVLRRRKDWNVRLQAFFTSDTGLEYEAPKLYPAIPAARRRPIRVLSLFDGIATGYLVLKELGIKVGKYVASEVCEESIAVGTVKHEGNIKYVNDVRNITKKNIEEWGPFDLVIGGSPCNDLSNVNPARKGLYEGTGRLFFEFYHLLNYSRPKEGDDRPFFWMFENVVAMKVGDKRDISRFLECNPVMIDAIKVSAAHRARYFWGNLPGMNRIFGFPVHYTDVSNMGRGARQKLLGRSWSVPVIRHLFAPLKDYFACE

SEQ ID NO: 44069 - protein, 566 aa, Homo sapiens
GRSPRGRSERPPTDGTGSLAVGRAGGNAARPAALGLSGPSKPSSAIGAGDSRAQRPARPPAGLPPASPDPRLRRPAAPQPALRQESMKGDTRHLNGEEDAGGREDSILVNGACSDQSSDSPPILEAIRTPEIRGRRSSSRLSKREVSSLLSYTQDLTGDGDGEDGDGSDTPVMPKLFRETRTRSESPAVRTRNNNSVSSRERHRPSPRSTRGRQGRNHVDESPVEFPATRSLRRRATASAGTPWPSPPSSYLTIDLTDDTEDTHGTPQSSSTPYARLAQDSQQGGMESPQVEADSGDGDSSEYQDGKEFGIGDLVWGKIKGFSWWPAMVVSWKATSKRQAMSGMRWVQWFGDGKFSEVSADKLVALGLFSQHFNLATFNKLVSYRKAMYHALEKARVRAGKTFPSSPGDSLEDQLKPMLEWAHGGFKPTGIEGLKPNNTQPENKTRRRTADDSATSDYCPAPKRLKTNCYNNGKDRGDEDQSREQMASDVANNKSSLEDGCLSCGRKNPVSFHPLFEGGLCQTCRHLCGDSVKPTHPSCLALCLWGRMGDSCHRGQWHAGHSQLSF

SEQ ID NO: 44070 - protein, 387 aa, Homo sapiens
MAAIPALDPEAEPSMDVILVGSSELSSSVSPGTGRDLIAYEVKANQRNIEDICICCGSLQVHTQHPLFEGGICAPCKDKFLDALFLYDDDGYQSYCSICCSGETLLICGNPDCTRCYCFECVDSLVGPGTSGKVHAMSNWVCYLCLPSSRSGLLQRRRKWRSQLKAFYDRESENPLEMFETVPVWRRQPVRVLSLFEDIKKELTSLGFLESGSDPGQLKHVVDVTDTVRKDVEEWGPFDLVYGATPPLGHTCDRPPSWYLFQFHRLLQYARPKPGSPRPFFWMFVDNLVLNKEDLDVASRFLEMEPVTIPDVHGGSLQNAVRVWSNIPAIRSSRHWALVSEEELSLLAQNKQSSKLAAKWPTKLVKNCFLPLREYFKYFSTELTSSL

SEQ ID NO: 44071 - protein, 386 aa, Homo sapiens
MAAIPALDPEAEPSMDVILVGSSELSSSVSPGTGRDLIAYEVKANQRNIEDICICCGSLQVHTQHPLFEGGICAPCKDKFLDALFLYDDDGYQSYCSICCSGETLLICGNPDCTRCYCFECVDSLVGPGTSGKVHAMSNWVCYLCLPSSRSGLLQRRRKWRSQLKAFYDRESENPLEMFETVPVWRRQPVRVLSLFEDIKKELTSLGFLESGSDPGQLKHVVDVTDTVRKDVEEWGPFDLVYGATPPLGHTCDRPPSWYLFQFHRLLQYARPKPGSPRPFFWMFVDNLVLNKEDLDVASRFLEMEPVTIPDVHGGSLQNAVRVWSNIPAIRSRHWALVSEEELSLLAQNKQSSKLAAKWPTKLVKNCFLPLREYFKYFSTELTSSL

SEQ ID NO: 44072 - protein, 1040 aa, Homo sapiens
MLEDISEEDIWEYKSKRKPKRVDPNNGSKNILKSVEKATDGKYQSKRSRNRKRAAEAKEVKDHEVPLGNAGCQTSVASSQNSSCGDGIQQTQDKETTPGKLCRTQKSQHVSPKIRPVYDGYCPNCQMPFSSLIGQTPRWHVFECLDSPPRSETECPDGLLCTSTIPFHYKRYTHFLLAQSRAGDHPFSSPSPASGGSFSETKSGVLCSLEERWSSYQNQTDNSVSNDPLLMTQYFKKSPSLTEASEKISTHIQTSQQALQFTDFVENDKLVGVALRLANNSEHINLPLPENDFSDCEISYSPLQSDEDTHDIDEKPDDSQEQLFFTESSKDGSLEEDDDSCGFFKKRHGPLLKDQDESCPKVNSFLTRDKYDEGLYRFNSLNDLSQPISQNNESTLPYDLACTGGDFVLFPPALAGKLAASVHQATKAKPDEPEFHSAQSNKQKQVIEESSVYNQVSLPLVKSLMLKPFESQVEGYLSSQPTQNTIRKLSSENLNAKNNTNSACFCRKALEGVPVGKATILNTENLSSTPAPKYLKILPSGLKYNARHPSTKVMKQMDIGVYFGLPPKRKEEKLLGESALEGINLNPVPSPNQKRSSQCKRKAEKSLSDLEFDASTLHESQLSVELSSERSQRQKKRCRKSNSLQEGACQKRSDHLINTESEAVNLSKVKVFTKSAHGGLQRGNKKIPESSNVGGSRKKTCPFYKKIPGTGFTVDAFQYGVVEGCTAYFLTHFHSDHYAGLSKHFTFPVYCSEITGNLLKNKLHVQEQYIHPLPLDTECIVNGVKVVLLDANHCPGAVMILFYLPNGTVILHTGDFRADPSMERSLLADQKVHMLYLDTTYCSPEYTFPSQQEVIRFAINTAFEAVTLNPHALVVCGTYSIGKEKVFLAIADVLGSKVGMSQEKYKTLQCLNIPEINSLITTDMCSSLVHLLPMMQINFKGLQSHLKKCGGKYNQILAFRPTGWTHSNKFTRIADVIPQTKGNISIYGIPYSEHSSYLEMKRFVQWLKPQKIIPTVNVGTWKSRSTMEKYFREWKLEAGY

SEQ ID NO: 44073 - protein, 1040 aa, Homo sapiens; identical to SEQ ID NO: 44072

SEQ ID NO: 44074 - protein, 270 aa, Homo sapiens
MLQKPKSVKLRALRSPRKFGVAGRSCQEVLRKGCLRFQLPERGSRLCLYEDGTELTEDYFPSVPDNAELVLLTLGQAWQGYVSDIRRFLSAFHEPQVGLIQAAQQLLCDEQAPQRQRLLADLLHNVSQNIAAETRAEDPPWFEGLESRFQSKSGYLRYSCESRIRSYLREVSSYPSTVGAEAQEEFLRVLGSMCQRLRSMQYNGSYFDRGAKGGSRLCTPEGWFSCQGPFDMDSCLSRHSINPYSNRESRILFSTWNLDHIDGVLLCGPG

SEQ ID NO: 44075 - protein, 274 aa, Homo sapiens
MCLLLDRHLLFVPLVADVSDIRRFLSAFHEPQVGLIQAAQQLLCDEQAPQRQRLLADLLHNVSQNIAAETRAEDPPWFEGLESRFQSKSGYLRYSCESRIRSYLREVSSYPSTVGAEAQEEFLRVLGSMCQRLRSMQYNGSYFDRGAKGGSRLCTPEGWFSCQGPFDMDSCLSRHSINPYSNRESRILFSTWNLDHIIEKKRTIIPTLVEAIKEQDGREVDWEYFYGLLFTSENLKLVHIVCHKKTTHKLNCDPSRIYKPQTRLKRKQPVRKRQ

SEQ ID NO: 44076 - protein, 103 aa, Homo sapiens
MLQKPKSVKLRALRSPRKFGVAGRSCQEVLRKGCLRFQLPERGSRLCLYEDGTELTEDYFPSVPDNAELVLLTLGQAWQGWFRHVSQDSLTLLGSSCPPALVS

SEQ ID NO: 44077 - protein, 274 aa, Homo sapiens; identical to SEQ ID NO: 44075

SEQ ID NO: 44078 - protein, 338 aa, Homo sapiens
MLQKPKSVKLRALRSPRKFGVAGRSCQEVLRKGCLRFQLPERGSRLCLYEDGTELTEDYFPSVPDNAELVLLTLGQAWQGYVSDIRRFLSAFHEPQVGLIQAAQQLLCDEQAPQRQRLLADLLHNVSQNIAAETRAEDPPWFEGLESRFQSKSGYLRYSCESRIRSYLREVSSYPSTVGAEAQEEFLRVLGSMCQRLRSMQYNGSYFDRGAKGGSRLCTPEGWFSCQGPFDMDSCLSRHSINPYSNRESRILFSTWNLDHIIEKKRTIIPTLVEAIKEQDGREVDWEYFYGLLFTSENLKLVHIVCHKKTTHKLNCDPSRIYKPQTRLKRKQPVRKRQ

SEQ ID NO: 44079 - protein, 116 aa, Homo sapiens
MLQKPKSVKLRALRSPRKFGVAGRSCQEVLRKGCLRFQLPERGSRLCLYEDGTELTEDYFPSVPDNAELVLLTLGQAWQGSVGVRARTKTRDTSSLSPGDCQALGNGGRCGQRLFL

SEQ ID NO: 44080 - protein, 86 aa, Homo sapiens [sequence omitted]

SEQ ID NO: 44081 - protein, 82 aa, Homo sapiens
MLQKPKSVKLRALRSPRKFGVAGRSCQEVLRKGCLRFQLPERGSRLCLYEDGTELTEDYFPSVPDNAELVLLTLGQAWQGCE

SEQ ID NO: 44082 - protein, 270 aa, Homo sapiens; identical to SEQ ID NO: 44074

SEQ ID NO: 44083 - protein, 1060 aa, Homo sapiens
MEQLNELELLMEKSFWEEAELPAELFQKKVVASFPRTVLSTGMDNRYLVLAVNTVQNKEGNCEKRLVITASQSLENKELCILRNDWCSVPVEPGDIIHLEGDCTSDTWIIDKDFGYLILYPDMLISGTSIASSIRCMRRAVLSETFRSSDPATRQMLIGTVLHEVFQKAINNSFAPEKLQELAFQTIQEIRHLKEMYRLNLSQDEIKQEVEDYLPSFCKWAGDFMHKNTSTDFPQMQLSLPSDNSKDNSTCNIEVVKPMDIEESIWSPRFGLKGKIDVTVGVKIHRGYKTKYKIMPLELKTGKESNSIEHRSQVVLYTLLSQERRADPEAGLLLYLKTGQMYPVPANHLDKRELLKLRNQMAFSLFHRISKSATRQKTQLASLPQIIEEEKTCKYCSQIGNCALYSRAVEQQMDCSSVPIVMLPKIEEETQHLKQTHLEYFSLWCLMLTLESQSKDNKKNHQNIWLMPASEMEKSGSCIGNLIRMEHVKIVCDGQYLHNFQCKHGAIPVTNLMAGDRVIVSGEERSLFALSRGYVKEINMTTVTCLLDRNLSVLPESTLFRLDQEEKNCDIDTPLGNLSKLMENTFVSKKLRDLIIDFREPQFISYLSSVLPHDAKDTVACILKGLNKPQRQAMKKVLLSKDYTLIVGMPGTGKTTTICTLVRILYACGFSVLLTSYTHSAVDNILLKLAKFKIGFLRLGQIQKVHPAIQQFTEQEICRSKSIKSLALLEELYNSQLIVATTCMGINHPIFSRKIFDFCIVDEASQISQPICLGPLFFSRRFVLVGDHQQLPPLVLNREARALGMSESLFKRLEQNKSAVVQLTVQYRMNSKIMSLSNKLTYEGKLECGSDKVANAVINLRHFKDVKLELEFYADYSDNPWLMGVFEPNNPVCFLNTDKVPAPEQVEKGGVSNVTEAKLIVFLTSIFVKAGCSPSDIGIIAPYRQQLKIINDLLARSIGMVEVNTVDKYQGRDKSIVLVSFVRSNKDGTVGELLKDWRRLNVAITRAKHKLILLGCVPSLNCYPPLEKLLNHLNSEKLIIDLPSREHESLCHILGDFQRE

SEQ ID NO: 44084 - protein, 822 aa, Homo sapiens
MEQLNELELLMEKSFWEEAELPAELFQKKVVASFPRTVLSTGMDNRYLVLAVNTVQNKEGNCEKRLVITASQSLENKELCILRNDWCSVPVEPGDIIHLEGDCTSDTWIIDKDFGYLILYPDMLISGTSIASSIRCMRRAVLSETFRSSDPATRQMLIGTVLHEVFQKAINNSFAPEKLQELAFQTIQEIRHLKEMYRLNLSQDEIKQEVEDYLPSFCKWAGDFMHKNTSTDFPQMQLSLPSDNSKDNSTCNIEVVKPMDIEESIWSPRFGLKGKIDVTVGVKIHRGYKTKYKIMPLELKTGKESNSIEHRSQVVLYTLLSQERRADPEAGLLLYLKTGQMYPVPANHLDKRELLKLRNQMAFSLFHRISKSATRQKTQLASLPQIIEEEKTCKYCSQIGNCALYSRAVEQQMDCSSVPIVMLPKIEEETQHLKQTHLEYFSLWCLMLTLESQSKDNKKNHQNIWLMPASEMEKSGSCIGNLIRMEHVKIVCDGQYLHNFQCKHGAIPVTNLMAGDRVIVSGEERSLFALSRGYVKEINMTTVTCLLDRNLSVLPESTLFRLDQEEKNCDIDTPLGNLSKLMENTFVSKKLRDLIIDFREPQFISYLSSVLPHDAKDTVACILKGLNKPQRQAMKKVLLSKDYTLIVGMPGTGKTTTICTLVPAPEQVEKGGVSNVTEAKLIVFLTSIFVKAGCSPSDIGIIAPYRQQLKIINDLLARSIGMVEVNTVDKYQGRDKSIVLVSFVRSNKDGTVGELLKDWRRLNVAITRAKHKLILLGCVPSLNCYPPLEKLLNHLNSEKLIIDLPSREHESLCHILGDFQRE

SEQ ID NO: 44085 - protein, 1146 aa, Homo sapiens
MKTPCIPSPKQGSKGRGQSPAAQVRGPTWNAPAREGRPGAGHLGHLRVGACARGAQARAFFPFLSFLCYPRFRCLFCLQFAIPASRMEQLNELELLMEKSFWEEAELPAELFQKKVVASFPRTVLSTGMDNRYLVLAVNTVQNKEGNCEKRLVITASQSLENKELCILRNDWCSVPVEPGDIIHLEGDCTSDTWIIDKDFGYLILYPDMLISGTSIASSIRCMRRAVLSETFRSSDPATRQMLIGTVLHEVFQKAINNSFAPEKLQELAFQTIQEIRHLKEMYRLNLSQDEIKQEVEDYLPSFCKWAGDFMHKNTSTDFPQMQLSLPSDNSKDNSTCNIEVVKPMDIEESIWSPRFGLKGKIDVTVGVKIHRGYKTKYKIMPLELKTGKESNSIEHRSQVVLYTLLSQERRADPEAGLLLYLKTGQMYPVPANHLDKRELLKLRNQMAFSLFHRISKSATRQKTQLASLPQIIEEEKTCKYCSQIGNCALYSRAVEQQMDCSSVPIVMLPKIEEETQHLKQTHLEYFSLWCLMLTLESQSKDNKKNHQNIWLMPASEMEKSGSCIGNLIRMEHVKIVCDGQYLHNFQCKHGAIPVTNLMAGDRVIVSGEERSLFALSRGYVKEINMTTVTCLLDRNLSVLPESTLFRLDQEEKNCDIDTPLGNLSKLMENTFVSKKLRDLIIDFREPQFISYLSSVLPHDAKDTVACILKGLNKPQRQAMKKVLLSKDYTLIVGMPGTGKTTTICTLVRILYACGFSVLLTSYTHSAVDNILLKLAKFKIGFLRLGQIQKVHPAIQQFTEQEICRSKSIKSLALLEELYNSQLIVATTCMGINHPIFSRKIFDFCIVDEASQISQPICLGPLFFSRRFVLVGDHQQLPPLVLNREARALGMSESLFKRLEQNKSAVVQLTVQYRMNSKIMSLSNKLTYEGKLECGSDKVANAVINLRHFKDVKLELEFYADYSDNPWLMGVFEPNNPVCFLNTDKVPAPEQVEKGGVSNVTEAKLIVFLTSIFVKAGCSPSDIGIIAPYRQQLKIINDLLARSIGMVEVNTVDKYQGRDKSIVLVSFVRSNKDGTVGELLKDWRRLNVAITRAKHKLILLGCVPSLNCYPPLEKLLNHLNSEKLIIDLPSREHESLCHILGDFQRE

SEQ ID NO: 44086 - protein, 238 aa, Homo sapiens
MLCFLRGMAFVPFLLVTWSSAAFIISYVVAVLSGHVNPFLPYISDTGTTPPESGIFGFMINFSAFLGAATMYTRYKIVQKQNQTCYFSTPVFNLVSLVLGLVGCFGMGIVANFQELAVPVVHDGGALLAFVCGVVYTLLQSIISYKSCPQWNSLSTCHIRMVISAVSCAAVIPMIVCASLISITKLEWNPREKDYVYHVVSAICEWTVAFGFIFYFLTFIQDFQSVTLRISTEINGDI

SEQ ID NO: 44087 - protein, 266 aa, Homo sapiens
MWWFQQGLSFLPSALVIWTSAAFIFSYITAVTLHHIDPALPYISDTGTVAPEKCLFGAMLNIAAVLCIATIYVRYKQVHALSPEENVIIKLNKAGLVLGILSCLGLSIVANFQKTTLFAAHVSGAVLTFGMGSLYMFVQTILSYQMQPKIHGKQVFWIRLLLVIWCGVSALSMLTCSSVLHSGNFGTDLEQKLHWNPEDKGYVLHMITTAAEWSMSFSFFGFFLTYIRDFQKISLRVEANLHGLTLYDTAPCPINNERTRLLSRDI

SEQ ID NO: 44088 - protein, 266 aa, Homo sapiens; identical to SEQ ID NO: 44087

SEQ ID NO: 44089 - protein, 232 aa, Homo sapiens
MPSLWDRFSSSSTSSSPSSLPRTPTPDRPPRSAWGSATREEGFDRSTSLESSDCESLDSSNSGFGPEEDTAYLDGVSLPDFELLSDPEDEHLCANLMQLLQESLAQARLGSRRPARLLMPSQLVSQVGKELLRLAYSEPCGLRGALLDVCVEQGKSCHSVGQLALDPSLVPTFQLTLVLRLDSRLWPKIQGLFSSANSPFLPGFSQSLTLSTGFRVIKKKLYSSEQLLIEEC

SEQ ID NO: 44090 - protein, 193 aa, Homo sapiens
MVATGSLSSKNPASISELLDCGYHPESLLSDFDYWDYVVPEPNLNEVIFEESTCQNLVKMLENCLSKSKQTKLGCSKVLVPEKLTQRIAQDVLRLSSTEPCGLRGCVMHVNLEIENVCKKLDRIVCDSSVVPTFELTLVFKQENCSWTSFRDFFFSRGRFSSGFRRTLILSSGFRLVKKKLYSLIGTTVIEGS

SEQ ID NO: 44091 - protein, 177 aa, Homo sapiens
MVATGSLSSKNPASISELLDCGYHPESLLSDFDYWDYVVPEPNLNEVIFEESTCQNLVKMLENCLSKSKQTKLGCSKVLVPEKLTQRIAQDVLRLSSTEPCGLRGCVMHVNLEIENVCKKLDRIVCDSSVVPTFELTLVFKQENCSWTSFRDFFFSRGRFSSGFRRTLILSSGFRLV

SEQ ID NO: 44092 - protein, 128 aa, Homo sapiens
MVATGSLSSKNPASISELLDCGYHPESLLSDFDYWDYVVPEPNLNEVIFEESTCQNLVKMLENCLSKSKQTKLGCSKVLVPEKLTQRIAQDVLRLSSTEPCGLRGCVMHVNLEIENVCKKLDRIVCDS

SEQ ID NO: 44093 - protein, 412 aa, Homo sapiens
MANVADTKLYDILGVPPGASENELKKAYRKLAKEYHPDKNPNAGDKFKEISFAYEVLSNPEKRELYDRYGEQGLREGSGGGGGMDDIFSHIFGGGLFGFMGNQSRSRNGRRRGEDMMHPLKVSLEDLYNGKTTKLQLSKNVLCSACSGQGGKSGAVQKCSACRGRGVRIMIRQLAPGMVQQMQSVCSDCNGEGEVINEKDRCKKCEGKKVIKEVKILEVHVDKGMKHGQRITFTGEADQAPGVEPGDIVLLLQEKEHEVFQRDGNDLHMTYKIGLVEALCGFQFTFKHLDGRQIVVKYPPGKVIEPGCVRVVRGEGMPQYRNPFEKGDLYIKFDVQFPENNWINPDKLSELEDLLPSRPEVPNIIGETEEVELQEFDSTRGSGGGQRREAYNDSSDEESSSHHGPGVQCAHQ

SEQ ID NO: 44094 - protein, 480 aa, Homo sapiens
MAARCSTRWLLVVVGTPRLPAISGRGARPPREGVVGAWLSRKLSVPAFASSLTSCGPRALLTLRPGVSLTGTKHNPFICTASFHTSAPLAKEDYYQILGVPRNASQKEIKKAYYQLAKKYHPDTNKDDPKAKEKFSQLAEAYEVLSDEVKRKQYDAYGSAGFDPGASGSQHSYWKGGPTVDPEELFRKIFGEFSSSSFGDFQTVFDQPQEYFMELTFNQAAKGVNKEFTVNIMDTCERCNGKGNEPGTKVQHCHYCGGSGMETINTGPFVMRSTCRRCGGRGSIIISPCVVCRGAGQAKQKKRVMIPVPAGVEDGQTVRMPVGKREIFITFRVQKSPVFRRDGADIHSDLFISIAQALLGGTARAQGLYETINVTIPPGTQTDQKIRMGGKGIPRINSYGYGDHYIHIKIRVPKRLTSRQQSLILSYAEDETDVEGTVNGVTLTSSGGSTMDSSAGSKARREAGEDEEGFLSKLKKMFTS

SEQ ID NO: 44095 - protein, 453 aa, Homo sapiens
MAARCSTRWLLVVVGTPRLPAISGRGARPPREGVVGAWLSRKLSVPAFASSLTSCGPRALLTLRPGVSLTGTKHNPFICTASFHTSAPLAKEDYYQILGVPRNASQKEIKKAYYQLAKKYHPDTNKDDPKAKEKFSQLAEAYEVLSDEVKRKQYDAYGSAGFDPGASGSQHSYWKGGPTVDPEELFRKIFGEFSSSSFGDFQTVFDQPQEYFMELTFNQAAKGVNKEFTVNIMDTCERCNGKGNEPGTKVQHCHYCGGSGMETINTGPFVMRSTCRRCGGRGSIIISPCVVCRGAGQAKQKKRVMIPVPAGVEDGQTVRMPVGKREIFITFRVQKSPVFRRDGADIHSDLFISIAQALLGGTARAQGLYETINVTIPPGTQTDQKIRMGGKGIPRINSYGYGDHYIHIKIRVPKRLTSRQQSLILSYAEDETDVEGTVNGVTLTSSGKRSTGN

SEQ ID NO: 44096 - protein, 300 aa, Homo sapiens
MAEPQAERPRLCVFPDLLRPPSAADIETWCQPYRKIFGEFSSSSFGDFQTVFDQPQEYFMELTFNQAAKGVNKEFTVNIMDTCERCNGKGNEPGTKVQHCHYCGGSGMETINTGPFVMRSTCRRCGGRGSIIISPCVVCRGAGQAKQKKRVMIPVPAGVEDGQTVRMPVGKREIFITFRVQKSPVFRRDGADIHSDLFISIAQALLGGTARAQGLYETINVTIPPGTQTDQKIRMGGKGIPRINSYGYGDHYIHIKIRVPKRLTSRQQSLILSYAEDETDVEGTVNGVTLTSSGKRSTGN

SEQ ID NO: 44097 - protein, 340 aa, Homo sapiens
MGKDYYQTLGLARGASDEEIKRAYRRQALRYHPDKNKEPGAEEKFKEIAEAYDVLSDPRKREIFDRYGEEGLKGSGPSGGSGGGANGTSFSYTFHGDPHAMFAEFFGGRNPFDTFFGQRNGEEGMDIDDPFSGFPMGMGGFTNVNFGRSRSAQEPARKKQDPPVTHDLRVSLEEIYSGCTKKMKISHKRLNPDGKSIRNEDKILTIEVKKGWKEGTKITFPKEGDQTSNNIPADIVFVLKDKPHNIFKRDGSDVIYPARISLREALCGCTVNVPTLDGRTIPVVFKDVIRPGMRRKVPGEGLPLPKTPEKRGDLIIEFEVIFPERIPQTSRTVLEQVLPI

SEQ ID NO: 44098 - protein, 240 aa, Homo sapiens
MFAEFFGGRNPFDTFFGQRNGEEGMDIDDPFSGFPMGMGGFTNVNFGRSRSAQEPARKKQDPPVTHDLRVSLEEIYSGCTKKMKISHKRLNPDGKSIRNEDKILTIEVKKGWKEGTKITFPKEGDQTSNNIPADIVFVLKDKPHNIFKRDGSDVIYPARISLREALCGCTVNVPTLDGRTIPVVFKDVIRPGMRRKVPGEGLPLPKTPEKRGDLIIEFEVIFPERIPQTSRTVLEQVLPI

SEQ ID NO: 44099 - protein, 409 aa, Homo sapiens
MSSLRARLPATRRRVAQPFARPASPSLVPRSGSAMESNKDEAERCISIALKAIQSNQPDRALRFLEKAQRLYPTPRVRALIESLNQKPQTAGDQPPPTDTTHATHRKAGGTDAPSANGEAGGESTKGYTAEQVAAVKRVKQCKDYYEILGVSRGASDEDLKKAYRRLALKFHPDKNHAPGATEAFKAIGTAYAVLSNPEKRKQYDQFGDDKSQAARHGHGHGDFHRGFEADISPEDLFNMFFGGGFPSSNVHVYSNGRMRYTYQQRQDRRDNQGDGGLGVFVQLMPILILILVSALSQLMVSSPPYSLSPRPSVGHIHRRVTDHLGVVYYVGDTFSEEYTGSSLKTVERNVEDDYIANLRNNCWKEKQQKEGLLYRARYFGDTDMYHRAQKMGTPSCSRLSEVQASLHG

SEQ ID NO: 44100 - protein, 409 aa, Homo sapiens; identical to SEQ ID NO: 44099

SEQ ID NO: 44101 - protein, 375 aa, Homo sapiens
MESNKDEAERCISIALKAIQSNQPDRALRFLEKAQRLYPTPRVRALIESLNQKPQTAGDQPPPTDTTHATHRKAGGTDAPSANGEAGGESTKGYTAEQVAAVKRVKQCKDYYEILGVSRGASDEDLKKAYRRLALKFHPDKNHAPGATEAFKAIGTAYAVLSNPEKRKQYDQFGDDKSQAARHGHGHGDFHRGFEADISPEDLFNMFFGGGFPSSNVHVYSNGRMRYTYQQRQDRRDNQGDGGLGVFVQLMPILILILVSALSQLMVSSPPYSLSPRPSVGHIHRRVTDHLGVVYYVGDTFSEEYTGSSLKTVERNVEDDYIANLRNNCWKEKQQKEGLLYRARYFGDTDMYHRAQKMGTPSCSRLSEVQASLHG

SEQ ID NO: 44102 - protein, 324 aa, Homo sapiens
MASYYEILDVPRSASADDIKKAYRRKALQWHPDKNPDNKEFAEKKFKEVAEAYEVLSDKHKREIYDRYGREGLTGTGTGPSRAEAGSGGPGFTFTFRSPEEVFREFFGSGDPFAELFDDLGPFSELQNRGSRHSGPFFTFSSSFPGHSDFSSSSFSFSPGAGAFRSVSTSTTFVQGRRITTRRIMENGQERVEVEEDGQLKSVTINGVPDDLALGLELSRREQQPSVTSRSGGTQVQQTPASCPLDSDLSEDEDLQLAMAYSLSEMEAAGKKPAGGREAQHRRQGRPKAQHQDPGLGGTQEGARGEATKRSPSPEEKASRCLIL

SEQ ID NO: 44103 - protein, 277 aa, Homo sapiens
MASYYEILDVPRSASADDIKKAYRRKALQWHPDKNPDNKEFAEKKFKEVAEAYEVLSDKHKREIYDRYGREGLTGTGTGPSRAEAGSGGPGFTFTFRSPEEVFREFFGSGDPFAELFDDLGPFSELQNRGSRHSGPFFTFSSSFPGHSDFSSSSFSFSPGAGAFRSVSTSTTFVQGRRITTRRIMENGQERVEVEEDGQLKSVTINGVPDDLALGLELSRREQQPSVTSRSGGTQVQQTPASCPLDSDLSEDEDLQLAMAYSLSEMEAAGKKPADVF

SEQ ID NO: 44104 - protein, 228 aa, Homo sapiens
MASYYEILDVPRSASADDIKKAYRRKALQWHPDKNPDNKEFAEKKFKEVAEAYEVLSDKHKREIYDRYGREGLTGTGTGPSRAEAGSGGPGFTFTFRSPEEVFREFFGSGDPFAELFDDLGPFSELQNRGSRHSGPFFTFSSSFPGHSDFSSSSFSFSPGAGAFRSVSTSTTFVQGRRITTRRIMENGQERVEVEEDGQLKSVTINGVPDDLALGLELSRREQQPSVT

SEQ ID NO: 44105 - protein, 148 aa, Homo sapiens
MASYYEILDVPRSASADDIKKAYRRKALQWHPDKNPDNKEFAEKKFKEVAEAYEVLSDKHKREIYDRYGREGLTGTGTGPSRAEAGSGGPGFTFTFRSPEEVFREFFGSGDPFAELFDDLGPFSELQNRGSRHSGPFFTFSSSFPGHS

SEQ ID NO: 44106 - protein, 122 aa, Homo sapiens
MASYYEILDVPRSASADDIKKAYRRKALQWHPDKNPDNKEFAEKKFKEVAEAYEVLSDKHKREIYDRYGREGLTGTGTGPSRAEAGSGGPGFTFTFRSPEEVFREFFGSGDPFAELFDDLGP

SEQ ID NO: 44107 - protein, 326 aa, Homo sapiens
MVDYYEVLGVQRHASPEDIKKAYRKLALKWHPDKNPENKEEAERKFKQVAEAYEVLSDAKKRDIYDKYGKEGLNGGGGGGSHFDSPFEFGFTFRNPDDVFREFFGGRDPFSFDFFEDPFEDFFGNRRGPRGSRSRGTGSFFSAFSGFPSFGSGFSSFDTGFTSFGSLGHGGLTSFSSTSFGGSGMGNFKSISTSTKMVNGRKITTKRIVENGQERVEVEEDGQLKSLTINGVADDDALAEERMRRGQNALPAQPAGLRPPKPPRPASLLRHAPHCLSEEEGEQDRPRAPGPWDPLASAAGLKEGGKRKKQKQREESKKKKSTKGNH

SEQ ID NO: 44108 - protein, 125 aa, Homo sapiens
MVDYYEVLGVQRHASPEDIKKAYRKLALKWHPDKNPENKEEAERKFKQVAEAYEVLSDAKKRDIYDKYGKEGLNGGGGGGSHFDSPFEFGFTFRNPDDVFREFFGGRDPFSFDFFEDPFEDFFGN

SEQ ID NO: 44109 - protein, 228 aa, Homo sapiens
MVDYYEVLGVQRHASPEDIKKAYRKLALKWHPDKNPENKEEAERKFKQVAEAYEVLSDAKKRDIYDKYGKEGLNGGGGGGSHFDSPFEFGFTFRNPDDVFREFFGGRDPFSFDFFEDPFEDFFGNRRGPRGSRSRGTGSFFSAFSGFPSFGSGFSSFDTGFTSFGSLGHGGLTSFSSTSFGGSGMGNFKSISTSTKMVNGRKITTKRIVENGQERVEVEEDGQLKSLT

SEQ ID NO: 44110 - protein, 215 aa, Homo sapiens
MVDYYEVLGVQRHASPEDIKKAYRKLALKWHPDKNPENKEEAERKFKQVAEAYEVLSDAKKRDIYDKYGKEGLNGGGGGGSHFDSPFEFGFTFRNPDDVFREFFGGRDPFSFDFFEDPFEDFFGNRRGPRGSRSRGTGSFFSAFSGFPSFGSGFSSFDTGFTSFGSLGHGGLTSFSSTSFGGSGMGNFKSISTSTKWLMAEKSLQRELSRTVKKE

SEQ ID NO: 44111 - protein, 241 aa, Homo sapiens
MVDYYEVLGVQRHASPEDIKKAYRKLALKWHPDKNPENKEEAERKFKQVAEAYEVLSDAKKRDIYDKYGKEGLNGGGGGGSHFDSPFEFGFTFRNPDDVFREFFGGRDPFSFDFFEDPFEDFFGNRRGPRGSRSRGTGSFFSAFSGFPSFGSGFSSFDTGFTSFGSLGHGGLTSFSSTSFGGSGMGNFKSISTSTKMVNGRKITTKRIVENGQERVEVEEDGQLKSLTINGKEQLLRLDNK

SEQ ID NO: 44112 - protein, 66 aa, Homo sapiens
MVDYYEVLGVQRHASPEDIKKAYRKLALKWHPDKNPENKEEAERKFKQVAEAYEVLSDAKKRDIYD

SEQ ID NO: 44113 - protein, 45 aa, Homo sapiens
MVDYYEVLGVQRHASPEDIKKAYRKLALKWHPDKNPENKEEAERK

SEQ ID NO: 44114 - protein, 146 aa, Homo sapiens
MVDYYEVLGVQRHASPEDIKKAYRKLALKWHPDKNPENKEEAERKFKQVAEAYEVLSDAKKRDIYDKYGKEGLNGGGGGGSHFDSPFEFGFTFRNPDDVFREFFGGRDPFSFDFFEDPFEDFFGNRRGPRGSRSRGTGSFFSAFSG

SEQ ID NO: 44115 - protein, 211 aa, Homo sapiens
MVDYYEVLGVQRHASPEDIKKAYRKLALKWHPDKNPENKEEAERKFKQVAEAYEVLSDAKKRDIYDKYGKEGLNGGGGGGSHFDSPFEFGFTFRNPDDVFREFFGGRDPFSFDFFGVADDDALAEERMRRGQNALPAQPAGLRPPKPPRPASLLRHAPHCLSEEEGEQDRPRAPGPWDPLASAAGLKEGGKRKKQKQREESKKKKSTKGNH

SEQ ID NO: 44116 - protein, 277 aa, Homo sapiens
MPHPRILKRPKKRDIYDKYGKEGLNGGGGGGSHFDSPFEFGFTFRNPDDVFREFFGGRDPFSFDFFEDPFEDFFGNRRGPRGSRSRGTGSFFSAFSGFPSFGSGFSSFDTGFTSFGSLGHGGLTSFSSTSFGGSGMGNFKSISTSTKMVNGRKITTKRIVENGQERVEVEEDGQLKSLTINGVADDDALAEERMRRGQNALPAQPAGLRPPKPPRPASLLRHAPHCLSEEEGEQDRPRAPGPWDPLASAAGLKEGGKRKKQKQREESKKKKSTKGNH

SEQ ID NO: 44117 - protein, 98 aa, Homo sapiens
MVDYYEVLGVQRHASPEDIKKAYRKLALKWHPDKNPENKEEAERKFKQVAEAYEVLSDAKKRDIYDKYGKEGLNGGGGGGSHFDSPFEFGFTFRNPDD

SEQ ID NO: 44118 - protein, 223 aa, Homo sapiens
MATPQSIFIFAICILMITELILASKSYYDILGVPKSASERQIKKAFHKLAMKYHPDKNKSPDAEAKFREIAEAYETLSDANRRKEYDTLGHSAFTSGKGQRGSGSSFEQSFNFNFDDLFKDFGFFGQNQNTGSKKRFENHFQTRQDGGSSRQRHHFQEFSFGGGLFDDMFEDMEKMFSFSGFDSTNQHTVQTENRFHGSSKHCRTVTQRRGNMVTTYTDCSGQ

SEQ ID NO: 44119 - protein, 793 aa, Homo sapiens
MGVWLNKDDYIRDLKRIILCFLIVYMAILVGTDQDFYSLLGVSKTASSREIRQAFKKLALKLHPDKNPNNPNAHGDFLKINRAYEVLKDEDLRKKYDKYGEKGLEDNQGGQYESWNYYRYDFGIYDDDPEIITLERREFDAAVNSGELWFVNFYSPGCSHCHDLAPTWRDFAKEVDGLLRIGAVNCGDDRMLCRMKGVNSYPSLFIFRSGMAPVKYHGDRSKESLVSFAMQHVRSTVTELWTGNFVNSIQTAFAAGIGWLITFCSKGGDCLTSQTRLRLSGMLDGLVNVGWMDCATQDNLCKSLDITTSTTAYFPPGATLNNKEKNSILFLNSLDAKEIYLEVIHNLPDFELLSANTLEDRLAHHRWLLFFHFGKNENSNDPELKKLKTLLKNDHIQVGRFDCSSAPDICSNLYVFQPSLAVFKGQGTKEYEIHHGKKILYDILAFAKESVNSHVTTLGPQNFPANDKEPWLVDFFAPWCPPCRALLPELRRASNLLYGQLKFGTLDCTVHEGLCNMYNIQAYPTTVVFNQSNIHEYEGHHSAEQILEFIEDLMNPSVVSLTPTTFNELVTQRKHNEVWMVDFYSPWCHPCQVLMPEWKRMARTLTGLINVGSIDCQQYHSFCAQENVQRYPEIRFFPPKSNKAYHYHSYNGWNRDAYSLRIWGLGFLPQVSTDLTPQTFSEKVLQGKNHWVIDFYAPWCGPCQNFAPEFELLARMIKGKVKAGKVDCQAYAQTCQKAGIRAYPTVKFYFYERAKRNFQEEQINTRDAKAIAALISEKLETLRNQGKRNKDEL

SEQ ID NO: 44120 - protein, 747 aa, Homo sapiens
MGVWLNKDDYIRDLKRIILCFLIVYMAILVGTDQDFYSLLGVSKTASSREIRQAFKKLALKLHPDKNPNNPNAHGDFLKINRAYEVLKDEDLRKKYDKYGEKGLEDNQGGQYESWNYYRYDFGIYDDDPEIITLERREFDAAVNSGELWFVNFYSPGCSHCHDLAPTWRDFAKEVDGLLRIGAVNCGDDRMLCRMKGVNSYPSLFIFRSGMAPVKYHGDRSKESLVSFAMQHVRSTVTELWTGNFVNSIQTAFAAGIGWLITFCSKGGDCLTSQTRLRLSGMLFLNSLDAKEIYLEVIHNLPDFELLSANTLEDRLAHHRWLLFFHFGKNENSNDPELKKLKTLLKNDHIQVGRFDCSSAPDICSNLYVFQPSLAVFKGQGTKEYEIHHGKKILYDILAFAKESVNSHVTTLGPQNFPANDKEPWLVDFFAPWCPPCRALLPELRRASNLLYGQLKFGTLDCTVHEGLCNMYNIQAYPTTVVFNQSNIHEYEGHHSAEQILEFIEDLMNPSVVSLTPTTFNELVTQRKHNEVWMVDFYSPWCHPCQVLMPEWKRMARTLTGLINVGSIDCQQYHSFCAQENVQRYPEIRFFPPKSNKAYHYHSYNGWNRDAYSLRIWGLGFLPQVSTDLTPQTFSEKVLQGKNHWVIDFYAPWCGPCQNFAPEFELLARMIKGKVKAGKVDCQAYAQTCQKAGIRAYPTVKFYFYERAKRNFQEEQINTRDAKAIAALISEKLETLRNQGKRNKDHL

SEQ ID NO: 44121 - protein, 177 aa, Homo sapiens [sequence omitted]

SEQ ID NO: 44122 - protein, 332 aa, Homo sapiens
MGVWLNKDDYIRDLKRIILCFLIVYMAILVGTDQDFYSLLGVSKTASSREIRQAFKKLALKLHPDKNPNNPNAHGDFLKINRAYEVLKDEDLRKKYDKYGEKGLEDNQGGQYESWNYYRYDFGIYDDDPEIITLERREFDAAVNSGELWFVNFYSPGCSHCHDLAPTWRDFAKEVDGLLRIGAVNCGDDRMLCRMKGVNSYPSLFIFRSGMAPVKYHGDRSKESLVSFAMQHVRSTVTELWTGNFVNSIQTAFAAGIGWLITFCSKGGDCLTSQTRLRLSGMLDGLVNVGWMDCATQDNLCKSLDITTSTTAYFPPGATLNNKEKNSILLLH

SEQ ID NO: 44123 - protein, 2243 aa, Homo sapiens
MNIIRENKDLACFYTTKHSWRGKYKRVFSVGTHAITTYNPNTLEVTNQWPYGDICSISPVGKGQGTEFNLTFRKGSGKKSETLKFSTEHRTELLTEALRFRTDFSEGKITGRRYNCYKHHWSDSRKPVILEVTPGGFDQINPATNRVLCSYDYRNIEGFVDLSDYQGGFCILYGGFSRLHLFASEQREEIIKSAIDHAGNYIGISLRIRKEPLEFEQYLNLRFGKYSTDESITSLAEFVVQKISPRHSEPVKRVLALTETCLVERDPATYNIATLKPLGEVFALVCDSENPQLFTIEFIKGQVRKYSSTERDSLLASLLDGVRASGNRDVCVKMTPTHKGQRWGLLSMPVDEEVESLHLRFLATPPNGNFADAVFRFNANISYSGVLHAVTQDGLFSENKEKLINNAITALLSQEGDVVASNAELESQFQAVRRLVASKAGFLAFTQLPKFRERLGVKVVKALKRSNNGIIHAAVDMLCALMCPMHDDYDLRQEQLNKASLLSSKKFLENLLEKFNSHVDHGTGALVISSLLDFLTFALCAPYSETTEGQQFDMLLEMVASNGRTLFKLFQHPSMAIIKGAGLVMKAIIEEGDKEIATKMQELALSEGALPRHLHTAMFTISSDQRMLTNRQLSRHLVGLWTADNATATNLLKRILPPGLLAYLESSDLVPEKDADRMHVRDNVKIAMDQYGKFNKVPEWQRLAGKAAKEVEKFAKEKVDLVLMHWRDRMGIAQKENINQKPVVLRKRRQRIKIEANWDLFYYRFGQDHARSNLIWNFKTREELKDTLESEMRAFNIDRELGSANVISWNHHEFEVKYECLAEEIKIGDYYLRLLLEEDENEESGSIKRSYEFFNELYHRFLLTPKVNMKCLCLQALAIVYGRCHEEIGPFTDTRYIIGMLERCTDKLERDRLILFLNKLILNKKNVKDLMDSNGIRILVDLLTLAHLHVSRATVPLQSNVIEAAPDMKRESEKEWYFGNADKERSGPYGFHEMQELWTKGMLNAKTRCWAQGMDGWRPLQSIPQLKWCLLASGQAVLNETDLATLILNMLITMCGYFPSRDQDNAIIRPLPKVKRLLSDSTCLPHIIQLLLTFDPILVEKVAILLYHIMQDNPQLPRLYLSGVFFFIMMYTGSNVLPVARFLKYTHTKQAFKSEETKGQDIFQRSILGHILPEAMVCYLENYEPEKFSEIFLGEFDTPEAIWSSEMRRLMIEKIAAHLADFTPRLQSNTRALYQYCPIPIINYPQLENELFCNIYYLKQLCDTLRFPDWPIKDPVKLLKDTLDAWKKEVEKKPPMMSIDDAYEVLNLPQGQGPHDESKIRKAYFRLAQKYHPDKNPEGRDMFEKVNKAYEFLCTKSAKIVDGPDPENIILILKTQSILFNRHKEDLQPYKYAGYPMLIRTITMETSDDLLFSKESPLLPAATELAFHTVNCSALNAEELRRENGLEVLQEAFSRCVAVLTRASKPSDMSVQVCGYISKCYSVAAQFEECREKITEMPSIIKDLCRVLYFGKSIPRVAALGVECVSSFAVDFWLQTHLFQAGILWYLLGFLFNYDYTLEESGIQKSEETNQQEVANSLAKLSVHALSRLGGYLAEEQATPENPTIRKSLAGMLTPYVARKLAVASVTEILKMLNSNTESPYLIWNNSTRAELLEFLESQQENMIKKGDCDKTYGSEFVYSDHAKELIVGEIFVRVYNEVPTFQLEVPKAFAASLLDYIGSQAQYLHTFMAITHAAKVESEQHGDRLPRVEMALEALRNVIKYNPGSESECIGHFKLIFSLLRVHGAGQVQQLALEVVNIVTSNQDCVNNIAESMVLSSLLALLHSLPSSRQLVLETLYALTSSTKIIKEAMAKGALIYLLDMFCNSTHPQVRAQTAELFAKMTADKLIGPKVRITLMKFLPSVFMDAMRDNPEAAVHIFEGTHENPELIWNDNSRDKVSTTVREMMLEHFKNQQDNPEANWKLPEDFAVVFGEAEGELAVGGVFLRIFIAQPAWVLRKPREFLIALLEKLTELLEKNNPHGETLETLTMATVCLFSAQPQLADQVPPLGHLPKVIQAMNHRNNAIPKSAIRVIHALSENELCVRAMASLETIGPLMNGMKKRADTVGLACEAINRMFQKEQSELVAQALKADLVPYLLKLLEGIGLENLDSPAATKAQIVKALKAMTRSLQYGEQVNEILCRSSVWSAFKDQKHDLFISESQTAGYLTGPGVAGYLTAGTSTSVMSNLPPPVDHEAGDLGYQT

SEQ ID NO: 44124 - protein, 890 aa, Homo sapiens
MYQISKNSGWARSREYNFNLKTQSILFNRHKEDLQPYKYAGYPMLIRTITMETSDDLLFSKESPLLPAATELAFHTVNCSALNAEELRRENGLEVLQEAFSRCVAVLTRASKPSDMSVQVCGYISKCYSVAAQFEECREKITEMPSIIKDLCRVLYFGKSIPRVAALGVECVSSFAVDFWLQTHLFQAGILWYLLGFLFNYDYTLEESGIQKSEETNQQEVANSLAKLSVHALSRLGGYLAEEQATPENPTIRKSLAGMLTPYVARKLAVASVTEILKMLNSNTESPYLIWNNSTRAELLEFLESQQENMIKKGDCDKTYGSEFVYSDHAKELIVGEIFVRVYNEVPTFQLEVPKAFAASLLDYIGSQAQYLHTFMAITHAAKVESEQHGDRLPRVEMALEALRNVIKYNPGSESECIGHFKLIFSLLRVHGAGQVQQLALEVVNIVTSNQDCVNNIAESMVLSSLLALLHSLPSSRQLVLETLYALTSSTKIIKEAMAKGALIYLLDMFCNSTHPQVRAQTAELFAKMTADKLIGPKVRITLMKFLPSVFMDAMRDNPEAAVHIFEGTHENPELIWNDNSRDKVSTTVREMMLEHFKNQQDNPEANWKLPEDFAVVFGEAEGELAVGGVFLRIFIAQPAWVLRKPREFLIALLEKLTELLEKNNPHGETLETLTMATVCLFSAQPQLADQVPPLGHLPKVIQAMNHRNNAIPKSAIRVIHALSENELCVRAMASLETIGPLMNGMKKRADTVGLACEAINRMFQKEQSELVAQALKADLVPYLLKLLEGIGLENLDSPAATKAQIVKALKAMTRSLQYGEQVNEILCRSSVWSAFKDQKHDLFISESQTAGYLTGPGVAGYLTAGTSTSVMSNLPPPVDHEAGDLGYQT

SEQ ID NO: 44125 - protein, 116 aa, Homo sapiens
MASTVVAVGLTIAAAGFAGRYVLQAMKHMEPQVKQVFQSLPKSAFSGGYYRGGFEPKMTKREAALILGVSPTANKGKIRDAHRRIMLLNHPDKGGSPYIAAKINEAKDLLEGQAKK

SEQ ID NO: 44126 - protein, 568 aa, Homo sapiens
MLLLPSAADGRGTAITHALTSASTLCQVEPVGRWFEAFVKRRNRNASASFQELEDKKELSEESEDEELQLEEFPMLKTLDPKDWKNQDHYAVLGLGHVRYKATQRQIKAAHKAMVLKHHPDKRKAAGEPIKEGDNDYFTCITKAYEMLSDPVKRRAFNSVDPTFDNSVPSKSEAKDNFFEVFTPVFERNSRWSNKKNVPKLGDMNSSFEDVDIFYSFWYNFDSWREFSYLDEEEKEKAECRDERRWIEKQNRATRAQRKKEEMNRIRTLVDNAYSCDPRIKKFKEEEKAKKEAEKKAKAEAKRKEQEAKEKQRQAELEAARLAKEKEEEEVRQQALLAKKEKDIQKKAIKKERQKLRNSCKIEEINEQIRKEKEEAEARMRQASKNTEKSTGGGGNGSKNWSEDDLQLLIKAVNLFPAGTNSRWEVIANYMNIHSSSGVKRTAKDVIGKAKSLQKLDPHQKDDINKKAFDKFKKEHGVVPQADNATPSERFEGPYTDFTPWTTEEQKLLEQALKTYPVNTPERWEKIAEAVPGRTKKDCMKRYKELVEMVKAKKAAQEQVLNASRAKK

SEQ ID NO: 44127 - protein, 621 aa, Homo sapiens
MLLLPSAADGRGTAITHALTSASTLCQVEPVGRWFEAFVKRRNRNASASFQELEDKKELSEESEDEELQLEEFPMLKTLDPKDWKNQDHYAVLGLGHVRYKATQRQIKAAHKAMVLKHHPDKRKAAGEPIKEGDNDYFTCITKAYEMLSDPVKRRAFNSVDPTFDNSVPSKSEAKDNFFEVFTPVFERNSRWSNKKNVPKLGDMNSSFEDVDIFYSFWYNFDSWREFSYLDEEEKEKAECRDERRWIEKQNRATRAQRKKEEMNRIRTLVDNAYSCDPRIKKFKEEEKAKKEAEKKAKAEAKRKEQEAKEKQRQAELEAARLAKEKEEEEVRQQALLAKKEKDIQKKAIKKERQKLRNSCKTWNHFSDNEAERVKMMEEVEKLCDRLELASLQCLNETLTSCTKEVGKAALEKQIEEINEQIRKEKEEAEARMRQASKNTEKSTGGGGNGSKNWSEDDLQLLIKAVNLFPAGTNSRWEVIANYMNIHSSSGVKRTAKDVIGKAKSLQKLDPHQKDDINKKAFDKFKKEHGVVPQADNATPSERFEGPYTDFTPWTTEEQKLLEQALKTYPVNTPERWEKIAEAVPGRTKKDCMKRYKELVEMVKAKKAAQEQVLNASRAKK

SEQ ID NO: 44128 - protein, 202 aa, Homo sapiens
MLLLPSAADGRGTAITHALTSASTLCQVEPVGRWFEAFVKRRNRNASASFQELEDKKELSEESEDEELQLEEFPMLKTLDPKDWKNQDHYAVLGLGHVRYKATQRQIKAAHKAMVLKHHPDKRKAAGEPIKEGDNDYFTCITKAYEMLSDPVKRRAFNSVDPTFDNSVPSKSEAKDNFFEVFTPVFERNSRVSISKKKKKKR

SEQ ID NO: 44129 - protein, 273 aa, Homo sapiens
MEANMPKRKEPGRSLRIKVISMGNAEVGKSCIIKRYCEKRFVSKYLATIGIDYGVTKVHVRDREIKVNIFDMAGHPFFYEVRNEFYKDTQGVILVYDVGQKDSFDALDAWLAEMKQELGPHGNMENIIFVVCANKIDCTKHRCVDESEGRLWAESKGFLYFETSAQTGEGINEMFQTFYISIVDLCENGGKRPTTNSSASFTKEQADAIRRIRNSKDSWDMLGVKPGASRDEVNKAYRKLAVLLHPDKCVAPGSEDAFKAVVNARTALLKNIK

SEQ ID NO: 44130 - protein, 202 aa, Homo sapiens
MAGHPFFYEVRNEFYKDTQGVILVYDVGQKDSFDALDAWLAEMKQELGPHGNMENIIFVVCANKIDCTKHRCVDESEGRLWAESKGFLYFETSAQTGEGINEMFQTFYISIVDLCENGGKRPTTNSSASFTKEQADAIRRIRNSKDSWDMLGVKPGASRDEVNKAYRKLAVLLHPDKCVAPGSEDAFKAVVNARTALLKNIK

SEQ ID NO: 44131 - protein, 504 aa, Homo sapiens
MVAPGSVTSRLGSVFPFLLVLVDLQYEGAECGVNADVEKHLELGKKLLAAGQLADALSQFHAAVDGDPDNYIAYYRRATVFLAMGKSKAALPDLTKVIQLKMDFTAARLQRGHLLLKQGKLDEAEDDFKKVLKSNPSENEEKEAQSQLIKSDEMQRLRSQALNAFGSGDYTAAIAFLDKILEVCVWDAELRELRAECFIKEGEPRKAISDLKAASKLKNDNTEAFYKISTLYYQLGDHELSLSEVRECLKLDQDHKRCFAHYKQVKKLNKLIESAEELIRDGRYTDATSKYESVMKTEPSIAEYTVRSKERICHCFSKDEKPVEAIRVCSEVLQMEPDNVNALKDRAEAYLIEEMYDEAIQDYETAQEHNENDQQIREGLEKAQRLLKQSQKRDYYKILGVKRNAKKQEIIKAYRKLALQWHPDNFQNEEEKKKAEKKFIDIAAAKEVLSDPEMRKKFDDGEDPLDAESQQGGGGNPFHRSWNSWQGFNPFSSGGPFRFKFHFN

SEQ ID NO: 44132 - protein, 198 aa, Homo sapiens
MADQRQRSLSTSGESLYHVLGLDKNATSDDIKKSYRKLALKYHPDKNPDNPEAADKFKEINNAHAILTDATKRNIYDKYGSLGLYVAEQFGEENVNTYFVLSSWWAKALFVFCGLLTCCYCCCCLCCCFNCCCGKCKPKAPEGEETEFYVSPEDLEAQLQSDEREATDTPIVIQPASATETTQLTADSHPSYHTDGFN

SEQ ID NO: 44133 - protein, 167 aa, Homo sapiens
MADQRQRSLSTSGESLYHVLGLDKNATSDDIKKSYRKLALKYHPDKNPDNPEAADKFKEINNAHAILTDATKRNIYDKYGSLGLYVAEQFGEENVNTYFVLSSWWAKALFVFCGLLTCCYCCCCLCCCFNCCCGKCKPKAPEGEETEFYVSPEDLEAQLQSDERGGH

SEQ ID NO: 44134 - protein, 199 aa, Homo sapiens
MACNIPNQRQRTLSTTGEALYEILGLHKGASNEEIKKTYRKLALKHHPDKNPDDPAATEKFKEINNAHAILTDISKRSIYDKYGSLGLYVAEQFGDENVNTYFMLSSWWAKALFVIVGLLTGCYFCCCLCCCCNCCCGHCRPESSVPEEDFYVSPEDLEEQIKSDMEKDVDFPVFLQPTNANEKTQLIKEGSRSYCTDS

SEQ ID NO: 44135 - protein, 189 aa, Homo sapiens
MSTVKEAAHRLSKSEMSLYAVLDLKKGASPEDFKKSYSHSALLPHPPFEYHLGRKLALRYHPDKNPGNAQAAEIFKEINAAHAILSDSKKRKIYDQHGSLGIYLYDHFGEEGVRYYFILNSCWFKTLVILCTLLTCCCFCCCCCFCCGALKPPPEQDSGRKYQQNVQSQPPRSGAKCDFRSEENSEDDF

SEQ ID NO: 44136 - protein, 189 aa, Homo sapiens; identical to SEQ ID NO: 44135

SEQ ID NO: 44137 - protein, 900 aa, Homo sapiens
MEPSYGGGLFDMVKGGAGRLFSNLKDNLKDTLKDTSSRVIQSVTSYTKGDLDFTYVTSRIIVMSFPLDNVDIGFRNQVDDIRSFLDSRHLDHYTVYNLSPKSYRTAKFHSRVSECSWPIRQAPSLHNLFAVCRNMYNWLLQNPKNVCVVHCLDGRAASSILVGAMFIFCNLYSTPGPAIRLLYAKRPGIGLSPSHRRYLGYMCDLLADKPYRPHFKPLTIKSITVSPIPFFNKQRNGCRPYCDVLIGETKIYSTCTDFERMKEYRVQDGKIFIPLNITVQGDVVVSMYHLRSTIGSRLQAKVTNTQIFQLQFHTGFIPLDTTVLKFTKPELDACDVPEKYPQLFQVTLDVELQPHDKVIDLTPPWEHYCTKDVNPSILFSSHQEHQDTLALGGQAPIDIPPDNPRHYGQSGFFASLCWQDQKSEKSFCEEDHAALVNQESEQSDDELLTLSSPHGNANGDKPHGVKKPSKKQQEPAAPPPPEDVDLLGLEGSAMSNSFSPPAAPPTNSELLSDLFGGGGAAGPTQAGQSGVEDVFHPSGPASTQSTPRRSATSTSASPTLRVGEGATFDPFGAPSKPSGQDLLGSFLNTSSASSDPFLQPTRSPSPTVHASSTPAVNIQPDVSGGWDWHAKPGGFGMGSKSAATSPTGSSHGTPTHQSKPQTLDPFADLGTLGSSSFASKPTTPTGLGGGFPPLSSPQKASPQPMGGGWQQGGAYNWQQPQPKPQPSMPHSSPQNRPNYNVSFSAMPGGQNERGKGSSNLEGKQKAADFEDLLSGQGFNAHKDKKGPRTIAEMRKEEMAKEMDPEKLKILEWIEGKERNIRALLSTMHTVLWAGETKWKPVGMADLVTPEQVKKVYRKAVLVVHPDKATGQPYEQYAKMIFMELNDAWSEFENQGQKPLY

SEQ ID NO: 44138 - protein, 970 aa, Homo sapiens
MSLLGSYRKKTSNDGYESLQLVDSNGDLSAGSGGVGGKQRVNAGAAARSPARQPPDRASTMDSSGASSPDMEPSYGGGLFDMVKGGAGRLFSNLKDNLKDTLKDTSSRVIQSVTSYTKGDLDFTYVTSRIIVMSFPLDNVDIGFRNQVDDIRSFLDSRHLDHYTVYNLSPKSYRTAKFHSRVSECSWPIRQAPSLHNLFAVCRNMYNWLLQNPKNVCVVHCLDGRAASSILVGAMFIFCNLYSTPGPAIRLLYAKRPGIGLSPSHRRYLGYMCDLLADKPYRPHFKPLTIKSITVSPIPFFNKQRNGCRPYCDVLIGETKIYSTCTDFERMKEYRVQDGKIFIPLNITVQGDVVVSMYHLRSTIGSRLQAKVTNTQIFQLQFHTGFIPLDTTVLKFTKPELDACDVPEKYPQLFQVTLDVELQPHDKVIDLTPPWEHYCTKDVNPSILFSSHQEHQDTLALGGQAPIDIPPDNPRHYGQSGFFASLCWQDQKSEKSFCEEDHAALVNQESEQSDDELLTLSSPHGNANGDKPHGVKKPSKKQQEPAAPPPPEDVDLLGLEGSAMSNSFSPPAAPPTNSELLSDLFGGGGAAGPTQAGQSGVEDVFHPSGPASTQSTPRRSATSTSASPTLRVGEGATFDPFGAPSKPSGQDLLGSFLNTSSASSDPFLQPTRSPSPTVHASSTPAVNIQPDVSGGWDWHAKPGGFGMGSKSAATSPTGSSHGTPTHQSKPQTLDPFADLGTLGSSSFASKPTTPTGLGGGFPPLSSPQKASPQPMGGGWQQGGAYNWQQPQPKPQPSMPHSSPQNRPNYNVSFSAMPGGQNERGKGSSNLEGKQKAADFEDLLSGQGFNAHKDKKGPRTIAEMRKEEMAKEMDPEKLKILEWIEGKERNIRALLSTMHTVLWAGETKWKPVGMADLVTPEQVKKVYRKAVLVVHPDKATGQPYEQYAKMIFMELNDAWSEFENQGQKPLY

SEQ ID NO: 44139 - protein, 913 aa, Homo sapiens
MKDSENKGASSPDMEPSYGGGLFDMVKGGAGRLFSNLKDNLKDTLKDTSSRVIQSVTSYTKGDLDFTYVTSRIIVMSFPLDNVDIGFRNQVDDIRSFLDSRHLDHYTVYNLSPKSYRTAKFHSRVSECSWPIRQAPSLHNLFAVCRNMYNWLLQNPKNVCVVHCLDGRAASSILVGAMFIFCNLYSTPGPAIRLLYAKRPGIGLSPSHRRYLGYMCDLLADKPYRPHFKPLTIKSITVSPIPFFNKQRNGCRPYCDVLIGETKIYSTCTDFERMKEYRVQDGKIFIPLNITVQGDVVVSMYHLRSTIGSRLQAKVTNTQIFQLQFHTGFIPLDTTVLKFTKPELDACDVPEKYPQLFQVTLDVELQPHDKVIDLTPPWEHYCTKDVNPSILFSSHQEHQDTLALGGQAPIDIPPDNPRHYGQSGFFASLCWQDQKSEKSFCEEDHAALVNQESEQSDDELLTLSSPHGNANGDKPHGVKKPSKKQQEPAAPPPPEDVDLLGLEGSAMSNSFSPPAAPPTNSELLSDLFGGGGAAGPTQAGQSGVEDVFHPSGPASTQSTPRRSATSTSASPTLRVGEGATFDPFGAPSKPSGQDLLGSFLNTSSASSDPFLQPTRSPSPTVHASSTPAVNIQPDVSGGWDWHAKPGGFGMGSKSAATSPTGSSHGTPTHQSKPQTLDPFADLGTLGSSSFASKPTTPTGLGGGFPPLSSPQKASPQPMGGGWQQGGAYNWQQPQPKPQPSMPHSSPQNRPNYNVSFSAMPGGQNERGKGSSNLEGKQKAADFEDLLSGQGFNAHKDKKGPRTIAEMRKEEMAKEMDPEKLKILEWIEGKERNIRALLSTMHTVLWAGETKWKPVGMADLVTPEQVKKVYRKAVLVVHPDKATGQPYEQYAKMIFMELNDAWSEFENQGQKPLY

SEQ ID NO: 44140 - protein, 260 aa, Homo sapiens
MGLLDLCEEVFGTADLYRVLGVRREASDGEVRRGYHKVSLQVHPDRVGEGDKEDATRRFQILGKVYSVLSDREQRAVYDEQGTVDEDSPVLTQDRDWEAYWRLLFKKISLEDIQAFEKTYKGSEEELADIKQAYLDFKGDMDQIMESVLCVQYTEEPRIRNIIQQAIDAGEVPSYNAFVKESKQKMNARKRRAQEEAKEAEMSRKELGLDEGVDSLKAAIQSRQKDRQKEMDNFLAQMEAKYCKSSKGGGKKSALKKEKK

SEQ ID NO: 44141 - protein, 342 aa, Homo sapiens
MLENSLYSPTWEGSQFWVTVQRTEAAERCGLHGSYVLRVEAERLTLLTVGAQSQILEPLLSWPYTLLRRYGRDKVMFSFEAGRRCPSGPGTFTFQTAQGNDIFQAVETAIHRQKAQGKAGQGHDVLRADSHEGEVAEGKLPSPPGPQELLDSPPALYAEPLDSLRIAPCPSQDSLYSDPLDSTSAQAGEGVQRKKPLYWDLYEHAQQQLLKAKLTDPKEDPIYDEPEGLAPVPPQGLYDLPREPKDAWWCQARVKEEGYELPYNPATDDYAVPPPRSTKPLLAPKPQGPAFPEPGTATGSGIKSHNSALYSQVQKSGASGSWDCGLSRVGTDKTGVKSEGST

SEQ ID NO: 44142 - protein, 481 aa, Homo sapiens [sequence omitted]

SEQ ID NO: 44143 - protein, 412 aa, Homo sapiens
MGDGAVKQGFLYLQQQQTFGKKWRRFGASLYGGSDCALARLELQEGPEKPRRCEAARKVIRLSDCLRVAEAGGEASSPRDTSAFFLETKERLYLLAAPAAERGDWVQAICLLAFPGQRKELSGPEGKQSRPCMEENELYSSAVTVGPHKEFAVTMRPTEASERCHLRGSYTLRAGESALELWGGPEPGTQLYDWPYRFLRRFGRDKVTFSFEAGRRCVSGEGNFEFETRQGNEIFLALEEAISAQKNAAPATPQPQPATIPASLPRPDSPYSRPHDSLPPPSPTTPVPAPRPRGQEGEYAVPFDAVARSLGKNFRGILAVPPQLLADPLYDSIEETLPPRPDHIYDEPEGVAALSLYDSPQEPRGEAWRRQATADRDPAGLQHVQPAGQDFSASGWQPGTEYDNVVLKKGPK

SEQ ID NO: 44144 - protein, 258 aa, Homo sapiens
MRPTEASERCHLRGSYTLRAGESALELWGGPEPGTQLYDWPYRFLRRFGRDKVTFSFEAGRRCVSGEGNFEFETRQGNEIFLALEEAISAQKNAAPATPQPQPATIPASLPRPDSPYSRPHDSLPPPSPTTPVPAPRPRGQEGEYAVPFDAVARSLGKNFRGILAVPPQLLADPLYDSIEETLPPRPDHIYDEPEGVAALSLYDSPQEPRGEAWRRQATADRDPAGLQHVQPAGQDFSASGWQPGTEYDNVVLKKGPK

SEQ ID NO: 44145 - protein, 330 aa, Homo sapiens
MDPLETPIKDGILYQQHVKFGKKCWRKVWALLYAGGPSGVARLESWEVRDGGLGAAGDRSAGPGRRGERRVIRLADCVSVLPADGESCPRDTGAFLLTTTERSHLLAAQHRQAWMGPICQLAFPGTGEASSGSTDAQSPKRGLVPMEENSIYSSWQEVGEFPVVVQRTEAATRCQLKGPALLVLGPDAIQLREAKGTQALYSWPYHFLRKFGSDKILLGTPGVSLLICKGERTDDVSGIILDESLLRAYSVPGAGGHSRVQDSLGPVLREPTFQGERSFLKTSMLRSLLCSCSWRHPRSQPRTQASCLQGSDCPAPHRNSTSAAHTLGTS

SEQ ID NO: 44146 - protein, 496 aa, Homo sapiens
MTRGARLRSDARAQLNQLSLDGGTGSGQKGKCEEFPSSLSSVSPGLEAAALLLAVTMDPLETPIKDGILYQQHVKFGKKCWRKVWALLYAGGPSGVARLESWEVRDGGLGAAGDRSAGPGRRGERRVIRLADCVSVLPADGESCPRDTGAFLLTTTERSHLLAAQHRQAWMGPICQLAFPGTGEASSGSTDAQSPKRGLVPMEENSIYSSWQEVGEFPVVVQRTEAATRCQLKGPALLVLGPDAIQLREAKGTQALYSWPYHFLRKFGSDKGVFSFEAGRRCHSGEGLFAFSTPCAPDLCRAVAGAIARQRERLPELTRPQPCPLPRATSLPSLDTPGELREMPPGPEPPTSRKMHLAEPGPQSLPLLLGPEPNDLASGLYASVCKRASGPPGNEHLYENLCVLEASPTLHGGEPEPHEGPGSRSPTTSPIYHNGQDLSWPGPANDSTLEAQYRRLLELDQVEGTGRPDPQAGFKAKLVTLLSRERRKGPAPCDRP

SEQ ID NO: 44147 - protein, 228 aa, Homo sapiens
MDPLETPIKDGILYQQHVKFGKGTGEASSGSTDAQSPKRGLVPMEENSIYSSWQEVGEFPVVVQRTEAATRCQLKGPALLVLGPDAIQLREAKGTQALYSWPYHFLRKFGSDKILLGTPGVSLLICKGERTDDVSGIILDESLLRAYSVPGAGGHSRVQDSLGPVLREPTFQGERSFLKTSMLRSLLCSCSWRHPRSQPRTQASCLQGSDCPAPHRNSTSAAHTLGTS

SEQ ID NO: 44148 - protein, 144 aa, Homo sapiens
MDPLETPIKDGILYQQHVKFGKKCWRKVWALLYAGGPSGVARLESWEVRDGGLGAAGDRSAGPGRRGERRVIRLADCVSVLPADGESCPRDTGAFLLTTTERSHLLAAQHRQAWMGPICQLAFPGTGEASSGSTDAQSPKRGLV

SEQ ID NO: 44149 - protein, 156 aa, Homo sapiens
MDPLETPIKDGILYQQHVKFGKKCWRKVWALLYAGGPSGVARLESWEVRDGGLGAAGDRSAGPGRRGERRVIRLADCVSVLPADGESCPRDTGAFLLTTTERSHLLAAQHRQAWMGPICQLAFPGTGEASSGSTDAQSPKRGLVPMEENSIYSSWQ

SEQ ID NO: 44150 - protein, 43 aa, Homo sapiens
MDPLETPIKDGILYQQHVKFGKKCWRKVWALLYAGGPSGVARL

SEQ ID NO: 44151 - protein, 213 aa, Homo sapiens
MDPLETPIKDGILYQQHVKFGKKCWRKVWALLYAGGPSGVARLESWEVRDGGLGAAGDRSAGPGRRGERRVIRLADCVSVLPADGESCPRDTGAFLLTTTERSHLLAAQHRQAWMGPICQLAFPGTGEASSGSTDAQSPKRGLVPMEENSIYSSWQEVGEFPVVVQRTEAATRCQLKGPALLVLGPDAIQLREAKGTQALYSWPYHFLRKFGS

SEQ ID NO: 44152 - protein, 13 aa, Homo sapiens
MDPLETPIKDGIL

SEQ ID NO: 44153 - protein, 85 aa, Homo sapiens
MDPLETPIKDGILYQQHVKFGKKCWRKVWALLYAGGPSGVARLESWEVRDGGLGAAGDRSAGPGRRGERRVIRLADCVSVLPADG

SEQ ID NO: 44154 - protein, 326 aa, Homo sapiens
MATNFSDIVKQGYVKMKSRKLGIYRRCWLVFRKSSSKGPQRLEKYPDEKSVCLRGCPKVTEISNVKCVTRLPKETKRQAVAIIFTDDSARTFTCDSELEAEEWYKTLSVECLGSRLNDISLGEPDLLAPGVQCEQTDRFNVFLLPCPNLDVYGECKLQITHENIYLWDIHNPRVKLVSWPLCSLRRYGRDATRFTFEAGRMCDAGEGLYTFQTQEGEQIYQRVHSATLAIAEQHKRVLLEMEKNVRLLNKGTEHYSYPCTPTTMLPRSAYWHHITGSQNIAEASSYAGEGYGAAQASSETDLLNRFILLKPKPSQGDSSEAKTPSQ

SEQ ID NO: 44155 - protein, 306 aa, Homo sapiens [sequence omitted]

SEQ ID NO: 44156 - protein, 504 aa, Homo sapiens
MTEAALVEGQVKLRDGKKWKSRWLVLRKPSPVADCLLMLVYKDKSERIKGLRERSSLTLEDICGLEPGLPYEGLVHTLAIVCLSQAIMLGFDSHEAMCAWDARIRYALGEVHRFHVTVAPGTKLESGPATLHLCNDVLVLARDIPPAVTGQWKLSDLRRYGAVPSGFIFEGGTRCGYWAGVFFLSSAEGEQISFLFDCIVRGISPTKGPFGLRPVLPDPSPPGPSTVEERVAQEALETLQLEKRLSLLSHAGRPGSGGDDRSLSSSSSEASHLDVSASSRLTAWPEQSSSSASTSQEGPRPAAAQAAGEAMVGASRPPPKPLRPRQLQEVGRQSSSDSGIATGSHSSYSSSLSSYAGSSLDVWRATDELGSLLSLPAAGAPEPSLCTCLPGTVEYQVPTSLRAHYDTPRSLCLAPRDHSPPSQGSPGNSAARDSGGQTSAGCPSGWLGTRRRGLVMEAPQGSEATLPGPAPGEPWEAGGPHAGPPPAFFSACPVCGGLKVNPPP

SEQ ID NO: 44157 - protein, 608 aa, Homo sapiens
MTEAALVEGQVKLRDGKKWKSRWLVLRKPSPVADCLLMLVYKDKSERIKGLRERSSLTLEDICGLEPGLPYEGLVHTLAIVCLSQAIMLGFDSHEAMCAWDARIRYALGEVHRFHVTVAPGTKLESGPATLHLCNDVLVLARDIPPAVTGQWKLSDLRRYGAVPSGFIFEGGTRCGYWAGVFFLSSAEGEQISFLFDCIVRGISPTKGPFGLRPVLPDPSPPGPSTVEERVAQEALETLQLEKRLSLLSHAGRPGSGGDDRSLSSSSSEASHLDVSASSRLTAWPEQSSSSASTSQEGPRPAAAQAAGEAMVGASRPPPKPLRPRQLQEVGRQSSSDSGIATGSHSSYSSSLSSYAGSSLDVWRATDELGSLLSLPAAGAPEPSLCTCLPGTVEYQVPTSLRAHYDTPRSLCLAPRDHSPPSQGSPGNSAARDSGGQTSAGCPSGWLGTRRRGLVMEAPQGSEATLPGPAPGEPWEAGGPHAGPPPAFFSACPVCGGLKGAAASAPGPATAHSGSPGPVAVDSPGPERPRGESPTYVNIPVSPSSRKQLHYMGLELQEASEGVRGAGASLYAQIDIMATETAHRVGVRHARAREEQLSELEQRKAAPQ

SEQ ID NO: 44158 - protein, 255 aa, Homo sapiens
MTEAALVEGQVKLRDGKKWKSRWLVLRKPSPVADCLLMLVYKDKSERIKGLRERSSLTLEDICGLEPGLPYEGLVHTLAIVCLSQAIMLGFDSHEAMCAWDARIRYALGEVHRFHVTVAPGTKLESGPATLHLCNDVLVLARDIPPAVTGQWKLSDLRRYGAVPSGFIFEGGTRGWRLLPVLGRGGADQLPVRLHRPRHLPHQGPLWAAAGSTRPKSPGTLDCGGACGPGSPGNPTAGEAAEPPLTCGQAGQWRG

SEQ ID NO: 44159 - protein, 456 aa, Homo sapiens
MGYFRCARAGSFGRRRKMEPSTAARAWALFWLLLPLLGAVCASGPRTLVLLDNLNVRETHSLFFRSLKDRGFELTFKTADDPSLSLIKYGEFLYDNLIIFSPSVEDFGGNINVETISAFIDGGGSVLVAASSDIGDPLRELGSECGIEFDEEKTAVIDHHNYDISDLGQHTLIVADTENLLKAPTIVGKSSLNPILFRGVGMVADPDNPLVLDILTGSSTSYSFFPDKPITQYPHAVGKNTLLIAGLQARNNARVIFSGSLDFFSDSFFNSAVQKAAPGSQRYSQTGNYELAVALSRWVFKEEGVLRVGPVSHHRVGETAPPNAYTVTDLVEYSIVIQQLSNGKWVPFDGDDIQLEFVRIDPFVRTFLKKKGGKYSVQFKLPDVYGVFQFKVDYNRLGYTHLYSSTQVSVRPLQHTQYERFIPSAYPYYASAFSMMLGLFIFSIVFLHMKEKEKSD

SEQ ID NO: 44160 - protein, 419 aa, Homo sapiens
MGYFRCARAGSFGRRRKMEPSTAARAWALFWLLLPLLGAVCASGPRTLVLLDNLNVRETHSLFFRSLKDFGGNINVETISAFIDGGGSVLVAASSDIGDPLRELGSECGIEFDEEKTAVIDHHNYDISDLGQHTLIVADTENLLKAPTIVGKSSLNPILFRGVGMVADPDNPLVLDILTGSSTSYSFFPDKPITQYPHAVGKNTLLIAGLQARNNARVIFSGSLDFFSDSFFNSAVQKAAPGSQRYSQTGNYELAVALSRWVFKEEGVLRVGPVSHHRVGETAPPNAYTVTDLVEYSIVIQQLSNGKWVPFDGDDIQLEFVRIDPFVRTFLKKKGGKYSVQFKLPDVYGVFQFKVDYNRLGYTHLYSSTQVSVRPLQHTQYERFIPSAYPYYASAFSMMLGLFIFSIVFLHMKEKEKSD

SEQ ID NO: 44161 - protein, 92 aa, Homo sapiens
MTKLAQWLWGLAILGSTWVALTTGALGLELPLSCQEVLWPLPAYLLVSAGCYALGTVGYRVATFHDCEDAARELQSQIQEARADLARRGLRF

SEQ ID NO: 44162 - protein, 122 aa, Homo sapiens
MLSVGGLRLSLVRFSFLLLRGALLPSLAVTMTKLAQWLWGLAILGSTWVALTTGALGLELPLSCQEVLWPLPAYLLVSAGCYALGTVGYRVATFHDCEDAARELQSQIQEARADLARRGLRF

SEQ ID NO: 44163 - protein, 92 aa, Homo sapiens; identical to SEQ ID NO: 44161

SEQ ID NO: 44164 - protein, 396 aa, Homo sapiens
MDPRGTKRGAEKTEVAEPRNKLPRPAPSLPTDPALYSGPFPFYRRPSELGCFSLDAQRQYHGDARALRYYSPPPTNGPGPNFDLRDGYPDRYQPRDEEVQERLDHLLCWLLEHRGRLEGGPGWLAEAIVTWRGHLTKLLTTPYERQEGWQLAASRFQGTLYLSEVETPNARAQRLARPPLLRELMYMGYKFEQYMCADKPGSSPDPSGEVNTNVAFCSVLRSRLGSHPLLFSGEVDCTDPQAPSTQPPTCYVELKTSKEMHSPGQWRSFYRHKLLKWWAQSFLPGVPNVVAGFRNPDGFVSSLKTFPTMKMFEYVRNDRDGWNPSVCMNFCAAFLSFAQSTVVQDDPRLVHLFSWEPGGPVTVSVHQDAPYAFLPIWYVEAMTQDLPSPPKTPSPK

SEQ ID NO: 44165 - protein, 396 aa, Homo sapiens; identical to SEQ ID NO: 44164

SEQ ID NO: 44166 - protein, 396 aa, Homo sapiens; identical to SEQ ID NO: 44164

SEQ ID NO: 44167 - protein, 396 aa, Homo sapiens; identical to SEQ ID NO: 44164

SEQ ID NO: 44168 - protein, 396 aa, Homo sapiens; identical to SEQ ID NO: 44164

SEQ ID NO: 44169 - protein, 396 aa, Homo sapiens; identical to SEQ ID NO: 44164

SEQ ID NO: 44170 - protein, 396 aa, Homo sapiens
MDPRGTKRGAEKTEVAEPRNKLPRPAPSLPTDPALYSGPFPFYRRPSELGCFSLDAQRQYHGDARALRYYSPPPTNGPGPNFDLRDGYPDRYQPRDEEVQERLDHLLCWLLEHRGRLEGGPGWLAEAIVTWRGHLTKLLTTPYERQEGWQLAASRFQGTLYLSEVETPNARAQRLARPPLLRELMYMGYKFEQYMCADKPGSSPDPSGEVNTNVAFCSVLRSRLGSHPLLFSGEVDCTDPQAPSTQPPTCYVELKTSKEMQSPGQWRSFYRHKLLKWWAQSFLPGVPNVVAGFRNPDGFVSSLKTFPTMKMFEYVRNDRDGWNPSVCMNFCAAFLSFAQSTVVQDDPRLVHLFSWEPGGPVTVSVHQDAPYAFLPIWYVEAMTQDLPSPPKTPSPK

SEQ ID NO: 44171 - protein, 396 aa, Homo sapiens; identical to SEQ ID NO: 44164

SEQ ID NO: 44172 - protein, 396 aa, Homo sapiens; identical to SEQ ID NO: 44164

SEQ ID NO: 44173 - protein, 396 aa, Homo sapiens; identical to SEQ ID NO: 44164

SEQ ID NO: 44174 - protein, 396 aa, Homo sapiens; identical to SEQ ID NO: 44164

SEQ ID NO: 44175 - protein, 396 aa, Homo sapiens; identical to SEQ ID NO: 44170

SEQ ID NO: 44176 - protein, 396 aa, Homo sapiens; identical to SEQ ID NO: 44164

SEQ ID NO: 44177 - protein, 396 aa, Homo sapiens; identical to SEQ ID NO: 44164

SEQ ID NO: 44178 - protein, 396 aa, Homo sapiens; identical to SEQ ID NO: 44164

SEQ ID NO: 44179 - protein, 396 aa, Homo sapiens; identical to SEQ ID NO: 44164

SEQ ID NO: 44180 - protein, 396 aa, Homo sapiens; identical to SEQ ID NO: 44164

SEQ ID NO: 44181 - protein, 396 aa, Homo sapiens; identical to SEQ ID NO: 44170

SEQ ID NO: 44182 - protein, 480 aa, Homo sapiens
MNASEFRRRGKEMVDYMANYMEGIEGRQVYPDVEPGYLRPLIPAAAPQEPDTFEDIINDVEKIIMPGVTHWHSPYFFAYFPTASSYPAMLADMLCGAIGCIGFSWAASPACTELETVMMDWLGKMLELPKAFLNEKAGEGGGVIQGSASEATLVALLAARTKVIHRLQAASPELTQAAIMEKLVAYSSDQAHSSVERAGLIGGVKLKAIPSDGNFAMRASALQEALERDKAAGLIPFFMVATLGTTTCCSFDNLLEVGPICNKEDIWLHVDAAYAGSAFICPEFRHLLNGVEFADSFNFNPHKWLLVNFDCSAMWVKKRTDLTGAFRLDPTYLKHSHQDSGLITDYRHWQIPLGRRFRSLKMWFVFRMYGVKGLQAYIRKHVQLSHEFESLVRQDPRFEICVEVILGLVCFRLKGSNKVNEALLQRINSAKKIHLVPCHLRDKFVLRFAICSRTVESAHVQRAWEHIKELAADVLRAERE

SEQ ID NO: 44183 - protein, 31 aa, Homo sapiens
MNASEFRRRGKEMVDYMANYMEGIEGRQVYP

SEQ ID NO: 44184 - protein, 16 aa, Homo sapiens
MNASEFRRRGKEMVDY

SEQ ID NO: 44185 - protein, 480 aa, Homo sapiens; identical to SEQ ID NO: 44182

SEQ ID NO: 44186 - protein, 338 aa, Homo sapiens
MNASEFRRRGKEMVDYMANYMEGIEGRQVYPDVEPGYLRPLIPAAAPQEPDTFEDIINDVEKIIMPGVTHWHSPYFFAYFPTASSYPAMLADMLCGAIGCIGFSWAASPACTELETVMMDWLGKMLELPKAFLNEKAGEGGGVIQGSASEATLVALLAARTKVIHRLQAASPELTQAAIMEKLVAYSSDQAHSSVERAGLIGGVKLKAIPSDGNFAMRASALQEALERDKAAGLIPFFMVATLGTTTCCSFDNLLEVGPICNKEDIWLHVDAAYAGSAFICPEFRHLLNGVEFADSFNFNPHKWLLVNFDCSAMWSRQPVRMLRLKKTCLVSAVVRRS

SEQ ID NO: 44187 - protein, 402 aa, Homo sapiens
MNASEFRRRGKEMVDYMANYMEGIEGRQVYPDVEPGYLRPLIPAAAPQEPDTFEDIINDVEKIIMPGGSASEATLVALLAARTKVIHRLQAASPELTQAAIMEKLVAYSSDQAHSSVERAGLIGGVKLKAIPSDGNFAMRASALQEALERDKAAGLIPFFMVATLGTTTCCSFDNLLEVGPICNKEDIWLHVDAAYAGSAFICPEFRHLLNGVEFADSFNFNPHKWLLVNFDCSAMWVKKRTDLTGAFRLDPTYLKHSHQDSGLITDYRHWQIPLGRRFRSLKMWFVFRMYGVKGLQAYIRKHVQLSHEFESLVRQDPRFEICVEVILGLVCFRLKGSNKVNEALLQRINSAKKIHLVPCHLRDKFVLRFAICSRTVESAHVQRAWEHIKELAADVLRAERE

SEQ ID NO: 44188 - protein, 387 aa, Homo sapiens
MNASEFRRRGKEMVDYMANYMEGIEGRQVYPDVEPGYLRPLIPAAAPQEPDTFEDIINDVEKIIMPGVTHWHSPYFFAYFPTASSYPAMLADMLCGAIGCIGFSWAASPACTELETVMMDWLGKMLELPKAFLNEKAGEGGGVIQMVATLGTTTCCSFDNLLEVGPICNKEDIWLHVDAAYAGSAFICPEFRHLLNGVEFADSFNFNPHKWLLVNFDCSAMWVKKRTDLTGAFRLDPTYLKHSHQDSGLITDYRHWQIPLGRRFRSLKMWFVFRMYGVKGLQAYIRKHVQLSHEFESLVRQDPRFEICVEVILGLVCFRLKGSNKVNEALLQRINSAKKIHLVPCHLRDKFVLRFAICSRTVESAHVQRAWEHIKELAADVLRAERE

SEQ ID NO: 44189 - protein, 244 aa, Homo sapiens
MREAAFMYSTAVAIFLVILVAALQGSAPRESPLPYHIPLDPEGSLELSWNVSYTQEAIHFQLLVRRLKAGVLFGMSDRGELENADLVVLWTDGDTAYFADGTVHLVYGILEEPFRSLEAINGSGLQMGLQRVQLLKPNIPEPELPSDACTMEVQAPNIQIPSQETTYWCYIKELPKGFSRHHIIKYEPIVTKGNEALVHHMEVFQCAPEMDSVPHFSGPCDSKMKPDRLNYCRHVLAAWALGAK

SEQ ID NO: 44190 - protein, 617 aa, Homo sapiens
MPALSRWASLPGPSMREAAFMYSTAVAIFLVILVAALQGSAPRESPLPYHIPLDPEGSLELSWNVSYTQEAIHFQLLVRRLKAGVLFGMSDRGELENADLVVLWTDGDTAYFADAWSDQKGQIHLDPQQDYQLLQVQRTPEGLTLLFKRPFGTCDPKDYLIEDGTVHLVYGILEEPFRSLEAINGSGLQMGLQRVQLLKPNIPEPELPSDACTMEVQAPNIQIPSQETTYWCYIKELPKGFSRHHIIKYEPIVTKGNEALVHHMEVFQCAPEMDSVPHFSGPCDSKMKPDRLNYCRHVLAAWALGAKAFYYPEEAGLAFGGPGSSRYLRLEVHYHNPLVIEGRNDSSGIRLYYTAKLRRFNAGIMELGLVYTPVMAIPPRETAFILTGYCTDKCTQLALPPSGIHIFASQLHTHLTGRKVVTVLVRDGREWEIVNQDNHYSPHFQEIRMLKKVVSVHPGDVLITSCTYNTEDRELATVGGFGILEEMCVNYVHYYPQTQLELCKSAVDAGFLQKYFHLINRFNNEDVCTCPQASVSQQFTSVPWNSFNRDVLKALYSFAPISMHCNKSSAVRFQGEWNLQPLPKVISTLEEPTPQCPTSQGRSPAGPTVVSIGGGKG

SEQ ID NO: 44191 - protein, 446 aa, Homo sapiens
MRTLNTSAMDGTGLVVERDFSVRILTACFLSLLILSTLLGNTLVCAAVIRFRHLRSKVTNFFVISLAVSDLLVAVLVMPWKAVAEIAGFWPFGSFCNIWVAFDIMCSTASILNLCVISVDRYWAISSPFRYERKMTPKAAFILISVAWTLSVLISFIPVQLSWHKAKPTSPSDGNATSLAETIDNCDSSLSRTYAISSSVISFYIPVAIMIVTYTRIYRIAQKQIRRIAALERAAVHAKNCQTTTGNGKPVECSQPESSFKMSFKRETKVLKTLSVIMGVFVCCWLPFFILNCILPFCGSGETQPFCIDSNTFDVFVWFGWANSSLNPIIYAFNADFRKAFSTLLGCYRLCPATNNAIETVSINNNGAAMFSSHHEPRGSISKECNLVYLIPHAVGSSEDLKKEEAAGIARPLEKLSPALSVILDYDTDVSLEKIQPITQNGQHPT

SEQ ID NO: 44192 - protein, 446 aa, Homo sapiens; identical to SEQ ID NO: 44191

SEQ ID NO: 44193 - protein, 414 aa, Homo sapiens
MDPLNLSWYDDDLERQNWSRPFNGSDGKADRPHYNYYATLLTLLIAVIVFGNVLVCMAVSREKALQTTTNYLIVSLAVADLLVATLVMPWVVYLEVVGEWKFSRIHCDIFVTLDVMMCTASILNLCAISIDRYTAVAMPMLYNTRYSSKRRVTVMISIVWVLSFTISCPLLFGLNNADQNECIIANPAFVVYSSIVSFYVPFIVTLLVYIKIYIVLRRRRKRVNTKRSSRAFRAHLRAPLKEAARRAQELEMEMLSSTSPPERTRYSPIPPSHHQLTLPDPSHHGLHSTPDSPAKPEKNGHAKDHPKIAKIFEIQTMPNGKTRTSLKTMSRRKLSQQKEKKATQMLAIVLGVFIICWLPFFITHILNIHCDCNIPPVLYSAFTWLGYVNSAVNPIIYTTFNIEFRKAFLKILHC

SEQ ID NO: 44194 - protein, 445 aa, Homo sapiens
MDPLNLSWYDDDLERQNWSRPFNGSDGKADRPHYNYYATLLTLLIAVIVFGNVLVCMAVSREKALQTTTNYLIVSLAVADLLVATLVMPWVVYLEVVGEWKFSRIHCDIFVTLDVMMCTASILNLCAISIDRYTAVAMPMLYNTRYSSKRRVTVMISIVWVLSFTISCPLLFGLNNADQNECIIANPAFVVYSSIVSFYVPFIVTLLVYIKIYIVLRRRRKRVNTKRSSRAFRAHLRAPLKGNCTHPEDMKLCTVIMKSNGSFPVNRRRVVQEAARRAQELEMEMLSSTSPPERTRYSPIPPSHHQLTLPDPSHHGLHSTPDSPAKPEKNGHAKDHPKIAKIFEIQTMPNGKTRTSLKTMSRRKLSQQKEKKATQMLAIVLGVFIICWLPFFITHILNIHCDCNIPPVLYSAFTWLGYVNSAVNPIIYTTFNIEFRKAFLKILHC

SEQ ID NO: 44195 - protein, 443 aa, Homo sapiens
MDPLNLSWYDDDLERQNWSRPFNGSDGKADRPHYNYYATLLTLLIAVIVFGNVLVCMAVSREKALQTTTNYLIVSLAVADLLVATLVMPWVVYLEVVGEWKFSRIHCDIFVTLDVMMCTASILNLCAISIDRYTAVAMPMLYNTRYSSKRRVTVMISIVWVLSFTISCPLLFGLNNADQNECIIANPAFVVYSSIVSFYVPFIVTLLVYIKIYIVLRRRRKRVNTKRSSRAFRAHLRAPLKGNCTHPEDMKLCTVIMKSNGSFPVNRRRVEAARRAQELEMEMLSSTSPPERTRYSPIPPSHHQLTLPDPSHHGLHSTPDSPAKPEKNGHAKDHPKIAKIFEIQTMPNGKTRTSLKTMSRRKLSQQKEKKATQMLAIVLGVFIICWLPFFITHILNIHCDCNIPPVLYSAFTWLGYVNSAVNPIIYTTFNIEFRKAFLKILHC

SEQ ID NO: 44196 - protein, 445 aa, Homo sapiens; identical to SEQ ID NO: 44194

SEQ ID NO: 44197 - protein, 7 aa, Homo sapiens
MDPLNLS

SEQ ID NO: 44198 - protein, 443 aa, Homo sapiens; identical to SEQ ID NO: 44195

SEQ ID NO: 44199 - protein, 177 aa, Homo sapiens
MDPLNLSWYDDDLERQNWSRPFNGSDGKADRPHYNYYATLLTLLIAVIVFGNVLVCMAVSREKALQTTTNYLIVSLAVADLLVATLVMPWVVYLEVVGEWKFSRIHCDIFVTLDVMMCTASILNLCAISIDRYTAVAMPMLYNTRYSSKRRVTVMISIVWVLSFTISCPLLFGLNNA

SEQ ID NO: 44200 - protein, 442 aa, Homo sapiens
MDPLNLSWYDDDLERQNWSRPFNGSDGKADRPHYNYYATLLTLLIAVIVFGNVLVCMAVSREKALQTTTNYLIVSLAVADLLVATLVMPWVVYLEVGEWKFSRIHCDIFVTLDVMMCTASILNLCAISIDRYTAVAMPMLYNTRYSSKRRVTVMISIVWVLSFTISCPLLFGLNNADQNECIIANPAFVVYSSIVSFYVPFIVTLLVYIKIYIVLRRRRKRVNTKRSSRAFRAHLRAPLKGNCTHPEDMKLCTVIMKSNGSFPVNRRRVEAARRAQELEMEMLSSTSPPERTRYSPIPPSHHQLTLPDPSHHGLHSTPDSPAKPEKNGHAKDHPKIAKIFEIQTMPNGKTRTSLKTMSRRKLSQQKEKKATQMLAIVLGVFIICWLPFFITHILNIHCDCNIPPVLYSAFTWLGYVNSAVNPIIYTTFNIEFRKAFLKILHC

SEQ ID NO: 44201 - protein, 342 aa, Homo sapiens
MASLSQLSGHLNYTCGAENSTGASQARPHAYYALSYCALILAIVFGNGLVCMAVLKERALQTTTNYLVVSLAVADLLVATLVMPWVVYLEVTGGVWNFSRICCDVFVTLDVMMCTASILNLCAISIDRYTAVVMPVHYQHGTGQSSCRRVALMITAVWVLAFAVSCPLLFGFNTTGDPTVCSISNPDFVIYSSVVSFYLPFGVTVLVYARIYVVLKQRRRKRILTRQNSQCNSVRPGFPQQTLSPDPAHLELKRYYSICQDTALGGPGFQERGGELKREEKTRNSLSATSGEEGNPNGGHCAWGLHCLLAALLLDPCSQYPLPDMPRVPRALQCHDMAGLRE

SEQ ID NO: 44202 - protein, 367 aa, Homo sapiens
MASLSQLSGHLNYTCGAENSTGASQARPHAYYALSYCALILAIVFGNGLVCMAVLKERALQTTTNYLVVSLAVADLLVATLVMPWVVYLEVTGGVWNFSRICCDVFVTLDVMMCTASILNLCAISIDRYTAVVMPVHYQHGTGQSSCRRVALMITAVWVLAFAVSCPLLFGFNTTGDPTVCSISNPDFVIYSSVVSFYLPFGVTVLVYARIYVVLKQRRRKRILTRQNSQCNSVRPGFPQQTLSPDPAHLELKRYYSICQDTALGGPGFQERGGELKREEKTRNSLMPLREKKATQMVAIVLGAFIVCWLPFFLTHVLNTHCQTCHVSPELYSATTWLGYVNSALNPVIYTTFNIEFRKAFLKILSC

SEQ ID NO: 44203 - protein, 400 aa, Homo sapiens
MASLSQLSGHLNYTCGAENSTGASQARPHAYYALSYCALILAIVFGNGLVCMAVLKERALQTTTNYLVVSLAVADLLVATLVMPWVVYLEVTGGVWNFSRICCDVFVTLDVMMCTASILNLCAISIDRYTAVVMPVHYQHGTGQSSCRRVALMITAVWVLAFAVSCPLLFGFNTTGDPTVCSISNPDFVIYSSVVSFYLPFGVTVLVYARIYVVLKQRRRKRILTRQNSQCNSVRPGFPQQTLSPDPAHLELKRYYSICQDTALGGPGFQERGGELKREEKTRNSLSPTIAPKLSLEVRKLSNGRLSTSLKLGPLQPRGVPLREKKATQMVAIVLGAFIVCWLPFFLTHVLNTHCQTCHVSPELYSATTWLGYVNSALNPVIYTTFNIEFRKAFLKILSC

SEQ ID NO: 44204 - protein, 400 aa, Homo sapiens; identical to SEQ ID NO: 44203

SEQ ID NO: 44205 - protein, 400 aa, Homo sapiens; identical to SEQ ID NO: 44203

SEQ ID NO: 44206 - protein, 419 aa, Homo sapiens
MGNRSTADADGLLAGRGPAAGASAGASAGLAGQGAAALVGGVLLIGAVLAGNSLVCVSVATERALQTPTNSFIVSLAAADLLLALLVLPLFVYSEVQGGAWLLSPRLCDALMAMDVMLCTASIFNLCAISVDRFVAVAVPLRYNRQGGSRRQLLLIGATWLLSAAVAAPVLCGLNDVRGRDPAVCRLEDRDYVVYSSVCSFFLPCPLMLLLYWATFRGLQRWEVARRAKLHGRAPRRPSGPGPPSPTPPAPRLPQDPCGPDCAPPAPGLPRGPCGPDCAPAAPSLPQDPCGPDCAPPAPGLPPDPCGSNCAPPDAVRAAALPPQTPPQTRRRRRAKITGRERKAMRVLPVVVGAFLLCWTPFFVVHITQALCPACSVPPRLVSAVTWLGYVNSALNPVIYTVFNAEFRNVFRKALRACC

SEQ ID NO: 44207 - protein, 477 aa, Homo sapiens
MLPPGSNGTAYPGQFALYQQLAQGNAVGGSAGAPPLGPSQVVTACLLTLLIIWTLLGNVLVCAAIVRSRHLRANMTNVFIVSLAVSDLFVALLVMPWKAVAEVAGYWPFGAFCDVWVAFDIMCSTASILNLCVISVDRYWAISRPFRYKRKMTQRMALVMVGLAWTLSILISFIPVQLNWHRDQAASWGGLDLPNNLANWTPWEEDFWEPDVNAENCDSSLNRTYAISSSLISFYIPVAIMIVTYTRIYRIAQVQIRRISSLERAAEHAQSCRSSAACAPDTSLRASIKKETKVLKTLSVIMGVFVCCWLPFFILNCMVPFCSGHPEGPPAGFPCVSETTFDVFVWFGWANSSLNPVIYAFNADFQKVFAQLLGCSHFCSRTPVETVNISNELISYNQDIVFHKEIAAAYIHMMPNAVTPGNREVDNDEEEGPFDRMFQIYQTSPDGDPVAESVWELDCEGEISLDKITPFTPNGFH

SEQ ID NO: 44208 - protein, 145 aa, Homo sapiens
MDPEEQELLNDYRYRSYSSVIEKALRNFESSSEWADLISSLGKLNKALQSNLRYSLLPRRLLISKRLAQCLHPALPSGVHLKALETYEIIFKIVGTKWLAKDLFLYSCGLFPLLAHAAVSVRPVLLTLYEKYFLPLQKLLLPSLQ

SEQ ID NO: 44209 - protein, 2298 aa, Homo sapiens
MDPEEQELLNDYRYRSYSSVIEKALRNFESSSEWADLISSLGKLNKALQSNLRYSLLPRRLLISKRLAQCLHPALPSGVHLKALETYEIIFKIVGTKWLAKDLFLYSCGLFPLLAHAAVSVRPVLLTLYEKYFLPLQKLLLPSLQAFIVGLLPGLEEGSEISDRTDALLLRLSLVVGKEVFYTALWGSVLASPSIRLPASVFVVGHINRDAPGREQKYMLGTNHQLTVKSLRASLLDSNVLVQRNNLEIVLFFFPFYTCLDSNERAIPLLRSDIVRILSAATQTLLRRDMSLNRRLYAWLLGSDIKGNTVVPESEISNSYEDQSSYFFEKYSKDLLVEGLAEILHQKFIDADVEERHHAYLKPFRVLISLLDKPEIGPQVVGNLFLEVIRAFYSYCRDALGSDLKLSYTQSGNSLISAIKENRNASEIVKTVNLLITSLSTDFLWDYMTRCFEECFRPVKQRYSVRNSVSPPPTVSELCALLVFLLDVIPLELYSEVQTQYLPQVLGCLVQPLAEDMEALSLPELTHALKTCFKVLSKVQMPPSYLDTESTSGTSSPVKGENGKIILETKAVIPGDEDASFPPLKSEDSGIGLSASSPELSEHLRVPRVSLERDDVWKKGGSMQRTFLCIQELIANFASKNIFGVQLTASGEESKSEEPAGKRDRDGTQSLAANDSSRKNSWEPKPITVPQFKQMLSDLFTARGSPFKTKSSESPSSSPSSPARKNGGEWDVEKVVIDLGGSREERREAFAAACHLLLDCATFPVYLSEEETEQLCATLFQLPGAGDSSFPSWLKSLMTICCCVTDCYLQNVAISTLLEVINHSQSLALVIEDKMKRYKSSGHNPFFGKLQMVTVPPIAPGILKVIAEKTDFYQRVARVLWNQLNKETREHHVTCVELFYRLHCLAPTANICEDIICHALLDPDKGTRLEALFRFSVIWHLTREIQGSRVTSHNRSFDRSLFVVLDSLACTDGAIGAAAQGWLVRALSLGDVARILEPVLLLLLQPKTQRTSIHCLKQENSADDLHRWFNRKKTSFREACAVPEPQESGSEEHLPLSQFTTVDREAIWAEVEKEPEKYPLRGELSEEELPYYVELPDRTAHGAPDSSEHTESADTSSCHTDSENTSSFSSPSHDLQELSNEENCCAPIPMGGRAYPKRSALLAAFQSESFKAGAKLSLVRVDSDKTQASESFSSDEEADLELQALTTSRLLKQQRERQEAVEALFKHILLYLQPYDSRRVLYAFSVLEAVLKTNPKEFIEAVSRTSMDTSSTAHLNLISNLLARHQEALIGQSFYGKLQTQVPNVCPHSLLLELLTYLCLSFLRSYYPCYLKVSHRDILGNRDVQVKSVEVLIRIMMQLVSVAKSSEGKNVEFIHSLLQRCKVQEFVLLSLSASMYTSQKRYGLATAHHGRALPEDSLFEESLINLGQDQIWSEHPLQIELLKLLQVLIVLEHHLGRAHEEAENQPDLSREWQRALNFQQAISALQYVQPHPLTSQGLLVSAVVRGLQPAYGYGMHPAWVSLVTHSLPYFGKSLGWTVTPFVVQICKNLDDLVKQYESESVKLSVSTTSKRENISPDYPLTLLEGLTTISHFCLLEQANQNKKTMAAGDPANLRNARNAILEELPRTVNTMALLWNVLRKEETQKRPVDLLGATKGSSSVYFKTTKTIRQKILDFLNPLTAHLGVQLTAAVAAVWSRKKAQRHSKMKIIPTASASQLTLVDLVCALSTLQTDTLLHLVKEVVKRPPQVKGGDEKSPLVDIPVLQFCYAFLQRLPVPALQENFSSLLGVLKESVQLNLAPPGYFLLLSMLNDFVTRTPNLENKKDQKDLQEITQKILEAVGNIAGSSLEQTSWLSRNLEVKAQPQASLEESDAEEDLYDAAAASAMVSSSAPSVYSVQALSLLAEVLASLLDMVYRSDEKEKAVPLISRLLYYVFPYLRNHSAYNAPSFRAGAQLLSSLSGYAYTKRAWRKEVLELFLDPAFFQMDTSCVHWKSIIDHLLTHEKTMFKDLMNMQSSSLKLFSSFEQKAMLLKRQAFAVFSGELDQYHLYLPLIQERLTDNLRVGQTSIVAAQMFLFFRVLLLRISPQHLTSLWPIMVSELIQTFTQLEEDLKDEDESLRSTNKVNRTKVSVPDANGPSVGEIPQSELILYLSACKFLDTALSFPPDKMPLFQIYRWAFIPEVDTEGPAFLSDVEENHQECKPHTVRILELLKLKFGEISSSDEITMKSEFPLLRQHSVSSIRQLMPFFMTLNGAFKTQRQLPADSPGTPFLDFPVTDSPRILKQLEECIEYDFLEHPEC

SEQ ID NO: 44210 - protein, 263 aa, Homo sapiens
MFYFHCPPQLEGTATFGNHSSGDFDDGFLRRKQRRNRTTFTLQQLEALEAVFAQTHYPDVFTREELAMKINLTEARVQVWFQNRRAKWRKTERGASDQEPGAKEPMAEVTPPPVRNINSPPPGDQARSKKEALEAQQSLGRTVGPAGPFFPSCLPGTLLNTATYAQALSHVASLKGGPLCSCCVPDPMGLSFLPTYGCQSNRTASVATLRMKAREHSEAVLQSANLLPSTSSSPGPVAKPAPPDGSQEKTSPTKEQSEAEKSV

SEQ ID NO: 44211 - protein, 268 aa, Homo sapiens
MVLMSCDQRLISLLLVGTATFGNHSSGDFDDGFLRRKQRRNRTTFTLQQLEALEAVFAQTHYPDVFTREELAMKINLTEARVQVWFQNRRAKWRKTERGASDQEPGAKEPMAEVTPPPVRNINSPPPGDQARSKKEALEAQQSLGRTVGPAGPFFPSCLPGTLLNTATYAQALSHVASLKGGPLCSCCVPDPMGLSFLPTYGCQSNRTASVATLRMKAREHSEAVLQSANLLPSTSSSPGPVAKPAPPDGSQEKTSPTKEQSEAEKSV

SEQ ID NO: 44212 - protein, 1740 aa, Homo sapiens
MGEKLELRLKSPVGAEPAVYPWPLPVYDKHHDAAHEIIETIRWVCEEIPDLKLAMENYVLIDYDTKSFESMQRLCDKYNRAIDSIHQLWKGTTQPMKLNTRPSTGLLRHILQQVYNHSVTDPEKLNNYEPFSPEVYGETSFDLVAQMIDEIKMTDDDLFVDLGSGVGQVVLQVAAATNCKHHYGVEKADIPAKYAETMDREFRKWMKWYGKKHAEYTLERGDFLSEEWRERIANTSVIFVNNFAFGPEVDHQLKERFANMKEGGRIVSSKPFAPLNFRINSRNLSDIGTIMRVVELSPLKGSVSWTGKPVSYYLHTIDRTILENYFSSLKNPKLREEQEAARRRQQRESKSNAATPTKGPEGKVAGPADAPMDSGAEEEKAGAATVKKPSPSKARKKKLNKKGRKMAGRKRGRPKKMNTANPERKPKKNQTALDALHAQTVSQTAASSPQDAYRSPHSPFYQLPPSVQRHSPNPLLVAPTPPALQKLLESFKIQYLQFLAYTKTPQYKASLQELLGQEKEKNAQLLGAAQQLLSHCQAQKEEIRRLFQQKLDELGVKALTYNDLIQAQKEISAHNQQLREQSEQLEQDNRALRGQSLQLLKARCEELQLDWATLSLEKLLKEKQALKSQISEKQRHCLELQISIVELEKSQRQQELLQLKSCVPPDDALSLHLRGKGALGRELEPDASRLHLELDCTKFSLPHLSSMSPELSMNGQAAGYELCGVLSRPSSKQNTPQYLASPLDQEVVPCTPSHVGRPRLEKLSGLAAPDYTRLSPAKIVLRRHLSQDHTVPGRPAASELHSRAEHTKENGLPYQSPSVPGSMKLSPQDPRPLSPGALQLAGEKSSEKGLRERAYGSSGELITSLPISIPLSTVQPNKLPVSIPLASVVLPSRAERARSTPSPVLQPRDPSSTLEKQIGANAHGAGSRSLALAPAGFSYAGSVAISGALAGSPASLTPGAEPATLDESSSSGSLFATVGSRSSTPQHPLLLAQPRNSLPASPAHQLSSSPRLGGAAQGPLPEASKGDLPSDSGFSDPESEAKRRIVFTITTGAGSAKQSPSSKHSPLTASARGDCVPSHGQDSRRRGRRKRASAGTPSLSAGVSPKRRALPSVAGLFTQPSGSPLNLNSMVSNINQPLEITAISSPETSLKSSPVPYQDHDQPPVLKKERPLSQTNGAHYSPLTSDEEPGSEDEPSSARIERKIATISLESKSPPKTLENGGGLAGRKPAPAGEPVNSSKWKSTFSPISDIGLAKSADSPLQASSALSQNSLFTFRPALEEPSADAKLAAHPRKGFPGSLSGADGLSPGTNPANGCTFGGGLAADLSLHSFSDGASLPHKGPEAAGLSSPLSFPSQRGKEGSDANPFLSKRQLDGLAGLKGEGSRGKEAGEGGLPLCGPTDKTPLLSGKAAKARDREVDLKNGHNLFISAAAVPPGSLLSGPGLAPAASSAGGAASSAQTHRSFLGPFPPGPQFALGPMSLQANLGSVAGSSVLQSLFSSVPAAAGLVHVSSAATRLTNSHAMGSFSGVAGGTVGAGGVFNHAVPSASAHPFGARVGRGAACGSATLGPSPLQAAASASASSFQAPASVETRPPPPPPPPPPPLPPPAHLGRSPAGPPVLHAPPPPNAALPPPPTLLASNPEPALLQSLASLPPNQAFLPPTSAASLPPANASLSIKLTSLPHKGARPSFTVHHQPLPRLALAQAAPGIPQASATGPSAVWVSLGMPPPYAAHLSGVKPR

SEQ ID NO: 44213 - protein, 1537 aa, Homo sapiens
MGEKLELRLKSPVGAEPAVYPWPLPVYDKHHDAAHEIIETIRWVCEEIPDLKLAMENYVLIDYDTKSFESMQRLCDKYNRAIDSIHQLWKGTTQPMKLNTRPSTGLLRHILQQVYNHSVTDPEKLNNYEPFSPEVYGETSFDLVAQMIDEIKMTDDDLFVDLGSGVGQVVLQVAAATNCKHHYGVEKADIPAKYAETMDREFRKWMKWYGKKHAEYTLERGDFLSEEWRERIANTSVIFVNNFAFGPEVDHQLKERFANMKEGGRIVSSKPFAPLNFRINSRNLSDIGTIMRVVELSPLKGSVSWTGKPVSYYLHTIDRTILENYFSSLKNPKLREEQEAARRRQQRESKSNAATPTKGPEGKVAGPADAPMDSGAEEEKAGAATVKKPSPSKARKKKLNKKGRKMAGRKRGRPKKMNTANPERKPKKNQTALDALHAQTVSQTAASSPQDAYRSPHSPFYQLPPSVQRHSPNPLLVAPTPPALQKLLESFKIQYLQFLAYTKTPQYKASLQELLGQEKEKNAQLLGAAQQLLSHCQAQKEEIRRLFQQKLDELGVKALTYNDLIQAQKEISAHNQQLREQSEQLEQDNRALRGQSLQLLKARCEELQLDWATLSLEKLLKEKQALKSQISEKQRHCLELQISIVELEKSQRQQELLQLKSCVPPDDALSLHLRGKGALGRELEPDASRLHLELDCTKFSLPHLSSMSPELSMNGQAAGYELCGVLSRPSSKQNTPQYLASPLDQEVVPCTPSHVGRPRLEKLSGLAAPDYTRLSPAKIVLRRHLSQDHTVPGRPAASELHSRAEHTKENGLPYQSPSVPGSMKLSPQDPRPLSPGALQLAGEKSSEKGLRERAYGSSGELITSLPISIPLSTVQPNKLPVSIPLASVVLPSRAERARSTPSPVLQPRDPSSTLEKQIGANAHGAGSRSLALAPAGFSYAGSVAISGALAGSPASLTPGAEPATLDESSSSGSLFATVGSRSSTPQHPLLLAQPRNSLPASPAHQLSSSPRLGGAAQGPLPEASKGDLPSDSGFSDPESEAKRRIVFTITTGAGSAKQSPSSKHSPLTASARGDCVPSHGQDSRRRGRRKRASAGTPSLSAGVSPKRRALPSVAGLFTQPSGSPLNLNSMVSNINQPLEITAISSPETSLKSSPVPYQDHDQPPVLKKERPLSQTNGAHYSPLTSDEEPGSEDEPSSARIERKIATISLESKSPPKTLENGGGLAGRKPAPAGEPVNSSKWKSTFSPISDIGLAKSADSPLQASSALSQNSLFTFRPALEEPSADAKLAAHPRKGFPGSLSGADGLSPGTNPANGCTFGGGLAADLSLHSFSDGASLPHKGPEAAGLSSPLSFPSQRGKEGSDANPFLSKRQLDGLAGLKGEGSRGKEAGEGGLPLCGPTDKTPLLSGKAAKARDREVDLKNGHNLFISAAAVPPGSLLSGPGLAPAASSAGGAASSAQTHRSFLGPFPPGPQFALGPMSLQANLGSVAGSSVLQSLFSSVPAAAGLVHVSSAATRLTNSHAMGSFSGVAGGTVGGN

SEQ ID NO: 44214 - protein, 400 aa, Homo sapiens
MRGRRGDRMTINIQEHMAINVCPGPIRPIRQISDYFPRGPGPEGGGGGGGEAPAHLVPLALAPPAALLGATTPEDGAEVDSYDSDDATALGTLEFDLLYDRASCTLHCSILRAKGLKPMDFNGLADPYVKLHLLPGACKANKLKTKTQRNTLNPVWNEDLTYSGITDDDITHKVLRIAVCDEDKLSHNEFIGEIRVPLRRLKPSQKKHFNICLERQVPLASPSSMSAALRGISCYLKELEQAEQGQGLLEERGRILLSLSYSSRRRGLLVGILRCAHLAAMDVNGYSDPYVKTYLRPDVDKKSKHKTCVKKKTLNPEFNEEFFYEIELSTLATKTLEVTVWDYDIGKSNDFIGGVSLGPGARGEARKHWSDCLQQPDAALERWHTLTSELPPAAGALSSA

SEQ ID NO: 44215 - protein, 308 aa, Homo sapiens [sequence omitted]

SEQ ID NO: 44216 - protein, 308 aa, Homo sapiens [sequence omitted]

SEQ ID NO: 44217 - protein, 424 aa, Homo sapiens
MALPTPSDSTLPAEARGRGRRRRLVWTPSQSEALRACFERNPYPGIATRERLAQAIGIPEPRVQIWFQNERSRQLRQHRRESRPWPGRRGPPEGRRKRTAVTGSQTALLLRAFEKDRFPGIAAREELARETGLPESRIQIWFQNRRARHPGQGGRAPAQAGGLCSAAPGGGHPAPSWVAFAHTGAWGTGLPAPHVPCAPGALPQGAFVSQAARAAPALQPSQAAPAEGVSQPAPARGDFAYAAPAPPDGALSHPQAPRWPPHPGKSREDRDPQRDGLPGPCAVAQPGPAQAGPQGQGVLAPPTSQGSPWWGWGRGPQVAGAAWEPQAGAAPPPQPAPPDASASARQGQMQGIPAPSQALQEPAPWSALPCGLLLDELLASPEFLQQAQPLLETEAPGELEASEEAASLEAPLSEEEYRALLEEL

SEQ ID NO: 44218 - protein, 485 aa, Homo sapiens
MKGWSLPACGPLQGRLAGWLAVRAGLLAAPAAVHSPAEVHGSPPASLCPRPSVKFRPGLTAMALPTPSDSTLPAEARGRGRRRRLVWTPSQSEALRACFERNPYPGIATRERLAQAIGIPEPRVQIWFQNERSRQLRQHRRESRPWPGRRGPPEGRRKRTAVTGSQTALLLRAFEKDRFPGIAAREELARETGLPESRIQIWFQNRRARHPGQGGRAPAQAGGLCSAAPGGGHPAPSWVAFAHTGAWGTGLPAPHVPCAPGALPQGAFVSQAARAAPALQPSQAAPAEGVSQPAPARGDFAYAAPAPPDGALSHPQAPRWPPHPGKSREDRDPQRDGLPGPCAVAQPGPAQAGPQGQGVLAPPTSQGSPWWGWGRGPQVAGAAWEPQAGAAPPPQPAPPDASASARQGQMQGIPAPSQALQEPAPWSALPCGLLLDELLASPEFLQQAQPLLETEAPGELEASEEAASLEAPLSEEEYRALLEEL

SEQ ID NO: 44219 - protein, 441 aa, Homo sapiens
MKTLPLHSHCTEMQRLLPKLEMLTLGSSFCSLQGEFCQAMDSFTTVSHVGMCEETDASFNVFSPKFQFDRSHCQSLRFHQNMELDFGHFDERDKTSRNMRGSRMNGLPSPTHSAHCSFYRTRTLQALSNEKKAKKVRFYRNGDRYFKGIVYAVSSDRFRSFDALLADLTRSLSDNINLPQGVRYIYTIDGSRKIGSMDELEEGESYVCSSDNFFKKVEYTKNVNPNWSVNVKTSANMKAPQSLASSNSAQARENKDFVRPKLVTIIRSGVKPRKAVRVLLNKKTAHSFEQVLTDITEAIKLETGVVKKLYTLDGKQVTCLHDFFGDDDVFIACGPEKFRYAQDDFSLDENECRVMKGNPSATAGPKASPTPQKTSAKSPGPMRRSKSPADSANGTSSSQLSTPKSKQSPISTPTSPGSLRKHKDLYLPLSLDDSDSLGDSM

SEQ ID NO: 44220 - protein, 365 aa, Homo sapiens
MELDFGHFDERDKTSRNMRGSRMNGLPSPTHSAHCSFYRTRTLQALSNEKKAKKVRFYRNGDRYFKGIVYAVSSDRFRSFDALLADLTRSLSDNINLPQGVRYIYTIDGSRKIGSMDELEEGESYVCSSDNFFKKVEYTKNVNPNWSVNVKTSANMKAPQSLASSNSAQARENKDFVRPKLVTIIRSGVKPRKAVRVLLNKKTAHSFEQVLTDITEAIKLETGVVKKLYTLDGKQVTCLHDFFGDDDVFIACGPEKFRYAQDDFSLDENECRVMKGNPSATAGPKASPTPQKTSAKSPGPMRRSKSPADSGNDQDANGTSSSQLSTPKSKQSPISTPTSPGSLRKHKDLYLPLSLDDSDSLGDSM

SEQ ID NO: 44221 - protein, 365 aa, Homo sapiens; identical to SEQ ID NO: 44220

SEQ ID NO: 44222 - protein, 438 aa, Homo sapiens
  VARIANT 1: note = MOD_RES - Any amino acid
XCTEMQRLLPKLEMLTLGSSFCSLQGEFCQAMDSFTTVSHVGMCEETDASFNVFSPKFQFDRSHCQSLRFHQNMELDFGHFDERDKTSRNMRGSRMNGLPSPTHSAHCSFYRTRTLQALSNEKKAKKVRFYRNGDRYFKGIVYAVSSDRFRSFDALLADLTRSLSDNINLPQGVRYIYTIDGSRKIGSMDELEEGESYVCSSDNFFKKVEYTKNVNPNWSVNVKTSANMKAPQSLASSNSAQARENKDFVRPKLVTIIRSGVKPRKAVRVLLNKKTAHSFEQVLTDITEAIKLETGVVKKLYTLDGKQVTCLHDFFGDDDVFIACGPEKFRYAQDDFSLDENECRVMKGNPSATAGPKASPTPQKTSAKSPGPMRRSKSPADSGNDQDANGTSSSQLSTPKSKQSPISTPTSPGSLRKHKDLYLPLSLDDSDSLGDSM

SEQ ID NO: 44223 - protein, 360 aa, Homo sapiens
MELDFGHFDERDKTSRNMRGSRMNGLPSPTHSAHCSFYRTRTLQALSNEKKAKKVRFYRNGDRYFKGIVYAVSSDRFRSFDALLADLTRSLSDNINLPQGVRYIYTIDGSRKIGSMDELEEGESYVCSSDNFFKKVEYTKNVNPNWSVNVKTSANMKAPQSLASSNSAQARENKDFVRPKLVTIIRSGVKPRKAVRVLLNKKTAHSFEQVLTDITEAIKLETGVVKKLYTLDGKQVTCLHDFFGDDDVFIACGPEKFRYAQDDFSLDENECRVMKGNPSATAGPKASPTPQKTSAKSPGPMRRSKSPADSANGTSSSQLSTPKSKQSPISTPTSPGSLRKHKDLYLPLSLDDSDSLGDSM

SEQ ID NO: 44224 - protein, 113 aa, Homo sapiens
MELDFGHFDERDKTSRNMRGSRMNGLPSPTHSAHCSFYRTRTLQALSNEKKAKKVRFYRNGDRYFKGIVYAVSSDRFRSFDALLADLTRSLSDNINLPQGVRYIYTIDGSRKI

SEQ ID NO: 44225 - protein, 360 aa, Homo sapiens; identical to SEQ ID NO: 44223

SEQ ID NO: 44226 - protein, 354 aa, Homo sapiens
MAKTGAEDHREALSQSSLSLLTEAMEVLQQSSPEGTLDGNTVNPIYKYILNDLPREFMSSQAKAVIKTTDDYLQSQFGPNRLVHSAAVSEGSGLQDCSTHQTASDHSHDEISDLDSYKSNSKNNSCSISASKRNRPVSAPVGQLRVAEFSSLKFQSARNWQKLSQRHKLQPRVIKVTAYKNGSRTVFARVTVPTITLLLEECTEKLNLNMAARRVFLADGKEALEPEDIPHEADVYVSTGEPFLNPFKKIKDHLLLIKKVTWTMNGLMLPTDIKRRKTKPVLSIRMKKLTERTSVRILFFKNGMGQDGHEITVGKETMKKVLDTCTIRMNLNLPARYFYDLYGRKIEDISKGKH

SEQ ID NO: 44227 - protein, 229 aa, Homo sapiens
MKMWNNWGWCGGRRRGCTKILSTKKGIQMSIKNKHLIVIPAFSHTMSQLDFDFHCVFVSIDEGIFKAGAERSETRGAAEVQEDEDTQVEVPVDQRPAEIVDEEEDGEKANKDAEQKEDFSGMNGDLEEEGGREATDAPEQVEEILDHSEQQARPARVNGGTDEENGEELQQVNNELQLVLDKERKSQGAGSGQDEADVDPQRPPRPEVKITSPEENENNQQNKDYAAVA

SEQ ID NO: 44228 - protein, 476 aa, Homo sapiens
MSGSSARSSHLSQPVVKSVLVYRNGDPFYAGRRVVIHEKKVSSFEVFLKEVTGGVQAPFGAVRNIYTPRTGHRIRKLDQIQSGGNYVAGGQEAFKKLNYLDIGEIKKRPMEVVNTEVKPVIHSRINVSARFRKPLQEPCTIFLIANGDLINPASRLLIPRKTLNQWDHVLQMVTEKITLRSGAVHRLYTLEGKLVESGAELENGQFYVAVGRDKFKKLPYSELLFDKSTMRRPFGQKASSLPPIVGSRKSKGSGNDRHSKSTVGSSDNSSPQPLKRKGKKEDVNSEKLTKLKQNVKLKNSQETIPNSDEGIFKAGAERSETRGAAEVQEDEDTQVEVPVDQRPAEIVDEEEDGEKANKDAEQKEDFSGMNGDLEEEGGREATDAPEQVEEILDHSEQQARPARVNGGTDEENGEELQQVNNELQLVLDKERKSQGAGSGQDEADVDPQRPPRPEVKITSPEENENNQQNKDYAAVA

SEQ ID NO: 44229 - protein, 88 aa, Homo sapiens
  VARIANT 1: note = MOD_RES - Any amino acid
XVVIHEKKVSSFEVFLKEVTGGVQAPFGAVRNIYTPRTGHRIRKLDQIQSGGNYVAGGQEAFKKLNYLDIGEIKKRPMEVVNTELHVL

SEQ ID NO: 44230 - protein, 120 aa, Homo sapiens
MSGSSARSSHLSQPVVKSVLVYRNGDPFYAGRRVVIHEKKVSSFEVFLKEVTGGVQAPFGAVRNIYTPRTGHRIRKLDQIQSGGNYVAGGQEAFKKLNYLDIGEIKKRPMEVVNTELHVL

SEQ ID NO: 44231 - protein, 648 aa, Homo sapiens
MKKPICKTTEPYAPVRLRVLQNGEKNKNRSVTILGPDISPGRKTQCTEILNLPSAARRLYNEKGKEIFALKDLQRDELVYVSCGELWINPDLSIAQQKKQIFLRNLESDIAKIQIFCSTHKIEALVLEVQSDIVSGSKLAVHKPVAIFGEEKQVTEPEEKQMQEDPLTTENASSEILDSHVRAHLRMKACHTLPRYAWQETSHDFDEDDSLPKKTEKGLFENVEPQKKHSCSPKHSKLHKHCHQQFEYRDGQIISHAAPQLVLGVQGPNLRSGMEVVLVEKKSDGSHQRWIHQEDSRTFHLVSNPDLVLAVSMTKTRNEVCGYPVIVQKYKPYNNGAANQKWHYMKNIKALVAFHSTALDKEITSANYAGVCTSSVIKEENIDQPGYCYLSPDGKRKTMLCLACGQSMRTEKGLKQLLPGVPFLCISGTKTQKPFLQGPFKVISVAEVDLSCDKAEKTLSYYQARLLSLRMKTCTQAASHSGMAATHQKAVKIIAYKNGDGYRNGKLIVAGTFPMLLTECTEQLGLARAASKVYTKDGTPIFTLRDLVLWALDESFLQRDSEKQKQDAAPVGKEQIIVEKNPRMKVKNRLFAKSVTSDSLDGIDKSLLTLILRNPIAIWVSCGEPFLPPNESRKIRETELAKKGQNFG

SEQ ID NO: 44232 - protein, 454 aa, Homo sapiens
MKNIKALVAFHSTALDKEITSANYAGVCTSSVIKEENIDQPGYCYLSPDGKRKTMLCLACGQSMRTEKGLKQLLPGVPFLCISGTKTQKPFLQGPFKVISVAEVDLSCDKAEKTLSYYQARLLSLRMKTCTQAASHSGMAATHQKAVKIIAYKNGDGYRNGKLIVAGTFPMLLTECTEQLGLARAASKVYTKDGTPIFTLRDLVLWALDESFLQRDSEKQKQDAAPVGKEQIIVESMEENPRMKVKNRLFAKSVTSDSLDGIDKSLLTLILRNPIAIWVSCGEPFLPPNALQKAEKLEKQNWLKKDRILADLDTMRHKMRQLKGRRVAACQPATMVPTKSPVQPVVVEGGWTEQTQQEIKLMELIRHTEAHLSEIQEMESKINFPIATKRIAVKPSNLYKQPNTKRVWIYLNGGRPEDGTYAWGKTISEVSLLYLKTWIFIWSRKVFFYFLITA

SEQ ID NO: 44233 - protein, 729 aa, Homo sapiens
MSFGRDMELEHFDERDKAQRYSRGSRVNGLPSPTHSAHCSFYRTRTLQTLSSEKKAKKVRFYRNGDRYFKGIVYAISPDRFRSFEALLADLTRTLSDNVNLPQGVRTIYTIDGLKKISSLDQLVEGESYVCGSIEPFKKLEYTKNVNPNWSVNVKTTSASRAVSSLATAKGSPSEVRENKDFIRPKLVTIIRSGVKPRKAVRILLNKKTAHSFEQVLTDITDAIKLDSGVVKRLYTLDGKQVMCLQDFFGDDDIFIACGPEKFRYQDDFLLDESECRVVKSTSYTKIASSSRRSTTKSPGPSRRSKSPASTSSVNGTPGSQLSTPRSGKSPSPSPTSPGSLRKQRSSQHGGSSTSLASTKVCSSMDENDGPGEEVSEEGFQIPATITERYKVGRTIGDGNFAVVKECVERSTAREYALKIIKKSKCRGKEHMIQNEVSILRRVKHPNIVLLIEEMDVPTELYLVMELVKGGDLFDAITSTNKYTERDASGMLYNLASAIKYLHSLNIVHRDIKPENLLVYEHQDGSKSLKLGDFGLATIVDGPLYTVCGTPTYVAPEIIAETGYGLKVDIWAAGVITYILLCGFPPFRGSGDDQEVLFDQILMGQVDFPSPYWDNVSDSAKELITMMLLVDVDQRFSAVQVLEHPWVNDDGLPENEHQLSVAGKIKKHFNTGPKPNSTAAGVSVIALDHGFTIKRSGSLDYYQQPGMYWIRPPLLIRRGRFSDEDATRM

SEQ ID NO: 44234 - protein, 740 aa, Homo sapiens
MSFGRDMELEHFDERDKAQRYSRGSRVNGLPSPTHSAHCSFYRTRTLQTLSSEKKAKKVRFYRNGDRYFKGIVYAISPDRFRSFEALLADLTRTLSDNVNLPQGVRTIYTIDGLKKISSLDQLVEGESYVCGSIEPFKKLEYTKNVNPNWSVNVKTTSASRAVSSLATAKGSPSEVRENKDFIRPKLVTIIRSGVKPRKAVRILLNKKTAHSFEQVLTDITDAIKLDSGVVKRLYTLDGKQVMCLQDFFGDDDIFIACGPEKFRYQDDFLLDESECRVVKSTSYTKIASSSRRSTTKSPGPSRRSKSPASTSSVNGTPGSQLSTPRSGKSPSPSPTSPGSLRKQRSSQHGGSSTSLASTKVCSSMDENDGPGEEVSEEGFQIPATITERYKVGRTIGDGNFAVVKECVERSTAREYALKIIKKSKCRGKEHMIQNEVSILRRVKHPNIVLLIEEMDVPTELYLVMELVKGGDLFDAITSTNKYTERDASGMLYNLASAIKYLHSLNIVHRDIKPENLLVYEHQDGSKSLKLGDFGLATIVDGPLYTVCGTPTYVAPEIIAETGYGLKVDIWAAGVITYILLCGFPPFRGSGDDQEVLFDQILMGQVDFPSPYWDNVSDSAKELITMMLLVDVDQRFSAVQVLEHPWVNDDGLPENEHQLSVAGKIKKHFNTGPKPNSTAAGVSVIATTALDKERQVFRRRRNQDVRSRYKAQPAPPELNSESEDYSPSSSETVRSPNSPF

SEQ ID NO: 44235 - protein, 363 aa, Homo sapiens
MSFGRDMELEHFDERDKAQRYSRGSRVNGLPSPTHSAHCSFYRTRTLQTLSSEKKAKKVRFYRNGDRYFKGIVYAISPDRFRSFEALLADLTRTLSDNVNLPQGVRTIYTIDGLKKISSLDQLVEGESYVCGSIEPFKKLEYTKNVNPNWSVNVKTTSASRAVSSLATAKGSPSEVRENKDFIRPKLVTIIRSGVKPRKAVRILLNKKTAHSFEQVLTDITDAIKLDSGVVKRLYTLDGKQVMCLQDFFGDDDIFIACGPEKFRYQDDFLLDESECRVVKSTSYTKIASSSRRSTTKSPGPSRRSKSPASTSSVNGTPGSQLSTPRSGKSPSPSPTSPGSLRKQRDLYRPLSSDDLDSVGDSV

SEQ ID NO: 44236 - protein, 433 aa, Homo sapiens
MLELIEVNGTPGSQLSTPRSGKSPSPSPTSPGSLRKQRSSQHGGSSTSLASTKVCSSMDENDGPGEEVSEEGFQIPATITERYKVGRTIGDGNFAVVKECVERSTAREYALKIIKKSKCRGKEHMIQNEVSILRRVKHPNIVLLIEEMDVPTELYLVMELVKGGDLFDAITSTNKYTERDASGMLYNLASAIKYLHSLNIVHRDIKPENLLVYEHQDGSKSLKLGDFGLATIVDGPLYTVCGTPTYVAPEIIAETGYGLKVDIWAAGVITYILLCGFPPFRGSGDDQEVLFDQILMGQVDFPSPYWDNVSDSAKELITMMLLVDVDQRFSAVQVLEHPWVNDDGLPENEHQLSVAGKIKKHFNTGPKPNSTAAGVSVIATTALDKERQVFRRRRNQDVRSRYKAQPAPPELNSESEDYSPSSSETVRSPNSPF

SEQ ID NO: 44237 - protein, 421 aa, Homo sapiens
LSLIKFNGTPGSQLSTPRSGKSPSPSPTSPGSLRKQRSSQHGGSSTSLASTKVCSSMDENDGPGEEVSEEGFQIPATITERYKVGRTIGDGNFAVVKECVERSTAREYALKIIKKSKCRGKEHMIQNEVSILRRVKHPNIVLLIEEMDVPTELYLVMELVKGGDLFDAITSTNKYTERDASGMLYNLASAIKYLHSLNIVHRDIKPENLLVYEHQDGSKSLKLGDFGLATIVDGPLYTVCGTPTYVAPEIIAETGYGLKVDIWAAGVITYILLCGFPPFRGSGDDQEVLFDQILMGQVDFPSPYWDNVSDSAKELITMMLLVDVDQRFSAVQVLEHPWVNDDGLPENEHQLSVAGKIKKHFNTGPKPNSTAAGVSVIALDHGFTIKRSGSLDYYQQPGMYWIRPPLLIRRGRFSDEDATRM

SEQ ID NO: 44238 - protein, 619 aa, Homo sapiens
MSFGRDMELEHFDERDKAQRYSRGSRVNGLPSPTHSAHCSFYRTRTLQTLSSEKKAKKVRFYRNGDRYFKGIVYAISPDRFRSFEALLADLTRTLSDNVNLPQGVRTIYTIDGLKKISSLDQLVEGESYVCGSIEPFKKLEYTKNVNPNWSVNVKTTSASRAVSSLATAKGSPSEVRENKDFIRPKLVTIIRSGVKPRKAVRILLNKKTAHSFEQVLTDITDAIKLDSGVVKRLYTLDGKQVMCLQDFFGDDDIFIACGPEKFRYQDDFLLDESECRVVKSTSYTKIASSSRRSTTKSPGPSRRSKSPASTSSVNGTPGSQLSTPRSGKSPSPSPTSPGSLRKQRSSQHGGSSTSLASTKVCSSMDENDGPGEEVSEEGFQIPATITERYKVGRTIGDGNFAVVKECVERSTAREYALKIIKKSKCRGKEHMIQNEVSILRRVKHPNIVLLIEEMDVPTELYLVMELVKGGDLFDAITSTNKYLHSLNIVHRDIKPENLLVYEHQDGSKSLKLGDFGLATIVDGPLYTVCGTPTYVAPEIIAETGYGLKVDIWAAGVITYILLCGFPPFRGSGDDQEVLFDQILMGQVDFPSPYWDNVSDSAKELITMMASQKMNISCQ

SEQ ID NO: 44239 - protein, 766 aa, Homo sapiens
MASTRSIELEHFEERDKRPRPGSRRGAPSSSGGSSSSGPKGNGLIPSPAHSAHCSFYRTRTLQALSSEKKAKKARFYRNGDRYFKGLVFAISSDRFRSFDALLIELTRSLSDNVNLPQGVRTIYTIDGSRKVTSLDELLEGESYVCASNEPFRKVDYTKNINPNWSVNIKGGTSRALAAASSVKSEVKESKDFIKPKLVTVIRSGVKPRKAVRILLNKKTAHSFEQVLTDITEAIKLDSGVVKRLCTLDGKQVTCLQDFFGDDDVFIACGPEKFRYAQDDFVLDHSECRVLKSSYSRSSAVKYSGSKSPGPSRRSKSPASVNGTPSSQLSTPKSTKSSSSSPTSPGSFRGLKQISAHGRSSSNVNGGPELDRCISPEGVNGNRCSESSTLLEKYKIGKVIGDGNFAVVKECIDRSTGKEFALKIIDKAKCCGKEHLIENEVSILRRVKHPNIIMLVEEMETATELFLVMELVKGGDLFDAITSSTKYTERDGSAMVYNLANALRYLHGLSIVHRDIKPENLLVCEYPDGTKSLKLGDFGLATVVEGPLYTVCGTPTYVAPEIIAETGYGLKVDIWAAGVITYILLCGFPPFRSENNLQEDLFDQILAGKLEFPAPYWDNITDSAKELISQMLQVNVEARCTAGQILSHPWVSDDASQENNMQAEVTGKLKQHFNNALPKQNSTTTGVSVIMNTALDKEGQIFCSKHCQDSGRPGMEPISPVPPSVEEIPVPGEAVPAPTPPESPTPHPPPAAPGGERAGTWRRHRD

SEQ ID NO: 44240 - protein, 783 aa, Homo sapiens
MASTRSIELEHFEERDKRPRPGSRRGAPSSSGGSSSSGPKGNGLIPSPAHSAHCSFYRTRTLQALSSEKKAKKARFYRNGDRYFKGLVFAISSDRFRSFDALLIELTRSLSDNVNLPQGVRTIYTIDGSRKVTSLDELLEGESYVCASNEPFRKVDYTKNINPNWSVNIKGGTSRALAAASSVKSEVKESKDFIKPKLVTVIRSGVKPRKAVRILLNKKTAHSFEQVLTDITEAIKLDSGVVKRLCTLDGKQVTCLQDFFGDDDVFIACGPEKFRYAQDDFVLDHSECRVLKSSYSRSSAVKYSGSKSPGPSRRSKSPASVKRGGHYSSAYSTAKSPVNGTPSSQLSTPKSTKSSSSSPTSPGSFRGLKQISAHGRSSSNVNGGPELDRCISPEGVNGNRCSESSTLLEKYKIGKVIGDGNFAVVKECIDRSTGKEFALKIIDKAKCCGKEHLIENEVSILRRVKHPNIIMLVEEMETATELFLVMELVKGGDLFDAITSSTKYTERDGSAMVYNLANALRYLHGLSIVHRDIKPENLLVCEYPDGTKSLKLGDFGLATVVEGPLYTVCGTPTYVAPEIIAETGYGLKVDIWAAGVITYILLCGFPPFRSENNLQEDLFDQILAGKLEFPAPYWDNITDSAKELISQMLQVNVEARCTAGQILSHPWVSDDASQENNMQAEVTGKLKQHFNNALPKQNSTTTGVSVIMNTALDKEGQIFCSKHCQDSGRPGMEPISPVPPSVEEIPVPGEAVPAPTPPESPTPHPPPAAPGGERAGTWRRHRD

SEQ ID NO: 44241 - protein, 765 aa, Homo sapiens
MASTRSIELEHFEERDKRPRPGSRRGAPSSSGGSSSSGPKGNGLIPSPAHSAHCSFYRTRTLQALSSEKKAKKARFYRNGDRYFKGLVFAISSDRFRSFDALLIELTRSLSDNVNLPQGVRTIYTIDGSRKVTSLDELLEGESYVCASNEPFRKVDYTKNINPNWSVNIKGGTSRALAAASSVKSEVKESKDFIKPKLVTVIRSGVKPRKAVRILLNKKTAHSFEQVLTDITEAIKLDSGVVKRLCTLDGKQVTCLQDFFGDDDVFIACGPEKFRYAQDDFVLDHSECRVLKSSYSRSSAVKYSGSKSPGPSRRSKSPASVNGTPSSQLSTPKSTKSSSSSPTSPGSFRGLKISAHGRSSSNVNGGPELDRCISPEGVNGNRCSESSTLLEKYKIGKVIGDGNFAVVKECIDRSTGKEFALKIIDKAKCCGKEHLIENEVSILRRVKHPNIIMLVEEMETATELFLVMELVKGGDLFDAITSSTKYTERDGSAMVYNLANALRYLHGLSIVHRDIKPENLLVCEYPDGTKSLKLGDFGLATVVEGPLYTVCGTPTYVAPEIIAETGYGLKVDIWAAGVITYILLCGFPPFRSENNLQEDLFDQILAGKLEFPAPYWDNITDSAKELISQMLQVNVEARCTAGQILSHPWVSDDASQENNMQAEVTGKLKQHFNNALPKQNSTTTGVSVIMNTALDKEGQIFCSKHCQDSGRPGMEPISPVPPSVEEIPVPGEAVPAPTPPESPTPHPPPAAPGGERAGTWRRHRD

SEQ ID NO: 44242 - protein, 648 aa, Homo sapiens
MGKEPLTLKSIQVAVEELYPNKARALTLAQHSRAPSPRLRSRLFSKALKGDHRCGETETPKSCSEVAGCKAAMRHQGKIPEELSLDDRARTQKKWGRGKWEPEPSSKPPREATLEERHARGEKHLGVEIEKTSGEIIRCEKCKRERELQQSLERERLSLGTSELDMGKGPMYDVEKLVRTRSCRRSPEANPASGEEGWKGDSHRSSPRNPTQELRRPSKSMDKKEDRGPEDQESHAQGAAKAKKDLVEVLPVTEEGLREVKKDTRPMSRSKHGGWLLREHQAGFEKLRRTRGEEKEAEKEKKPCMSGGRRMTLRDDQPAKLEKEPKTRPEENKPERPSGRKPRPMGIIAANVEKHYETGRVIGDGNFAVVKECRHRETRQAYAMKIIDKSRLKGKEDMVDSEILIIQSLSHPNIVKLHEVYETDMEIYLILEYVQGGDLFDAIIESVKFPEPDAALMIMDLCKALVHMHDKSIVHRDLKPENLLVQRNEDKSTTLKLADFGLAKHVVRPIFTVCGTPTYVAPEILSEKGYGLEVDMWAAGVILYILLCGFPPFRSPERDQDELFNIIQLGHFEFLPPYWDNISDAAKDLVSRLLVVDPKKRYTAHQVLQHPWIETAGKTNTVKRQKQVSPSSEGHFRSQHKRVVEQVS

SEQ ID NO: 44243 - protein, 373 aa, Homo sapiens
MPNDEAFSKPSTPSEAPHAPGVPPQGRAGGFGKASGALVGAASGSSAGGSSRGGGSGSGASDLGAGSKKSPRLPKCARCRNHGYASPLKGHKRFCMWRDCQCKKCNLIAERQRVMAAQVALRRQQAQEEELGISHPIPLPSAAELLVKRENNGSNPCLMTECSGTSQPPPASVPTTAASEGRMVIQDIPAVTSRGHVENTPDLVSDSTYYSSFYQPSLFPYYNNLYNCPQYSMALAADSASGEVGNPLGGSPVKNSLRGLPGPYVPGQTGNQWQMKNMENRHAMSSQYRMHSYYPPPSYLGQSVPQFFTFEDAPSYPEARASVFSPPSSQDSGLVSLSSSSPISNKSTKAVLECEPASEPSSFTVTPVIEEDE

SEQ ID NO: 44244 - protein, 174 aa, Homo sapiens
MPNDEAFSKPSTPSEAPHAPGVPPQGRAGGFGKASGALVGAASGSSAGGSSRGGGSGSGASDLGAGSKKSPRLPKCARCRNHGYASPLKGHKRFCMWRDCQCKKCNLIAERQRVMAAQVGAGVREPGFSLSFFFFFFFRWSLARLPRLQCSGAILAHCNSASRVQAILLPQPPK

SEQ ID NO: 44245 - protein, 226 aa, Homo sapiens
MADPQAGSAAGDWEIDVESLELEEDVCGAPRSTPPGPSPPPADGDCEDDEDDDGVDEDAEEEGDGEEAGASPGMPGQPEQRGGPQPRPPLAPQASPAGTGPRERCTPAGGGAEPRKLSRTPKCARCRNHGVVSCLKGHKRFCRWRDCQCANCLLVVERQRVMAAQVALRRQQATEDKKGLSGKQNNFERKAVYQRQVRAPSLLAKSILEVLLGLFYSYYVYIMNHL

SEQ ID NO: 44246 - protein, 561 aa, Homo sapiens
MADPQAGSAAGDWEIDVESLELEEDVCGAPRSTPPGPSPPPADGDCEDDEDDDGVDEDAEEEGDGEEAGASPGMPGQPEQRGGPQPRPPLAPQASPAGTGPRERCTPAGGGAEPRKLSRTPKCARCRNHGVVSCLKGHKRFCRWRDCQCANCLLVVERQRVMAAQVALRRQQATEDKKGLSGKQNNFERKAVYQRQVRAPSLLAKSILEGYRPIPAETYVGGTFPLPPPVSDRMRKRRAFADKELENIMLEREYKEREMLETSQAAALFLPNRMVPGPDYNSYKSAYSPSPVEPPSKDFCNFLPTCLDLTMQYSGSGNMELISSNVSVATTYRQYPLSSRFLVWPKCGPISDTLLYQQCLLNATTSVQALKPGASWDLKGARVQDGLSAEQDMMPSKLEGSLVLPHTPEIQTTRSDLQGHQAVPERSAFSPPRRNFSPIVDTDSLAAQGHVLTKISKENTRHPLPLRHNPFHSLFQQTLTDKSGPELKTPFVKEAFEETPKKHRECLVKDNQKYTFTIDRCAKDLFVAKQVGTKLSVNEPLSFSVESILKRPSSAITRVSQ

SEQ ID NO: 44247 - protein, 561 aa, Homo sapiens; identical to SEQ ID NO: 44246

SEQ ID NO: 44248 - protein, 561 aa, Homo sapiens; identical to SEQ ID NO: 44246

SEQ ID NO: 44249 - protein, 226 aa, Homo sapiens; identical to SEQ ID NO: 44245

SEQ ID NO: 44250 - protein, 226 aa, Homo sapiens; identical to SEQ ID NO: 44245

SEQ ID NO: 44251 - protein, 2012 aa, Homo sapiens
MWILALSLFQSFANVFSEDLHSSLYFVNASLQEVVFASTTGTLVPCPAAGIPPVTLRWYLATGEEIYDVPGIRHVHPNGTLQIFPFPPSSFSTLIHDNTYYCTAENPSGKIRSQDVHIKAVLREPYTVRVEDQKTMRGNVAVFKCIIPSSVEAYITVVSWEKDTVSLVSGSRFLITSTGALYIKDVQNEDGLYNYRCITRHRYTGETRQSNSARLFVSDPANSAPSILDGFDHRKAMAGQRVELPCKALGHPEPDYRWLKDNMPLELSGRFQKTVTGLLIENIRPSDSGSYVCEVSNRYGTAKVIGRLYVKQPLKATISPRKVKSSVGSQVSLSCSVTGTEDQELSWYRNGEILNPGKNVRITGINHENLIMDHMVKSDGGAYQCFVRKDKLSAQDYVQVVLEDGTPKIISAFSEKVVSPAEPVSLMCNVKGTPLPTITWTLDDDPILKGGSHRISQMITSEGNVVSYLNISSSQVRDGGVYRCTANNSAGVVLYQARINVRGPASIRPMKNITAIAGRDTYIHCRVIGYPYYSIKWYKNSNLLPFNHRQVAFENNGTLKLSDVQKEVDEGEYTCNVLVQPQLSTSQSVHVTVKVPPFIQPFEFPRFSIGQRVFIPCVVVSGDLPITITWQKDGRPIPGSLGVTIDNIDFTSSLRISNLSLMHNGNYTCIARNEAAAVEHQSQLIVRVPPKFVVQPRDQDGIYGKAVILNCSAEGYPVPTIVWKFSKGAGVPQFQPIALNGRIQVLSNGSLLIKHVVEEDSGYYLCKVSNDVGADVSKSMYLTVKIPAMITSYPNTTLATQGQKKEMSCTAHGEKPIIVRWEKEDRIINPEMARYLVSTKEVGEEVISTLQILPTVREDSGFFSCHAINSYGEDRGIIQLTVQEPPDPPEIEIKDVKARTITLRWTMGFDGNSPITGYDIECKNKSDSWDSAQRTKDVSPQLNSATIIDIHPSSTYSIRMYAKNRIGKSEPSNELTITADEAAPDGPPQEVHLEPISSQSIRVTWKAPKKHLQNGIIRGYQIGYREYSTGGNFQFNIISVDTSGDSEVYTLDNLNKFTQYGLVVQACNRAGTGPSSQEIITTTLEDVPSYPPENVQAIATSPESISISWSTLSKEALNGILQGFRVIYWANLMDGELGEIKNITTTQPSLELDGLEKYTNYSIQVLAFTRAGDGVRSEQIFTRTKEDVPGPPAGVKAAAASASMVFVSWLPPLKLNGIIRKYTVFCSHPYPTVISEFEASPDSFSYRIPNLSRNRQYSVWVVAVTSAGRGNSSEIITVEPLAKAPARILTFSGTVTTPWMKDIVLPCKAVGDPSPAVKWMKDSNGTPSLVTIDGRRSIFSNGSFIIRTVKAEDSGYYSCIANNNWGSDEIILNLQVQVPPDQPRLTVSKTTSSSITLSWLPGDNGGSSIRGYILQYSEDNSEQWGSFPISPSERSYRLENLKCGTWYKFTLTAQNGVGPGRISEIIEAKTLGKEPQFSKEQELFASINTTRVRLNLIGWNDGGCPITSFTLEYRPFGTTVWTTAQRTSLSKSYILYDLQEATWYELQMRVCNSAGCAEKQANFATLNYDGSTIPPLIKSVVQNEEGLTTNEGLKMLVTISCILVGVLLLFVLLLVVRRRRREQRLKRLRDAKSLAEMLMSKNTRTSDTLSKQQQTLRMHIDIPRAQLLIEERDTMETIDDRSTVLLTDADFGEAAKQKSLTVTHTVHYQSVSQATGPLVDVSDARPGTNPTTRRNAKAGPTARNRYASQWTLNRPHPTISAHTLTTDWRLPTPRAAGSVDKESDSYSVSPSQDTDRARSSMVSTESASSTYEELARAYEHAKMEEQLRHAKFTITECFISDTSSEQLTAGTNEYTDSLTSSTPSESGICRFTASPPKPQDGGRVMNMAVPKAHRPGDLIHLPPYLRMDFLLNRGGPGTSRDLSLGQACLEPQKSRTLKRPTVLEPIPMEAASSASSTREGQSWQPGAVATLPQREGAELGQAAKMSSSQESLLDSRGHLKGNNPYAKSYTLV

SEQ ID NO: 44252 - protein, 2113 aa, Homo sapiens
MTGAGEPRREEPPPQPSAGLRSRESGAPSAGGWERAERGRGAAARPATGPPPRRIGPLYGMWLVTFLLLLDSLHKARPEDVGTSLYFVNDSLQQVTFSSSVGVVVPCPAAGSPSAALRWYLATGDDIYDVPHIRHVHANGTLQLYPFSPSAFNSFIHDNDYFCTAENAAGKIRSPNIRVKAVFREPYTVRVEDQRSMRGNVAVFKCLIPSSVQEYVSVVSWEKDTVSIIPEHRFFITYHGGLYISDVQKEDALSTYRCITKHKYSGETRQSNGARLSVTDPAESIPTILDGFHSQEVWAGHTVELPCTASGYPIPAIRWLKDGRPLPADSRWTKRITGLTISDLRTEDSGTYICEVTNTFGSAEATGILMVIDPLHVTLTPKKLKTGIGSTVILSCALTGSPEFTIRWYRNTELVLPDEAISIRGLSNETLLITSAQKSHSGAYQCFATRKAQTAQDFAIIALEDGTPRIVSSFSEKVVNPGEQFSLMCAAKGAPPPTVTWALDDEPIVRDGSHRTNQYTMSDGTTISHMNVTGPQIRDGGVYRCTARNLVGSAEYQARINVRGPPSIRAMRNITAVAGRDTLINCRVIGYPYYSIKWYKDALLLPDNHRQVVFENGTLKLTDVQKGMDEGEYLCSVLIQPQLSISQSVHVAVKVPPLIQPFEFPPASIGQLLYIPCVVSSGDMPIRITWRKDGQVIISGSGVTIESKEFMSSLQISSVSLKHNGNYTCIASNAAATVSRERQLIVRVPPRFVVQPNNQDGIYGKAGVLNCSVDGYPPPKVMWKHAKGSGNPQQYHPVPLTGRIQILPNSSLLIRHVLEEDIGYYLCQASNGVGTDISKSMFLTVKIPAMITSHPNTTIAIKGHAKELNCTARGERPIIIRWEKGDTVIDPDRVMRYAIATKDNGDEVVSTLKLKPADRGDSVFFSCHAINSYGEDRGLIQLTVQEPPDPPELEIREVKARSMNLRWTQRFDGNSIITGFDIEYKNKSDSWDFKQSTRNISPTINQANIVDLHPASVYSIRMYSFNKIGRSEPSKELTISTEEAAPDGPPMDVTLQPVTSQSIQVTWKAPKKELQNGVIRGYQIGYRENSPGSNGQYSIVEMKATGDSEVYTLDNLKKFAQYGVVVQAFNRAGTGPSSSEINATTLEDVPSQPPENVRALSITSDVAVISWSEPPRSTLNGVLKGYRVIFWSLYVDGEWGEMQNITTTRERVELRGMEKFTNYSVQVLAYTQAGDGVRSSVLYIQTKEDVPGPPAGIKAVPSSASSVVVSWLPPTKPNGVIRKYTIFCSSPGSGQPAPSEYETSPEQLFYRIAHLNRGQQYLLWVAAVTSAGRGNSSEKVTIEPAGKAPAKIISFGGTVTTPWMKDVRLPCNSVGDPAPAVKWTKDSEDSAIPVSMDGHRLIHTNGTLLLRAVKAEDSGYYTCTATNTGGFDTIIVNLLVQVPPDQPRLTVSKTSASSITLTWIPGDNGGSSIRGFVLQYSVDNSEEWKDVFISSSERSFKLDSLKCGTWYKVKLAAKNSVGSGRISEIIEAKTHGREPSFSKDQHLFTHINSTHARLNLQGWNNGGCPITAIVLEYRPKGTWAWQGLRANSSGEVFLTELREATWYELRMRACNSAGCGNETAQFATLDYDGSTIPPIKSAQGEGDDVKKLFTIGCPVILATLGVALLFIVRKKRKEKRLKRLRDAKSLAEMLISKNNRSFDTPVKGPPQGPRLHIDIPRVQLLIEDKEGIKQLGDDKATIPVTDAEFSQAVNPQSFCTGVSLHHPTLIQSTGPLIDMSDIRPGTNPVSRKNVKSAHSTRNRYSSQWTLTKCQASTPARTLTSDWRTVGSQHGVTVTESDSYSASLSQDTDKGRNSMVSTESASSTYEELARAYEHAKLEEQLQHAKFEITECFISDSSSDQMTTGTNENADSMTSMSTPSEPGICRFTASPPKPQDADRGKNVAVPIPHRANKSDYCNLPLYAKSEAFFRKADGREPCPVVPPREASIRNLARTYHTQARHLTLDPASKSLGLPHPGAPAAASTATLPQRTLAMPAPPAGTAPPAPGPTPAEPPTAPSAAPPAPSTEPPRAGGPHTKMGGSRDSLLEMSTSGVGRSQKQGAGAYSKSYTLV

SEQ ID NO: 44253 - protein, 1820 aa, Homo sapiens
MLPYWAGHTVELPCTASGYPIPAIRWLKDGRPLPADSRWTKRITGLTISDLRTEDSGTYICEVTNTFGSAEATGILMVIDPLHVTLTPKKLKTGIGSTVILSCALTGSPEFTIRWYRNTELVLPDEAISIRGLSNETLLITSAQKSHSGAYQCFATRKAQTAQDFAIIALEDGTPRIVSSFSEKVVNPGEQFSLMCAAKGAPPPTVTWALDDEPIVRDGSHRTNQYTMSDGTTISHMNVTGPQIRDGGVYRCTARNLVGSAEYQARINVRGPPSIRAMRNITAVAGRDTLINCRVIGYPYYSIKWYKDALLLPDNHRQVVFENGTLKLTDVQKGMDEGEYLCSVLIQPQLSISQSVHVAVKVPPLIQPFEFPPASIGQLLYIPCVVSSGDMPIRITWRKDGQVIISGSGVTIESKEFMSSLQISSVSLKHNGNYTCIASNAAATVSRERQLIVRVPPRFVVQPNNQDGIYGKAGVLNCSVDGYPPPKVMWKHAKGSGNPQQYHPVPLTGRIQILPNSSLLIRHVLEEDIGYYLCQASNGVGTDISKSMFLTVKIPAMITSHPNTTIAIKGHAKELNCTARGERPIIIRWEKGDTVIDPDRVMRYAIATKDNGDEVVSTLKLKPADRGDSVFFSCHAINSYGEDRGLIQLTVQEPPDPPELEIREVKARSMNLRWTQRFDGNSIITGFDIEYKNKSDSWDFKQSTRNISPTINQANIVDLHPASVYSIRMYSFNKIGRSEPSKELTISTEEAAPDGPPMDVTLQPVTSQSIQVTWKAPKKELQNGVIRGYQIGYRENSPGSNGQYSIVEMKATGDSEVYTLDNLKKFAQYGVVVQAFNRAGTGPSSSEINATTLEDVPSQPPENVRALSITSDVAVISWSEPPRSTLNGVLKGYRVIFWSLYVDGEWGEMQNITTTRERVELRGMEKFTNYSVQVLAYTQAGDGVRSSVLYIQTKEDVPGPPAGIKAVPSSASSVVVSWLPPTKPNGVIRKYTIFCSSPGSGQPAPSEYETSPEQLFYRIAHLNRGQQYLLWVAAVTSAGRGNSSEKVTIEPAGKAPAKIISFGGTVTTPWMKDVRLPCNSVGDPAPAVKWTKDSEDSAIPVSMDGHRLIHTNGTLLLRAVKAEDSGYYTCTATNTGGFDTIIVNLLVQVPPDQPRLTVSKTSASSITLTWIPGDNGGSSIRGFVLQYSVDNSEEWKDVFISSSERSFKLDSLKCGTWYKVKLAAKNSVGSGRISEIIEAKTHGREPSFSKDQHLFTHINSTHARLNLQGWNNGGCPITAIVLEYRPKGTWAWQGLRANSSGEVFLTELREATWYELRMRACNSAGCGNETAQFATLDYDGSTIPPIKSAQGEGDDVKKLFTIGCPVILATLGVALLFIVRKKRKEKRLKRLRDAKSLAEMLISKNNRSFDTPVKGPPQGPRLHIDIPRVQLLIEDKEGIKQLGDDKATIPVTDAEFSQAVNPQSFCTGVSLHHPTLIQSTGPLIDMSDIRPGTNPVSRKNVKSAHSTRNRYSSQWTLTKCQASTPARTLTSDWRTVGSQHGVTVTESDSYSASLSQDTDKGRNSMVSTESASSTYEELARAYEHAKLEEQLQHAKFEITECFISDSSSDQMTTGTNENADSMTSMSTPSEPGICRFTASPPKPQDADRGKNVAVPIPHRANKSDYCNLPLYAKSEAFFRKADGREPCPVVPPREASIRNLARTYHTQARHLTLDPASKSLGLPHPGAPAAASTATLPQRTLAMPAPPAGTAPPAPGPTPAEPPTAPSAAPPAPSTEPPRAGGPHTKMGGSRDSLLEMSTSGVGRSQKQGAGAYSKSYTLV

SEQ ID NO: 44254 - protein, 253 aa, Homo sapiens
MEGTVNLQLSAKSVGVFEAFYNSVKPIQIINSTIEMVKPGKFPSGKTEIPFEFPLHLKGNKVLYETYHGVFVNIQYTLRCDMKRSLLAKDLTKTCEFIVHSAPQKGKFTPSPVDFTITPETLQNVKERALLPKFLLRTSQLNKLCHHAATNGRAGGGELGSRHQKRGAAAGARGDVRVCRYARDATEIQNIQIADGDVCRGLSVPIYMVFPRLFTCPTLETTNFKVEFEVNIVVLLHPDHLITENFPLKLCRI

SEQ ID NO: 44255 - protein, 297 aa, Homo sapiens
MGTALDIKIKRANKVYHAGEVLSGVVVISSKDSVQHQGVSLTMEGTVNLQLSAKSVGVFEAFYNSVKPIQIINSTIEMVKPGKFPSGKTEIPFEFPLHLKGNKVLYETYHGVFVNIQYTLRCDMKRSLLAKDLTKTCEFIVHSAPQKGKFTPSPVDFTITPETLQNVKERALLPKFLLRGHLNSTNCVITQPLTGELVVESSEAAIRSVELQLVRVETCGCAEGYARDATEIQNIQIADGDVCRGLSVPIYMVFPRLFTCPTLETTNFKVEFEVNIVVLLHPDHLITENFPLKLCRI

SEQ ID NO: 44256 - protein, 172 aa, Homo sapiens
MGTALDIKIKRANKVYHAGPQKGKFTPSPVDFTITPETLQNVKERALLPKFLLRGHLNSTNCVITQPLTGELVVESSEAAIRSVELQLVRVETCGCAEGYARDATEIQNIQIADGDVCRGLSVPIYMVFPRLFTCPTLETTNFKVEFEVNIVVLLHPDHLITENFPLKLCRI

SEQ ID NO: 44257 - protein, 270 aa, Homo sapiens
MGTALDIKIKRANKVYHAGEVLSGVVVISSKDSVQHQGVSLTMEGTVNLQLSAKSVGVFEAFYNSVKPIQIINSTIEMVKPGKFPSGKTEIPFEFPLHLKGNKVLYETYHGVFVNIQPQKGKFTPSPVDFTITPETLQNVKERALLPKFLLRGHLNSTNCVITQPLTGELVVESSEAAIRSVELQLVRVETCGCAEGYARDATEIQNIQIADGDVCRGLSVPIYMVFPRLFTCPTLETTNFKVEFEVNIVVLLHPDHLITENFPLKLCRI

SEQ ID NO: 44258 - protein, 220 aa, Homo sapiens
MGTALDIKIKRANKVYHAGEVLSGVVVISSKDSVQHQGVSLTMEGTVNLQLSAKSVGVFEAFYNSVKPQKGKFTPSPVDFTITPETLQNVKERALLPKFLLRGHLNSTNCVITQPLTGELVVESSEAAIRSVELQLVRVETCGCAEGYARDATEIQNIQIADGDVCRGLSVPIYMVFPRLFTCPTLETTNFKVEFEVNIVVLLHPDHLITENFPLKLCRI

SEQ ID NO: 44259 - protein, 118 aa, Homo sapiens
MSLIILTRDDEPRIFTPDSDAASPALHSTSPLPDPASASPLHREEKILPKVCNIVSCLSFSLPASPTDSGLASPTIITREGQQFWAKCLIWKYQLYLHGLHKKSDGRRDKQISASPST

SEQ ID NO: 44260 - protein, 190 aa, Homo sapiens
MEPEAAAGARKARGRGCHCPGDAPWRPPPPRGPESPAPWRPWIQTPGDAELTRTGRPLEPRADQHTFGSKGAFGFQHPVRVYLPMSKRQEYLRSSGEQVLASFPVQATIDFYDDESTESASEAEEPEEGPPPLHLLPQEVGGRQENGPGGKGRDQGINQGQRSSGGGDHWGEGPLPQGVSSRGGKCSSSK

SEQ ID NO: 44261 - protein, 97 aa, Homo sapiens
MKEPGPNFVTVRKGLHSFKMAFVKHLLLFLSPRLECSGSITDHCSLHLPVQEILMSQPPEQLGLQTNLGNQESSGMMKLFMPRPKVLAQYESIQFMP

SEQ ID NO: 44262 - protein, 91 aa, Homo sapiens
MKEPGPNFVTVRKGLHSFKMAFVKHLLLECSGSITDHCSLHLPVQEILMSQPPEQLGLQTNLGNQESSGMMKLFMPRPKVLAQYESIQFMP

SEQ ID NO: 44263 - protein, 176 aa, Homo sapiens
MASSSGNDDDLTIPRAAINKMIKETLPNVRVANDARELVVNCCTEFIHLISSEANEICNKSEKKTISPEHVIQALESLGFGSYISEVKEVLQECKTVALKRRKASSRLENLGIPEEELLRQQQELFAKARQQQAELAQQEWLQMQQAAQQAQLAAASASASNQAGSSQDEEDDDDI

SEQ ID NO: 44264 - protein, 176 aa, Homo sapiens; identical to SEQ ID NO: 44263

SEQ ID NO: 44265 - protein, 489 aa, Homo sapiens
MESMFSSPAEAALQRETGVPGLLTPLPDLDGVYELERVAGFVRDLGCERVALQFPDQLLGDAVAVAARLEETTGSKMFILGDTAYGSCCVDVLGAEQAGAQALIHFGPACLSPPARPLPVAFVLRQRSVALELCVKAFEAQNPDPKAPVVLLSEPACAHALEALATLLRPRYLDLLVSSPAFPQPVGSLSPEPMPLERFGRRFPLAPGRRLEEYGAFYVGGSKASPDPDLDPDLSRLLLGWAPGQPFSSCCPDTGKTQDEGARAGRLRARRRYLVERARDARVVGLLAGTLGVAQHREALAHLRNLTQAAGKRSYVLALGRPTPAKLANFPEVDVFVLLACPLGALAPQLSGSFFQPILAPCELEAACNPAWPPPGLAPHLTHYADLLPGSPFHVALPPPESELWETPDVSLITGDLRPPPAWKSSNDHGSLALTPRPQLELAESSPAASFLSSRSWQGLEPRLGQTPVTEAVSGRRGIAIAYEDEGSG

SEQ ID NO: 44266 - protein, 261 aa, Homo sapiens
MESMFSSPAEAALQRETGVPGLLTPLPDLDGVYELERVAGFVRDLGCERVALQFPDQLLGDAVAVAARLEETTGSKMFILGDTAYGSCCVDVLGAEQAGAQALIHFGPACLSPPARPLPVAFVLRQRSVALELCVKAFEAQNPDPKAPVVLLSEPACAHALGSPFHVALPPPESELWETPDVSLITGDLRPPPAWKSSNDHGSLALTPRPQLELAESSPAASFLSSRSWQGLEPRLGQTPVTEAVSGRRGIAIAYEDEGSG

SEQ ID NO: 44267 - protein, 354 aa, Homo sapiens
MLWLWLHDWRRRQGQRCSFWVTQPTAEALATLLRPRYLDLLVSSPAFPQPVGSLSPEPMPLERFGRRFPLAPGRRLEEYGAFYVGGSKASPDPDLDPDLSRLLLGWAPGQPFSSCCPDTGKTQDEGARAGRLRARRRYLVERARDARVVGLLAGTLGVAQHREALAHLRNLTQAAGKRSYVLALGRPTPAKLANFPEVDVFVLLACPLGALAPQLSGSFFQPILAPCELEAACNPAWPPPGLAPHLTHYADLLPGSPFHVALPPPESELWETPDVSLITGDLRPPPAWKSSNDHGSLALTPRPQLELAESSPAASFLSSRSWQGLEPRLGQTPVTEAVSGRRGIAIAYEDEGSG

SEQ ID NO: 44268 - protein, 57 aa, Homo sapiens
MAVFHDEVEIEDFQYDEDSETYFYPCPCGDNFSITKDQFVCGETVPAPSANKELVKC

SEQ ID NO: 44269 - protein, 82 aa, Homo sapiens
MAVFHDEVEIEDFQYDEDSETYFYPCPCGDNFSITKEDLENGEDVATCPSCSLIIKVIYDKDQFVCGETVPAPSANKELVKC

SEQ ID NO: 44270 - protein, 284 aa, Homo sapiens
MLYLIGLGLGDAKDITVKGLEVVRRCSRVYLEAYTSVLTVGKEALEEFYGRKLVVADREEVEQEADNILKDADISDVAFLVVGDPFGATTHSDLVLRATKLGIPYRVIHNASIMNAVGCCGLQLYKFGETVSIVFWTDTWRPESFFDKVKKNRQNGMHTLCLLDIKVKEQSLENLIKGRKIYEPPRYMSVNQAAQQLLEIVQNQRIRGEEPVTEETLCVGLARVGADDQKIAAGTLRQMCTVDLGEPLHSLIITGGSIHPMEMEMLSLFSIPENSSESQSINGL

SEQ ID NO: 44271 - protein, 285 aa, Homo sapiens
MLYLIGLGLGDAKDITVKGLEVVRRCSRVYLEAYTSVLTVGKEALEEFYGRKLVVADREEVEQEADNILKDADISDVAFLVVGDPFGATTHSDLVLRATKLGIPYRVIHNASIMNAVGCCGLQLYKFGETVSIVFWTDTWRPESFFDKVKKNRQNGMHTLCLLDIKVKEQSLENLIKGRKIYEPPRYMSVNQAAQQLLEIVQNQRIRGEEPAVTEETLCVGLARVGADDQKIAAGTLRQMCTVDLGEPLHSLIITGGSIHPMEMEMLSLFSIPENSSESQSINGL

SEQ ID NO: 44272 - protein, 234 aa, Homo sapiens
MLYLIGLGLGDAKDITVKGLEVVRRCSRVYLEAYTSVLTVGKEALEEFYGRKLVVADREEVEQEADNILKDADISDVAFLVVGDPTDTWRPESFFDKVKKNRQNGMHTLCLLDIKVKEQSLENLIKGRKIYEPPRYMSVNQAAQQLLEIVQNQRIRGEEPAVTEETLCVGLARVGADDQKIAAGTLRQMCTVDLGEPLHSLIITGGSIHPMEMEMLSLFSIPENSSESQSINGL

SEQ ID NO: 44273 - protein, 46 aa, Homo sapiens
MCTVDLGEPLHSLIITGGSIHPMEMEMLSLFSIPENSSESQSINGL

SEQ ID NO: 44274 - protein, 284 aa, Homo sapiens
MLYLIGLGLGDAKDITVKGLEVVRRCSRVYLEAYTSVLTVGKEALEEFYGRKLVVADREEVEQEADNILKDADISDVAFLVVGDPFGATTHSDLVLRATKLGIPYRVIHNASIMNAVGCCGLQYISLERQFLLFFGQTLGPESFFDKVKKNRQNGMHTLCLLDIKVKEQSLENLIKGRKIYEPPRYMSVNQAAQQLLEIVQNQRIRGEEPAVTEETLCVGLARVGADDQKIAAGTLRQMCTVDLGEPLHSLIITGGSIHPMEMEMLSLFSIPENSSESQSINGL

SEQ ID NO: 44275 - protein, 285 aa, Homo sapiens; identical to SEQ ID NO: 44271

SEQ ID NO: 44276 - protein, 675 aa, Homo sapiens
MEGRPPPEGRPPPRPRTGRAPRGRRRAVFAAVLHWSHITHLFENDRHFSHLSTLEREMAFRTEMGLYYSYFKTIVEAPSFLNGVWMIMNDKLTEYPLVINTLKRFNLYPEVILASWYRIYTKIMDLIGIQTKICWTVTRGEGLSPIESCEGLGDPACFYVAVIFILNGLMMALFFIYGTYLSGSRLGGLVTVLCFFFNHGECTRVMWTPPLRESFSYPFLVLQMLLVTHILRATKLYRGSLIALCISNVFFMLPWQFAQFVLLTQIASLFAVYVVGYIDICKLRKIIYIHMISLALCFVLMFGNSMLLTSYYASSLVIIWGILAMKPHFLKINVSELSLWVIQGCFWLFGTVILKYLTSKIFGIADDAHIGNLLTSKFFSYKDFDTLLYTCAAEFDFMEKETPLRYTKTLLLPVVLVVFVAIVRKIISDMWGVLAKQQTHVRKHQFDHGELVYHALQLLAYTALGILIMRLKLFLTPHMCVMASLICSRQLFGWLFCKVHPGAIVFAILAAMSIQGSANLQTQWNIVGEFSNLPQEELIEWIKYSTKPDAVFAGAMPTMASVKLSALRPIVNHPHYEDAGLRARTKIVYSMYSRKAAEEVKRELIKLKVNYYILEESWCVRRSKPGCSMPEIWDVEDPANAGKTPLCNLLVKDSKPHFTTVFQNSVYKVLEVVKE

SEQ ID NO: 44277 - protein, 85 aa, Homo sapiens
MYSRKAAEEVKRELIKLKVNYYILEESWCVRRSKPGCSMPEIWDVEDPANAGKTPLCNLLVKDSKPHFTTVFQNSVYKVLEVVKE

SEQ ID NO: 44278 - protein, 758 aa, Homo sapiens
MRKQGVSSKRLQSSGRSQSKGRRGASLAREPEVEEEMEKSALGGGKLPRGSWRSSPGRIQSLKERKGLELEVVAKTFLLGPFQFVRNSLAQLREKVQELQARRFSSRTTLGIAVFVAILHWLHLVTLFENDRHFSHLSSLEREMTFRTEMGLYYSYFKTIIEAPSFLEGLWMIMNDRLTEYPLIINAIKRFHLYPEVIIASWYCTFMGIMNLFGLETKTCWNVTRIEPLNEVQSCEGLGDPACFYVGVIFILNGLMMGLFFMYGAYLSGTQLGGLITVLCFFFNHGEATRVMWTPPLRESFSYPFLVLQMCILTLILRTSSNDRRPFIALCLSNVAFMLPWQFAQFILFTQIASLFPMYVVGYIEPSKFQKIIYMNMISVTLSFILMFGNSMYLSSYYSSSLLMTWAIILKRNEIQKLGVSKLNFWLIQGSAWWCGTIILKFLTSKILGVSDHIRLSDLIAARILRYTDFDTLIYTCAPEFDFMEKATPLRYTKTLLLPVVMVITCFIFKKTVRDISYVLATNIYLRKQLLEHSELAFHTLQLLVFTALAILIMRLKMFLTPHMCVMASLICSRQLFGWLFRRVRFEKVIFGILTVMSIQGYANLRNQWSIIGEFNNLPQEELLQWIKYSTTSDAVFAGAMPTMASIKLSTLHPIVNHPHYEDADLRARTKIVYSTYSRKSAKEVRDKLLELHVNYYVLEEAWCVVRTKPGCSMLEIWDVEDPSNAANPPLCSVLLEDARPYFTTVFQNSVYRVLKVN

SEQ ID NO: 44279 - protein, 205 aa, Homo sapiens
MRLKMFLTPHMCVMASLICSRQLFGWLFRRVRFEKVIFGILTVMSIQGYANLRNQWSIIGEFNNLPQEELLQWIKYSTTSDAVFAGAMPTMASIKLSTLHPIVNHPHYEDADLRARTKIVYSTYSRKSAKEVRDKLLELHVNYYVLEEAWCVVRTKPGCSMLEIWDVEDPSNAANPPLCSVLLEDARPYFTTVFQNSVYRVLKVN

SEQ ID NO: 44280 - protein, 90 aa, Homo sapiens
MRKQGVSSKRLQSSGRSQSKGRRGASLAREPEVEEEMEKSALGGGKLPRGSWRSSPGRIQSLKERKGLELEVVAKTFLLGPFQFVRNSLA

SEQ ID NO: 44281 - protein, 542 aa, Homo sapiens
MMSIRQRREIRATEVSEDFPAQEENVKLENKLPSGCTSRRLWKILSLTIGGTIALCIGLLTSVYLATLHENDLWFSNIKEVEREISFRTECGLYYSYYKQMLQAPTLVQGFHGLIYDNKTESMKTINLLQRMNIYQEVFLSILYRVLPIQKYLEPVYFYIYTLFGLQAIYVTALYITSWLLSGTWLSGLLAAFWYVTNRIDTTRVEFTIPLRENWALPFFAIQIAAITYFLRPNLQPLSERLTLLAIFISTFLFSLTWQFNQFMMLMQALVLFTLDSLDMLPAVKATWLYGIQITSLLLVCILQFFNSMILGSLLISFNLSVFIARKLQKNLKTGSFLNRLGKLLLHLFMVLCLTLFLNNIIKKILNLKSDEHIFKFLKAKFGLGATRDFDANLYLCEEAFGLLPFNTFGRLSDTLLFYAYIFVLSITVIVAFVVAFHNLSDSTNQQSVGKMEKGTVDLKPETAYNLIHTILFGFLALSTMRMKYLWTSHMCVFASFGLCSPEIWELLLKSVHLYNPKRICIMRYSVPILILLYLCYKNQKS

SEQ ID NO: 44282 - protein, 716 aa, Homo sapiens
MMSIRQRREIRATEVSEDFPAQEENVKLENKLPSGCTSRRLWKILSLTIGGTIALCIGLLTSVYLATLHENDLWFSNIKEVEREISFRTECGLYYSYYKQMLQAPTLVQGFHGLIYDNKTESMKTINLLQRMNIYQEVFLSILYRVLPIQKYLEPVYFYIYTLFGLQAIYVTALYITSWLLSGTWLSGLLAAFWYVTNRIDTTRVEFTIPLRENWALPFFAIQIAAITYFLRPNLQPLSERLTLLAIFISTFLFSLTWQFNQFMMLMQALVLFTLDSLDMLPAVKATWLYGIQITSLLLVCILQFFNSMILGSLLISFNLSVFIARKLQKNLKTGSFLNRLGKLLLHLFMVLCLTLFLNNIIKKILNLKSDEHIFKFLKAKFGLGATRDFDANLYLCEEAFGLLPFNTFGRLSDTLLFYAYIFVLSITVIVAFVVAFHNLSDSTNQQSVGKMEKGTVDLKPETAYNLIHTILFGFLALSTMRMKYLWTSHMCVFASFGLCSPEIWELLLKSVHLYNPKRICIMRYSVPILILLYLCYKFWPGMMDELSELREFYDPDTVELMNWINSNTPRKAVFAGSMQLLAGVKLCTGRTLTNHPHYEDSSLRERTRAVYQIYAKRAPEEVHALLRSFGTDYVILEDSICYERRHRRGCRLRDLLDIANGHMMDGPGENDPDLKPADHPRFCEEIKRNLPPYVAYFTRVFQNKTFHVYKLSRNK

SEQ ID NO: 44283 - protein, 113 aa, Homo sapiens
MMSIRQRREIRATEVSEDFPAQEENVKLENKLPSGCTSRRLWKILSLTIGGTLPFALDFLHLSTLPRYMKMIYGFLILRKWSEKSHSEQSVACITPTTSRCCRLQPSCKVFMA

SEQ ID NO: 44284 - protein, 716 aa, Homo sapiens; identical to SEQ ID NO: 44282

SEQ ID NO: 44285 - protein, 723 aa, Homo sapiens
MAEEEGPPVELRQRKKPKSSENKESAKEEKISDIPIPERAPKHVLFQRFAKIFIGCLAAVTSGMMYALYLSAYHERKFWFSNRQELEREITFQGDSAIYYSYYKDMLKAPSFERGVYELTHNNKTVSLKTINAVQQMSLYPELIASILYQATGSNEIIEPVYFYIGIVFGLQGIYVTALFVTSWLMSGTWLAGMLTVAWFVINRVDTTRIEYSIPLRENWALPYFACQIAALTGYLKSNLNTYGERFCYLLMSASTYTFMMMWEYSHYLLFLQAISLFLLDTFSVEQSDKVYEVYKIYIFSLFLGYLLQFENPALLVSPLLSLVAALMLAKCLQLNVKKGSFVAKIIKVINFYLVCTLTITLNIIMKMFVPHKENGHMLKFLEVKFGLNMTKNFTMNWLLCQESLQAPSQDFFLRLTQSSLLPFYILVLIICFLSMLQVIFRRINGKSLKETVTLEDGRIGERPEIIYHVIHTILLGSLAMVIEGLKYIWIPYVCMLAAFGVCSPELWMTLFKWLRLRTVHPILLALILSMAVPTIIGLSLWKEFFPRLMTELMELQEFYDPDTVELMTWIKRQAPVAAVFAGSPQLMGAIKLCTGWMVTSLPLYNDDDLLKRNENIYQIYSKRSAEDIYKILTSYKANYLIVEDAICNEVGPMRGCRVKDLLDIANGHMVCEEGDKLTYSKYGRFCHEVKINYSPYVNYFTRVYWNRSYFVYKINTVISFQS

SEQ ID NO: 44286 - protein, 99 aa, Homo sapiens
MEPEQMLEGQTQVAENPHSEYGLTDNVERIVENEKINAEKSSKQKVDLQSLPTRAYLDQTVVPILLQGLAVLAKERPPNPIEFLASYLLKNKAQFEDRN

SEQ ID NO: 44287 - protein, 99 aa, Homo sapiens; identical to SEQ ID NO: 44286

SEQ ID NO: 44288 - protein, 651 aa, Homo sapiens
MAGHPWHGTAALASSQAWRDGRERQALVSCRALYTYEDGSDDLKLAASGEGGLQELSGHFENQKVMYGFCSVKDSQAALPKYVLINWVGEDVPDARKCACASHVAKVAEFFQGVDVIVNASSVEDIDAGAIGQRLSNGLARLSSPVLHRLRLREDENAEPVGTTYQKTDAAVEMKRINREQFWEQAKKEEELRKEEERKKALDERLRFEQERMEQERQEQEERERRYREREQQIEEHRRKQQTLEAEEAKRRLKEQSIFGDHRDEEEETHMKKSESEVEEAAAIIAQRPDNPREFFKQQERVASASAGSCDVPSPFNHRPGSHLDSHRRMAPTPIPTRSPSDSSTASTPVAEQIERALDEVTSSQPPPLPPPPPPAQETQEPSPILDSEETRAAAPQAWAGPMEEPPQAQAPPRGPGSPAEDLMFMESAEQAVLAAPVEPATADATEIHDAADTIETDTATADTTVANNVPPAATSLIDLWPGNGEGASTLQGEPRAPTPPSGTEVTLAEVPLLDEVAPEPLLPAGEGCATLLNFDELPEPPATFCDPEEVEGESLAAPQTPTLPSALEELEQEQEPEPHLLTNGETTQKEGTQASEGYFSQSQEEEFAQSEELCAKAPPPVFYNKPPEIDITCWDADPVPEEEEGFEGGD

SEQ ID NO: 44289 - protein, 649 aa, Homo sapiens
MAGVSFSGHRLELLAAYEEVIREESAADWALYTYEDGSDDLKLAASGEGGLQELSGHFENQKVMYGFCSVKDSQAALPKYVLINWVGEDVPDARKCACASHVAKVAEFFQGVDVIVNASSVEDIDAGAIGQRLSNGLARLSSPVLHRLRLREDENAEPVGTTYQKTDAAVEMKRINREQFWEQAKKEEELRKEEERKKALDERLRFEQERMEQERQEQEERERRYREREQQIEEHRRKQQTLEAEEAKRRLKEQSIFGDHRDEEEETHMKKSESEVEEAAAIIAQRPDNPREFFKQQERVASASAGSCDVPSPFNHRPGSHLDSHRRMAPTPIPTRSPSDSSTASTPVAEQIERALDEVTSSQPPPLPPPPPPAQETQEPSPILDSEETRAAAPQAWAGPMEEPPQAQAPPRGPGSPAEDLMFMESAEQAVLAAPVEPATADATEIHDAADTIETDTATADTTVANNVPPAATSLIDLWPGNGEGASTLQGEPRAPTPPSGTEVTLAEVPLLDEVAPEPLLPAGEGCATLLNFDELPEPPATFCDPEEVEGESLAAPQTPTLPSALEELEQEQEPEPHLLTNGETTQKEGTQASEGYFSQSQEEEFAQSEELCAKAPPPVFYNKPPEIDITCWDADPVPEEEEGFEGGD

SEQ ID NO: 44290 - protein, 381 aa, Homo sapiens
MKKSESEVEEAAAIIAQRPDNPREFFKQQERVASASAGSCDVPSPFNHRPGSHLDSHRRMAPTPIPTRSPSDSSTASTPVAEQIERALDEVTSSQPPPLPPPPPPAQETQEPSPILDSEETRAAAPQAWAGPMEEPPQAQAPPRGPGSPAEDLMFMESAEQAVLAAPVEPATADATEIHDAADTIETDTATADTTVANNVPPAATSLIDLWPGNGEGASTLQGEPRAPTPPSGTEVTLAEVPLLDEVAPEPLLPAGEGCATLLNFDELPEPPATFCDPEEVEGESLAAPQTPTLPSALEELEQEQEPEPHLLTNGETTQKEGTQASEGYFSQSQEEEFAQSEELCAKAPPPVFYNKPPEIDITCWDADPVPEEEEGFEGGD

SEQ ID NO: 44291 - protein, 317 aa, Homo sapiens
MAGVSFSGHRLELLAAYEEVIREESAADWALYTYEDGSDDLKLAASGGGLQELSGHFENQKVMYGFCSVKDSQAALPKYVLINWVGEDVPDARKCACASHVAKVAEFFQGVDVIVNASSVEDIDAGAIGQRLSNGLARLSSPVLHRLRLREDENAEPVGTTYQKTDAAVEMKRINREQFWEQAKKEEELRKEEERKKALDERLRFEQERMEQERQEQEERERRYREREQQIEEHRRKQQTLEAEEAKRRLKEQSIFGDHRDEEEETHMKKSESEVEEAAAIIAQRPDNPREFFKQQERVASASAGSCDVPSPFNHRP

SEQ ID NO: 44292 - protein, 124 aa, Homo sapiens
MAGVSFSGHRLELLAAYEEVIREESAADWALYTYEDGSDDLKLAASGEGGLQELSGHFENQKVMYGFCSVKDSQAALPKYVLINWVGEDVPDARKCACASHVAKVAEFFQGVDVIVNASSVEDI

SEQ ID NO: 44293 - protein, 1299 aa, Homo sapiens
HRMSFHPGRGCPRGRGGHGARPSAPSFRPQNLRLLHPQQPPVQYQYEPPSAPSTTFSNSPAPNFLPPRPDFVPFPPPMPPSAQGPLPPCPIRPPFPNHQMRHPFPVPPCFPPMPPPMPCPNNPPVPGAPPGQGTFPFMMPPPSMPHPPPPPVMPQQVNYQYPPGYSHHNFPPPSFNSFQNNPSSFLPSANNSSSPHFRHLPPYPLPKAPSERRSPERLKHYDDHRHRDHSHGRGERHRSLDRRERGRSPDRRRQDSRYRSDYDRGRTPSRHRSYERSSRSPSREKKRARWEEEKDRWSDNQSSGKDKNYTSIKEKEPEETMPDKNEEEEEELLKPVWIRCTHSENYYSSDPMDQVGDSTVVGTSRLRDLYDKFEEELGSRQEKAKAARPPWEPPKTKLDEDLESSSESECESDEDSTCSSSSDSEVFDVIAEIKRKKAHPDRLHDELWYNDPGQMNDGPLCKCSAKARRTGIRHSIYPGEEAIKPCRPMTNNAGRLFHYRITVSPPTNFLTDRPTVIEYDDHEYIFEGFSMFAHAPLTNIPLCKVIRFNIDYTIHFIEEMMPENFCVKGLELFSLFLFRDILELYDWNLKGPLFEDSPPCCPRFHFMPRFVRFLPDGGKEVLSMHQILLYLLRCSKALVPEEEIANMLQWEELEWQKYAEECKGMIVTNPGTKPSSVRIDQLDREQFNPDVITFPIIVHFGIRPAQLSYAGDPQYQKLWKSYVKLRHLLANSPKVKQTDKQKLAQREEALQKIRQKNTMRREVTVELSSQGFWKTGIRSDVCQHAMMLPVLTHHIRYHQCLMHLDKLIGYTFQDRCLLQLAMTHPSHHLNFGMNPDHARNSLSNCGIRQPKYGDRKVHHMHMRKKGINTLINIMSRLGQDDPTPSRINHNERLEFLGDAVVEFLTSVHLYYLFPSLEEGGLATYRTAIVQNQHLAMLAKKLELDRFMLYAHGPDLCRESDLRHAMANCFEALIGAVYLEGSLEEAKQLFGRLLFNDPDLREVWLNYPLHPLQLQEPNTDRQLIETSPVLQKLTEFEEAIGVIFTHVRLLARAFTLRTVGFNHLTLGHNQRMEFLGDSIMQLVATEYLFIHFPDHHEGHLTLLRSSLVNNRTQAKVAEELGMQEYAITNDKTKRPVALRTKTLADLLESFIAALYIDKDLEYVHTFMNVCFFPRLKEFILNQDWNDPKSQLQQCCLTLRTEGKEPDIPLYKTLQTVGPSHARTYTVAVYFKGERIGCGKGPSIQQAEMGAAMDALEKYNFPQMAHQKRFIERKYRQELKEMRWEREHQEREPDETEDIKK

SEQ ID NO: 44294 - protein, 1374 aa, Homo sapiens
MMQGNTCHRMSFHPGRGCPRGRGGHGARPSAPSFRPQNLRLLHPQQPPVQYQYEPPSAPSTTFSNSPAPNFLPPRPDFVPFPPPMPPSAQGPLPPCPIRPPFPNHQMRHPFPVPPCFPPMPPPMPCPNNPPVPGAPPGQGTFPFMMPPPSMPHPPPPPVMPQQVNYQYPPGYSHHNFPPPSFNSFQNNPSSFLPSANNSSSPHFRHLPPYPLPKAPSERRSPERLKHYDDHRHRDHSHGRGERHRSLDRRERGRSPDRRRQDSRYRSDYDRGRTPSRHRSYERSRERERERHRHRDNRRSPSLERSYKKEYKRSGRSYGLSVVPEPAGCTPELPGEIIKNTDSWAPPLEIVNHRSPSREKKRARWEEEKDRWSDNQSSGKDKNYTSIKEKEPEETMPDKNEEEEEELLKPVWIRCTHSENYYSSDPMDQVGDSTVVGTSRLRDLYDKFEEELGSRQEKAKAARPPWEPPKTKLDEDLESSSESECESDEDSTCSSSSDSEVFDVIAEIKRKKAHPDRLHDELWYNDPGQMNDGPLCKCSAKARRTGIRHSIYPGEEAIKPCRPMTNNAGRLFHYRITVSPPTNFLTDRPTVIEYDDHEYIFEGFSMFAHAPLTNIPLCKVIRFNIDYTIHFIEEMMPENFCVKGLELFSLFLFRDILELYDWNLKGPLFEDSPPCCPRFHFMPRFVRFLPDGGKEVLSMHQILLYLLRCSKALVPEEEIANMLQWEELEWQKYAEECKGMIVTNPGTKPSSVRIDQLDREQFNPDVITFPIIVHFGIRPAQLSYAGDPQYQKLWKSYVKLRHLLANSPKVKQTDKQKLAQREEALQKIRQKNTMRREVTVELSSQGFWKTGIRSDVCQHAMMLPVLTHHIRYHQCLMHLDKLIGYTFQDRCLLQLAMTHPSHHLNFGMNPDHARNSLSNCGIRQPKYGDRKVHHMHMRKKGINTLINIMSRLGQDDPTPSRINHNERLEFLGDAVVEFLTSVHLYYLFPSLEEGGLATYRTAIVQNQHLAMLAKKLELDRFMLYAHGPDLCRESDLRHAMANCFEALIGAVYLEGSLEEAKQLFGRLLFNDPDLREVWLNYPLHPLQLQEPNTDRQLIETSPVLQKLTEFEEAIGVIFTHVRLLARAFTLRTVGFNHLTLGHNQRMEFLGDSIMQLVATEYLFIHFPDHHEGHLTLLRSSLVNNRTQAKVAEELGMQEYAITNDKTKRPVALRTKTLADLLESFIAALYIDKDLEYVHTFMNVCFFPRLKEFILNQDWNDPKSQLQQCCLTLRTEGKEPDIPLYKTLQTVGPSHARTYTVAVYFKGERIGCGKGPSIQQAEMGAAMDALEKYNFPQMAHQKRFIERKYRQELKEMRWEREHQEREPDETEDIKK

SEQ ID NO: 44295 - protein, 1185 aa, Homo sapiens
HRMSFHPGRGCPRGRGGHGARPSAPSFRPQNLRLLHPQQPPVQYQYEPPSAPSTTFSNSPAPNFLPPRPDFVPFPPPMPPSAQGPLPPCPIRPPFPNHQMRHPFPVPPCFPPMPPPMPCPNNPPVPGAPPGQGTFPFMMPPPSMPHPPPPPVMPQQVNYQYPPGYSHHNFPPPSFNSFQNNPSSFLPSANNSSSPHFRHLPPYPLPKAPSERRSPERLKHYDDHRHRDHSHGRGERHRSLDRRERGRSPDRRRQDSRYRSDYDRGRTPSRHRSYERSRERERERHRHRDNRRSPSLERSYKKEYKRSGSRSPSREKKRARWEEEKDRWSDNQSSGKDKNYTSIKEKEPEETMPDKNEEEEEELLKPVWIRCTHSENYYSSDPMDQVGDSTVVGTSRLRDLYDKFEEELGSRQEKAKAARPPWEPPKTKLDEDLESSSESECESDEDSTCSSSSDSEVFDVIAEIKRKKAHPDRLHDELWYNDPGQMNDGPLCKCSAKARRTGIRHSIYPGEEAIKPCRPMTNNAGRLFHYRITVSPPTNFLTDRPTVIEYDDHEYIFEGFSMFAHAPLTNIPLCKVIRFNIDYTIHFIEEMMPENFCVKGLELFSLFLFRDILELYDWNLKGPLFEDSPPCCPRFHFMPRFVRFLPDGGKEVLSMHQILLYLLRCSKALVPEEEIANMLQWEELEWQKYAEECKGMIVTNPGTKPSSVRIDQLDREQFNPDVITFPIIVHFGIRPAQLSYAGDPQYQKLWKSYVKLRHLLANSPKVKQTDKQKLAQREEALQKIRQKNTMRREVTVELSSQGFWKTGIRSDVCQHAMMLPVLTHHIRYHQCLMHLDKLIGYTFQDRCLLQLAMTHPSHHLNFGMNPDHARNSLSNCGIRQPKYGDRKVHHMHMRKKGINTLINIMSRLGQDDPTPSRINHNERLEFLGDAVVEFLTSVHLYYLFPSLEEGGLATYRTAIVQNQHLAMLAKKLELDRFMLYAHGPDLCRESDLRHAMANCFEALIGAVYLEGSLEEAKQLFGRLLFNDPDLREVWLNYPLHPLQLQEPNTDRQLIETSPVLQKLTEFEEAIGVIFTHVRLLARAFTLRTVGFNHLTLGHNQRMEFLGDSIMQLVATEYLFIHFPDHHEGHLTLLRSSLVNNRTQAKVAEELGMQEWSIYLLSNCDCCLLRPSLVFLQTMNEVCSLK

SEQ ID NO: 44296 - protein, 1337 aa, Homo sapiens
MMQGNTCHRMSFHPGRGCPRGRGGHGARPSAPSFRPQNLRLLHPQQPPVQYQYEPPSAPSTTFSNSPAPNFLPPRPDFVPFPPPMPPSAQGPLPPCPIRPPFPNHQMRHPFPVPPCFPPMPPPMPCPNNPPVPGAPPGQGTFPFMMPPPSMPHPPPPPVMPQQVNYQYPPGYSHHNFPPPSFNSFQNNPSSFLPSANNSSSPHFRHLPPYPLPKAPSERRSPERLKHYDDHRHRDHSHGRGERHRSLDRRERGRSPDRRRQDSRYRSDYDRGRTPSRHRSYERSRERERERHRHRDNRRSPSLERSYKKEYKRSGSRSPSREKKRARWEEEKDRWSDNQSSGKDKNYTSIKEKEPEETMPDKNEEEEEELLKPVWIRCTHSENYYSSDPMDQVGDSTVVGTSRLRDLYDKFEEELGSRQEKAKAARPPWEPPKTKLDEDLESSSESECESDEDSTCSSSSDSEVFDVIAEIKRKKAHPDRLHDELWYNDPGQMNDGPLCKCSAKARRTGIRHSIYPGEEAIKPCRPMTNNAGRLFHYRITVSPPTNFLTDRPTVIEYDDHEYIFEGFSMFAHAPLTNIPLCKVIRFNIDYTIHFIEEMMPENFCVKGLELFSLFLFRDILELYDWNLKGPLFEDSPPCCPRFHFMPRFVRFLPDGGKEVLSMHQILLYLLRCSKALVPEEEIANMLQWEELEWQKYAEECKGMIVTNPGTKPSSVRIDQLDREQFNPDVITFPIIVHFGIRPAQLSYAGDPQYQKLWKSYVKLRHLLANSPKVKQTDKQKLAQREEALQKIRQKNTMRREVTVELSSQGFWKTGIRSDVCQHAMMLPVLTHHIRYHQCLMHLDKLIGYTFQDRCLLQLAMTHPSHHLNFGMNPDHARNSLSNCGIRQPKYGDRKVHHMHMRKKGINTLINIMSRLGQDDPTPSRINHNERLEFLGDAVVEFLTSVHLYYLFPSLEEGGLATYRTAIVQNQHLAMLAKKLELDRFMLYAHGPDLCRESDLRHAMANCFEALIGAVYLEGSLEEAKQLFGRLLFNDPDLREVWLNYPLHPLQLQEPNTDRQLIETSPVLQKLTEFEEAIGVIFTHVRLLARAFTLRTVGFNHLTLGHNQRMEFLGDSIMQLVATEYLFIHFPDHHEGHLTLLRSSLVNNRTQAKVAEELGMQEYAITNDKTKRPVALRTKTLADLLESFIAALYIDKDLEYVHTFMNVCFFPRLKEFILNQDWNDPKSQLQQCCLTLRTEGKEPDIPLYKTLQTVGPSHARTYTVAVYFKGERIGCGKGPSIQQAEMGAAMDALEKYNFPQMAHQKRFIERKYRQELKEMRWEREHQEREPDETEDIKK

SEQ ID NO: 44297 - protein, 201 aa, Homo sapiens
MMQGNTCHRMSFHPGRGCPRGRGGHGARPSAPSFRPQNLRLLHPQQPPVQYQYEPPSAPSTTFSNSPAPNFLPPRPDFVPFPPPMPPSAQGPLPPCPIRPPFPNHQMRHPFPVPPCFPPMPPPMPCPNNPPVPGAPPGQGTFPFMMPPPSMPHPPPPPVMPQQVNYQYPPGYSHHNFPPPSFNSFQNNPSSFLPSANNSSS

SEQ ID NO: 44298 - protein, 1374 aa, Homo sapiens; identical to SEQ ID NO: 44294

SEQ ID NO: 44299 - protein, 209 aa, Homo sapiens
MKAVVQRVTRASVTVGGEQISAIGRGICVLLGISLEDTQKELEHMVRKILNLRVFEDESGKHWSKSVMDKQYEILCVSQFTLQCVLKGNKPDFHLAMPTEQAEGFYNSFLEQLRKTYRPELIKDGKFGAYMQVHIQNDGPVTIELESPAPGTATSDPKQLSKLEKQQQRKEKTRAKGPSESSKERNTPRKEDRSASSGAEGDVSSEREP

SEQ ID NO: 44300 - protein, 280 aa, Homo sapiens
MGRAELLEGKMSTQDPSDLWSRSDGEAELLQDLGWYHGNLTRHAAEALLLSNGCDGSYLLRDSNETTGLYSLSVRAKDSVKHFHVEYTGYSFKFGFNEFSSLKDFVKHFANQPLIGSETGTLMVLKHPYPRKVEEPSIYESVRVHTAMQTGRTEDDLVPTAPSLGTKEGYLTKQGGLVKTWKTRWFTLHRNELKYFKDQMSPEPIRILDLTECSAVQFDYSQERVNCFCLVFPFRTFYLCAKTGVEADEWIKILRWKLSQIRKQLNQGEGTIRSRSFIFK

SEQ ID NO: 44301 - protein, 1551 aa, Homo sapiens
MGFCLALAWTLLVGAWTPLGAQNPISWEVQRFDGWYNNLMEHRWGSKGSRLQRLVPASYADGVYQPLGEPHLPNPRDLSNTISRGPAGLASLRNRTVLGVFFGYHVLSDLVSVETPGCPAEFLNIRIPPGDPMFDPDQRGDVVLPFQRSRWDPETGRSPSNPRDPANQVTGWLDGSAIYGSSHSWSDALRSFSRGQLASGPDPAFPRDSQNPLLMWAAPDPATGQNGPRGLYAFGAERGNREPFLQALGLLWFRYHNLWAQRLARQHPDWEDEELFQHARKRVIATYQNIAVYEWLPSFLQKTLPEYTGYRPFLDPSISSEFVAASEQFLSTMVPPGVYMRNASCHFQGVINRNSSVSRALRVCNSYWSREHPSLQSAEDVDALLLGMASQIAEREDHVLVEDVRDFWPGPLKFSRTDHLASCLQRGRDLGLPSYTKARAALGLSPITRWQDINPALSRSNDTVLEATAALYNQDLSWLELLPGGLLESHRDPGPLFSTIVLEQFVRLRDGDRYWFENTRNGLFSKKEIEEIRNTTLQDVLVAVINIDPSALQPNVFVWHKGDPCPQPRQLSTEGLPACAPSVVRDYFEGSGFGFGVTIGTLCCFPLVSLLSAWIVARLRMRNFKRLQGQDRQSIVSEKLVGGMEALEWQGHKEPCRPVLVYLQPGQIRVVDGRLTVLRTIQLQPPQKVNFVLSSNRGRRTLLLKIPKEYDLVLLFNLEEERQALVENLRGALKESGLSIQEWELREQELMRAAVTREQRRHLLETFFRHLFSQVLDINQADAGTLPLDSSQKVREALTCELSRAEFAESLGLKPQDMFVESMFSLADKDGNGYLSFREFLDILVVFMKGSPEEKSRLMFRMYDFDGNGLISKDEFIRMLRSFIEISNNCLSKAQLAEVVESMFRESGFQDKEELTWEDFHFMLRDHNSELRFTQLCVKGVEVPEVIKDLCRRASYISQDMICPSPRVSARCSRSDIETELTPQRLQCPMDTDPPQEIRRRFGKKVTSFQPLLFTEAHREKFQRSCLHQTVQQFKRFIENYRRHIGCVAVFYAIAGGLFLERAYYYAFAAHHTGITDTTRVGIILSRGTAASISFMFSYILLTMCRNLITFLRETFLNRYVPFDAAVDFHRLIASTAIVLTVLHSVGHVVNVYLFSISPLSVLSCLFPGLFHDDGSELPQKYYWWFFQTVPGLTGVVLLLILAIMYVFASHHFRRRSFRGFWLTHHLYILLYVLLIIHGSFALIQLPRFHIFFLVPAIIYGGDKLVSLSRKKVEISVVKAELLPSGVTHLRFQRPQGFEYKSGQWVRIACLALGTTEYHPFTLTSAPHEDTLSLHIRAAGPWTTRLREIYSAPTGDRCARYPKLYLDGPFGEGHQEWHKFEVSVLVGGGIGVTPFASILKDLVFKSSVSCQVFCKKIYFIWVTRTQRQFEWLADIIREVEENDHQDLVSVHIYITQLAEKFDLRTTMLYICERHFQKVLNRSLFTGLRSITHFGRPPFEPFFNSLQEVHPQVRKIGVFSCGPPGMTKNVEKACQLINRQDRTHFSHHYENF

SEQ ID NO: 44302 - protein, 1551 aa, Homo sapiens; identical to SEQ ID NO: 44301

SEQ ID NO: 44303 - protein, 1551 aa, Homo sapiens; identical to SEQ ID NO: 44301

SEQ ID NO: 44304 - protein, 43 aa, Homo sapiens
MGFCLALAWTLLVGAWTPLGAQNPISWEVQRFDGWYNNLMEHR

SEQ ID NO: 44305 - protein, 1197 aa, Homo sapiens
MWMHCCWAWPPRSQSERTMCWLKMCGVSLRLSLQVVNSWPLGRGSAGLPEPDFWPGPLKFSRTDHLASCLQRGRDLGLPSYTKARAALGLSPITRWQDINPALSRSNDTVLEATAALYNQDLSWLELLPGGLLESHRDPGPLFSTIVLEQFVRLRDGDRYWFENTRNGLFSKKEIEEIRNTTLQDVLVAVINIDPSALQPNVFVWHKGDPCPQPRQLSTEGLPACAPSVVRDYFEGSGFGFGVTIGTLCCFPLVSLLSAWIVARLRMRNFKRLQGQDRQSIVSEKLVGGMEALEWQGHKEPCRPVLVYLQPGQIRVVDGRLTVLRTIQLQPPQKVNFVLSSNRGRRTLLLKIPKEYDLVLLFNLEEERQALVENLRGALKESGLSIQEWELREQELMRAAVTREQRRHLLETFFRHLFSQVLDINQADAGTLPLDSSQKVREALTCELSRAEFAESLGLKPQDMFVESMFSLADKDGNGYLSFREFLDILVVFMKGSPEEKSRLMFRMYDFDGNGLISKDEFIRMLRSFIEISNNCLSKAQLAEVVESMFRESGFQDKEELTWEDFHFMLRDHNSELRFTQLCVKGVEVPEVIKDLCRRASYISQDMICPSPRVSARCSRSDIETELTPQRLQCPMDTDPPQEIRRRFGKKVTSFQPLLFTEAHREKFQRSCLHQTVQQFKRFIENYRRHIGCVAVFYAIAGGLFLERAYYYAFAAHHTGITDTTRVGIILSRGTAASISFMFSYILLTMCRNLITFLRETFLNRYVPFDAAVDFHRLIASTAIVLTVLHSVGHVVNVYLFSISPLSVLSCLFPGLFHDDGSELPQKYYWWFFQTVPGLTGVVLLLILAIMYVFASHHFRRRSFRGFWLTHHLYILLYVLLIIHGSFALIQLPRFHIFFLVPAIIYGGDKLVSLSRKKVEISVVKAELLPSGVTHLRFQRPQGFEYKSGQWVRIACLALGTTEYHPFTLTSAPHEDTLSLHIRAAGPWTTRLREIYSAPTGDRCARYPKLYLDGPFGEGHQEWHKFEVSVLVGGGIGVTPFASILKDLVFKSSVSCQVFCKKIYFIWVTRTQRQFEWLADIIREVEENDHQDLVSVHIYITQLAEKFDLRTTMLYICERHFQKVLNRSLFTGLRSITHFGRPPFEPFFNSLQEVHPQVRKIGVFSCGPPGMTKNVEKACQLINRQDRTHFSHHYENF

SEQ ID NO: 44306 - protein, 1548 aa, Homo sapiens
MLRARPEALMLLGALLTGSLGPSGNQDALSLPWEVQRYDGWFNNLRHHERGAVGCRLQRRVPANYADGVYQALEEPQLPNPRRLSNAATRGIAGLPSLHNRTVLGVFFGYHVLSDVVSVETPGCPAEFLNIRIPPGDPVFDPDQRGDVVLPFQRSRWDPETGRSPSNPRDLANQVTGWLDGSAIYGSSHSWSDALRSFSGGQLASGPDPAFPRDSQNPLLMWAAPDPATGQNGPRGLYAFGAERGNREPFLQALGLLWFRYHNLWAQRLARQHPDWEDEELFQHARKRVIATYQNIAVYEWLPSFLQKTLPEYTGYRPFLDPSISPEFVVASEQFFSTMVPPGVYMRNASCHFRKVLNKGFQSSQALRVCNNYWIRENPNLNSTQEVNELLLGMASQISELEDNIVVEDLRDYWPGPGKFSRTDYVASSIQRGRDMGLPSYSQALLAFGLDIPRNWSDLNPNVDPQVLEATAALYNQDLSQLELLLGGLLESHGDPGPLFSAIVLDQFVRLRDGDRYWFENTRNGLFSKKEIEDIRNTTLRDVLVAVINIDPSALQPNVFVWHKGAPCPQPKQLTTDGLPQCAPLTVLDFFEGSSPGFAITIIALCCLPLVSLLLSGVVAYFRGREHKKLQKKLKESVKKEAAKDGVPAMEWPGPKERSSPIIIQLLSDRCLQVLNRHLTVLRVVQLQPLQQVNLILSNNRGCRTLLLKIPKEYDLVLLFSSEEERGAFVQQLWDFCVRWALGLHVAEMSEKELFRKAVTKQQRERILEIFFRHLFAQVLDINQADAGTLPLDSSQKVREALTCELSRAEFAESLGLKPQDMFVESMFSLADKDGNGYLSFREFLDILVVFMKGSPEDKSRLMFTMYDLDENGFLSKDEFFTMMRSFIEISNNCLSKAQLAEVVESMFRESGFQDKEELTWEDFHFMLRDHDSELRFTQLCVKGGGGGGNGIRDIFKQNISCRVSFITRTPGERSHPQGLGPPAPEAPELGGPGLKKRFGKKAAVPTPRLYTEALQEKMQRGFLAQKLQQYKRFVENYRRHIVCVAIFSAICVGVFADRAYYYGFASPPSDIAQTTLVGIILSRGTAASVSFMFSYILLTMCRNLITFLRETFLNRYVPFDAAVDFHRWIAMAAVVLAILHSAGHAVNVYIFSVSPLSLLACIFPNVFVNDGSKLPQKFYWWFFQTVPGMTGVLLLLVLAIMYVFASHHFRRRSFRGFWLTHHLYILLYALLIIHGSYALIQLPTFHIYFLVPAIIYGGDKLVSLSRKKVEISVVKAELLPSGVTYLQFQRPQGFEYKSGQWVRIACLALGTTEYHPFTLTSAPHEDTLSLHIRAVGPWTTRLREIYSSPKGNGCAGYPKLYLDGPFGEGHQEWHKFEVSVLVGGGIGVTPFASILKDLVFKSSLGSQMLCKKIYFIWVTRTQRQFEWLADIIQEVEENDHQDLVSVHIYVTQLAEKFDLRTTMLYICERHFQKVLNRSLFTGLRSITHFGRPPFEPFFNSLQEVHPQVRKIGVFSCGPPGMTKNVEKACQLVNRQDRAHFMHHYENF

SEQ ID NO: 44307 - protein, 483 aa, Homo sapiens
MATLGHTFPFYAGPKPTFPMDTTLASIIMIFLTALATFIVILPGIRGKTRLFWLLRVVTSLFIGAAILAVNFSSEWSVGQVSTNTSYKAFSSEWISADIGLQVGLGGVNITLTGTPVQQLNETINYNEEFTWRLGENYAEEYAKALEKGLPDPVLYLAEKFTPRSPCGLYRQYRLAGHYTSAMLWVAFLCWLLANVMLSMPVLVYGGYMLLATGIFQLLALLFFSMATSLTSPCPLHLGASVLHTHHGPAFWITLTTGLLCVLLGLAMAVAHRMQPHRLKAFFNQSVDEDPMLEWSPEEGGLLSPRYRSMADSPKSQDIPLSEASSTKAYYRPRRLSLVPADVRGLAPAALSALPGALLAQAWRALLPGLRCPKAGKESRLGPPHSPWRFGPEGCEERWAEHTGDSPRPLRGRGTGRLWRWGSKERRACGVRAMLPRLVSNSGLKRPSCLDLPKCWDYRRDARAFFHLLEPTPCVTSRHTPLI

SEQ ID NO: 44308 - protein, 438 aa, Homo sapiens
MATLGHTFPFYAGPKPTFPMDTTLASIIMIFLTALATFIVILPGIRGKTRLFWLLRVVTSLFIGAAILGTPVQQLNETINYNEEFTWRLGENYAEEYAKALEKGLPDPVLYLAEKFTPRSPCGLYRQYRLAGHYTSAMLWVAFLCWLLANVMLSMPVLVYGGYMLLATGIFQLLALLFFSMATSLTSPCPLHLGASVLHTHHGPAFWITLTTGLLCVLLGLAMAVAHRMQPHRLKAFFNQSVDEDPMLEWSPEEGGLLSPRYRSMADSPKSQDIPLSEASSTKAYYRPRRLSLVPADVRGLAPAALSALPGALLAQAWRALLPGLRCPKAGKESRLGPPHSPWRFGPEGCEERWAEHTGDSPRPLRGRGTGRLWRWGSKERRACGVRAMLPRLVSNSGLKRPSCLDLPKCWDYRRDARAFFHLLEPTPCVTSRHTPLI

SEQ ID NO: 44309 - protein, 77 aa, Homo sapiens
MATLGHTFPFYAGPKPTFPMDTTLASIIMIFLTALATFIVILPGIRGKTRLFWLLRVVTSLFIGAAILGTPVQQLNE

SEQ ID NO: 44310 - protein, 72 aa, Homo sapiens
MATLGHTFPFYAGPKPTFPMDTTLASIIMIFLTALATFIVILPGIRGKTRLFWLLRVVTSLFIGAAILAVNF

SEQ ID NO: 44311 - protein, 298 aa, Homo sapiens
MATLGHTFPFYAGPKPTFPMDTTLASIIMIFLTALATFIVILPGIRGKTRLFWLLRVVTSLFIGAAILGTPVQQLNETINYNEEFTWRLGENYAEEYAKALEKGLPDPVLYLAEKFTPRSPCGLYRQYRLAGHYTSAMLWVAFLCWLLANVMLSMPVLVYGGYMLLATGIFQLLALLFFSMATSLTSPCPLHLGASVLHTHHGPAFWITLTTGLLCVLLGLAMAVAHRMQPHRLKAFFNQSVDEDPMLEWSPEEGGLLSPRYRSMADSPKSQDIPLSEASSTKAYCKEAHPKDPDCAL

SEQ ID NO: 44312 - protein, 13 aa, Homo sapiens
MATLGHTFPFYAG

SEQ ID NO: 44313 - protein, 298 aa, Homo sapiens; identical to SEQ ID NO: 44311

SEQ ID NO: 44314 - protein, 483 aa, Homo sapiens; identical to SEQ ID NO: 44307

SEQ ID NO: 44315 - protein, 72 aa, Homo sapiens
MATLGHTFPFYAGPKPTFPMDTTLASIIMIFLTALATFIVILPGIRGKTRLFWLLRVVTSLFIGAAILGTPV

SEQ ID NO: 44316 - protein, 16 aa, Homo sapiens
MATLGHTFPFYAGPKP

SEQ ID NO: 44317 - protein, 121 aa, Homo sapiens
MATLGHTFPFYAGPKPTFPMDTTLASIIMIFLTALATFIVILPGIRGKTRLFWLLRVVTSLFIGAAILAVNFSSEWSVGQVSTNTSYKAFSSEWISADIGLQVGLGGVNITLTGTPVQQLN

SEQ ID NO: 44318 - protein, 343 aa, Homo sapiens
MATLGHTFPFYAGPKPTFPMDTTLASIIMIFLTALATFIVILPGIRGKTRLFWLLRVVTSLFIGAAILAVNFSSEWSVGQVSTNTSYKAFSSEWISADIGLQVGLGGVNITLTGTPVQQLNETINYNEEFTWRLGENYAEEYAKALEKGLPDPVLYLAEKFTPRSPCGLYRQYRLAGHYTSAMLWVAFLCWLLANVMLSMPVLVYGGYMLLATGIFQLLALLFFSMATSLTSPCPLHLGASVLHTHHGPAFWITLTTGLLCVLLGLAMAVAHRMQPHRLKAFFNQSVDEDPMLEWSPEEGGLLSPRYRSMADSPKSQDIPLSEASSTKAYCKEAHPKDPDCAL

SEQ ID NO: 44319 - protein, 320 aa, Homo sapiens
MTLWNGVLPFYPQPRHAAGFSVPLLIVILVFLALAASFLLILPGIRGHSRWFWLVRVLLSLFIGAEIVAVHFSAEWFVGTVNTNTSYKAFSAARVTARVRLLVGLEGINITLTGTPVHQLNETIDYNEQFTWRLKENYAAEYANALEKGLPDPVLYLAEKFTPSSPCGLYHQYHLAGHYASATLWVAFCFWLLSNVLLSTPAPLYGGLALLTTGAFALFGVFALASISSVPLCPLRLGSSALTTQYGAAFWVTLATGVLCLFLGGAVVSLQYVRPSALRTLLDQSAKDCSQERGGSPLILGDPLHKQAALPDLKCITTNL

SEQ ID NO: 44320 - protein, 588 aa, Homo sapiens
MEGDGVPWGSEPVSGPGPGGGGMIRELCRGFGRYRRYLGRLRQNLRETQKFFRDIKCSHNHTCLSSLTGGGGAERGPAGDVAETGLQAGQLSCISFPPKEEKYLQQIVDCLPCILILGQDCNVKCQLLNLLLGVQVLPTTKLGSEESCKLRRLRFTYGTQTRVSLALPGQYELVHTLVAHQGNWETIPEEDLEVQENNEDAAHVLAELEVTMHHALLQEVDVVVAPCQGLRPTVDVLGDLVNDFLPVITYALHKDELSERDEQELQEIRKYFSFPVFFFKVPKLGSEIIDSSTRRMESERSPLYRQLIDLGYLSSSHWNCGAPGQDTKAQSMLVEQSEKLRHLSTFSHQVLQTRLVDAAKALNLVHCHCLDIFINQAFDMQRDLQITPKRLEYTRKKENELYESLMNIANRKQEEMKDMIVETLNTMKEELLDDATNMEFKDVIVPENGEPITDLGFCKPEAMMSGSIVGTPIHMAPELFTGKYDNSVDVYAFGILFWYICSGSVKLPEAFERCASKDHLWNNVRRGARPERLPVFDEECWQLMEACWDGDPLKRPLLGIVQPMLQGIMNRLCKSNSEQPNRGLDDST

SEQ ID NO: 44321 - protein, 884 aa, Homo sapiens
MEGDGVPWGSEPVSGPGPGGGGMIRELCRGFGRYRRYLGRLRQNLRETQKFFRDIKCSHNHTCLSSLTGGGGAERGPAGDVAETGLQAGQLSCISFPPKEEKYLQQIVDCLPCILILGQDCNVKCQLLNLLLGVQVLPTTKLGSEESCKLRRLRFTYGTQTRVSLALPGQYELVHTLVAHQGNWETIPEEDLEVQENNEDAAHVLAELEVTMHHALLQEVDVVVAPCQGLRPTVDVLGDLVNDFLPVITYALHKDELSERDEQELQEIRKYFSFPVFFFKVPKLGSEIIDSSTRRMESERSPLYRQLIDLGYLSSSHWNCGAPGQDTKAQSMLVEQSEKLRHLSTFSHQVLQTRLVDAAKALNLVHCHCLDIFINQAFDMQRDLQITPKRLEYTRKKENELYESLMNIANRKQEEMKDMIVETLNTMKEELLDDATNMEFKDVIVPENGEPVGTREIKCCIRQIQELIISRLNQAVANKLISSVDYLRESFVGTLERCLQSLEKSQDVSVHITSNYLKQILNAAYHVEVTFHSGSSVTRMLWEQIKQIIQRITWVSPPAITLEWKRKVAQEAIESLSASKLAKSICSQFRTRLNSSHEAFAASLRQLEAGHSGRLEKTEDLWLRVRKDHAPRLARLSLESCSLQDVLLHRKPKLGQELGRGQYGVVYLCDNWGGHFPCALKSVVPPDEKHWNDLALEFHYMRSLPKHERLVDLHGSVIDYNYGGGSSIAVLLIMERLHRDLYTGLKAGLTLETRLQIALDVVEGIRFLHSQGLVHRDIKLKNVLLDKQNRAKITDLGFCKPEAMMSGSIVGTPIHMAPELFTGARPERLPVFDEECWQLMEACWDGDPLKRPLLGIVQPMLQGIMNRLCKSNSEQPNRGLDDST

SEQ ID NO: 44322 - protein, 929 aa, Homo sapiens
MEGDGVPWGSEPVSGPGPGGGGMIRELCRGFGRYRRYLGRLRQNLRETQKFFRDIKCSHNHTCLSSLTGGGGAERGPAGDVAETGLQAGQLSCISFPPKEEKYLQQIVDCLPCILILGQDCNVKCQLLNLLLGVQVLPTTKLGSEESCKLRRLRFTYGTQTRVSLALPGQYELVHTLVAHQGNWETIPEEDLEVQENNEDAAHVLAELEVTMHHALLQEVDVVVAPCQGLRPTVDVLGDLVNDFLPVITYALHKDELSERDEQELQEIRKYFSFPVFFFKVPKLGSEIIDSSTRRMESERSPLYRQLIDLGYLSSSHWNCGAPGQDTKAQSMLVEQSEKLRHLSTFSHQVLQTRLVDAAKALNLVHCHCLDIFINQAFDMQRDLQITPKRLEYTRKKENELYESLMNIANRKQEEMKDMIVETLNTMKEELLDDATNMEFKDVIVPENGEPVGTREIKCCIRQIQELIISRLNQAVANKLISSVDYLRESFVGTLERCLQSLEKSQDVSVHITSNYLKQILNAAYHVEVTFHSGSSVTRMLWEQIKQIIQRITWVSPPAITLEWKRKVAQEAIESLSASKLAKSICSQFRTRLNSSHEAFAASLRQLEAGHSGRLEKTEDLWLRVRKDHAPRLARLSLESCSLQDVLLHRKPKLGQELGRGQYGVVYLCDNWGGHFPCALKSVVPPDEKHWNDLALEFHYMRSLPKHERLVDLHGSVIDYNYGGGSSIAVLLIMERLHRDLYTGLKAGLTLETRLQIALDVVEGIRFLHSQGLVHRDIKLKNVLLDKQNRAKITDLGFCKPEAMMSGSIVGTPIHMAPELFTGKYDNSVDVYAFGILFWYICSGSVKLPEAFERCASKDHLWNNVRRGARPERLPVFDEECWQLMEACWDGDPLKRPLLGIVQPMLQGIMNRLCKSNSEQPNRGLDDST

SEQ ID NO: 44323 - protein, 367 aa, Homo sapiens
MVMEVGTLDAGGLRALLGERAAQCLLLDCRSFFAFNAGHIAGSVNVRFSTIVRRRAKGAMGLEHIVPNAELRGRLLAGAYHAVVLLDERSAALDGAKRDGTLALAAGALCREARAAQVFFLKGGYEAFSASCPELCSKQSTPMGLSLPLSTSVPDSAESGCSSCSTPLYDQGGPVEILPFLYLGSAYHASRKDMLDALGITALINVSANCPNHFEGHYQYKSIPVEDNHKADISSWFNEAIDFIDSIKNAGGRVFVHCQAGISRSATICLAYLMRTNRVKLDEAFEFVKQRRSIISPNFSFMGQLLQFESQVLAPHCSAEAGSPAMAVLDRGTSTTTVFNFPVSIPVHSTNSALSYLQSPITTSPSC

SEQ ID NO: 44324 - protein, 302 aa, Homo sapiens
MVMEVGTLDAGGLRALLGERAAQCLLLDCRSFFAFNAGHIAGSVNVRFSAAQVFFLKGGYEAFSASCPELCSKQSTPMGLSLPLSTSVPDSAESGCSSCSTPLYDQGGPVEILPFLYLGSAYHASRKDMLDALGITALINVSANCPNHFEGHYQYKSIPVEDNHKADISSWFNEAIDFIDSIKNAGGRVFVHCQAGISRSATICLAYLMRTNRVKLDEAFEFVKQRRSIISPNFSFMGQLLQFESQVLAPHCSAEAGSPAMAVLDRGTSTTTVFNFPVSIPVHSTNSALSYLQSPITTSPSC

SEQ ID NO: 44325 - protein, 340 aa, Homo sapiens
MVMEVGTLDAGGLRALLGERAAQCLLLDCRSFFAFNAGHIAGSVNVRFSTIVRRRAKGAMGLEHIVPNAKRDGTLALAAGALCREARAAQVFFLKGGYEAFSASCPELCSKQSTPMGLSLPLSTSVPDSAESGCSSCSTPLYDQGGPVEILPFLYLGSAYHASRKDMLDALGITALINVSANCPNHFEGHYQYKSIPVEDNHKADISSWFNEAIDFIDSIKNAGGRVFVHCQAGISRSATICLAYLMRTNRVKLDEAFEFVKQRRSIISPNFSFMGQLLQFESQVLAPHCSAEAGSPAMAVLDRGTSTTTVFNFPVSIPVHSTNSALSYLQSPITTSPSC

SEQ ID NO: 44326 - protein, 377 aa, Homo sapiens
MRNSETLERGVGGCRVFSCLGSYPGIEGAGLALLADLALGGRLLGTHMSQWHHPRSGWGRRRDFSGRSSAKKKGGNHIPERWKDYLPVGQRMPGTRFIAFKVPLQKSFEKKLAPEECFSPLDLFNKIREQNEELGLIIDLTYTQRYYKPEDLPETVPYLKIFTVGHQVPDDETIFKFKHAVNGFLKENKDNDKLIGVHCTHGLNRTGYLICRYLIDVEGVRPDDAIELFNRCRGHCLERQNYIEDLQNGPIRKNWNSSVPRSSDFEDSAHLMQPVHNKPVKQGPRYNLHQIQGHSAPRHFHTQTQSLQQSVRKFSENPHVYQRHHLPPPGPPGEDYSHRRYSWNVKPNASRAAQDRRRWYPYNYSRLSYPACWEWTQ

SEQ ID NO: 44327 - protein, 226 aa, Homo sapiens
MSQWHHPRSGWGRRRDFSGRSSAKKKGGNHIPERWKDYLPVGQRMPGTRFIAFKVPLQKSFEKKLAPEECFSPLDLFNKIREQNEELGLIIDLTYTQRYYKPEDLPETVPYLKIFTVGHQVPDDETIFKFKHAVNGFLKENKDNDKLIGVHCTHGLNRTGYLICRRSLALSPRLECSGTISTHSKFCFPGSRRSPASASQVAGTTGARHHARLIFCIFSRDVVSPC

SEQ ID NO: 44328 - protein, 273 aa, Homo sapiens
MRNSETLERGVGGCRVFSCLGSYPGIEGAGLALLADLALGGRLLGTHMSQWHHPRSGWGRRRDFSGRSSAKKKGGNHIPERWKDYLPVGQRMPGTRFIAFKVPLQKSFEKKLAPEECFSPLDLFNKIREQNEELGLIIDLTYTQRYYKPEDLPETVPYLKIFTVGHQVPDDETIFKFKHAVNGFLKENKDNDKLIGVHCTHGLNRTGYLICRRSLALSPRLECSGTISTHSKFCFPGSRRSPASASQVAGTTGARHHARLIFCIFSRDVVSPC

SEQ ID NO: 44329 - protein, 198 aa, Homo sapiens
MDSLQKQDLRRPKIHGAVQASPYQPPTLASLQRLLWVRQAATLNHIDEVWPSLFLGDAYAARDKSKLIQLGITHVVNAAAGKFQVDTGAKFYRGMSLEYYGIEADDNPFFDLSVYFLPVARYIRAALSVPQGRVLVHCAMGVSRSATLVLAFLMICENMTLVEAIQTVQAHRNICPNSGFLRQLQVLDNRLGRETGRF

SEQ ID NO: 44330 - protein, 248 aa, Homo sapiens
MAETSLPELGGEDKATPCPSILELEELLRAGKSSCSRVDEVWPNLFIGDAMDSLQKQDLRRPKIHGAVQASPYQPPTLASLQRLLWVRQAATLNHIDEVWPSLFLGDAYAARDKSKLIQLGITHVVNAAAGKFQVDTGAKFYRGMSLEYYGIEADDNPFFDLSVYFLPVARYIRAALSVPQGRVLVHCAMGVSRSATLVLAFLMICENMTLVEAIQTVQAHRNICPNSGFLRQLQVLDNRLGRETGRF

SEQ ID NO: 44331 - protein, 188 aa, Homo sapiens
MAETSLPELGGEDKATPCPSILELEELLRAGKSSCSRVDEVWPNLFIGDAATANNRFELWKLGITHVLNAAHKGLYCQGGPDFYGSSVSYLGVPAHDLPDFDISAYFSSAADFIHRALNTPGAKVLVHCVVGVSRSATLVLAYLMLHQRLSLRQAVITVRQHRWVFPNRGFLHQLCRLDQQLRGAGQS

SEQ ID NO: 44332 - protein, 291 aa, Homo sapiens
MGLCHFATLALILLVLLEALAQADTQKMVEAQRGVGPRACYSIWLLLAPTPPLSHCLQSPQKQHQVCGDRRLKASSTNCPSEKCTAWARYSHRMDSLQKQDLRRPKIHGAVQASPYQPPTLASLQRLLWVRQAATLNHIDEVWPSLFLGDAYAARDKSKLIQLGITHVVNAAAGKFQVDTGAKFYRGMSLEYYGIEADDNPFFDLSVYFLPVARYIRAALSVPQGRVLVHCAMGVSRSATLVLAFLMICENMTLVEAIQTVQAHRNICPNSGFLRQLQVLDNRLGRETGRF

SEQ ID NO: 44333 - protein, 198 aa, Homo sapiens; identical to SEQ ID NO: 44329

SEQ ID NO: 44334 - protein, 327 aa, Homo sapiens
MGLPQPRLPAPALQAGPATAGCRPELRGQSWSLLPAMGLCHFATLALILLVLLEALAQADTQKMVEAQRGVGPRACYSIWLLLAPTPPLSHCLQSPQKQHQVCGDRRLKASSTNCPSEKCTAWARYSHRMDSLQKQDLRRPKIHGAVQASPYQPPTLASLQRLLWVRQAATLNHIDEVWPSLFLGDAYAARDKSKLIQLGITHVVNAAAGKFQVDTGAKFYRGMSLEYYGIEADDNPFFDLSVYFLPVARYIRAALSVPQGRVLVHCAMGVSRSATLVLAFLMICENMTLVEAIQTVQAHRNICPNSGFLRQLQVLDNRLGRETGRF

SEQ ID NO: 44335 - protein, 198 aa, Homo sapiens
MSSRGHSTLPRTLMAPRMISEGDIGGIAQITSSLFLGRGSVASNRHLLQARGITCIVNATIEIPNFNWPQFEYVKVPLADMPHAPIGLYFDTVADKIHSVSRKHGATLVHCAAGVSRSATLCIAYLMKFHNVCLLEAYNWVKARRPVIRPNVGFWRQLIDYERQLFGKSTVKMVQTPYGIVPDVYEKESRHLMPYWGI

SEQ ID NO: 44336 - protein, 198 aa, Homo sapiens; identical to SEQ ID NO: 44335

SEQ ID NO: 44337 - protein, 314 aa, Homo sapiens
MGLEAARELECAALGTLLRDPREAERTLLLDCRPFLAFCRRHVRAARPVPWNALLRRRARGPPAAVLACLLPDRALRTRLVRGELARAVVLDEGSASVAELRPDSPAHVLLAALLHETRAGPTAVYFLRGGFDGFQGCCPDLCSEAPAPALPPTGDKTSRSDSRAPVYDQGGPVEILPYLFLGSCSHSSDLQGLQACGITAVLNVSASCPNHFEGLFRYKSIPVEDNQMVEISAWFQEAIGFIDWVKNSGGRVLVHCQAGISRSATICLAYLMQSRRVRLDEAFDFVKQRRGVISPNFSFMGQLLQFETQVLCH

SEQ ID NO: 44338 - protein, 185 aa, Homo sapiens
MSGSFELSVQDLNDLLSDGSGCYSLPSQPCNEVTPRIYVGNASVAQDIPKLQKLGITHVLNAAEGRSFMHVNTNANFYKDSGITYLGIKANDTQEFNLSAYFERAADFIDQALAQKNGRVLVHCREGYSRSPTLVIAYLMMRQKMDVKSALSIVRQNREIGPNDGFLAQLCQLNDRLAKEGKLKP

SEQ ID NO: 44339 - protein, 144 aa, Homo sapiens
MSVAQDIPKLQKLGITHVLNAAEGRSFMHVNTNANFYKDSGITYLGIKANDTQEFNLSAYFERAADFIDQALAQKNGRVLVHCREGYSRSPTLVIAYLMMRQKMDVKSALSIVRQNREIGPNDGFLAQLCQLNDRLAKEGKLKP

SEQ ID NO: 44340 - protein, 394 aa, Homo sapiens
MVTMEELREMDCSVLKRLMNRDENGGGAGGSGSHGTLGLPSGGKCLLLDCRPFLAHSAGYILGSVNVRCNTIVRRRAKGSVSLEQILPAEEEVRARLRSGLYSAVIVYDERSPRAESLREDSTVSLVVQALRRNAERTDICLLKGGYERFSSEYPEFCSKTKALAAIPPPVPPSATEPLDLGCSSCGTPLHDQGGPVEILPFLYLGSAYHAARRDMLDALGITALLNVSSDCPNHFEGHYQYKCIPVEDNHKADISSWFMEAIEYIDAVKDCRGRVLVHCQAGISRSATICLAYLMMKKRVRLEEAFEFVKQRRSIISPNFSFMGQLLQFESQVLATSCAAEAASPSGPLRERGKTPATPTSQFVFSFPVSVGVHSAPSSLPYLHSPITTSPSC

SEQ ID NO: 44341 - protein, 303 aa, Homo sapiens
MGRKVHSNGSQFAEHSRSPRRTGRDCKPVRAPSMALGVSQLAGRSRCLCSESQGGYERFSSEYPEFCSKTKALAAIPPPVPPSATEPLDLGCSSCGTPLHDQGGPVEILPFLYLGSAYHAARRDMLDALGITALLNVSSDCPNHFEGHYQYKCIPVEDNHKADISSWFMEAIEYIDAVKDCRGRVLVHCQAGISRSATICLAYLMMKKRVRLEEAFEFVKQRRSIISPNFSFMGQLLQFESQVLATSCAAEAASPSGPLRERGKTPATPTSQFVFSFPVSVGVHSAPSSLPYLHSPITTSPSC

SEQ ID NO: 44342 - protein, 384 aa, Homo sapiens
MKVTSLDGRQLRKMLRKEAAARCVVLDCRPYLAFAASNVRGSLNVNLNSVVLRRARGGAVSARYVLPDEAARARLLQEGGGGVAAVVVLDQGSRHWQKLREESAARVVLTSLLACLPAGPRVYFLKGGYETFYSEYPECCVDVKPISQEKIESERALISQCGKPVVNVSYRPAYDQGGPVEILPFLYLGSAYHASKCEFLANLHITALLNVSRRTSEACATHLHYKWIPVEDSHTADISSHFQEAIDFIDCVREKGGKVLVHCEAGISRSPTICMAYLMKTKQFRLKEAFDYIKQRRSMVSPNFGFMGQLLQYESEILPSTPNPQPPSCQGEAAGSSLIGHLQTLSPDMQGAYCTFPASVLAPVPTHSTVSELSRSPVATATSC

SEQ ID NO: 44343 - protein, 368 aa, Homo sapiens
MPCKSAEWLQEELEARGGASLLLLDCRPHELFESSHIETAINLAIPGLMLRRLRKGNLPIRSIIPNHADKERFATRCKAATVLLYDEATAEWQPEPGAPASVLGLLLQKLRDDGCQAYYLQGGFNKFQTEYSEHCETNVDSSSSPSSSPPTSVLGLGGLRISSDCSDGESDRELPSSATESDGSPVPSSQPAFPVQILPYLYLGCAKDSTNLDVLGKYGIKYILNVTPNLPNAFEHGGEFTYKQIPISDHWSQNLSQFFPEAISFIDEARSKKCGVLVHCLAGISRSVTVTVAYLMQKMNLSLNDAYDFVKRKKSNISPNFNFMGQLLDFERTLGLSSPCDNHASSEQLYFSTPTNHNLFPLNTLEST

SEQ ID NO: 44344 - protein, 419 aa, Homo sapiens
MKNQLRGPPARAHMSTSGAAAAGGTRAGSEPGAGSGSGAGTGAGAATGAGAMPCKSAEWLQEELEARGGASLLLLDCRPHELFESSHIETAINLAIPGLMLRRLRKGNLPIRSIIPNHADKERFATRCKAATVLLYDEATAEWQPEPGAPASVLGLLLQKLRDDGCQAYYLQGGFNKFQTEYSEHCETNVDSSSSPSSSPPTSVLGLGGLRISSDCSDGESDRELPSSATESDGSPVPSSQPAFPVQILPYLYLGCAKDSTNLDVLGKYGIKYILNVTPNLPNAFEHGGEFTYKQIPISDHWSQNLSQFFPEAISFIDEARSKKCGVLVHCLAGISRSVTVTVAYLMQKMNLSLNDAYDFVKRKKSNISPNFNFMGQLLDFERTLGLSSPCDNHASSEQLYFSTPTNHNLFPLNTLEST

SEQ ID NO: 44345 - protein, 625 aa, Homo sapiens
MAGDRLPRKVMDAKKLASLLRGGPGGPLVIDSRSFVEYNSWHVLSSVNICCSKLVKRRLQQGKVTIAELIQPAARSQVEATEPQDVVVYDQSTRDASVLAADSFLSILLSKLDGCFDSVAILTGGFATFSSCFPGLCEGKPAALLPMSLSQPCLPVPSVGLTRILPHLYLGSQKDVLNKDLMTQNGISYVLNASNSCPKPDFICESRFMRVPINDNYCEKLLPWLDKSIEFIDKAKLSSCQVIVHCLAGISRSATIAIAYIMKTMGMSSDDAYRFVKDRRPSISPNFNFLGQLLEYERSLKLLAALQGDPGTPSGTPEPPPSPAAGAPLPRLPPPTSESAATGNAAAREGGLSAGGEPPAPPTPPATSALQQGLRGLHLSSDRLQDTNRLKRSFSLDIKSAYAPSRRPDGPGPPDPGEAPKLCKLDSPSGAALGLSSPSPDSPDAAPEARPRPRRRPRPPAGSPARSPAHSLGLNFGDAARQTPRHGLSALSAPGLPGPGQPAGPGAWAPPLDSPGTPSPDGPWCFSPEGAQGAGGVLFAPFGRAGAPGPGGGSDLRRREAARAEPRDARTGWPEEPAPETQFKRRSCQMEFEEGMVEGRARGEELAALGKQASFSGSVEVIEVS

SEQ ID NO: 44346 - protein, 625 aa, Homo sapiens; identical to SEQ ID NO: 44345

SEQ ID NO: 44347 - protein, 541 aa, Homo sapiens
MHTGGETSACKPSSVRLAPSFSFHAAGLQMAGQMPHSHQYSDRRQPNISDQQVSALSYSDQIQQPLTNQVMPDIVMLQRRMPQTFRDPATAPLRKLSVDLIKTYKHINEVYYAKKKRRHQQGQGDDSSHKKERKVYNDGYDDDNYDYIVKNGEKWMDRYEIDSLIGKGSFGQVVKAYDRVEQEWVAIKIIKNKKAFLNQAQIEVRLLELMNKHDTEMKYYIVHLKRHFMFRNHLCLVFEMLSYNLYDLLRNTNFRGVSLNLTRKFAQQMCTALLFLATPELSIIHCDLKPENILLCNPKRSAIKIVDFGSSCQLGQRIYQYIQSRFYRSPEVLLGMPYDLAIDMWSLGCILVEMHTGEPLFSGANEVDQMNKIVEVLGIPPAHILDQAPKARKFFEKLPDGTWNLKKTKDGKREYKPPGTRKLHNILGVETGGPGGRRAGESGHTVADYLKFKDLILRMLDYDPKTRIQPYYALQHSFFKKTADEGTNTSNSVSTSPAMEQSQSSGTTSSTSSSSVVEQHWMPGAFRMTVSFTLEVHDVPV

SEQ ID NO: 44348 - protein, 584 aa, Homo sapiens
MHTGGETSACKPSSVRLAPSFSFHAAGLQMAGQMPHSHQYSDRRQPNISDQQVSALSYSDQIQQPLTNQVMPDIVMLQRRMPQTFRDPATAPLRKLSVDLIKTYKHINEVYYAKKKRRHQQGQGDDSSHKKERKVYNDGYDDDNYDYIVKNGEKWMDRYEIDSLIGKGSFGQVVKAYDRVEQEWVAIKIIKNKKAFLNQAQIEVRLLELMNKHDTEMKYYIVHLKRHFMFRNHLCLVFEMLSYNLYDLLRNTNFRGVSLNLTRKFAQQMCTALLFLATPELSIIHCDLKPENILLCNPKRSAIKIVDFGSSCQLGQRIYQYIQSRFYRSPEVLLGMPYDLAIDMWSLGCILVEMHTGEPLFSGANEVDQMNKIVEVLGIPPAHILDQAPKARKFFEKLPDGTWNLKKTKDGKREYKPPGTRKLHNILGVETGGPGGRRAGESGHTVADYLKFKDLILRMLDYDPKTRIQPYYALQHSFFKKTADEGTNTSNSVSTSPAMEQSQSSGTTSSTSSSSGGSSGTSNSGRARSDPTHQHRHSGGHFTAAVQAMDCETHSPQVSSHVVHLLVSPAILRWSSTGCQVPLE

SEQ ID NO: 44349 - protein, 754 aa, Homo sapiens
MHTGGETSACKPSSVRLAPSFSFHAAGLQMAGQMPHSHQYSDRRQPNISDQQVSALSYSDQIQQPLTNQRRMPQTFRDPATAPLRKLSVDLIKTYKHINEVYYAKKKRRHQQGQGDDSSHKKERKVYNDGYDDDNYDYIVKNGEKWMDRYEIDSLIGKGSFGQVVKAYDRVEQEWVAIKIIKNKKAFLNQAQIEVRLLELMNKHDTEMKYYIVHLKRHFMFRNHLCLVFEMLSYNLYDLLRNTNFRGVSLNLTRKFAQQMCTALLFLATPELSIIHCDLKPENILLCNPKRSAIKIVDFGSSCQLGQRIYQYIQSRFYRSPEVLLGMPYDLAIDMWSLGCILVEMHTGEPLFSGANEVDQMNKIVEVLGIPPAHILDQAPKARKFFEKLPDGTWNLKKTKDGKREYKPPGTRKLHNILGVETGGPGGRRAGESGHTVADYLKFKDLILRMLDYDPKTRIQPYYALQHSFFKKTADEGTNTSNSVSTSPAMEQSQSSGTTSSTSSSSGGSSGTSNSGRARSDPTHQHRHSGGHFTAAVQAMDCETHSPQVRQQFPAPLGWSGTEAPTQVTVETHPVQETTFHVAPQQNALHHHHGNSSHHHHHHHHHHHHHGQQALGNRTRPRVYNSPTNSSSTQDSMEVGHSHHSMTSLSSSTTSSSTSSSSTGNQGNQAYQNRPVAANTLDFGQNGAMDVNLTVYSNPRQETGIAGHPTYQFSANTGPAHYMTEGHLTMRQGADREESPMTGVCVQQSPVASS

SEQ ID NO: 44350 - protein, 529 aa, Homo sapiens
MHTGGETSACKPSSVRLAPSFSFHAAGLQMAGQMPHSHQYSDRRQPNISDQQVSALSYSDQIQQPLTNQVMPDIVMLQRRMPQTFRDPATAPLRKLSVDLIKTYKHINEVYYAKKKRRHQQGQGDDSSHKKERKVYNDGYDDDNYDYIVKNGEKWMDRYEIDSLIGKGSFGQVVKAYDRVEQEWVAIKIIKNKKAFLNQAQIEVRLLELMNKHDTEMKYYIVHLKRHFMFRNHLCLVFEMLSYNLYDLLRNTNFRGVSLNLTRKFAQQMCTALLFLATPELSIIHCDLKPENILLCNPKRSAIKIVDFGSSCQLGQRIYQYIQSRFYRSPEVLLGMPYDLAIDMWSLGCILVEMHTGEPLFSGANEVDQMNKIVEVLGIPPAHILDQAPKARKFFEKLPDGTWNLKKTKDGKREYKPPGTRKLHNILGVETGGPGGRRAGESGHTVADYLKFKDLILRMLDYDPKTRIQPYYALQHSFFKKTADEGTNTSNSVSTSPAMEQSQSSGTTSSTSSSSGASAISCSSWLVRH

SEQ ID NO: 44351 - protein, 763 aa, Homo sapiens
MHTGGETSACKPSSVRLAPSFSFHAAGLQMAGQMPHSHQYSDRRQPNISDQQVSALSYSDQIQQPLTNQVMPDIVMLQRRMPQTFRDPATAPLRKLSVDLIKTYKHINEVYYAKKKRRHQQGQGDDSSHKKERKVYNDGYDDDNYDYIVKNGEKWMDRYEIDSLIGKGSFGQVVKAYDRVEQEWVAIKIIKNKKAFLNQAQIEVRLLELMNKHDTEMKYYIVHLKRHFMFRNHLCLVFEMLSYNLYDLLRNTNFRGVSLNLTRKFAQQMCTALLFLATPELSIIHCDLKPENILLCNPKRSAIKIVDFGSSCQLGQRIYQYIQSRFYRSPEVLLGMPYDLAIDMWSLGCILVEMHTGEPLFSGANEVDQMNKIVEVLGIPPAHILDQAPKARKFFEKLPDGTWNLKKTKDGKREYKPPGTRKLHNILGVETGGPGGRRAGESGHTVADYLKFKDLILRMLDYDPKTRIQPYYALQHSFFKKTADEGTNTSNSVSTSPAMEQSQSSGTTSSTSSSSGGSSGTSNSGRARSDPTHQHRHSGGHFTAAVQAMDCETHSPQVRQQFPAPLGWSGTEAPTQVTVETHPVQETTFHVAPQQNALHHHHGNSSHHHHHHHHHHHHHGQQALGNRTRPRVYNSPTNSSSTQDSMEVGHSHHSMTSLSSSTTSSSTSSSSTGNQGNQAYQNRPVAANTLDFGQNGAMDVNLTVYSNPRQETGIAGHPTYQFSANTGPAHYMTEGHLTMRQGADREESPMTGVCVQQSPVASS

SEQ ID NO: 44352 - protein, 131 aa, Homo sapiens
MHTGGETSACKPSSVRLAPSFSFHAAGLQMAGQMPHSHQYSDRRQPNISDQQVSALSYSDQIQQPLTNQVMPDIVMLQRRMPQTFRDPATAPLRKLSVDLIKTYKHINEVYYAKKKRRHQQGQGDDSSHKK

SEQ ID NO: 44353 - protein, 584 aa, Homo sapiens; identical to SEQ ID NO: 44348

SEQ ID NO: 44354 - protein, 46 aa, Homo sapiens
MHTGGETSACKPSSVRLAPSFSFHAAGLQMAGQMPHSHQYSDRRQP

SEQ ID NO: 44355 - protein, 535 aa, Homo sapiens
MFRNHLCLVFEMLSYNLYDLLRNTNFRGVSLNLTRKFAQQMCTALLFLATPELSIIHCDLKPENILLCNPKRSAIKIVDFGSSCQLGQRIYQYIQSRFYRSPEVLLGMPYDLAIDMWSLGCILVEMHTGEPLFSGANEVDQMNKIVEVLGIPPAHILDQAPKARKFFEKLPDGTWNLKKTKDGKREYKPPGTRKLHNILGVETGGPGGRRAGESGHTVADYLKFKDLILRMLDYDPKTRIQPYYALQHSFFKKTADEGTNTSNSVSTSPAMEQSQSSGTTSSTSSSSGGSSGTSNSGRARSDPTHQHRHSGGHFTAAVQAMDCETHSPQVRQQFPAPLGWSGTEAPTQVTVETHPVQETTFHVAPQQNALHHHHGNSSHHHHHHHHHHHHHGQQALGNRTRPRVYNSPTNSSSTQDSMEVGHSHHSMTSLSSSTTSSSTSSSSTGNQGNQAYQNRPVAANTLDFGQNGAMDVNLTVYSNPRQETGIAGHPTYQFSANTGPAHYMTEGHLTMRQGADREESPMTGVCVQQSPVASS

SEQ ID NO: 44356 - protein, 629 aa, Homo sapiens
MAVPPGHGPFSGFPGPQEHTQVLPDVRLLPRRLPLAFRDATSAPLRKLSVDLIKTYKHINEVYYAKKKRRAQQAPPQDSSNKKEKKVLNHGYDDDNHDYIVRSGERWLERYEIDSLIGKGSFGQVVKAYDHQTQELVAIKIIKNKKAFLNQAQIELRLLELMNQHDTEMKYYIVHLKRHFMFRNHLCLVFELLSYNLYDLLRNTHFRGVSLNLTRKLAQQLCTALLFLATPELSIIHCDLKPENILLCNPKRSAIKIVDFGSSCQLGQRIYQYIQSRFYRSPEVLLGTPYDLAIDMWSLGCILVEMHTGEPLFSGSNEVDQMNRIVEVLGIPPAAMLDQAPKARKYFERLPGGGWTLRRTKELRKDYQGPGTRRLQEVLGVQTGGPGGRRAGEPGHSPADYLRFQDLVLRMLEYEPAARISPLGALQHGFFRRTADEATNTGPAGSSASTSPAPLDTCPSSSTASSISSSGGSSGSSSDNRTYRYSNRYCGGPGPPITDCEMNSPQVPPSQPLRPWAGGDVPHKTHQAPASASSLPGTGAQLPPQPRYLGRPPSPTSPPPPELMDVSLVGGPADCSPPHPAPAPQHPAASALRTRMTGGRPPLPPPDDPATLGPHLGLRGVPQSTAASS

SEQ ID NO: 44357 - protein, 601 aa, Homo sapiens
MAVPPGHGPFSGFPGPQEHTQVLPDVRLLPRRLPLAFRDATSAPLRKLSVDLIKTYKHINEVYYAKKKRRAQQAPPQDSSNKKEKKVLNHGYDDDNHDYIVRSGERWLERYEIDSLIGKGSFGQVVKAYDHQTQELVAIKIIKNKKAFLNQAQIELRLLELMNQHDTEMKYYIVHLKRHFMFRNHLCLVFELLSYNLYDLLRNTHFRGVSLNLTRKLAQQLCTALLFLATPELSIIHCDLKPENILLCNPKRSAIKIVDFGSSCQLGQRIYQYIQSRFYRSPEVLLGTPYDLAIDMWSLGCILVEMHTGEPLFSGSNEVDQMNRIVEVLGIPPAAMLDQAPKARKYFERLPGGGWTLRRTKELRKDYQGPGTRRLQEDLVLRMLEYEPAARISPLGALQHGFFRRTADEATNTGPAGSSASTSPAPLDTCPSSSTASSISSSGGSSGSSSDNRTYRYSNRYCGGPGPPITDCEMNSPQVPPSQPLRPWAGGDVPHKTHQAPASASSLPGTGAQLPPQPRYLGRPPSPTSPPPPELMDVSLVGGPADCSPPHPAPAPQHPAASALRTRMTGGRPPLPPPDDPATLGPHLGLRGVPQSTAASS

SEQ ID NO: 44358 - protein, 589 aa, Homo sapiens
MAVPPGHGPFSGFPGPQEHTQVLPDVRLLPRRLPLAFRDATSAPLRKLSVDLIKTYKHINEVYYAKKKRRAQQAPPQDSSNKKEKKVLNHGYDDDNHDYIVRSGERWLERYEIDSLIGKGSFGQVVKAYDHQTQELVAIKIIKNKKAFLNQAQIELRLLELMNQHDTEMKYYIVHLKRHFMFRNHLCLVFELLSYNLYDLLRNTHFRGVSLNLTRKLAQQLCTALLFLATPELSIIHCDLKPENILLCNPKRSAIKIVDFGSSCQLGQRIYQYIQSRFYRSPEVLLGTPYDLAIDMWSLGCILVEMHTGEPLFSGSNEVDQMNRIVEVLGIPPAAMLDQAPKARKYFERLPGGGWTLRRTKELRKDLVLRMLEYEPAARISPLGALQHGFFRRTADEATNTGPAGSSASTSPAPLDTCPSSSTASSISSSGGSSGSSSDNRTYRYSNRYCGGPGPPITDCEMNSPQVPPSQPLRPWAGGDVPHKTHQAPASASSLPGTGAQLPPQPRYLGRPPSPTSPPPPELMDVSLVGGPADCSPPHPAPAPQHPAASALRTRMTGGRPPLPPPDDPATLGPHLGLRGVPQSTAASS

SEQ ID NO: 44359 - protein, 94 aa, Homo sapiens
MNDHLHVGSHAHGQIQVQQLFEDNSNKRTVLTTQPNGLTTVGKTGLPVVPERQLDSIHRRQGSSTSLKSMEGMGKVKATPMTPEQAMKQYMQKL

SEQ ID NO: 44360 - protein, 601 aa, Homo sapiens
MLTRKPSAAAPAAYPTGRGGDSAVRQLQASPGLGAGATRSGVGTGPPSPIALPPLRASNAAAAAHTIGGSKHTMNDHLHVGSHAHGQIQVQQLFEDNSNKRTVLTTQPNGLTTVGKTGLPVVPERQLDSIHRRQGSSTSLKSMEGMGKVKATPMTPEQAMKQYMQKLTAFEHHEIFSYPEIYFLGLNAKKRQGMTGGPNNGGYDDDQGSYVQVPHDHVAYRYEVLKVIGKGSFGQVVKAYDHKVHQHVALKMVRNEKRFHRQAAEEIRILEHLRKQDKDNTMNVIHMLENFTFRNHICMTFELLSMNLYELIKKNKFQGFSLPLVRKFAHSILQCLDALHKNRIIHCDLKPENILLKQQGRSGIKVIDFGSSCYEHQRVYTYIQSRFYRAPEVILGARYGMPIDMWSLGCILAELLTGYPLLPGEDEGDQLACMIELLGMPSQKLLDASKRAKNFVSSKGYPRYCTVTTLSDGSVVLNGGRSRRGKLRGPPESREWGNALKGCDDPLFLDFLKQCLEWDPAVRMTPGQALRHPWLRRRLPKPPTGEKTSVKRITESTGAITSISKLPPPSSSASKLRTNLAQMTDANGNIQQRTVLPKLVS

SEQ ID NO: 44361 - protein, 528 aa, Homo sapiens
MNDHLHVGSHAHGQIQVQQLFEDNSNKRTVLTTQPNGLTTVGKTGLPVVPERQLDSIHRRQGSSTSLKSMEGMGKVKATPMTPEQAMKQYMQKLTAFEHHEIFSYPEIYFLGLNAKKRQGMTGGPNNGGYDDDQGSYVQVPHDHVAYRYEVLKVIGKGSFGQVVKAYDHKVHQHVALKMVRNEKRFHRQAAEEIRILEHLRKQDKDNTMNVIHMLENFTFRNHICMTFELLSMNLYELIKKNKFQGFSLPLVRKFAHSILQCLDALHKNRIIHCDLKPENILLKQQGRSGIKVIDFGSSCYEHQRVYTYIQSRFYRAPEVILGARYGMPIDMWSLGCILAELLTGYPLLPGEDEGDQLACMIELLGMPSQKLLDASKRAKNFVSSKGYPRYCTVTTLSDGSVVLNGGRSRRGKLRGPPESREWGNALKGCDDPLFLDFLKQCLEWDPAVRMTPGQALRHPWLRRRLPKPPTGEKTSVKRITESTGAITSISKLPPPSSSASKLRTNLAQMTDANGNIQQRTVLPKLVS

SEQ ID NO: 44362 - protein, 156 aa, Homo sapiens
MNDHLHVGSHAHGQIQVQQLFEDNSNKRTVLTTQPNGLTTVGKTGLPVVPERQLDSIHRRQGSSTSLKSMEGMGKVKATPMTPEQAMKQYMQKLTAFEHHEIFSYPEIYFLGLNAKKRQGMTGGPNNGGYDDDQGSYVQVPHDHVAYRYEVLKVIG

SEQ ID NO: 44363 - protein, 568 aa, Homo sapiens
MKWKEKLGDGVYDTFMMIDETKCPPCSNVLCNPSEPPPPRRLNMTTEQFTGDHTQHFLDGGEMKVEQLFQEFGNRKSNTIQSDGISDSEKCSPTVSQGKSSDCLNTVKSNSSSKAPKVVPLTPEQALKQYKHHLTAYEKLEIINYPEIYFVGPNAKKRHGVIGGPNNGGYDDADGAYIHVPRDHLAYRYEVLKIIGKGSFGQVARVYDHKLRQYVALKMVRNEKRFHRQAAEEIRILEHLKKQDKTGSMNVIHMLESFTFRNHVCMAFELLSIDLYELIKKNKFQGFSVQLVRKFAQSILQSLDALHKNKIIHCDLKPENILLKHHGRSSTKVIDFGSSCFEYQKLYTYIQSRFYRAPEIILGSRYSTPIDIWSFGCILAELLTGQPLFPGEDEGDQLACMMELLGMPPPKLLEQSKRAKYFINSKGIPRYCSVTTQADGRVVLVGGRSRRGKKRGPPGSKDWGTALKGCDDYLFIEFLKRCLHWDPSARLTPAQALRHPWISKSVPRPLTTIDKVSGKRVVNPASAFQGLGSKLPPVVGIANKLKANLMSETNGSIPLCSVLPKLIS

SEQ ID NO: 44364 - protein, 568 aa, Homo sapiens; identical to SEQ ID NO: 44363

SEQ ID NO: 44365 - protein, 588 aa, Homo sapiens
MGGTARGPGRKDAGPPGAGLPPQQRRLGDGVYDTFMMIDETKCPPCSNVLCNPSEPPPPRRLNMTTEQFTGDHTQHFLDGGEMKVEQLFQEFGNRKSNTIQSDGISDSEKCSPTVSQGKSSDCLNTVKSNSSSKAPKVVPLTPEQALKQYKHHLTAYEKLEIINYPEIYFVGPNAKKRHGVIGGPNNGGYDDADGAYIHVPRDHLAYRYEVLKIIGKGSFGQVARVYDHKLRQYVALKMVRNEKRFHRQAAEEIRILEHLKKQDKTGSMNVIHMLESFTFRNHVCMAFELLSIDLYELIKKNKFQGFSVQLVRKFAQSILQSLDALHKNKIIHCDLKPENILLKHHGRSSTKVIDFGSSCFEYQKLYTYIQSRFYRAPEIILGSRYSTPIDIWSFGCILAELLTGQPLFPGEDEGDQLACMMELLGMPPPKLLEQSKRAKYFINSKGIPRYCSVTTQADGRVVLVGGRSRRGKKRGPPGSKDWGTALKGCDDYLFIEFLKRCLHWDPSARLTPAQALRHPWISKSVPRPLTTIDKVSGKRVVNPASAFQGLGSKLPPVVGIANKLKANLMSETNGSIPLCSVLPKLIS

SEQ ID NO: 44366 - protein, 243 aa, Homo sapiens
MKWKEKLGDGVYDTFMMIDETKCPPCSNVLCNPSEPPPPRRLNMTTEQFTGDHTQHFLDGGEMKVEQLFQEFGNRKSNTIQSDGISDSEKCSPTVSQGKSSDCLNTVKSNSSSKAPKVVPLTPEQALKQYKHHLTAYEKLEIINYPEIYFVGPNAKKRHGVIGGPNNGGYDDADGAYIHVPRDHLAYRYEVLKIIGKGSFGQVARVYDHKLRQYVALKMVRNEKRFHRQAAEEIRILEHLKKQ

SEQ ID NO: 44367 - protein, 520 aa, Homo sapiens
MPASELKASEIPFHPSIKTQDPKAEEKSPKKQKVTLTAAEALKLFKNQLSPYEQSEILGYAELWFLGLEAKKLDTAPEKFSKTSFDDEHGFYLKVLHDHIAYRYEVLETIGKGSFGQVAKCLDHKNNELVALKIIRNKKRFHQQALMELKILEALRKKDKDNTYNVVHMKDFFYFRNHFCITFELLGINLYELMKNNNFQGFSLSIVRRFTLSVLKCLQMLSVEKIIHCDLKPENIVLYQKGQASVKVIDFGSSCYEHQKVYTYIQSRFYRSPEVILGHPYDVAIDMWSLGCITAELYTGYPLFPGENEVEQLACIMEVLGLPPAGFIQTASRRQTFFDSKGFPKNITNNRGKKRYPDSKDLTMVLKTYDTSFLDFLRRCLVWEPSLRMTPDQALKHAWIHQSRNLKPQPRPQTLRKSNSFFPSETRKDKVQGCHHSSRKADEITKETTEKTKDSPTKHVQHSGDQQDCLQHGADTVQLPQLVDAPKKSEAAVGAEVSMTSPGQSKNFSLKNTNVLPPIV

SEQ ID NO: 44368 - protein, 520 aa, Homo sapiens; identical to SEQ ID NO: 44367

SEQ ID NO: 44369 - protein, 519 aa, Homo sapiens
MPASELKASEIPFHPSIKTQDPKAEEKSPKKQKVTLTAAEALKLFKNQLSPYEQSEILGYAELWFLGLEAKKLDTAPEKFSKTSFDDEHGFYLKVLHDHIAYRYEVLETIGKGSFGQVAKCLDHKNNELVALKIIRNKKRFHQQALMELKILEALRKKDKDNTYNVVHMKDFFYFRNHFCITFELLGINLYELMKNNNFQGFSLSIVRRFTLSVLKCLQMLSVEKIIHCDLKPENIVLYQKGQASVKVIDFGSSCYEHQKVYTYIQSRFYRSPEVILGHPYDVAIDMWSLGCITAELYTGYPLFPGENEVEQLACIMEVLGLPPAGFIQTASRRQTFFDSKGFPKNITNNRGKKRYPDSKDLTMVLKTYDTSFLDFLRRCLVWEPSLRMTPDQALKHAWIHQSRNLKPQPRPQTLRKSNSFFPSETRKDKVQGCHHSSRKDEITKETTEKTKDSPTKHVQHSGDQQDCLQHGADTVQLPQLVDAPKKSEAAVGAEVSMTSPGQSKNFSLKNTNVLPPIV

SEQ ID NO: 44370 - protein, 157 aa, Homo sapiens
MVLKTYDTSFLDFLRRCLVWEPSLRMTPDQALKHAWIHQSRNLKPQPRPQTLRKSNSFFPSETRKDKVQGCHHSSRKADEITKETTEKTKDSPTKHVQHSGDQQDCLQHGADTVQLPQLVDAPKKSEAAVGAEVSMTSPGQSKNFSLKNTNVLPPIV

SEQ ID NO: 44371 - protein, 336 aa, Homo sapiens
MGNCLHRAELSPSTENSSQLDFEDVWNSSYGVNDSFPDGDYGANLEAAAPCHSCNLLDDSALPFFILTSVLGILASSTVLFMLFRPLFRWQLCPGWPVLAQLAVGSALFSIVVPVLAPGLGSTRSSALCSLGYCVWYGSAFAQALLLGCHASLGHRLGAGQVPGLTLGLTVGIWGVAALLTLPVTLASGASGGLCTLIYSTELKALQATHTVACLAIFVLLPLGLFGAKGLKKALGMGPGPWMNILWAWFIFWWPHGVVLGLDFLVRSKLLLLSTCLAQQALDLLLNLAEALAILHCVATPLLLALFCHQATRTLLPSLPLPEGWSSHLDTLGSKS

SEQ ID NO: 44372 - protein, 338 aa, Homo sapiens
MASSGYVLQAELSPSTENSSQLDFEDVWNSSYGVNDSFPDGDYGANLEAAAPCHSCNLLDDSALPFFILTSVLGILASSTVLFMLFRPLFRWQLCPGWPVLAQLAVGSALFSIVVPVLAPGLGSTRSSALCSLGYCVWYGSAFAQALLLGCHASLGHRLGAGQVPGLTLGLTVGIWGVAALLTLPVTLASGASGGLCTLIYSTELKALQATHTVACLAIFVLLPLGLFGAKGLKKALGMGPGPWMNILWAWFIFWWPHGVVLGLDFLVRSKLLLLSTCLAQQALDLLLNLAEALAILHCVATPLLLALFCHQATRTLLPSLPLPEGWSSHLDTLGSKS

SEQ ID NO: 44373 - protein, 336 aa, Homo sapiens; identical to SEQ ID NO: 44371

SEQ ID NO: 44374 - protein, 155 aa, Homo sapiens
MASSGYVLQAELSPSTENSSQLDFEDVWNSSYGVNDSFPDGDYGANLEAAAPCHSCNLLDDSALPFFILTSVLGILASSTVLFMLFRPLFRWQLCPGWPVLAQLAVGSALFSIVVPVLAPGLGSTRSSALCSLGYCVWYGSAFAQALLLGCHASL

SEQ ID NO: 44375 - protein, 336 aa, Homo sapiens; identical to SEQ ID NO: 44371

SEQ ID NO: 44376 - protein, 669 aa, Homo sapiens
MGSNSSRIGDLPKNEYLKKLSGTESISENDPFWNQLLSFSFPAPTSSSELKLLEEATISVCRSLVENNPRTGNLGALIKVFLSRTKELKLSAECQNHIFIWQTHNALFIICCLLKVFICQMSEEELQLHFTYEEKSPGNYSSDSEDLLEELLCCLMQLITDIPLLDITYEISVEAISTMVVFLSCQLFHKEVLRQSISHKYLMRGPCLPYTSKLVKTLLYNFIRQEKPPPPGAHVFPQQSDGGGLLYGLASGVATGLWTVFTLGGVGSKAAASPELSSPLANQSLLLLLVLANLTDASDAPNPYRQAIMSFKNTQDSSPFPSSIPHAFQINFNSLYTALCEQQTSDQATLLLYTLLHQNSNIRTYMLARTDMENLVLPILEILYHVEERNSHHVYMALIILLILTEDDGFNRSIHEVILKNITWYSERVLTEISLGSLLILVVIRTIQYNMTRTRDKYLHTNCLAALANMSAQFRSLHQYAAQRIISLFSLLSKKHNKVLEQATQSLRGSLSSNDVPLPDYAQDLNVIEEVIRMMLEIINSCLTNSLHHNPNLVYALLYKRDLFEQFRTHPSFQDIMQNIDLVISFFSSRLLQAGAELSVERVLEIIKQGVVALPKDRLKKFPELKFKYVEEEQPEEFFIPYVWSLVYNSAVGLYWNPQDIQLFTMDSD

SEQ ID NO: 44377 - protein, 172 aa, Homo sapiens
MALIILLILTEDDGFNRSIHEVILKNITWYSERVLTEISLGSLLILVVIRTIQYNMTRTRDKYLHTNCLAALANMSAQFRSLHQYAAQRIISYTCRHLRRYVYVLDKLYFPHSHCSTLQHCFSTLSDNGEELLSLTCSHILRSYASSLFSLLSKKHNKVLEQATQSLRGSLS

SEQ ID NO: 44378 - protein, 479 aa, Homo sapiens
MGSNSSRIGDLPKNEYLKKLSGTESISENDPFWNQLLSFSFPAPTSSSELKLLEEATISVCRSLAGLWTVFTLGGVGSKAAASPELSSPLANQSLLLLLVLANLTDASDAPNPYRQAIMSFKNTQDSSPFPSSIPHAFQINFNSLYTALCEQQTSDQATLLLYTLLHQNSNIRTYMLARTDMENLVLPILEILYHVEERNSHHVYMALIILLILTEDDGFNRSIHEVILKNITWYSERVLTEISLGSLLILVVIRTIQYNMTRTRDKYLHTNCLAALANMSAQFRSLHQYAAQRIISLFSLLSKKHNKVLEQATQSLRGSLSSNDVPLPDYAQDLNVIEEVIRMMLEIINSCLTNSLHHNPNLVYALLYKRDLFEQFRTHPSFQDIMQNIDLVISFFSSRLLQAGAELSVERVLEIIKQGVVALPKDRLKKFPELKFKYVEEEQPEEFFIPYVWSLVYNSAVGLYWNPQDIQLFTMDSD

SEQ ID NO: 44379 - protein, 1278 aa, Homo sapiens
MAQSKRHVYSRTPSGSRMSAEASARPLRVGSRVEVIGKGHRGTVAYVGATLFATGKWVGVILDEAKGKNDGTVQGRKYFTCDEGHGIFVRQSQIQVFEDGADTTSPETPDSSASKVLKREGTDTTAKTSKLRGLKPKKAPTARKTTTRRPKPTRPASTGVAGASSSLGPSGSASAGELSSSEPSTPAQTPLAAPIIPTPVLTSPGAVPPLPSPSKEEEGLRAQVRDLEEKLETLRLKRAEDKAKLKELEKHKIQLEQVQEWKSKMQEQQADLQRRLKEARKEAKEALEAKERYMEEMADTADAIEMATLDKEMAEERAESLQQEVEALKERVDELTTDLEILKAEIEEKGSDGAASSYQLKQLEEQNARLKDALVRMRDLSSSEKQEHVKLQKLMEKKNQELEVVRQQRERLQEELSQAESTIDELKEQVDAALGAEEMVEMLTDRNLNLEEKVRELRETVGDLEAMNEMNDELQENARETELELREQLDMAGARVREAQKRVEAAQETVADYQQTIKKYRQLTAHLQDVNRELTNQQEASVERQQQPPPETFDFKIKFAETKAHAKAIEMELRQMEVAQANRHMSLLTAFMPDSFLRPGGDHDCVLVLLLMPRLICKAELIRKQAQEKFELSENCSERPGLRGAAGEQLSFAAGLVYSLSLLQATLHRYEHALSQCSVDVYKKVGSLYPEMSAHERSLDFLIELLHKDQLDETVNVEPLTKAIKYYQHLYSIHLAEQPEDCTMQLADHIKFTQSALDCMSVEVGRLRAFLQGGQEATDIALLLRDLETSCSDIRQFCKKIRRRMPGTDAPGIPAALAFGPQVSDTLLDCRKHLTWVVAVLQEVAAAAAQLIAPLAENEGLLVAALEELAFKASEQIYGTPSSSPYECLRQSCNILISTMNKLATAMQEGEYDAERPPSKPPPVELRAAALRAEITDAEGLGLKLEDRETVIKELKKSLKIKGEELSEANVRLSLLEKKLDSAAKDADERIEKVQTRLEETQALLRKKEKEFEETMDALQADIDQLEAEKAELKQRLNSQSKRTIEGLRGPPPSGIATLVSGIAGEEQQRGAIPGQAPGSVPGPGLVKDSPLLLQQISAMRLHISQLQHENSILKGAQMKASLASLPPLHVAKLSHEGPGSELPAGALYRKTSQLLETLNQLSTHTHVVDITRTSPAAKSPSAQLMEQVAQLKSLSDTVEKLKDEVLKETVSQRPGATVPTDFATFPSSAFLRAKEEQQDDTVYMGKVTFSCAAGFGQRHRLVLTQEQLHQLHSRLIS

SEQ ID NO: 44380 - protein, 1261 aa, Homo sapiens
MSAEASARPLRVGSRVEVIGKGHRGTVAYVGATLFATGKWVGVILDEAKGKNDGTVQGRKYFTCDEGHGIFVRQSQIQVFEDGADTTSPETPDSSASKVLKREGTDTTAKTSKLRGLKPKKAPTARKGRRVRTKPTRPASTGVAGASSSLGPSGSASAGELSSSEPSTPAQTPLAAPIIPTPVLTSPGAVPPLPSPSKEEEGLRAQVRDLEEKLETLRLKRAEDKAKLKELEKHKIQLEQVQEWKSKMQEQQADLQRRLKEARKEAKEALEAKERYMEEMADTADAIEMATLDKEMAEERAESLQQEVEALKERVDELTTDLEILKAEIEEKGSDGAASSYQLKQLEEQNARLKDALVRMRDLSSSEKQEHVKLQKLMEKKNQELEVVRQQRERLQEELSQAESTIDELKEQVDAALGAEEMVEMLTDRNLNLEEKVRELRETVGDLEAMNEMNDELQENARETELELREQLDMAGARVREAQKRVEAAQETVADYQQTIKKYRQLTAHLQDVNRELTNQQEASVERQQQPPPETFDFKIKFAETKAHAKAIEMELRQMEVAQANRHMSLLTAFMPDSFLRPGGDHDCVLVLLLMPRLICKAELIRKQAQEKFELSENCSERPGLRGAAGEQLSFAAGLVYSLSLLQATLHRYEHALSQCSVDVYKKVGSLYPEMSAHERSLDFLIELLHKDQLDETVNVEPLTKAIKYYQHLYSIHLAEQPEDCTMQLADHIKFTQSALDCMSVEVGRLRAFLQGGQEATDIALLLRDLETSCSDIRQFCKKIRRRMPGTDAPGIPAALAFGPQVSDTLLDCRKHLTWVVAVLQEVAAAAAQLIAPLAENEGLLVAALEELAFKASEQIYGTPSSSPYECLRQSCNILISTMNKLATAMQEGEYDAERPPSKPPPVELRAAALRAEITDAEGLGLKLEDRETVIKELKKSLKIKGEELSEANVRLSLLEKKLDSAAKDADERIEKVQTRLEETQALLRKKEKEFEETMDALQADIDQLEAEKAELKQRLNSQSKRTIEGLRGPPPSGIATLVSGIAGEEQQRGAIPGQAPGSVPGPGLVKDSPLLLQQISAMRLHISQLQHENSILKGAQMKASLASLPPLHVAKLSHEGPGSELPAGALYRKTSQLLETLNQLSTHTHVVDITRTSPAAKSPSAQLMEQVAQLKSLSDTVEKLKDEVLKETVSQRPGATVPTDFATFPSSAFLRAKEEQQDDTVYMGKVTFSCAAGFGQRHRLVLTQEQLHQLHSRLIS

SEQ ID NO: 44381 - protein, 1271 aa, Homo sapiens
MAQSKRHVYSRTPSGSRMSAEASARPLRVGSRVEVIGKGHRGTVAYVGATLFATGKWVGVILDEAKGKNDGTVQGRKYFTCDEGHGIFVRQSQIQVFEDGADTTSPETPDSSASKVLKREGTDTTAKTSKLAPTARKTTTRRPKPTRPASTGVAGASSSLGPSGSASAGELSSSEPSTPAQTPLAAPIIPTPVLTSPGAVPPLPSPSKEEEGLRAQVRDLEEKLETLRLKRAEDKAKLKELEKHKIQLEQVQEWKSKMQEQQADLQRRLKEARKEAKEALEAKERYMEEMADTADAIEMATLDKEMAEERAESLQQEVEALKERVDELTTDLEILKAEIEEKGSDGAASSYQLKQLEEQNARLKDALVRMRDLSSSEKQEHVKLQKLMEKKNQELEVVRQQRERLQEELSQAESTIDELKEQVDAALGAEEMVEMLTDRNLNLEEKVRELRETVGDLEAMNEMNDELQENARETELELREQLDMAGARVREAQKRVEAAQETVADYQQTIKKYRQLTAHLQDVNRELTNQQEASVERQQQPPPETFDFKIKFAETKAHAKAIEMELRQMEVAQANRHMSLLTAFMPDSFLRPGGDHDCVLVLLLMPRLICKAELIRKQAQEKFELSENCSERPGLRGAAGEQLSFAAGLVYSLSLLQATLHRYEHALSQCSVDVYKKVGSLYPEMSAHERSLDFLIELLHKDQLDETVNVEPLTKAIKYYQHLYSIHLAEQPEDCTMQLADHIKFTQSALDCMSVEVGRLRAFLQGGQEATDIALLLRDLETSCSDIRQFCKKIRRRMPGTDAPGIPAALAFGPQVSDTLLDCRKHLTWVVAVLQEVAAAAAQLIAPLAENEGLLVAALEELAFKASEQIYGTPSSSPYECLRQSCNILISTMNKLATAMQEGEYDAERPPSKPPPVELRAAALRAEITDAEGLGLKLEDRETVIKELKKSLKIKGEELSEANVRLSLLEKKLDSAAKDADERIEKVQTRLEETQALLRKKEKEFEETMDALQADIDQLEAEKAELKQRLNSQSKRTIEGLRGPPPSGIATLVSGIAGEEQQRGAIPGQAPGSVPGPGLVKDSPLLLQQISAMRLHISQLQHENSILKGAQMKASLASLPPLHVAKLSHEGPGSELPAGALYRKTSQLLETLNQLSTHTHVVDITRTSPAAKSPSAQLMEQVAQLKSLSDTVEKLKDEVLKETVSQRPGATVPTDFATFPSSAFLRAKEEQQDDTVYMGKVTFSCAAGFGQRHRLVLTQEQLHQLHSRLIS

SEQ ID NO: 44382 - protein, 1144 aa, Homo sapiens
MMRQAPTARKTTTRRPKPTRPASTGVAGASSSLGPSGSASAGELSSSEPSTPAQTPLAAPIIPTPVLTSPGAVPPLPSPSKEEEGLRAQVRDLEEKLETLRLKRAEDKAKLKELEKHKIQLEQVQEWKSKMQEQQADLQRRLKEARKEAKEALEAKERYMEEMADTADAIEMATLDKEMAEERAESLQQEVEALKERVDELTTDLEILKAEIEEKGSDGAASSYQLKQLEEQNARLKDALVRMRDLSSSEKQEHVKLQKLMEKKNQELEVVRQQRERLQEELSQAESTIDELKEQVDAALGAEEMVEMLTDRNLNLEEKVRELRETVGDLEAMNEMNDELQENARETELELREQLDMAGARVREAQKRVEAAQETVADYQQTIKKYRQLTAHLQDVNRELTNQQEASVERQQQPPPETFDFKIKFAETKAHAKAIEMELRQMEVAQANRHMSLLTAFMPDSFLRPGGDHDCVLVLLLMPRLICKAELIRKQAQEKFELSENCSERPGLRGAAGEQLSFAAGLVYSLSLLQATLHRYEHALSQCSVDVYKKVGSLYPEMSAHERSLDFLIELLHKDQLDETVNVEPLTKAIKYYQHLYSIHLAEQPEDCTMQLADHIKFTQSALDCMSVEVGRLRAFLQGGQEATDIALLLRDLETSCSDIRQFCKKIRRRMPGTDAPGIPAALAFGPQVSDTLLDCRKHLTWVVAVLQEVAAAAAQLIAPLAENEGLLVAALEELAFKASEQIYGTPSSSPYECLRQSCNILISTMNKLATAMQEGEYDAERPPSKPPPVELRAAALRAEITDAEGLGLKLEDRETVIKELKKSLKIKGEELSEANVRLSLLEKKLDSAAKDADERIEKVQTRLEETQALLRKKEKEFEETMDALQADIDQLEAEKAELKQRLNSQSKRTIEGLRGPPPSGIATLVSGIAGEEQQRGAIPGQAPGSVPGPGLVKDSPLLLQQISAMRLHISQLQHENSILKGAQMKASLASLPPLHVAKLSHEGPGSELPAGALYRKTSQLLETLNQLSTHTHVVDITRTSPAAKSPSAQLMEQVAQLKSLSDTVEKLKDEVLKETVSQRPGATVPTDFATFPSSAFLRAKEEQQDDTVYMGKVTFSCAAGFGQRHRLVLTQEQLHQLHSRLIS

SEQ ID NO: 44383 - protein, 1256 aa, Homo sapiens
MSAEASARPLRVGSRVEVIGKGHRGTVAYVGATLFATGKWVGVILDEAKGKNDGTVQGRKYFTCDEGHGIFVRQSQIQVFEDGADTTSPETPDSSASKVLKREGTDTTAKTSKLRGLKPKKAPTARKTTTRRPKPTRPASTGVAGASSSLGPSGSASAGELSSSEPSTPAQTPLAAPIIPTPVLTSPGAVPPLPSPSKEEEGLRAQVRDLEEKLETLRLKRAEDKAKLKELEKHKIQLEQVQEWKSKMQEQQADLQRRLKEARKEAKEALEAKERYMEEMADTADAIEMATLDKEMAEERAESLQQEVEALKERVDELTTDLEILKAEIEEKGSDGAASSYQLKQLEEQNARLKDALVRMRDLSSSEKQEHVKLQKLMEKKNQELEVVRQQRERLQEELSQAESTIDELKEQVDAALGAEEMVEMLTDRNLNLEEKVRELRETVGDLEAMNEMNDELQENARETELELREQLDMAGARVREAQKRVEAAQETVADYQQTIKKYRQLTAHLQDVNRELTNQQEASVERQQQPPPETFDFKIKFAETKAHAKAIEMELRQMEVAQANRHMSLLTAFMPDSFLRPGGDHDCVLVLLLMPRLICKAELIRKQAQEKFELSENCSERPGLRGAAGEQLSFAAGLVYSLSLLQATLHRYEHALSQCSVDVYKKVGSLYPEMSAHERSLDFLIELLHKDQLDETVNVEPLTKAIKYYQHLYSIHLAEQPEDCTMQLADHIKFTQSALDCMSVEVGRLRAFLQGGQEATDIALLLRDLETSCSDIRQFCKKIRRRMPGTDAPGIPAALAFGPQVSDTLLDCRKHLTWVVAVLQEVAAAAAQLIAPLAENEGLLVAALEELAFKASEQIYGTPSSSPYECLRQSCNILISTMNKLATAMQEGEYDAERPPSKPPPVELRAAALRAEITDAEGLGLKLEDRETVIKELKKSLKIKGEELSEANVRLSLLEKKLDSAAKDADERIEKVQTRLEETQALLRKKEKEFEETMDALQADIDQLEAEKAELKQRLNSQSKRTIEGLRGPPPSGIATLVSGIAGGAIPGQAPGSVPGPGLVKDSPLLLQQISAMRLHISQLQHENSILKGAQMKASLASLPPLHVAKLSHEGPGSELPAGALYRKTSQLLETLNQLSTHTHVVDITRTSPAAKSPSAQLMEQVAQLKSLSDTVEKLKDEVLKETVSQRPGATVPTDFATFPSSAFLRAKEEQQDDTVYMGKVTFSCAAGFGQRHRLVLTQEQLHQLHSRLIS

SEQ ID NO: 44384 - protein, 890 aa, Homo sapiens
MSAEASARPLRVGSRVEVIGKGHRGTVAYVGATLFATGKWVGVILDEAKGKNDGTVQGRKYFTCDEGHGIFVRQSQIQVFEDGADTTSPETPDSSASKVLKREGTDTTAKTSKLPTRPASTGVAGASSSLGPSGSASAGELSSSEPSTPAQTPLAAPIIPTPVLTSPGAVPPLPSPSKEEEGLRAQVRDLEEKLETLRLKRAEDKAKLKELEKHKIQLEQVQEWKSKMQEQQADLQRRLKEARKEAKEALEAKERYMEEMADTADAIEMATLDKEMAEERAESLQQEVEALKERVDELTTDLEILKAEIEEKGSDGAASSYQLKQLEEQNARLKDALVRMRDLSSSEKQEHVKLQKLMEKKNQELEVVRQQRERLQEELSQAESTIDELKEQVDAALGAEEMVEMLTDRNLNLEEKVRELRETVGDLEAMNEMNDELQENARETELELREQLDMAGARVREAQKRVEAAQETVADYQQTIKKYRQLTAHLQDVNRELTNQQEASVERQQQPPPETFDFKIKFAETKAHAKAIEMELRQMEVAQANRHMSLLTAFMPDSFLRPGGDHDCVLVLLLMPRLICKAELIRKQAQEKFELSENCSERPGLRGAAGEQLSFAAGLVYSLSLLQATLHRYEHALSQCSVDVYKKVGSLYPEMSAHERSLDFLIELLHKDQLDETVNVEPLTKAIKYYQHLYSIHLAEQPEDCTMQLADHIKFTQSALDCMSVEVGRLRAFLQGGQEATDIALLLRDLETSCSDIRQFCKKIRRRMPGTDAPGIPAALAFGPQVSDTLLDCRKHLTWVVAVLQEVAAAAAQLIAPLAENEGLLVAALEELAFKASEQVGLDGWVEGVGRVSDQCGAFTSALGSCRSMGPPPAAPMSVCASHATSSSVP

SEQ ID NO: 44385 - protein, 186 aa, Homo sapiens
MLMGLLRPYILGERGTVMTPSGSRMSAEASARPLRVGSRVEVIGKGHRGTVAYVGATLFATGKWVGVILDEAKGKNDGTVQGRKYFTCDEGHGIFVRQSQIQVFEDGADTTSPETPDSSASKVLKREGTDTTAKTSKLRGLKPKKAPTARKTTTRRPKPTRPASTGVAGASSSLGPSGSASAGELS

SEQ ID NO: 44386 - protein, 1236 aa, Homo sapiens
MSAEASARPLRVGSRVEVIGKGHRGTVAYVGATLFATGKWVGVILDEAKGKNDGTVQGRKYFTCDEGHGIFVRQSQIQVFEDGADTTSPETPDSSASKVLKREGTDTTAKTSKLPTRPASTGVAGASSSLGPSGSASAGELSSSEPSTPAQTPLAAPIIPTPVLTSPGAVPPLPSPSKEEEGLRAQVRDLEEKLETLRLKRAEDKAKLKELEKHKIQLEQVQEWKSKMQEQQADLQRRLKEARKEAKEALEAKERYMEEMADTADAIEMATLDKEMAEERAESLQQEVEALKERVDELTTDLEILKAEIEEKGSDGAASSYQLKQLEEQNARLKDALVRMRDLSSSEKQEHVKLQKLMEKKNQELEVVRQQRERLQEELSQAESTIDELKEQVDAALGAEEMVEMLTDRNLNLEEKVRELRETVGDLEAMNEMNDELQENARETELELREQLDMAGARVREAQKRVEAAQETVADYQQTIKKYRQLTAHLQDVNRELTNQQEASVERQQQPPPETFDFKIKFAETKAHAKAIEMELRQMEVAQANRHMSLLTAFMPDSFLRPGGDHDCVLVLLLMPRLICKAELIRKQAQEKFELSENCSERPGLRGAAGEQLSFAAGLVYSLSLLQATLHRYEHALSQCSVDVYKKVGSLYPEMSAHERSLDFLIELLHKDQLDETVNVEPLTKAIKYYQHLYSIHLAEQPEDCTMQLADHIKFTQSALDCMSVEVGRLRAFLQGGQEATDIALLLRDLETSCSDIRQFCKKIRRRMPGTDAPGIPAALAFGPQVSDTLLDCRKHLTWVVAVLQEVAAAAAQLIAPLAENEGLLVAALEELAFKASEQIYGTPSSSPYECLRQSCNILISTMNKLATAMQEGEYDAERPPSKPPPVELRAAALRAEITDAEGLGLKLEDRETVIKELKKSLKIKGEELSEANVRLSLLEKKLDSAAKDADERIEKVQTRLEETQALLRKKEKEFEETMDALQADIDQLEAEKAELKQRLNSQSKRTIEGLRGPPPSGIATLVSGIAGGAIPGQAPGSVPGPGLVKDSPLLLQQISAMRLHISQLQHENSILKGAQMKASLASLPPLHVAKLSHEGPGSELPAGALYRKTSQLLETLNQLSTHTHVVDITRTSPAAKSPSAQLMEQVAQLKSLSDTVEKLKDEVLKETVSQRPGATVPTDFATFPSSAFLRAKEEQQDDTVYMGKVTFSCAAGFGQRHRLVLTQEQLHQLHSRLIS

SEQ ID NO: 44387 - protein, 1139 aa, Homo sapiens
MMRQAPTARKTTTRRPKPTRPASTGVAGASSSLGPSGSASAGELSSSEPSTPAQTPLAAPIIPTPVLTSPGAVPPLPSPSKEEEGLRAQVRDLEEKLETLRLKRAEDKAKLKELEKHKIQLEQVQEWKSKMQEQQADLQRRLKEARKEAKEALEAKERYMEEMADTADAIEMATLDKEMAEERAESLQQEVEALKERVDELTTDLEILKAEIEEKGSDGAASSYQLKQLEEQNARLKDALVRMRDLSSSEKQEHVKLQKLMEKKNQELEVVRQQRERLQEELSQAESTIDELKEQVDAALGAEEMVEMLTDRNLNLEEKVRELRETVGDLEAMNEMNDELQENARETELELREQLDMAGARVREAQKRVEAAQETVADYQQTIKKYRQLTAHLQDVNRELTNQQEASVERQQQPPPETFDFKIKFAETKAHAKAIEMELRQMEVAQANRHMSLLTAFMPDSFLRPGGDHDCVLVLLLMPRLICKAELIRKQAQEKFELSENCSERPGLRGAAGEQLSFAAGLVYSLSLLQATLHRYEHALSQCSVDVYKKVGSLYPEMSAHERSLDFLIELLHKDQLDETVNVEPLTKAIKYYQHLYSIHLAEQPEDCTMQLADHIKFTQSALDCMSVEVGRLRAFLQGGQEATDIALLLRDLETSCSDIRQFCKKIRRRMPGTDAPGIPAALAFGPQVSDTLLDCRKHLTWVVAVLQEVAAAAAQLIAPLAENEGLLVAALEELAFKASEQIYGTPSSSPYECLRQSCNILISTMNKLATAMQEGEYDAERPPSKPPPVELRAAALRAEITDAEGLGLKLEDRETVIKELKKSLKIKGEELSEANVRLSLLEKKLDSAAKDADERIEKVQTRLEETQALLRKKEKEFEETMDALQADIDQLEAEKAELKQRLNSQSKRTIEGLRGPPPSGIATLVSGIAGGAIPGQAPGSVPGPGLVKDSPLLLQQISAMRLHISQLQHENSILKGAQMKASLASLPPLHVAKLSHEGPGSELPAGALYRKTSQLLETLNQLSTHTHVVDITRTSPAAKSPSAQLMEQVAQLKSLSDTVEKLKDEVLKETVSQRPGATVPTDFATFPSSAFLRAKEEQQDDTVYMGKVTFSCAAGFGQRHRLVLTQEQLHQLHSRLIS

SEQ ID NO: 44388 - protein, 1253 aa, Homo sapiens
MAQSKRHVYSRTPSGSRMSAEASARPLRVGSRVEVIGKGHRGTVAYVGATLFATGKWVGVILDEAKGKNDGTVQGRKYFTCDEGHGIFVRQSQIQVFEDGADTTSPETPDSSASKVLKREGTDTTAKTSKLPTRPASTGVAGASSSLGPSGSASAGELSSSEPSTPAQTPLAAPIIPTPVLTSPGAVPPLPSPSKEEEGLRAQVRDLEEKLETLRLKRAEDKAKLKELEKHKIQLEQVQEWKSKMQEQQADLQRRLKEARKEAKEALEAKERYMEEMADTADAIEMATLDKEMAEERAESLQQEVEALKERVDELTTDLEILKAEIEEKGSDGAASSYQLKQLEEQNARLKDALVRMRDLSSSEKQEHVKLQKLMEKKNQELEVVRQQRERLQEELSQAESTIDELKEQVDAALGAEEMVEMLTDRNLNLEEKVRELRETVGDLEAMNEMNDELQENARETELELREQLDMAGARVREAQKRVEAAQETVADYQQTIKKYRQLTAHLQDVNRELTNQQEASVERQQQPPPETFDFKIKFAETKAHAKAIEMELRQMEVAQANRHMSLLTAFMPDSFLRPGGDHDCVLVLLLMPRLICKAELIRKQAQEKFELSENCSERPGLRGAAGEQLSFAAGLVYSLSLLQATLHRYEHALSQCSVDVYKKVGSLYPEMSAHERSLDFLIELLHKDQLDETVNVEPLTKAIKYYQHLYSIHLAEQPEDCTMQLADHIKFTQSALDCMSVEVGRLRAFLQGGQEATDIALLLRDLETSCSDIRQFCKKIRRRMPGTDAPGIPAALAFGPQVSDTLLDCRKHLTWVVAVLQEVAAAAAQLIAPLAENEGLLVAALEELAFKASEQIYGTPSSSPYECLRQSCNILISTMNKLATAMQEGEYDAERPPSKPPPVELRAAALRAEITDAEGLGLKLEDRETVIKELKKSLKIKGEELSEANVRLSLLEKKLDSAAKDADERIEKVQTRLEETQALLRKKEKEFEETMDALQADIDQLEAEKAELKQRLNSQSKRTIEGLRGPPPSGIATLVSGIAGGAIPGQAPGSVPGPGLVKDSPLLLQQISAMRLHISQLQHENSILKGAQMKASLASLPPLHVAKLSHEGPGSELPAGALYRKTSQLLETLNQLSTHTHVVDITRTSPAAKSPSAQLMEQVAQLKSLSDTVEKLKDEVLKETVSQRPGATVPTDFATFPSSAFLRAKEEQQDDTVYMGKVTFSCAAGFGQRHRLVLTQEQLHQLHSRLIS

SEQ ID NO: 44389 - protein, 406 aa, Homo sapiens
MADPKYADLPGIARNEPDVYETSDLPEDDQAEFDAFAQELEELTSTSVEHIIVNPNAAYDKFKDKRVGTKGLDFSDRIGKTKRTGYESGEYEMLGEGLGVKETPQQKYQRLLHEVQELTTEVEKIKTTVKESATEEKLTPVLLAKQLAALKQQLVASHLEKLLGPDAAINLTDPDGALAKRLLLQLEATKNSKGGSGGKTTGTPPDSSLVTYELHSRPEQDKFSQAAKVAELEKRLTELETAVRCDQDAQNPLSAGLQGACLMETVELLQAKVSALDLAVLDQVEARLQSVLGKVNEIAKHKASVEDADTQSKVHQLYETIQRWSPIASTLPELVQRLVTIKQLHEQAMQFGQLLTHLDTTQQMIANSLKDNTTLLTQVQTTMRENLATVEGNFASIDERMKKLGK

SEQ ID NO: 44390 - protein, 378 aa, Homo sapiens
MYAQGTEDSRTLEELTSTSVEHIIVNPNAAYDKFKDKRVGTKGLDFSDRIGKTKRTGYESGEYEMLGEGLGVKETPQQKYQRLLHEVQELTTEVEKIKTTVKESATEEKLTPVLLAKQLAALKQQLVASHLEKLLGPDAAINLTDPDGALAKRLLLQLEATKNSKGGSGGKTTGTPPDSSLVTYELHSRPEQDKFSQAAKVAELEKRLTELETAVRCDQDAQNPLSAGLQGACLMETVELLQAKVSALDLAVLDQVEARLQSVLGKVNEIAKHKASVEDADTQSKVHQLYETIQRWSPIASTLPELVQRLVTIKQLHEQAMQFGQLLTHLDTTQQMIANSLKDNTTLLTQVQTTMRENLATVEGNFASIDERMKKLGK

SEQ ID NO: 44391 - protein, 314 aa, Homo sapiens
MLGEGLGVKETPQQKYQRLLHEVQELTTEVEKIKTTVKESATEEKLTPVLLAKQLAALKQQLVASHLEKLLGPDAAINLTDPDGALAKRLLLQLEATKNSKGGSGGKTTGTPPDSSLVTYELHSRPEQDKFSQAAKVAELEKRLTELETAVRCDQDAQNPLSAGLQGACLMETVELLQAKVSALDLAVLDQVEARLQSVLGKVNEIAKHKASVEDADTQSKVHQLYETIQRWSPIASTLPELVQRLVTIKQLHEQAMQFGQLLTHLDTTQQMIANSLKDNTTLLTQVQTTMRENLATVEGNFASIDERMKKLGK

SEQ ID NO: 44392 - protein, 406 aa, Homo sapiens
MADPKYADLPGIARNEPDVYETSDLPEDDQAEFDATVQHLEELTSTSVEHIIVNPNAAYDKFKDKRVGTKGLDFSDRIGKTKRTGYESGEYEMLGEGLGVKETPQQKYQRLLHEVQELTTEVEKIKTTVKESATEEKLTPVLLAKQLAALKQQLVASHLEKLLGPDAAINLTDPDGALAKRLLLQLEATKNSKGGSGGKTTGTPPDSSLVTYELHSRPEQDKFSQAAKVAELEKRLTELETAVRCDQDAQNPLSAGLQGACLMETVELLQAKVSALDLAVLDQVEARLQSVLGKVNEIAKHKASVEDADTQSKVHQLYETIQRWSPIASTLPELVQRLVTIKQLHEQAMQFGQLLTHLDTTQQMIANSLKDNTTLLTQVQTTMRENLATVEGNFASIDERMKKLGK

SEQ ID NO: 44393 - protein, 401 aa, Homo sapiens
MADPKYADLPGIARNEPDVYETSDLPEDDQAEFDAEELTSTSVEHIIVNPNAAYDKFKDKRVGTKGLDFSDRIGKTKRTGYESGEYEMLGEGLGVKETPQQKYQRLLHEVQELTTEVEKIKTTVKESATEEKLTPVLLAKQLAALKQQLVASHLEKLLGPDAAINLTDPDGALAKRLLLQLEATKNSKGGSGGKTTGTPPDSSLVTYELHSRPEQDKFSQAAKVAELEKRLTELETAVRCDQDAQNPLSAGLQGACLMETVELLQAKVSALDLAVLDQVEARLQSVLGKVNEIAKHKASVEDADTQSKVHQLYETIQRWSPIASTLPELVQRLVTIKQLHEQAMQFGQLLTHLDTTQQMIANSLKDNTTLLTQVQTTMRENLATVEGNFASIDERMKKLGK

SEQ ID NO: 44394 - protein, 186 aa, Homo sapiens
MAGLTDLQRLQARVEELERWVYGPGGARGSRKVADGLVKVQVALGNISSKRERVKILYKKIEDLIKYLDPEYIDRIAIPDASKLQFILAEEQFILSQVALLEQVNALVPMLDSAHIKAVPEHAARLQRLAQIHIQQQDQCVEITEESKALLEEYNKTTMLLSKQFVQWDELLCQLEAATQVKPAEE

SEQ ID NO: 44395 - protein, 176 aa, Homo sapiens
MAGLTDLQRLQARVEELERWVYGPGGARGSRKVADGLVKVQVALGNISSKRERVKILYKKIEDLIKYLDPEYIDRIAIPDASKLQFILAEEQFILSQVALLEQVNALVPMLDSAHIKAVPEHAARLQRLAQIHIQQQAPWGVGVRDEAGSLVEDVGFAQFLSVLHFGPTGPVCGNH

SEQ ID NO: 44396 - protein, 161 aa, Homo sapiens [sequence omitted]

SEQ ID NO: 44397 - protein, 104 aa, Homo sapiens
MAGLTDLQRLQARVEELERWVYGPGGARGSRKVADGLVKVQVALGNISSKRERVKILYKKIEDLIKYLDPEYIDRIAIPDASKLQFILAERSSLSFPRLHSWSR

SEQ ID NO: 44398 - protein, 158 aa, Homo sapiens
MAGLTDLQRLQARVEELERWVYGPGGARGSRKVADGLVKVQVALGNISSKRERVKILYKKIEDLIKYLDPEYIDRIAIPDASKLQFILAAVPEHAARLQRLAQIHIQQQDQCVEITEESKALLEEYNKTTMLLSKQFVQWDELLCQLEAATQVKPAEE

SEQ ID NO: 44399 - protein, 151 aa, Homo sapiens
QRLQARVEELERWVYGPGGARGSRKVADGLVKVQVALGNISSKRERVKILYKKIEDLIKYLDPEYIDRIAIPDASKLQFILAAVPEHAARLQRLAQIHIQQQDQCVEITEESKALLEEYNKTTMLLSKQFVQWDELLCQLEAATQVKPAEE

SEQ ID NO: 44400 - protein, 172 aa, Homo sapiens
MAGLTDLQRLQARVEELERWVYGPGGARGSRKVADGLVKVQVALGNISSKRERVKILYKKIEDLIKYLDPEYIDRIAIPDASKLQFILAGNAGLHVYMHLRMWVVGEVKHRDGLSIQSSGGYKPWMLLSGIVAWFWVEDPMDPLVDIEYSIPLHQLQAMVPATVGASPVFYQ

SEQ ID NO: 44401 - protein, 182 aa, Homo sapiens
MELGELLYNKSEYIETASGNKVSRQSVLCGSQNIVLNGKTIVMNDCIIRGDLANVRVGRHCVVKSRSVIRPPFKKFSKGVAFFPLHIGDHVFIEEDCVVNAAQIGSYVHVGKNCVIGRRCVLKDCCKILDNTVLPPETVVPPFTVFSGCPGLFSGELPECTQELMIDVTKSYYQKFLPLTQV

SEQ ID NO: 44402 - protein, 84 aa, Homo sapiens
MELGELLYNKSEYIETASGNKVSRQSVLCGSQNIVLNGKNFVISVFLSPYIRCHSACRDRKRSDESVRLSVNNREWWGLVNWRM

SEQ ID NO: 44403 - protein, 190 aa, Homo sapiens
MAEKTQKSVKIAPGAVVCVESEIRGDVTIGPRTVIHPKARIIAEAGPIVIGEGNLIEEQALIINAYPDNITPDTEDPEPKPMIIGTNNVFEVGCYSQAMKMGDNNVIESKAYVGRNVILTSGCIIGACCNLNTFEVIPENTVIYGADCLRRVQTERPQPQTLQLDFLMKILPNYHHLKKTMKGSSTPVKN

SEQ ID NO: 44404 - protein, 851 aa, Homo sapiens
MGNRGMEDLIPLVNRLQDAFSAIGQNADLDLPQIAVVGGQSAGKSSVLENFVGRDFLPRGSGIVTRRPLVLQLVNATTEYAEFLHCKGKKFTDFEEVRLEIEAETDRVTGTNKGISPVPINLRVYSPHVLNLTLVDLPGMTKVPVGDQPPDIEFQIRDMLMQFVTKENCLILAVSPANSDLANSDALKVAKEVDPQGQRTIGVITKLDLMDEGTDARDVLENKLLPLRRGYIGVVNRSQKDIDGKKDITAALAAERKFFLSHPSYRHLADRMGTPYLQKVLNQQLTNHIRDTLPGLRNKLQSQLLSIEKEVEEYKNFRPDDPARKTKALLQMVQQFAVDFEKRIEGSGDQIDTYELSGGARINRIFHERFPFELVKMEFDEKELRREISYAIKNIHGIRTGLFTPDMAFETIVKKQVKKIREPCLKCVDMVISELISTVRQCTKKLQQYPRLREEMERIVTTHIREREGRTKEQVMLLIDIELAYMNTNHEDFIGFANAQQRSNQMNKKKTSGNQDEILVIRKGWLTINNIGIMKGGSKEYWFVLTAENLSWYKDDEEKEKKYMLSVDNLKLRDVEKGFMSSKHIFALFNTEQRNVYKDYRQLELACETQEEVDSWKASFLRAGVYPERVGDKEKASETEENGSDSFMHSMDPQLERQVETIRNLVDSYMAIVNKTVRDLMPKTIMHLMINNTKEFIFSELLANLYSCGDQNTLMEESAEQAQRRDEMLRMYHALKEALSIIGDINTTTVSTPMPPPVDDSWLQVQSVPAGRRSPTSSPTPQRRAPAVPPARPGSRGPAPGPPPAGSALGGAPPVPSRPGASPDPFGPPPQVPSRPNRAPPGVPRITISDP

SEQ ID NO: 44405 - protein, 864 aa, Homo sapiens
MGNRGMEDLIPLVNRLQDAFSAIGQNADLDLPQIAVVGGQSAGKSSVLENFVGRDFLPRGSGIVTRRPLVLQLVNATTEYAEFLHCKGKKFTDFEEVRLEIEAETDRVTGTNKGISPVPINLRVYSPHVLNLTLVDLPGMTKVPVGDQPPDIEFQIRDMLMQFVTKENCLILAVSPANSDLANSDALKVAKEVDPQGQRTIGVITKLDLMDEGTDARDVLENKLLPLRRGYIGVVNRSQKDIDGKKDITAALAAERKFFLSHPSYRHLADRMGTPYLQKVLNQQLTNHIRDTLPGLRNKLQSQLLSIEKEVEEYKNFRPDDPARKTKALLQMVQQFAVDFEKRIEGSGDQIDTYELSGGARINRIFHERFPFELVKMEFDEKELRREISYAIKNIHGIRTGLFTPDMAFETIVKKQVKKIREPCLKCVDMVISELISTVRQCTKKLQQYPRLREEMERIVTTHIREREGRTKEQVMLLIDIELAYMNTNHEDFIGFANAQQRSNQMNKKKTSGNQDEILVIRKGWLTINNIGIMKGGSKEYWFVLTAENLSWYKDDEEKEKKYMLSVDNLKLRDVEKGFMSSKHIFALFNTEQRNVYKDYRQLELACETQEEVDSWKASFLRAGVYPERVGDKEKASETEENGSDSFMHSMDPQLERQVETIRNLVDSYMAIVNKTVRDLMPKTIMHLMINNTKEFIFSELLANLYSCGDQNTLMEESAEQAQRRDEMLRMYHALKEALSIIGDINTTTVSTPMPPPVDDSWLQVQSVPAGRRSPTSSPTPQRRAPAVPPARPGSRGPAPGPPPAGSALGGAPPVPSRPGASPDPFGPPPQVPSRPNRAPPGVPSRSGQASPSRPESPRPPFDL

SEQ ID NO: 44406 - protein, 662 aa, Homo sapiens
MEDLIPLVNRLQDAFSAIGQNADLDLPQIAVVGGQSAGKSSVLENFVGRDFLPRGSGIVTRRPLVLQLVNATTEYAEFLHCKGKKFTDFEEVRLEIEAETDRVTGTNKGISPVPINLRVYSPHVLNLTLVDLPGMTKVPVGDQPPDIEFQIRDMLMQFVTKENCLILAVSPANSDLANSDALKVAKEVDPQGQRTIGVITKLDLMDEGTDARDVLENKLLPLRRGYIGVVNRSQKDIDGKKDITAALAAERKFFLSHPSYRHLADRMGTPYLQKVLNQQLTNHIRDTLPGLRNKLQSQLLSIEKEVEEYKNFRPDDPARKTKALLQMVQQFAVDFEKRIEGSGDQIDTYELSGGARINRIFHERFPFELVKMEFDEKELRREISYAIKNIHGIRTGLFTPDMAFETIVKKQVKKIREPCLKCVDMVISELISTVRQCTKKLQQYPRLREEMERIVTTHIREREGRTKEQVMLLIDIELAYMNTNHEDFIGFANAQQRSNQMNKKKTSGNQITLQVIRKGWLTINNIGIMKGGSKEYWFVLTAENLSWYKDDEEKEKKYMLSVDNLKLRDVEKGFMSSKHIFALFNTEQRNVYKDYRQLELACETQEEVDSWKASFLRAGVYPERVGDKEKVSVPFSCLLPGICSLAPAPARFSSKGPGDVLF

SEQ ID NO: 44407 - protein, 851 aa, Homo sapiens
MGNRGMEDLIPLVNRLQDAFSAIGQNADLDLPQIAVVGGQSAGKSSVLENFVGRDFLPRGSGIVTRRPLVLQLVNATTEYAEFLHCKGKKFTDFEEVRLEIEAETDRVTGTNKGISPVPINLRVYSPHVLNLTLVDLPGMTKVPVGDQPPDIEFQIRDMLMQFVTKENCLILAVSPANSDLANSDALKVAKEVDPQGQRTIGVITKLDLMDEGTDARDVLENKLLPLRRGYIGVVNRSQKDIDGKKDITAALAAERKFFLSHPSYRHLADRMGTPYLQKVLNQQLTNHIRDTLPGLRNKLQSQLLSIEKEVEEYKNFRPDDPARKTKALLQMVQQFAVDFEKRIEGSGDQIDTYELSGGARINRIFHERFPFELVKMEFDEKELRREISYAIKNIHGIRTGLFTPDLAFEATVKKQVQKLKEPSIKCVDMVVSELTATIRKCSEKLQQYPRLREEMERIVTTHIREREGRTKEQVMLLIDIELAYMNTNHEDFIGFANAQQRSNQMNKKKTSGNQDEILVIRKGWLTINNIGIMKGGSKEYWFVLTAENLSWYKDDEEKEKKYMLSVDNLKLRDVEKGFMSSKHIFALFNTEQRNVYKDYRQLELACETQEEVDSWKASFLRAGVYPERVGDKEKASETEENGSDSFMHSMDPQLERQVETIRNLVDSYMAIVNKTVRDLMPKTIMHLMINNTKEFIFSELLANLYSCGDQNTLMEESAEQAQRRDEMLRMYHALKEALSIIGDINTTTVSTPMPPPVDDSWLQVQSVPAGRRSPTSSPTPQRRAPAVPPARPGSRGPAPGPPPAGSALGGAPPVPSRPGASPDPFGPPPQVPSRPNRAPPGVPRITISDP

SEQ ID NO: 44408 - protein, 851 aa, Homo sapiens; identical to SEQ ID NO: 44407

SEQ ID NO: 44409 - protein, 864 aa, Homo sapiens
MGNRGMEDLIPLVNRLQDAFSAIGQNADLDLPQIAVVGGQSAGKSSVLENFVGRDFLPRGSGIVTRRPLVLQLVNATTEYAEFLHCKGKKFTDFEEVRLEIEAETDRVTGTNKGISPVPINLRVYSPHVLNLTLVDLPGMTKVPVGDQPPDIEFQIRDMLMQFVTKENCLILAVSPANSDLANSDALKVAKEVDPQGQRTIGVITKLDLMDEGTDARDVLENKLLPLRRGYIGVVNRSQKDIDGKKDITAALAAERKFFLSHPSYRHLADRMGTPYLQKVLNQQLTNHIRDTLPGLRNKLQSQLLSIEKEVEEYKNFRPDDPARKTKALLQMVQQFAVDFEKRIEGSGDQIDTYELSGGARINRIFHERFPFELVKMEFDEKELRREISYAIKNIHGIRTGLFTPDLAFEATVKKQVQKLKEPSIKCVDMVVSELTATIRKCSEKLQQYPRLREEMERIVTTHIREREGRTKEQVMLLIDIELAYMNTNHEDFIGFANAQQRSNQMNKKKTSGNQDEILVIRKGWLTINNIGIMKGGSKEYWFVLTAENLSWYKDDEEKEKKYMLSVDNLKLRDVEKGFMSSKHIFALFNTEQRNVYKDYRQLELACETQEEVDSWKASFLRAGVYPERVGDKEKASETEENGSDSFMHSMDPQLERQVETIRNLVDSYMAIVNKTVRDLMPKTIMHLMINNTKEFIFSELLANLYSCGDQNTLMEESAEQAQRRDEMLRMYHALKEALSIIGDINTTTVSTPMPPPVDDSWLQVQSVPAGRRSPTSSPTPQRRAPAVPPARPGSRGPAPGPPPAGSALGGAPPVPSRPGASPDPFGPPPQVPSRPNRAPPGVPSRSGQASPSRPESPRPPFDL

SEQ ID NO: 44410 - protein, 396 aa, Homo sapiens
MERIVTTHIREREGRTKEQVMLLIDIELAYMNTNHEDFIGFANAQQRSNQMNKKKTSGNQDEILVIRKGWLTINNIGIMKGGSKEYWFVLTAENLSWYKDDEEKEKKYMLSVDNLKLRDVEKGFMSSKHIFALFNTEQRNVYKDYRQLELACETQEEVDSWKASFLRAGVYPERVGDKEKASETEENGSDSFMHSMDPQLERQVETIRNLVDSYMAIVNKTVRDLMPKTIMHLMINNTKEFIFSELLANLYSCGDQNTLMEESAEQAQRRDEMLRMYHALKEALSIIGDINTTTVSTPMPPPVDDSWLQVQSVPAGRRSPTSSPTPQRRAPAVPPARPGSRGPAPGPPPAGSALGGAPPVPSRPGASPDPFGPPPQVPSRPNRAPPGVPRITISDP

SEQ ID NO: 44411 - protein, 575 aa, Homo sapiens
MEALIPVINKLQDVFNTVGADIIQLPQIVVVGTQSSGKSSVLESLVGRDLLPRGTGIVTRRPLILQLVHVSQEDKRKTTGEENGVEAEEWGKFLHTKNKLYTDFDEIRQEIENETERISGNNKGVSPEPIHLKIFSPNVVNLTLVDLPGMTKVPVGDQPKDIELQIRELILRFISNPNSIILAVTAANTDMATSEALKISREVDPDGRRTLAVITKLDLMDAGTDAMDVLMGRVIPVKLGIIGVVNRSQLDINNKKSVTDSIRDEYAFLQKKYPSLANRNGTKYLARTLNRLLMHHIRDCLPELKTRINVLAAQYQSLLNSYGEPVDDKSATLLQLITKFATEYCNTIEGTAKYIETSELCGGARICYIFHETFGRTLESVDPLGGLNTIDILTAIRNATGPRPALFVPEVSFELLVKRQIKRLEEPSLRCVELVHEEMQRIIQHCSNYSTQELLRFPKLHDAIVEVVTCLLRKRLPVTNEMVHNLVAIELAYINTKHPDFADACGLMNNNIEEQRRNRLARELPSAVSRDKVASGGGGVGDGVQEPTTGNWRGMLKTSKAEELLAEKKKKKKKK

SEQ ID NO: 44412 - protein, 699 aa, Homo sapiens
MEALIPVINKLQDVFNTVGADIIQLPQIVVVGTQSSGKSSVLESLVGRDLLPRGTGIVTRRPLILQLVHVSQEDKRKTTGEENGVEAEEWGKFLHTKNKLYTDFDEIRQEIENETERISGNNKGVSPEPIHLKIFSPNVVNLTLVDLPGMTKVPVGDQPKDIELQIRELILRFISNPNSIILAVTAANTDMATSEALKISREVDPDGRRTLAVITKLDLMDAGTDAMDVLMGRVIPVKLGIIGVVNRSQLDINNKKSVTDSIRDEYAFLQKKYPSLANRNGTKYLARTLNRLLMHHIRDCLPELKTRINVLAAQYQSLLNSYGEPVDDKSATLLQLITKFATEYCNTIEGTAKYIETSELCGGARICYIFHETFGRTLESVDPLGGLNTIDILTAIRNATGPRPALFVPEVSFELLVKRQIKRLEEPSLRCVELVHEEMQRIIQHCSNYSTQELLRFPKLHDAIVEVVTCLLRKRLPVTNEMVHNLVAIELAYINTKHPDFADACGLMNNNIEEQRRNRLARELPSAVSRDKVASGGGGVGDGVQEPTTGNWRGMLKTSKAEELLAEEKSKPIPIMPASPQKGHAVNLLDVPVPVARKLSAREQRDCEVIERLIKSYFLIVRKNIQDSVPKAVMHFLVNHVKDTLQSELVGQLYKSSLLDDLLTESEDMAQRRKEAADMLKALQGASQIIAEIRETHLW

SEQ ID NO: 44413 - protein, 791 aa, Homo sapiens
MACREGAGSRRARSNGCRLPRRGRRRGGRRRTVGPGPIHCRGRRALGPRVFRVMEALIPVINKLQDVFNTVGADIIQLPQIVVVGTQSSGKSSVLESLVGRDLLPRGTGIVTRRPLILQLVHVSQEDKRKTTGEENDPATWKNSRHLSKGVEAEEWGKFLHTKNKLYTDFDEIRQEIENETERISGNNKGVSPEPIHLKIFSPNVVNLTLVDLPGMTKVPVGDQPKDIELQIRELILRFISNPNSIILAVTAANTDMATSEALKISREVDPDGRRTLAVITKLDLMDAGTDAMDVLMGRVIPVKLGIIGVVNRSQLDINNKKSVTDSIRDEYAFLQKKYPSLANRNGTKYLARTLNRLLMHHIRDCLPELKTRINVLAAQYQSLLNSYGEPVDDKSATLLQLITKFATEYCNTIEGTAKYIETSELCGGARICYIFHETFGRTLESVDPLGGLNTIDILTAIRNATGPRPALFVPEVSFELLVKRQIKRLEEPSLRCVELVHEEMQRIIQHCSNYSTQELLRFPKLHDAIVEVVTCLLRKRLPVTNEMVHNLVAIELAYINTKHPDFADACGLMNNNIEEQRRNRLARELPSAVSRDKSSKVPSALAPASQEPSPAASAEADGKVASGGGGVGDGVQEPTTGNWRGMLKTSKAEELLAEEKSKPIPIMPASPQKGHAVNLLDVPVPVARKLSAREQRDCEVIERLIKSYFLIVRKNIQDSVPKAVMHFLVNHVKDTLQSELVGQLYKSSLLDDLLTESEDMAQRRKEAADMLKALQGASQIIAEIRETHLW

SEQ ID NO: 44414 - protein, 533 aa, Homo sapiens
MFHKKINGKQQEKKMTLLHGKTQDTFLKGWKQKNGVNFFTPKIRSQLDINNKKSVTDSIRDEYAFLQKKYPSLANRNGTKYLARTLNRLLMHHIRDCLPELKTRINVLAAQYQSLLNSYGEPVDDKSATLLQLITKFATEYCNTIEGTAKYIETSELCGGARICYIFHETFGRTLESVDPLGGLNTIDILTAIRNATGPRPALFVPEVSFELLVKRQIKRLEEPSLRCVELVHEEMQRIIQHCSNYSTQELLRFPKLHDAIVEVVTCLLRKRLPVTNEMVHNLVAIELAYINTKHPDFADACGLMNNNIEEQRRNRLARELPSAVSRDKSSKVPSALAPASQEPSPAASAEADGKLIQDSRRETKNVASGGGGVGDGVQEPTTGNWRGMLKTSKAEELLAEEKSKPIPIMPASPQKGHAVNLLDVPVPVARKLSAREQRDCEVIERLIKSYFLIVRKNIQDSVPKAVMHFLVNHVKDTLQSELVGQLYKSSLLDDLLTESEDMAQRRKEAADMLKALQGASQIIAEIRETHLW

SEQ ID NO: 44415 - protein, 710 aa, Homo sapiens
MEALIPVINKLQDVFNTVGADIIQLPQIVVVGTQSSGKSSVLESLVGRDLLPRGTGIVTRRPLILQLVHVSQEDKRKTTGEENGVEAEEWGKFLHTKNKLYTDFDEIRQEIENETERISGNNKGVSPEPIHLKIFSPNVVNLTLVDLPGMTKVPVGDQPKDIELQIRELILRFISNPNSIILAVTAANTDMATSEALKISREVDPDGRRTLAVITKLDLMDAGTDAMDVLMGRVIPVKLGIIGVVNRSQLDINNKKSVTDSIRDEYAFLQKKYPSLANRNGTKYLARTLNRLLMHHIRDCLPELKTRINVLAAQYQSLLNSYGEPVDDKSATLLQLITKFATEYCNTIEGTAKYIETSELCGGARICYIFHETFGRTLESVDPLGGLNTIDILTAIRNATGPRPALFVPEVSFELLVKRQIKRLEEPSLRCVELVHEEMQRIIQHCSNYSTQELLRFPKLHDAIVEVVTCLLRKRLPVTNEMVHNLVAIELAYINTKHPDFADACGLMNNNIEEQRRNRLARELPSAVSRDKLIQDSRRETKNVASGGGGVGDGVQEPTTGNWRGMLKTSKAEELLAEEKSKPIPIMPASPQKGHAVNLLDVPVPVARKLSAREQRDCEVIERLIKSYFLIVRKNIQDSVPKAVMHFLVNHVKDTLQSELVGQLYKSSLLDDLLTESEDMAQRRKEAADMLKALQGASQIIAEIRETHLW

SEQ ID NO: 44416 - protein, 725 aa, Homo sapiens
MEALIPVINKLQDVFNTVGADIIQLPQIVVVGTQSSGKSSVLESLVGRDLLPRGTGIVTRRPLILQLVHVSQEDKRKTTGEENGVEAEEWGKFLHTKNKLYTDFDEIRQEIENETERISGNNKGVSPEPIHLKIFSPNVVNLTLVDLPGMTKVPVGDQPKDIELQIRELILRFISNPNSIILAVTAANTDMATSEALKISREVDPDGRRTLAVITKLDLMDAGTDAMDVLMGRVIPVKLGIIGVVNRSQLDINNKKSVTDSIRDEYAFLQKKYPSLANRNGTKYLARTLNRLLMHHIRDCLPELKTRINVLAAQYQSLLNSYGEPVDDKSATLLQLITKFATEYCNTIEGTAKYIETSELCGGARICYIFHETFGRTLESVDPLGGLNTIDILTAIRNATGPRPALFVPEVSFELLVKRQIKRLEEPSLRCVELVHEEMQRIIQHCSNYSTQELLRFPKLHDAIVEVVTCLLRKRLPVTNEMVHNLVAIELAYINTKHPDFADACGLMNNNIEEQRRNRLARELPSAVSRDKSSKVPSALAPASQEPSPAASAEADGKVASGGGGVGDGVQEPTTGNWRGMLKTSKAEELLAEEKSKPIPIMPASPQKGHAVNLLDVPVPVARKLSAREQRDCEVIERLIKSYFLIVRKNIQDSVPKAVMHFLVNHVKDTLQSELVGQLYKSSLLDDLLTESEDMAQRRKEAADMLKALQGASQIIAEIRETHLW

SEQ ID NO: 44417 - protein, 736 aa, Homo sapiens
MEALIPVINKLQDVFNTVGADIIQLPQIVVVGTQSSGKSSVLESLVGRDLLPRGTGIVTRRPLILQLVHVSQEDKRKTTGEENGVEAEEWGKFLHTKNKLYTDFDEIRQEIENETERISGNNKGVSPEPIHLKIFSPNVVNLTLVDLPGMTKVPVGDQPKDIELQIRELILRFISNPNSIILAVTAANTDMATSEALKISREVDPDGRRTLAVITKLDLMDAGTDAMDVLMGRVIPVKLGIIGVVNRSQLDINNKKSVTDSIRDEYAFLQKKYPSLANRNGTKYLARTLNRLLMHHIRDCLPELKTRINVLAAQYQSLLNSYGEPVDDKSATLLQLITKFATEYCNTIEGTAKYIETSELCGGARICYIFHETFGRTLESVDPLGGLNTIDILTAIRNATGPRPALFVPEVSFELLVKRQIKRLEEPSLRCVELVHEEMQRIIQHCSNYSTQELLRFPKLHDAIVEVVTCLLRKRLPVTNEMVHNLVAIELAYINTKHPDFADACGLMNNNIEEQRRNRLARELPSAVSRDKSSKVPSALAPASQEPSPAASAEADGKLIQDSRRETKNVASGGGGVGDGVQEPTTGNWRGMLKTSKAEELLAEEKSKPIPIMPASPQKGHAVNLLDVPVPVARKLSAREQRDCEVIERLIKSYFLIVRKNIQDSVPKAVMHFLVNHVKDTLQSELVGQLYKSSLLDDLLTESEDMAQRRKEAADMLKALQGASQIIAEIRETHLW

SEQ ID NO: 44418 - protein, 749 aa, Homo sapiens
MEALIPVINKLQDVFNTVGADIIQLPQIVVVGTQSSGKSSVLESLVGRDLLPRGTGIVTRRPLILQLVHVSQEDKRKTTGEENDPATWKNSRHLSKGVEAEEWGKFLHTKNKLYTDFDEIRQEIENETERISGNNKGVSPEPIHLKIFSPNVVNLTLVDLPGMTKVPVGDQPKDIELQIRELILRFISNPNSIILAVTAANTDMATSEALKISREVDPDGRRTLAVITKLDLMDAGTDAMDVLMGRVIPVKLGIIGVVNRSQLDINNKKSVTDSIRDEYAFLQKKYPSLANRNGTKYLARTLNRLLMHHIRDCLPELKTRINVLAAQYQSLLNSYGEPVDDKSATLLQLITKFATEYCNTIEGTAKYIETSELCGGARICYIFHETFGRTLESVDPLGGLNTIDILTAIRNATGPRPALFVPEVSFELLVKRQIKRLEEPSLRCVELVHEEMQRIIQHCSNYSTQELLRFPKLHDAIVEVVTCLLRKRLPVTNEMVHNLVAIELAYINTKHPDFADACGLMNNNIEEQRRNRLARELPSAVSRDKSSKVPSALAPASQEPSPAASAEADGKLIQDSRRETKNVASGGGGVGDGVQEPTTGNWRGMLKTSKAEELLAEEKSKPIPIMPASPQKGHAVNLLDVPVPVARKLSAREQRDCEVIERLIKSYFLIVRKNIQDSVPKAVMHFLVNHVKDTLQSELVGQLYKSSLLDDLLTESEDMAQRRKEAADMLKALQGASQIIAEIRETHLW

SEQ ID NO: 44419 - protein, 870 aa, Homo sapiens
MGNRGMEELIPLVNKLQDAFSSIGQSCHLDLPQIAVVGGQSAGKSSVLENFVGRDFLPRGSGIVTRRPLILQLIFSKTEHAEFLHCKSKKFTDFDEVRQEIEAETDRVTGTNKGISPVPINLRVYSPHVLNLTLIDLPGITKVPVGDQPPDIEYQIKDMILQFISRESSLILAVTPANMDLANSDALKLAKEVDPQGLRTIGVITKLDLMDEGTDARDVLENKLLPLRRGYIGVVNRSQKDIEGKKDIRAALAAERKFFLSHPAYRHMADRMGTPHLQKTLNQQLTNHIRESLPALRSKLQSQLLSLEKEVEEYKNFRPDDPTRKTKALLQMVQQFGVDFEKRIEGSGDQVDTLELSGGARINRIFHERFPFELVKMEFDEKDLRREISYAIKNIHGVRTGLFTPDMAFEAIVKKQIVKLKEPSLKCVDLVVSELATVIKKCAEKLSSYPRLREETERIVTTYIREREGRTKDQILLLIDIEQSYINTNHEDFIGFANAQQRSTQLNKKRAIPNQPETLVIRRGWLTINNISLMKGGSKEYWFVLTAESLSWYKDEEEKEKKYMLPLDNLKIRDVEKGFMSNKHVFAIFNTEQRNVYKDLRQIELACDSQEDVDSWKASFLRAGVYPEKDQAENEDGAQENTFSMDPQLERQVETIRNLVDSYVAIINKSIRDLMPKTIMHLMINNTKAFIHHELLAYLYSSADQSSLMEESADQAQRRDDMLRMYHALKEALNIIGDISTSTVSTPVPPPVDDTWLQSASSHSPTPQRRPVSSIHPPGRPPAVRGPTPGPPLIPVPVGAAASFSAPPIPSRPGPQSVFANSDLFPAPPQIPSRPVRIPPGIPPGVPSRRPPAAPSRPTIIRPAEPSLLD

SEQ ID NO: 44420 - protein, 866 aa, Homo sapiens
MGNRGMEELIPLVNKLQDAFSSIGQSCHLDLPQIAVVGGQSAGKSSVLENFVGRDFLPRGSGIVTRRPLILQLIFSKTEHAEFLHCKSKKFTDFDEVRQEIEAETDRVTGTNKGISPVPINLRVYSPHVLNLTLIDLPGITKVPVGDQPPDIEYQIKDMILQFISRESSLILAVTPANMDLANSDALKLAKEVDPQGLRTIGVITKLDLMDEGTDARDVLENKLLPLRRGYIGVVNRSQKDIEGKKDIRAALAAERKFFLSHPAYRHMADRMGTPHLQKTLNQQLTNHIRESLPALRSKLQSQLLSLEKEVEEYKNFRPDDPTRKTKALLQMVQQFGVDFEKRIEGSGDQVDTLELSGGARINRIFHERFPFELVKMEFDEKDLRREISYAIKNIHGVRTGLFTPDLAFEAIVKKQVVKLKEPCLKCVDLVIQELINTVRQCTSKLSSYPRLREETERIVTTYIREREGRTKDQILLLIDIEQSYINTNHEDFIGFANAQQRSTQLNKKRAIPNQVIRRGWLTINNISLMKGGSKEYWFVLTAESLSWYKDEEEKEKKYMLPLDNLKIRDVEKGFMSNKHVFAIFNTEQRNVYKDLRQIELACDSQEDVDSWKASFLRAGVYPEKDQAENEDGAQENTFSMDPQLERQVETIRNLVDSYVAIINKSIRDLMPKTIMHLMINNTKAFIHHELLAYLYSSADQSSLMEESADQAQRRDDMLRMYHALKEALNIIGDISTSTVSTPVPPPVDDTWLQSASSHSPTPQRRPVSSIHPPGRPPAVRGPTPGPPLIPVPVGAAASFSAPPIPSRPGPQSVFANSDLFPAPPQIPSRPVRIPPGIPPGVPSRRPPAAPSRPTIIRPAEPSLLD

SEQ ID NO: 44421 - protein, 870 aa, Homo sapiens
MGNRGMEELIPLVNKLQDAFSSIGQSCHLDLPQIAVVGGQSAGKSSVLENFVGRDFLPRGSGIVTRRPLILQLIFSKTEHAEFLHCKSKKFTDFDEVRQEIEAETDRVTGTNKGISPVPINLRVYSPHVLNLTLIDLPGITKVPVGDQPPDIEYQIKDMILQFISRESSLILAVTPANMDLANSDALKLAKEVDPQGLRTIGVITKLDLMDEGTDARDVLENKLLPLRRGYIGVVNRSQKDIEGKKDIRAALAAERKFFLSHPAYRHMADRMGTPHLQKTLNQQLTNHIRESLPALRSKLQSQLLSLEKEVEEYKNFRPDDPTRKTKALLQMVQQFGVDFEKRIEGSGDQVDTLELSGGARINRIFHERFPFELVKMEFDEKDLRREISYAIKNIHGVRTGLFTPDLAFEAIVKKQVVKLKEPCLKCVDLVIQELINTVRQCTSKLSSYPRLREETERIVTTYIREREGRTKDQILLLIDIEQSYINTNHEDFIGFANAQQRSTQLNKKRAIPNQGEILVIRRGWLTINNISLMKGGSKEYWFVLTAESLSWYKDEEEKEKKYMLPLDNLKIRDVEKGFMSNKHVFAIFNTEQRNVYKDLRQIELACDSQEDVDSWKASFLRAGVYPEKDQAENEDGAQENTFSMDPQLERQVETIRNLVDSYVAIINKSIRDLMPKTIMHLMINNTKAFIHHELLAYLYSSADQSSLMEESADQAQRRDDMLRMYHALKEALNIIGDISTSTVSTPVPPPVDDTWLQSASSHSPTPQRRPVSSIHPPGRPPAVRGPTPGPPLIPVPVGAAASFSAPPIPSRPGPQSVFANSDLFPAPPQIPSRPVRIPPGIPPGVPSRRPPAAPSRPTIIRPAEPSLLD

SEQ ID NO: 44422 - protein, 486 aa, Homo sapiens
HVTVAAADSWKPPASAQHVGRAPRAGAATCFLGPRPPSHLGGRDFLPRGSGIVTRRPLILQLIFSKTEHAEFLHCKSKKFTDFDEVRQEIEAETDRVTGTNKGISPVPINLRVYSPHVLNLTLIDLPGITKVPVGDQPPDIEYQIKDMILQFISRESSLILAVTPANMDLANSDALKLAKEVDPQGLRTIGVITKLDLMDEGTDARDVLENKLLPLRRGYIGVVNRSQKDIEGKKDIRAALAAERKFFLSHPAYRHMADRMGTPHLQKTLNQQLTNHIRESLPALRSKLQSQLLSLEKEVEEYKNFRPDDPTRKTKALLQMVQQFGVDFEKRIEGSGDQVDTLELSGGARINRIFHERFPFELVKMEFDEKDLRREISYAIKNIHGVRTGLFTPDMAFEAIVKKQIVKLKEPSLKCVDLVVSELATVIKKCAEKLSSYPRLREETERIVTTYIREREGRTKDQILLLIDIEQSYINTNHEDFIGFA

SEQ ID NO: 44423 - protein, 870 aa, Homo sapiens
MGNRGMEELIPLVNKLQDAFSSIGQSCHLDLPQIAVVGGQSAGKSSVLENFVGRDFLPRGSGIVTRRPLILQLIFSKTEHAEFLHCKSKKFTDFDEVRQEIEAETDRVTGTNKGISPVPINLRVYSPHVLNLTLIDLPGITKVPVGDQPPDIEYQIKDMILQFISRESSLILAVTPANMDLANSDALKLAKEVDPQGLRTIGVITKLDLMDEGTDARDVLENKLLPLRRGYIGVVNRSQKDIEGKKDIRAALAAERKFFLSHPAYRHMADRMGTPHLQKTLNQQLTNHIRESLPALRSKLQSQLLSLEKEVEEYKNFRPDDPTRKTKALLQMVQQFGVDFEKRIEGSGDQVDTLELSGGARINRIFHERFPFELVKMEFDEKDLRREISYAIKNIHGVRTGLFTPDMAFEAIVKKQIVKLKEPSLKCVDLVVSELATVIKKCAEKLSSYPRLREETERIVTTYIREREGRTKDQILLLIDIEQSYINTNHEDFIGFANAQQRSTQLNKKRAIPNQGEILVIRRGWLTINNISLMKGGSKEYWFVLTAESLSWYKDEEEKEKKYMLPLDNLKIRDVEKGFMSNKHVFAIFNTEQRNVYKDLRQIELACDSQEDVDSWKASFLRAGVYPEKDQAENEDGAQENTFSMDPQLERQVETIRNLVDSYVAIINKSIRDLMPKTIMHLMINNTKAFIHHELLAYLYSSADQSSLMEESADQAQRRDDMLRMYHALKEALNIIGDISTSTVSTPVPPPVDDTWLQSASSHSPTPQRRPVSSIHPPGRPPAVRGPTPGPPLIPVPVGAAASFSAPPIPSRPGPQSVFANSDLFPAPPQIPSRPVRIPPGIPPGVPSRRPPAAPSRPTIIRPAEPSLLD

SEQ ID NO: 44424 - protein, 866 aa, Homo sapiens
MGNRGMEELIPLVNKLQDAFSSIGQSCHLDLPQIAVVGGQSAGKSSVLENFVGRDFLPRGSGIVTRRPLILQLIFSKTEHAEFLHCKSKKFTDFDEVRQEIEAETDRVTGTNKGISPVPINLRVYSPHVLNLTLIDLPGITKVPVGDQPPDIEYQIKDMILQFISRESSLILAVTPANMDLANSDALKLAKEVDPQGLRTIGVITKLDLMDEGTDARDVLENKLLPLRRGYIGVVNRSQKDIEGKKDIRAALAAERKFFLSHPAYRHMADRMGTPHLQKTLNQQLTNHIRESLPALRSKLQSQLLSLEKEVEEYKNFRPDDPTRKTKALLQMVQQFGVDFEKRIEGSGDQVDTLELSGGARINRIFHERFPFELVKMEFDEKDLRREISYAIKNIHGVRTGLFTPDMAFEAIVKKQIVKLKEPSLKCVDLVVSELATVIKKCAEKLSSYPRLREETERIVTTYIREREGRTKDQILLLIDIEQSYINTNHEDFIGFANAQQRSTQLNKKRAIPNQVIRRGWLTINNISLMKGGSKEYWFVLTAESLSWYKDEEEKEKKYMLPLDNLKIRDVEKGFMSNKHVFAIFNTEQRNVYKDLRQIELACDSQEDVDSWKASFLRAGVYPEKDQAENEDGAQENTFSMDPQLERQVETIRNLVDSYVAIINKSIRDLMPKTIMHLMINNTKAFIHHELLAYLYSSADQSSLMEESADQAQRRDDMLRMYHALKEALNIIGDISTSTVSTPVPPPVDDTWLQSASSHSPTPQRRPVSSIHPPGRPPAVRGPTPGPPLIPVPVGAAASFSAPPIPSRPGPQSVFANSDLFPAPPQIPSRPVRIPPGIPPGVPSRRPPAAPSRPTIIRPAEPSLLD

SEQ ID NO: 44425 - protein, 399 aa, Homo sapiens
MLPLEPYLTQTSAVPQMSHFMCHSPTHKPQGLLPWAPFHQASVSLYPISPWPSESVCPPTCPGGASCWFPAGNAWDRVELGFLGFGAGGVSIAVPGFPLSCGQGCCAGGWLGHGARFPAKLRAFPQVIRRGWLTINNISLMKGGSKEYWFVLTAESLSWYKDEEEKEKKYMLPLDNLKIRDVEKGFMSNKHVFAIFNTEQRNVYKDLRQIELACDSQEDVDSWKASFLRAGVYPEKDQAENEDGAQENTFSMDPQLERQVETIRNLVDSYVAIINKSIRDLMPKTIMHLMINNTKAFIHHELLAYLYSSADQSSLMEESADQAQRRDDMLRMYHALKEALNIIGDISTSTVSTPVPPPVDDTWLQSASSHSPTPQRRPVSSIHPPGRPPAVRGPTPGPP

SEQ ID NO: 44426 - protein, 4427 aa, Homo sapiens
MSSKAEKKQRLSGRGSSQASWSGRATRAAVATQEQGNAPAVSEPELQAELPKEEPEPRLEGPQAQSEESVEPEADVKPLFLSRAALTGLADAVWTQEHDAILEHFAQDPTESILTIFIDPCFGLKLELGMPVQTQNQLVYFIRQAPVPITWENFEATVQFGTVRGPYIPALLRLLGGVFAPQIFANTGWPESIRNHFASHLHKFLACLTDTRYKLEGHTVLYIPAEAMNMKPEMVIKDKELVQRLETSMIHWTRQIKEMLSAQETVETGENLGPLEEIEFWRNRCMDLSGISKQLVKKGVKHVESILHLAKSSYLAPFMKLAQQIQDGSRQAQSNLTFLSILKEPYQELAFMKPKDISSKLPKLISLIRIIWVNSPHYNTRERLTSLFRKVCDCQYHFARWEDGKQGPLPCFFGAQGPQITRNLLEIEDIFHKNLHTLRAVRGGILDVKNTCWHEDYNKFRAGIKDLEVMTQNLITSAFELVRDVPHGVLLLDTFHRLASREAIKRTYDKKAVDLYMLFNSELALVNRERNKKWPDLEPYVAQYSGKARWVHILRRRIDRVMTCLAGAHFLPRIGTGKESVHTYQQMVQAIDELVRKTFQEWTSSLDKDCIRRLDTPLLRISQEKAGMLDVNFDKSLLILFAEIDYWERLLFETPHYVVNVAERAEDLRILRENLLLVARDYNRIIAMLSPDEQALFKERIRLLDKKIHPGLKKLHWALKGASAFFITECRIHASKVQMIVNEFKASTLTIGWRAQEMSEKLLVRISGKRVYRDLEFEEDQREHRAAVQQKLMNLHQDVVTIMTNSYEVFKNDGPEIQQQWMLYMIRLDRMMEDALRLNVKWSLLELSKAINGDGKTSPNPLFQVLVILKNDLQGSVAQVEFSPTLQTLAGVVNDIGNHLFSTISVFCHLPDILTKRKLHREPIQTVVEQDEDIKKIQTQISSGMTNNASLLQNYLKTWDMYREIWEINKDSFIHRYQRLNPPVSSFVADIARYTEVANNVQKEETVTNIQFVLLDCSHLKFSLVQHCNEWQNKFATLLREMAAGRLLELHTYLKENAEKISRPPQTLEELGVSLQLVDALKHDLANVETQIPPIHEQFAILEKYEVPVEDSVLEMLDSLNGEWVVFQQTLLDSKQMLKKHKEKFKTGLIHSADDFKKKAHTLLEDFEFKGHFTSNVGYMSALDQITQVRAMLMAMREEENSLRANLGIFKIEQPPSKDLQNLEKELDALQQIWEIARDWEENWNEWKTGRFLILQTETMETTAHGLFRRLTKLAKEYKDRNWEIIETTRSKIEQFKRTMPLISDLRNPALRERHWDQVRDEIQREFDQESESFTLEQIVELGMDQHVEKIGEISASATKELAIEVALQNIAKTWDVTQLDIVPYKDKGHHRLRGTEEVFQALEDNQVALSTMKASRFVKAFEKDVDHWERCLSLILEVIEMILTVQRQWMYLENIFLGEDIRKQLPNESTLFDQVNSNWKAIMDRMNKDNNALRSTHHPGLLDTLIEMNTILEDIQKSLDMYLETKRHIFPRFYFLSNDDLLEILGQSRNPEAVQPHLKKCFDNIKLLRIQKVGGPSSKWEAVGMFSGDGEYIDFLHSVFLEGPVESWLGDVEQTMRVTLRDLLRNCHLALRKFLNKRDKWVKEWAGQVVITASQIQWTADVTKCLLTAKERADKKILKVMKKNQVSILNKYSEAIRGNLTKIMRLKIVALVTIEIHARDVLEKLYKSGLMDVNSFDWLSQLRFYWEKDLDDCVIRQTNTQFQYNYEYLGNSGRLVITPLTDRCYMTLTTALHLHRGGSPKGPAGTGKTETVKDLGKALGIYVIVVNCSEGLDYKSMGRMYSGLAQTGAWGCFDEFNRINIEVLSVVAHQILCILSALAAGLTHFHFDGFEINLVWSCGIFITMNPGYAGRTELPENLKSMFRPIAMVVPDSTLIAEIILFGEGFGNCKILAKKVYTLYSLAVQQLSRQDHYDFGLRALTSLLRYAGKKRRLQPDLTDEEVLLLSMRDMNIAKLTSVDAPLFNAIVQDLFPNIELPVIDYGKLRETVEQEIRDMGLQSTPFTLTKVFQLYETKNSRHSTMIVGCTGSGKTASWRILQASLSSLCRAGDPNFNIVREFPLNPKALSLGELYGEYDLSTNEWTDGILSSVMRTACADEKPDEKWILFDGPVDTLWIENMNSVMDDNKVLTLINGERIAMPEQVSLLFEVEDLAMASPATVSRCGMVYTDYADLGWKPYVQSWLEKRPKAEVEPLQRMFEKLINKMLAFKKDNCKELVPLPEYSGITSLCKLYSALATPENGVNPADGENYVTMVEMTFVFSMIWSVCASVDEEGRKRIDSYLREIEGSFPNKDTVYEYFVDPKIRSWTSFEDKLPKSWRYPPNAPFYKIMVPTVDTVRYNYLVSSLVANQNPILLVGPVGTGKTSIAQSVLQSLPSSQWSVLVVNMSAQTTSNNVQSIIESRVEKRTKGVYVPFGGKSMITFMDDLNMPAKDMFGSQPPLELIRLWIDYGFWYDRTKQTIKYIREMFLMAAMGPPGGGRTVISPRLRSRFNIINMTFPTKSQIIRIFGTMINQKLQDFEEEVKPIGNVVTEATLDMYNTVVQRFLPTPTKMHYLFNLRDISKVFQGMLRANKDFHDTKSSITRLWIHECFRVFSDRLVDAADTEAFMGIISDKLGSFFDLTFHHLCPSKRPPIFGDFLKEPKVYEDLTDLTVLKTVMETALNEYNLSPSVVPMQLVLFREAIEHITRIVRVIGQPRGNMLLVGIGGSGRQSLARLASSICDYTTFQIEVTKHYRKQEFRDDIKRLYRQAGVELKTTSFIFVDTQIADESFLEDINNILSSGEVPNLYKPDEFEEIQSHIIDQARVEQVPESSDSLFAYLIERVQNNLHIVLCLSPMGDPFRNWIRQYPALVNCTTINWFSEWPQEALLEVAEKCLIGVDLGTQENIHRKVAQIFVTMHWSVAQYSQKMLLELRRHNYVTPTKYLELLSGYKKLLGEKRQELLAQANKLRTGLFKIDETREKVQVMSLELEDAKKKVAEFQKQCEEYLVIIVQQKREADEQQKAVTANSEKIAVEEIKCQALADNAQKDLEEALPALEEAMRALESLNKKDIGEIKSYGRPPAQVEIVMQAVMILRGNEPTWAEAKRQLGEQNFIKSLINFDKDNISDKVLKKIGAYCAQPDFQPDIIGRVSLAAKSLCMWVRAMELYGRLYRVVEPKRIRMNAALAQLREKQAALAEAQEKLREVAEKLEMLKKQYDEKLAQKEELRKKSEEMELKLERAGMLVSGLAGEKARWEETVQGLEEDLGYLVGDCLLAAAFLSYMGPFLTNYRDEIVNQIWIGKIWELQVPCSPSFAIDNFLCNPTKVRDWNIQGLPSDAFSTENGIIVTRGNRWALMIDPQAQALKWIKNMEGGQGLKIIDLQMSDYLRILEHAIHFGYPVLLQNVQEYLDPTLNPMLNKSVARIGGRLLMRIGDKEVEYNTNFRFYITTKLSNPHYSPETSAKTTIVNFAVKEQGLEAQLLGIVVRKERPELEEQKDSLVINIAAGKRKLKELEDEILRLLNEATGSLLDDVQLVNTLHTSKITATEVTEQLETSETTEINTDLAREAYRPCAQRASILFFVLNDMGCIDPMYQFSLDAYISLFILSIDKSHRSNKLEDRIDYLNDYHTYAVYRYTCRTLFERHKLLFSFHMCAKILETSGKLNMDEYNFFLRGGVVLDREGQMDNPCSSWLADAYWDNITELDKLTNFHGLMNSFEQYPRDWHLWYTNAAPEKAMLPGEWENACNEMQRMLIVRSLRQDRVAFCVTSFIITNLGSRFIEPPVLNMKSVLEDSTPRSPLVFILSPGVDPTSALLQLAEHMGMAQRFHALSLGQGQAPIAARLLREGVTQGHWVFLANCHLSLSWMPNLDKLVEQLQVEDPHPSFRLWLSSIPHPDFPISILQVSIKMTTEPPKGLKANMTRLYQLMSEPQFSRCSKPAKYKKLLFSLCFFHSVLLERKKFLQLGWNIIYGFNDSDFEVSENLLSLYLDEYEETPWDALKYLIAGINYGGHVTDDWDRRLLTTYINDYFCDQSLSTPFHRLSALETYFIPKDGSLASYKEYISLLPGMDPPEAFGQHPNADVASQITEAQTLFDTLLSLQPQITPTRAGGQTREEKVLELAADVKQKIPEMIDYEGTQKLLALDPSPLNVVLLQEIQRYNTLMQTILFSLTDLEKGIQGLIVMSTSLEEIFNCIFDAHVPPLWGKAYPSQKPLAAWTRDLAMRVEQFELWASRARPPVIFWLSGFTFPTGFLTAVLQSSARQNNVSVDSLSWEFIVSTVDDSNLVYPPKDGVWVRGLYLEGAGWDRKNSCLVEAEPMQLVCLMPTIHFRPAESRKKSAKGMYSCPCYYYPNRAGSSDRASFVIGIDLRSGAMTPDHWIKRGTALLMSLDS

SEQ ID NO: 44427 - protein, 593 aa, Homo sapiens
MEIVYVYVKKRSEFGKQCNFSDRQAELNIDIMPNPELAEQFVERNPVDTGIQCSISMSEHEANSERFEMETRGVNHVEGGWPKDVNPLELEQTIRFRKKVEKDENYVNAIMQLGSIMEHCIKQNNAIDIYEEYFNDEEAMEVMEEDPSAKTINVFRDPQEIKRAATHLSWHPDGNRKLAVAYSCLDFQRAPVGMSSDSYIWDLENPNKPELALKPSSPLVTLEFNPKDSHVLLGGCYNGQIACWDTRKGSLVAELSTIESSHRDPVYGTIWLQSKTGTECFSASTDGQVMWWDIRKMSEPTEVVILDITKKEQLENALGAISLEFESTLPTKFMVGTEQGIVISCNRKAKTSAEKIVCTFPGHHGPIYALQRNPFYPKNFLTVGDWTARIWSEDSRESSIMWTKYHMAYLTDAAWSPVRPTVFFTTRMDGTLDIWDFMFEQCDPTLSLKDNGCLIACGSQLGTTTLLEVSPGLSTLQRNEKNVASSMFERETRREKILEARHREMRLKEKGKAEGRDEEQTDEELAVDLEALVSKAEEEFFDIIFAELKKKEADAIKLTPVPQQPSPEEDQVVEEGEEAAGEEGDEEVEEDLA

SEQ ID NO: 44428 - protein, 891 aa, Homo sapiens
EKDNGLDVFKLSDRDFLRSMENAIRFGKPCLLENVGEELDPALEPVLLKQTYKQQGNTVLKLGDTVIPYHEDFRMYITTKLPNPHYTPEISTKLTLINFTLSPSGLEDQLLGQVVAEERPDLEEAKNQLIISNAKMRQELKDIEDQILYRLSSSEGNPVDDMELIKVLEASKMKAAEIQAKVRIAEQTEKDIDLTRMEYIPVAIRTQILFFCVSDLANVDPMYQYSLEWFLNIFLSGIANSERADNLKKRISNINRYLTYSLYSNVCRSLFEKHKLMFAFLLCVRIMMNEGKINQSEWRYLLSGGSISIMTENPAPDWLSDRAWRDILALSNLPTFSSFSSDFVKHLSEFRVIFDSLEPHREPLPGIWDQYLDQFQKLLVLRCLRGDKVTNAMQDFVATNLEPRFIEPQTANLSVVFKDSNSTTPLIFVLSPGTDPAADLYKFAEEMKFSKKLSAISLGQGQGPRAEAMMRSSIERGKWVFFQNCHLAPSWMPALERLIEHINPDKVHRDFRLWLTSLPSNKFPVSILQNGSKMTIEPPRGVRANLLKSYSSLGEDFLNSCHKVMEFKSLLLSLCLFHGNALERHKFGPLGFNIPYEFTDGDLRICISQLKMFLDEYDDIPYKVLKYTAGEINYGGRVTDDWDRRCIMNILEDFYNPDVLSPEHSYSASGIYHQIPPTYDLHGYLSYIKSLPLNDMPEIFGLHDNANITFAQNETFALLGTIIQLQPKSSSAGSQGREEIVEDVTQNILLKVPEPINLQWVMAKYPVLYEESMNTVLVQEVIRYNRLLQVITQTLQDLLKALKGLVVMSSQLELMAASLYNNTVPELWSAKAYPSLKPLSSWVMDLLQRLDFLQAWIQDGIPAVFWISGFFFPQAFNRHSAEFCPQICHLH

SEQ ID NO: 44429 - protein, 4265 aa, Homo sapiens
MEQPNSKGYSLGRTPQGPECSSAPAVQVGTHRGLEYNPGKILPGSDYGLGNPPALDPKLPHLPLPPAPPTLSDLGQPRKSPLTGTDKKYPLMKQRGFYSDILSPGTLDQLGEVCRGPRMSQNLLRQADLDKFTPRVGSFEVPEDFQERMEQQCIGSTTRLLAQTDFPLQAYEPKMQVPFQVLPGQHPRKIEIERRKQQYLSLDIEQLLFSQGIDSNKLMPRHLDHQHPQTIEQGHDPIFPIYLPLKVFDNEDFDCRTPREWINMGLEPGSLDRKPVPGKALLPTDDFLGHEDPKSQKLKYKWCEVGVLDYDEEKKLYLVHKTDEKGLVRDEMGRPILNAGVTTEGRPPLQVCQYWVPRIQLLFCAEDPCMFAQRVVQANALRKNTEALLLYNLYVDCMPSDGQHVISEQSLSKIKQWALSTPRMRKGPSVLEHLSSLAREVSLDYERSMNKINFDHVVSSKPETFSYVTLPKKEEEQVPERGLVSVPKYHFWEQKEDFTFVSLLTRPEVITALSKVRAECNKVTAMSLFHSSLSKYSHLEEFEQIQSQTFSQVQMFLKDSWISSLKVAMRSSLRDMSKGWYNLYETNWEVYLMSKLRKLMELVKYMLQDTLRFLVQDSLASFSQFISDTCCSVLNCTDDMVWGDDLINSPYRPRKNPLFIMDLVLDSSGVHYSTPLEQFEASLLNLFDKGILATHAVPQLEKLVMEDIFISGDPLLESVGLHEPLVEELRATIASAVSKAMIPLQAYAKEYRKYLELNNNDIASFLKTYQTQGLLAQEVREVVLTHLREKEILDSSLPSSIIIGPFYINTDNVKQSLSKKRKALATSVLDILAKNLHKEVDSICEEFRSISRKIYEKPNSIEELAELREWMKGIPERLVGLEERIVKVMDDYQVMDEFLYNLSSDDFNDKWIASNWPSKILGQIELVQQQHVEDEEKFRKIQIMDQNNFQEKLEGLQLVVAGFSIHVEISRAHEIANEVRRVKKQLKDCQQLAMLYNNRERIFSLPITNYDKLSRMVKEFQPYLDLWTTASDWLRWSESWMNDPLSAIDAEQLEKNVVEAFKTMHKCVKQFKDMPACQEVALDIRARIEEFKPYIPLIQGLRNPGMRIRHWETLSNQININVRPKANLTFARCLEMNLQDHIESISKVAEVAGKEYAIEQALDKMEKEWSTILFNVLPYKATDTYILKSPDEASQLLDDHIVMTQNMSFSPYKKPFEQRINSWENKLKLTQEVLEEWLNCQRSWLYLEPIFSSEDINQQLPVESKRYQTMERIWKKIMKNAYENREVINVCSDLRMLDSLRDCNKILDLVQKGLSEYLETKRSAFPRFYFLSDDELLEILSQTKDPTAVQPHLRKCFENIARLLFQEDLEITHMYSAEGEEVQLCFSIYPSSNVEDWLREVERSMKASVHDIIEKAIRAYPTMPRTQWVLNWPGQVTIAGCQTYWTMEVAEALEAGNLRSQLFPQLCQQLSDLVALVRGKLSRMQRAVLSALIVIEVHAKDVVSKLIQENVVSVNDFQWISQLRYYWTNNDLYIRAVNAEFIYGYEYLGNSGRLVITPLTDRCYLTLTGALHLKFGGAPAGPAGTGKTETTKDLGKALAIQTVVFNCSDQLDFMAMGKFFKGLASAGAWACFDEFNRIDIEVLSVVAQQITTIQKAQQQRVERFMFEGVEIPLVPSCAVFITMNPGYAGRTELPDNLKALFRPVAMMVPDYAMITEISLYSFGFNEASVLAKKITTTFKLSSEQLSSQDHYDFGMRAVKTVISAAGNLKRENPSMNEELICLRAIRDVNVPKFLQEDLKLFSGIVSDLFPTIKEEDTDYGILDEAIREACRNSNLKDVEGFLTKCIQLYETTVVRHGLMLVGPTGSGKSTCYRVLAAAMTSLKGQPSISGGMYEAVNYYVLNPKSITMGQLYGEFDLLTHEWTDGIFSSFIRAGAITSDTNKKWYMFDGPVDAIWIENMNTVLDDNKKLCLSSGEIIKLTEAMTMMFEVQDLAVASPATVSRCGMVYLEPSILGLMPFIECWLRKLPPLLKPYEEHFKALFVSFLEESISFVRSSVKEVIASTNCNLTMSLLKLLDCFFKPFLPREGLKKIPSEKLSRIVELIEPWFIFSLIWSVGATGDSSGRTSFSHWLRLKMENEQLTLLFPEEGLVFDYRLEDAGISGTNDSEDEEEEYKQVAWVKWMDSSAPFTMVPDTNYCNIIVPTMDTVQMSHLLDMLLTNKKPVLCIGPTGTGKTLTISDKLLKNLALDYISHFLTFSARTSANQTQDFIDSKLDKRRKGVFGPPLGRNFIFFIDDLNMPALETYGAQPPIELLRQWMDHGGWYDRKIIGAFKNLVDINFVCAMGPPGGGRNTVTPRLMRHFNYLSFAEMDEVSKKRIFSTILGNWLDGLLGEKSYRERVPGAPHIAHFTEPLVEATIMVYATITSQLLPTPAKSHYTFNLRDLSKVFQGMLMADPAKVEDQVQLLRLWYHENCRVFRDRLVNEEDRSWFDQLLKRCMEQWEVTFNKVCPFQPILYGDFMSPGSDVKSYELITSESKMMQVIEEYIEDYNQINTAKLKLVLFMDAMSHICRISRTLRQALGNALLLGVGGSGRSSLTRLASHMAEYECFQIELSKNYGMSEWRDDVKKVLLKAGLQNLPITFLFSDTQIKNESFLEDINNVLNSGDIPNLYTADEQDQIVSTMRPYIQEQGLQPTKANLMAAYTGRVRSNIHMVLCMSPIGEVFRARLRQFPSLVNCCTIDWFNEWPAEALKSVATVFLNEIPELESSQEEIQGLIQVCVYIHQSVSKKCIEYLAELTRHNYVTPKSYLELLHIFSILIGQKKLELKTAKNRMKSGLDKLLRTSEDVAKMQEDLESMHPLLEEAAKDTMLTMEQIKVDTAIAEETRNSVQTEEIKANEKAKKAQAIADDAQKDLDEALPALDAALASLRNLNKNDVTEVRAMQRPPPGVKLVIEAVCIMKGIKPKKVPGEKPGTKVDDYWEPGKGLLQDPGHFLESLFKFDKDNIGDVVIKAIQPYIDNEEFQPATIAKVSKACTSICQWVRAMHKYHFVAKAVEPKRQALLEAQDDLGVTQRILDEAKQRLREVEDGIATMQAKYRECITKKEELELKCEQCEQRLGRAGKLINGLSDEKVRWQETVENLQYMLNNISGDVLVAAGFVAYLGPFTGQYRTVLYDSWVKQLRSHNVPHTSEPTLIGTLGNPVKIRSWQIAGLPNDTLSVENGVINQFSQRWTHFIDPQSQANKWIKNMEKDNGLDVFKLSDRDFLRSMENAIRFGKPCLLENVGEELDPALEPVLLKQTYKQQGNTVLKLGDTVIPYHEDFRMYITTKLPNPHYTPEISTKLTLINFTLSPSGLEDQLLGQVVAEERPDLEEAKNQLIISNAKMRQELKDIEDQILYRLSSSEGNPVDDMELIKVLEASKMKAAEIQAKVRIAEQTEKDIDLTRMEYIPVAIRTQILFFCVSDLANVDPMYQYSLEWFLNIFLSGIANSERADNLKKRISNINRYLTYSLYSNVCRSLFEKHKLMFAFLLCVRIMMNEGKINQSEWRYLLSGGSISIMTENPAPDWLSDRAWRDILALSNLPTFSSFSSDFVKHLSEFRVIFDSLEPHREPLPGIWDQYLDQFQKLLVLRCLRGDKVTNAMQDFVATNLEPRFIEPQTANLSVVFKDSNSTTPLIFVLSPGTDPAADLYKFAEEMKFSKKLSAISLGQGQGPRAEAMMRSSIERGKWVFFQNCHLAPSWMPALERLIEHINPDKVHRDFRLWLTSLPSNKFPVSILQNGSKMTIEPPRGVRANLLKSYSSLGEDFLNSCHKVMEFKSLLLSLCLFHGNALERHKFGPLGFNIPYEFTDGDLRICISQLKMFLDEYDDIPYKVLKYTAGEINYGGRVTDDWDRRCIMNILEDFYNPDVLSPEHSYSASGIYHQIPPTYDLHGYLSYIKSLPLNDMPEIFGLHDNANITFAQNETFALLGTIIQLQPKSSSAGSQGREEIVEDVTQNILLKVPEPINLQWVMAKYPVLYEESMNTVLVQEVIRYNRLLQVITQTLQDLLKALKGLVVMSSQLELMAASLYNNTVPELWSAKAYPSLKPLSSWVMDLLQRLDFLQAWIQDGIPAVFWISGFFFPQAFLTGTLQNFARKFVISIDTISFDFKVMFEAPSELTQRPQVGCYIHGLFLEGARWDPEAFQLAESQPKELYTEMAVIWLLPTPNRKAQDQDFYLCPIYKTLTRAGTLSTTGHSTNYVIAVEIPTHQPQRHWIKRGVALICALDY

SEQ ID NO: 44430 - protein, 4471 aa, Homo sapiens
MVPEEVEVEIDEIPVLSEEGEEEEETYSQKVESVDKVRAKRVSLRTESLGQPLNREDEEMDKEISEKLPSKRTAKHIMEKMHLHMLCTPLPEEFLDQNVVFFLRNTKEAISEATDMKEAMEIMPETLEYGIINANVLHFLKNIICQVFLPALSFNQHRTSTTVGVTSGEVSNSSEHESDLPPMPGEAVEYHSIQLIRDEFLMNVQKFASNIQRTMQQLEGEIKLEMPIISVEGEVSDLAADPETVDILEQCVINWLNQISTAVEAQLKKTPQGKGPLAEIEFWRERNATLSALHEQTKLPIVRKVLDVIKESDSMLVANLQPVFTELFKFHTEASDNVRFLSTVERYFKNITHGSGFHVVLDTIPAMMSALRMVWIISRHYNKDERMIPLMERIAWEIAERVCRVVNLRTLFKENRASAQSKTLEARNTLRLWKKAYFDTRAKIEASGREDRWEFDRKRLFERTDYMATICQDLSDVLQILEEFYNIFGPELKAVTGDPKRIDDVLCRVDGLVTPMENLTFDPFSIKSSQFWKYVMDEFKIEVLIDIINKIFVQNLENPPLYKNHPPVAGAIYWERSLFFRIKHTILRFQEVQEILDSDRGQEVKQKYLEVGRTMKEYEDRKYEQWMEVTEQVLPALMKKSLLTKSSIATEEPSTLERGAVFAINFSPALREIINETKYLEQLGFTVPELARNVALQEDKFLRYTAGIQRMLDHYHMLIGTLNDAESVLLKDHSQELLRVFRSGYKRLNWNSLGIGDYITGCKQAIGKFESLVHQIHKNADDISSRLTLIEAINLFKYPAAKSEEELPGVKEFFEHIERERASDVDHMVRWYLAIGPLLTKVEGLVVHTNTGKAPKLASYYKYWEKKIYEVLTKLILKNLQSFNSLILGNVPLFHTETILTAPEIILHPNTNEIDKMCFHCVRNCVEITKHFVRWMNGSCIECPPQKGEEEEVVIINFYNDISLNPQIIEQAVMIPQNVHRILINLMKYLQKWKRYRPLWKLDKAIVMEKFAAKKPPCVAYDEKLQFYSKIAYEVMRHPLIKDEHCIRLQLRHLANTVQENAKSWVISLGKLLNESAKEELYNLHEEMEHLAKNLRKIPNTLEDLKFVLATIAEIRSKSLVMELRYRDVQERYRTMAMYNLFPPDAEKELVDKIESIWSNLFNDSVNVEHALGDIKRTFTELTRGEIMNYRVQIEEFAKRFYSEGPGSVGDDLDKGVELLGVYERELARHEKSRQELANAEKLFDLPITMYPELLKVQKEMSGLRMIYELYEGLKVAKEEWSQTLWINLNVQILQEGIEGFLRALRKLPRPVRGLSVTYYLEAKMKAFKDSIPLLLDLKNEALRDRHWKELMEKTSVFFEMTETFTLENMFAMELHKHTDVLNEIVTAAIKEVAIEKAVKEILDTWENMKFTVVKYCKGTQERGYILGSVDEIIQSLDDNTFNLQSISGSRFVGPFLQTVHKWEKTLSLIGEVIEIWMLVQRKWMYLESIFIGGDIRSQLPEEAKKFDNIDKVFKRIMGETLKDPVIKRCCEAPNRLSDLQNVSEGLEKCQKSLNDYLDSKRNAFPRFFFISDDELLSILGSSDPLCVQEHMIKMYDNIASLRFNDGDSGEKLVSAMISAEGEVMEFRKILRAEGRVEDWMTAVLNEMRRTNRLITKEAIFRYCEDRSRVDWMLLYQGMVVLAASQVWWTWEVEDVFHKAQKGEKQAMKNYGRKMHRQIDELVTRITMPLSKNDRKKYNTVLIIDVHARDIVDSFIRGSILEAREFDWESQLRFYWDREPDELNIRQCTGTFGYGYEYMGLNGRLVITPLTDRIYLTLTQALSMYLGGAPAGPAGTGKTETTKDLAKALGLLCVVTNCGEGMDYRAVGKIFSGLAQCGAWGCFDEFNRIDASVLSVISSQIQTIRNALIHQLTTFQFEGQEISLDSRMGIFITMNPGYAGRTELPESVKALFRPVVVIVPDLQQICEIMLFSEGFLEAKTLAKKMTVLYKLAREQLSKQYHYDFGLRALKSVLVMAGELKRGSSDLREDVVLMRALRDMNLPKFVFEDVPLFLGLISDLFPGLDCPRVRYPDFNDAVEQVLEENGYAVLPIQVDKVVQMFETMLTRHTTMVVGPTRGGKSVVINTLCQAQTKLGLTTKLYILNPKAVSVIELYGILDPTTRDWTDGVLSNIFREINKPTDKKERKYILFDGDVDALWVENMNSVMDDNRLLTLANGERIRLQAHCALLFEVGDLQYASPATVSRCGMVYVDPKNLKYRPYWKKWVNQIPNKVEQYNLNSLFEKYVPYLMDVIVEGIVDGRQAEKLKTIVPQTDLNMVTQLAKMLDALLEGEIEDLDLLECYFLEALYCSLGASLLEDGRMKFDEYIKRLASLSTVDTEGVWANPGELPGQLPTLYDFHFDNKRNQWVPWSKLVPEYIHAPERKFINILVHTVDTTRTTWILEQMVKIKQPVIFVGESGTSKTATTQNFLKNLSEETNIVLMVNFSSRTTSMDIQRNLEANVEKRTKDTYGPPMGKRLLVFMDDMNMPRVDEYGTQQPIALLKLLLEKGYLYDRGKELNCKSIRDLGFIAAMGKAGGGRNEVDPRFISLFSVFNVPFPSEESLHLIYSSILKGHTSTFHESIVAVSGKLTFCTLALYKNIVQDLPPTPSKFHYIFNLRDLSRVFNGLVLTNPERFQTVAQMVRVWRNECLRVFHDRLISETDKQLVQQHIGSLVVEHFKDDVEVVMRDPILFGDFQMALHEGEPRIYEDIQDYEAAKALFQEILEEYNESNTKMNLVLFDDALEHLTRVHRIIRMDRGHALLVGVGGSGKQSLSRLAAFTASCEVFEILLSRGYSENSFREDLKSLYLKLGIENKAMIFLFTDAHVAEEGFLELINNMLTSGIVPALFSEEEKESILSQIGQEALKQGMGPAKESVWQYFVNKSANNLHIVLGMSPVGDTLRTWCRNFPGMVNNTGIDWFMPWPPQALHAVAKSFLGYNPMIPAENIENVVKHVVLVHQSVDHYSQQFLQKLRRSNYVTPKNYLDFINTYSKLLDEKTQCNIAQCKRLDGGLDKLKEATIQLDELNQKLAEQKIVLAEKSAACEALLEEIAVNTAVAEEKKKLAEEKAMEIEEQNKVIAMEKAEAETTLAEVMPILEAAKLELQKLDKSDVTEIRSFAKPPKQVQTVCECILIMKGYKELNWKTAKGVMSDPNFLRSLMEIDFDSITQSQVKNIKGLLKTLNTTTEEMEAVSKAGLGMLKFVEAVMGYCDVFREIKPKREKVARLERNFYLTKRELERIQNELAAIQKELETLGAKYEAAILEKQKLQEEAEIMERRLIAADKLISGLGSENIRWLNDLDELMHRRVKLLGDCLLCAAFLSYEGAFTWEFRDEMVNRIWQNDILEREIPLSQPFRLESLLTDDVEISRWGSQGLPPDELSVQNGILTTRASRFPLCIDPQQQALNWIKRKEEKNNLRVASFNDPDFLKQLEMSIKYGTPFLFRDVDEYIDPVIDNVLEKNIKVSQGRQFIILGDKEVDYDSNFRLYLNTKLANPRYSPSVFGKAMVINYTVTLKGLEDQLLSVLVAYERRELEEQREHLIQETSENKNLLKDLEDSLLRELATSTGNMLDNVDLVHTLEETKSKATEVSEKLKLAEKTALDIDRLRDGYRPAARRGAILFFVLSEMALVNSMYQYSLIAFLEVFRLSLKKSLPDSILMKRLRNIMDTLTFSIYNHGCTGLFERHKLLFSFNMTIKIEQAEGRVPQEELDFFLKGNISLEKSKRKKPCAWLSDQGWEDIILLSEMFSDNFGQLPDDVENNQTVWQEWYDLDSLEQFPVPLGYDNNITPFQKLLILRCFRVDRVYRAVTDYVTVTMGEKYVQPPMISFEAIFEQSTPHSPIVFILSPGSDPATDLMKLAERSGFGGNRLKFLAMGQGQEKVALQLLETAVARGQWLMLQNCHLLVKWLKDLEKSLERITKPHPDFRLWLTTDPTKGFPIGILQKSLKVVTEPPNGLKLNMRATYFKISHEMLDQCPHPAFKPLVYVLAFFHAVVQERRKFGKIGWNVYYDFNESDFQVCMEILNTYLTKAFQQRDPRIPWGSLKYLIGEVMYGGRAIDSFDRRILTIYMDEYLGDFIFDTFQPFHFFRNKEVDYKIPVGDEKEKFVEAIEALPLANTPEVFGLHPNAEIGYYTQAARDMWAHLLELQPQTGESSSGISRDDYIGQVAKEIENKMPKVFDLDQVRKRLGTGLSPTSVVLLQELERFNKLVVRMTKSLAELQRALAGEVGMSNELDDVARSLFIGHIPNIWRRLAPDTLKSLGNWMVYFLRRFSQYMLWVTESEPSVMWLSGLHIPESYLTALVQATCRKNGWPLDRSTLFTQVTKFQDADEVNERAGQGCFVSGLYLEGADWDIEKGCLIKSKPKVLVVDLPILKIIPIEAHRLKLQNTFRTPVYTTSMRRNAMGVGLVFEADLFTTRHISHWVLQGVCLTLNSD

SEQ ID NO: 44431 - protein, 4523 aa, Homo sapiens
MAAQVAAREARDFREAPTLRLTSGAGLEAVGAVELEEEEENEEEAAARRARSFAQDARVRFLGGRLAMMLGFTEEKWSQYLESEDNRQVLGEFLESTSPACLVFSFAASGRLAASQEIPRDANHKLVFISKKITESIGVNDFSQVVLFGELPALSLGHVSAFLDEILVPVLSNKNNHKSWSCFTSQDMEYHIEVMKKKMYIFRGKMSRRTLLPIPTVAGKMDLDQNCSENKPPSNERIILHAIESVVIEWSHQIQEIIERDSVQRLLNGLHLSPQAELDFWMMRRENLSCIYDQLQAPVVLKMVKILTTKQSSYFPTLKDIFLAVENALLEAQDVELYLRPLRRHIQCLQETEFPQTRILIAPLFHTICLIWSHSKFYNTPARVIVLLQEFCNLFINQATAYLSPEDLLRGEIEESLEKVQVAVNILKTFKNSFFNYRKKLASYFMGRKLRPWDFQSHLVFCRFDKFLDRLIKIEDIFATTLEFEKLERLEFGGTKGAILNGQVHEMSEELMELCKLFKQSTYDPSDCTNMEFESDYVAFKSKTLEFDRRLGTIICEAFFNCNGLEAAFKLLTIFGNFLEKPVVMEIFSLHYSTLVHMFNTELDVCKQLYNEHMKQIECGHVVLNKNMPFTSGNMKWAQQVLQRLQMFWSNFASLRYLFLGNPDHALVYQKYVEMTTLLDQFESRIYNEWKSNVDEICEFNLNQPLVKFSAINGLLCVNFDPKLVAVLREVKYLLMLKKQDIPDSALAIFKKRNTILKYIGNLDLLVQGYNKLKQTLLEVEYPLIEDELRAIDEQLTAATTWLTWQDDCWGYIERVRAATSELEHRVERTQKNVKVIQQTMRGWARCVLPPRREHRREAAFTLEDKGDLFTKKYKLIQGDGCKIHNLVEENRKLFKANPSLDTWKIYVEFIDDIVVEGFFQAIMHDLDFFLKNTEKQLKPAPFFQAQMILLPPEIVFKPSLDREAGDGFYDLVEEMLCNSFRMSAQMNRIATHLEIKNYQNDMDNMLGLAEVRQEIMNRVVNVINKVLDFRNTLETHTYLWVDDRAEFMKHFLLYGHAVSSDEMDAHANEEIPEQPPTLEQFKEQIDIYEALYVQMSKFEDFRVFDSWFKVDMKPFKVSLLTIIKKWSWMFQEHLLRFVIDSLNELQEFIKETDSGLQRELNEGDHDGLVDIMVHLLAVRSRQRATDELFEPLKETITLLESYGQKMPEQVYIQLEELPERWETTKKIAATVRHEVSPLHNAEVTLIRKKCILFDAKQAEFRERFRHYAPLGFNAENPYTALDKANEELEALEEEMLQMQESTRLFEVALPEYKQMKQCRKEIKLLKGLWDVIIYVRRSIDNWTKTQWRQIHVEQMDVELRRFAKASSITEIWSLNKEVRVWDAYTGLEGTVKDMTASLRAITELQSPALRDRHWHQLMKAIGVKFLINEATTLADLLALRLHRVEDDVRRIVDKAVKELGTEKVITEISQTWATMKFSYEVHYRTGIPLLKSDEQLFETLEHNQVQLQTLLQSKYVEYFIEQVLSWQNKLNIADLVIFTWMEVQRTWSHLESIFVCSEDIRIQLVKDARRFDGVDAEFKELMFKTAKVENVLEATCRPNLYEKLKDLQSRLSLCEKALAEYLETKRIAFPRFYFVSSADLLDILSKGAQPKQVTCHLAKLFDSIADLQFEDNQDVSAHRAVGMYSKEKEYVPFQAECECVGHVETWLLQLEQTMQETVRHSITEAIVAYEEKPRELWIFDFPAQVALTSSQIWWTTDVGIAFSRLEEGYETALKDFHKKQISQLNTLITLLLGELPPGDRQKIMTICTIDVHARDVVAKLISQKQVVVSPQAFTWLSQLRHRWEDTQKHCFVNICDAQFQYFYEYLGNSPRLVITPLTDRCYITLTQSLHLTMSGAPAGPAGTGKTETTKDLGRALGMMVYVFNCSEQMDYKSIGNIYKGLVQTGAWGCFDEFNRISVEVLSVVAVQVKMIHDAIRNRKKRFVFLGEAITLKPSVGIFITMNPGYAGRTELPENLKALFRPCAMVAPDIELICEILLVAEGFVDARALARKFITLYTLCKELLSKQDHYDWGLRAIKSVLVVAGSLKRGDKNRPEDQVLMRALRDFNMPKIVTDDIPVFLGLVGDLFPALDVPRRRKLHFEQMVRQSTLELRLQPEESFILKVVQLEELLAVRHSVFVVGNAGTGKSKILRTLNRTYVNMKQKPVWNDLNPKAVTTDELFGFIHHATREWKDGKIVYSYFIGLFSSILREQANLKHDGPKWIVLDGDIDPMWIESLNTVMDDNKVLTLASNERIALTPFMRLLFEIHHLRSATPATVSRAGILYVNPQDLGWNPYVASWIDRRRHQSEKANLTILFDKYVPACLDKLRTSFKTITSIPESSLVQTLCVLLECLLTPENVPSDSPKEVYEVYFVFACIWAFGGTLLQDQISDYQADFSRWWQKEMKAVKFPSQGTIFDYYVDHKTKKLLPWADKIAQFTMDPDVPLQTVLVHTTETARLRYFMELLLEKGKPLMLVGNAGVGKTVFVGDTLASLSEDYIVSRVPFNYYTTSTALQKILEKPLEKKAGHNYGPGGNKKLIYFIDDMNMPEVDLYGTVQPHTLIRQHIDYGHWYDRQKVMLKEIHNCQYVACMNPMVGSFTINPRLQRHFTVFAFNFPSLDALNTIYGQIFSFHFQQQAFAPSILRSGPTLIQATIAFHQTMMCNFLPTAIKFHYIFNLRDLSNVFQGILFASPECLKGPLDLIHLWLHESARVYGDKLIDKKDCDLFQRRMLETAYKYFEGIDSHMLLQQPLIYCHFADRGKDPHYMPVKDWEVLKTILTETLDNYNELNAAMHLVLFEDAMQHVCRISRILRTPQGCALLVGVGGSGKQSLSRLAAYLRGLEVFQITLTEGYGIQELRVDLANLYIRTGAKNMPTVFLLTDAQVLDESFLVLINDLLASGEIPDLFSDEDVDKIISGIHNEVHALGMVDSRENCWKFFMARVRLQLKIILCFSPVGRTLRVRARKFPAIVNCTAIDWFHAWPQEALVSVSRRFIEETKGIEPVHKDSISLFMAHVHTTVNEMSTRYYQNERRHNYTTPKSFLEQISLFKNLLKKKQNEVSEKKERLVNGIQKLKTTASQVGDLKARLASQEAELQLRNHDAEALITKIGLQTEKVSREKTIADAEERKVTAIQTEVFQKQRECEADLLKAEPALVAATAALNTLNRVNLSELKAFPNPPIAVTNVTAAVMVLLAPRGRVPKDRSWKAAKVFMGKVDDFLQALINYDKEHIPENCLKVVNEHYLKDPEFNPNLIRTKSFAAAGLCAWVINIIKFYEVYCDVEPKRQALAQANLELAAATEKLEAIRKKLVDLDRNLSRLTASFEKATAEKVRCQEEVNQTNKTIKLANRLVKELEAKKIRWGQSIKSFEAQEKTLCGDVLLTAAFVSYVGPFTRQYRQELVHCKWVPFLQQKVSIPLTEGLDLISMLTDDATIAAWNNEGLPSDRMSTENAAILTHCERWPLVIDPQQQGIKWIKNKYGMDLKVTHLGQKGFLNAIETALAFGDVILIENLEETIDPVLDPLLGRNTIKKGKYIRIGDKECEFNKNFRLILHTKLANPHYKPELQAQTTLLNFTVTEDGLEAQLLAEVVSIERPDLEKLKLVLTKHQNDFKIELKYLEDDLLLRLSAAEGSFLDDTKLVERLEATKTTVAEIEHKVIEAKENERKINEARECYRPVAARASLLYFVINDLQKINPLYQFSLKAFNVLFHRAIEQADKVEDMQGRISILMESITHAVFLYTSQALFEKDKLTFLSQMAFQILLRKKEIDPLELDFLLRFTVEHTHLSPVDFLTSQSWSAIKAIAVMEEFRGIDRDVEGSAKQWRKWVESECPEKEKLPQEWKKKSLIQKLILLRAMRPDRMTYALRNFVEEKLGAKYVERTRLDLVKAFEESSPATPIFFILSPGVDALKDLEILGKRLGFTIDSGKFHNVSLGQGQETVAEVALEKASKGGHWVILQNVHLVAKWLGTLEKLLERFSQGSHRDYRVFMSAESAPTPDEHIIPQGLLENSIKITNEPPTGMLANLHAALYNFDQDTLEICSKEQEFKSILFSLCYFHACVAGRLRFGPQGWSRSYPFNPGDLTICASVLYNYLEANSKVPWEDLRYLFGEIMYGGHITDDWDRKLCRVYLEEFMNPSLTEDELMLAPGFAAPPYLDYAGYHQYIEEMLPPESPALYGLHPNAEIEFLTVTSNTLFRTLLEMQPRNALSGDELGQSTEEKVKNVLDDILEKLPEEFNMAEIMQKNSNRSPYVLVCFQECERMNILIREIRISLEQLDLSLKGELALSPAVEAQQFALSYDTVPDTWSKLAYPSTYGLAQWFNDLLLRCRELDTWTQDLTLPAVVWLSGFFNPQSFLTAIMQTMARKNEWPLDKTRLTADVTKKTKEDYGHPPREGAYLHGLFMEGARWDTQAGTIVEARLKELACPMPVIFAKATPVDRQETKQTYECPVYRTKLRGPSYIWTFRLKSEEKTAKWVLAGVALLLEA

SEQ ID NO: 44432 - protein, 457 aa, Homo sapiens
MSDANKAAIAAEKEALNLKLPPIVHLPENIGVDTPTQSKLLKYRRSKEQQQKINQLVIDGAKRNLDRTLGKRTPLLPPPDYPQTMTSEMKKKGFNYIYMKQCVESSPLVPIQQEWLDHMLRLIPESLKEGKEREELLESLINEVSSDFENSMKRYLVQSVLVKPPVKSLEDEGGPLPESPVGLDYSNPWHSSYVQARNQIFSNLHIIHPTMKMLLDLGYTTFADTVLLDFTGIRAKGPIDCESLKTDLSIQTRNAEEKIMNTWYPKVINLFTKKEALEGVKPEKLDAFYSCVSTLMSNQLKDLLRRTVEGFVKLFDPKDQQRLPIFKIELTFDDDKMEFYPTFQDLEDNVLSLVERIAEALQNVQTIPSWLSGTSTPVNLDTELPEHVLHWAVDTLKAAVHRNLEGARKHYETYVEKYNWLLDGTAVENIETFQTEDHTFDEYTEELDCWVVWEVYF

SEQ ID NO: 44433 - protein, 679 aa, Homo sapiens
MFLLTGGVSLKSAEKNPDPTWLQDKSWEEICRASEFPAFRGLRQHFCEHIYEWREIYDSKEPHNAKFPAPMDKNLNELQKIIILRCLRPDKITPAITNYVTDKLGKKFVEPPPFDLTKSYLDSNCTIPLIFVLSPGADPMASLLKFANDKSMSGNKFQAISLGQGQGPIAAKMIKAAIEEGTWVCLQNCHLAVSWMPMLEKICEDFTSETCNSSFRLWLTSYPSSKFPVTILQNGVKMTNEPPTGLRLNLLQSYLTDPVSDPEFFKGCRGKELLFINEYDTIPFEAISYLTGECNYGGRVTDDWDRRLLLTMLADFYNLYIVENPHYKFSPSGNYFAPPKGTYEDYIEFIKKLPFTQHPEIFGLHENVDISKDLQQTKTLFESLLLTQGGSKQTGASGSTDQILLEITKDILNKLPSDFDIEMALRKYPVRYEESMNTVLVQEMERFNNLIITIRNTLRDLEKAIKGVVVMDSALEALSGSLLVGKVPEIWAKRSYPSLKPLGSYITDFLARLNFLQDWYNSGKPCVFWLSGFFFTQAFLTGAMQNYARKYTTPIDLLGYEFEVIPSDTSDTSPEDGVYIHGLYLDGARWDRESGLLAEQYPKLLFDLMPIIWIKPTQKSRIIKSDAYVCPLYKTSERKGTLSTTGHSTNFVIAMLLKTDQPTRHWIKRGVALLCQLDD

SEQ ID NO: 44434 - protein, 3092 aa, Homo sapiens
MSDANKAAIAAEKEALNLKLPPIVHLPENIGVDTPTQSKLLKYRRSKEQQQKINQLVIDGAKRNLDRTLGKRTPLLPPPDYPQTMTSEMKKKGFNYIYMKQCVESSPLVPIQQEWLDHMLRLIPESLKEGKEREELLESLINEVSSDFENSMKRYLVQSVLVKPPVKSLEDEGGPLPESPVGLDYSNPWHSSYVQARNQIFSNLHIIHPTMKMLLDLGYTTFADTVLLDFTGIRAKGPIDCESLKTDLSIQTRNAEEKIMNTWYPKVINLFTKKEALEGVKPEKLDAFYSCVSTLMSNQLKDLLRRTVEGFVKLFDPKDQQRLPIFKIELTFDDDKMEFYPTFQDLEDNVLSLVERIAEALQNVQTIPSWLSGTSTPVNLDTELPEHVLHWAVDTLKAAVHRNLEGARKHYETYVEKYNWLLDGTAVENIETFQTEDHTFDEYTEFIEKFLSLASEIMLLPQWIHYTMVRLDCEDLKTGLTNKAKAFANILLNDIASKYRKENECICSEFEAIKEHALKVPETTEEMMDLISYVEKARTVGIEELILRIQESKRQMSYFLDVFLFPQEDLALNATVLMWPRKINPIFDENDELIENAKHKKENELMAKREKLILEIEKESRRMEEFTEFAELERMQQYVTDVRQLQKRIQESEEAVQFINKEEELFKWELTKYPELDKLKVNIEPYQKFFNFVLKWQRSEKRWMDGGFLDLNGESMEADVEEFSREIFKTLKFFQTKLKKELQEKRKAARKRSLEEEKIEEEPKDNATITMCRMRARHWKQISEIVGYDLTPDSGTTLRKVLKLNLTPYLEQFEVISAGASKEFSLEKAMNTMIGTWEDIAFHISLYRDTGVCILSSVDEIQAILDDQIIKTQTMRGSPFIKPFEHEIKAWEDRLIRIQETIDEWLKVQAQWLYLEPIFCSEDIMQQMPEEGRQFQTVDRHWRDIMKFCAKDPKVLAATSLTGLLEKLQNCNELLEKIMKGLNAYLEKKRLFFPRFFFLSNDEMLEILSETKDPLRVQPHLKKCFEGIAKLEFLPNLDIKAMYSSEGERVELIALISTSAARGAVEKWLIQVEDLMLRSVHDVIAAARLAYPESARRDWVREWPGQVVLCISQMFWTSETQEVISGGTEGLKKYYKELQNQLNEIVELVRGKLSKQTRTTLGALVTIDVHARDVVMDMIKMGVSHDTDFLWLAQLRYYWENENARVRIINCNVKYAYEYLGNSPRLVITPLTDRCYRTLIGAFYLNLGGAPEGPAGTGKTETTKDLAKALAVQCVVFNCSDGLDYLAMGKFFKGLASSGAWACFDEFNRIELEVLSVVAQQILCIQRAIQQKLVVFVFEGTELKLNPNCFVAITMNPGYAGRSELPDNLKVLFRTVAMMVPNYALIAEISLYSYGFLNARPLSVKIVMTYRLCSEQLSSQFHYDYGMRAVKAVLVAAGNLKLKYPNENEDILLLRSIKDVNEPKFLSHDIPLFNGITSDLFPGIKLPEADYHEFLECAHEACNVHNLQPVKFFLEKIIQTYEMMIVRHGFMLVGEPFAAKTKVLHVLADTLTLMNEHGYGEEEKVIYRTVNPKSITMGQLFGQFDPVSHEWTDGIVANTFREFALSETPDRKWVVFDGPIDTLWIESMNTVLDDNKKLCLMSGEIIQMSPQMSLIFETMDLSQASPATVSRCGMIYLEPSQLGWEPLVSSWLNSLKGPLCEPEYQALLRGLFAWLIPPSLNQRVELFQLNYLYTTIVSKILKILITFRISNYFKYVPLKTQCTFIKFFLHQQACFIFSLIWSIGGSCDTDGRRVFDTFIRLIILGKDDENPVPDSVGKWECPFDEKGLVYDYMYELKNKGRWVHWNELIKNTNLGDKQIKIQDIIVPTMDTIRYTFLMDLSITYAKPLLFVGPTGTGKSVYVKDKLMNHLEKDQYFPFYINLSARTSANQVQNIIMARLDKRRKGVFGPPMGKKCIIFIDDMNMPALEKYGAQPPIELLRQFFDCGHWYDLKDTSKITLVDIELIAAMGPPGGGRNPVTPRCIRHFNICSINSFSDETMVRIFSSIVAFYLRTHEFPPEYFVIGNQIVNGTMEIYKQSVENLLPTPTKSHYTFNLRDFSRVIRGCLLIERDAVANKHTMIRLFVHEVLRVFYDRLINDDDRRWLFQLTKTVIKDHFKESFHSIFSHLRKQNAPVTEEDLRNLMFGDYMNPDLEGDDRVYIEIPNIHHFSDVVDQCLDEYNQTHKTRMNLVIFRYVLEHLSRICRVLKQSGGNALLVGLGGSGRQSLTRLATSMAKMHIFQPEISKSYGMNEWREDMKSFIAVPVTNRIVDNKSKILEKRLRYLNDHFTYNLYCNICRSLFEKDKLLFSFLLCANLLLARKEIEYQELMFLLTGGVSLKSAEKNPDPTWLQDKSWEEICRASEFPAFRGLRQHFCEHIYEWREIYDSKEPHNAKFPAPMDKNLNELQKIIILRCLRPDKITPAITNYVTDKLGKKFVEPPPFDLTKSYLDSNCTIPLIFVLSPGADPMASLLKFANDKSMSGNKFQAISLGQGQGPIAAKMIKAAIEEGTWVCLQNCHLAVSWMPMLEKICEDFTSETCNSSFRLWLTSYPSSKFPVTILQNGVKMTNEPPTGLRLNLLQSYLTDPVSDPEFFKGCRGKELAWEKLLFGVCFFHALVQERKKFGPLGWNIPYGFNESDLRISIRQLQLFINEYDTIPFEAISYLTGECNYGGRVTDDWDRRLLLTMLADFYNLYIVENPHYKFSPSGNYFAPPKGTYEDYIEFIKKLPFTQHPEIFGLHENVDISKDLQQTKTLFESLLLTQGGSKQTGASGSTDQILLEITKDILNKLPSDFDIEMALRKYPVRYEESMNTVLVQEMERFNNLIITIRNTLRDLEKAIKGVVVMDSALEALSGSLLVGKVPEIWAKRSYPSLKPLGSYITDFLARLNFLQDWYNSGKPCVFWLSGFFFTQAFLTGAMQNYARKYTTPIDLLGYEFEVIPSDTSDTSPEDGVYIHGLYLDGARWDRESGLLAEQYPKLLFDLMPIIWIKPTQKSRIIKSDAYVCPLYKTSERKGTLSTTGHSTNFVIAMLLKTDQPTRHWIKRGVALLCQLDD

SEQ ID NO: 44435 - protein, 784 aa, Homo sapiens
MSDANKAAIAAEKEALNLKLPPIVHLPENIGVDTPTQSKLLKYRRSKEQQQKINQLVIDGAKRNLDRTLGKRTPLLPPPDYPQTMTSEMKKKGFNYIYMKQCVESSPLVPIQQEWLDHMLRLIPESLKEGKEREELLESLINEVSSDFENSMKRYLVQSVLVKPPVKSLEDEGGPLPESPVGLDYSNPWHSSYVQARNQIFSNLHIIHPTMKMLLDLGYTTFADTVLLDFTGIRAKGPIDCESLKTDLSIQTRNAEEKIMNTWYPKVINLFTKKEALEGVKPEKLDAFYSCVSTLMSNQLKDLLRRTVEGFVKLFDPKDQQRLPIFKIELTFDDDKMEFYPTFQDLEDNVLSLVERIAEALQNVQTIPSWLSGTSTPVNLDTELPEHVLHWAVDTLKAAVHRNLEGARKHYETYVEKYNWLLDGTAVENIETFQTEDHTFDEYTEFIEKFLSLASEIMLLPQWIHYTMVRLDCEDLKTGLTNKAKAFANILLNDIASKYRKENECICSEFEAIKEHALKVPETTEEMMDLISYVEKARTVGIEELILRIQESKRQMSYFLDVFLFPQEDLALNATVLMWPRKINPIFDENDELIENAKHKKENELMAKREKLILEIEKESRRMEEFTEFAELERMQQYVTDVRQLQKRIQESEEAVQFINKEEELFKWELTKYPELDKLKVNIEPYQKFFNFVLKWQRSEKRWMDGGFLDLNGESMEADVEEFSREIFKTLKFFQTKLKKELQEKRKAARKRSLEEEKIEEEPKDNATITMCSTVMEQIKAFKV

SEQ ID NO: 44436 - protein, 228 aa, Homo sapiens
METFIPIDLTTENQEMDKEETKTKPRLLRYEEKKYEDVKPLETQPAEIAEKETLEYKTVRTFSESLKSEKTEDYLRESIIQQHMVSPEPASLKEKGKSRRKKDQTHACPNVRKARPVSYDRTEPKDDDVIRNIIRLREKLGWQTILPQHSLKYGSSKIAIQKITLKKPLEDDGEFVYCLPRKSPKSLYNPYDLQVVSAHTAKHCKEFWVITASFISKRYLVICGAVYI

SEQ ID NO: 44437 - protein, 228 aa, Homo sapiens; identical to SEQ ID NO: 44436

SEQ ID NO: 44438 - protein, 453 aa, Homo sapiens
METFIPIDLTTENQEMDKEETKTKPRLLRYEEKKYEDVKPLETQPAEIAEKETLEYKTVRTFSESLKSEKTEDYLRESIIQQHMVSPEPASLKEKGKSRRKKDQTHACPNVRKARPVSYDRTEPKDDDVIRNIIRLREKLGWQTILPQHSLKYGSSKIAIQKITLKKPLEDDGEFVYCLPRKSPKSLYNPYDLQVVSAHTAKHCKEFWVITASFISKVINIVGSVKEVELIPTLEWLSERRHYYLLRQFKIFSDFRMNKAFVTWKLNVKRIKTEKSRSFLYHHLFLADDLFQTCLVYIRGLCEDAINLKNYNDHENNLSAICLVKLDSSRTYSLDEFCEEQLQQATQALKQLEDIRNKAISEMKSTFLKVAEKNEIKEYFESKLSEDDTTHFKLPKYRRLLETFFKFVMLVDYIFQELIRQLMNTAVTLLLELFNGSAGMPFSVEKKNENLIR

SEQ ID NO: 44439 - protein, 4515 aa, Homo sapiens
METFIPIDLTTENQEMDKEETKTKPRLLRYEEKKYEDVKPLETQPAEIAEKETLEYKTVRTFSESLKSEKTEDYLRESIIQQHMVSPEPASLKEKGKSRRKKDQTHACPNVRKARPVSYDRTEPKDDDVIRNIIRLREKLGWQTILPQHSLKYGSSKIAIQKITLKKPLEDDGEFVYCLPRKSPKSLYNPYDLQVVSAHTAKHCKEFWVITASFISKVINIVGSVKEVELIPTLEWLSERRHYYLLRQFKIFSDFRMNKAFVTWKLNVKRIKTEKSRSFLYHHLFLADDLFQTCLVYIRGLCEDAINLKNYNDHENNLSAICLVKLDSSRTYSLDEFCEEQLQQATQALKQLEDIRNKAISEMKSTFLKVAEKNEIKEYFESKLSEDDTTHFKLPKYRRLLETFFKFVMLVDYIFQELIRQLMNTAVTLLLELFNGSAGMPFSVEKKNENLIRTFKDNSFPTGKTTNDCEELVDNSKLHAISVQKSEVKTDTDINEILNSVEVGKDLRKTYAPIFEVNLCLRIPAESDSSENSKENFHESDQCPEECVMFEDEMSENKDNCVKKHSSEELLPKAKKSKEISYNLEDIISDTEIETEFENKYMYYEFPEFPTNLFIDPNRLEFSVKIQNMLTNMEKCITTITPLCQDPQLSIFIDLVSIMDLPNKTGSIIHYKEQTRWPDCHILFETDPAYQNIIVNLLTIIGNSMGLVNAYSHKFIKYCTMTEKAKIMSMKISSMGELTSKEFEAILNRFRNYFRHIVNMAIEKRIGIFNVVSLDYQSECLLYIDNVIHMSHTLIQSVIEKKNKNLLEVVESSLQQLECDPTEIEEFLEHFIFLNAISSKISKLEKEFLTMSQLYSVAKHHQIHISEEQIAIFQVLLLKFSQLKSSMKLSKINKDTAITKFRDNLEACISGLHVDVGNLKAKIRTPLLLCAGTQVSTAMEMIQTLSGEAASLTNKAKAYSHYQDCFSDSQSHMHSVNVEEITQIVLSEISDIEGDLTLRKKLWEAQEEWKRASWEWRNSSLQSIDVESVQRNVSKLMHIISVLEKGLPKSDMVTHLKQVVTEFKQELPIIIALGNPCLKPRHWEALQEIIGKSVPLDKNCKVENLLALKMFQYENEINDMSTSATNEAALEKMLFKIIDFWNTTPLPLILHHTEIYSIFIIPSIDDISAQLEESQVILATIKGSPHIGPIKDLVNEWDQNLTLFSYTLEEWMNCQRNWLYLEPVFHSSEIRRQLPAETELFSQVISMWKKIMSKIQNKQNALQITTSAGVLEILQNCNIHLEHIKKSLEDYLEVKRLIFPRFYFLSNAELLDILADSRNPESVQPHLVKCFENIKQLLIWKQDIGPPAVKMLISAEGEGLVLPKKIRVRSAVEQWLVNVEKSMFDVLKKERYIYNIILLFQSQIMFYNDCVKSFVSSYSREKLEKVHAGLMCHLEEVADLVVLDTSNSRTKAILGALLILYVHCRDIVINLLLKNIFNAEDFEWTRHLQYKWNEKQKLCYVSQGNASFTYGYEYLGCTSRLVITPLTDRCWLTLMEALHLNLGGCPAGPAGTGKTETVKDLAKSLGKHCVVFNCFEDLDYKIVRKFFFGLVQSGAWSCFDEFNLIDLEVLSVIASQILTIKAAKDNYSARFVLEGKEIRINMSCAVFITMNPRYGGGVELPDNLKSLFRPVAMMVPHYQMIAEIILFSFGFKSANSLSGKLTNLYELARKQLSQQDHYNFGLRSLKIVLIMAGTKKREFKCLSEADETLIVIEAIREASLPKCPPEDVPLFENIIGDIFPEVTVLKVNQLALEKVIYTATQQLGLQNWSSQKEKIIQFYNQLQVCVGVMLVGPTGGGKTTVRRILEKALTLLPIADFLSVAERKSASKISERKGKVDICVLNPKCVTLSELYGQLDPNTMEWTDGLLSATIRSYVYFNTPKNTKKDIDLRLKSRISDLSNVFKLDSSDTTETDDNIFEEIEKVVKIPENHNFDWQWIILDGPVDTFWVENLNSVLDDTRTLCLANSERIALTNKIRVIFEVDNLSQASPATVSRCAMVYMDPVDLGWEPYVKSWLLKTSKIISQSGVDCLEFMIKNSVTDGLQFIRNRQKFQPYPMEDITVVITLCRILDAFFDFMGKNGGFEQSDDLNDTSSKEANSQRESVTFKDIEKRDENTWYPEKNPDKLTKIIQKLFVFAFTWAFGGALNREDEHRENIPFCPSLEPDSLAKVTYDFDKLVHELFGNSSQVGWKHWGQSQGRRRKGNCINLPTGECSIFGYFVDIEQCEFIPWSDLVPNDQTLIQRGTSLLTNLQRSGGNFLKITECGECINYTATRDTTCLSFLMSLLLKNSCPVLLTGESGVGKTAAINQMLEKLEGPGAFDIKHGSILGDTLLYSEIKKSSSLKQNITILIPETHKTATGSSDNPTKKPEVRTNKKLLKNNDHKGVVVSTINFSTNVTAAKTKEMILKKLIRRTKDTLGAPKNNRILIFIDDMNMPVSDMYGAQPPLELIRQLLDLGGVYDTEKNTWKNIQDLSIVAACVPVVNDISPRLLKHFSMLVLPHPSQDILCTIFQAHLGIYFSINNFTPEVQKSKDQIISCSLAIYHQVRQNMLPTPTKCHYMFNLRDMFKLLLGLLQADRTVVNSKEMAALLFVHEATRVFHDRLIDFTDKSLFYRLLSRELENCFQIGIDGCGKKTCATLACYLTDNKLYRVPISHKCAYIEFKEVFKKVFIHAGLKGKPTVLMVPNLNIEQDSFLEDLNYIISSGRIPDLFENVELDSIAMKIRYLTEQSGHMDNRQSLLSFFQKRIYKNLHIFVIMSPEGPSFRQNCRVYPSMISSCTIDWYERWPEEALLIVANSFLKEKVNFENRENLKEKLAPTCVQIHKSMKDLNRKYFEETGRFYYTTPNSYLQFMETFAHILRAREEEMQTKRDRFHMGLSTILEATTLVTEMQEELLILGPQVEQKTKETETLMEKLRKDSQVVEKVQMLVKQDEEIVAEEVRIVEDYAQKTANELKSVLPAFDKAIVALNALDKADVAELRVYTRPPFLVLTVMNAVCILLQKKPNWATAKLLLSETGFLKKLINLDKDSIPDKVFVKLKKIVTLPDFNPHKISLVSVACCSLCQWVIALNNYHEVQKVVGPKQIQVAEAQNVLKIARQRLAEKQRGLQLVEEHLLFLQAAYKDTVAEKQLLANRKTMASRRFQCASVLLTVLEDEKTRWQETINQIDNKLEGILGDILLSAACIVYSGILTPEFRQLIVNKWETFCIENGISLSSKFSLIKVMAQKYEISRWHNQGLPHGQYSVENAILIKNGQQWPLLIDPHRQAHKWIRQMEGSRLQKLSIEDSNYTKKIENAMKTGGSVLLQNLLETLAPGLKAILKKDIYQKKGHYFIRVGDAEFEYNSNFRLYLSTEIDNPHFLPSVYNFVTMINFTVTFQGLQDQLLSTVVTHEVPHLEDQRSKLLESISLDAITLEELEEKTLNLLQKALGSILDDDKIVDTLRKSKMTSNEISKRIEATKKAESEIQAIRKNYLPIATRGALLYFLVADLTQINYMYQFSLDWFHQVFVSSVVSKSKEQEHSFKREKVSPKEVHEFISISKEPNLENEKNLLDKHIKSAIDMLTKSIFKVVSSALFNEDKLCFSFRLCTVIMQNNANGNLIQDDIGFLPEEEWNIFLYSGILINIKSALSQSRLTSTFEIGESQHLQWLSDSRWRQCQYVSTHLEPFSLLCKSLLSNVSQWDTFKNSKAVYSLISTPFSSENASLEENTKPPEETELLNENKETCNPINFPWEKLTSFQRLILVKVLRPESLNNSVRKFITEKMGNKYLQRTGVNLKDAYKGSNARTPLILIQTHGIDLTNILLRFAQELKGTTHHVTIISLGRDQAAKAEDLILKALTKTQQWVFLQNCHLATSFMPRLCTIVESFNSPNVTIDPEFRLWLSSKSYSSFPIPVLKKGLKIAVESPQGLKSNLLQTFGCTGSGEVTEEIFENPDCGQWWKKLLFSLCFFNAVINERKNYGILGWNIAYKFNSSDLGVAIKVLENSLRGQPSISWQALRYLIGEVIYGGRVIDNWDKRCLKTLLYKFCNPEVLKDDFSFSRSASIKDYIHIIQSLPDDDLPEVLGIHPEAIRSCWETQGEKFIENLIAMQPKTTTANLMIRPEQSKDELVMEILSDLLKRLPLTVEKEEIAVGTPSTLKSMMSSSIWESLSKNLKDHDPLIHCVLLTFLKQEIKRFDKLLFVIHKSLKDLQLAIKGEIILTQELEEIFNSFLNMRVPTLWQKHAYRSCKPLSSWIDDLIQRLNFFNTWAKVAYTAIQRRYMRFVTVWKQSIPSTSQKCKHPEDSENNFFEGFPSRYWLPAFFFPQAFLAAVLQDYGRSRGIAVDALTFTHHVISNTTDKDEKFSVFMPKKLNIVRRAFKGSASSHTGVYIFGLFIEGARWNREQKILEDSLPLEMCCDFPDIYFLPTKISTKTPNASNQTDSELYAFECPVYQTPERSRILATTGLPTNFLTSVYLSTKKPPSHWITMRVALLCEKNEK

SEQ ID NO: 44440 - protein, 4515 aa, Homo sapiens; identical to SEQ ID NO: 44439

SEQ ID NO: 44441 - protein, 3507 aa, Homo sapiens
MGRRSQWIWAMRCQMLVPVLSLHIGLARALGCGCIASKIECLIRCNAPFPLLDAVGSVASQELQSLTGTVGVTSGAAAYPRWNLARARAPPHLPGTQDPLRRVRDPTPIVASSPGRRRGSWSGGYGQEASEPGVVGLCCAVLPIHPSLALAGVGGPDLRRFQEGPQRPSDHGAAEKHMETFIPIDLTTENQEMDKEETKTKPRLLRYEEKKYEDVKPLETQPAEIAEKETLEYKTVRTFSESLKSEKTEEPKDDDVIRNIIRLREKLGWQTILPQHSLKYGSSKIAIQKITLKKPLEDDGEFVYCLPRKSPKSLYNPYDLQVVSAHTAKHCKEFWVITASFISKLDSSRTYSLDEFCEEQLQQATQALKQLEDIRNKAISEMKSTFLKVAEKNEIKEYFESKLSEDDTTHFKLPKYRRLLETFFKFVMLVDYIFQELIRQLMNTAVTLLLELFNGSAGMPFSVEKKNENLIRTFKDNSFPTGKTTNDCEELVDNSKLHAISVQKSEVKTDTDINEILNSVEVGKDLRKTYAPIFEVNLCLRIPAESDSSENSKENFHESDQCPEECVMFEDEMSENKDNCVKKHSSEELLPKAKKSKEISYNLEDIISATITPLCQDPQLSIFIDLVSIMDLPNKTGSIIHYKEQTRWPDCHILFETDPAYQNIIVNLLTIIGNSMGLVNAYSHKFIKYCTMTEKAKIMSMKISSMGELTSKEFEAILNRFRNYFRHIVNMAIEKRIGIFNVVVESSLQQLECDPTEIEEFLEHFIFLNAISSKISKLEKEFLTMSQLYSVAKHHQIHISEEQIAIFQVLLLKFSQLKSSMKLSKINKDTAITKFRDNLEACISGLHVDVGNLKAKIRTPLLLCAGTQVSTAMEMIQTLSGEAASLTNKAKAYSHYQDCFSDSQSHMHSVNVEEITQIVLSEISDIEGDLTLRKKLWEAQEEWKRASWEWRNSSLQSIDVESVQRNVSKLMHIISVLEKEIYSIFIIPSIDDISAQLEESQVILATIKGSPHIGPIKSQIMFYNDCVKSFVSSYSREKLEKVHAGLMCHLEEVADLVVLDTSNSRTKAILGALLILYVHCRDIVINLLLKNIFNAEDFEWTRHLQYKWNEKQKLCYVSQGNASFTYGYEYLGCTSRLVITPLTDRCWLTLMEALHLNLGGCPAGPAGTGKTETVKDLAKCALFAFKCNTALIKLPNSLIVLTCFGLEKTVLVMNTVMSFRFVLEGKEIRINMSCAVFITMNPRYGGGVELPDNLKSLFRPVAMMVPHYQMIAEIILFSFGFKSANSLSGKLTNLYELARKQLSQQDHYNFGLRSLKIVLIMAGTKKREFKCDTSDSLSEADETLIVIEAIREASLPKCPPEDVPLFENIIGDIFPEVTVLKVNQLALEKVIYTATQQLGLQNWSSQKEKIIQFYNQLQVCVGVMLVGPTGGGKTTVRRILEKALTLLPIADFLSVAERKSASKISERKGKVDICVLNPKCVTLSELYGQLDPNTMEWTDGLLSATIRSYVYFNTPKNTKKDIDLRLKSRISDLSNVFKLDSSDTTETDDNIFEEIEKVVKIPENHNFDWQWIILDGPVDTFWVENLNSVLDDTRTLCLANSERIALTNKIRVIFEVDNLSQASPATVSRCAMVYMDPVDLGWEPYVKSWLLKTSKIISQSGVDCLEFMIKNSVTDGLQFIRNRQKFQPYPMEDITVVITLCRILDAFFDFMGKNGGFEQSDDLNDTSSKEANSQRESVTFKDIEKRDENTWYPEKNPDKLTKIIQKLFVFAFTWAFGGALNREDEHRENIPFCPSLEPDSLAKVTYDFDKLVHELFGNSSQVGINLPTGECSIFGYFVDIEQCEFIPWSDLVPNDQTLIQRDNPTKKPEVRTNKKLLKNNDHKGVVVSTINFSTNVTAAKTKEMILKKLIRRTKDTLGAPKNNRILIFIDDMNMPVSDMYGAQPPLELIRQLLDLGGVYDTEKNTWKNIQDLSIVAACVPVVNDISPRLLKHFSMLVLPHPSQDILCTIFQIGIDGCGKKTCATLACYLTDNKLYRVPISHKCAYIEFKEVFKKVFIHAGLKGKPTVLMVPNLNIEQDSFLEDLNYIISSGRIPDLFENVELDSIAMKIRYLTEQSGHMDNRQSLLSFFQKRIYKNLHIFVIMSPEGPSFRQNCRVYPSMISSCTIDWYERWPEEALLIVANSFLKEKVNFENRENLKEKLAPTCVQIHKSMKDLNRKYFEETGRFYYTTPNSYLQFMETFAHILRAREEEMQTKRDRFHMGLSTILEATTLVTEMQEELLILGPQVEQKTKETETLMEKLRKDSQVVEKVQMLVKQDEEIVAEEVRIVEDYAQKTANELKSVLPAFDKAIVALNALDKADVAELRVYTRPPFLVLTVMNAVCILLQKKPNWATAKLLLSETGFLKKLINLDKDSIPDKVFVKLKKIVTLPDFNPHKISLVSVACCSLCQWVIALNNYHEVQKVVGPKQIQVAEAQNVLKIARQRLAEKQRGLQLISRWHNQGLPHGQYSVENAILIKNGQQWPLLIDPHRQAHKWIRQMEGSRLQKLSIEDSNYTKKIENAMKTGGSVLLQSCQASTWRKKLYLSTEIDNPHFLPSVYNFVTMINFTVTFQGLQDQLLSTVVTHEVPHLEDQRSKLLESISLDAITLEELEEKTLNLLQKALGSILDDDKIVDTLRKSKMTSNEISKRIEATKKAESEIQAIRKNYLPIATRGALLYFLVADLTQINYMYQFSLDWFHQVFVSSVVSKSKEQEHSFKREKVSPKEVHEFISISKEPNLENEKNLLDKHIKSAIDMLTKSIFKVVSSALFNEDKLCFSFRLCTVIMQNNANGNLIQDDIGFLPEEEWNIFLYSGILINIKSALSQSRLTSTFEIGESQHLQWLSDSRWRQCQYVSTHLEPFSLLCKSLLSNVSQWDTFKNSKAVYSLISTPFSSENASLEENTKPPEEKHTFCLLLRAINHTGTDLGPVGRGQWLTSTACDRHTDVCSFSFALNDGVPDVEHVQDIFYGHCVDKYHVKVLRPESLNNSVRKFITEKMGNKYLQRTGVNLKDAYKGSNARTPLILIQTHGSASIKDYIHIIQSLPDDDLPEVLGIHPEAIRSCWETQGEKFIENLIAMQPKTTTANLMIRPEQSKDELVMEILSDLLKRLPLTVEKEEIAVGTPSTLKSMMSSSIWESLSKNLKDHDPLIHCVLLTFLKQEIKRFDKLLFVIHKSLKDLQLAIKGEIILTQELEEIFNSFLNMRVPTLWQKHAYRSCKPLSSWIDDLIQRLNFFNTWAKVAYTAIQRRYMRFVTVWKQSIPSTSQKCKHPEDSENNFFEGFPSRYWLPAFFFPQAFLAAVLQDYGRSRGIAVDALTFTHHVISNTTDKDEKFSVFMPKKLNIVRRAFKGSASSHTGVYIFGLFIEGARWNREQKILEDSLPLEMCCDFPDIYFLPTKISTKTPNASNQTDSELYAFECPVYQTPERSRILATTGLPTNFLTSVYLSTKKPPSHWITMRVALLCEKNEK

SEQ ID NO: 44442 - protein, 872 aa, Homo sapiens
MSSKAEKKQRLSGRGSSQASWSGRATRAAVATQEQGNAPAVSEPELQAELPKEEPEPRLEGPQAQSEESVEPEADVKPLFLSRAALTGLADAVWTQEHDAILEHFAQDPTESILTIFIDPCFGLKLELGMPVQTQNQLVYFIRQAPVPITWENFEATVQFGTVRGPYIPALLRLLGGVFAPQIFANTGWPESIRNHFASHLHKFLACLTDTRYKLEGHTVLYIPAEAMNMKPEMVIKDKELVQRLETSMIHWTRQIKEMLSAQETVETGENLGPLEEIEFWRNRCMDLSGISKQLVKKGVKHVESILHLAKSSYLAPFMKLAQQIQDGSRQAQSNLTFLSILKEPYQELAFMKPKDISSKLPKLISLIRIIWVNSPHYNTRERLTSLFRKMSNEIIRLCCHAISLDRIFEGYVSSSKEDLQGCILCCHAWKDHYVQAVQMHIQFSSRGWVLDQTSIFAQVDAFVQRCKDLIEVCDCQYHFARWEDGKQGPLPCFFGAQGPQITRNLLEIEDIFHKNLHTLRAVRGGILDVKNTCWHEDYNKFRAGIKDLEVMTQNLITSAFELVRDVPHGVLLLDTFHRLASREAIKRTYDKKAVDLYMLFNSELALVNRERNKKWPDLEPYVAQYSGKARWVHILRRRIDRVMTCLAGAHFLPRIGTGKESVHTYQQMVQAIDELVRKTFQEWTSSLDKDCIRRLDTPLLRISQEKAGMLDVNFDKYRSHLAPFPYTPLLQLSQEFHSHLLTPLFIILSLSHTICLLSSFYFFFSSFIFVSPHLPPCYQHFNFTTYLKTQQNKTMIGQARWLTPVIPALWEAEVGASLEPRSLRTAWATWQNPVSAKNTKISWAWWHKPVVSATWEGEVGGSPEPGRQRLQ

SEQ ID NO: 44443 - protein, 4196 aa, Homo sapiens
MSSKAEKKQRLSGRGSSQASWSGRATRAAVATQEQGNAPAVSEPELQAELPKEEPEPRLEGPQAQSEESVEPEADVKPLFLSRAALTGLADAVWTQEHDAILEHFAQDPTESILTIFIDPCFGLKLELGMPVQTQNQLVYFIRQAPVPITWENFEATVQFGTVRGPYIPALLRLLGGVFAPQIFANTGWPESIRNHFASHLHKFLACLTDTRYKLEGHTVLYIPAEAMNMKPEMVIKDKELVQRLETSMIHWTRQIKEMLSAQETVETGENLGPLEEIEFWRNRCMDLSGISKQLVKKGVKHVESILHLAKSSYLAPFMKLAQQIQDGSRQAQSNLTFLSILKEPYQELAFMKPKDISSKLPKLISLIRIIWVNSPHYNTRERLTSLFRKVCDCQYHFARWEDGKQGPLPCFFGAQGPQITRNLLEIEDIFHKNLHTLRAVRGGILDVKNTCWHEDYNKFRAGIKDLEVMTQNLITSAFELVRDVPHGVLLLDTFHRLASREAIKRTYDKKAVDLYMLFNSELALVNRERNKKWPDLEPYVAQYSGKARWVHILRRRIDRVMTCLAGAHFLPRIGTGKESVHTYQQMVQAIDELVRKTFQEWTSSLDKDCIRRLDTPLLRISQEKAGMLDVNFDKSLLILFAEIDYWERLLFETPHYVVNVAERAEDLRILRENLLLVARDYNRIIAMLSPDEQALFKERIRLLDKKIHPGLKKLHWALKGASAFFITECRIHASKVQMIVNEFKASTLTIGWRAQEMSEKLLVRISGKRVYRDLEFEEDQREHRAAVQQKLMNLHQDVVTIMTNSYEVFKNDGPEIQQQWMLYMIRLDRMMEDALRLNVKWSLLELSKAINGDGKTSPNPLFQVLVILKNDLQGSVAQVEFSPTLQTLAGVVNDIGNHLFSTISVFCHLPDILTKRKLHREPIQTVVEQDEDIKKIQTQISSGMTNNASLLQNYLKTWDMYREIWEINKDSFIHRYQRLNPPVSSFVADIARYTEVANNVQKEETVTNIQFVLLDCSHLKFSLVQHCNEWQNKFATLLREMAAGRLLELHTYLKENAEKISRPPQTLEELGVSLQLVDALKHDLANVETQIPPIHEQFAILEKYEVPVEDSVLEMLDSLNGEWVVFQQTLLDSKQMLKKHKEKFKTGLIHSADDFKKKAHTLLEDFEFKGHFTSNVGYMSALDQITQVRAMLMAMREEENSLRANLGIFKIEQPPSKDLQNLEKELDALQQIWEIARDWEENWNEWKTGRFLILQTETMETTAHGLFRRLTKLAKEYKDRNWEIIETTRSKIEQFKRTMPLISDLRNPALRERHWDQVRDEIQREFDQESESFTLEQIVELGMDQHVEKIGEISASATKELAIEVALQNIAKTWDVTQLDIVPYKDKGHHRLRGTEEVFQALEDNQVALSTMKASRFVKAFEKDVDHWERCLSLILEVIEMILTVQRQWMYLENIFLGEDIRKQLPNESTLFDQVNSNWKAIMDRMNKDNNALRSTHHPGLLDTLIEMNTILEDIQKSLDMYLETKRHIFPRFYFLSNDDLLEILGQSRNPEAVQPHLKKCFDNIKLLRIQKVGGPSSKWEAVGMFSGDGEYIDFLHSVFLEGPVESWLGDVEQTMRVTLRDLLRNCHLALRKFLNKRDKWVKEWAGQVVITASQIQWTADVTKCLLTAKERADKKILKVMKKNQVSILNKYSEAIRGNLTKIMRLKIVALVTIEIHARDVLEKLYKSGLMDVNSFDWLSQLRFYWEKDLDDCVIRQTNTQFQYNYEYLGNSGRLVITPLTDRCYMTLTTALHLHRGGSPKGPAGTGKTETVKDLGKALGIYVIVVNCSEGLDYKSMGRMYSGLAQTGAWGCFDEFNRINIEVLSVVAHQILCILSALAAGLTHFHFDGFEINLVWSCGIFITMNPGYAGRTELPENLKSMFRPIAMVVPDSTLIAEIILFGEGFGNCKILAKKVYTLYSLAVQQLSRQDHYDFGLRALTSLLRYAGKKRRLQPDLTDEEVLLLSMRDMNIAKLTSVDAPLFNAIVQDLFPNIELPVIDYGKLRETVEQEIRDMGLQSTPFTLTKVFQLYETKNSRHSTMIVGCTGSGKTASWRILQASLSSLCRAGDPNFNIVREFPLNPKALSLGELYGEYDLSTNEWTDGILSSVMRTACADEKPDEKWILFDGPVDTLWIENMNSVMDDNKVLTLINGERIAMPEQVSLLFEVEDLAMASPATVSRCGMVYTDYADLGWKPYVQSWLEKRPKAEVEPLQRMFEKLINKMLAFKKDNCKELVPLPEYSGITSLCKLYSALATPENGVNPADGENYVTMVEMTFVFSMIWSVCASVDEEGRKRIDSYLREIEGSFPNKDTVYEYFVDPKIRSWTSFEDKLPKSWRYPPNAPFYKIMVPTVDTVRYNYLVSSLVANQNPILLVGPVGTGKTSIAQSVLQSLPSSQWSVLVVNMSAQTTSNNVQSIIESRVEKRTKGVYVPFGGKSMITFMDDLNMPAKDMFGSQPPLELIRLWIDYGFWYDRTKQTIKYIREMFLMAAMGPPGGGRTVISPRLRSRFNIINMTFPTKSQIIRIFGTMINQKLQDFEEEVKPIGNVVTEATLDMYNTVVQRFLPTPTKMHYLFNLRDISKVFQGMLRANKDFHDTKSSITRLWIHECFRVFSDRLVDAADTEAFMGIISDKLGSFFDLTFHHLCPSKRPPIFGDFLKEPKVYEDLTDLTVLKTVMETALNEYNLSPSVVPMQLVLFREAIEHITRIVRVIGQPRGNMLLVGIGGSGRQSLARLASSICDYTTFQIEVTKHYRKQEFRDDIKRLYRQAGVELKTTSFIFVDTQIADESFLEDINNILSSGEVPNLYKPDEFEEIQSHIIDQARVEQVPESSDSLFAYLIERVQNNLHIVLCLSPMGDPFRNWIRQYPALVNCTTINWFSEWPQEALLEVAEKCLIGVDLGTQENIHRKVAQIFVTMHWSVAQYSQKMLLELRRHNYVTPTKYLELLSGYKKLLGEKRQELLAQANKLRTGLFKIDETREKVQVMSLELEDAKKKVAEFQKQCEEYLVIIVQQKREADEQQKALESLNKKDIGEIKSYGRPPAQVEIVMQAVMILRGNEPTWAEAKRQLGEQNFIKSLINFDKDNISDKVLKKIGAYCAQPDFQPDIIGRVSLAAKSLCMWVRAMELYGRLYRVVEPKRIRMNAALAQLREKQAALAEAQEKLREVAEKLEMLKKQYDEKLAQKEELRKKSEEMELKLERAGMLVSGLAGEKARWEETVQGLEEDLGYLVGDCLLAAAFLSYMGPFLTNYRDEIVNQIWIGKIWELQVPCSPSFAIDNFLCNPTKVRDWNIQGLPSDAFSTENGIIVTRGNRWALMIDPQAQALKWIKNMEGGQGLKIIDLQMSDYLRILEHAIHFGYPVLLQNVQEYLDPTLNPMLNKSVARIGGRLLMRIGDKEVEYNTNFRFYITTKLSNPHYSPETSAKTTIVNFAVKEQGLEAQLLGIVVRKERPELEEQKDSLVINIAAGKRKLKELEDEILRLLNEATGSLLDDVQLVNTLHTSKITATEVTEQLETSETTEINTDLAREAYRPCAQRASILFFVLNDMGCIDPMYQFSLDAYISLFILSIDKSHRSNKLEDRIDYLNDYHTYAVYRYTCRTLFERHKLLFSFHMCAKILETSGKLNMDEYNFFLRGGVVLDREGQMDNPCSSWLADAYWDNITELDKLTNFHGLMNSFEQYPRDWHLWYTNAAPEKAMLPGEWENACNEMQRMLIVRSLRQDRVAFCVTSFIITNLGSRFIEPPVLNMKSVLEDSTPRSPLVFILSPGVDPTSALLQLAEHMGMAQRFHALSLGQGQAPIAARLLREGVTQGHWVFLANCHLSLSWMPNLDKLVEQLQVEDPHPSFRLWLSSIPHPDFPISILQVSIKMTTEPPKGLKANMTRLYQLMSEPQFSRCSKPAKYKKLLFSLCFFHSVLLERKKFLQLGWNIIYGFNDSDFEVSENLLSLYLDEYEETPWDALKYLIAGINYGGHVTDDWDRRLLTTYINDYFCDQSLSTPFHRLSALETYFIPKDGSLASYKEYISLLPGMDPPEAFGQHPNADVASQITEAQTLFDTLLSLQPQITPTRAGGQTREEKVLELAADVKQKIPEMIDYEGTQKLLALDPSPLNVVLLQEIQRYNTLMQTILFSLTDLEIPSCVSHKSERVVLELSAVKHPRQ

SEQ ID NO: 44444 - protein, 4427 aa, Homo sapiens; identical to SEQ ID NO: 44426

SEQ ID NO: 44445 - protein, 4116 aa, Homo sapiens
MGATGRLELTLAAPPHPGPAFQRSKARETQGEEEGSEMQIAKSDSIHHMSHSQGQPELPPLPASANEEPSGLYQTVMSHSFYPPLMQRTSWTLAAPFKEQHHHRGPSDSIANNYSLMAQDLKLKDLLKVYQPATISVPRDRTGQGLPSSGNRSSSEPMRKKTKFSSRNKEDSTRIKLAFKTSIFSPMKKEVKTSLTFPGSRPMSPEQQLDVMLQQEMEMESKEKKPSESDLERYYYYLTNGIRKDMIAPEEGEVMVRISKLISNTLLTSPFLEPLMVVLVQEKENDYYCSLMKSIVDYILMDPMERKRLFIESIPRLFPQRVIRAPVPWHSVYRSAKKWNEEHLHTVNPMMLRLKELWFAEFRDLRFVRTAEILAGKLPLQPQEFWDVIQKHCLEAHQTLLNKWIPTCAQLFTSRKEHWIHFAPKSNYDSSRNIEEYFASVASFMSLQLRELVIKSLEDLVSLFMIHKDGNDFKEPYQEMKFFIPQLIMIKLEVSEPIIVFNPSFDGCWELIRDSFLEIIKNSNGIPKLKYIPLKFSFTAAAADRQCVKAAEPGEPSMHAAATAMAELKGYNLLLGTVNAEEKLVSDFLIQTFKVFQKNQVGPCKYLNVYKKYVDLLDNTAEQNIAAFLKENHDIDDFVTKINAIKKRRNEIASMNITVPLAMFCLDATALNHDLCERAQNLKDHLIQFQVDVNRDTNTSICNQYSHIADKVSEVPANTKELVSLIEFLKKSSAVTVFKLRRQLRDASERLEFLMDYADLPYQIEDIFDNSRNLLLHKRDQAEMDLIKRCSEFELRLEGYHRELESFRKREVMTTEEMKHNVEKLNELSKNLNRAFAEFELINKEEELLEKEKSTYPLLQAMLKNKVPYEQLWSTAYEFSIKSEEWMNGPLFLLNAEQIAEEIGNMWRTTYKLIKTLSDVPAPRRLAENVKIKIDKFKQYIPILSISCNPGMKDRHWQQISEIVGYEIKPTETTCLSNMLEFGFGKFVEKLEPIGAAASKEYSLEKNLDRMKLDWVNVTFSFVKYRDTDTNILCAIDDIQMLLDDHVIKTQTMCGSPFIKPIEAECRKWEEKLIRIQDNLDAWLKCQATWLYLEPIFSSEDIIAQMPEEGRKFGIVDSYWKSLMSQAVKDNRILVAADQPRMAEKLQEANFLLEDIQKGLNDYLEKKRLFFPRFFFLSNDELLEILSETKDPLRVQPHLKKCFEGIAKLEFTDNLEIVGMISSEKETVPFIQKIYPANAKGMVEKWLQQVEQMMLASMREVIGLGIEAYVKVPRNHWVLQWPGQVVICVSSIFWTQEVSQALAENTLLDFLKKSNDQIAQIVQLVRGKLSSGARLTLGALTVIDVHARDVVAKLSEDRVSDLNDFQWISQLRYYWVAKDVQVQIITTEALYGYEYLGNSPRLVITPLTDRCYRTLMGALKLNLGGAPEGPAGTGKTETTKDLAKALAKQCVVFNCSDGLDYKAMGKFFKGLAQAGAWACFDEFNRIEVEVLSVVAQQILSIQQAIIRKLKTFIFEGTELSLNPTCAVFITMNPGYAGRAELPDNLKALFRTVAMMVPDYALIGEISLYSMGFLDSRSLAQKIVATYRLCSEQLSSQHHYDYGMRAVKSVLTAAGNLKLKYPEENESVLLLRALLDVNLAKFLAQDVPLFQGIISDLFPGVVLPKPDYEVFLKVLNDNIKKMKLQPVPWFIGKIIQIYEMMLVRHGYMIVGDPMGGKTSAYKVLAAALGDLHAANQMEEFAVEYKIINPKAITMGQLYGCFDQVSHEWMDGVLANAFREQASSLSDDRKWIIFDGPVDAIWIENMNTVLDDNKKLCLMSGEIIQMNSKMSLIFEPADLEQASPATVSRCGMIYMEPHQLGWKPLKDSYMDTLPSSLTKEHKELVNDMFMWLVQPCLEFGRLHCKFVVQTSPIHLAFSMMRLYSSLLDEIRAVEEEEMELGEGLSSQQIFLWLQGLFLFSLVWTVAGTINADSRKKFDVFFRNLIMGMDDNHPRPKSVKLTKNNIFPERGSIYDFYFIKQASGHWETWTQYITKEEEKVPAGAKVSELIIPTMETARQSFFLKTYLDHEIPMLFVGPTGTGKSAITNNFLLHLPKNTYLPNCINFSARTSANQTQDIIMSKLDRRRKGLFGPPIGKKAVVFVDDLNMPAKEVYGAQPPIELLRQWIDHGYWFDKKDTTRLDIVDMLLVTAMGPPGGGRNDITGRFTRHLNIISINAFEDDILTKIFSSIVDWHFGKGFDVMFLRYGKMLVQATKTIYRDAVENFLPTPSKSHYVFNLRDFSRVIQGVLLCPHTHLQDVEKCIRLWIHEVYRVFYDRLIDKEDRQVFFNMVKETTSNCFKQTIEKVLIHLSPTGKIVDDNIRSLFFGDYFKPESDQKIYDEITDLKQLTVVMEHYLEEFNNISKAPMSLVMFRFAIEHISRICRVLKQDKGHLLLVGIGGSGRQSAAKLSTFMNAYELYQIEITKNYAGNDWREDLKKIILQVGVATKSTVFLFADNQIKDESFVEDINMLLNTGDVPNIFPADEKADIVEKMQTAARTQGEKVEVTPLSMYNFFIERVINKISFSLAMSPIGDAFRNRLRMFPSLINCCTIDWFQSWPTDALELVANKFLEDVELDDNIRVEVVSMCKYFQESVKKLSLDYYNKLRRHNYVTPTSYLELILTFKTLLNSKRQEVAMMRNRYLTGLQKLDFAASQVAVMQRELTALQPQLILTSEETAKMMVKIEAETREADGKKLLVQADEKEANVAAAIAQGIKNECEGDLAEAMPALEAALAALDTLNPADISLVKSMQNPPGPVKLVMESICIMKGMKPERKPDPSGSGKMIEDYWGVSKKILGDLKFLESLKTYDKDNIPPLTMKRIRERFINHPEFQPAVIKNVSSACEGLCKWVRAMEVYDRVAKVVAPKRERLREAEGKLAAQMQKLNQKRAELKLVVDRLQALNDDFEEMNTKKKDLEENIEICSQKLVRAEKLISGLGGEKDRWTEAARQLGIRYTNLTGDVLLSSGTVAYLGAFTVDYRVQCQNQWLAECKDKVIPGFSDFSLSHTLGDPIKIRAWQIAGLPVDSFSIDNGIIVSNSRRWALMIDPHGQANKWIKNMEKANKLAVIKFSDSNYMRMLENALQLGTPVLIENIGEELDASIEPILLKATFKQQGVEYMRLGENIIEYSRDFKLYITTRLRNPHYLPEVAVKVCLLNFMITPLGLQDQLLGIVAAKEKPELEEKKNQLIVESAKNKKHLKEIEDKILEVLSMSKGNILEDETAIKVLSSSKVLSEEISEKQKVASMTETQIDETRMGYKPVAVHSATIFFCISDLANIEPMYQYSLTWFINLYMHSLTHSTKSEELNLRIKYIIDHFTLSIYNNVCRSLFEKDKLLFSLLLTIGIMKQKKEITEEVWYFLLTGGIALDNPYPNPAPQWLSEKAWAEIVRASALPKLHGLMEHLEQNLGEWKLIYDSAWPHEEQLPGSWKFSQGLEKMVILRCLRPDKMVPAVREFIAEHMGKLYIEAPTFDLQGSYNDSSCCAPLIFVLSPSADPMAGLLKFADDLGMGGTRTQTISLGQGQGPIAAKMINNAIKDGTWVVLQNCHLAASWMPTLEKICEEVIVPESTNARFRLWLTSYPSEKFPVSILQNGIKMTNEPPKGLRANLLRSYLNDPISDPVFFQSCAKAVMWQKMLFGLCFFHAVVQERRNFGPLGWNIPYEFNESDLRISMWQIQMFLNDYKEVPFDALTYLTGECNYGGRVTDDKDRRLLLSLLSMFYCKEIEEDYYSLAPGDTYYIPPHGSYQSYIDYLRNLPITAHPEVFGLHENADITKDNQETNQLFEGVLLTLPRQSGGSGKSPQEVVEELAQDILSKLPRDFDLEEVMKLYPVVYEESMNTVLRQELIRFNRLTKVVRRSLINLGRAIKGQVLMSSELEEVFNSMLVGKVPAMWAAKSYPSLKPLGGYVADLLARLTFFQEWIDKGPPVVFWISGFYFTQSFLTGVSQNYARKYTIPIDHIGFEFEVTPQETVMENNPEDGAYIKGLFLEGARWDRKTMQIGESLPKILYDPLPIIWLKPGESAMFLHQDIYVCPVYKTSARRGTLSTTGHSTNYVLSIELPTDMPQKHWINRGVASLCQLDN

SEQ ID NO: 44446 - protein, 753 aa, Homo sapiens
MGDMDCSSQKIAKSDSIHHMSHSQGQPELPPLPASANEEPSGLYQTVMSHSFYPPLMQRTSWTLAAPFKEQHHHRGPSDSIANNYSLMAQDLKLKDLLKVYQPATISVPRDRTGQGLPSSGNRSSSEPMRKKTKFSSRNKEDSTRIKLAFKTSIFSPMKKEVKTSLTFPGSRPMSPEQQLDVMLQQEMEMESKEKKPSESDLERYYYYLTNGIRKDMIAPEEGEVMVRISKLISNTLLTSPFLEPLMVVLVQEKENDYYCSLMKSIVDYILMDPMERKRLFIESIPRLFPQRVIRAPVPWHSVYRSAKKWNEEHLHTVNPMMLRLKELWFAEFRDLRFVRTAEILAGKLPLQPQEFWDVIQKHCLEAHQTLLNKWIPTCAQLFTSRKEHWIHFAPKSNYDSSRNIEEYFASVASFMSLQLRELVIKSLEDLVSLFMIHKDGNDFKEPYQEMKFFIPQLIMIKLEVSEPIIVFNPSFDGCWELIRDSFLEIIKNSNGIPKVESVLFPELKGYNLLLGTVNAEEKLVSDFLIQTFKVFQKNQVGPCKYLNVYKKYVDLLDNTAEQNIAAFLKENHDIDDFVTKINAIKKRRNEIASMNITVPLAMFCLDATALNHDLCERAQNLKDHLIQFQVDVNRDTNTSICNQYSHIADKVSEVPANTKELVSLIEFLKKSSAVTVFKLRRQLRDASERLEFLMDYADLPYEDIKLNSTLFLWPDQIEDIFDNSRNLLLHKRDQAEMDLIKRYRESLGLSWK

SEQ ID NO: 44447 - protein, 1887 aa, Homo sapiens
MGATGRLELTLAAPPHPGPAFQRSKARETQGEEEGSEMQIAKSDSIHHMSHSQGQPELPPLPASANEEPSGLYQTVMSHSFYPPLMQRTSWTLAAPFKEQHHHRGPSDSIANNYSLMAQDLKLKDLLKVYQPATISVPRDRTGQGLPSSGNRSSSEPMRKKTKFSSRNKEDSTRIKLAFKTSIFSPMKKEVKTSLTFPGSRPMSPEQQLDVMLQQEMEMESKEKKPSESDLERYYYYLTNGIRKDMIAPEEGEVMVRISKLISNTLLTSPFLEPLMVVLVQEKENDYYCSLMKSIVDYILMDPMERKRLFIESIPRLFPQRVIRAPVPWHSVYRSAKKWNEEHLHTVNPMMLRLKELWFAEFRDLRFVRTAEILAGKLPLQPQEFWDVIQKHCLEAHQTLLNKWIPTCAQLFTSRKEHWIHFAPKSNYDSSRNIEEYFASVASFMSLQLRELVIKSLEDLVSLFMIHKDGNDFKEPYQEMKFFIPQLIMIKLEVSEPIIVFNPSFDGCWELIRDSFLEIIKNSNGIPKLKYIPLKFSFTAAAADRQCVKAAEPGEPSMHAAATAMAELKGYNLLLGTVNAEEKLVSDFLIQTFKVFQKNQVGPCKYLNVYKKYVDLLDNTAEQNIAAFLKENHDIDDFVTKINAIKKRRNEIASMNITVPLAMFCLDATALNHDLCERAQNLKDHLIQFQVDVNRDTNTSICNQYSHIADKVSEVPANTKELVSLIEFLKKSSAVTVFKLRRQLRDASERLEFLMDYADLPYQIEDIFDNSRNLLLHKRDQAEMDLIKRCSEFELRLEGYHRELESFRKREVMTTEEMKHNVEKLNELSKNLNRAFAEFELINKEEELLEKEKSTYPLLQAMLKNKVPYEQLWSTAYEFSIKSEEWMNGPLFLLNAEQIAEEIGNMWRTTYKLIKTLSDVPAPRRLAENVKIKIDKFKQYIPILSISCNPGMKDRHWQQISEIVGYEIKPTETTCLSNMLEFGFGKFVEKLEPIGAAASKEYSLEKNLDRMKLDWVNVTFSFVKYRDTDTNILCAIDDIQMLLDDHVIKTQTMCGSPFIKPIEAECRKWEEKLIRIQDNLDAWLKCQATWLYLEPIFSSEDIIAQMPEEGRKFGIVDSYWKSLMSQAVKDNRILVAADQPRMAEKLQEANFLLEDIQKGLNDYLEKKRLFFPRFFFLSNDELLEILSETKDPLRVQPHLKKCFEGIAKLEFTDNLEIVGMISSEKETVPFIQKIYPANAKGMVEKWLQQVEQMMLASMREVIGLGIEAYVKVPRNHWVLQWPGQVVICVSSIFWTQEVSQALAENTLLDFLKKSNDQIAQIVQLVRGKLSSGARLTLGALTVIDVHARDVVAKLSEDRVSDLNDFQWISQLRYYWVAKDVQVQIITTEALYGYEYLGNSPRLVITPLTDRCYRTLMGALKLNLGGAPEGPAGTGKTETTKDLAKALAKQCVVFNCSDGLDYKAMGKFFKGLAQAGAWACFDEFNRIEVEVLSVVAQQILSIQQAIIRKLKTFIFEGTELSLNPTCAVFITMNPGYAGRAELPDNLKALFRTVAMMVPDYALIGEISLYSMGFLDSRSLAQKIVATYRLCSEQLSSQHHYDYGMRAVKSVLTAAGNLKLKYPEENESVLLLRALLDVNLAKFLAQDVPLFQGIISDLFPGVVLPKPDYEVFLKVLNDNIKKMKLQPVPWFIGKIIQIYEMMLVRHGYMIVGDPMGGKTSAYKVLAAALGDLHAANQMEEFAVEYKIINPKAITMGQLYGCFDQVSHEWMDGVLANAFREQASSLSDDRKWIIFDGPVDAIWIENMNTVLDDNKKLCLMSGEIIQMNSKMSLIFEPADLEQASPATVSRCGMIYMEPHQLGWKPLKDSYMDTLPSSLTKEHKELMKSGQ

SEQ ID NO: 44448 - protein, 153 aa, Homo sapiens
MLHMGLAHVKRMPRSSRLQCKEAQAFFSLQSGTYRVLSTPLKLGVWEEKKHWAALLQPVSLGRKWKKRPCNLDDYVWGQLKYIPLKFSFTAAAADRQCVKAAEPGEPSMHAAATAMAGTRAGTTFDELQCQEDMVCTRFENKAYVNTNDFTRQ

SEQ ID NO: 44449 - protein, 4624 aa, Homo sapiens
MFRIGRRQLWKHSVTRVLTQRLKGEKEAKRALLDARHNYLFAIVASCLDLNKTEVEDAILEGNQIERIDQLFAVGGLRHLMFYYQDVEEAETGQLGSLGGVNLVSGKIKKPKVFVTEGNDVALTGVCVFFIRTDPSKAITPDNIHQEVSFNMLDAADGGLLNSVRRLLSDIFIPALRATSHGWGELEGLQDAANIRQEFLSSLEGFVNVLSGAQESLKEKVNLRKCDILELKTLKEPTDYLTLANNPETLGKIEDCMKVWIKQTEQVLAENNQLLKEADDVGPRAELEHWKKRLSKFNYLLEQLKSPDVKAVLAVLAAAKSKLLKTWREMDIRITDATNEAKDNVKYLYTLEKCCDPLYSSDPLSMMDAIPTLINAIKMIYSISHYYNTSEKITSLFVKVTNQIISACKAYITNNGTASIWNQPQDVVEEKILSAIKLKQEYQLCFHKTKQKLKQNPNAKQFDFSEMYIFGKFETFHRRLAKIIDIFTTLKTYSVLQDSTIEGLEDMATKYQGIVATIKKKEYNFLDQRKMDFDQDYEEFCKQTNDLHNELRKFMDVTFAKIQNTNQALRMLKKFERLNIPNLGIDDKYQLILENYGADIDMISKLYTKQKYDPPLARNQPPIAGKILWARQLFHRIQQPMQLFQQHPAVLSTAEAKPIIRSYNRMAKVLLEFEVLFHRAWLRQIEEIHVGLEASLLVKAPGTGELFVNFDPQILILFRETECMAQMGLEVSPLATSLFQKRDRYKRNFSNMKMMLAEYQRVKSKIPAAIEQLIVPHLAKVDEALQPGLAALTWTSLNIEAYLENTFAKIKDLELLLDRVNDLIEFRIDAILEEMSSTPLCQLPQEEPLTCEEFLQMTKDLCVNGAQILHFKSSLVEEAVNELVNMLLDVEVLSEEESEKISNENSVNYKNESSAKREEGNFDTLTSSINARANALLLTTVTRKKKETEMLGEEARELLSHFNHQNMDALLKVTRNTLEAIRKRIHSSHTINFRDSNSASNMKQNSLPIFRASVTLAIPNIVMAPALEDVQQTLNKAVECIISVPKGVRQWSSELLSKKKIQERKMAALQSNEDSDSDVEMGENELQDTLEIASVNLPIPVQTKNYYKNVSENKEIVKLVSVLSTIINSTKKEVITSMDCFKRYNHIWQKGKEEAIKTFITQSPLLSEFESQILYFQNLEQEINAEPEYVCVGSIALYTADLKFALTAETKAWMVVIGRHCNKKYRSEMENIFMLIEEFNKKLNRPIKDLDDIRIAMAALKEIREEQISIDFQVGPIEESYALLNRYGLLIAREEIDKVDTLHYAWEKLLARAGEVQNKLVSLQPSFKKELISAVEVFLQDCHQFYLDYDLNGPMASGLKPQEASDRLIMFQNQFDNIYRKYITYTGGEELFGLPATQYPQLLEIKKQLNLLQKIYTLYNSVIETVNSYYDILWSEVNIEKINNELLEFQNRCRKLPRALKDWQAFLDLKKIIDDFSECCPLLEYMASKAMMERHWERITTLTGHSLDVGNESFKLRNIMEAPLLKYKEEIEDICISAVKERDIEQKLKQVINEWDNKTFTFGSFKTRGELLLRGDSTSEIIANMEDSLMLLGSLLSNRYNMPFKAQIQKWVQYLSNSTDIIESWMTVQNLWIYLEAVFVGGDIAKQLPKEAKRFSNIDKSWVKIMTRAHEVPSVVQCCVGDETLGQLLPHLLDQLEICQKSLTGYLEKKRLCFPRFFFVSDPALLEILGQASDSHTIQAHLLNVFDNIKSVKFHEKIYDRILSISSQEGETIELDKPVMAEGNVEVWLNSLLEESQSSLHLVIRQAAANIQETGFQLTEFLSSFPAQVGLLGIQMIWTRDSEEALRNAKFDKKIMQKTNQAFLELLNTLIDVTTRDLSSTERVKYETLITIHVHQRDIFDDLCHMHIKSPMDFEWLKQCRFYFNEDSDKMMIHITDVAFIYQNEFLGCTDRLVITPLTDRCYITLAQALGMSMGGAPAGPAGTGKTETTKDMGRCLGKYVVVFNCSDQMDFRGLGRIFKGLAQSGSWGCFDEFNRIDLPVLSVAAQQISIILTCKKEHKKSFIFTDGDNVTMNPEFGLFLTMNPGYAGRQELPENLKINFRSVAMMVPDRQIIIRVKLASCGFIDNVVLARKFFTLYKLCEEQLSKQVHYDFGLRNILSVLRTLGAAKRANPMDTESTIVMRVLRDMNLSKLIDEDEPLFLSLIEDLFPNILLDKAGYPELEAAISRQVEEAGLINHPPWKLKVIQLFETQRVRHGMMTLGPSGAGKTTCIHTLMRAMTDCGKPHREMRMNPKAITAPQMFGRLDVATNDWTDGIFSTLWRKTLRAKKGEHIWIILDGPVDAIWIENLNSVLDDNKTLTLANGDRIPMAPNCKIIFEPHNIDNASPATVSRNGMVFMSSSILDWSPILEGFLKKRSPQEAEILRQLYTESFPDLYRFCIQNLEYKMEVLEAFVITQSINMLQGLIPLKEQGGEVSQAHLGRLFVFALLWSAGAALELDGRRRLELWLRSRPTGTLELPPPAGPGDTAFDYYVAPDGTWTHWNTRTQEYLYPSDTTPEYGSILVPNVDNVRTDFLIQTIAKQGKAVLLIGEQGTAKTVIIKGFMSKYDPECHMIKSLNFSSATTPLMFQRTIESYVDKRMGTTYGPPAGKKMTVFIDDVNMPIINEWGDQVTNEIVRQLMEQNGFYNLEKPGEFTSIVDIQFLAAMIHPGGGRNDIPQRLKRQFSIFNCTLPSEASVDKIFGVIGVGHYCTQRGFSEEVRDSVTKLVPLTRRLWQMTKIKMLPTPAKFHYVFNLRDLSRVWQGMLNTTSEVIKEPNDLLKLWKHECKRVIADRFTVSSDVTWFDKALVSLVEEEFGEEKKLLVDCGIDTYFVDFLRDAPEAAGETSEEADAETPKIYEPIESFSHLKERLNMFLQLYNESIRGAGMDMVFFADAMVHLVKISRVIRTPQGNALLVGVGGSGKQSLTRLASFIAGYVSFQITLTRSYNTSNLMEDLKVLYRTAGQQGKGITFIFTDNEIKDESFLEYMNNVLSSGEVSNLFARDEIDEINSDLASVMKKEFPRCLPTNENLHDYFMSRVRQNLHIVLCFSPVGEKFRNRALKFPALISGCTIDWFSRWPKDALVAVSEHFLTSYDIDCSLEIKKEVVQCMGSFQDGVAEKCVDYFQRFRRSTHVTPKSYLSFIQGYKFIYGEKHVEVRTLANRMNTGLEKLKEASESVAALSKELEAKEKELQVANDKADMVLKEVTMKAQAAEKVKAEVQKVKDRAQAIVDSISKDKAIAEEKLEAAKPALEEAEAALQTIRPSDIATVRTLGRPPHLIMRIMDCVLLLFQRKVSAVKIDLEKSCTMPSWQESLKLMTAGNFLQNLQQFPKDTINEEVIEFLSPYFEMPDYNIETAKRVCGNVAGLCSWTKAMASFFSINKEVLPLKANLVVQENRHLLAMQDLQKAQAELDDKQAELDVVQAEYEQAMTEKQTLLEDAERCRHKMQTASTLISGLAGEKERWTEQSQEFAAQTKRLVGDVLLATAFLSYSGPFNQEFRDLLLNDWRKEMKARKIPFGKNLNLSEMLIDAPTISEWNLQGLPNDDLSIQNGIIVTKASRYPLLIDPQTQGKIWIKNKESRNELQITSLNHKYFRNHLEDSLSLGRPLLIEDVGEELDPALDNVLERNFIKTGSTFKVKVGDKEVDVLDGFRLYITTKLPNPAYTPEISARTSIIDFTVTMKGLEDQLLGRVILTEKQELEKERTHLMEDVTANKRRMKELEDNLLYRLTSTQGSLVEDESLIVVLSNTKRTAEEVTQKLEISAETEVQINSAREEYRPVATRGSILYFLITEMRLVNEMYQTSLRQFLGLFDLSLARSVKSPITSKRIANIIEHMTYEVYKYAARGLYEEHKFLFTLLLTLKIDIQRNRVKHEEFLTLIKGGASLDLKACPPKPSKWILDITWLNLVELSKLRQFSDVLDQISRNEKMWKIWFDKENPEEEPLPNAYDKSLDCFRRLLLIRSWCPDRTIAQARKYIVDSMGEKYAEGVILDLEKTWEESDPRTPLICLLSMGSDPTDSIIALGKRLKIETRYVSMGQGQEVHARKLLQQTMANGGWALLQNCHLGLDFMDELMDIIIETELVHDAFRLWMTTEAHKQFPITLLQMSIKFANDPPQGLRAGLKRTYSGVSQDLLDVSSGSQWKPMLYAVAFLHSTVQERRKFGALGWNIPYEFNQADFNATVQFIQNHLDDMDVKKGVSWTTIRYMIGEIQYGGRVTDDYDKRLLNTFAKVWFSENMFGPDFSFYQGYNIPKCSTVDNYLQYIQSLPAYDSPEVFGLHPNADITYQSKLAKDVLDTILGIQPKDTSGGGDETREAVVARLADDMLEKLPPDYVPFEVKERLQKMGPFQPMNIFLRQEIDRMQRVLSLVRSTLTELKLAIDGTIIMSENLRDALDCMFDARIPAWWKKASWISSTLGFWFTELIERNSQFTSWVFNGRPHCFWMTGFFNPQGFLTAMRQEITRANKGWALDNMVLCNEVTKWMKDDISAPPTEGVYVYGLYLEGAGWDKRNMKLIESKPKVLFELMPVIRIYAENNTLRDPRFYSCPIYKKPVRTDLNYIAAVDLRTAQTPEHWVLRGVALLCDVK

SEQ ID NO: 44450 - protein, 4158 aa, Homo sapiens
MTFRATDSEFDLTNIEEYAENSALSRLNNIKAKQRVSYVTSTENESDTQILTFRHITKAQEKTRKRQQPIKLEPLPVLKVYQDHKQPEYIHEQNRFQLMTAGIIKRPVSIAKKSFATSSTQFLEHQDAVKKMQIHRPYVEVFSPSPPKLPHTGIGKRGLFGTRSSAYPKYTFHDREEVVKANIRDPLQIIKIIRENEHLGFLYMIPAVPRSSIEYDTYNLKVVSYENINKNDYYTISQRAVTHIYNEDIEFIEIDRWEQEYLYHRELTKIPIFSLFRKWKAFSVWRKNVRSKKITGCQKSLQKNLFIVNPHLRPALLKINELCYHLSFMGLCYIEKCHTYTLQEFKAAQVIRLAEVTERLGEFRNEAKYVVRRACRFALRAAGFVPDDCAFGPFEDYHKVQSSGSFINTPHELPTYGDSEKMTYTEQASKRHYCMRLTCFIRLNDYLIENTMHILTVNAVNSLLNHLTDKLKRTPSADVIQKWITEEKPEVPDKKGTLMVEKQEEDESLIPMFLTELMLTVQSLLFEPSLEDFLDGILGAVNHCQNTVLSVPNLVPDSYFDAFTSPYINNKLEGKTCGTGPSLAAVFEDDKNFHTIISQIKETIQAAFESARIYAATFEKFQIFFKENESLDLQALKLQEPDINFFSEQLEKYHKQHKDAVALRPTRNVGLLLIDTRLLREKLIPSPLRCLEVLNFMLPRQSKKKVDAIIFEAQDAEYKLEFVPTTTTEYVHSLLFLDEIQERIESLEDEGNIVTQMYKLMEQYQVPTPPEDFAVFATMKPSIVAVRNAIDKSVGDRESSIKQFCVHLGSDLEELNNEVNEVKLQAQDPQILDISADQDKIRLILNNLQSVLADLQKRAFQYKSYQKNFKVEVSKFEALEEVSAELKLKQLLWDSFSEWDKLQQEWLKSKFDCLDPEVLNGQVSKYAKFVTQLEKGLPPNSVVPQLKYKVEKMKEKLPVIIDLRNPTLKARHWAAIEQTVDATLVDAEIPLTLERLSQLHVFDFGQEIQDISGQASGEAALEAILKKVEDSWKTTEFVILPHRDSKDVFILGGTDDIQVLLDDSTINVATLASSRYLGPLKTRVDEWQKQLALFNQTLEEWLTCQRNWLYLESIFNAPDIQRQLPAEAKMFLQVDKSWKEIMRKVNRLPNALRAATQPGLLETFQNNNALLDQIQKCLEAYLESKRVIFPRFYFLSNDELLEILAQTRNPQAVQPHLRKCFDSISKLEFALMPPAEGKIPGIDGEPEKVYTNDILAMLSPEGERVSLGKGLKARGNVEEWLGKVEEAMFTSLRRLCKAAIADYQGKLRTDWVVAGHPSQVILTVSQIMWCRDLTECLETEHSNHIQALKNFEKVNFERLNALAAIVQGSLPKLHRNILTALITIDVHARDIVTELVQSKVETVESFDWQRQLRYYWDIDLDNCVARMALSQYTYGYEYLGACPRLVITPLTDRCYLCLMGALQLDLGGAPAGPAGTGKTETTKDLAKALAIQCVVFNCSDGLDYKMMGRFFSGLAQSGAWCCFDEFNRIDIEVLSVIAQQLITIRNAKAAKLSRFMFEGREIKLVMTCAAFITMNPGYAGRTELPDNLKALFRPFAMMVPNYALIAEVILYSEGFESSKILARKMTQMYKLCSEQLSQQDHYDFGMRAVKSVLVMAGSLKRENPDLNEDVVLIRALQDSNLPKFLTDDALLFSGIISDLFPGVQIPEHDYGILQSTIVDVMNRQNLQPEMCMVRKVIQFYETMLVRHGVMLVGPTGGGKTTVYRILAETLGNLQKLGIENSFYQAVKTYVLNPKSITMGELYGEVNNLTLEWKDGLMALSVRAAVNDTSEDHKWIISDGPVDALWIENMNTVLDDNKMLCLANSERIKLTPQIHMLFEVQDLRVASPATVSRCGMVFVDPEELKWMPYVKTWMKGISKKLTEETQEYILNLFQRYVDEGLHFINKKCSQAIPQVDISKVTTLCCLLESLILGKDGVNLAMEQTKLNTILCQTFVFCYLWSLGGNLTENYYDSFDTFIRTQFDDNPDARLPNSGDLWSIHMDFDTKRLDPWERIIPTFKYNRDVPFFEMLVPTTDTVRYGYLMEKLLAVKHSVLFTGITGVGKSVIAKGLLNKIQESAGYVPVYLNFSAQTSSARTQEIIESKLERKRKNILGAPGNKRIVIFVDDLNMPRLDRYGSQPPIELLRQYQDFGGFYDRNKLFWKEIQDVTIISACAPPGGGRNPVTPRFIRHFSMLCLPMPSEHSLKQIFQAILNGFLSDFPPAVKQTASSIVEASVEIYNKMSVDLLPTPAKSHYVFNLRDLSKCVQGILQCDPGTIREEIQIFRLFCHECQRVFHDRLINNEDKHYFHVILTEMANKHFGIAIDLEYFLNKPIIFGDFIKFGADKADRIYDDMPDIEKTANVLQDYLDDYNLTNPKEVKLVFFQDAIEHVSRIARMIRQERGNALLVGVGGTGKQSLTRLAAHICGYKCLQIELSRGYNYDSFHEDLRKLYKMAGVEDKNMVFLFTDTQIVVEEFLEDINNILNSGEVPNLFEKDELEQVLAATRPRAKEVGISEGNRDEVFQYFISKVRQKLHIVLCMSPVGEAFRSRCRMFPSLVNCCTIDWFVQWPREALLSVSKTFFSQVDAGNEELKEKLPLMCVNVHLSVSSMAERYYNELRRRYYTTPTSYLELINLYLSMLSEKRKQIISARDRVKNGLTKLLETNILVDKMKLDLSALEPVLLAKSEDVEALMEKLAVDQESADQVRNTVQEDEATAKVKAEETQAIADDAQRDLDEALPALDAANKALDSLDKADISEIRVFTKPPDLVMTVMEAISILLNAKPDWPSAKQLLGDSNFLKRLLEYDKENIKPQILAKLQKYINNPDFVPEKVEKVSKACKSMCMWVRAMDLYSRVVKVVEPKRQKLRAAQAELDITMATLREKQALLRQVEDQIQALQDEYDKGVNEKESLAKTMALTKARLVRAGKLTAALEDEQVRWEESIQKFEEEISNITGNVFIAAACVAYYGAFTAQYRQSLIECWIQDCQSLEIPIDPSFSLINILGDPYEIRQWNTDGLPRDLISTENGILVTQGRRWPLMIDPQDQANRWIRNKESKSGLKIIKLTDSNFLRILENSIRLGLPVLLEELKETLDPALEPILLKQIFISGGRLLIRLGDSDIDYDKNFRFYMTTKMPNPHYLPEVCIKVTIINFTVTKSGLEDQLLSDVVRLEKPRLEEQRIKLIVRINTDKNQLKTIEEKILRMLFTSEGNILDNEELIDTLQDSKITSGAIKTRLEEAESTEQMINVAREKYRPVATQGSVMYFVIASLSEIDPMYQYSLKYFKQLFNTTIETSVKTENLQQRLDVLLEQTLLTAYVNVSRGLFEQHKLIYSFMLCVEMMRQQGTLSDAEWNFFLRGSAGLEKERPPKPEAPWLPTATWFACCDLEESFPVFHGLTQNILSHPISIRLGSFETYINPQKWEGYSKMKHEDKHMRQEKEAAHQDPWSAGLSSFHKLILIKCCKEEKVVFALTDFVIENLGKQFIETPPVDLPTLYQDMSCNTPLVFILSTGSDPMGAFQRFARESGYSERVQSISLGQGQGPIAEKMVKDAMKSGNWVFLQNCHLAVSWMLAMEELIKTFTDPDSAIKDTFRLFLSSMPSNTFPVTVLQNSVKVTNEPPKGLRANIRRAFTEMTPSFFEENILGKKWRQIIFGICFFHAIIQERKKFGPLGWNICYEFNDSDRECALLNLKLYCKEGKIPWDALIYITGEITYGGRVTDSWDQRCLRTILKRFFSPETLEEDYKYSESGIYFAPMADSLQEFKDYIENLPLIDDPEIFGMHENANLVFQYKETSTLINTILEVQPRSSTGGEGKSNDEIVQELVASVQTRVPEKLEMEGASESLFVKDLQGRLNSLTTVLGQEVDRFNNLLKLIHTSLETLNKAIAGFVVMSEEMEKVYNSFLNNQVPALWSNTAYPSLKPLGSWVKDLILRTSFVDLWLKRGQPKSYWISGFFFPQGFLTGTLQNHARKYNLPIDELSFKYSVIPTYRDQAAVIEAAKTVQFGQELPMDMELPSPEDGVLVHGMFMDASRWDDKEMVIEDALPGQMNPVLPVVHFEPQQNYKPSPTLYHCPLYKTGARAGTLSTTGHSTNFVVTVLLPSKRSKDYWIAKGSALLCQLSE

SEQ ID NO: 44451 - protein, 4158 aa, Homo sapiens; identical to SEQ ID NO: 44450

SEQ ID NO: 44452 - protein, 2530 aa, Homo sapiens
MTFRATDSEFDLTNIEEYAENSALSRLNNIKAKQRVSYVTSTENESDTQILTFRHITKAQEKTRKRQQPIKLEPLPVLKVYQDHKQPEYIHEQNRFQLMTAGIIKRPVSIAKKSFATSSTQFLEHQDAVKKMQIHRPYVEVFSPSPPKLPHTGIGKRGLFGTRSSAYPKYTFHDREEVVKANIRDPLQIIKIIRENEHLGFLYMIPAVPRSSIEYDTYNLKVVSYENINKNDYYTISQRAVTHIYNEDIEFIEIDRWEQEYLYHRELTKIPIFSLFRKWKAFSVWRKNVRSKKITGCQKSLQKNLFIVNPHLRPALLKINELCYHLSFMGLCYIEKCHTYTLQEFKAAQVIRLAEVTERLGEFRNEAKYVVRRACRFALRAAGFVPDDCAFGPFEDYHKVQSSGSFINTPHELPTYGDSEKMTYTEQASKRHYCMRLTCFIRLNDYLIENTMHILTVNAVNSLLNHLTDKLKRTPSADVIQKWITEEKPEVPDKKGTLMVEKQEEDESLIPMFLTELMLTVQSLLFEPSLEDFLDGILGAVNHCQNTVLSVPNLVPDSYFDAFTSPYINNKLEGKTCGTGPSLAAVFEDDKNFHTIISQIKETIQAAFESARIYAATFEKFQIFFKENESLDLQALKLQEPDINFFSEQLEKYHKQHKDAVALRPTRNVGLLLIDTRLLREKLIPSPLRCLEVLNFMLPRQSKKKVDAIIFEAQDAEYKLEFVPTTTTEYVHSLLFLDEIQERIESLEDEGNIVTQMYKLMEQYQVPTPPEDFAVFATMKPSIVAVRNAIDKSVGDRESSIKQFCVHLGSDLEELNNEVNEVKLQAQDPQILDISADQDKIRLILNNLQSVLADLQKRAFQYKSYQKNFKVEVSKFEALEEVSAELKLKQLLWDSFSEWDKLQQEWLKSKFDCLDPEVLNGQVSKYAKFVTQLEKGLPPNSVVPQLKYKVEKMKEKLPVIIDLRNPTLKARHWAAIEQTVDATLVDAEIPLTLERLSQLHVFDFGQEIQDISGQASGEAALEAILKKVEDSWKTTEFVILPHRDSKDVFILGGTDDIQVLLDDSTINVATLASSRYLGPLKTRVDEWQKQLALFNQTLEEWLTCQRNWLYLESIFNAPDIQRQLPAEAKMFLQVDKSWKEIMRKVNRLPNALRAATQPGLLETFQNNNALLDQIQKCLEAYLESKRVIFPRFYFLSNDELLEILAQTRNPQAVQPHLRKCFDSISKLEFALMPPAEGKIPGIDGEPEKVYTNDILAMLSPEGERVSLGKGLKARGNVEEWLGKVEEAMFTSLRRLCKAAIADYQGKLRTDWVVAGHPSQVILTVSQIMWCRDLTECLETEHSNHIQALKNFEKVNFERLNALAAIVQGSLPKLHRNILTALITIDVHARDIVTELVQSKVETVESFDWQRQLRYYWDIDLDNCVARMALSQYTYGYEYLGACPRLVITPLTDRCYLCLMGALQLDLGGAPAGPAGTGKTETTKDLAKALAIQCVVFNCSDGLDYKMMGRFFSGLAQSGAWCCFDEFNRIDIEVLSVIAQQLITIRNAKAAKLSRFMFEGREIKLVMTCAAFITMNPGYAGRTELPDNLKALFRPFAMMVPNYALIAEVILYSEGFESSKILARKMTQMYKLCSEQLSQQDHYDFGMRAVKSVLVMAGSLKRENPDLNEDVVLIRALQDSNLPKFLTDDALLFSGIISDLFPGVQIPEHDYGILQSTIVDVMNRQNLQPEMCMVRKVIQFYETMLVRHGVMLVGPTGGGKTTVYRILAETLGNLQKLGIENSFYQAVKTYVLNPKSITMGELYGEVNNLTLEWKDGLMALSVRAAVNDTSEDHKWIISDGPVDALWIENMNTVLDDNKMLCLANSERIKLTPQIHMLFEVQDLRVASPATVSRCGMVFVDPEELKWMPYVKTWMKGISKKLTEETQEYILNLFQRYVDEGLHFINKKCSQAIPQVDISKVTTLCCLLESLILGKDGVNLAMEQTKLNTILCQTFVFCYLWSLGGNLTENYYDSFDTFIRTQFDDNPDARLPNSGDLWSIHMDFDTKRLDPWERIIPTFKYNRDVPFFEMLVPTTDTVRYGYLMEKLLAVKHSVLFTGITGVGKSVIAKGLLNKIQESAGYVPVYLNFSAQTSSARTQEIIESKLERKRKNILGAPGNKRIVIFVDDLNMPRLDRYGSQPPIELLRQYQDFGGFYDRNKLFWKEIQDVTIISACAPPGGGRNPVTPRFIRHFSMLCLPMPSEHSLKQIFQAILNGFLSDFPPAVKQTASSIVEASVEIYNKMSVDLLPTPAKSHYVFNLRDLSKCVQDKHFGIAIDLEYFLNKPIIFGDFIKFGADKADRIYDDMPDIEKTANVLQDYLDDYNLTNPKEVKLVFFQDAIEHVSRIARMIRQERGNALLVGVGGTGKQSLTRLAAHICGYKCLQIELSRGYNYDSFHEDLRKLYKMAGVEDKNMVFLFTDTQIVVEEFLEDINNILNSGEVPNLFEKDELEQVLAATRPRAKEVGISEGNRDEVGCARVVMWLYHKNVSSPFI

SEQ ID NO: 44453 - protein, 4695 aa, Homo sapiens
GAEAPPSTEEAAPPRSEEEEAPRPPTVEAPAEDGFSPSAEDAVSSVVDYRDLIPSEEGIVLPDDHEADLNRVRQRLAPRPVQSVISEVLSLPSSRRSSRYRRSMSGLPNLQETLKERQARFREARESRRLKIDPSYKYIFEILAENLGLDIVTVEELILDCPSLEAFTNFFAKDGCKTLKFLYQEGDVPGIECGRTIAGATKGAKMMKLYIDNAAPDKLKGLCIFFVRCRNDVAINVKTIQEEALFTVLDASKGLLNGIRDMLANIFLPAVLATNNWGALNQSKQGESEKHIFTETINRYLSFLDGARISIEGTVKLKTIDNVNFSKLHTFEEVTAAASNSETVHQLEEVLMVWYKQIEQVLIESEQMRKEAGDSGPLTELEHWKRMSAKFNYIIEQIKGPSCKAVINVLNVAHSKLLKNWRDLDARITDTANESKDNVRYLYTLEKVCQPLYNHDLVSMAHGIQNLINAIRMIHGVSRYYNTSERMTSLFIKVTNQMVTACKAYITDGGLNHVWDQETPVVLKKIQDCIFLFKEYQASFHKTRKLISESSGEKSFEVSEMYIFGKFEAFCKRLEKITEMITVVQTYSTLSNSTIEGIDIMAIKFRNIYQGVKKKQYDILDPRRTEFDTDFLDFMTKINGLEVQIQAFMNSSFGKILSSQQALQLLQRFQKLNIPCLGLEINHTIERILQYYVAELDATKKLYHSQKDDPPLARNMPPIAGKILWVRQLYRRISEPINYFFKNSDILSSPDGKAVIRQYNKISYVLVEFEVVYHTAWIREISQLHYALQATLFVRHPETGKLLVNFDPKILEVVRETKCMIKMKLDVPEQAKRLLKLESKLKADKLYLQGLLQYYDELCQEVPSVFVNLMTPKMKKVESVLRQGLTVLTWSSLTLESFFQEVELVLDMFNQLLKKISDLCEMHIDTVLKEIAKTVLISLPESGATKVEDMLTLNETYTKEWADILNHKSKHVEEAVRELISIFEQIYEVKYTGKVGKQSEQRKHVVFGSETGEGENNDYEANIVNEFDTHDKEDEFKKECKEVFAFFSHQLLDSLQKATRLSLDTMKRRIFVASLYGRKQSEDIISFIKSEVHLAIPNVVMIPSLDDIQQAINRMIQLTLEVSRGVAHWGQQQIRPIKSVIPSPTTTDVTHQNTGKLLKKEERSFEEAIPARKLKNFYPGVAEHKDISKLVLLLSSSVNSLRKAAHEALQDFQKYKTLWTEDRDVKVKEFLANNPSLTEIRSEILHYATFEQEIDELKPIIVVGALELHTEPMKLALSIEAKAWKMLLCRYLNEEYKKKMSYMIAFINEYLKKLSRPIRDLDDVRFAMEALSCIRDNEIQMDMTLGPIEEAYAILNRFEVEVTKEESEAVDTLRYSFNKLQSKAVSVQEDLVQVQPKFKSNLLESVEVFREDVINFAEAYELEGPMVPNIPPQEASNRLQIFQASFDDLWRKFVTYSSGEQLFGLPVTDYEVLHKTRKELNLLQKLYGLYDTVMSSISGYYEILWGDVDIEKINAELLEFQNRCRKLPKGLKDWQAFLDLKKRIDDFSESCPLLEMMTNKAMKQRHWDRISELTGTPFDVESDSFCLRNIMEAPLLKHKDDIEDICISAIKEKDIEAKLTQVIENWTNQNLSFAAFKGKGELLLKGTESGEIITLMEDSLMVLGSLLSNRYNAPFKKNIQNWVYKLSTSSDIIEEWLVVQNLWVYLEAVFVGGDIAKQLPQEAKRFQNIDKSWIKIMQRAHENPNVINCCVGDETMGQLLPHLHEQLEVCQKSLTGYLEKKRLLFPRFFFVSDPVLLEILGQASDSHTIQPHLPAVSDNINEVTFHAKDYDRIMAVISREGEKIVLDNSVMAKGPVEIWLLDLLKMQMSSLHNIIRSAFYQISDSGFQLLPFLSHFPAQVGLLGIQMLWTHDSEEALRNAKDDRKIMQVTNQKFLDILNTLISQTTHDLSKFDRVKFETLITIHVHQRDIFDDLVKMHIKSPTDFEWLKQSRFYFKEDLDQTVVSITDVDFIYQNEFLGCTDRLVITPLTDRCYITLAQALGMNMGGAPAGPAGTGKTETTKDMGRCLGKYVVVFNCSDQMDFRGLGRIFKGLAQSGSWGCFDEFNRIELPVLSVAAQQIYIVLTARKERKKQFIFSDGDCVDLNPEFGIFLTMNPGYAGRQELPENLKIQFRTVAMMVPDRQIIMRVKLASCGFLENVILAQKFYVLYKLCEEQLTKQVHYDFGLRNILSVLRTLGSQKRARPEDSELSIVMRGLRDMNLSKLVDEDEPLFLSLINDLFPGLQLDSNTYAELQNAVAHQVQIEGLINHPPWNLKLVQLYETSLVRHGLMTLGPSGSGKTTVITILMKAQTECGRPHREMRMNPKAITAPQMFGRLDTATNDWTDGIFSTLWRKTLKAKKGENIFLILDGPVDAIWIENLNSVLDDNKTLTLANGDRIPMAPSCKLLFEVHNIENASPATVSRMGMVYISSSALSWRPILQAWLKKRTAQEAAVFLTLYEKVFEDTYTYMKLNLNPKMQLLECNYIVQSLNLLEGLIPSKEEGGVSCVEHLHKLFVFGLMWSLGALLELESREKLEAFLRQHESKLDLPEIPKGSNQTMYEFYVTDYGDWEHWNKKLQPYYYPTDSIPEYSSILVPNVDNIRTNFLIDTIAKQHKAVLLTGEQGTAKTVMVKAYLKKYDPEVQLSKSLNFSSATEPMMFQRTIESYVDKRIGSTYGPPGGRKMTVFIDDINMPVINEWGDQITNEIVRQMMEMEGMYSLDKPGDFTTIVDVQLIAAMIHPGGGRNDIPQRLKRQFTVFNCTLPSNASIDKIFGIIGCGYFDPCRSFKPQICEMIVNLVSVGRVLWQWTKVKMLPTPSKFHYIFNLRDLSRIWQGMLTIKAEECASIPTLLSLFKHECSRVIADRFITPEDEQWFNAHLTRAVEENIGSDAASCILPEPYFVDFLREMPEPTGDEPEDSVFEVPKIYELMPSFDFLAEKLQFYQRQFNEIIRGTSLDLVFFKDAMTHLIKISRIIRTSCGNALLVGVGGSGKQSLSRLASFIAGYQIFQITLTRSYNVTNLTDDLKALYKVAGADGKGITFIFTDSEIKDEAFLEYLNNLLSSGEISNLFARDEMDEITQGLISVMKRELPRHPPTFDNLYEYFISRSRKNLHVVLCFSPVGEKFRARSLKFPGLISGCTMDWFSRWPREALIAVASYFLSDYNIVCSSEIKRQVVETMGLFHDMVSESCESYFQRYRRRAHVTPKSYLSFINGYKNIYAEKVKFINEQAERMNIGLDKLMEASESVAKLSQDLAVKEKELAVASIKADEVLAEVTVSAQASAKIKNEVQEVKDKAQKIVDEIDSEKVKAESKLEAAKPALEEAEAALNTIKPNDIATVRKLAKPPHLIMRIMDCVLLLFQKKIDPVTMDPEKSCCKPSWGESLKLMSATGFLWSLQQFPKDTINEETVELLQPYFNMDDYTFESAKKVCGNVAGLLSWTLAMAIFYGINREVLPLKANLAKQEGRLAVANAELGKAQALLDEKQAELDKVQAKFDAAMNEKMDLLNDADTCRKKMQAASTLIDGLSGEKIRWTQQSKEFKAQINRLVGDILLCTGFLSYLGPFNQIFRNYLLKDQWEMELRARKIPFTENLNLISMLVDPPTIGEWGLQGLPGDDLSIQNGIIVTKATRYPLLIDPQTQGKTWIKSKEKENDLQVTSLNHKYFRTHLEDSLSLGRPLLIEDIHEELDPALDNVLEKNFIKSGTTFKVKVGDKECDIMDTFKLYITTKLPNPAFTPEINAKTSVIDFTVTMKGLENQLLRRVILTEKQELEAERVKLLEDVTFNKRKMKELEDNLLYKLSATKGSLVDDESLIGVLRTTKQTAAEVSEKLHVAAETEIKINAAQEEFRPAATRGSILYFLITEMSMVNIMYQTSLAQFLKLFDQSMARSEKSPLPQKRITNIIEYLTYEVFTYSVRGLYENHKFLFVLLMTLKIDLQRGTVKHREFQALIKGGAALDLKACPPKPYRWILDMTWLNLVELSKLPQFAEIMNQISRNEKGWKSWFDKDAPEEEIIPDGYNDSLDTCHKLLLIRSWCPDRTVFQARKYIADSLEEKYTEPVILNLEKTWEESDTRTPLICFLSMGSDPTNQIDALAKKLKLECRTISMGQGQEVHARKLIQMSMQQGGWVLLQNCHLGLEFMEELLETLITTEASDDSFRVWITTEPHDRFPITLLQTSLKFTNEPPQGVRAGLKRTFAGINQDLLDISNLPMWKPMLYTVAFLHSTVQERRKFGPLGWNIPYEFNSADFSASVQFIQNHLDECDIKKGVSWNTVRYMIGEVQYGGRVTDDFDKRLLNCFARVWFSEKMFEPSFCFYTGYKIPLCKTLDQYFEYIQSLPSLDNPEVFGLHPNADITYQSNTASAVLETITNIQPKESGGGVGETREAIVYRLSEDMLSKLPPDYIPHEVKSRLIKMGHLNSMNIFLRQEIDRMQRVISILRSSLSDLKLAIEGTIIMSENLRDALDNMYDARIPQLWKRVSWDSSTLGFWFTELLERNAQFSTWIFEGRPNVFWMTGFFNPQGFLTAMRQEVTRAHKGWALDTVTIHNEVLRQTKEEITSPPGEGVYIYGLYMDGAAWDRRNGKLMESTPKVLFTQLPVLHIFAINSTAPKDPKLYVCPIYKKPRRTDLTFITVVYLRTVLSPDHWILRGVALLCDIK

SEQ ID NO: 44454 - protein, 4490 aa, Homo sapiens
MMKLYIDNAAPDKLKGLCIFFVRCRNDVAINVKTIQEEALFTVLDASKGLLNGIRDMLANIFLPAVLATNNWGALNQSKQGESEKHIFTETINRYLSFLDGARISIEGTVKLKTIDNVNFSKLHTFEEVTAAASNSETVHQLEEVLMVWYKQIEQVLIESEQMRKEAGDSGPLTELEHWKRMSAKFNYIIEQIKGPSCKAVINVLNVAHSKLLKNWRDLDARITDTANESKDNVRYLYTLEKVCQPLYNHDLVSMAHGIQNLINAIRMIHGVSRYYNTSERMTSLFIKVTNQMVTACKAYITDGGLNHVWDQETPVVLKKIQDCIFLFKEYQASFHKTRKLISESSGEKSFEVSEMYIFGKFEAFCKRLEKITEMITVVQTYSTLSNSTIEGIDIMAIKFRNIYQGVKKKQYDILDPRRTEFDTDFLDFMTKINGLEVQIQAFMNSSFGKILSSQQALQLLQRFQKLNIPCLGLEINHTIERILQYYVAELDATKKLYHSQKDDPPLARNMPPIAGKILWVRQLYRRISEPINYFFKNSDILSSPDGKAVIRQYNKISYVLVEFEVVYHTAWIREISQLHYALQATLFVRHPETGKLLVNFDPKILEVVRETKCMIKMKLDVPEQAKRLLKLESKLKADKLYLQGLLQYYDELCQEVPSVFVNLMTPKMKKVESVLRQGLTVLTWSSLTLESFFQEVELVLDMFNQLLKKISDLCEMHIDTVLKEIAKTVLISLPESGATKVEDMLTLNETYTKEWADILNHKSKHVEEAVRELISIFEQIYEVKYTGKVGKQSEQRKHVVFGSETGEGENNDYEANIVNEFDTHDKEDEFKKECKEVFAFFSHQLLDSLQKATRLSLDTMKRRIFVASLYGRKQSEDIISFIKSEVHLAIPNVVMIPSLDDIQQAINRMIQLTLEVSRGVAHWGQQQIRPIKSVIPSPTTTDVTHQNTGKLLKKEERSFEEAIPARKLKNFYPGVAEHKDISKLVLLLSSSVNSLRKAAHEALQDFQKYKTLWTEDRDVKVKEFLANNPSLTEIRSEILHYATFEQEIDELKPIIVVGALELHTEPMKLALSIEAKAWKMLLCRYLNEEYKKKMSYMIAFINEYLKKLSRPIRDLDDVRFAMEALSCIRDNEIQMDMTLGPIEEAYAILNRFEVEVTKEESEAVDTLRYSFNKLQSKAVSVQEDLVQVQPKFKSNLLESVEVFREDVINFAEAYELEGPMVPNIPPQEASNRLQIFQASFDDLWRKFVTYSSGEQLFGLPVTDYEVLHKTRKELNLLQKLYGLYDTVMSSISGYYEILWGDVDIEKINAELLEFQNRCRKLPKGLKDWQAFLDLKKRIDDFSESCPLLEMMTNKAMKQRHWDRISELTGTPFDVESDSFCLRNIMEAPLLKHKDDIEDICISAIKEKDIEAKLTQVIENWTNQNLSFAAFKGKGELLLKGTESGEIITLMEDSLMVLGSLLSNRYNAPFKKNIQNWVYKLSTSSDIIEEWLVVQNLWVYLEAVFVGGDIAKQLPQEAKRFQNIDKSWIKIMQRAHENPNVINCCVGDETMGQLLPHLHEQLEVCQKSLTGYLEKKRLLFPRFFFVSDPVLLEILGQASDSHTIQPHLPAVSDNINEVTFHAKDYDRIMAVISREGEKIVLDNSVMAKGPVEIWLLDLLKMQMSSLHNIIRSAFYQISDSGFQLLPFLSHFPAQVGLLGIQMLWTHDSEEALRNAKDDRKIMQVTNQKFLDILNTLISQTTHDLSKFDRVKFETLITIHVHQRDIFDDLVKMHIKSPTDFEWLKQSRFYFKEDLDQTVVSITDVDFIYQNEFLGCTDRLVITPLTDRCYITLAQALGMNMGGAPAGPAGTGKTETTKDMGRCLGKYVVVFNCSDQMDFRGLGRIFKGLAQSGSWGCFDEFNRIELPVLSVAAQQIYIVLTARKERKKQFIFSDGDCVDLNPEFGIFLTMNPGYAGRQELPENLKIQFRTVAMMVPDRQIIMRVKLASCGFLENVILAQKFYVLYKLCEEQLTKQVHYDFGLRNILSVLRTLGSQKRARPEDSELSIVMRGLRDMNLSKLVDEDEPLFLSLINDLFPGLQLDSNTYAELQNAVAHQVQIEGLINHPPWNLKLVQLYETSLVRHGLMTLGPSGSGKTTVITILMKAQTECGRPHREMRMNPKAITAPQMFGRLDTATNDWTDGIFSTLWRKTLKAKKGENIFLILDGPVDAIWIENLNSVLDDNKTLTLANGDRIPMAPSCKLLFEVHNIENASPATVSRMGMVYISSSALSWRPILQAWLKKRTAQEAAVFLTLYEKVFEDTYTYMKLNLNPKMQLLECNYIVQSLNLLEGLIPSKEEGGVSCVEHLHKLFVFGLMWSLGALLELESREKLEAFLRQHESKLDLPEIPKGSNQTMYEFYVTDYGDWEHWNKKLQPYYYPTDSIPEYSSILVPNVDNIRTNFLIDTIAKQHKAVLLTGEQGTAKTVMVKAYLKKYDPEVQLSKSLNFSSATEPMMFQRTIESYVDKRIGSTYGPPGGRKMTVFIDDINMPVINEWGDQITNEIVRQMMEMEGMYSLDKPGDFTTIVDVQLIAAMIHPGGGRNDIPQRLKRQFTVFNCTLPSNASIDKIFGIIGCGYFDPCRSFKPQICEMIVNLVSVGRVLWQWTKVKMLPTPSKFHYIFNLRDLSRIWQGMLTIKAEECASIPTLLSLFKHECSRVIADRFITPEDEQWFNAHLTRAVEENIGSDAASCILPEPYFVDFLREMPEPTGDEPEDSVFEVPKIYELMPSFDFLAEKLQFYQRQFNEIIRGTSLDLVFFKDAMTHLIKISRIIRTSCGNALLVGVGGSGKQSLSRLASFIAGYQIFQITLTRSYNVTNLTDDLKALYKVAGADGKGITFIFTDSEIKDEAFLEYLNNLLSSGEISNLFARDEMDEITQGLISVMKRELPRHPPTFDNLYEYFISRSRKNLHVVLCFSPVGEKFRARSLKFPGLISGCTMDWFSRWPREALIAVASYFLSDYNIVCSSEIKRQVVETMGLFHDMVSESCESYFQRYRRRAHVTPKSYLSFINGYKNIYAEKVKFINEQAERMNIGLDKLMEASESVAKLSQDLAVKEKELAVASIKADEVLAEVTVSAQASAKIKNEVQEVKDKAQKIVDEIDSEKVKAESKLEAAKPALEEAEAALNTIKPNDIATVRKLAKPPHLIMRIMDCVLLLFQKKIDPVTMDPEKSCCKPSWGESLKLMSATGFLWSLQQFPKDTINEETVELLQPYFNMDDYTFESAKKVCGNVAGLLSWTLAMAIFYGINREVLPLKANLAKQEGRLAVANAELGKAQALLDEKQAELDKVQAKFDAAMNEKMDLLNDADTCRKKMQAASTLIDGLSGEKIRWTQQSKEFKAQINRLVGDILLCTGFLSYLGPFNQIFRNYLLKDQWEMELRARKIPFTENLNLISMLVDPPTIGEWGLQGLPGDDLSIQNGIIVTKATRYPLLIDPQTQGKTWIKSKEKENDLQVTSLNHKYFRTHLEDSLSLGRPLLIEDIHEELDPALDNVLEKNFIKSGTTFKVKVGDKECDIMDTFKLYITTKLPNPAFTPEINAKTSVIDFTVTMKGLENQLLRRVILTEKQELEAERVKLLEDVTFNKRKMKELEDNLLYKLSATKGSLVDDESLIGVLRTTKQTAAEVSEKLHVAAETEIKINAAQEEFRPAATRGSILYFLITEMSMVNIMYQTSLAQFLKLFDQSMARSEKSPLPQKRITNIIEYLTYEVFTYSVRGLYENHKFLFVLLMTLKIDLQRGTVKHREFQALIKGGAALDLKACPPKPYRWILDMTWLNLVELSKLPQFAEIMNQISRNEKGWKSWFDKDAPEEEIIPDGYNDSLDTCHKLLLIRSWCPDRTVFQARKYIADSLEEKYTEPVILNLEKTWEESDTRTPLICFLSMGSDPTNQIDALAKKLKLECRTISMGQGQEVHARKLIQMSMQQGGWVLLQNCHLGLEFMEELLETLITTEASDDSFRVWITTEPHDRFPITLLQTSLKFTNEPPQGVRAGLKRTFAGINQDLLDISNLPMWKPMLYTVAFLHSTVQERRKFGPLGWNIPYEFNSADFSASVQFIQNHLDECDIKKGVSWNTVRYMIGEVQYGGRVTDDFDKRLLNCFARVWFSEKMFEPSFCFYTGYKIPLCKTLDQYFEYIQSLPSLDNPEVFGLHPNADITYQSNTASAVLETITNIQPKESGGGVGETREAIVYRLSEDMLSKLPPDYIPHEVKSRLIKMGHLNSMNIFLRQEIDRMQRVISILRSSLSDLKLAIEGTIIMSENLRDALDNMYDARIPQLWKRVSWDSSTLGFWFTELLERNAQFSTWIFEGRPNVFWMTGFFNPQGFLTAMRQEVTRAHKGWALDTVTIHNEVLRQTKEEITSPPGEGVYIYGLYMDGAAWDRRNGKLMESTPKVLFTQLPVLHIFAINSTAPKDPKLYVCPIYKKPRRTDLTFITVVYLRTVLSPDHWILRGVALLCDIK

SEQ ID NO: 44455 - protein, 4454 aa, Homo sapiens
MMKLYIDNAAPDKLKGLCIFFVRCRNDVAINVKTIQEEALFTVLDASKGLLNGIRDMLANIFLPAVLATNNWGALNQSKQGESEKHIFTETINRYLSFLDGARISIEGTVKLKTIDNVNFSKLHTFEEVTAAASNSETVHQLEEVLMVWYKQIEQVLIESEQMRKEAGDSGPLTELEHWKRMSAKFNYIIEQIKGPSCKAVINVLNVAHSKLLKNWRDLDARITDTANESKDNVRYLYTLEKVCQPLYNHDLVSMAHGIQNLINAIRMIHGVSRYYNTSERMTSLFIKVTNQMVTACKAYITDGGLNHVWDQETPVVLKKIQDCIFLFKEYQASFHKTRKLISESSGEKSFEVSEMYIFGKFEAFCKRLEKITEMITVVQTYSTLSNSTIEGIDIMAIKFRNIYQGVKKKQYDILDPRRTEFDTDFLDFMTKINGLEVQIQAFMNSSFGKILSSQQALQLLQRFQKLNIPCLGLEINHTIERILQYYVAELDATKKLYHSQKDDPPLARNMPPIAGKILWVRQLYRRISEPINYFFKNSDILSSPDGKAVIRQYNKISYVLVEFEVVYHTAWIREISQLHYALQATLFVRHPETGKLLVNFDPKILEVVRETKCMIKMKLDVPEQAKRLLKLESKLKADKLYLQGLLQYYDELCQEVPSVFVNLMTPKMKKVESVLRQGLTVLTWSSLTLESFFQEVELVLDMFNQLLKKISDLCEMHIDTVLKEIAKTVLISLPESGATKVEDMLTLNETYTKEWADILNHKSKHVEEAVRELISIFEQIYEVKYTGKVGKQSEQRKHVVFGSETGEGENNDYEANIVNEFDTHDKEDEFKKECKEVFAFFSHQLLDSLQKATRLSLDTMKRRIFVASLYGRKQSEDIISFIKSEVHLAIPNVVMIPSLDDIQQAINRMIQLTLEVSRGVAHWGQQQIRPIKSVIPSPTTTDVTHQNTGKLLKKEERSFEEAIPARKLKNFYPGVAEHKDISKLVLLLSSSVNSLRKAAHEALQDFQKYKTLWTEDRDVKVKEFLANNPSLTEIRSEILHYATFEQEIDELKPIIVVGALELHTEPMKLALSIEAKAWKMLLCRYLNEEYKKKMSYMIAFINEYLKKLSRPIRDLDDVRFAMEALSCIRDNEIQMDMTLGPIEEAYAILNRFEVEVTKEESEAVDTLRYSFNKLQSKAVSVQEDLVQVQPKFKSNLLESVEVFREDVINFAEAYELEGPMVPNIPPQEASNRLQIFQASFDDLWRKFVTYSSGEQLFGLPVTDYEVLHKTRKELNLLQKLYGLYDTVMSSISGYYEILWGDVDIEKINAELLEFQNRCRKLPKGLKDWQAFLDLKKRIDDFSESCPLLEMMTNKAMKQRHWDRISELTGTPFDVESDSFCLRNIMEAPLLKHKDDIEDICISAIKEKDIEAKLTQVIENWTNQNLSFAAFKGKGELLLKGTESGEIITLMEDSLMVLGSLLSNRYNAPFKKNIQNWVYKLSTSSDIIEEWLVVQNLWVYLEAVFVGGDIAKQLPQEAKRFQNIDKSWIKIMQRAHENPNVINCCVGDETMGQLLPHLHEQLEVCQKSLTGYLEKKRLLFPRFFFVSDPVLLEILGQASDSHTIQPHLPAVSDNINEVTFHAKDYDRIMAVISREGEKIVLDNSVMAKGPVEIWLLDLLKMQMSSLHNIIRSAFYQISDSGFQLLPFLSHFPAQVGLLGIQMLWTHDSEEALRNAKDDRKIMQVTNQKFLDILNTLISQTTHDLSKFDRVKFETLITIHVHQRDIFDDLVKMHIKSPTDFEWLKQSRFYFKEDLDQTVVSITDVDFIYQNEFLGCTDRLVITPLTDRCYITLAQALGMNMGGAPAGPAGTGKTETTKDMGRCLGKYVVVFNCSDQMDFRGLGRIFKGLAQSGSWGCFDEFNRIELPVLSVAAQQIYIVLTARKERKKQFIFSDGDCVDLNPEFGIFLTMNPGYAGRQELPENLKIQFRTVAMMVPDRQVHYDFGLRNILSVLRTLGSQKRARPEDSELSIVMRGLRDMNLSKLVDEDEPLFLSLINDLFPGLQLDSNTYAELQNAVAHQVQIEGLINHPPWNLKLVQLYETSLVRHGLMTLGPSGSGKTTVITILMKAQTECGRPHREMRMNPKAITAPQMFGRLDTATNDWTDGIFSTLWRKTLKAKKGENIFLILDGPVDAIWIENLNSVLDDNKTLTLANGDRIPMAPSCKLLFEVHNIENASPATVSRMGMVYISSSALSWRPILQAWLKKRTAQEAAVFLTLYEKVFEDTYTYMKLNLNPKMQLLECNYIVQSLNLLEGLIPSKEEGGVSCVEHLHKLFVFGLMWSLGALLELESREKLEAFLRQHESKLDLPEIPKGSNQTMYEFYVTDYGDWEHWNKKLQPYYYPTDSIPEYSSILVPNVDNIRTNFLIDTIAKQHKAVLLTGEQGTAKTVMVKAYLKKYDPEVQLSKSLNFSSATEPMMFQRTIESYVDKRIGSTYGPPGGRKMTVFIDDINMPVINEWGDQITNEIVRQMMEMEGMYSLDKPGDFTTIVDVQLIAAMIHPGGGRNDIPQRLKRQFTVFNCTLPSNASIDKIFGIIGCGYFDPCRSFKPQICEMIVNLVSVGRVLWQWTKVKMLPTPSKFHYIFNLRDLSRIWQGMLTIKAEECASIPTLLSLFKHECSRVIADRFITPEDEQWFNAHLTRAVEENIGSDAASCILPEPYFVDFLREMPEPTGDEPEDSVFEVPKIYELMPSFDFLAEKLQFYQRQFNEIIRGTSLDLVFFKDAMTHLIKISRIIRTSCGNALLVGVGGSGKQSLSRLASFIAGYQIFQITLTRSYNVTNLTDDLKALYKVAGADGKGITFIFTDSEIKDEAFLEYLNNLLSSGEISNLFARDEMDEITQGLISVMKRELPRHPPTFDNLYEYFISRSRKNLHVVLCFSPVGEKFRARSLKFPGLISGCTMDWFSRWPREALIAVASYFLSDYNIVCSSEIKRQVVETMGLFHDMVSESCESYFQRYRRRAHVTPKSYLSFINGYKNIYAEKVKFINEQAERMNIGLDKLMEASESVAKLSQDLAVKEKELAVASIKADEVLAEVTVSAQASAKIKNEVQEVKDKAQKIVDEIDSEKVKAESKLEAAKPALEEAEAALNTIKPNDIATVRKLAKPPHLIMRIMDCVLLLFQKKIDPVTMDPEKSCCKPSWGESLKLMSATGFLWSLQQFPKDTINEETVELLQPYFNMDDYTFESAKKVCGNVAGLLSWTLAMAIFYGINREVLPLKANLAKQEGRLAVANAELGKAQALLDEKQAELDKVQAKFDAAMNEKMDLLNDADTCRKKMQAASTLIDGLSGEKIRWTQQSKEFKAQINRLVGDILLCTGFLSYLGPFNQIFRNYLLKDQWEMELRARKIPFTENLNLISMLVDPPTIGEWGLQGLPGDDLSIQNGIIVTKATRYPLLIDPQTQGKTWIKSKEKENDLQVTSLNHKYFRTHLEDSLSLGRPLLIEDIHEELDPALDNVLEKNFIKSGTTFKVKVGDKECDIMDTFKLYITTKLPNPAFTPEINAKTSVIDFTVTMKGLENQLLRRVILTEKQELEAERVKLLEDVTFNKRKMKELEDNLLYKLSATKGSLVDDESLIGVLRTTKQTAAEVSEKLHVAAETEIKINAAQEEFRPAATRGSILYFLITEMSMVNIMYQTSLAQFLKLFDQSMARSEKSPLPQKRITNIIEYLTYEVFTYSVRGLYENHKFLFVLLMTLKIDLQRGTVKHREFQALIKGGAALDLKACPPKPYRWILDMTWLNLVELSKLPQFAEIMNQISRNEKGWKSWFDKDAPEEEIIPDGYNDSLDTCHKLLLIRSWCPDRTVFQARKYIADSLEEKYTEPVILNLEKTWEESDTRTPLICFLSMGSDPTNQIDALAKKLKLECRTISMGQGQEVHARKLIQMSMQQGGWVLLQNCHLGLEFMEELLETLITTEASDDSFRVWITTEPHDRFPITLLQTSLKFTNEPPQGVRAGLKRTFAGINQDLLDISNLPMWKPMLYTVAFLHSTVQERRKFGPLGWNIPYEFNSADFSASVQFIQNHLDECDIKKGVSWNTVRYMIGEVQYGGRVTDDFDKRLLNCFARVWFSEKMFEPSFCFYTGYKIPLCKTLDQYFEYIQSLPSLDNPEVFGLHPNADITYQSNTASAVLETITNIQPKESGGGVGETREAIVYRLSEDMLSKLPPDYIPHEVKSRLIKMGHLNSMNIFLRQEIDRMQRVISILRSSLSDLKLAIEGTIIMSENLRDALDNMYDARIPQLWKRVSWDSSTLGFWFTELLERNAQFSTWIFEGRPNVFWMTGFFNPQGFLTAMRQEVTRAHKGWALDTVTIHNEVLRQTKEEITSPPGEGVYIYGLYMDGAAWDRRNGKLMESTPKVLFTQLPVLHIFAINSTAPKDPKLYVCPIYKKPRRTDLTFITVVYLRTVLSPDHWILRGVALLCDIK

SEQ ID NO: 44456 - protein, 4188 aa, Homo sapiens
MEKDAEDGAPSEGAEAPPSTEEAAPPRSEEEEAPRPPTVEAPAEDGFSPSAEDAVSSVVDYRDLIPSEEGIVLPDDHEADLNRVRQRLAPRPVQSVISEVLSLPSSRRSSRYRRSMSGLPNLQETLKERQARFREARESRRLKIDPSYKYIFEILAENLGLDIVTVEELILDCPSLEAFTNFFAKDGCKTLKFLYQEGDVPGIECGRTIAGATKGAKMMKLYIDNAAPDKLKGLCIFFVRCRNDVAINVKTIQEEALFTVLDASKGLLNGIRDMLANIFLPAVLATNNWGALNQSKQGESEKHIFTETINRYLSFLDGARISIEGTVKLKTIDNVNFSKLHTFEEVTAAASNSETVHQLEEVLMVWYKQIEQVLIESEQMRKEAGDSGPLTELEHWKRMSAKFNYIIEQIKGPSCKAVINVLNVAHSKLLKNWRDLDARITDTANESKDNVRYLYTLEKVCQPLYNHDLVSMAHGIQNLINAIRMIHGVSRYYNTSERMTSLFIKVTNQMVTACKAYITDGGLNHVWDQETPVVLKKIQDCIFLFKEYQASFHKTRKLISESSGEKSFEVSEMYIFGKFEAFCKRLEKITEMITVVQTYSTLSNSTIEGIDIMAIKFRNIYQGVKKKQYDILDPRRTEFDTDFLDFMTKINGLEVQIQAFMNSSFGKILSSQQALQLLQRFQKLNIPCLGLEINHTIERILQYYVAELDATKKLYHSQKDDPPLARNMPPIAGKILWVRQLYRRISEPINYFFKNSDILSSPDGKAVIRQYNKISYVLVEFEVVYHTAWIREISQLHYALQATLFVRHPETGKLLVNFDPKILEVVRETKCMIKMKLDVPEQAKRLLKLESKLKADKLYLQGLLQYYDELCQEVPSVFVNLMTPKMKKVESVLRQGLTVLTWSSLTLESFFQEVELVLDMFNQLLKKISDLCEMHIDTVLKEIAKTVLISLPESGATKVEDMLTLNETYTKEWADILNHKSKHVEEAVRELISIFEQIYEVKYTGKVGKQSEQRKHVVFGSETGEGENNDYEANIVNEFDTHDKEDEFKKECKEVFAFFSHQLLDSLQKATRLSLDTMKRRIFVASLYGRKQSEDIISFIKSEVHLAIPNVVMIPSLDDIQQAINRMIQLTLEVSRGVAHWGQQQIRPIKSVIPSPTTTDVTHQNTGKLLKKEERSFEEAIPARKLKNFYPGVAEHKDISKLVLLLSSSVNSLRKAAHEALQDFQKYKTLWTEDRDVKVKEFLANNPSLTEIRSEILHYATFEQEIDELKPIIVVGALELHTEPMKLALSIEAKAWKMLLCRYLNEEYKKKMSYMIAFINEYLKKLSRPIRDLDDVRFAMEALSCIRDNEIQMDMTLGPIEEAYAILNRFEVEVTKEESEAVDTLRYSFNKLQSKAVSVQEDLVQVQPKFKSNLLESVEVFREDVINFAEAYELEGPMVPNIPPQEASNRLQIFQASFDDLWRKFVTYSSGEQLFGLPVTDYEVLHKTRKELNLLQKLYGLYDTVMSSISGYYEILWGDVDIEKINAELLEFQNRCRKLPKGLKDWQAFLDLKKRIDDFSESCPLLEMMTNKAMKQRHWDRISELTGTPFDVESDSFCLRNIMEAPLLKHKDDIEDICISAIKEKDIEAKLTQVIENWTNQNLSFAAFKGKGELLLKGTESGEIITLMEDSLMVLGSLLSNRYNAPFKKNIQNWVYKLSTSSDIIEEWLVVQNLWVYLEAVFVGGDIAKQLPQEAKRFQNIDKSWIKIMQRAHENPNVINCCVGDETMGQLLPHLHEQLEVCQKSLTGYLEKKRLLFPRFFFVSDPVLLEILGQASDSHTIQPHLPAVSDNINEVTFHAKDYDRIMAVISREGEKIVLDNSVMAKGPVEIWLLDLLKMQMSSLHNIIRSAFYQISDSGFQLLPFLSHFPAQVGLLGIQMLWTHDSEEALRNAKDDRKIMQVTNQKFLDILNTLISQTTHDLSKFDRVKFETLITIHVHQRDIFDDLVKMHIKSPTDFEWLKQSRFYFKEDLDQTVVSITDVDFIYQNEFLGCTDRLVITPLTDRCYITLAQALGMNMGGAPAGPAGTGKTETTKDMGRCLGKYVVVFNCSDQMDFRGLGRIFKGLAQSGSWGCFDEFNRIELPVLSVAAQQIYIVLTARKERKKQFIFSDGDCVDLNPEFGIFLTMNPGYAGRQELPENLKIQFRTVAMMVPDRQIIMRVKLASCGFLENVILAQKFYVLYKLCEEQLTKQVHYDFGLRNILSVLRTLGSQKRARPEDSELSIVMRGLRDMNLSKLVDEDEPLFLSLINDLFPGLQLDSNTYAELQNAVAHQVQIEGLINHPPWNLKLVQLYETSLVRHGLMTLGPSGSGKTTVITILMKAQTECGRPHREMRMNPKAITAPQMFGRLDTATNDWTDGIFSTLWRKTLKAKKGENIFLILDGPVDAIWIENLNSVLDDNKTLTLANGDRIPMAPSCKLLFEVHNIENASPATVSRMGMVYISSSALSWRPILQAWLKKRTAQEAAVFLTLYEKVFEDTYTYMKLNLNPKMQLLECNYIVQSLNLLEGLIPSKEEGGVSCVEHLHKLFVFGLMWSLGALLELESREKLEAFLRQHESKLDLPEIPKGSNQTMYEFYVTDYGDWEHWNKKLQPYYYPTDSIPEYSSILVPNVDNIRTNFLIDTIAKQHKAVLLTGEQGTAKTVMVKAYLKKYDPEVQLSKSLNFSSATEPMMFQRTIESYVDKRIGSTYGPPGGRKMTVFIDDINMPVINEWGDQITNEIVRQMMEMEGMYSLDKPGDFTTIVDVQLIAAMIHPGGGRNDIPQRLKRQFTVFNCTLPSNASIDKIFGIIGCGYFDPCRSFKPQICEMIVNLVSVGRVLWQWTKVKMLPTPSKFHYIFNLRDLSRIWQGMLTIKAEECASIPTLLSLFKHECSRVIADRFITPEDEQWFNAHLTRAVEENIGSDAASCILPEPYFVDFLREMPEPTGDEPEDSVFEVPKIYELMPSFDFLAEKLQFYQRQFNEIIRGTSLDLVFFKDAMTHLIKISRIIRTSCGNALLVGVGGSGKQSLSRLASFIAGYQIFQITLTRSYNVTNLTDDLKALYKVAGADGKGITFIFTDSEIKDEAFLEYLNNLLSSGEISNLFARDEMDEITQGLISVMKRELPRHPPTFDNLYEYFISRSRKNLHVVLCFSPVGEKFRARSLKFPGLISGCTMDWFSRWPREALIAVASYFLSDYNIVCSSEIKRQVVETMGLFHDMVSESCESYFQRYRRRAHVTPKSYLSFINGYKNIYAEKVKFINEQAERMNIGLDKLMEASESVAKLSQDLAVKEKELAVASIKADEVLAEVTVSAQASAKIKNEVQEVKDKAQKIVDEIDSEKVKAESKLEAAKPALEEAEAALNTIKPNDIATVRKLAKPPHLIMRIMDCVLLLFQKKIDPVTMDPEKSCCKPSWGESLKLMSATGFLWSLQQFPKDTINEETVELLQPYFNMDDYTFESAKKVCGNVAGLLSWTLAMAIFYGINREVLPLKANLAKQEGRLAVANAELGKAQALLDEKQAELDKVQAKFDAAMNEKMDLLNDADTCRKKMQAASTLIDGLSGEKIRWTQQSKEFKAQINRLVGDILLCTGFLSYLGPFNQIFRNYLLKDQWEMELRARKIPFTENLNLISMLVDPPTIGEWGLQGLPGDDLSIQNGIIVTKATRYPLLIDPQTQGKTWIKSKEKENDLQVTSLNHKYFRTHLEDSLSLGRPLLIEDIHEELDPALDNVLEKNFIKSGTTFKVKVGDKECDIMDTFKLYITTKLPNPAFTPEINAKTSVIDFTVTMKGLENQLLRRVILTEKQELEAERVKLLEDVTFNKRKMKELEDNLLYKLSATKGSLVDDESLIGVLRTTKQTAAEVSEKLHVAAETEIKINAAQEEFRPAATRGSILYFLITEMSMVNIMYQTSLAQFLKLFDQSMARSEKSPLPQKRITNIIEYLTYEVFTYSVRGLYENHKFLFVLLMTLKIDLQRGTVKHREFQALIKGGAALDLKACPPKPYRWILDMTWLNLVELSKLPQFAEIMNQISRNEKGWKSWFDKDAPEEEIIPDGYNDSLDTCHKLLLIRSWCPDRTVFQARKYIADSLEEKYTEPVILNLEKTWEESDTRTPLICFLSMGSDPTNQIDALAKKLKLECRTISMGQGQEVHARKLIQMSMQQVCDKRLLLLQHYC

SEQ ID NO: 44457 - protein, 4486 aa, Homo sapiens
MRLAEERAALAAENADGEPGADRRLRLLGTYVAMSLRPAAGAWERCAGSAEAEQLLQAFLGRDAAEGPRPLLVVRPGPRGLAIRPGLEVGPESGLAGAKALFFLRTGPEPPGPDSFRGAVVCGDLPAAPLEHLAALFSEVVLPVLANEKNRLNWPHMICEDVRRHAHSLQCDLSVILEQVKGKTLLPLPAGSEKMEFADSKSETVLDSIDKSVIYAIESAVIKWSYQVQVVLKRESSQPLLQGENPTPKVELEFWKSRYEDLKYIYNQLRTITVRGMAKLLDKLQSSYFPAFKAMYRDVVAALAEAQDIHVHLIPLQRHLEALENAEFPEVKPQLRPLLHVVCLIWATCKSYRSPGRLTVLLQEICNLLIQQASNYLSPEDLLRSEVEESQRKLQVVSDTLSFFKQEFQDRRENLHTYFKENQEVKEWDFQSSLVFVRLDGFLGQLHVVEGLLKTALDFHKLGKVEFSGVRGNALSQQVQQMHEEFQEMYRLLSGSSSDCLYLQSTDFENDVSEFNQKVEDLDRRLGTIFIQAFDDAPGLEHAFKLLDIAGNLLERPLVARDTSDKYLVLIQMFNKDLDAVRMIYSQHVQEEAELGFSPVHKNMPTVAGGLRWAQELRQRIQGPFSNFGRITHPCMESAEGKRMQQKYEDMLSLLEKYETRLYEDWCRTVSEKSQYNLSQPLLKRDPETKEITINFNPQLISVLKEMSYLEPREMKHMPETAAAMFSSRDFYRQLVANLELMANWYNKVMKTLLEVEFPLVEEELQNIDLRLRAAEETLNWKTEGICDYVTEITSSIHDLEQRIQKTKDNVEEIQNIMKTWVTPIFKTKDGKRESLLSLDDRHDRMEKYYNLIKESGLKIHALVQENLGLFSADPTSNIWKTYVNSIDNLLLNGFFLAIECSLKYLLENTECKAGLTPIFEAQLSLAIPELVFYPSLESGVKGGFCDIVEGLITSIFRIPSLVPRLSPQNGSPHYQVDLDGIPDLANMRRTLMERVQRMMGLCCGYQSTFSQYSYLYVEDRKEVLGQFLLYGHILTPEEIEDHVEDGIPENPPLLSQFKVQIDSYETLYEEVCRLEPIKVFDGWMKIDIRPFKASLLNIIKRWSLLFKQHLVDHVTHSLANLDAFIKKSESGLLKKVEKGDFQGLVEIMGHLMAVKERQSNTDEMFEPLKQTIELLKTYEQELPETVFKQLEELPEKWNNIKKVAITVKQQVAPLQANEVTLLRQRCTAFDAEQQQFWEQFHKEAPFRFDSIHPHQMLDARHIEIQQMESTMASISESASLFEVNVPDYKQLRQCRKEVCQLKELWDTIGMVTSSIHAWETTPWRNINVEAMELECKQFARHIRNLDKEVRAWDAFTGLESTVWNTLSSLRAVAELQNPAIRERHWRQLMQATGVSFTMDQDTTLAHLLQLQLHHYEDEVRGIVDKAAKEMGMEKTLKELQTTWAGMEFQYEPHPRTNVPLLCSDEDLIEVLEDNQVQLQNLVMSKYVAFFLEEVSGWQKKLSTVDAVISIWFEVQRTWTHLESIFTGSEDIRAQLPQDSKRFEGIDIDFKELAYDAQKIPNVVQTTNKPGLYEKLEDIQGRLCLCEKALAEYLDTKRLAFPRFYFLSSSDLLDILSNGTAPQQVQRHLSKLFDNMAKMRFQLDASGEPTKTSLGMYSKEEEYVAFSEPCDCSGQVEIWLNHVLGHMKATVRHEMTEGVTAYEEKPREQWLFDHPAQVALTCTQIWWTTEVGMAFARLEEGYESAMKDYYKKQVAQLKTLITMLIGQLSKGDRQKIMTICTIDVHARDVVAKMIAQKVDNAQAFLWLSQLRHRWDDEVKHCFANICDAQFLYSYEYLGNTPRLVITPLTDRCYITLTQSLHLTMSGAPAGPAGTGKTETTKDLGRALGILVYVFNCSEQMDYKSCGNIYKGLAQTGAWGCFDEFNRISVEVLSVVAVQVKSIQDAIRDKKQWFSFLGEEISLNPSVGIFITMNPGYAGRTELPENLKSLFRPCAMVVPDFELICEIMLVAEGFIEAQSLARKFITLYQLCKELLSKQDHYDWGLRAIKSVLVVAGSLKRGDPDRPEDQVLMRSLRDFNIPKIVTDDMPIFMGLIGDLFPALDVPRRRDPNFEALVRKAIVDLKLQAEDNFVLKVVQLEELLAVRHSVFVVGGAGTGKSQVLRSLHKTYQIMKRRPVWTDLNPKAVTNDELFGIINPATGEWKDGLFSSIMRELANITHDGPKWILLDGDIDPMWIESLNTVMDDNKVLTLASNERIPLNPTMKLLFEISHLRTATPATVSRAGILYINPADLGWNPPVSSWIEKREIQTERANLTILFDKYLPTCLDTLRTRFKKIIPIPEQSMVQMVCHLLECLLTTEDIPADCPKEIYEHYFVFAAIWAFGGAMVQDQLVDYRAEFSKWWLTEFKTVKFPSQGTIFDYYIDPETKKFEPWSKLVPQFEFDPEMPLQACLVHTSETIRVCYFMERLMARQRPVMLVGTAGTGKSVLVGAKLASLDPEAYLVKNVPFNYYTTSAMLQAVLEKPLEKKAGRNYGPPGNKKLIYFIDDMNMPEVDAYGTVQPHTIIRQHLDYGHWYDRSKLSLKEITNVQYVSCMNPTAGSFTINPRLQRHFSVFVLSFPGADALSSIYSIILTQHLKLGNFPASLQKSIPPLIDLALAFHQKIATTFLPTGIKFHYIFNLRDFANIFQGILFSSVECVKSTWDLIRLYLHESNRVYRDKMVEEKDFDLFDKIQTEVLKKTFDDIEDPVEQTQSPNLYCHFANGIGEPKYMPVQSWELLTQTLVEALENHNEVNTVMDLVLFEDAMRHVCHINRILESPRGNALLVGVGGSGKQSLTRLAAFISSMDVFQITLRKGYQIQDFKMDLASLCLKAGVKNLNTVFLMTDAQVADERFLVLINDLLASGEIPDLYSDDEVENIISNVRNEVKSQGLVDNRENCWKFFIDRIRRQLKVTLCFSPVGNKLRVRSRKFPAIVNCTAIHWFHEWPQQALESVSLRFLQNTEGIEPTVKQSISKFMAFVHTSVNQTSQSYLSNEQRYNYTTPKSFLEFIRLYQSLLHRHRKELKCKTERLENGLLKLHSTSAQVDDLKAKLAAQEVELKQKNEDADKLIQVVGVETDKVSREKAMADEEEQKVAVIMLEVKQKQKDCEEDLAKAEPALTAAQAALNTLNKTNLTELKSFGSPPLAVSNVSAAVMVLMAPRGRVPKDRSWKAAKVTMAKVDGFLDSLINFNKENIHENCLKAIRPYLQDPEFNPEFVATKSYAAAGLCSWVINIVRFYEVFCDVEPKRQALNKATADLTAAQEKLAAIKAKIAHLNENLAKLTARFEKATADKLKCQQEAEVTAVTISLANRLVGGLASENVRWADAVQNFKQQERTLCGDILLITAFISYLGFFTKKYRQSLLDRTWRPYLSQLKTPIPVTPALDPLRMLMDDADVAAWQNEGLPADRMSVENATILINCERWPLMVDPQLQGIKWIKNKYGEDLRVTQIGQKGYLQIIEQALEAGAVVLIENLEESIDPVLGPLLGREVIKKGRFIKIGDKECEYNPKFRLILHTKLANPHYQPELQAQATLINFTVTRDGLEDQLLAAVVSMERPDLEQLKSDLTKQQNGFKITLKTLEDSLLSRLSSASGNFLGETVLVENLEITKQTAAEVEKKVQEAKVTEVKINEAREHYRPAAARASLLYFIMNDLSKIHPMYQFSLKAFSIVFQKAVERAAPDESLRERVANLIDSITFSVYQYTIRGLFECDKLTYLAQLTFQILLMNREVNAVELDFLLRSPVQTGTASPVEFLSHQAWGAVKVLSSMEEFSNLDRDIEGSAKSWKKFVESECPEKEKLPQEWKNKTALQRLCMLRAMRPDRMTYALRDFVEEKLGSKYVVGRALDFATSFEESGPATPMFFILSPGVDPLKDVESQGRKLGYTFNNQNFHNVSLGQGQEVVAEAALDLAAKKGHWVILQNIHLVAKWLSTLEKKLEEHSENSHPEFRVFMSAEPAPSPEGHIIPQGILENSIKITNEPPTGMHANLHKALDNFTQDTLEMCSRETEFKSILFALCYFHAVVAERRKFGPQGWNRSYPFNTGDLTISVNVLYNFLEANAKVPYDDLRYLFGEIMYGGHITDDWDRRLCRTYLGEFIRPEMLEGELSLAPGFPLPGNMDYNGYHQYIDAELPPESPYLYGLHPNAEIGFLTQTSEKLFRTVLELQPRDSQARDGAGATREEKVKALLEEILERVTDEFNIPELMAKVEERTPYIVVAFQECGRMNILTREIQRSLRELELGLKGELTMTSHMENLQNALYFDMVPESWARRAYPSTAGLAAWFPDLLNRIKELEAWTGDFTMPSTVWLTGFFNPQSFLTAIMQSTARKNEWPLDQMALQCDMTKKNREEFRSPPREGAYIHGLFMEGACWDTQAGIITEAKLKDLTPPMPVMFIKAIPADKQDCRSVYSCPVYKTSQRGPTYVWTFNLKTKENPSKWVLAGVALLLQI

SEQ ID NO: 44458 - protein, 333 aa, Homo sapiens
MKDFVLGRDKVQEAKVTEVKINEAREHYRPAAARASLLYFIMNDLSKIHPMYQFSLKAFSIVFQKAVERAAPDESLRERVANLIDSITFSVYQYTIRGLFECDKLTYLAQLTFQILLMNREVNAVELDFLLRSPVQTGTASPVEFLSHQAWGAVKVLSSMEEFSNLDRDIEGSAKSWKKFVESECPEKEKLPQEWKNKTALQRLCMLRAMRPDRMTYALRDFVEEKLGSKYVVGRALDFATSFEESGPATPMFFILSPGVDPLKDVESQGRKLGYTFNNQNFHNVSLGQGQEVVAEAALDLAAKKGHWVILQVKRCSFFTFYHPAHCLEHSRH

SEQ ID NO: 44459 - protein, 798 aa, Homo sapiens
MNDLSKIHPMYQFSLKAFSIVFQKAVERAAPDESLRERVANLIDSITFSVYQYTIRGLFECDKLTYLAQLTFQILLMNREVNAVELDFLLRSPVQTGTASPVEFLSHQAWGAVKVLSSMEEFSNLDRDIEGSAKSWKKFVESECPEKEKLPQEWKNKTALQRLCMLRAMRPDRMTYALRDFVEEKLGSKYVVGRALDFATSFEESGPATPMFFILSPGVDPLKDVESQGRKLGYTFNNQNFHNVSLGQGQEVVAEAALDLAAKKGHWVILQNIHLVAKWLSTLEKKLEEHSENSHPEFRVFMSAEPAPSPEGHIIPQGILENSIKITNEPPTGMHANLHKALDNFTQDTLEMCSRETEFKSILFALCYFHAVVAERRKFGPQGWNRSYPFNTGDLTISVNVLYNFLEANAKVPYDDLRYLFGEIMYGGHITDDWDRRLCRTYLGEFIRPEMLEGELSLAPGFPLPGNMDYNGYHQYIDAELPPESPYLYGLHPNAEIGFLTQTSEKLFRTVLELQPRDSQARDGAGATREEKVKALLEEILERVTDEFNIPELMAKVEERTPYIVVAFQECGRMNILTREIQRSLRELELGLKGELTMTSHMENLQNALYFDMVPESWARRAYPSTAGLAAWFPDLLNRIKELEAWTGDFTMPSTVWLTGFFNPQSFLTAIMQSTARKNEWPLDQMALQCDMTKKNREEFRSPPREGAYIHGLFMEGACWDTQAGIITEAKLKDLTPPMPVMFIKAIPADKQDCRSVYSCPVYKTSQRGPTYVWTFNLKTKENPSKWVLAGVALLLQI

SEQ ID NO: 44460 - protein, 2992 aa, Homo sapiens
EVRGIVDKAAKEMGMEKTLKELQTTWAGMEFQYEPHPRTNVPLLCSDEDLIEVLEDNQVQLQNLVMSKYVAFFLEEVSGWQKKLSTVDAVISIWFEVQRTWTHLESIFTGSEDIRAQLPQDSKRFEGIDIDFKELAYDAQKIPNVVQTTNKPGLYEKLEDIQGRLCLCEKALAEYLDTKRLAFPRFYFLSSSDLLDILSNGTAPQQVQRHLSKLFDNMAKMRFQLDASGEPTKTSLGMYSKEEEYVAFSEPCDCSGQVEIWLNHVLGHMKATVRHEMTEGVTAYEEKPREQWLFDHPAQVALTCTQIWWTTEVGMAFARLEEGYESAMKDYYKKQVAQLKTLITMLIGQLSKGDRQKIMTICTIDVHARDVVAKMIAQKVDNAQAFLWLSQLRHRWDDEVKHCFANICDAQFLYSYEYLGNTPRLVITPLTDRCYITLTQSLHLTMSGAPAGPAGTGKTETTKDLGRALGILVYVFNCSEQMDYKSCGNIYKGLAQTGAWGCFDEFNRISVEVLSVVAVQVKSIQDAIRDKKQWFSFLGEEISLNPSVGIFITMNPGYAGRTELPENLKSLFRPCAMVVPDFELICEIMLVAEGFIEAQSLARKFITLYQLCKELLSKQDHYDWGLRAIKSVLVVAGSLKRGDPDRPEDQVLMRSLRDFNIPKIVTDDMPIFMGLIGDLFPALDVPRRRDPNFEALVRKAIVDLKLQAEDNFVLKVVQLEELLAVRHSVFVVGGAGTGKSQVLRSLHKTYQIMKRRPVWTDLNPKAVTNDELFGIINPATGEWKDGLFSSIMRELANITHDGPKWILLDGDIDPMWIESLNTVMDDNKVLTLASNERIPLNPTMKLLFEISHLRTATPATVSRAGILYINPADLGWNPPVSSWIEKREIQTERANLTILFDKYLPTCLDTLRTRFKKIIPIPEQSMVQMVCHLLECLLTTEDIPADCPKEIYEHYFVFAAIWAFGGAMVQDQLVDYRAEFSKWWLTEFKTVKFPSQGTIFDYYIDPETKKFEPWSKLVPQFEFDPEMPLQACLVHTSETIRVCYFMERLMARQRPVMLVGTAGTGKSVLVGAKLASLDPEAYLVKNVPFNYYTTSAMLQAVLEKPLEKKAGRNYGPPGNKKLIYFIDDMNMPEVDAYGTVQPHTIIRQHLDYGHWYDRSKLSLKEITNVQYVSCMNPTAGSFTINPRLQRHFSVFVLSFPGADALSSIYSIILTQHLKLGNFPASLQKSIPPLIDLALAFHQKIATTFLPTGIKFHYIFNLRDFANIFQGILFSSVECVKSTWDLIRLYLHESNRVYRDKMVEEKDFDLFDKIQTEVLKKTFDDIEDPVEQTQSPNLYCHFANGIGEPKYMPVQSWELLTQTLVEALENHNEVNTVMDLVLFEDAMRHVCHINRILESPRGNALLVGVGGSGKQSLTRLAAFISSMDVFQITLRKGYQIQDFKMDLASLCLKAGVKNLNTVFLMTDAQVADERFLVLINDLLASGEIPDLYSDDEVENIISNVRNEVKSQGLVDNRENCWKFFIDRIRRQLKVTLCFSPVGNKLRVRSRKFPAIVNCTAIHWFHEWPQQALESVSLRFLQNTEGIEPTVKQSISKFMAFVHTSVNQTSQSYLSNEQRYNYTTPKSFLEFIRLYQSLLHRHRKELKCKTERLENGLLKLHSTSAQVDDLKAKLAAQEVELKQKNEDADKLIQVVGVETDKVSREKAMADEEEQKVAVIMLEVKQKQKDCEEDLAKAEPALTAAQAALNTLNKTNLTELKSFGSPPLAVSNVSAAVMVLMAPRGRVPKDRSWKAAKVTMAKVDGFLDSLINFNKENIHENCLKAIRPYLQDPEFNPEFVATKSYAAAGLCSWVINIVRFYEVFCDVEPKRQALNKATADLTAAQEKLAAIKAKIAHLNENLAKLTARFEKATADKLKCQQEAEVTAVTISLANRLVGGLASENVRWADAVQNFKQQERTLCGDILLITAFISYLGFFTKKYRQSLLDRTWRPYLSQLKTPIPVTPALDPLRMLMDDADVAAWQNEGLPADRMSVENATILINCERWPLMVDPQLQGIKWIKNKYGEDLRVTQIGQKGYLQIIEQALEAGAVVLIENLEESIDPVLGPLLGREVIKKGRFIKIGDKECEYNPKFRLILHTKLANPHYQPELQAQATLINFTVTRDGLEDQLLAAVVSMERPDLEQLKSDLTKQQNGFKITLKTLEDSLLSRLSSASGNFLGETVLVENLEITKQTAAEVEKKVQEAKVTEVKINEAREHYRPAAARASLLYFIMNDLSKIHPMYQFSLKAFSIVFQKAVERAAPDESLRERVANLIDSITFSVYQYTIRGLFECDKLTYLAQLTFQILLMNREVNAVELDFLLRSPVQTGTASPVEFLSHQAWGAVKVLSSMEEFSNLDRDIEGSAKSWKKFVESECPEKEKLPQEWKNKTALQRLCMLRAMRPDRMTYALRDFVEEKLGSKYVVGRALDFATSFEESGPATPMFFILSPGVDPLKDVESQGRKLGYTFNNQNFHNVSLGQGQEVVAEAALDLAAKKGHWVILQDTLEMCSRETEFKSILFALCYFHAVVAERRKFGPQGWNRSYPFNTGDLTISVNVLYNFLEANAKVPYDDLRYLFGEIMYGGHITDDWDRRLCRTYLGEFIRPEMLEGELSLAPGFPLPGNMDYNGYHQYIDAELPPESPYLYGLHPNAEIGFLTQTSEKLFRTVLELQPRDSQARDGAGATREEKVKALLEEILERVTDEFNIPELMAKVEERTPYIVVAFQECGRMNILTREIQRSLRELELGLKGELTMTSHMENLQNALYFDMVPESWARRAYPSTAGLAAWFPDLLNRIKELEAWTGDFTMPSTVWLTGFFNPQSFLTAIMQSTARKNEWPLDQMALQCDMTKKNREEFRSPPREGAYIHGLFMEGACWDTQAGIITEAKLKDLTPPMPVMFIKAIPADKQDCRSVYSCPVYKTSQRGPTYVWTFNLKTKENPSKWVLAGVALLLQI

SEQ ID NO: 44461 - protein, 4410 aa, Homo sapiens
MRLAEERAALAAENADGEPGADRRLRLLGTYVAMSLRPAAGAWERCAGSAEAEQLLQAFLGRDAAEGPRPLLVVRPGPRGLAIRPGLEVGPESGLAGAKALFFLRTGPEPPGPDSFRGAVVCGDLPAAPLEHLAALFSEVVLPVLANEKNRLNWPHMICEDVRRHAHSLQCDLSVILEQVKGKTLLPLPAGSEKMEFADSKSETVLDSIDKSVIYAIESAVIKWSYQVQVVLKRESSQPLLQGENPTPKVELEFWKSRYEDLKYIYNQLRTITVRGMAKLLDKLQSSYFPAFKAMYRDVVAALAEAQDIHVHLIPLQRHLEALENAEFPEVKPQLRPLLHVVCLIWATCKSYRSPGRLTVLLQEICNLLIQQASNYLSPEDLLRSEVEESQRKLQVVSDTLSFFKQEFQDRRENLHTYFKENQEVKEWDFQSSLVFVRLDGFLGQLHVVEGLLKTALDFHKLGKVEFSGVRGNALSQQVQQMHEEFQEMYRLLSGSSSDCLYLQSTDFENDVSEFNQKVEDLDRRLGTIFIQAFDDAPGLEHAFKLLDIAGNLLERPLVARDTSDKYLVLIQMFNKDLDAVRMIYSQHVQEEAELGFSPVHKNMPTVAGGLRWAQELRQRIQGPFSNFGRITHPCMESAEGKRMQQKYEDMLSLLEKYETRLYEDWCRTVSEKSQYNLSQPLLKRDPETKEITINFNPQLISVLKEMSYLEPREMKHMPETAAAMFSSRDFYRQLVANLELMANWYNKVMKTLLEVEFPLVEEELQNIDLRLRAAEETLNWKTEGICDYVTEITSSIHDLEQRIQKTKDNVEEIQNIMKTWVTPIFKTKDGKRESLLSLDDRHDRMEKYYNLIKESGLKIHALVQENLGLFSADPTSNIWKTYVNSIDNLLLNGFFLAIECSLKYLLENTECKAGLTPIFEAQLSLAIPELVFYPSLESGVKGGFCDIVEGLITSIFRIPSLVPRLSPQNGSPHYQVDLDGIPDLANMRRTLMERVQRMMGLCCGYQSTFSQYSYLYVEDRKEVLGQFLLYGHILTPEEIEDHVEDGIPENPPLLSQFKVQIDSYETLYEEVCRLEPIKVFDGWMKIDIRPFKASLLNIIKRWSLLFKQHLVDHVTHSLANLDAFIKKSESGLLKKVEKGDFQGLVEIMGHLMAVKERQSNTDEMFEPLKQTIELLKTYEQELPETVFKQLEELPEKWNNIKKVAITVKQQVAPLQANEVTLLRQRCTAFDAEQQQFWEQFHKEAPFRFDSIHPHQMLDARHIEIQQMESTMASISESASLFEVNVPDYKQLRQCRKEVCQLKELWDTIGMVTSSIHAWETTPWRNINVEAMELECKQFARHIRNLDKEVRAWDAFTGLESTVWNTLSSLRAVAELQNPAIRERHWRQLMQATGVSFTMDQDTTLAHLLQLQLHHYEDEVRGIVDKAAKEMGMEKTLKELQTTWAGMEFQYEPHPRTNVPLLCSDEDLIEVLEDNQVQLQNLVMSKYVAFFLEEVSGWQKKLSTVDAVISIWFEVQRTWTHLESIFTGSEDIRAQLPQDSKRFEGIDIDFKELAYDAQKIPNVVQTTNKPGLYEKLEDIQGRLCLCEKALAEYLDTKRLAFPRFYFLSSSDLLDILSNGTAPQQVQRHLSKLFDNMAKMRFQLDASGEPTKTSLGMYSKEEEYVAFSEPCDCSGQVEIWLNHVLGHMKATVRHEMTEGVTAYEEKPREQWLFDHPAQVALTCTQIWWTTEVGMAFARLEEGYESAMKDYYKKQVAQLKTLITMLIGQLSKGDRQKIMTICTIDVHARDVVAKMIAQKVDNAQAFLWLSQLRHRWDDEVKHCFANICDAQFLYSYEYLGNTPRLVITPLTDRCYITLTQSLHLTMSGAPAGPAGTGKTETTKDLGRALGILVYVFNCSEQMDYKSCGNIYKGLAQTGAWGCFDEFNRISVEVLSVVAVQVKSIQDAIRDKKQWFSFLGEEISLNPSVGIFITMNPGYAGRTELPENLKSLFRPCAMVVPDFELICEIMLVAEGFIEAQSLARKFITLYQLCKELLSKQDHYDWGLRAIKSVLVVAGSLKRGDPDRPEDQVLMRSLRDFNIPKIVTDDMPIFMGLIGDLFPALDVPRRRDPNFEALVRKAIVDLKLQAEDNFVLKVVQLEELLAVRHSVFVVGGAGTGKSQVLRSLHKTYQIMKRRPVWTDLNPKAVTNDELFGIINPATGEWKDGLFSSIMRELANITHDGPKWILLDGDIDPMWIESLNTVMDDNKVLTLASNERIPLNPTMKLLFEISHLRTATPATVSRAGILYINPADLGWNPPVSSWIEKREIQTERANLTILFDKYLPTCLDTLRTRFKKIIPIPEQSMVQMVCHLLECLLTTEDIPADCPKEIYEHYFVFAAIWAFGGAMVQDQLVDYRAEFSKWWLTEFKTVKFPSQGTIFDYYIDPETKKFEPWSKLVPQFEFDPEMPLQACLVHTSETIRVCYFMERLMARQRPVMLVGTAGTGKSVLVGAKLASLDPEAYLVKNVPFNYYTTSAMLQAVLEKPLEKKAGRNYGPPGNKKLIYFIDDMNMPEVDAYGTVQPHTIIRQHLDYGHWYDRSKLSLKEITNVQYVSCMNPTAGSFTINPRLQRHFSVFVLSFPGADALSSIYSIILTQHLKLGNFPASLQKSIPPLIDLALAFHQKIATTFLPTGIKFHYIFNLRDFANIFQGILFSSVECVKSTWDLIRLYLHESNRVYRDKMVEEKDFDLFDKIQTEVLKKTFDDIEDPVEQTQSPNLYCHFANGIGEPKYMPVQSWELLTQTLVEALENHNEVNTVMDLVLFEDAMRHVCHINRILESPRGNALLVGVGGSGKQSLTRLAAFISSMDVFQITLRKGYQIQDFKMDLASLCLKAGVKNLNTVFLMTDAQVADERFLVLINDLLASGEIPDLYSDDEVENIISNVRNEVKSQGLVDNRENCWKFFIDRIRRQLKVTLCFSPVGNKLRVRSRKFPAIVNCTAIHWFHEWPQQALESVSLRFLQNTEGIEPTVKQSISKFMAFVHTSVNQTSQSYLSNEQRYNYTTPKSFLEFIRLYQSLLHRHRKELKCKTERLENGLLKLHSTSAQVDDLKAKLAAQEVELKQKNEDADKLIQVVGVETDKVSREKAMADEEEQKVAVIMLEVKQKQKDCEEDLAKAEPALTAAQAALNTLNKTNLTELKSFGSPPLAVSNVSAAVMVLMAPRGRVPKDRSWKAAKVTMAKVDGFLDSLINFNKENIHENCLKAIRPYLQDPEFNPEFVATKSYAAAGLCSWVINIVRFYEVFCDVEPKRQALNKATADLTAAQEKLAAIKAKIAHLNENLAKLTARFEKATADKLKCQQEAEVTAVTISLANRLVGGLASENVRWADAVQNFKQQERTLCGDILLITAFISYLGFFTKKYRQSLLDRTWRPYLSQLKTPIPVTPALDPLRMLMDDADVAAWQNEGLPADRMSVENATILINCERWPLMVDPQLQGIKWIKNKYGEDLRVTQIGQKGYLQIIEQALEAGAVVLIENLEESIDPVLGPLLGREVIKKGRFIKIGDKECEYNPKFRLILHTKLANPHYQPELQAQATLINFTVTRDGLEDQLLAAVVSMERPDLEQLKSDLTKQQNGFKITLKTLEDSLLSRLSSASGNFLGETVLVENLEITKQTAAEVEKKVQEAKVTEVKINEAREHYRPAAARASLLYFIMNDLSKIHPMYQFSLKAFSIVFQKAVERAAPDESLRERVANLIDSITFSVYQYTIRGLFECDKLTYLAQLTFQILLMNREVNAVELDFLLRSPVQTGTASPVEFLSHQAWGAVKVLSSMEEFSNLDRDIEGSAKSWKKFVESECPEKEKLPQEWKNKTALQRLCMLRAMRPDRMTYALRDFVEEKLGSKYVVGRALDFATSFEESGPATPMFFILSPGVDPLKDVESQGRKLGYTFNNQNFHNVSLGQGQEVVAEAALDLAAKKGHWVILQDTLEMCSRETEFKSILFALCYFHAVVAERRKFGPQGWNRSYPFNTGDLTISVNVLYNFLEANAKVPYDDLRYLFGEIMYGGHITDDWDRRLCRTYLGEFIRPEMLEGELSLAPGFPLPGNMDYNGYHQYIDAELPPESPYLYGLHPNAEIGFLTQTSEKLFRTVLELQPRDSQARDGAGATREEKVKALLEEILERVTDEFNIPELMAKVEERTPYIVVAFQECGRMNILTREIQRSLRELELGLKGELTMTSHMENLQNALYFDMVPESWARRAYPSTAGLAAWFPDLLNRIKELEAWTGDFTMPSTVWLTGFFNPQSFLTAIMQSTARKNEWPLDQMALQCDMTKKNREEFRSPPREGAYIHGLFMEGACWDTQAGIITEAKLKDLTPPMPVMFIKAIPADKQDCRSVYSCPVYKTSQRGPTYVWTFNLKTKENPSKWVLAGVALLLQI

SEQ ID NO: 44462 - protein, 699 aa, Homo sapiens
MIPASAKAPHKQPHKQSISIGRGTRKRDEDSGTEVGEGTDEWAQSKATVRPPDQLELTDAELKEEFTRILTANNPHAPQNIVRYSFKEGTYKPIGFVNQLAVHYTQVGNLIPKDSDEGRRQHYRDELVAGSQESVKVISETGNLEEDEEPKELETEPGSQTDVPAAGAAEKVTEEELMTPKQPKERKLTNQFNFSERASQTYNNPVRDRECQTEPPPRTNFSATANQWEIYDAYVEELEKQEKTKEKEKAKTPVAKKSGKMAMRKLTSMESQTDDLIKLSQAAKIMERMVNQNTYDDIAQDFKYYDDAADEYRDQVGTLLPLWKFQNDKAKRLSVTALCWNPKYRDLFAVGYGSYDFMKQSRGMLLLYSLKNPSFPEYMFSSNSGVMCLDIHVDHPYLVAVGHYDGNVAIYNLKKPHSQPSFCSSAKSGKHSDPVWQVKWQKDDMDQNLNFFSVSSDGRIVSWTLVKRKLVHIDVIKLKVEGSTTEVPEGLQLHPVGCGTAFDFHKEIDYMFLVGTEEGKIYKCSKSYSSQFLDTYDAHNMSVDTVSWNPYHTKVFMSCSSDWTVKIWDHTIKTPMFIYDLNSAVGDVAWAPYSSTVFAAVTTDGKAHIFDLAINKYEAICNQPVAAKKNRLTHVQFNLIHPIIIVGDDRGHIISLKLSPNLRKMPKEKKGQEVQKGPAVEIAKLDKLLNLVREVKIKT

SEQ ID NO: 44463 - protein, 194 aa, Homo sapiens
MDQNLNFFSVSSDGRIVSWTLVKRKLVHIDVIKLKVEGSTTEVPEGLQLHPVGCGTAFDFHKEIDYMFLVGTEEGKIYKCSKSYSSQFLDTYDAHNMSVDTVSWNPYHTKVFMSCSSDWTVKIWDHTIKTPMFIYDLNSAVGDVAWAPYSSTVFAAVTTDGKEKKGQEVQKGPAVEIAKLDKLLNLVREVKIKT

SEQ ID NO: 44464 - protein, 289 aa, Homo sapiens
MIPASAKAPHKQPHKQDEDSGTEVGEGTDEWAQSKATVRPPDQLELTDAELKEEFTRILTANNPHAPQNIVRYSFKEGTYKPIGFVNQLAVHYTQVGNLIPKDSDEGRRQHYRDELVAGSQESVKVISETGNLEEDEEPKELETEPGSQTDVPAAGAAEKVTEEELMTPKQPKERKLTNQFNFSERASQTYNNPVRDRECQTEPPPRTNFSATANQWEIYDAYVEELEKQEKTKEKEKAKTPVAKKSGKMAMRKLTSMESQTDDLIKLSQAAKIMERMVNQNTYDDIAQ

SEQ ID NO: 44465 - protein, 289 aa, Homo sapiens; identical to SEQ ID NO: 44464

SEQ ID NO: 44466 - protein, 142 aa, Homo sapiens
  VARIANT 1: note = MOD_RES - Any amino acid
XCGTAFDFHKEIDYMFLVGTEEGKIYKCSKSYSSQFLDTYDAHNMSVDTVSWNPYHTKVFMSCSSDWTVKIWDHTIKTPMFIYDLNSAVGDVAWAPYSSTVFAAVTTDGKEKKGQEVQKGPAVEIAKLDKLLNLVREVKIKT

SEQ ID NO: 44467 - protein, 168 aa, Homo sapiens
MIPASAKAPHKQPHKQSISIGRGTRKRDEDSGTEVGEGTDEWAQSKATVRPPDQLELTDAELKEEFTRILTANNPHAPQNIVRYSFKKQWSLGFIPKLKRKIPVNYWGQDEGEISNETVRVIYSLGIFIMKIVTILLNINIEHLLCVRHCVNRLFLLFLILIIIMQIR

SEQ ID NO: 44468 - protein, 402 aa, Homo sapiens
MRTTLTPSCSSALDPQEIKRAATHLSWHPDGNRKLAVAYSCLDFQRAPVGMSSDSYIWDLENPNKPELALKPSSPLVTLEFNPKDSHVLLGGCYNGQIACWDTRKGSLVAELSTIESSHRDPVYGTIWLQSKTGTECFSASTDGQVMWWDIRKMSEPTEVVILDITKKEQLENALGAISLEFESTLPTKFMVGTEQGIVISCNRKAKTSAEKIVCTFPGHHGPIYALQRNPFYPKNFLTVGDWTARIWSEDSRESSIMWTKYHMAYLTDAAWSPVRPTVFFTTRMDGTLDIWDFMFEQCDPTLSLKVCDEALFCLRVQDNGCLIACGSQLGTTTLLEVSPGLSTLQRNEKNVASSMFERETRREKILEARHREMRLKEKAATKSRRRPGGGGGRGSSGGRRG

SEQ ID NO: 44469 - protein, 605 aa, Homo sapiens
MEIVYVYVKKRSEFGKQCNFSDRQAELNIDIMPNPELAEQFVERNPVDTGIQCSISMSEHEANSERFEMETRGVNHVEGGWPKDVNPLELEQTIRFRKKVEKDENYVNAIMQLGSIMEHCIKQNNAIDIYEEYFNDEEAMEVMEEDPSAKTINVFRDPQEIKRAATHLSWHPDGNRKLAVAYSCLDFQRAPVGMSSDSYIWDLENPNKPELALKPSSPLVTLEFNPKDSHVLLGGCYNGQIACWDTRKGSLVAELSTIESSHRDPVYGTIWLQSKTGTECFSASTDGQVMWWDIRKMSEPTEVVILDITKKEQLENALGAISLEFESTLPTKFMVGTEQGIVISCNRKAKTSAEKIVCTFPGHHGPIYALQRNPFYPKNFLTVGDWTARIWSEDSRESSIMWTKYHMAYLTDAAWSPVRPTVFFTTRMDGTLDIWDFMFEQCDPTLSLKVCDEALFCLRVQDNGCLIACGSQLGTTTLLEVSPGLSTLQRNEKNVASSMFERETRREKILEARHREMRLKEKGKAEGRDEEQTDEELAVDLEALVSKAEEEFFDIIFAELKKKEADAIKLTPVPQQPSPEEDQVVEEGEEAAGEEGDEEVEEDLA

SEQ ID NO: 44470 - protein, 605 aa, Homo sapiens; identical to SEQ ID NO: 44469

SEQ ID NO: 44471 - protein, 77 aa, Homo sapiens
MKKLKILYMSNNLVKDWAEFVKLAELPCLEDLVFVGNPLEEKHSAENNWIEEATKRVPKLKKLDGTPVIKGDEEEDN

SEQ ID NO: 44472 - protein, 151 aa, Homo sapiens
MDASLSMLANCEKLSLSTNCIEKIANLNGLKNLRILSLGRNNIKNLNGLEAVGDTLEELWISYNFIEKLKGIHIMKKLKILYMSNNLVKDWAEFVKLAELPCLEDLVFVGNPLEEKHSAENNWIEEATKRVPKLKKLDGTPVIKGDEEEDN

SEQ ID NO: 44473 - protein, 190 aa, Homo sapiens
MAKATTIKEALARWEEKTGQRPSEAKEIKLYAQIPPIEKMDASLSMLANCEKLSLSTNCIEKIANLNGLKNLRILSLGRNNIKNLNGLEAVGDTLEELWISYNFIEKLKGIHIMKKLKILYMSNNLVKDWAEFVKLAELPCLEDLVFVGNPLEEKHSAENNWIEEATKRVPKLKKLDGTPVIKGDEEEDN

SEQ ID NO: 44474 - protein, 57 aa, Homo sapiens
MKKLKILYMSNNLVKDWAEFVKLAELPCLEDLVFVGNPLEEKHSAENNWIEEATKRV

SEQ ID NO: 44475 - protein, 151 aa, Homo sapiens; identical to SEQ ID NO: 44472

SEQ ID NO: 44476 - protein, 64 aa, Homo sapiens
MKKLKILYMSNNLVKDWAEFVKLAELPCLEDLVFVGNPLEEKHSAENNWIEEATKRVPKLKKLD

SEQ ID NO: 44477 - protein, 52 aa, Homo sapiens
MDASLSMLANCEKLSLSTNCIEKIANLNGLKNLRILSLGRNNIKNLNGLEAV

SEQ ID NO: 44478 - protein, 65 aa, Homo sapiens
MKKLKILYMSNNLVKDWAEFVKLAELPCLEDLVFVGNPLEEKHSAENNWIEEATKRVPKLKKLDG

SEQ ID NO: 44479 - protein, 280 aa, Homo sapiens
MVTANKAHTGQGSCWVATLASAMIPPADSLLKYDTPVLVSRNTEKRSPKARLLKVSPQQPGPSGSAPQPPKTKLPSTPCVPDPTKQAEEILNAILPPREWVEDTQLWIQQVSSTPSTRMDVVHLQEQLDLKLQQRQARETGICPVRRELYSQCFDELIREVTINCAERGLLLLRVRDEIRMTIAAYQTLYESSVAFGMRKALQAEQGKSDMERKIAELETEKRDLERQVNEQKAKCEATEKRESERRQVEEKKHNEEIQFLKRTNQQLKAQLEGIIAPKK

SEQ ID NO: 44480 - protein, 132 aa, Homo sapiens
MPYYPQDELIREVTINCAERGLLLLRVRDEIRMTIAAYQTLYESSVAFGMRKALQAEQGKSDMERKIAELETEKRDLERQVNEQKAKCEATEKRESERRQVEEKKHNEEIQFLKRTNQQLKAQLEGIIAPKK

SEQ ID NO: 44481 - protein, 4646 aa, Homo sapiens [sequence omitted]

SEQ ID NO: 44482 - protein, 632 aa, Homo sapiens
MSDKSELKAELERKKQRLAQIREEKKRKEEERKKKETDQKKEAVAPVQEESDLEKKRREAEALLQSMGLTPESPIVPPPMSPSSKSVSTPSEAGSQDSGDGAVGSRTLHWDTDPSVLQLHSDSDLGRGPIKLGMAKITQVDFPPREIVTYTKETQTPVMAQPKEDEEEDDDVVAPKPPIEPEEEKTLKKDEENDSKAPPHELTEEEKQQILHSEEFLSFFDHSTRIVERALSEQINIFFDYSGRDLEDKEGEIQAGAKLSLNRQFFDERWSKHRVVSCLDWSSQYPELLVASYNNNEDAPHEPDGVALVWNMKYKKTTPEYVFHCQSAVMSATFAKFHPNLVVGGTYSGQIVLWDNRSNKRTPVQRTPLSAAAHTHPVYCVNVVGTQNAHNLISISTDGKICSWSLDMLSHPQDSMELVHKQSKAVAVTSMSFPVGDVNNFVVGSEEGSVYTACRHGSKAGISEMFEGHQGPITGIHCHAAVGAVDFSHLFVTSSFDWTVKLWTTKNNKPLYSFEDNADYVYDVMWSPTHPALFACVDGMGRLDLWNLNNDTEVPTASISVEGNPALNRVRWTHSGREIAVGDSEGQIVIYDVGEQIAVPRNDEWARFGRTLAEINANRADAEEEAATRIPA

SEQ ID NO: 44483 - protein, 612 aa, Homo sapiens
MSDKSELKAELERKKQRLAQIREEKKRKEEERKKKETDQKKEAVAPVQEESDLEKKRREAEALLQSMGLTPESPIVPPPMSPSSKSVSTPSEAGSQDSGDGAVGSRRGPIKLGMAKITQVDFPPREIVTYTKETQTPVMAQPKEDEEEDDDVVAPKPPIEPEEEKTLKKDEENDSKAPPHELTEEEKQQILHSEEFLSFFDHSTRIVERALSEQINIFFDYSGRDLEDKEGEIQAGAKLSLNRQFFDERWSKHRVVSCLDWSSQYPELLVASYNNNEDAPHEPDGVALVWNMKYKKTTPEYVFHCQSAVMSATFAKFHPNLVVGGTYSGQIVLWDNRSNKRTPVQRTPLSAAAHTHPVYCVNVVGTQNAHNLISISTDGKICSWSLDMLSHPQDSMELVHKQSKAVAVTSMSFPVGDVNNFVVGSEEGSVYTACRHGSKAGISEMFEGHQGPITGIHCHAAVGAVDFSHLFVTSSFDWTVKLWTTKNNKPLYSFEDNADYVYDVMWSPTHPALFACVDGMGRLDLWNLNNDTEVPTASISVEGNPALNRVRWTHSGREIAVGDSEGQIVIYDVGEQIAVPRNDEWARFGRTLAEINANRADAEEEAATRIPA

SEQ ID NO: 44484 - protein, 630 aa, Homo sapiens
MSDKSELKAELERKKQRLAQIREEKKRKEEERKKKETDQKKEAVAPVQEESDLEKKRREAEALLQSMGLTPESPIAEQPLRVVTADTCLFHYLVPPPMSPSSKSVSTPSEAGSQDSGDGAVGSRRGPIKLGMAKITQVDFPPREIVTYTKETQTPVMAQPKEDEEEDDDVVAPKPPIEPEEEKTLKKDEENDSKAPPHELTEEEKQQILHSEEFLSFFDHSTRIVERALSEQINIFFDYSGRDLEDKEGEIQAGAKLSLNRQFFDERWSKHRVVSCLDWSSQYPELLVASYNNNEDAPHEPDGVALVWNMKYKKTTPEYVFHCQSAVMSATFAKFHPNLVVGGTYSGQIVLWDNRSNKRTPVQRTPLSAAAHTHPVYCVNVVGTQNAHNLISISTDGKICSWSLDMLSHPQDSMELVHKQSKAVAVTSMSFPVGDVNNFVVGSEEGSVYTACRHGSKAGISEMFEGHQGPITGIHCHAAVGAVDFSHLFVTSSFDWTVKLWTTKNNKPLYSFEDNADYVYDVMWSPTHPALFACVDGMGRLDLWNLNNDTEVPTASISVEGNPALNRVRWTHSGREIAVGDSEGQIVIYDVGEQIAVPRNDEWARFGRTLAEINANRADAEEEAATRIPA

SEQ ID NO: 44485 - protein, 638 aa, Homo sapiens
MSDKSELKAELERKKQRLAQIREEKKRKEEERKKKETDQKKEAVAPVQEESDLEKKRREAEALLQSMGLTPESPIVFSEYWVPPPMSPSSKSVSTPSEAGSQDSGDGAVGSRTLHWDTDPSVLQLHSDSDLGRGPIKLGMAKITQVDFPPREIVTYTKETQTPVMAQPKEDEEEDDDVVAPKPPIEPEEEKTLKKDEENDSKAPPHELTEEEKQQILHSEEFLSFFDHSTRIVERALSEQINIFFDYSGRDLEDKEGEIQAGAKLSLNRQFFDERWSKHRVVSCLDWSSQYPELLVASYNNNEDAPHEPDGVALVWNMKYKKTTPEYVFHCQSAVMSATFAKFHPNLVVGGTYSGQIVLWDNRSNKRTPVQRTPLSAAAHTHPVYCVNVVGTQNAHNLISISTDGKICSWSLDMLSHPQDSMELVHKQSKAVAVTSMSFPVGDVNNFVVGSEEGSVYTACRHGSKAGISEMFEGHQGPITGIHCHAAVGAVDFSHLFVTSSFDWTVKLWTTKNNKPLYSFEDNADYVYDVMWSPTHPALFACVDGMGRLDLWNLNNDTEVPTASISVEGNPALNRVRWTHSGREIAVGDSEGQIVIYDVGEQIAVPRNDEWARFGRTLAEINANRADAEEEAATRIPA

SEQ ID NO: 44486 - protein, 612 aa, Homo sapiens; identical to SEQ ID NO: 44483

SEQ ID NO: 44487 - protein, 632 aa, Homo sapiens; identical to SEQ ID NO: 44482

SEQ ID NO: 44488 - protein, 637 aa, Homo sapiens
MSDKSELKAELERKKQRLAQIREEKKRKEEERKKKETDQKKEAVAPVQEESDLEKKRREAEALLQSMGLTPESPIVFSEYWVPPPMSPSSKSVSTPSEAGSQDSGDGAVGSRTLHWDTDPSVLQLHSDSDLGRGPIKLGMAKITQVDFPPREIVTYTKETQTPVMAQPKEDEEEDDDVVAPKPPIEPEEEKTLKKDEENDSKAPPHELTEEEKQQILHSEEFLSFFDHSTRIVERALSEQINIFFDYSGRDLEDKEGEIQAGAKLSLNRQFFDERWSKHRVVSCLDWSSQYPELLVASYNNNEDAPHEPDGVALVWNMKYKKTTPEYVFHCQSAVMSATFAKFHPNLVVGGTYSGQIVLWDNRSNKRTPVQRTPLSAAAHTHPVYCVNVVGTQNAHNLISISTDGKICSWSLDMLSHPQDSMELVHKQSKAVAVTSMSFPVGDVNNFVVGSEEGSVYTACRHGSKAGISEMFEGHQGPITGIHCHAAVGAVDFSHLFVTSSFDWTVKLWTTKNNKPLYSFEDNADYVYDVMWSPTHPALFACVDGMGRLDLWNLNNDTEVPTASISVEGNPALNRVRWTHSGREIAVGDSEGQIVIYDVGEIAVPRNDEWARFGRTLAEINANRADAEEEAATRIPA

SEQ ID NO: 44489 - protein, 638 aa, Homo sapiens; identical to SEQ ID NO: 44485

SEQ ID NO: 44490 - protein, 611 aa, Homo sapiens
MSDKSELKAELERKKQRLAQIREEKKRKEEERKKKETDQKKEAVAPVQEESDLEKKRREAEALLQSMGLTPESPIVPPPMSPSSKSVSTPSEAGSQDSGDGAVGSRRGPIKLGMAKITQVDFPPREIVTYTKETQTPVMAQPKEDEEEDDDVVAPKPPIEPEEEKTLKKDEENDSKAPPHELTEEEKQQILHSEEFLSFFDHSTRIVERALSEQINIFFDYSGRDLEDKEGEIQAGAKLSLNRQFFDERWSKHRVVSCLDWSSQYPELLVASYNNNEDAPHEPDGVALVWNMKYKKTTPEYVFHCQSAVMSATFAKFHPNLVVGGTYSGQIVLWDNRSNKRTPVQRTPLSAAAHTHPVYCVNVVGTQNAHNLISISTDGKICSWSLDMLSHPQDSMELVHKQSKAVAVTSMSFPVGDVNNFVVGSEEGSVYTACRHGSKAGISEMFEGHQGPITGIHCHAAVGAVDFSHLFVTSSFDWTVKLWTTKNNKPLYSFEDNADYVYDVMWSPTHPALFACVDGMGRLDLWNLNNDTEVPTASISVEGNPALNRVRWTHSGREIAVGDSEGQIVIYDVGEIAVPRNDEWARFGRTLAEINANRADAEEEAATRIPA

SEQ ID NO: 44491 - protein, 638 aa, Homo sapiens
MSDKSELKAELERKKQRLAQIREEKKRKEEERKKKETDQKKEAVAPVQEESDLEKKRREAEALLQSMGLTPESPIDIAEYLVPPPMSPSSKSVSTPSEAGSQDSGDGAVGSRTLHWDTDPSVLQLHSDSDLGRGPIKLGMAKITQVDFPPREIVTYTKETQTPVMAQPKEDEEEDDDVVAPKPPIEPEEEKTLKKDEENDSKAPPHELTEEEKQQILHSEEFLSFFDHSTRIVERALSEQINIFFDYSGRDLEDKEGEIQAGAKLSLNRQFFDERWSKHRVVSCLDWSSQYPELLVASYNNNEDAPHEPDGVALVWNMKYKKTTPEYVFHCQSAVMSATFAKFHPNLVVGGTYSGQIVLWDNRSNKRTPVQRTPLSAAAHTHPVYCVNVVGTQNAHNLISISTDGKICSWSLDMLSHPQDSMELVHKQSKAVAVTSMSFPVGDVNNFVVGSEEGSVYTACRHGSKAGISEMFEGHQGPITGIHCHAAVGAVDFSHLFVTSSFDWTVKLWTTKNNKPLYSFEDNADYVYDVMWSPTHPALFACVDGMGRLDLWNLNNDTEVPTASISVEGNPALNRVRWTHSGREIAVGDSEGQIVIYDVGEQIAVPRNDEWARFGRTLAEINANRADAEEEAATRIPA

SEQ ID NO: 44492 - protein, 920 aa, Homo sapiens
MANGTADVRKLFIFTTTQNYFGLMSELWDQPLLCNCLEINNFLDDGNQMLLRVQRSDAGISFSNTIEFGDTKDKVLVFFKLRPEVITDENLHDNILVSSMLESPISSLYQAVRQVFAPMLLKDQEWSRNFDPKLQNLLSELEAGLGIVLRRSDTNLTKLKFKEDDTRGILTPSDEFQFWIEQAHRGNKQISKERANYFKELFETIAREFYNLDSLSLLEVVDLVETTQDVVDDVWRQTEHDHYPESRMLHLLDIIGGSFGRFVQKKLGTLNLWEDPYYLVKESLKAGISICEQWVIVCNHLTGQVWQRYVPHPWKNEKYFPETLDKLGKRLEEVLAIRTIHEKFLYFLPASEEKIICLTRVFEPFTGLNPVQYNPYTEPLWKAAVSQYEKIIAPAEQKIAGKLKNYISEIQDSPQQLLQAFLKYKELVKRPTISKELMLERETLLARLVDSIKDFRLDFENRCRGIPGDASGPLSGKNLSEVVNSIVWVRQLELKVDDTIKIAEALLSDLPGFRCFHQSAKDLLDQLKLYEQEQFDDWSRDIQSGLSDSRSGLCIEASSRIMELDSNDGLLKVHYSDRLVILLREVRQLSALGFVIPAKIQQVANIAQKFCKQAIILKQVAHFYNSIDQQMIQSQRPMMLQSALAFEQIIKNSKAGSGGKSQITWDNPKELEGYIQKLQNAAERLATENRKLRKWHTTFCEKVVVLMNIDLLRQQQRWKDGLQELRTGLATVEAQCPLAWQSKWEGPEDPLQYLRGLVARALAIQNWVDKAEKQALLSETLDLSELFHPDTFLNALRQETARAVGRSVDSLKFVASWKGRLQEAKLQIKISGLLLEGCSFDGNQLSENQLDSPSVSSVLPCFMGWIPQDACGPYSPDECISLPVYTSAERDRVVTNIDVPCGGNQDQWIQCGAALFLKNQ

SEQ ID NO: 44493 - protein, 4307 aa, Homo sapiens
MANGTADVRKLFIFTTTQNYFGLMSELWDQPLLCNCLEINNFLDDGNQMLLRVQRSDAGISFSNTIEFGDTKDKVLVFFKLRPEVITDENLHDNILVSSMLESPISSLYQAVRQVFAPMLLKDQEWSRNFDPKLQNLLSELEAGLGIVLRRSDTNLTKLKFKEDDTRGILTPSDEFQFWIEQAHRGNKQISKERANYFKELFETIAREFYNLDSLSLLEVVDLVETTQDVVDDVWRQTEHDHYPESRMLHLLDIIGGSFGRFVQKKLGTLNLWEDPYYLVKESLKAGISICEQWVIVCNHLTGQVWQRYVPHPWKNEKYFPETLDKLGKRLEEVLAIRTIHEKFLYFLPASEEKIICLTRVFEPFTGLNPVQYNPYTEPLWKAAVSQYEKIIAPAEQKIAGKLKNYISEIQDSPQQLLQAFLKYKELVKRPTISKELMLERETLLARLVDSIKDFRLDFENRCRGIPGDASGPLSGKNLSEVVNSIVWVRQLELKVDDTIKIAEALLSDLPGFRCFHQSAKDLLDQLKLYEQEQFDDWSRDIQSGLSDSRSGLCIEASSRIMELDSNDGLLKVHYSDRLVILLREVRQLSALGFVIPAKIQQVANIAQKFCKQAIILKQVAHFYNSIDQQMIQSQRPMMLQSALAFEQIIKNSKAGSGGKSQITWDNPKELEGYIQKLQNAAERLATENRKLRKWHTTFCEKVVVLMNIDLLRQQQRWKDGLQELRTGLATVEAQGFQASDMHAWKQHWNHQLYKALEHQYQMGLEALNENLPEINIDLTYKQGRLQFRPPFEEIRAKYYREMKRFIGIPNQFKGVGEAGDESIFSIMIDRNASGFLTIFSKAEDLFRRLSAVLHQHKEWIVIGQVDMEALVEKHLFTVHDWEKNFKALKIKGKEVERLPSAVKVDCLNINCNPVKTVIDDLIQKLFDLLVLSLKKSIQAHLHEIDTFVTEAMEVLTIMPQSVEEIGDANLQYSKLQERKPEILPLFQEAEDKNRLLRTVAGGGLETISNLKAKWDKFELMMESHQLMIKDQIEVMKGNVKSRLQIYYQELEKFKARWDQLKPGDDVIETGQHNTLDKSAKLIKEKKIEFDDLEVTRKKLVDDCHHFRLEEPNFSLASSISKDIESCAQIWAFYEEFQQGFQEMANEDWITFRTKTYLFEEFLMNWHDRLRKVEEHSVMTVKLQSEVDKYKIVIPILKYVRGEHLSPDHWLDLFRLLGLPRGTSLEKLLFGDLLRVADTIVAKAADLKDLNSRAQGEVTIREALRELDLWGVGAVFTLIDYEDSQSRTMKLIKDWKDIVNQVGDNRCLLQSLKDSPYYKGFEDKVSIWERKLAELDEYLQNLNHIQRKWVYLEPIFGRGALPKEQTRFNRVDEDFRSIMTDIKKDNRVTTLTTHAGIRNSLLTILDQLQRCQKSLNEFLEEKRSAFPRFYFIGDDDLLEILGQSTNPSVIQSHLKKLFAGINSVCFDEKSKHITAMKSLEGEVVPFKNKVPLSNNVETWLNDLALEMKKTLEQLLKECVTTGRSSQGAVDPSLFPSQILCLAEQIKFTEDVENAIKDHSLHQIETQLVNKLEQYTNIDTSSEDPGNTESGILELKLKALILDIIHNIDVVKQLNQIQVHTTEDWAWKKQLRFYMKSDHTCCVQMVDSEFQYTYEYQGNASKLVYTPLTDKCYLTLTQAMKMGLGGNPYGPAGTGKTESVKALGGLLGRQVLVFNCDEGIDVKSMGRIFVGLVKCGAWGCFDEFNRLEESVLSAVSMQIQTIQDALKNHRTVCELLGKEVEVNSNSGIFITMNPAGKGYGGRQKLPDNLKQLFRPVAMSHPDNELIAEVILYSEGFKDAKVLSRKLVAIFNLSRELLTPQQHYDWGLRALKTVLRGSGNLLRQLNKSGTTQNANESHIVVQALRLNTMSKFTFTDCTRFDALIKDVFPGIELKEVEYDELSAALKQVFEEANYEIIPNQIKKALELYEQLCQRMGVVIVGPSGAGKSTLWRMLRAALCKTGKVVKQYTMNPKAMPRYQLLGHIDMDTREWSDGVLTNSARQVVREPQDVSSWIICDGDIDPEWIESLNSVLDDNRLLTMPSGERIQFGPNVNFVFETHDLSCASPATISRMGMIFLSDEETDLNSLIKSWLRNQPAEYRNNLENWIGDYFEKALQWVLKQNDYVVETSLVGTVMNGLSHLHGCRDHDEFIINLIRGLGGNLNMKSRLEFTKEVFHWARESPPDFHKPMDTYYDSTRGRLATYVLKKPEDLTADDFSNGLTLPVIQTPDMQRGLDYFKPWLSSDTKQPFILVGPEGCGKGMLLRYAFSQLRSTQIATVHCSAQTTSRHLLQKLSQTCMVISTNTGRVYRPKDCERLVLYLKDINLPKLDKWGTSTLVAFLQQVLTYQGFYDENLEWVGLENIQIVASMSAGGRLGRHKLTTRFTSIVRLCSIDYPEREQLQTIYGAYLEPVLHKNLKNHSIWGSSSKIYLLAGSMVQVYEQVRAKFTVDDYSHYFFTPCILTQWVLGLFRYDLEGGSSNHPLDYVLEIVAYEARRLFRDKIVGAKELHLFDIILTSVFQGDWGSDILDNMSDSFYVTWGARHNSGARAAPGQPLPPHGKPLGKLNSTDLKDVIKKGLIHYGRDNQNLDILLFHEVLEYMSRIDRVLSFPGGSLLLAGRSGVGRRTITSLVSHMHGAVLFSPKISRGYELKQFKNDLKHVLQLAGIEAQQVVLLLEDYQFVHPTFLEMINSLLSSGEVPGLYTLEELEPLLLPLKDQASQDGFFGPVFNYFTYRIQQNLHIVLIMDSANSNFMINCESNPALHKKCQVLWMEGWSNSSMKKIPEMLFSETGGGEKYNDKKRKEEKKKNSVDPDFLKSFLLIHESCKAYGATPSRYMTFLHVYSAISSSKKKELLKRQSHLQAGVSKLNEAKALVDELNRKAGEQSVLLKTKQDEADAALQMITVSMQDASEQKTELERLKHRIAEEVVKIEERKNKIDDELKEVQPLVNEAKLAVGNIKPESLSEIRSLRMPPDVIRDILEGVLRLMGIFDTSWVSMKSFLAKRGVREDIATFDARNISKEIRESVEELLFKNKGSFDPKNAKRASTAAAPLAAWVKANIQYSHVLERIHPLETEQAGLESNLKKTEDRKRKLEELLNSVGQKVSELKEKFQSRTSEAAKLEAEVSKAQETIKAAEVLINQLDREHKRWNAQVVEITEELATLPKRAQLAAAFITYLSAAPESLRKTCLEEWTKSAGLEKFDLRRFLCTESEQLIWKSEGLPSDDLSIENALVILQSRVCPFLIDPSSQATEWLKTHLKDSRLEVINQQDSNFITALELAVRFGKTLIIQEMDGVEPVLYPLLRRDLVAQGPRYVVQIGDKIIDYNEEFRLFLSTRNPNPFIPPDAASIVTEVNFTTTRSGLRGQLLALTIQHEKPDLEEQKTKLLQQEEDKKIQLAKLEESLLETLATSQGNILENKDLIESLNQTKASSALIQESLKESYKLQISLDQERDAYLPLAESASKMYFIISDLSKINNMYRFSLAAFLRLFQRALQNKQDSENTEQRIQSLISSLQHMVYEYICRCLFKADQLMFALHFVRGMHPELFQENEWDTFTGVVVGDMLRKADSQQKIRDQLPSWIDQERSWAVATLKIALPSLYQTLCFEDAALWRTYYNNSMCEQEFPSILAKKVSLFQQILVVQALRPDRLQSAMALFACKTLGLKEVSPLPLNLKRLYKETLEIEPILIIISPGADPSQELQELANAERSGECYHQVAMGQGQADLAIQMLKECARNGDWLCLKNLHLVVSWLPVLEKELNTLQPKDTFRLWLTAEVHPNFTPILLQSSLKITYESPPGLKKNLMRTYESWTPEQISKKDNTHRAHALFSLAWFHAACQERRNYIPQGWTKFYEFSLSDLRAGYNIIDRLFDGAKDVQWEFVHGLLENAIYGGRIDNYFDLRVLQSYLKQFFNSSVIDVFNQRNKKSIFPYSVSLPQSCSILDYRAVIEKIPEDDKPSFFGLPANIARSSQRMISSQVISQLRILGRSITAGSKFDREIWSNELSPVLNLWKKLNQNSNLIHQKVPPPNDRQGSPILSFIILEQFNAIRLVQSVHQSLAALSKVIRGTTLLSSEVQKLASALLNQKCPLAWQSKWEGPEDPLQYLRGLVARALAIQNWVDKAEKQALLSETLDLSELFHPDTFLNALRQETARAVGRSVDSLKFVASWKGRLQEAKLQIKISGLLLEGCSFDGNQLSENQLDSPSVSSVLPCFMGWIPQDACGPYSPDECISLPVYTSAERDRVVTNIDVPCGGNQDQWIQCGAALFLKNQ

SEQ ID NO: 44494 - protein, 4314 aa, Homo sapiens
MANGTADVRKLFIFTTTQNYFGLMSELWDQPLLCNCLEINNFLDDGNQMLLRVQRSDAGISFSNTIEFGDTKDKVLVFFKLRPEVITDENLHDNILVSSMLESPISSLYQAVRQVFAPMLLKDQEWSRNFDPKLQNLLSELEAGLGIVLRRSDTNLTKLKFKEDDTRGILTPSDEFQFWIEQAHRGNKQISKERANYFKELFETIAREFYNLDSLSLLEVVDLVETTQDVVDDVWRQTEHDHYPESRMLHLLDIIGGSFGRFVQKKLGTLNLWEDPYYLVKESLKAGISICEQWVIVCNHLTGQVWQRYVPHPWKNEKYFPETLDKLGKRLEEVLAIRTIHEKFLYFLPASEEKIICLTRVFEPFTGLNPVQYNPYTEPLWKAAVSQYEKIIAPAEQKIAGKLKNYISEIQDSPQQLLQAFLKYKELVKRPTISKELMLERETLLARLVDSIKDFRLDFENRCRGIPGDASGPLSGKNLSEVVNSIVWVRQLELKVDDTIKIAEALLSDLPGFRCFHQSAKDLLDQLKLYEQEQFDDWSRDIQSGLSDSRSGLCIEASSRIMELDSNDGLLKVHYSDRLVILLREVRQLSALGFVIPAKIQQVANIAQKFCKQAIILKQVAHFYNSIDQQMIQSQRPMMLQSALAFEQIIKNSKAGSGGKSQITWDNPKELEGYIQKLQNAAERLATENRKLRKWHTTFCEKVVVLMNIDLLRQQQRWKDGLQELRTGLATVEAQGFQASDMHAWKQHWNHQLYKALEHQYQMGLEALNENLPEINIDLTYKQGRLQFRPPFEEIRAKYYREMKRFIGIPNQFKGVGEAGDESIFSIMIDRNASGFLTIFSKAEDLFRRLSAVLHQHKEWIVIGQVDMEALVEKHLFTVHDWEKNFKALKIKGKEVERLPSAVKVDCLNINCNPVKTVIDDLIQKLFDLLVLSLKKSIQAHLHEIDTFVTEAMEVLTIMPQSVEEIGDANLQYSKLQERKPEILPLFQEAEDKNRLLRTVAGGGLETISNLKAKWDKFELMMESHQLMIKDQIEVMKGNVKSRLQIYYQELEKFKARWDQLKPGDDVIETGQHNTLDKSAKLIKEKKIEFDDLEVTRKKLVDDCHHFRLEEPNFSLASSISKDIESCAQIWAFYEEFQQGFQEMANEDWITFRTKTYLFEEFLMNWHDRLRKVEEHSVMTVKLQSEVDKYKIVIPILKYVRGEHLSPDHWLDLFRLLGLPRGTSLEKLLFGDLLRVADTIVAKAADLKDLNSRAQGEVTIREALRELDLWGVGAVFTLIDYEDSQSRTMKLIKDWKDIVNQVGDNRCLLQSLKDSPYYKGFEDKVSIWERKLAELDEYLQNLNHIQRKWVYLEPIFGRGALPKEQTRFNRVDEDFRSIMTDIKKDNRVTTLTTHAGIRNSLLTILDQLQRCQKSLNEFLEEKRSAFPRFYFIGDDDLLEILGQSTNPSVIQSHLKKLFAGINSVCFDEKSKHITAMKSLEGEVVPFKNKVPLSNNVETWLNDLALEMKKTLEQLLKECVTTGRSSQGAVDPSLFPSQILCLAEQIKFTEDVENAIKDHSLHQIETQLVNKLEQYTNIDTSSEDPGNTESGILELKLKALILDIIHNIDVVKQLNQIQVHTTEDWAWKKQLRFYMKSDHTCCVQMVDSEFQYTYEYQGNASKLVYTPLTDKCYLTLTQAMKMGLGGNPYGPAGTGKTESVKALGGLLGRQVLVFNCDEGIDVKSMGRIFVGLVKCGAWGCFDEFNRLEESVLSAVSMQIQTIQDALKNHRTVCELLGKEVEVNSNSGIFITMNPAGKGYGGRQKLPDNLKQLFRPVAMSHPDNELIAEVILYSEGFKDAKVLSRKLVAIFNLSRELLTPQQHYDWGLRALKTVLRGSGNLLRQLNKSGTTQNANESHIVVQALRLNTMSKFTFTDCTRFDALIKDVFPGIELKEVEYDELSAALKQVFEEANYEIIPNQIKKALELYEQLCQRMGVVIVGPSGAGKSTLWRMLRAALCKTGKVVKQYTMNPKAMPRYQLLGHIDMDTREWSDGVLTNSARQVVREPQDVSSWIICDGDIDPEWIESLNSVLDDNRLLTMPSGERIQFGPNVNFVFETHDLSCASPATISRMGMIFLSDEETDLNSLIKSWLRNQPAEYRNNLENWIGDYFEKALQWVLKQNDYVVETSLVGTVMNGLSHLHGCRDHDEFIINLIRGLGGNLNMKSRLEFTKEVFHWARESPPDFHKPMDTYYDSTRGRLATYVLKKPEDLTADDFSNGLTLPVIQTPDMQRGLDYFKPWLSSDTKQPFILVGPEGCGKGMLLRYAFSQLRSTQIATVHCSAQTTSRHLLQKLSQTCMVISTNTGRVYRPKDCERLVLYLKDINLPKLDKWGTSTLVAFLQQVLTYQGFYDENLEWVGLENIQIVASMSAGGRLGRHKLTTRFTSIVRLCSIDYPEREQLQTIYGAYLEPVLHKNLKNHSIWGSSSKIYLLAGSMVQVYEQVRAKFTVDDYSHYFFTPCILTQWVLGLFRYDLEGGSSNHPLDYVLEIVAYEARRLFRDKIVGAKELHLFDIILTSVFQGDWGSDILDNMSDSFYVTWGARHNSGARAAPGQPLPPHGKPLGKLNSTDLKDVIKKGLIHYGRDNQNLDILLFHEVLEYMSRIDRVLSFPGGSLLLAGRSGVGRRTITSLVSHMHGAVLFSPKISRGYELKQFKNDLKHVLQLAGIEAQQVVLLLEDYQFVHPTFLEMINSLLSSGEVPGLYTLEELEPLLLPLKDQASQDGFFGPVFNYFTYRIQQNLHIVLIMDSANSNFMINCESNPALHKKCQVLWMEGWSNSSMKKIPEMLFSETGGGEKYNDKKRKEEKKKNSVDPDFLKSFLLIHESCKAYGATPSRYMTFLHVYSAISSSKKKELLKRQSHLQAGVSKLNEAKALVDELNRKAGEQSVLLKTKQDEADAALQMITVSMQDASEQKTELERLKHRIAEEVVKIEERKNKIDDELKEVQPLVNEAKLAVGNIKPESLSEIRSLRMPPDVIRDILEGVLRLMGIFDTSWVSMKSFLAKRGVREDIATFDARNISKEIRESVEELLFKNKGSFDPKNAKRASTAAAPLAAWVKANIQYSHVLERIHPLETEQAGLESNLKKTEDRKRKLEELLNSVGQKVSELKEKFQSRTSEAAKLEAEVSKAQETIKAAEVLINQLDREHKRWNAQVVEITEELATLPKRAQLAAAFITYLSAAPESLRKTCLEEWTKSAGLEKFDLRRFLCTESEQLIWKSEGLPSDDLSIENALVILQIIGLKSWSRVCPFLIDPSSQATEWLKTHLKDSRLEVINQQDSNFITALELAVRFGKTLIIQEMDGVEPVLYPLLRRDLVAQGPRYVVQIGDKIIDYNEEFRLFLSTRNPNPFIPPDAASIVTEVNFTTTRSGLRGQLLALTIQHEKPDLEEQKTKLLQQEEDKKIQLAKLEESLLETLATSQGNILENKDLIESLNQTKASSALIQESLKESYKLQISLDQERDAYLPLAESASKMYFIISDLSKINNMYRFSLAAFLRLFQRALQNKQDSENTEQRIQSLISSLQHMVYEYICRCLFKADQLMFALHFVRGMHPELFQENEWDTFTGVVVGDMLRKADSQQKIRDQLPSWIDQERSWAVATLKIALPSLYQTLCFEDAALWRTYYNNSMCEQEFPSILAKKVSLFQQILVVQALRPDRLQSAMALFACKTLGLKEVSPLPLNLKRLYKETLEIEPILIIISPGADPSQELQELANAERSGECYHQVAMGQGQADLAIQMLKECARNGDWLCLKNLHLVVSWLPVLEKELNTLQPKDTFRLWLTAEVHPNFTPILLQSSLKITYESPPGLKKNLMRTYESWTPEQISKKDNTHRAHALFSLAWFHAACQERRNYIPQGWTKFYEFSLSDLRAGYNIIDRLFDGAKDVQWEFVHGLLENAIYGGRIDNYFDLRVLQSYLKQFFNSSVIDVFNQRNKKSIFPYSVSLPQSCSILDYRAVIEKIPEDDKPSFFGLPANIARSSQRMISSQVISQLRILGRSITAGSKFDREIWSNELSPVLNLWKKLNQNSNLIHQKVPPPNDRQGSPILSFIILEQFNAIRLVQSVHQSLAALSKVIRGTTLLSSEVQKLASALLNQKCPLAWQSKWEGPEDPLQYLRGLVARALAIQNWVDKAEKQALLSETLDLSELFHPDTFLNALRQETARAVGRSVDSLKFVASWKGRLQEAKLQIKISGLLLEGCSFDGNQLSENQLDSPSVSSVLPCFMGWIPQDACGPYSPDECISLPVYTSAERDRVVTNIDVPCGGNQDQWIQCGAALFLKNQ

SEQ ID NO: 44495 - protein, 504 aa, Homo sapiens [sequence omitted]

SEQ ID NO: 44496 - protein, 89 aa, Homo sapiens
MCDRKAVIKNADMSEEMQQDSVECATQALEKYNIEKDIAAHIKKEFDKKYNPTWHCIVGRNFGSYVTHETKHFIYFYLGQVAILLFKSG

SEQ ID NO: 44497 - protein, 89 aa, Homo sapiens; identical to SEQ ID NO: 44496

SEQ ID NO: 44498 - protein, 89 aa, Homo sapiens; identical to SEQ ID NO: 44496

SEQ ID NO: 44499 - protein, 89 aa, Homo sapiens; identical to SEQ ID NO: 44496

SEQ ID NO: 44500 - protein, 42 aa, Homo sapiens
MCDRKAVIKNADMSEEMQQDSVECATQALEKYNIEKDIAAHI

SEQ ID NO: 44501 - protein, 89 aa, Homo sapiens; identical to SEQ ID NO: 44496

SEQ ID NO: 44502 - protein, 89 aa, Homo sapiens
MSDRKAVIKNADMSEDMQQDAVDCATQAMEKYNIEKDIAAYIKKEFDKKYNPTWHCIVGRNFGSYVTHETKHFIYFYLGQVAILLFKSG

SEQ ID NO: 44503 - protein, 47 aa, Homo sapiens
MAEVEETLKRLQSQKGVQGIIVVNTEGGWEPLGHCGDRSRPPAQGCP

SEQ ID NO: 44504 - protein, 96 aa, Homo sapiens
MAEVEETLKRLQSQKGVQGIIVVNTEGIPIKSTMDNPTTTQYASLMHSFILKARSTVRDIDPQNDLTFLRIRSKKNEIMVAPDKDYFLIVIQNPTE

SEQ ID NO: 44505 - protein, 121 aa, Homo sapiens
MAEVEETLKRLQSQKGVQGIIVVNTEGIPIKSTMDNPTTTQYASLMHSFILKARSTVRDIDPQNDLTFLRIRSKKNEIMVAPGKGSSTSPCRNRPHGTFSVAHQESWHSGVSRGSKQGPRS

SEQ ID NO: 44506 - protein, 96 aa, Homo sapiens
MAEVEETLKRIQSHKGVIGTMVVNAEGIPIRTTLDNSTTVQYAGLLHHLTMKAKSTVRDIDPQNDLTFLRIRSKKHEIMVAPDKEYLLIVIQNPCE

SEQ ID NO: 44507 - protein, 54 aa, Homo sapiens
MAEVEETLKRIQSHKGVIGTMVVNAEDPRFVTFKYARQLTAFQRKSGQQITIKD

SEQ ID NO: 44508 - protein, 161 aa, Homo sapiens
MDPNPRAALERQQLRLRERQKFFEDILQPETEFVFPLSHLHLESQRPPIGSISSMEVNVDTLEQVELIDLGDPDAADVFLPCEDPPPTPQSSGMDNHLEELSLPVPTSDRTTSRTSSSSSSDSSTNLHSPNPSDDGADTPLAQSDEEEERGDGGAEPGACS

SEQ ID NO: 44509 - protein, 161 aa, Homo sapiens; identical to SEQ ID NO: 44508

SEQ ID NO: 44510 - protein, 263 aa, Homo sapiens
MESWALAVFPEYRVSLLWCLELASPLWSLGQAPPLHETWFVGHTWFQGRGKRSPRAEVSRPEPGAPLLGCWLQWGAPSPGPLCLLFRLCSCTCFAPLPAGADMDPNPRAALERQQLRLRERQKFFEDILQPETEFVFPLSHLHLESQRPPIGSISSMEVNVDTLEQVELIDLGDPDAADVFLPCEDPPPTPQSSGMDNHLEELSLPVPTSDRTTSRTSSSSSSDSSTNLHSPNPSDDGADTPLAQSDEEEERGDGGAEPGACS

SEQ ID NO: 44511 - protein, 161 aa, Homo sapiens; identical to SEQ ID NO: 44508

SEQ ID NO: 44512 - protein, 112 aa, Homo sapiens
MDPNPRAALERQQLRLRERQKFFEDILQPETEFVFPLSHLHLESQRPPIGSISSMEVNVDTLEQVELIDLGDPDAADVFLPCEDPPPTPQSSGMPLCFGDFSASQPEPDVRL

SEQ ID NO: 44513 - protein, 259 aa, Homo sapiens
MGAGNFLTALEVPVAALAGAASDRRASCERVSPPPPLPHFRLPPLPRSRLPGPVSRPEPGAPLLGCWLQWGAPSPGPLCLLFRLCSCTCFAPLPAGADMDPNPRAALERQQLRLRERQKFFEDILQPETEFVFPLSHLHLESQRPPIGSISSMEVNVDTLEQVELIDLGDPDAADVFLPCEDPPPTPQSSGMDNHLEELSLPVPTSDRTTSRTSSSSSSDSSTNLHSPNPSDDGADTPLAQSDEEEERGDGGAEPGACS

SEQ ID NO: 44514 - protein, 112 aa, Homo sapiens; identical to SEQ ID NO: 44512

SEQ ID NO: 44515 - protein, 161 aa, Homo sapiens; identical to SEQ ID NO: 44508

SEQ ID NO: 44516 - protein, 172 aa, Homo sapiens
  VARIANT 1: note = MOD_RES - Any amino acid
XTWFQGRGKRSPRAEVSRPEPGAPLLGCWLQWGAPSPGPLCLLFRLCSCTCFAPLPAGADMDPNPRAALERQQLRLRERQKFFEDILQPETEFVFPLSHLHLESQRPPIGSISSMEVNVDTLEQVELIDLGDPDAADVFLPCEDPPPTPQSSGMPLCFGDFSASQPEPDVRL

SEQ ID NO: 44517 - protein, 5171 aa, Homo sapiens
MHSSSYSYRSSDSVFSNTTSTRTSLDSNENLLLVHCGPTLINSCISFGSESFDGHRLEMLQQIANRVQRDSVICEDKLILAGNALQSDSKRLESGVQFQNEAEIAGYILECENLLRQHVIDVQILIDGKYYQADQLVQRVAKLRDEIMALRNECSSVYSKGRILTTEQTKLMISGITQSLNSGFAQTLHPSLTSGLTQSLTPSLTSSSMTSGLSSGMTSRLTPSVTPAYTPGFPSGLVPNFSSGVEPNSLQTLKLMQIRKPLLKSSLLDQNLTEEEINMKFVQDLLNWVDEMQVQLDRTEWGSDLPSVESHLENHKNVHRAIEEFESSLKEAKISEIQMTAPLKLTYAEKLHRLESQYAKLLNTSRNQERHLDTLHNFVSRATNELIWLNEKEEEEVAYDWSERNTNIARKKDYHAELMRELDQKEENIKSVQEIAEQLLLENHPARLTIEAYRAAMQTQWSWILQLCQCVEQHIKENTAYFEFFNDAKEATDYLRNLKDAIQRKYSCDRSSSIHKLEDLVQESMEEKEELLQYKSTIANLMGKAKTIIQLKPRNSDCPLKTSIPIKAICDYRQIEITIYKDDECVLANNSHRAKWKVISPTGNEAMVPSVCFTVPPPNKEAVDLANRIEQQYQNVLTLWHESHINMKSVVSWHYLINEIDRIRASNVASIKTMLPGEHQQVLSNLQSRFEDFLEDSQESQVFSGSDITQLEKEVNVCKQYYQELLKSAEREEQEESVYNLYISEVRNIRLRLENCEDRLIRQIRTPLERDDLHESVFRITEQEKLKKELERLKDDLGTITNKCEEFFSQAAASSSVPTLRSELNVVLQNMNQVYSMSSTYIDKLKTVNLVLKNTQAAEALVKLYETKLCEEEAVIADKNNIENLISTLKQWRSEVDEKRQVFHALEDELQKAKAISDEMFKTYKERDLDFDWHKEKADQLVERWQNVHVQIDNRLRDLEGIGKSLKYYRDTYHPLDDWIQQVETTQRKIQENQPENSKTLATQLNQQKMLVSEIEMKQSKMDECQKYAEQYSATVKDYELQTMTYRAMVDSQQKSPVKRRRMQSSADLIIQEFMDLRTRYTALVTLMTQYIKFAGDSLKRLEEEEKSLEEEKKEHVEKAKELQKWVSNISKTLKDAEKAGKPPFSKQKISSEEISTKKEQLSEALQTIQLFLAKHGDKMTDEERNELEKQVKTLQESYNLLFSESLKQLQESQTSGDVKVEEKIVAERQQEYKEKLQGICDLLTQTENRLIGHQEAFMIGDGTVELKKYQSKQEELQKDMQGSAQALAEVVKNTENFLKENGEKLSQEDKALIEQKLNEAKIKCEQLNLKAEQSKKELDKVVTTAIKEETEKVAAVKQLEESKTKIENLLDWLSNVDKDSERAGTKHKQVIEQNGTHFQEGDGKSAIGEEDEVNGNLLETDVDGQVGTTQENLNQQYQKVKAQHEKIISQHQAVIIATQSAQVLLEKQGQYLSPEEKEKLQKNMKELKVHYETALAESEKKMKLTHSLQEELEKFDADYTEFEHWLQQSEQELENLEAGADDINGLMTKLKRQKSFSEDVISHKGDLRYITISGNRVLEAAKSCSKRDGGKVDTSATHREVQRKLDHATDRFRSLYSKCNVLGNNLKDLVDKYQHYEDASCGLLAGLQACEATASKHLSEPIAVDPKNLQRQLEETKALQGQISSQQVAVEKLKKTAEVLLDARGSLLPAKNDIQKTLDDIVGRYEDLSKSVNERNEKLQITLTRSLSVQDGLDEMLDWMGNVESSLKEQGQVPLNSTALQDIISKNIMLEQDIAGRQSSINAMNEKVKKFMETTDPSTASSLQAKMKDLSARFSEASHKHKETLAKMEELKTKVELFENLSEKLQTFLETKTQALTEVDVPGKDVTELSQYMQESTSEFLEHKKHLEVLHSLLKEISSHGLPSDKALVLEKTNNLSKKFKEMEDTIKEKKEAVTSCQEQLDAFQVLVKSLKSWIKETTKKVPIVQPSFGAEDLGKSLEDTKKLQEKWSLKTPEIQKVNNSGISLCNLISAVTTPAKAIAAVKSGGAVLNGEGTATNTEEFWANKGLTSIKKDMTDISHGYEDLGLLLKDKIAELNTKLSKLQKAQEESSAMMQWLQKMNKTATKWQQTPAPTDTEAVKTQVEQNKSFEAELKQNVNKVQELKDKLTELLEENPDTPEAPRWKQMLTEIDSKWQELNQLTIDRQQKLEESSNNLTQFQTVEAQLKQWLVEKELMVSVLGPLSIDPNMLNTQRQQVQILLQEFATRKPQYEQLTAAGQGILSRPGEDPSLRGIVKEQLAAVTQKWDSLTGQLSDRCDWIDQAIVKSTQYQSLLRSLSDKLSDLDNKLSSSLAVSTHPDAMNQQLETAQKMKQEIQQEKKQIKVAQALCEDLSALVKEEYLKAELSRQLEGILKSFKDVEQKAENHVQHLQSACASSHQFQQMSRDFQAWLDTKKEEQNKSHPISAKLDVLESLIKDHKDFSKTLTAQSHMYEKTIAEGENLLLKTQGSEKAALQLQLNTIKTNWDTFNKQVKERENKLKESLEKALKYKEQVETLWPWIDKCQNNLEEIKFCLDPAEGENSIAKLKSLQKEMDQHFGMVELLNNTANSLLSVCEIDKEVVTDENKSLIQKVDMVTEQLHSKKFCLENMTQKFKEFQEVSKESKRQLQCAKEQLDIHDSLGSQAYSNKYLTMLQTQQKSLQALKHQVDLAKRLAQDLVVEASDSKGTSDVLLQVETIAQEHSTLSQQVDEKCSFLETKLQGIGHFQNTIREMFSQFAEFDDELDSMAPVGRDAETLQKQKETIKAFLKKLEALMASNDNANKTCKMMLATEETSPDLVGIKRDLEALSKQCNKLLDRAQAREEQVEGTIKRLEEFYSKLKEFSILLQKAEEHEESQGPVGMETETINQQLNMFKVFQKEEIEPLQGKQQDVNWLGQGLIQSAAKSTSTQGLEHDLDDVNARWKTLNKKVAQRAAQLQEALLHCGRFQDALESLLSWMVDTEELVANQKPPSAEFKVVKAQIQEQKLLQRLLDDRKSTVEVIKREGEKIATTAEPADKVKILKQLSLLDSRWEALLNKAETRNRQLEGISVVAQQFHETLEPLNEWLTTIEKRLVNCEPIGTQASKLEEQIAQHKALEDDIINHNKHLHQAVSIGQSLKVLSSREDKDMVQSKLDFSQVWYIEIQEKSHSRSELLQQALCNAKIFGEDEVELMNWLNEVHDKLSKLSVQDYSTEGLWKQQSELRVLQEDILLRKQNVDQALLNGLELLKQTTGDEVLIIQDKLEAIKARYKDITKLSTDVAKTLEQALQLARRLHSTHEELCTWLDKVEVELLSYETQVLKGEEASQAQMRPKELKKEAKNNKALLDSLNEVSSALLELVPWRAREGLEKMVAEDNERYRLVSDTITQKVEEIDAAILRSQQFDQAADAELSWITETEKKLMSLGDIRLEQDQTSAQLQVQKTFTMEILRHKDIIDDLVKSGHKIMTACSEEEKQSMKKKLDKVLKNYDTICQINSERYLQLERAQSLVNQFWETYEELWPWLTETQSIISQLPAPALEYETLRQQQEEHRQLRELIAEHKPHIDKMNKTGPQLLELSPGEGFSIQEKYVAADTLYSQIKEDVKKRAVALDEAISQSTQFHDKIDQILESLERIVERLRQPPSISAEVEKIKEQISENKNVSVDMEKLQPLYETLKQRGEEMIARSGGTDKDISAKAVQDKLDQMVFIWENIHTLVEEREAKLLDVMELAEKFWCDHMSLIVTIKDTQDFIRDLEDPGIDPSVVKQQQEAAETIREEIDGLQEELDIVINLGSELIAACGEPDKPIVKKSIDELNSAWDSLNKAWKDRIDKLEEAMQAAVQYQDGLQAVFDWVDIAGGKLASMSPIGTDLETVKQQIEELKQFKSEAYQQQIEMERLNHQAELLLKKVTEESDKHTVQDPLMELKLIWDSLEERIINRQHKLEGALLALGQFQHALDELLAWLTHTEGLLSEQKPVGGDPKAIEIELAKHHVLQNDVLAHQSTVEAVNKAGNDLIESSAGEEASNLQNKLEVLNQRWQNVLEKTEQRKQQLDGALRQAKGFHGEIEDLQQWLTDTERHLLASKPLGGLPETAKEQLNVHMEVCAAFEAKEETYKSLMQKGQQMLARCPKSAETNIDQDINNLKEKWESVETKLNERKTKLEEALNLAMEFHNSLQDFINWLTQAEQTLNVASRPSLILDTVLFQIDEHKVFANEVNSHREQIIELDKTGTHLKYFSQKQDVVLIKNLLISVQSRWEKVVQRLVERGRSLDDARKRAKQFHEAWSKLMEWLEESEKSLDSELEIANDPDKIKTQLAQHKEFQKSLGAKHSVYDTTNRTGRSLKEKTSLADDNLKLDDMLSELRDKWDTICGKSVERQNKLEEALLFSGQFTDALQALIDWLYRVEPQLAEDQPVHGDIDLVMNLIDNHKAFQKELGKRTSSVQALKRSARELIEGSRDDSSWVKVQMQELSTRWETVCALSISKQTRLEAALRQAEEFHSVVHALLEWLAEAEQTLRFHGVLPDDEDALRTLIDQHKEFMKKLEEKRAELNKATTMGDTVLAICHPDSITTIKHWITIIRARFEEVLAWAKQHQQRLASALAGLIAKQELLEALLAWLQWAETTLTDKDKEVIPQEIEEVKALIAEHQTFMEEMTRKQPDVDKVTKTYKRRAADPSSLQSHIPVLDKGRAGRKRFPASSLYPSGSQTQIETKNPRVNLLVSKWQQVWLLALERRRKLNDALDRLEELREFANFDFDIWRKKYMRWMNHKKSRVMDFFRRIDKDQDGKITRQEFIDGILSSKFPTSRLEMSAVADIFDRDGDGYIDYYEFVAALHPNKDAYKPITDADKIEDEVTRQVAKCKCAKRFQVEQIGDNKYRFFLGNQFGDSQQLRLVRILRSTVMVRVGGGWMALDEFLVKNDPCRAKGRTNMELREKFILADGASQGMAAFRPRGRRSRPSSRGASPNRSTSVSSQAAQAASPQVPATTTPKILHPLTRNYGKPWLTNSKMSTPCKAAECSDFPVPSAEGTPIQGSKLRLPGYLSGKGFHSGEDSGLITTAAARVRTQFADSKKTPSRPGSRAGSKAGSRASSRRGSDASDFDISEIQSVCSDVETVPQTHRPTPRAGSRPSTAKPSKIPTPQRKSPASKLDKSSKR

SEQ ID NO: 44518 - protein, 4200 aa, Homo sapiens
MAGYLSPAAYLYVEEQEYLQAYEDVLERYKDERDKVQKKTFTKWINQHLMKVRKHVNDLYEDLRDGHNLISLLEVLSGDTLPREKGRMRFHRLQNVQIALDYLKRRQVKLVNIRNDDITDGNPKLTLGLIWTIILHFQISDIHVTGESEDMSAKERLLLWTQQATEGYAGIRCENFTTCWRDGKLFNAIIHKYRPDLIDMNTVAVQSNLANLEHAFYVAEKIGVIRLLDPEDVDVSSPDEKSVITYVSSLYDAFPKVPEGGEGIGANDVEVKWIEYQNMVNYLIQWIRHHVTTMSERTFPNNPVELKALYNQYLQFKETEIPPKETEKSKIKRLYKLLEIWIEFGRIKLLQGYHPNDIEKEWGKLIIAMLEREKALRPEVERLEMLQQIANRVQRDSVICEDKLILAGNALQSDSKRLESGVQFQNEAEIAGYILECENLLRQHVIDVQILIDGKYYQADQLVQRVAKLRDEIMALRNECSSVYSKGRILTTEQTKLMISGITQSLNSGFAQTLHPSLTSGLTQSLTPSLTSSSMTSGLSSGMTSRLTPSVTPAYTPGFPSGLVPNFSSGVEPNSLQTLKLMQIRKPLLKSSLLDQNLTEEEINMKFVQDLLNWVDEMQVQLDRTEWGSDLPSVESHLENHKNVHRAIEEFESSLKEAKISEIQMTAPLKLTYAEKLHRLESQYAKLLNTSRNQERHLDTLHNFVSRATNELIWLNEKEEEEVAYDWSERNTNIARKKDYHAELMRELDQKEENIKSVQEIAEQLLLENHPARLTIEAYRAAMQTQWSWILQLCQCVEQHIKENTAYFEFFNDAKEATDYLRNLKDAIQRKYSCDRSSSIHKLEDLVQESMEEKEELLQYKSTIANLMGKAKTIIQLKPRNSDCPLKTSIPIKAICDYRQIEITIYKDDECVLANNSHRAKWKVISPTGNEAMVPSVCFTVPPPNKEAVDLANRIEQQYQNVLTLWHESHINMKSVVSWHYLINEIDRIRASNVASIKTMLPGEHQQVLSNLQSRFEDFLEDSQESQVFSGSDITQLEKEVNVCKQYYQELLKSAEREEQEESVYNLYISEVRNIRLRLENCEDRLIRQIRTPLERDDLHESVFRITEQEKLKKELERLKDDLGTITNKCEEFFSQAAASSSVPTLRSELNVVLQNMNQVYSMSSTYIDKLKTVNLVLKNTQAAEALVKLYETKLCEEEAVIADKNNIENLISTLKQWRSEVDEKRQVFHALEDELQKAKAISDEMFKTYKERDLDFDWHKEKADQLVERWQNVHVQIDNRLRDLEGIGKSLKYYRDTYHPLDDWIQQVETTQRKIQENQPENSKTLATQLNQQKMLVSEIEMKQSKMDECQKYAEQYSATVKDYELQTMTYRAMVDSQQKSPVKRRRMQSSADLIIQEFMDLRTRYTALVTLMTQYIKFAGDSLKRLEEEEKSLEEEKKEHVEKAKELQKWVSNISKTLKDAEKAGKPPFSKQKISSEEISTKKEQLSEALQTIQLFLAKHGDKMTDEERNELEKQVKTLQESYNLLFSESLKQLQESQTSGDVKVEEKLDKVIAGTIDQTTGEVLSVFQAVLRGLIDYDTGIRLLETQLMISGLISPELRKCFDLKDAKSHGLIDEQILCQLKELSKAKEIISAASPTTIPVLDALAQSMITESMAIKVLEILLSTGSLVIPATGEQLTLQKAFQQNLVSSALFSKVLERQNMCKDLIDPCTSEKVSLIDMVQRSTLQENTGMWLLPVRPQEGGRITLKCGRNISILRAAHEGLIDRETMFRLLSAQLLSGGLINSNSGQRMTVEEAVREGVIDRDTASSILTYQVQTGGIIQSNPAKRLTVDEAVQCDLITSSSALLVLEAQRGYVGLIWPHSGEIFPTSSSLQQELITNELAYKILNGRQKIAALYIPESSQVIGLDAAKQLGIIDNNTASILKNITLPDKMPDLGDLEACKNARRWLSFCKFQPSTVHDYRQEEDVFDGEEPVTTQTSEETKKLFLSYLMINSYMDANTGQRLLLYDGDLDEAVGMLLEGCHAEFDGNTAIKECLDVLSSSGVFLNNASGREKDECTATPSSFNKCHCGEPEHEETPENRKCAIDEEFNEMRNTVINSEFSQSGKLASTISIDPKVNSSPSVCVPSLISYLTQTELADISMLRSDSENILTNYENQSRVETNERANECSHSKNIQNFPSDLIENPIMKSKMSKFCGVNETENEDNTNRDSPIFDYSPRLSALLSHDKLMHSQGSFNDTHTPESNGNKCEAPALSFSDKTMLSGQRIGEKFQDQFLGIAAINISLPGEQYGQKSLNMISSNPQVQYHNDKYISNTSGEDEKTHPGFQQMPEDKEDESEIEEYSCAVTPGGDTDNAIVSLTCATPLLDETISASDYETSLLNDQQNNTGTDTDSDDDFYDTPLFEDDDHDSLLLDGDDRDCLHPEDYDTLQEENDETASPADVFYDVSKENENSMVPQGAPVGSLSVKNKAHCLQDFLMDVEKDELDSGEKIHLNPVGSDKVNGQSLETGSERECTNILEGDESDSLTDYDIVGGKESFTASLKFDDSGSWRGRKEEYVTGQEFHSDTDHLDSMQSEESYGDYIYDSNDQDDDDDDGIDEEGGGIRDENGKPRCQNVAEDMDIQLCASILNENSDENENINTMILLDKMHSCSSLEKQQRVNVVQLASPSENNLVTEKSNLPEYTTEIAGKSKENLLNHEMVLKDVLPPIIKDTESEKTFGPASISHDNNNISSTSELGTDLANTKVKLIQGSELPELTDSVKGKDEYFKNMTPKVDSSLDHIICTEPDLIGKPAEESHLSLIASVTDKDPQGNGSDLIKGRDGKSDILIEDETSIQKMYLGEGEVLVEGLVEEENRHLKLLPGKNTRDSFKLINSQFPFPQITNNEELNQKGSLKKATVTLKDEPNNLQIIVSKSPVQFENLEEIFDTSVSKEISDDITSDITSWEGNTHFEESFTDGPEKELDLFTYLKHCAKNIKAKDVAKPNEDVPSHVLITAPPMKEHLQLGVNNTKEKSTSTQKDSPLNDMIQSNDLCSKESISGGGTEISQFTPESIEATLSILSRKHVEDVGKNDFLQSERCANGLGNDNSSNTLNTDYSFLEINNKKERIEQQLPKEQALSPRSQEKEVQIPELSQVFVEDVKDILKSRLKEGHMNPQEVEEPSACADTKILIQNLIKRITTSQLVNEASTVPSDSQMSDSSGVSPMTNSSELKPESRDDPFCIGNLKSELLLNILKQDQHSQKITGVFELMRELTHMEYDLEKRGITSKVLPLQLENIFYKLLADGYSEKIEHVGDFNQKACSTSEMMEEKPHILGDIKSKEGNYYSPNLETVKEIGLESSTVWASTLPRDEKLKDLCNDFPSHLECTSGSKEMASGDSSTEQFSSELQQCLQHTEKMHEYLTLLQDMKPPLDNQESLDNNLEALKNQLRQLETFELGLAPIAVILRKDMKLAEEFLKSLPSDFPRGHVEELSISHQSLKTAFSSLSNVSSERTKQIMLAIDSEMSKLAVSHEEFLHKLKSFSDWVSEKSKSVKDIEIVNVQDSEYVKKRLEFLKNVLKDLGHTKMQLETTAFDVQFFISEYAQDLSPNQSKQLLRLLNTTQKCFLDVQESVTTQVERLETQLHLEQDLDDQKIVAERQQEYKEKLQGICDLLTQTENRLIGHQEAFMIGDGTVELKKYQSKQEELQKDMQGSAQALAEVVKNTENFLKENGEKLSQEDKALIEQKLNEAKIKCEQLNLKAEQSKKELDKVVTTAIKEETEKVAAVKQLEESKTKIENLLDWLSNVDKDSERAGTKHKQVIEQNGTHFQEGDGKSAIGEEDEVNGNLLETDVDGQVGTTQENLNQQYQKVKAQHEKIISQHQAVIIATQSAQVLLEKQGQYLSPEEKEKLQKNMKELKVHYETALAESEKKMKLTHSLQEELEKFDADYTEFEHWLQQSEQELENLEAGADDINGLMTKLKRQKSFSEDVISHKGDLRYITISGNRVLEAAKSCSKRDGGKVDTSATHREVQRKLDHATDRFRSLYSKCNVLGNNLKDLVDKYQHYEDASCGLLAGLQACEATASKHLSEPIAVDPKNLQRQLEETKALQGQISSQQVAVEKLKKTAEVLLDARGSLLPAKNDIQKTLDDIVGRYEDLSKSVNERNEKLQITLTRSLSVQDGLDEMLDWMGNVESSLKEQDVGTGYCRSSEQYKCHE

SEQ ID NO: 44519 - protein, 7461 aa, Homo sapiens
MAGYLSPAAYLYVEEQEYLQAYEDVLERYKDERDKVQKKTFTKWINQHLMKVRKHVNDLYEDLRDGHNLISLLEVLSGDTLPREKGRMRFHRLQNVQIALDYLKRRQVKLVNIRNDDITDGNPKLTLGLIWTIILHFQISDIHVTGESEDMSAKERLLLWTQQATEGYAGIRCENFTTCWRDGKLFNAIIHKYRPDLIDMNTVAVQSNLANLEHAFYVAEKIGVIRLLDPEDVDVSSPDEKSVITYVSSLYDAFPKVPEGGEGIGANDVEVKWIEYQNMVNYLIQWIRHHVTTMSERTFPNNPVELKALYNQYLQFKETEIPPKETEKSKIKRLYKLLEIWIEFGRIKLLQGYHPNDIEKEWGKLIIAMLEREKALRPEVERLEMLQQIANRVQRDSVICEDKLILAGNALQSDSKRLESGVQFQNEAEIAGYILECENLLRQHVIDVQILIDGKYYQADQLVQRVAKLRDEIMALRNECSSVYSKGRILTTEQTKLMISGITQSLNSGFAQTLHPSLTSGLTQSLTPSLTSSSMTSGLSSGMTSRLTPSVTPAYTPGFPSGLVPNFSSGVEPNSLQTLKLMQIRKPLLKSSLLDQNLTEEEINMKFVQDLLNWVDEMQVQLDRTEWGSDLPSVESHLENHKNVHRAIEEFESSLKEAKISEIQMTAPLKLTYAEKLHRLESQYAKLLNTSRNQERHLDTLHNFVSRATNELIWLNEKEEEEVAYDWSERNTNIARKKDYHAELMRELDQKEENIKSVQEIAEQLLLENHPARLTIEAYRAAMQTQWSWILQLCQCVEQHIKENTAYFEFFNDAKEATDYLRNLKDAIQRKYSCDRSSSIHKLEDLVQESMEEKEELLQYKSTIANLMGKAKTIIQLKPRNSDCPLKTSIPIKAICDYRQIEITIYKDDECVLANNSHRAKWKVISPTGNEAMVPSVCFTVPPPNKEAVDLANRIEQQYQNVLTLWHESHINMKSVVSWHYLINEIDRIRASNVASIKTMLPGEHQQVLSNLQSRFEDFLEDSQESQVFSGSDITQLEKEVNVCKQYYQELLKSAEREEQEESVYNLYISEVRNIRLRLENCEDRLIRQIRTPLERDDLHESVFRITEQEKLKKELERLKDDLGTITNKCEEFFSQAAASSSVPTLRSELNVVLQNMNQVYSMSSTYIDKLKTVNLVLKNTQAAEALVKLYETKLCEEEAVIADKNNIENLISTLKQWRSEVDEKRQVFHALEDELQKAKAISDEMFKTYKERDLDFDWHKEKADQLVERWQNVHVQIDNRLRDLEGIGKSLKYYRDTYHPLDDWIQQVETTQRKIQENQPENSKTLATQLNQQKMLVSEIEMKQSKMDECQKYAEQYSATVKDYELQTMTYRAMVDSQQKSPVKRRRMQSSADLIIQEFMDLRTRYTALVTLMTQYIKFAGDSLKRLEEEEKSLEEEKKEHVEKAKELQKWVSNISKTLKDAEKAGKPPFSKQKISSEEISTKKEQLSEALQTIQLFLAKHGDKMTDEERNELEKQVKTLQESYNLLFSESLKQLQESQTSGDVKVEEKLDKVIAGTIDQTTGEVLSVFQAVLRGLIDYDTGIRLLETQLMISGLISPELRKCFDLKDAKSHGLIDEQILCQLKELSKAKEIISAASPTTIPVLDALAQSMITESMAIKVLEILLSTGSLVIPATGEQLTLQKAFQQNLVSSALFSKVLERQNMCKDLIDPCTSEKVSLIDMVQRSTLQENTGMWLLPVRPQEGGRITLKCGRNISILRAAHEGLIDRETMFRLLSAQLLSGGLINSNSGQRMTVEEAVREGVIDRDTASSILTYQVQTGGIIQSNPAKRLTVDEAVQCDLITSSSALLVLEAQRGYVGLIWPHSGEIFPTSSSLQQELITNELAYKILNGRQKIAALYIPESSQVIGLDAAKQLGIIDNNTASILKNITLPDKMPDLGDLEACKNARRWLSFCKFQPSTVHDYRQEEDVFDGEEPVTTQTSEETKKLFLSYLMINSYMDANTGQRLLLYDGDLDEAVGMLLEGCHAEFDGNTAIKECLDVLSSSGVFLNNASGREKDECTATPSSFNKCHCGEPEHEETPENRKCAIDEEFNEMRNTVINSEFSQSGKLASTISIDPKVNSSPSVCVPSLISYLTQTELADISMLRSDSENILTNYENQSRVETNERANECSHSKNIQNFPSDLIENPIMKSKMSKFCGVNETENEDNTNRDSPIFDYSPRLSALLSHDKLMHSQGSFNDTHTPESNGNKCEAPALSFSDKTMLSGQRIGEKFQDQFLGIAAINISLPGEQYGQKSLNMISSNPQVQYHNDKYISNTSGEDEKTHPGFQQMPEDKEDESEIEEYSCAVTPGGDTDNAIVSLTCATPLLDETISASDYETSLLNDQQNNTGTDTDSDDDFYDTPLFEDDDHDSLLLDGDDRDCLHPEDYDTLQEENDETASPADVFYDVSKENENSMVPQGAPVGSLSVKNKAHCLQDFLMDVEKDELDSGEKIHLNPVGSDKVNGQSLETGSERECTNILEGDESDSLTDYDIVGGKESFTASLKFDDSGSWRGRKEEYVTGQEFHSDTDHLDSMQSEESYGDYIYDSNDQDDDDDDGIDEEGGGIRDENGKPRCQNVAEDMDIQLCASILNENSDENENINTMILLDKMHSCSSLEKQQRVNVVQLASPSENNLVTEKSNLPEYTTEIAGKSKENLLNHEMVLKDVLPPIIKDTESEKTFGPASISHDNNNISSTSELGTDLANTKVKLIQGSELPELTDSVKGKDEYFKNMTPKVDSSLDHIICTEPDLIGKPAEESHLSLIASVTDKDPQGNGSDLIKGRDGKSDILIEDETSIQKMYLGEGEVLVEGLVEEENRHLKLLPGKNTRDSFKLINSQFPFPQITNNEELNQKGSLKKATVTLKDEPNNLQIIVSKSPVQFENLEEIFDTSVSKEISDDITSDITSWEGNTHFEESFTDGPEKELDLFTYLKHCAKNIKAKDVAKPNEDVPSHVLITAPPMKEHLQLGVNNTKEKSTSTQKDSPLNDMIQSNDLCSKESISGGGTEISQFTPESIEATLSILSRKHVEDVGKNDFLQSERCANGLGNDNSSNTLNTDYSFLEINNKKERIEQQLPKEQALSPRSQEKEVQIPELSQVFVEDVKDILKSRLKEGHMNPQEVEEPSACADTKILIQNLIKRITTSQLVNEASTVPSDSQMSDSSGVSPMTNSSELKPESRDDPFCIGNLKSELLLNILKQDQHSQKITGVFELMRELTHMEYDLEKRGITSKVLPLQLENIFYKLLADGYSEKIEHVGDFNQKACSTSEMMEEKPHILGDIKSKEGNYYSPNLETVKEIGLESSTVWASTLPRDEKLKDLCNDFPSHLECTSGSKEMASGDSSTEQFSSELQQCLQHTEKMHEYLTLLQDMKPPLDNQESLDNNLEALKNQLRQLETFELGLAPIAVILRKDMKLAEEFLKSLPSDFPRGHVEELSISHQSLKTAFSSLSNVSSERTKQIMLAIDSEMSKLAVSHEEFLHKLKSFSDWVSEKSKSVKDIEIVNVQDSEYVKKRLEFLKNVLKDLGHTKMQLETTAFDVQFFISEYAQDLSPNQSKQLLRLLNTTQKCFLDVQESVTTQVERLETQLHLEQDLDDQKIVAERQQEYKEKLQGICDLLTQTENRLIGHQEAFMIGDGTVELKKYQSKQEELQKDMQGSAQALAEVVKNTENFLKENGEKLSQEDKALIEQKLNEAKIKCEQLNLKAEQSKKELDKVVTTAIKEETEKVAAVKQLEESKTKIENLLDWLSNVDKDSERAGTKHKQVIEQNGTHFQEGDGKSAIGEEDEVNGNLLETDVDGQVGTTQENLNQQYQKVKAQHEKIISQHQAVIIATQSAQVLLEKQGQYLSPEEKEKLQKNMKELKVHYETALAESEKKMKLTHSLQEELEKFDADYTEFEHWLQQSEQELENLEAGADDINGLMTKLKRQKSFSEDVISHKGDLRYITISGNRVLEAAKSCSKRDGGKVDTSATHREVQRKLDHATDRFRSLYSKCNVLGNNLKDLVDKYQHYEDASCGLLAGLQACEATASKHLSEPIAVDPKNLQRQLEETKALQGQISSQQVAVEKLKKTAEVLLDARGSLLPAKNDIQKTLDDIVGRYEDLSKSVNERNEKLQITLTRSLSVQDGLDEMLDWMGNVESSLKEQGQVPLNSTALQDIISKNIMLEQDIAGRQSSINAMNEKVKKFMETTDPSTASSLQAKMKDLSARFSEASHKHKETLAKMEELKTKVELFENLSEKLQTFLETKTQALTEVDVPGKDVTELSQYMQESTSEFLEHKKHLEVLHSLLKEISSHGLPSDKALVLEKTNNLSKKFKEMEDTIKEKKEAVTSCQEQLDAFQVLVKSLKSWIKETTKKVPIVQPSFGAEDLGKSLEDTKKLQEKWSLKTPEIQKVNNSGISLCNLISAVTTPAKAIAAVKSGGAVLNGEGTATNTEEFWANKGLTSIKKDMTDISHGYEDLGLLLKDKIAELNTKLSKLQKAQEESSAMMQWLQKMNKTATKWQQTPAPTDTEAVKTQVEQNKSFEAELKQNVNKVQELKDKLTELLEENPDTPEAPRWKQMLTEIDSKWQELNQLTIDRQQKLEESSNNLTQFQTVEAQLKQWLVEKELMVSVLGPLSIDPNMLNTQRQQVQILLQEFATRKPQYEQLTAAGQGILSRPGEDPSLRGIVKEQLAAVTQKWDSLTGQLSDRCDWIDQAIVKSTQYQSLLRSLSDKLSDLDNKLSSSLAVSTHPDAMNQQLETAQKMKQEIQQEKKQIKVAQALCEDLSALVKEEYLKAELSRQLEGILKSFKDVEQKAENHVQHLQSACASSHQFQQMSRDFQAWLDTKKEEQNKSHPISAKLDVLESLIKDHKDFSKTLTAQSHMYEKTIAEGENLLLKTQGSEKAALQLQLNTIKTNWDTFNKQVKERENKLKESLEKALKYKEQVETLWPWIDKCQNNLEEIKFCLDPAEGENSIAKLKSLQKEMDQHFGMVELLNNTANSLLSVCEIDKEVVTDENKSLIQKVDMVTEQLHSKKFCLENMTQKFKEFQEVSKESKRQLQCAKEQLDIHDSLGSQAYSNKYLTMLQTQQKSLQALKHQVDLAKRLAQDLVVEASDSKGTSDVLLQVETIAQEHSTLSQQVDEKCSFLETKLQGIGHFQNTIREMFSQFAEFDDELDSMAPVGRDAETLQKQKETIKAFLKKLEALMASNDNANKTCKMMLATEETSPDLVGIKRDLEALSKQCNKLLDRAQAREEQVEGTIKRLEEFYSKLKEFSILLQKAEEHEESQGPVGMETETINQQLNMFKVFQKEEIEPLQGKQQDVNWLGQGLIQSAAKSTSTQGLEHDLDDVNARWKTLNKKVAQRAAQLQEALLHCGRFQDALESLLSWMVDTEELVANQKPPSAEFKVVKAQIQEQKLLQRLLDDRKSTVEVIKREGEKIATTAEPADKVKILKQLSLLDSRWEALLNKAETRNRQLEGISVVAQQFHETLEPLNEWLTTIEKRLVNCEPIGTQASKLEEQIAQHKVLQEDILLRKQNVDQALLNGLELLKQTTGDEVLIIQDKLEAIKARYKDITKLSTDVAKTLEQALQLARRLHSTHEELCTWLDKVEVELLSYETQVLKGEEASQAQMRPKELKKEAKNNKALLDSLNEVSSALLELVPWRAREGLEKMVAEDNERYRLVSDTITQKVEEIDAAILRSQQFDQAADAELSWITETEKKLMSLGDIRLEQDQTSAQLQVQKTFTMEILRHKDIIDDLVKSGHKIMTACSEEEKQSMKKKLDKVLKNYDTICQINSERYLQLERAQSLVNQFWETYEELWPWLTETQSIISQLPAPALEYETLRQQQEEHRQLRELIAEHKPHIDKMNKTGPQLLELSPGEGFSIQEKYVAADTLYSQIKEDVKKRAVALDEAISQSTQFHDKIDQILESLERIVERLRQPPSISAEVEKIKEQISENKNVSVDMEKLQPLYETLKQRGEEMIARSGGTDKDISAKAVQDKLDQMVFIWENIHTLVEEREAKLLDVMELAEKFWCDHMSLIVTIKDTQDFIRDLEDPGIDPSVVKQQQEAAETIREEIDGLQEELDIVINLGSELIAACGEPDKPIVKKSIDELNSAWDSLNKAWKDRIDKLEEAMQAAVQYQDGLQAVFDWVDIAGGKLASMSPIGTDLETVKQQIEELKQFKSEAYQQQIEMERLNHQAELLLKKVTEESDKHTVQDPLMELKLIWDSLEERIINRQHKLEGALLALGQFQHALDELLAWLTHTEGLLSEQKPVGGDPKAIEIELAKHHVLQNDVLAHQSTVEAVNKAGNDLIESSAGEEASNLQNKLEVLNQRWQNVLEKTEQRKQQLDGALRQAKGFHGEIEDLQQWLTDTERHLLASKPLGGLPETAKEQLNVHMEVCAAFEAKEETYKSLMQKGQQMLARCPKSAETNIDQDINNLKEKWESVETKLNERKTKLEEALNLAMEFHNSLQDFINWLTQAEQTLNVASRPSLILDTVLFQIDEHKVFANEVNSHREQIIELDKTGTHLKYFSQKQDVVLIKNLLISVQSRWEKVVQRLVERGRSLDDARKRAKQFHEAWSKLMEWLEESEKSLDSELEIANDPDKIKTQLAQHKEFQKSLGAKHSVYDTTNRTGRSLKEKTSLADDNLKLDDMLSELRDKWDTICGKSVERQNKLEEALLFSGQFTDALQALIDWLYRVEPQLAEDQPVHGDIDLVMNLIDNHKAFQKELGKRTSSVQALKRSARELIEGSRDDSSWVKVQMQELSTRWETVCALSISKQTRLEAALRQAEEFHSVVHALLEWLAEAEQTLRFHGVLPDDEDALRTLIDQHKEFMKKLEEKRAELNKATTMGDTVLAICHPDSITTIKHWITIIRARFEEVLAWAKQHQQRLASALAGLIAKQELLEALLAWLQWAETTLTDKDKEVIPQEIEEVKALIAEHQTFMEEMTRKQPDVDKVTKTYKRRAADPSSLQSHIPVLDKGRAGRKRFPASSLYPSGSQTQIETKNPRVNLLVSKWQQVWLLALERRRKLNDALDRLEELREFANFDFDIWRKKYMRWMNHKKSRVMDFFRRIDKDQDGKITRQEFIDGILSSKFPTSRLEMSAVADIFDRDGDGYIDYYEFVAALHPNKDAYKPITDADKIEDEVTRQVAKCKCAKRFQVEQIGDNKYRFFLGNQFGDSQQLRLVRILRSTVMVRVGGGWMALDEFLVKNDPCRVHHHGSKMLRSESNSSITTTQPTIAKGRTNMELREKFILADGASQGMAAFRPRGRRSRPSSRGASPNRSTSVSSQAAQAASPQVPATTTPKGTPIQGSKLRLPGYLSGKGFHSGEDSGLITTAAARVRTQFADSKKTPSRPGSRAGSKAGSRASSRRGSDASDFDISEIQSVCSDVETVPQTHRPTPRAGSRPSTAKPSKIPTPQRKSPASKLDKSSKR

SEQ ID NO: 44520 - protein, 7750 aa, Homo sapiens
MIAAAFLVLLRPYSIQCALFLLLLLLGTIATIVFFCCWHRKLQKGRHPMKSVFSGRSRSRDAVLRSHHFRSEGFRASPRHLRRRVAAAAAARLEEVKPVVEVHHQSEQETSVRKRRIKKSSRVQPEFYHSVQGASIRRPSSGNASYRCSMSSSADFSDEDDFSQKSGSASPAPGDTLPWNLPKHERSKRKIQGGSVLDPAERAVLRIADERDKVQKKTFTKWINQHLMKVRKHVNDLYEDLRDGHNLISLLEVLSGDTLPREKGRMRFHRLQNVQIALDYLKRRQVKLVNIRNDDITDGNPKLTLGLIWTIILHFQISDIHVTGESEDMSAKERLLLWTQQATEGYAGIRCENFTTCWRDGKLFNAIIHKYRPDLIDMNTVAVQSNLANLEHAFYVAEKIGVIRLLDPEDVDVSSPDEKSVITYVSSLYDAFPKVPEGGEGIGANDVEVKWIEYQNMVNYLIQWIRHHVTTMSERTFPNNPVELKALYNQYLQFKETEIPPKETEKSKIKRLYKLLEIWIEFGRIKLLQGYHPNDIEKEWGKLIIAMLEREKALRPEVERLEMLQQIANRVQRDSVICEDKLILAGNALQSDSKRLESGVQFQNEAEIAGYILECENLLRQHVIDVQILIDGKYYQADQLVQRVAKLRDEIMALRNECSSVYSKGRILTTEQTKLMISGITQSLNSGFAQTLHPSLTSGLTQSLTPSLTSSSMTSGLSSGMTSRLTPSVTPAYTPGFPSGLVPNFSSGVEPNSLQTLKLMQIRKPLLKSSLLDQNLTEEEINMKFVQDLLNWVDEMQVQLDRTEWGSDLPSVESHLENHKNVHRAIEEFESSLKEAKISEIQMTAPLKLTYAEKLHRLESQYAKLLNTSRNQERHLDTLHNFVSRATNELIWLNEKEEEEVAYDWSERNTNIARKKDYHAELMRELDQKEENIKSVQEIAEQLLLENHPARLTIEAYRAAMQTQWSWILQLCQCVEQHIKENTAYFEFFNDAKEATDYLRNLKDAIQRKYSCDRSSSIHKLEDLVQESMEEKEELLQYKSTIANLMGKAKTIIQLKPRNSDCPLKTSIPIKAICDYRQIEITIYKDDECVLANNSHRAKWKVISPTGNEAMVPSVCFTVPPPNKEAVDLANRIEQQYQNVLTLWHESHINMKSVVSWHYLINEIDRIRASNVASIKTMLPGEHQQVLSNLQSRFEDFLEDSQESQVFSGSDITQLEKEVNVCKQYYQELLKSAEREEQEESVYNLYISEVRNIRLRLENCEDRLIRQIRTPLERDDLHESVFRITEQEKLKKELERLKDDLGTITNKCEEFFSQAAASSSVPTLRSELNVVLQNMNQVYSMSSTYIDKLKTVNLVLKNTQAAEALVKLYETKLCEEEAVIADKNNIENLISTLKQWRSEVDEKRQVFHALEDELQKAKAISDEMFKTYKERDLDFDWHKEKADQLVERWQNVHVQIDNRLRDLEGIGKSLKYYRDTYHPLDDWIQQVETTQRKIQENQPENSKTLATQLNQQKMLVSEIEMKQSKMDECQKYAEQYSATVKDYELQTMTYRAMVDSQQKSPVKRRRMQSSADLIIQEFMDLRTRYTALVTLMTQYIKFAGDSLKRLEEEEKSLEEEKKEHVEKAKELQKWVSNISKTLKDAEKAGKPPFSKQKISSEEISTKKEQLSEALQTIQLFLAKHGDKMTDEERNELEKQVKTLQESYNLLFSESLKQLQESQTSGDVKVEEKLDKVIAGTIDQTTGEVLSVFQAVLRGLIDYDTGIRLLETQLMISGLISPELRKCFDLKDAKSHGLIDEQILCQLKELSKAKEIISAASPTTIPVLDALAQSMITESMAIKVLEILLSTGSLVIPATGEQLTLQKAFQQNLVSSALFSKVLERQNMCKDLIDPCTSEKVSLIDMVQRSTLQENTGMWLLPVRPQEGGRITLKCGRNISILRAAHEGLIDRETMFRLLSAQLLSGGLINSNSGQRMTVEEAVREGVIDRDTASSILTYQVQTGGIIQSNPAKRLTVDEAVQCDLITSSSALLVLEAQRGYVGLIWPHSGEIFPTSSSLQQELITNELAYKILNGRQKIAALYIPESSQVIGLDAAKQLGIIDNNTASILKNITLPDKMPDLGDLEACKNARRWLSFCKFQPSTVHDYRQEEDVFDGEEPVTTQTSEETKKLFLSYLMINSYMDANTGQRLLLYDGDLDEAVGMLLEGCHAEFDGNTAIKECLDVLSSSGVFLNNASGREKDECTATPSSFNKCHCGEPEHEETPENRKCAIDEEFNEMRNTVINSEFSQSGKLASTISIDPKVNSSPSVCVPSLISYLTQTELADISMLRSDSENILTNYENQSRVETNERANECSHSKNIQNFPSDLIENPIMKSKMSKFCGVNETENEDNTNRDSPIFDYSPRLSALLSHDKLMHSQGSFNDTHTPESNGNKCEAPALSFSDKTMLSGQRIGEKFQDQFLGIAAINISLPGEQYGQKSLNMISSNPQVQYHNDKYISNTSGEDEKTHPGFQQMPEDKEDESEIEEYSCAVTPGGDTDNAIVSLTCATPLLDETISASDYETSLLNDQQNNTGTDTDSDDDFYDTPLFEDDDHDSLLLDGDDRDCLHPEDYDTLQEENDETASPADVFYDVSKENENSMVPQGAPVGSLSVKNKAHCLQDFLMDVEKDELDSGEKIHLNPVGSDKVNGQSLETGSERECTNILEGDESDSLTDYDIVGGKESFTASLKFDDSGSWRGRKEEYVTGQEFHSDTDHLDSMQSEESYGDYIYDSNDQDDDDDDGIDEEGGGIRDENGKPRCQNVAEDMDIQLCASILNENSDENENINTMILLDKMHSCSSLEKQQRVNVVQLASPSENNLVTEKSNLPEYTTEIAGKSKENLLNHEMVLKDVLPPIIKDTESEKTFGPASISHDNNNISSTSELGTDLANTKVKLIQGSELPELTDSVKGKDEYFKNMTPKVDSSLDHIICTEPDLIGKPAEESHLSLIASVTDKDPQGNGSDLIKGRDGKSDILIEDETSIQKMYLGEGEVLVEGLVEEENRHLKLLPGKNTRDSFKLINSQFPFPQITNNEELNQKGSLKKATVTLKDEPNNLQIIVSKSPVQFENLEEIFDTSVSKEISDDITSDITSWEGNTHFEESFTDGPEKELDLFTYLKHCAKNIKAKDVAKPNEDVPSHVLITAPPMKEHLQLGVNNTKEKSTSTQKDSPLNDMIQSNDLCSKESISGGGTEISQFTPESIEATLSILSRKHVEDVGKNDFLQSERCANGLGNDNSSNTLNTDYSFLEINNKKERIEQQLPKEQALSPRSQEKEVQIPELSQVFVEDVKDILKSRLKEGHMNPQEVEEPSACADTKILIQNLIKRITTSQLVNEASTVPSDSQMSDSSGVSPMTNSSELKPESRDDPFCIGNLKSELLLNILKQDQHSQKITGVFELMRELTHMEYDLEKRGITSKVLPLQLENIFYKLLADGYSEKIEHVGDFNQKACSTSEMMEEKPHILGDIKSKEGNYYSPNLETVKEIGLESSTVWASTLPRDEKLKDLCNDFPSHLECTSGSKEMASGDSSTEQFSSELQQCLQHTEKMHEYLTLLQDMKPPLDNQESLDNNLEALKNQLRQLETFELGLAPIAVILRKDMKLAEEFLKSLPSDFPRGHVEELSISHQSLKTAFSSLSNVSSERTKQIMLAIDSEMSKLAVSHEEFLHKLKSFSDWVSEKSKSVKDIEIVNVQDSEYVKKRLEFLKANNVLKDLGHTKMQLETTAFDVQFFISEYAQDLSPNQSKQLLRLLNTTQKCFLDVQESVTTQVERLETQLHLEQDLDDQKIVAERQQEYKEKLQGICDLLTQTENRLIGHQEAFMIGDGTVELKKYQSKQEELQKDMQGSAQALAEVVKNTENFLKENGEKLSQEDKALIEQKLNEAKIKCEQLNLKAEQSKKELDKVVTTAIKEETEKVAAVKQLEESKTKIENLLDWLSNVDKDSERAGTKHKQVIEQNGTHFQEGDGKSAIGEEDEVNGNLLETDVDGQVGTTQENLNQQYQKVKAQHEKIISQHQAVIIATQSAQVLLEKQGQYLSPEEKEKLQKNMKELKVHYETALAESEKKMKLTHSLQEELEKFDADYTEFEHWLQQSEQELENLEAGADDINGLMTKLKRQKSFSEDVISHKGDLRYITISGNRVLEAAKSCSKRDGGKVDTSATHREVQRKLDHATDRFRSLYSKCNVLGNNLKDLVDKYQHYEDASCGLLAGLQACEATASKHLSEPIAVDPKNLQRQLEETKALQGQISSQQVAVEKLKKTAEVLLDARGSLLPAKNDIQKTLDDIVGRYEDLSKSVNERNEKLQITLTRSLSVQDGLDEMLDWMGNVESSLKEQGQVPLNSTALQDIISKNIMLEQDIAGRQSSINAMNEKVKKFMETTDPSTASSLQAKMKDLSARFSEASHKHKETLAKMEELKTKVELFENLSEKLQTFLETKTQALTEVDVPGKDVTELSQYMQESTSEFLEHKKHLEVLHSLLKEISSHGLPSDKALVLEKTNNLSKKFKEMEDTIKEKKEAVTSCQEQLDAFQVLVKSLKSWIKETTKKVPIVQPSFGAEDLGKSLEDTKKLQEKWSLKTPEIQKVNNSGISLCNLISAVTTPAKAIAAVKSGGAVLNGEGTATNTEEFWANKGLTSIKKDMTDISHGYEDLGLLLKDKIAELNTKLSKLQKAQEESSAMMQWLQKMNKTATKWQQTPAPTDTEAVKTQVEQNKSFEAELKQNVNKVQELKDKLTELLEENPDTPEAPRWKQMLTEIDSKWQELNQLTIDRQQKLEESSNNLTQFQTVEAQLKQWLVEKELMVSVLGPLSIDPNMLNTQRQQVQILLQEFATRKPQYEQLTAAGQGILSRPGEDPSLRGIVKEQLAAVTQKWDSLTGQLSDRCDWIDQAIVKSTQYQSLLRSLSDKLSDLDNKLSSSLAVSTHPDAMNQQLETAQKMKQEIQQEKKQIKVAQALCEDLSALVKEEYLKAELSRQLEGILKSFKDVEQKAENHVQHLQSACASSHQFQQMSRDFQAWLDTKKEEQNKSHPISAKLDVLESLIKDHKDFSKTLTAQSHMYEKTIAEGENLLLKTQGSEKAALQLQLNTIKTNWDTFNKQVKERENKLKESLEKALKYKEQVETLWPWIDKCQNNLEEIKFCLDPAEGENSIAKLKSLQKEMDQHFGMVELLNNTANSLLSVCEIDKEVVTDENKSLIQKVDMVTEQLHSKKFCLENMTQKFKEFQEVSKESKRQLQCAKEQLDIHDSLGSQAYSNKYLTMLQTQQKSLQALKHQVDLAKRLAQDLVVEASDSKGTSDVLLQVETIAQEHSTLSQQVDEKCSFLETKLQGIGHFQNTIREMFSQFAEFDDELDSMAPVGRDAETLQKQKETIKAFLKKLEALMASNDNANKTCKMMLATEETSPDLVGIKRDLEALSKQCNKLLDRAQAREEQVEGTIKRLEEFYSKLKEFSILLQKAEEHEESQGPVGMETETINQQLNMFKVFQKEEIEPLQGKQQDVNWLGQGLIQSAAKSTSTQGLEHDLDDVNARWKTLNKKVAQRAAQLQEALLHCGRFQDALESLLSWMVDTEELVANQKPPSAEFKVVKAQIQEQKLLQRLLDDRKSTVEVIKREGEKIATTAEPADKVKILKQLSLLDSRWEALLNKAETRNRQLEGISVVAQQFHETLEPLNEWLTTIEKRLVNCEPIGTQASKLEEQIAQHKALEDDIINHNKHLHQAVSIGQSLKVLSSREDKDMVQSKLDFSQVWYIEIQEKSHSRSELLQQALCNAKIFGEDEVELMNWLNEVHDKLSKLSVQDYSTEGLWKQQSELRVLQEDILLRKQNVDQALLNGLELLKQTTGDEVLIIQDKLEAIKARYKDITKLSTDVAKTLEQALQLARRLHSTHEELCTWLDKVEVELLSYETQVLKGEEASQAQMRPKELKKEAKNNKALLDSLNEVSSALLELVPWRAREGLEKMVAEDNERYRLVSDTITQKVEEIDAAILRSQQFDQAADAELSWITETEKKLMSLGDIRLEQDQTSAQLQVQKTFTMEILRHKDIIDDLVKSGHKIMTACSEEEKQSMKKKLDKVLKNYDTICQINSERYLQLERAQSLVNQFWETYEELWPWLTETQSIISQLPAPALEYETLRQQQEEHRQLRELIAEHKPHIDKMNKTGPQLLELSPGEGFSIQEKYVAADTLYSQIKEDVKKRAVALDEAISQSTQFHDKIDQILESLERIVERLRQPPSISAEVEKIKEQISENKNVSVDMEKLQPLYETLKQRGEEMIARSGGTDKDISAKAVQDKLDQMVFIWENIHTLVEEREAKLLDVMELAEKFWCDHMSLIVTIKDTQDFIRDLEDPGIDPSVVKQQQEAAETIREEIDGLQEELDIVINLGSELIAACGEPDKPIVKKSIDELNSAWDSLNKAWKDRIDKLEEAMQAAVQYQDGLQAVFDWVDIAGGKLASMSPIGTDLETVKQQIEELKQFKSEAYQQQIEMERLNHQAELLLKKVTEESDKHTVQDPLMELKLIWDSLEERIINRQHKLEGALLALGQFQHALDELLAWLTHTEGLLSEQKPVGGDPKAIEIELAKHHVLQNDVLAHQSTVEAVNKAGNDLIESSAGEEASNLQNKLEVLNQRWQNVLEKTEQRKQQLDGALRQAKGFHGEIEDLQQWLTDTERHLLASKPLGGLPETAKEQLNVHMEVCAAFEAKEETYKSLMQKGQQMLARCPKSAETNIDQDINNLKEKWESVETKLNERKTKLEEALNLAMEFHNSLQDFINWLTQAEQTLNVASRPSLILDTVLFQIDEHKVFANEVNSHREQIIELDKTGTHLKYFSQKQDVVLIKNLLISVQSRWEKVVQRLVERGRSLDDARKRAKQFHEAWSKLMEWLEESEKSLDSELEIANDPDKIKTQLAQHKEFQKSLGAKHSVYDTTNRTGRSLKEKTSLADDNLKLDDMLSELRDKWDTICGKSVERQNKLEEALLFSGQFTDALQALIDWLYRVEPQLAEDQPVHGDIDLVMNLIDNHKAFQKELGKRTSSVQALKRSARELIEGSRDDSSWVKVQMQELSTRWETVCALSISKQTRLEAALRQAEEFHSVVHALLEWLAEAEQTLRFHGVLPDDEDALRTLIDQHKEFMKKLEEKRAELNKATTMGDTVLAICHPDSITTIKHWITIIRARFEEVLAWAKQHQQRLASALAGLIAKQELLEALLAWLQWAETTLTDKDKEVIPQEIEEVKALIAEHQTFMEEMTRKQPDVDKVTKTYKRRAADPSSLQSHIPVLDKGRAGRKRFPASSLYPSGSQTQIETKNPRVNLLVSKWQQVWLLALERRRKLNDALDRLEELREFANFDFDIWRKKYMRWMNHKKSRVMDFFRRIDKDQDGKITRQEFIDGILSSKFPTSRLEMSAVADIFDRDGDGYIDYYEFVAALHPNKDAYKPITDADKIEDEVTRQVAKCKCAKRFQVEQIGDNKYRVSFQSNFGDSQQLRLVRILRSTVMVRVGGGWMALDEFLVKNDPCRVHHHGSKMLRSESNSSITTTQPTIAKGRTNMELREKFILADGASQGMAAFRPRGRRSRPSSRGASPNRSTSVSSQAAQAASPQVPATTTPKGTPIQGSKLRLPGYLSGKGFHSGEDSGLITTAAARVRTQFADSKKTPSRPGSRAGSKAGSRASSRRGSDASDFDISEIQSVCSDVETVPQTHRPTPRAGSRPSTAKPSKIPTPQRKSPASKLDKSSKR

SEQ ID NO: 44521 - protein, 2649 aa, Homo sapiens
MHSSSYSYRSSDSVFSNTTSTRTSLDSNENLLLVHCGPTLINSCISFGSESFDGHRLEMLQQIANRVQRDSVICEDKLILAGNALQSDSKRLESGVQFQNEAEIAGYILECENLLRQHVIDVQILIDGKYYQADQLVQRVAKLRDEIMALRNECSSVYSKGRILTTEQTKLMISGITQSLNSGFAQTLHPSLTSGLTQSLTPSLTSSSMTSGLSSGMTSRLTPSVTPAYTPGFPSGLVPNFSSGVEPNSLQTLKLMQIRKPLLKSSLLDQNLTEEEINMKFVQDLLNWVDEMQVQLDRTEWGSDLPSVESHLENHKNVHRAIEEFESSLKEAKISEIQMTAPLKLTYAEKLHRLESQYAKLLNTSRNQERHLDTLHNFVSRATNELIWLNEKEEEEVAYDWSERNTNIARKKDYHAELMRELDQKEENIKSVQEIAEQLLLENHPARLTIEAYRAAMQTQWSWILQLCQCVEQHIKENTAYFEFFNDAKEATDYLRNLKDAIQRKYSCDRSSSIHKLEDLVQESMEEKEELLQYKSTIANLMGKAKTIIQLKPRNSDCPLKTSIPIKAICDYRQIEITIYKDDECVLANNSHRAKWKVISPTGNEAMVPSVCFTVPPPNKEAVDLANRIEQQYQNVLTLWHESHINMKSVVSWHYLINEIDRIRASNVASIKTMLPGEHQQVLSNLQSRFEDFLEDSQESQVFSGSDITQLEKEVNVCKQYYQELLKSAEREEQEESVYNLYISEVRNIRLRLENCEDRLIRQIRTPLERDDLHESVFRITEQEKLKKELERLKDDLGTITNKCEEFFSQAAASSSVPTLRSELNVVLQNMNQVYSMSSTYIDKLKTVNLVLKNTQAAEALVKLYETKLCEEEAVIADKNNIENLISTLKQWRSEVDEKRQVFHALEDELQKAKAISDEMFKTYKERDLDFDWHKEKADQLVERWQNVHVQIDNRLRDLEGIGKSLKYYRDTYHPLDDWIQQVETTQRKIQENQPENSKTLATQLNQQKMLVSEIEMKQSKMDECQKYAEQYSATVKDYELQTMTYRAMVDSQQKSPVKRRRMQSSADLIIQEFMDLRTRYTALVTLMTQYIKFAGDSLKRLEEEEIKRCKETSEHGAYSDLLQRQKATVLENSKLTGKISELERMVAELKKQKSRVEEELPKVREAAENELRKQQRNVEDISLQKIRAESEAKQYRRELETIVREKEAAERELERVRQLTIEAEAKRAAVEENLLNFRNQLEENTFTRRTLEDHLKRKDLSLNDLEQQKNKLMEELRRKRDNEEELLKLIKQMEKDLAFQKQVAEKQLKEKQKIELEARRKITEIQYTCRENALPVCPITQATSCRAVTGLQQEHDKQKAEELKQQVDELTAANRKAEQDMRELTYELNALQLEKTSSEEKARLLKDKLDETNNTLRCLKLELERKDQAEKGYSQQLRELGRQLNQTTGKAEEAMQEASDLKKIKRNYQLELESLNHEKGKLQREVDRITRAHAVAEKNIQHLNSQIHSFRDEKELERLQICQRKSDHLKEQFEKSHEQLLQNIKAEKENNDKIQRLNEELEKSNECAEMLKQKVEELTRQNNETKLMMQRIQAESENIVLEKQTIQQRCEALKIQADGFKDQLRSTNEHLHKQTKTEQDFQRKIKCLEEDLAKSQNLVSEFKQKCDQQNIIIQNTKKEVRNLNAELNASKEEKRRGEQKVQLQQAQVQELNNRLKKVQDELHLKTIEEQMTHRKMVLFQEESGKFKQSAEEFRKKMEKLMESKVITENDISGIRLDFVSLQQENSRAQENAKLCETNIKELERQLQQYREQMQQGQHMEANHYQKCQKLEDELIAQKREVENLKQKMDQQIKEHEHQLVLLQCEIQKKSTAKDCTFKPDFEMTVKECQHSGELSSRNTGHLHPTPRSPLLRWTQEPQPLEEKWQHRVVEQIPKEVQFQPPGAPLEKEKSQQCYSEYFSQTSTELQITFDETNPITRLSEIEKIRDQALNNSRPPVRYQDNACEMELVKVLTPLEIAKNKQYDMHTEVTTLKQEKNPVPSAEEWMLEGCRASGGLKKGDFLKKGLEPETFQNFDGDHACSVRDDEFKFQGLRHTVTARQLVEAKLLDMRTIEQLRLGLKTVEEVQKTLNKFLTKATSIAGLYLESTKEKISFASAAERIIIDKMVALAFLEAQAATGFIIDPISGQTYSVEDAVLKGVVDPEFRIRLLEAEKAAVGYSYSSKTLSVFQAMENRMLDRQKGKHILEAQIASGGVIDPVRGIRVPPEIALQQGLLNNAILQFLHEPSSNTRVFPNPNNKQALYYSELLRMCVFDVESQCFLFPFGERNISNLNVKKTHRISVVDTKTGSELTVYEAFQRNLIEKSIYLELSGQQYQWKEAMFFESYGHSSHMLTDTKTGLHFNINEAIEQGTIDKALVKKYQEGLITLTELADSLLSRLVPKKDLHSPVAGYWLTASGERISVLKASRRNLVDRITALRCLEAQVSTGGIIDPLTGKKYRVAEALHRGLVDEGFAQQLRQCELVITGIGHPITNKMMSVVEAVNANIINKEMGIRCLEFQYLTGGLIEPQVHSRLSIEEALQVGIIDVLIATKLKDQKSYVRNIICPQTKRKLTYKEALEKADFDFHTGLKLLEVSEPLMTGISSLYYSS

SEQ ID NO: 44522 - protein, 7572 aa, Homo sapiens
MAGYLSPAAYLYVEEQEYLQAYEDVLERYKDERDKVQKKTFTKWINQHLMKVRKHVNDLYEDLRDGHNLISLLEVLSGDTLPREKGRMRFHRLQNVQIALDYLKRRQVKLVNIRNDDITDGNPKLTLGLIWTIILHFQISDIHVTGESEDMSAKERLLLWTQQATEGYAGIRCENFTTCWRDGKLFNAIIHKYRPDLIDMNTVAVQSNLANLEHAFYVAEKIGVIRLLDPEDVDVSSPDEKSVITYVSSLYDAFPKVPEGGEGIGANDVEVKWIEYQNMVNYLIQWIRHHVTTMSERTFPNNPVELKALYNQYLQFKETEIPPKETEKSKIKRLYKLLEIWIEFGRIKLLQGYHPNDIEKEWGKLIIAMLEREKALRPEVERLEMLQQIANRVQRDSVICEDKLILAGNALQSDSKRLESGVQFQNEAEIAGYILECENLLRQHVIDVQILIDGKYYQADQLVQRVAKLRDEIMALRNECSSVYSKGRILTTEQTKLMISGITQSLNSGFAQTLHPSLTSGLTQSLTPSLTSSSMTSGLSSGMTSRLTPSVTPAYTPGFPSGLVPNFSSGVEPNSLQTLKLMQIRKPLLKSSLLDQNLTEEEINMKFVQDLLNWVDEMQVQLDRTEWGSDLPSVESHLENHKNVHRAIEEFESSLKEAKISEIQMTAPLKLTYAEKLHRLESQYAKLLNTSRNQERHLDTLHNFVSRATNELIWLNEKEEEEVAYDWSERNTNIARKKDYHAELMRELDQKEENIKSVQEIAEQLLLENHPARLTIEAYRAAMQTQWSWILQLCQCVEQHIKENTAYFEFFNDAKEATDYLRNLKDAIQRKYSCDRSSSIHKLEDLVQESMEEKEELLQYKSTIANLMGKAKTIIQLKPRNSDCPLKTSIPIKAICDYRQIEITIYKDDECVLANNSHRAKWKVISPTGNEAMVPSVCFTVPPPNKEAVDLANRIEQQYQNVLTLWHESHINMKSVVSWHYLINEIDRIRASNVASIKTMLPGEHQQVLSNLQSRFEDFLEDSQESQVFSGSDITQLEKEVNVCKQYYQELLKSAEREEQEESVYNLYISEVRNIRLRLENCEDRLIRQIRTPLERDDLHESVFRITEQEKLKKELERLKDDLGTITNKCEEFFSQAAASSSVPTLRSELNVVLQNMNQVYSMSSTYIDKLKTVNLVLKNTQAAEALVKLYETKLCEEEAVIADKNNIENLISTLKQWRSEVDEKRQVFHALEDELQKAKAISDEMFKTYKERDLDFDWHKEKADQLVERWQNVHVQIDNRLRDLEGIGKSLKYYRDTYHPLDDWIQQVETTQRKIQENQPENSKTLATQLNQQKMLVSEIEMKQSKMDECQKYAEQYSATVKDYELQTMTYRAMVDSQQKSPVKRRRMQSSADLIIQEFMDLRTRYTALVTLMTQYIKFAGDSLKRLEEEEKSLEEEKKEHVEKAKELQKWVSNISKTLKDAEKAGKPPFSKQKISSEEISTKKEQLSEALQTIQLFLAKHGDKMTDEERNELEKQVKTLQESYNLLFSESLKQLQESQTSGDVKVEEKLDKVIAGTIDQTTGEVLSVFQAVLRGLIDYDTGIRLLETQLMISGLISPELRKCFDLKDAKSHGLIDEQILCQLKELSKAKEIISAASPTTIPVLDALAQSMITESMAIKVLEILLSTGSLVIPATGEQLTLQKAFQQNLVSSALFSKVLERQNMCKDLIDPCTSEKVSLIDMVQRSTLQENTGMWLLPVRPQEGGRITLKCGRNISILRAAHEGLIDRETMFRLLSAQLLSGGLINSNSGQRMTVEEAVREGVIDRDTASSILTYQVQTGGIIQSNPAKRLTVDEAVQCDLITSSSALLVLEAQRGYVGLIWPHSGEIFPTSSSLQQELITNELAYKILNGRQKIAALYIPESSQVIGLDAAKQLGIIDNNTASILKNITLPDKMPDLGDLEACKNARRWLSFCKFQPSTVHDYRQEEDVFDGEEPVTTQTSEETKKLFLSYLMINSYMDANTGQRLLLYDGDLDEAVGMLLEGCHAEFDGNTAIKECLDVLSSSGVFLNNASGREKDECTATPSSFNKCHCGEPEHEETPENRKCAIDEEFNEMRNTVINSEFSQSGKLASTISIDPKVNSSPSVCVPSLISYLTQTELADISMLRSDSENILTNYENQSRVETNERANECSHSKNIQNFPSDLIENPIMKSKMSKFCGVNETENEDNTNRDSPIFDYSPRLSALLSHDKLMHSQGSFNDTHTPESNGNKCEAPALSFSDKTMLSGQRIGEKFQDQFLGIAAINISLPGEQYGQKSLNMISSNPQVQYHNDKYISNTSGEDEKTHPGFQQMPEDKEDESEIEEYSCAVTPGGDTDNAIVSLTCATPLLDETISASDYETSLLNDQQNNTGTDTDSDDDFYDTPLFEDDDHDSLLLDGDDRDCLHPEDYDTLQEENDETASPADVFYDVSKENENSMVPQGAPVGSLSVKNKAHCLQDFLMDVEKDELDSGEKIHLNPVGSDKVNGQSLETGSERECTNILEGDESDSLTDYDIVGGKESFTASLKFDDSGSWRGRKEEYVTGQEFHSDTDHLDSMQSEESYGDYIYDSNDQDDDDDDGIDEEGGGIRDENGKPRCQNVAEDMDIQLCASILNENSDENENINTMILLDKMHSCSSLEKQQRVNVVQLASPSENNLVTEKSNLPEYTTEIAGKSKENLLNHEMVLKDVLPPIIKDTESEKTFGPASISHDNNNISSTSELGTDLANTKVKLIQGSELPELTDSVKGKDEYFKNMTPKVDSSLDHIICTEPDLIGKPAEESHLSLIASVTDKDPQGNGSDLIKGRDGKSDILIEDETSIQKMYLGEGEVLVEGLVEEENRHLKLLPGKNTRDSFKLINSQFPFPQITNNEELNQKGSLKKATVTLKDEPNNLQIIVSKSPVQFENLEEIFDTSVSKEISDDITSDITSWEGNTHFEESFTDGPEKELDLFTYLKHCAKNIKAKDVAKPNEDVPSHVLITAPPMKEHLQLGVNNTKEKSTSTQKDSPLNDMIQSNDLCSKESISGGGTEISQFTPESIEATLSILSRKHVEDVGKNDFLQSERCANGLGNDNSSNTLNTDYSFLEINNKKERIEQQLPKEQALSPRSQEKEVQIPELSQVFVEDVKDILKSRLKEGHMNPQEVEEPSACADTKILIQNLIKRITTSQLVNEASTVPSDSQMSDSSGVSPMTNSSELKPESRDDPFCIGNLKSELLLNILKQDQHSQKITGVFELMRELTHMEYDLEKRGITSKVLPLQLENIFYKLLADGYSEKIEHVGDFNQKACSTSEMMEEKPHILGDIKSKEGNYYSPNLETVKEIGLESSTVWASTLPRDEKLKDLCNDFPSHLECTSGSKEMASGDSSTEQFSSELQQCLQHTEKMHEYLTLLQDMKPPLDNQESLDNNLEALKNQLRQLETFELGLAPIAVILRKDMKLAEEFLKSLPSDFPRGHVEELSISHQSLKTAFSSLSNVSSERTKQIMLAIDSEMSKLAVSHEEFLHKLKSFSDWVSEKSKSVKDIEIVNVQDSEYVKKRLEFLKANNVLKDLGHTKMQLETTAFDVQFFISEYAQDLSPNQSKQLLRLLNTTQKCFLDVQESVTTQVERLETQLHLEQDLDDQKIVAERQQEYKEKLQGICDLLTQTENRLIGHQEAFMIGDGTVELKKYQSKQEELQKDMQGSAQALAEVVKNTENFLKENGEKLSQEDKALIEQKLNEAKIKCEQLNLKAEQSKKELDKVVTTAIKEETEKVAAVKQLEESKTKIENLLDWLSNVDKDSERAGTKHKQVIEQNGTHFQEGDGKSAIGEEDEVNGNLLETDVDGQVGTTQENLNQQYQKVKAQHEKIISQHQAVIIATQSAQVLLEKQGQYLSPEEKEKLQKNMKELKVHYETALAESEKKMKLTHSLQEELEKFDADYTEFEHWLQQSEQELENLEAGADDINGLMTKLKRQKSFSEDVISHKGDLRYITISGNRVLEAAKSCSKRDGGKVDTSATHREVQRKLDHATDRFRSLYSKCNVLGNNLKDLVDKYQHYEDASCGLLAGLQACEATASKHLSEPIAVDPKNLQRQLEETKALQGQISSQQVAVEKLKKTAEVLLDARGSLLPAKNDIQKTLDDIVGRYEDLSKSVNERNEKLQITLTRSLSVQDGLDEMLDWMGNVESSLKEQGQVPLNSTALQDIISKNIMLEQDIAGRQSSINAMNEKVKKFMETTDPSTASSLQAKMKDLSARFSEASHKHKETLAKMEELKTKVELFENLSEKLQTFLETKTQALTEVDVPGKDVTELSQYMQESTSEFLEHKKHLEVLHSLLKEISSHGLPSDKALVLEKTNNLSKKFKEMEDTIKEKKEAVTSCQEQLDAFQVLVKSLKSWIKETTKKVPIVQPSFGAEDLGKSLEDTKKLQEKWSLKTPEIQKVNNSGISLCNLISAVTTPAKAIAAVKSGGAVLNGEGTATNTEEFWANKGLTSIKKDMTDISHGYEDLGLLLKDKIAELNTKLSKLQKAQEESSAMMQWLQKMNKTATKWQQTPAPTDTEAVKTQVEQNKSFEAELKQNVNKVQELKDKLTELLEENPDTPEAPRWKQMLTEIDSKWQELNQLTIDRQQKLEESSNNLTQFQTVEAQLKQWLVEKELMVSVLGPLSIDPNMLNTQRQQVQILLQEFATRKPQYEQLTAAGQGILSRPGEDPSLRGIVKEQLAAVTQKWDSLTGQLSDRCDWIDQAIVKSTQYQSLLRSLSDKLSDLDNKLSSSLAVSTHPDAMNQQLETAQKMKQEIQQEKKQIKVAQALCEDLSALVKEEYLKAELSRQLEGILKSFKDVEQKAENHVQHLQSACASSHQFQQMSRDFQAWLDTKKEEQNKSHPISAKLDVLESLIKDHKDFSKTLTAQSHMYEKTIAEGENLLLKTQGSEKAALQLQLNTIKTNWDTFNKQVKERENKLKESLEKALKYKEQVETLWPWIDKCQNNLEEIKFCLDPAEGENSIAKLKSLQKEMDQHFGMVELLNNTANSLLSVCEIDKEVVTDENKSLIQKVDMVTEQLHSKKFCLENMTQKFKEFQEVSKESKRQLQCAKEQLDIHDSLGSQAYSNKYLTMLQTQQKSLQALKHQVDLAKRLAQDLVVEASDSKGTSDVLLQVETIAQEHSTLSQQVDEKCSFLETKLQGIGHFQNTIREMFSQFAEFDDELDSMAPVGRDAETLQKQKETIKAFLKKLEALMASNDNANKTCKMMLATEETSPDLVGIKRDLEALSKQCNKLLDRAQAREEQVEGTIKRLEEFYSKLKEFSILLQKAEEHEESQGPVGMETETINQQLNMFKVFQKEEIEPLQGKQQDVNWLGQGLIQSAAKSTSTQGLEHDLDDVNARWKTLNKKVAQRAAQLQEALLHCGRFQDALESLLSWMVDTEELVANQKPPSAEFKVVKAQIQEQKLLQRLLDDRKSTVEVIKREGEKIATTAEPADKVKILKQLSLLDSRWEALLNKAETRNRQLEGISVVAQQFHETLEPLNEWLTTIEKRLVNCEPIGTQASKLEEQIAQHKALEDDIINHNKHLHQAVSIGQSLKVLSSREDKDMVQSKLDFSQVWYIEIQEKSHSRSELLQQALCNAKIFGEDEVELMNWLNEVHDKLSKLSVQDYSTEGLWKQQSELRVLQEDILLRKQNVDQALLNGLELLKQTTGDEVLIIQDKLEAIKARYKDITKLSTDVAKTLEQALQLARRLHSTHEELCTWLDKVEVELLSYETQVLKGEEASQAQMRPKELKKEAKNNKALLDSLNEVSSALLELVPWRAREGLEKMVAEDNERYRLVSDTITQKVEEIDAAILRSQQFDQAADAELSWITETEKKLMSLGDIRLEQDQTSAQLQVQKTFTMEILRHKDIIDDLVKSGHKIMTACSEEEKQSMKKKLDKVLKNYDTICQINSERYLQLERAQSLVNQFWETYEELWPWLTETQSIISQLPAPALEYETLRQQQEEHRQLRELIAEHKPHIDKMNKTGPQLLELSPGEGFSIQEKYVAADTLYSQIKEDVKKRAVALDEAISQSTQFHDKIDQILESLERIVERLRQPPSISAEVEKIKEQISENKNVSVDMEKLQPLYETLKQRGEEMIARSGGTDKDISAKAVQDKLDQMVFIWENIHTLVEEREAKLLDVMELAEKFWCDHMSLIVTIKDTQDFIRDLEDPGIDPSVVKQQQEAAETIREEIDGLQEELDIVINLGSELIAACGEPDKPIVKKSIDELNSAWDSLNKAWKDRIDKLEEAMQAAVQYQDGLQAVFDWVDIAGGKLASMSPIGTDLETVKQQIEELKQFKSEAYQQQIEMERLNHQAELLLKKVTEESDKHTVQDPLMELKLIWDSLEERIINRQHKLEGALLALGQFQHALDELLAWLTHTEGLLSEQKPVGGDPKAIEIELAKHHVLQNDVLAHQSTVEAVNKAGNDLIESSAGEEASNLQNKLEVLNQRWQNVLEKTEQRKQQLDGALRQAKGFHGEIEDLQQWLTDTERHLLASKPLGGLPETAKEQLNVHMEVCAAFEAKEETYKSLMQKGQQMLARCPKSAETNIDQDINNLKEKWESVETKLNERKTKLEEALNLAMEFHNSLQDFINWLTQAEQTLNVASRPSLILDTVLFQIDEHKVFANEVNSHREQIIELDKTGTHLKYFSQKQDVVLIKNLLISVQSRWEKVVQRLVERGRSLDDARKRAKQFHEAWSKLMEWLEESEKSLDSELEIANDPDKIKTQLAQHKEFQKSLGAKHSVYDTTNRTGRSLKEKTSLADDNLKLDDMLSELRDKWDTICGKSVERQNKLEEALLFSGQFTDALQALIDWLYRVEPQLAEDQPVHGDIDLVMNLIDNHKAFQKELGKRTSSVQALKRSARELIEGSRDDSSWVKVQMQELSTRWETVCALSISKQTRLEAALRQAEEFHSVVHALLEWLAEAEQTLRFHGVLPDDEDALRTLIDQHKEFMKKLEEKRAELNKATTMGDTVLAICHPDSITTIKHWITIIRARFEEVLAWAKQHQQRLASALAGLIAKQELLEALLAWLQWAETTLTDKDKEVIPQEIEEVKALIAEHQTFMEEMTRKQPDVDKVTKTYKRRAADPSSLQSHIPVLDKGRAGRKRFPASSLYPSGSQTQIETKNPRVNLLVSKWQQVWLLALERRRKLNDALDRLEELREFANFDFDIWRKKYMRWMNHKKSRVMDFFRRIDKDQDGKITRQEFIDGILSSKFPTSRLEMSAVADIFDRDGDGYIDYYEFVAALHPNKDAYKPITDADKIEDEVTRQVAKCKCAKRFQVEQIGDNKYRVSFQSNFGDSQQLRLVRILRSTVMVRVGGGWMALDEFLVKNDPCRVHHHGSKMLRSESNSSITTTQPTIAKGRTNMELREKFILADGASQGMAAFRPRGRRSRPSSRGASPNRSTSVSSQAAQAASPQVPATTTPKGTPIQGSKLRLPGYLSGKGFHSGEDSGLITTAAARVRTQFADSKKTPSRPGSRAGSKAGSRASSRRGSDASDFDISEIQSVCSDVETVPQTHRPTPRAGSRPSTAKPSKIPTPQRKSPASKLDKSSKR

SEQ ID NO: 44523 - protein, 5457 aa, Homo sapiens
MAGYLSPAAYLYVEEQEYLQAYEDVLERYKDERDKVQKKTFTKWINQHLMKVRKHVNDLYEDLRDGHNLISLLEVLSGDTLPREKGRMRFHRLQNVQIALDYLKRRQVKLVNIRNDDITDGNPKLTLGLIWTIILHFQISDIHVTGESEDMSAKERLLLWTQQATEGYAGIRCENFTTCWRDGKLFNAIIHKYRPDLIDMNTVAVQSNLANLEHAFYVAEKIGVIRLLDPEDVDVSSPDEKSVITYVSSLYDAFPKVPEGGEGIGANDVEVKWIEYQNMVNYLIQWIRHHVTTMSERTFPNNPVELKALYNQYLQFKETEIPPKETEKSKIKRLYKLLEIWIEFGRIKLLQGYHPNDIEKEWGKLIIAMLEREKALRPEVERLEMLQQIANRVQRDSVICEDKLILAGNALQSDSKRLESGVQFQNEAEIAGYILECENLLRQHVIDVQILIDGKYYQADQLVQRVAKLRDEIMALRNECSSVYSKGRILTTEQTKLMISGITQSLNSGFAQTLHPSLTSGLTQSLTPSLTSSSMTSGLSSGMTSRLTPSVTPAYTPGFPSGLVPNFSSGVEPNSLQTLKLMQIRKPLLKSSLLDQNLTEEEINMKFVQDLLNWVDEMQVQLDRTEWGSDLPSVESHLENHKNVHRAIEEFESSLKEAKISEIQMTAPLKLTYAEKLHRLESQYAKLLNTSRNQERHLDTLHNFVSRATNELIWLNEKEEEEVAYDWSERNTNIARKKDYHAELMRELDQKEENIKSVQEIAEQLLLENHPARLTIEAYRAAMQTQWSWILQLCQCVEQHIKENTAYFEFFNDAKEATDYLRNLKDAIQRKYSCDRSSSIHKLEDLVQESMEEKEELLQYKSTIANLMGKAKTIIQLKPRNSDCPLKTSIPIKAICDYRQIEITIYKDDECVLANNSHRAKWKVISPTGNEAMVPSVCFTVPPPNKEAVDLANRIEQQYQNVLTLWHESHINMKSVVSWHYLINEIDRIRASNVASIKTMLPGEHQQVLSNLQSRFEDFLEDSQESQVFSGSDITQLEKEVNVCKQYYQELLKSAEREEQEESVYNLYISEVRNIRLRLENCEDRLIRQIRTPLERDDLHESVFRITEQEKLKKELERLKDDLGTITNKCEEFFSQAAASSSVPTLRSELNVVLQNMNQVYSMSSTYIDKLKTVNLVLKNTQAAEALVKLYETKLCEEEAVIADKNNIENLISTLKQWRSEVDEKRQVFHALEDELQKAKAISDEMFKTYKERDLDFDWHKEKADQLVERWQNVHVQIDNRLRDLEGIGKSLKYYRDTYHPLDDWIQQVETTQRKIQENQPENSKTLATQLNQQKMLVSEIEMKQSKMDECQKYAEQYSATVKDYELQTMTYRAMVDSQQKSPVKRRRMQSSADLIIQEFMDLRTRYTALVTLMTQYIKFAGDSLKRLEEEEKSLEEEKKEHVEKAKELQKWVSNISKTLKDAEKAGKPPFSKQKISSEEISTKKEQLSEALQTIQLFLAKHGDKMTDEERNELEKQVKTLQESYNLLFSESLKQLQESQTSGDVKVEEKIVAERQQEYKEKLQGICDLLTQTENRLIGHQEAFMIGDGTVELKKYQSKQEELQKDMQGSAQALAEVVKNTENFLKENGEKLSQEDKALIEQKLNEAKIKCEQLNLKAEQSKKELDKVVTTAIKEETEKVAAVKQLEESKTKIENLLDWLSNVDKDSERAGTKHKQVIEQNGTHFQEGDGKSAIGEEDEVNGNLLETDVDGQVGTTQENLNQQYQKVKAQHEKIISQHQAVIIATQSAQVLLEKQGQYLSPEEKEKLQKNMKELKVHYETALAESEKKMKLTHSLQEELEKFDADYTEFEHWLQQSEQELENLEAGADDINGLMTKLKRQKSFSEDVISHKGDLRYITISGNRVLEAAKSCSKRDGGKVDTSATHREVQRKLDHATDRFRSLYSKCNVLGNNLKDLVDKYQHYEDASCGLLAGLQACEATASKHLSEPIAVDPKNLQRQLEETKALQGQISSQQVAVEKLKKTAEVLLDARGSLLPAKNDIQKTLDDIVGRYEDLSKSVNERNEKLQITLTRSLSVQDGLDEMLDWMGNVESSLKEQGQVPLNSTALQDIISKNIMLEQDIAGRQSSINAMNEKVKKFMETTDPSTASSLQAKMKDLSARFSEASHKHKETLAKMEELKTKVELFENLSEKLQTFLETKTQALTEVDVPGKDVTELSQYMQESTSEFLEHKKHLEVLHSLLKEISSHGLPSDKALVLEKTNNLSKKFKEMEDTIKEKKEAVTSCQEQLDAFQVLVKSLKSWIKETTKKVPIVQPSFGAEDLGKSLEDTKKLQEKWSLKTPEIQKVNNSGISLCNLISAVTTPAKAIAAVKSGGAVLNGEGTATNTEEFWANKGLTSIKKDMTDISHGYEDLGLLLKDKIAELNTKLSKLQKAQEESSAMMQWLQKMNKTATKWQQTPAPTDTEAVKTQVEQNKSFEAELKQNVNKVQELKDKLTELLEENPDTPEAPRWKQMLTEIDSKWQELNQLTIDRQQKLEESSNNLTQFQTVEAQLKQWLVEKELMVSVLGPLSIDPNMLNTQRQQVQILLQEFATRKPQYEQLTAAGQGILSRPGEDPSLRGIVKEQLAAVTQKWDSLTGQLSDRCDWIDQAIVKSTQYQSLLRSLSDKLSDLDNKLSSSLAVSTHPDAMNQQLETAQKMKQEIQQEKKQIKVAQALCEDLSALVKEEYLKAELSRQLEGILKSFKDVEQKAENHVQHLQSACASSHQFQQMSRDFQAWLDTKKEEQNKSHPISAKLDVLESLIKDHKDFSKTLTAQSHMYEKTIAEGENLLLKTQGSEKAALQLQLNTIKTNWDTFNKQVKERENKLKESLEKALKYKEQVETLWPWIDKCQNNLEEIKFCLDPAEGENSIAKLKSLQKEMDQHFGMVELLNNTANSLLSVCEIDKEVVTDENKSLIQKVDMVTEQLHSKKFCLENMTQKFKEFQEVSKESKRQLQCAKEQLDIHDSLGSQAYSNKYLTMLQTQQKSLQALKHQVDLAKRLAQDLVVEASDSKGTSDVLLQVETIAQEHSTLSQQVDEKCSFLETKLQGIGHFQNTIREMFSQFAEFDDELDSMAPVGRDAETLQKQKETIKAFLKKLEALMASNDNANKTCKMMLATEETSPDLVGIKRDLEALSKQCNKLLDRAQAREEQVEGTIKRLEEFYSKLKEFSILLQKAEEHEESQGPVGMETETINQQLNMFKVFQKEEIEPLQGKQQDVNWLGQGLIQSAAKSTSTQGLEHDLDDVNARWKTLNKKVAQRAAQLQEALLHCGRFQDALESLLSWMVDTEELVANQKPPSAEFKVVKAQIQEQKLLQRLLDDRKSTVEVIKREGEKIATTAEPADKVKILKQLSLLDSRWEALLNKAETRNRQLEGISVVAQQFHETLEPLNEWLTTIEKRLVNCEPIGTQASKLEEQIAQHKALEDDIINHNKHLHQAVSIGQSLKVLSSREDKDMVQSKLDFSQVWYIEIQEKSHSRSELLQQALCNAKIFGEDEVELMNWLNEVHDKLSKLSVQDYSTEGLWKQQSELRVLQEDILLRKQNVDQALLNGLELLKQTTGDEVLIIQDKLEAIKARYKDITKLSTDVAKTLEQALQLARRLHSTHEELCTWLDKVEVELLSYETQVLKGEEASQAQMRPKELKKEAKNNKALLDSLNEVSSALLELVPWRAREGLEKMVAEDNERYRLVSDTITQKVEEIDAAILRSQQFDQAADAELSWITETEKKLMSLGDIRLEQDQTSAQLQVQKTFTMEILRHKDIIDDLVKSGHKIMTACSEEEKQSMKKKLDKVLKNYDTICQINSERYLQLERAQSLVNQFWETYEELWPWLTETQSIISQLPAPALEYETLRQQQEEHRQLRELIAEHKPHIDKMNKTGPQLLELSPGEGFSIQEKYVAADTLYSQIKEDVKKRAVALDEAISQSTQFHDKIDQILESLERIVERLRQPPSISAEVEKIKEQISENKNVSVDMEKLQPLYETLKQRGEEMIARSGGTDKDISAKAVQDKLDQMVFIWENIHTLVEEREAKLLDVMELAEKFWCDHMSLIVTIKDTQDFIRDLEDPGIDPSVVKQQQEAAETIREEIDGLQEELDIVINLGSELIAACGEPDKPIVKKSIDELNSAWDSLNKAWKDRIDKLEEAMQAAVQYQDGLQAVFDWVDIAGGKLASMSPIGTDLETVKQQIEELKQFKSEAYQQQIEMERLNHQAELLLKKVTEESDKHTVQDPLMELKLIWDSLEERIINRQHKLEGALLALGQFQHALDELLAWLTHTEGLLSEQKPVGGDPKAIEIELAKHHVLQNDVLAHQSTVEAVNKAGNDLIESSAGEEASNLQNKLEVLNQRWQNVLEKTEQRKQQLDGALRQAKGFHGEIEDLQQWLTDTERHLLASKPLGGLPETAKEQLNVHMEVCAAFEAKEETYKSLMQKGQQMLARCPKSAETNIDQDINNLKEKWESVETKLNERKTKLEEALNLAMEFHNSLQDFINWLTQAEQTLNVASRPSLILDTVLFQIDEHKVFANEVNSHREQIIELDKTGTHLKYFSQKQDVVLIKNLLISVQSRWEKVVQRLVERGRSLDDARKRAKQFHEAWSKLMEWLEESEKSLDSELEIANDPDKIKTQLAQHKEFQKSLGAKHSVYDTTNRTGRSLKEKTSLADDNLKLDDMLSELRDKWDTICGKSVERQNKLEEALLFSGQFTDALQALIDWLYRVEPQLAEDQPVHGDIDLVMNLIDNHKAFQKELGKRTSSVQALKRSARELIEGSRDDSSWVKVQMQELSTRWETVCALSISKQTRLEAALRQAEEFHSVVHALLEWLAEAEQTLRFHGVLPDDEDALRTLIDQHKEFMKKLEEKRAELNKATTMGDTVLAICHPDSITTIKHWITIIRARFEEVLAWAKQHQQRLASALAGLIAKQELLEALLAWLQWAETTLTDKDKEVIPQEIEEVKALIAEHQTFMEEMTRKQPDVDKVTKTYKRRAADPSSLQSHIPVLDKGRAGRKRFPASSLYPSGSQTQIETKNPRVNLLLREFANFDFDIWRKKYMRWMNHKKSRVMDFFRRIDKDQDGKITRQEFIDGILSSKFPTSRLEMSAVADIFDRDGDGYIDYYEFVAALHPNKDAYKPITDADKIEDEVTRQVAKCKCAKRFQVEQIGDNKYRVSFQSNFGDSQQLRLVRILRSTVMVRVGGGWMALDEFLVKNDPCRVHHHGSKMLRSESNSSITTTQPTIAKGRTNMELREKFILADGASQGMAAFRPRGRRSRPSSRGASPNRSTSVSSQAAQAASPQVPATTTPKGTPIQGSKLRLPGYLSGKGFHSGEDSGLITTAAARVRTQFADSKKTPSRPGSRAGSKAGSRASSRRGSDASDFDISEIQSVCSDVETVPQTHRPTPRAGSRPSTAKPSKIPTPQRKSPASKLDKSSKR

SEQ ID NO: 44524 - protein, 3060 aa, Homo sapiens
MHSSSYSYRSSDSVFSNTTSTRTSLDSNENLLLVHCGPTLINSCISFGSESFDGHRLEMLQQIANRVQRDSVICEDKLILAGNALQSDSKRLESGVQFQNEAEIAGYILECENLLRQHVIDVQILIDGKYYQADQLVQRVAKLRDEIMALRNECSSVYSKGRILTTEQTKLMISGITQSLNSGFAQTLHPSLTSGLTQSLTPSLTSSSMTSGLSSGMTSRLTPSVTPAYTPGFPSGLVPNFSSGVEPNSLQTLKLMQIRKPLLKSSLLDQNLTEEEINMKFVQDLLNWVDEMQVQLDRTEWGSDLPSVESHLENHKNVHRAIEEFESSLKEAKISEIQMTAPLKLTYAEKLHRLESQYAKLLNTSRNQERHLDTLHNFVSRATNELIWLNEKEEEEVAYDWSERNTNIARKKDYHAELMRELDQKEENIKSVQEIAEQLLLENHPARLTIEAYRAAMQTQWSWILQLCQCVEQHIKENTAYFEFFNDAKEATDYLRNLKDAIQRKYSCDRSSSIHKLEDLVQESMEEKEELLQYKSTIANLMGKAKTIIQLKPRNSDCPLKTSIPIKAICDYRQIEITIYKDDECVLANNSHRAKWKVISPTGNEAMVPSVCFTVPPPNKEAVDLANRIEQQYQNVLTLWHESHINMKSVVSWHYLINEIDRIRASNVASIKTMLPGEHQQVLSNLQSRFEDFLEDSQESQVFSGSDITQLEKEVNVCKQYYQELLKSAEREEQEESVYNLYISEVRNIRLRLENCEDRLIRQIRTPLERDDLHESVFRITEQEKLKKELERLKDDLGTITNKCEEFFSQAAASSSVPTLRSELNVVLQNMNQVYSMSSTYIDKLKTVNLVLKNTQAAEALVKLYETKLCEEEAVIADKNNIENLISTLKQWRSEVDEKRQVFHALEDELQKAKAISDEMFKTYKERDLDFDWHKEKADQLVERWQNVHVQIDNRLRDLEGIGKSLKYYRDTYHPLDDWIQQVETTQRKIQENQPENSKTLATQLNQQKMLVSEIEMKQSKMDECQKYAEQYSATVKDYELQTMTYRAMVDSQQKSPVKRRRMQSSADLIIQEFMDLRTRYTALVTLMTQYIKFAGDSLKRLEEEEKSLEEEKKEHVEKAKELQKWVSNISKTLKDAEKAGKPPFSKQKISSEEISTKKEQLSEALQTIQLFLAKHGDKMTDEERNELEKQVKTLQESYNLLFSESLKQLQESQTSGDVKVEEKLDKVIAGTIDQTTGEVLSVFQAVLRGLIDYDTGIRLLETQLMISGLISPELRKCFDLKDAKSHGLIDEQILCQLKELSKAKEIISAASPTTIPVLDALAQSMITESMAIKVLEILLSTGSLVIPATGEQLTLQKAFQQNLVSSALFSKVLERQNMCKDLIDPCTSEKVSLIDMVQRSTLQENTGMWLLPVRPQEGGRITLKCGRNISILRAAHEGLIDRETMFRLLSAQLLSGGLINSNSGQRMTVEEAVREGVIDRDTASSILTYQVQTGGIIQSNPAKRLTVDEAVQCDLITSSSALLVLEAQRGYVGLIWPHSGEIFPTSSSLQQELITNELAYKILNGRQKIAALYIPESSQVIGLDAAKQLGIIDNNTASILKNITLPDKMPDLGDLEACKNARRWLSFCKFQPSTVHDYRQEEDVFDGEEPVTTQTSEETKKLFLSYLMINSYMDANTGQRLLLYDGDLDEAVGMLLEGCHAEFDGNTAIKECLDVLSSSGVFLNNASGREKDECTATPSSFNKCHCGEPEHEETPENRKCAIDEEFNEMRNTVINSEFSQSGKLASTISIDPKVNSSPSVCVPSLISYLTQTELADISMLRSDSENILTNYENQSRVETNERANECSHSKNIQNFPSDLIENPIMKSKMSKFCGVNETENEDNTNRDSPIFDYSPRLSALLSHDKLMHSQGSFNDTHTPESNGNKCEAPALSFSDKTMLSGQRIGEKFQDQFLGIAAINISLPGEQYGQKSLNMISSNPQVQYHNDKYISNTSGEDEKTHPGFQQMPEDKEDESEIEEYSCAVTPGGDTDNAIVSLTCATPLLDETISASDYETSLLNDQQNNTGTDTDSDDDFYDTPLFEDDDHDSLLLDGDDRDCLHPEDYDTLQEENDETASPADVFYDVSKENENSMVPQGAPVGSLSVKNKAHCLQDFLMDVEKDELDSGEKIHLNPVGSDKVNGQSLETGSERECTNILEGDESDSLTDYDIVGGKESFTASLKFDDSGSWRGRKEEYVTGQEFHSDTDHLDSMQSEESYGDYIYDSNDQDDDDDDGIDEEGGGIRDENGKPRCQNVAEDMDIQLCASILNENSDENENINTMILLDKMHSCSSLEKQQRVNVVQLASPSENNLVTEKSNLPEYTTEIAGKSKENLLNHEMVLKDVLPPIIKDTESEKTFGPASISHDNNNISSTSELGTDLANTKVKLIQGSELPELTDSVKGKDEYFKNMTPKVDSSLDHIICTEPDLIGKPAEESHLSLIASVTDKDPQGNGSDLIKGRDGKSDILIEDETSIQKMYLGEGEVLVEGLVEEENRHLKLLPGKNTRDSFKLINSQFPFPQITNNEELNQKGSLKKATVTLKDEPNNLQIIVSKSPVQFENLEEIFDTSVSKEISDDITSDITSWEGNTHFEESFTDGPEKELDLFTYLKHCAKNIKAKDVAKPNEDVPSHVLITAPPMKEHLQLGVNNTKEKSTSTQKDSPLNDMIQSNDLCSKESISGGGTEISQFTPESIEATLSILSRKHVEDVGKNDFLQSERCANGLGNDNSSNTLNTDYSFLEINNKKERIEQQLPKEQALSPRSQEKEVQIPELSQVFVEDVKDILKSRLKEGHMNPQEVEEPSACADTKILIQNLIKRITTSQLVNEASTVPSDSQMSDSSGVSPMTNSSELKPESRDDPFCIGNLKSELLLNILKQDQHSQKITGVFELMRELTHMEYDLEKRGITSKVLPLQLENIFYKLLADGYSEKIEHVGDFNQKACSTSEMMEEKPHILGDIKSKEGNYYSPNLETVKEIGLESSTVWASTLPRDEKLKDLCNDFPSHLECTSGSKEMASGDSSTEQ

SEQ ID NO: 44525 - protein, 7246 aa, Homo sapiens
MHSSSYSYRSSDSVFSNTTSTRTSLDSNENLLLVHCGPTLINSCISFGSESFDGHRLEMLQQIANRVQRDSVICEDKLILAGNALQSDSKRLESGVQFQNEAEIAGYILECENLLRQHVIDVQILIDGKYYQADQLVQRVAKLRDEIMALRNECSSVYSKGRILTTEQTKLMISGITQSLNSGFAQTLHPSLTSGLTQSLTPSLTSSSMTSGLSSGMTSRLTPSVTPAYTPGFPSGLVPNFSSGVEPNSLQTLKLMQIRKPLLKSSLLDQNLTEEEINMKFVQDLLNWVDEMQVQLDRTEWGSDLPSVESHLENHKNVHRAIEEFESSLKEAKISEIQMTAPLKLTYAEKLHRLESQYAKLLNTSRNQERHLDTLHNFVSRATNELIWLNEKEEEEVAYDWSERNTNIARKKDYHAELMRELDQKEENIKSVQEIAEQLLLENHPARLTIEAYRAAMQTQWSWILQLCQCVEQHIKENTAYFEFFNDAKEATDYLRNLKDAIQRKYSCDRSSSIHKLEDLVQESMEEKEELLQYKSTIANLMGKAKTIIQLKPRNSDCPLKTSIPIKAICDYRQIEITIYKDDECVLANNSHRAKWKVISPTGNEAMVPSVCFTVPPPNKEAVDLANRIEQQYQNVLTLWHESHINMKSVVSWHYLINEIDRIRASNVASIKTMLPGEHQQVLSNLQSRFEDFLEDSQESQVFSGSDITQLEKEVNVCKQYYQELLKSAEREEQEESVYNLYISEVRNIRLRLENCEDRLIRQIRTPLERDDLHESVFRITEQEKLKKELERLKDDLGTITNKCEEFFSQAAASSSVPTLRSELNVVLQNMNQVYSMSSTYIDKLKTVNLVLKNTQAAEALVKLYETKLCEEEAVIADKNNIENLISTLKQWRSEVDEKRQVFHALEDELQKAKAISDEMFKTYKERDLDFDWHKEKADQLVERWQNVHVQIDNRLRDLEGIGKSLKYYRDTYHPLDDWIQQVETTQRKIQENQPENSKTLATQLNQQKMLVSEIEMKQSKMDECQKYAEQYSATVKDYELQTMTYRAMVDSQQKSPVKRRRMQSSADLIIQEFMDLRTRYTALVTLMTQYIKFAGDSLKRLEEEEKSLEEEKKEHVEKAKELQKWVSNISKTLKDAEKAGKPPFSKQKISSEEISTKKEQLSEALQTIQLFLAKHGDKMTDEERNELEKQVKTLQESYNLLFSESLKQLQESQTSGDVKVEEKLDKVIAGTIDQTTGEVLSVFQAVLRGLIDYDTGIRLLETQLMISGLISPELRKCFDLKDAKSHGLIDEQILCQLKELSKAKEIISAASPTTIPVLDALAQSMITESMAIKVLEILLSTGSLVIPATGEQLTLQKAFQQNLVSSALFSKVLERQNMCKDLIDPCTSEKVSLIDMVQRSTLQENTGMWLLPVRPQEGGRITLKCGRNISILRAAHEGLIDRETMFRLLSAQLLSGGLINSNSGQRMTVEEAVREGVIDRDTASSILTYQVQTGGIIQSNPAKRLTVDEAVQCDLITSSSALLVLEAQRGYVGLIWPHSGEIFPTSSSLQQELITNELAYKILNGRQKIAALYIPESSQVIGLDAAKQLGIIDNNTASILKNITLPDKMPDLGDLEACKNARRWLSFCKFQPSTVHDYRQEEDVFDGEEPVTTQTSEETKKLFLSYLMINSYMDANTGQRLLLYDGDLDEAVGMLLEGCHAEFDGNTAIKECLDVLSSSGVFLNNASGREKDECTATPSSFNKCHCGEPEHEETPENRKCAIDEEFNEMRNTVINSEFSQSGKLASTISIDPKVNSSPSVCVPSLISYLTQTELADISMLRSDSENILTNYENQSRVETNERANECSHSKNIQNFPSDLIENPIMKSKMSKFCGVNETENEDNTNRDSPIFDYSPRLSALLSHDKLMHSQGSFNDTHTPESNGNKCEAPALSFSDKTMLSGQRIGEKFQDQFLGIAAINISLPGEQYGQKSLNMISSNPQVQYHNDKYISNTSGEDEKTHPGFQQMPEDKEDESEIEEYSCAVTPGGDTDNAIVSLTCATPLLDETISASDYETSLLNDQQNNTGTDTDSDDDFYDTPLFEDDDHDSLLLDGDDRDCLHPEDYDTLQEENDETASPADVFYDVSKENENSMVPQGAPVGSLSVKNKAHCLQDFLMDVEKDELDSGEKIHLNPVGSDKVNGQSLETGSERECTNILEGDESDSLTDYDIVGGKESFTASLKFDDSGSWRGRKEEYVTGQEFHSDTDHLDSMQSEESYGDYIYDSNDQDDDDDDGIDEEGGGIRDENGKPRCQNVAEDMDIQLCASILNENSDENENINTMILLDKMHSCSSLEKQQRVNVVQLASPSENNLVTEKSNLPEYTTEIAGKSKENLLNHEMVLKDVLPPIIKDTESEKTFGPASISHDNNNISSTSELGTDLANTKVKLIQGSELPELTDSVKGKDEYFKNMTPKVDSSLDHIICTEPDLIGKPAEESHLSLIASVTDKDPQGNGSDLIKGRDGKSDILIEDETSIQKMYLGEGEVLVEGLVEEENRHLKLLPGKNTRDSFKLINSQFPFPQITNNEELNQKGSLKKATVTLKDEPNNLQIIVSKSPVQFENLEEIFDTSVSKEISDDITSDITSWEGNTHFEESFTDGPEKELDLFTYLKHCAKNIKAKDVAKPNEDVPSHVLITAPPMKEHLQLGVNNTKEKSTSTQKDSPLNDMIQSNDLCSKESISGGGTEISQFTPESIEATLSILSRKHVEDVGKNDFLQSERCANGLGNDNSSNTLNTDYSFLEINNKKERIEQQLPKEQALSPRSQEKEVQIPELSQVFVEDVKDILKSRLKEGHMNPQEVEEPSACADTKILIQNLIKRITTSQLVNEASTVPSDSQMSDSSGVSPMTNSSELKPESRDDPFCIGNLKSELLLNILKQDQHSQKITGVFELMRELTHMEYDLEKRGITSKVLPLQLENIFYKLLADGYSEKIEHVGDFNQKACSTSEMMEEKPHILGDIKSKEGNYYSPNLETVKEIGLESSTVWASTLPRDEKLKDLCNDFPSHLECTSGSKEMASGDSSTEQFSSELQQCLQHTEKMHEYLTLLQDMKPPLDNQESLDNNLEALKNQLRQLETFELGLAPIAVILRKDMKLAEEFLKSLPSDFPRGHVEELSISHQSLKTAFSSLSNVSSERTKQIMLAIDSEMSKLAVSHEEFLHKLKSFSDWVSEKSKSVKDIEIVNVQDSEYVKKRLEFLKANNVLKDLGHTKMQLETTAFDVQFFISEYAQDLSPNQSKQLLRLLNTTQKCFLDVQESVTTQVERLETQLHLEQDLDDQKIVAERQQEYKEKLQGICDLLTQTENRLIGHQEAFMIGDGTVELKKYQSKQEELQKDMQGSAQALAEVVKNTENFLKENGEKLSQEDKALIEQKLNEAKIKCEQLNLKAEQSKKELDKVVTTAIKEETEKVAAVKQLEESKTKIENLLDWLSNVDKDSERAGTKHKQVIEQNGTHFQEGDGKSAIGEEDEVNGNLLETDVDGQVGTTQENLNQQYQKVKAQHEKIISQHQAVIIATQSAQVLLEKQGQYLSPEEKEKLQKNMKELKVHYETALAESEKKMKLTHSLQEELEKFDADYTEFEHWLQQSEQELENLEAGADDINGLMTKLKRQKSFSEDVISHKGDLRYITISGNRVLEAAKSCSKRDGGKVDTSATHREVQRKLDHATDRFRSLYSKCNVLGNNLKDLVDKYQHYEDASCGLLAGLQACEATASKHLSEPIAVDPKNLQRQLEETKALQGQISSQQVAVEKLKKTAEVLLDARGSLLPAKNDIQKTLDDIVGRYEDLSKSVNERNEKLQITLTRSLSVQDGLDEMLDWMGNVESSLKEQGQVPLNSTALQDIISKNIMLEQDIAGRQSSINAMNEKVKKFMETTDPSTASSLQAKMKDLSARFSEASHKHKETLAKMEELKTKVELFENLSEKLQTFLETKTQALTEVDVPGKDVTELSQYMQESTSEFLEHKKHLEVLHSLLKEISSHGLPSDKALVLEKTNNLSKKFKEMEDTIKEKKEAVTSCQEQLDAFQVLVKSLKSWIKETTKKVPIVQPSFGAEDLGKSLEDTKKLQEKWSLKTPEIQKVNNSGISLCNLISAVTTPAKAIAAVKSGGAVLNGEGTATNTEEFWANKGLTSIKKDMTDISHGYEDLGLLLKDKIAELNTKLSKLQKAQEESSAMMQWLQKMNKTATKWQQTPAPTDTEAVKTQVEQNKSFEAELKQNVNKVQELKDKLTELLEENPDTPEAPRWKQMLTEIDSKWQELNQLTIDRQQKLEESSNNLTQFQTVEAQLKQWLVEKELMVSVLGPLSIDPNMLNTQRQQVQILLQEFATRKPQYEQLTAAGQGILSRPGEDPSLRGIVKEQLAAVTQKWDSLTGQLSDRCDWIDQAIVKSTQYQSLLRSLSDKLSDLDNKLSSSLAVSTHPDAMNQQLETAQKMKQEIQQEKKQIKVAQALCEDLSALVKEEYLKAELSRQLEGILKSFKDVEQKAENHVQHLQSACASSHQFQQMSRDFQAWLDTKKEEQNKSHPISAKLDVLESLIKDHKDFSKTLTAQSHMYEKTIAEGENLLLKTQGSEKAALQLQLNTIKTNWDTFNKQVKERENKLKESLEKALKYKEQVETLWPWIDKCQNNLEEIKFCLDPAEGENSIAKLKSLQKEMDQHFGMVELLNNTANSLLSVCEIDKEVVTDENKSLIQKVDMVTEQLHSKKFCLENMTQKFKEFQEVSKESKRQLQCAKEQLDIHDSLGSQAYSNKYLTMLQTQQKSLQALKHQVDLAKRLAQDLVVEASDSKGTSDVLLQVETIAQEHSTLSQQVDEKCSFLETKLQGIGHFQNTIREMFSQFAEFDDELDSMAPVGRDAETLQKQKETIKAFLKKLEALMASNDNANKTCKMMLATEETSPDLVGIKRDLEALSKQCNKLLDRAQAREEQVEGTIKRLEEFYSKLKEFSILLQKAEEHEESQGPVGMETETINQQLNMFKVFQKEEIEPLQGKQQDVNWLGQGLIQSAAKSTSTQGLEHDLDDVNARWKTLNKKVAQRAAQLQEALLHCGRFQDALESLLSWMVDTEELVANQKPPSAEFKVVKAQIQEQKLLQRLLDDRKSTVEVIKREGEKIATTAEPADKVKILKQLSLLDSRWEALLNKAETRNRQLEGISVVAQQFHETLEPLNEWLTTIEKRLVNCEPIGTQASKLEEQIAQHKALEDDIINHNKHLHQAVSIGQSLKVLSSREDKDMVQSKLDFSQVWYIEIQEKSHSRSELLQQALCNAKIFGEDEVELMNWLNEVHDKLSKLSVQDYSTEGLWKQQSELRVLQEDILLRKQNVDQALLNGLELLKQTTGDEVLIIQDKLEAIKARYKDITKLSTDVAKTLEQALQLARRLHSTHEELCTWLDKVEVELLSYETQVLKGEEASQAQMRPKELKKEAKNNKALLDSLNEVSSALLELVPWRAREGLEKMVAEDNERYRLVSDTITQKVEEIDAAILRSQQFDQAADAELSWITETEKKLMSLGDIRLEQDQTSAQLQVQKTFTMEILRHKDIIDDLVKSGHKIMTACSEEEKQSMKKKLDKVLKNYDTICQINSERYLQLERAQSLVNQFWETYEELWPWLTETQSIISQLPAPALEYETLRQQQEEHRQLRELIAEHKPHIDKMNKTGPQLLELSPGEGFSIQEKYVAADTLYSQIKEDVKKRAVALDEAISQSTQFHDKIDQILESLERIVERLRQPPSISAEVEKIKEQISENKNVSVDMEKLQPLYETLKQRGEEMIARSGGTDKDISAKAVQDKLDQMVFIWENIHTLVEEREAKLLDVMELAEKFWCDHMSLIVTIKDTQDFIRDLEDPGIDPSVVKQQQEAAETIREEIDGLQEELDIVINLGSELIAACGEPDKPIVKKSIDELNSAWDSLNKAWKDRIDKLEEAMQAAVQYQDGLQAVFDWVDIAGGKLASMSPIGTDLETVKQQIEELKQFKSEAYQQQIEMERLNHQAELLLKKVTEESDKHTVQDPLMELKLIWDSLEERIINRQHKLEGALLALGQFQHALDELLAWLTHTEGLLSEQKPVGGDPKAIEIELAKHHVLQNDVLAHQSTVEAVNKAGNDLIESSAGEEASNLQNKLEVLNQRWQNVLEKTEQRKQQLDGALRQAKGFHGEIEDLQQWLTDTERHLLASKPLGGLPETAKEQLNVHMEVCAAFEAKEETYKSLMQKGQQMLARCPKSAETNIDQDINNLKEKWESVETKLNERKTKLEEALNLAMEFHNSLQDFINWLTQAEQTLNVASRPSLILDTVLFQIDEHKVFANEVNSHREQIIELDKTGTHLKYFSQKQDVVLIKNLLISVQSRWEKVVQRLVERGRSLDDARKRAKQFHEAWSKLMEWLEESEKSLDSELEIANDPDKIKTQLAQHKEFQKSLGAKHSVYDTTNRTGRSLKEKTSLADDNLKLDDMLSELRDKWDTICGKSVERQNKLEEALLFSGQFTDALQALIDWLYRVEPQLAEDQPVHGDIDLVMNLIDNHKAFQKELGKRTSSVQALKRSARELIEGSRDDSSWVKVQMQELSTRWETVCALSISKQTRLEAALRQAEEFHSVVHALLEWLAEAEQTLRFHGVLPDDEDALRTLIDQHKEFMKKLEEKRAELNKATTMGDTVLAICHPDSITTIKHWITIIRARFEEVLAWAKQHQQRLASALAGLIAKQELLEALLAWLQWAETTLTDKDKEVIPQEIEEVKALIAEHQTFMEEMTRKQPDVDKVTKTYKRRAADPSSLQSHIPVLDKGRAGRKRFPASSLYPSGSQTQIETKNPRVNLLVSKWQQVWLLALERRRKLNDALDRLEELREFANFDFDIWRKKYMRWMNHKKSRVMDFFRRIDKDQDGKITRQEFIDGILSSKFPTSRLEMSAVADIFDRDGDGYIDYYEFVAALHPNKDAYKPITDADKIEDEVTRQVAKCKCAKRFQVEQIGDNKYRVSFQSNFGDSQQLRLVRILRSTVMVRVGGGWMALDEFLVKNDPCRVHHHGSKMLRSESNSSITTTQPTIAKGRTNMELREKFILADGASQGMAAFRPRGRRSRPSSRGASPNRSTSVSSQAAQAASPQVPATTTPKGTPIQGSKLRLPGYLSGKGFHSGEDSGLITTAAARVRTQFADSKKTPSRPGSRAGSKAGSRASSRRGSDASDFDISEIQSVCSDVETVPQTHRPTPRAGSRPSTAKPSKIPTPQRKSPASKLDKSSKR

SEQ ID NO: 44526 - protein, 255 aa, Homo sapiens
MNKTGPQLLELSPGEGFSIQEKYVAADTLYSQIKEDVKKRAVALDEAISQSTQFHDKIDQILESLERIVERLRQPPSISAEVEKIKEQISENKNVSVDMEKLQPLYETLKQRGEEMIARSGGTDKDISAKAVQDKLDQMVFIWENIHTLVEEREAKLLDVMELAEKFWCDHMSLIVTIKDTQDFIRDLEDPGIDPSVVKQQQEAAETIREEIDGLQEELDIVINLGSELIAACGEPDKPIVKKSIDELNSMGFSK

SEQ ID NO: 44527 - protein, 452 aa, Homo sapiens
MFPDQPEKPLNLAHIVPPRPVTSMNDTLFSHSVPSSGSPFITRRLPEGISASSPVAEEHSLIKLYVNQLDHGARSPPKDSEVEQNKLLARAAPAFLKGKGIQYSLNVADRLADEHVLIGLYVNMLRNNPSCMLESSNRLDEEHRLIARYAARLAAESSSSQPPQQRSAPDISFTIDANKQQRQLIAELENKNREILQEIQRLRLEHEQASQPTPEKAQQNPTLLAELRLLRQRKDELEQRMSALQESRRELMVQLEGLMKLLKTQGAGSPRSSPSHTISRPIPMPIRSASACSTPTHTPQDSLTGVGGDVQEAFAQSSRRNLRNDLLVAADSITNTMSSLVKELNSEVGSETESNVDSEFARTQFEDLVPSPTSEKAFLAQIHARKPGYIHSGATTSTMRGDMVTEDADPYVQPEDENYENDSVRQLENELQMEEYLKQKLQDEAYQVSLQG

SEQ ID NO: 44528 - protein, 371 aa, Homo sapiens
MIEDSGKRGNTMAERRQLFAEMRAQDLDRIRLSTYRTACKLRFVQKKCNLHLVDIWNVIEALRENALNNLDPNTELNVSRLEAVLSTIFYQLNKRMPTTHQIHVEQSISLLLNFLLAAFDPEGHGKISVFAVKMALATLCGGKIMDKLRYIFSMISDSSGVMVYGRYDQFLREVLKLPTAVFEGPSFGYTEQSARSCFSQQKKVTLNGFLDTLMSDPPPQCLVWLPLLHRLANVENVFHPVECSYCHSESMMGFRYRCQQCHNYQLCQDCFWRGHAGGSHSNQHQMKEYTSWKSPAKKLTNALSKSLSCASSREPLHPMFPDQPEKPLNLAHIVPPRPVTSMNDTLFSHSVPSSGSPFITRSSDGAFGGCV

SEQ ID NO: 44529 - protein, 395 aa, Homo sapiens
MFPDQPEKPLNLAHIVPPRPVTSMNDTLFSHSVPSSGSPFITRRLPEGISASSPVAEEHSLIKLYVNQLDHGARMLESSNRLDEEHRLIARYAARLAAESSSSQPPQQRSAPDISFTIDANKQQRQLIAELENKNREILQEIQRLRLEHEQASQPTPEKAQQNPTLLAELRLLRQRKDELEQRMSALQESRRELMVQLEGLMKLLKTQGAGSPRSSPSHTISRPIPMPIRSASACSTPTHTPQDSLTGVGGDVQEAFAQSSRRNLRNDLLVAADSITNTMSSLVKELNSEVGSETESNVDSEFARTQFEDLVPSPTSEKAFLAQIHARKPGYIHSGATTSTMRGDMVTEDADPYVQPEDENYENDSVRQLENELQMEEYLKQKLQDEAYQVSLQG

SEQ ID NO: 44530 - protein, 724 aa, Homo sapiens
MIEDSGKRGNTMAERRQLFAEMRAQDLDRIRLSTYRTACKLRFVQKKCNLHLVDIWNVIEALRENALNNLDPNTELNVSRLEAVLSTIFYQLNKRMPTTHQIHVEQSISLLLNFLLAAFDPEGHGKISVFAVKMALATLCGGKIMDKLRYIFSMISDSSGVMVYGRYDQFLREVLKLPTAVFEGPSFGYTEQSARSCFSQQKKVTLNGFLDTLMSDPPPQCLVWLPLLHRLANVENVFHPVECSYCHSESMMGFRYRCQQCHNYQLCQDCFWRGHAGGSHSNQHQMKEYTSWKSPAKKLTNALSKSLSCASSREPLHPMFPDQPEKPLNLAHIVPPRPVTSMNDTLFSHSVPSSGSPFITRSMLESSNRLDEEHRLIARYAARLAAESSSSQPPQQRSAPDISFTIDANKQQRQLIAELENKNREILQEIQRLRLEHEQASQPTPEKAQQNPTLLAELRLLRQRKDELEQRMSALQESRRELMVQLEGLMKLLKTQGAGSPRSSPSHTISRPIPMPIRSASACSTPTHTPQDSLTGVGGDVQEAFAQSSRRNLRNDLLVAADSITNTMSSLVKELNSEVGSETESNVDSEFARTQFEDLVPSPTSEKAFLAQIHARKPGYIHSGATTSTMRGDMVTEDADPYVQPEDENYENDSVRQLENELQMEEYLKQKLQDEAYQLHVSTETRLEHPCPVSETKWRVLFWGFVFFGGFLSLALQIYFWGLF

SEQ ID NO: 44531 - protein, 303 aa, Homo sapiens
MLETLRERLLSVQQDFTSGLKTLSDKSREAKVKSKPRTVPFLPKYSAGLELLSRYEDTWAALHRRAKDCASAGELVDSEVVMLSAHWEKKKTSLVELQEQLQQLPALIADLESMTANLTHLEASFEEVENNLLHLEDLCGQCELERCKHMQSQQLENYKKNKRKELETFKAELDAEHAQKVLEMEHTQQMKLKERQKFFEEAFQQDMEQYLSTGYLQIAERREPIGSMSSMEVNVDMLEQMDLMDISDQEALDVFLNSGGEENTVLSPALGRVDKLALAEPGQYRCHSPPKVRRENHLPVTYA

SEQ ID NO: 44532 - protein, 351 aa, Homo sapiens
MLETLRERLLSVQQDFTSGLKTLSDKSREAKVKSKPRTVPFLPKYSAGLELLSRYEDTWAALHRRAKDCASAGELVDSEVVMLSAHWEKKKTSLVELQEQLQQLPALIADLESMTANLTHLEASFEEVENNLLHLEDLCGQCELERCKHMQSQQLENYKKNKRKELETFKAELDAEHAQKVLEMEHTQQMKLKERQKFFEEAFQQDMEQYLSTGYLQIAERREPIGSMSSMEVNVDMLEQMDLMDISDQEALDVFLNSGGEENTVLSPALGPESSTCQNEITLQVPNPSELRAKPPSSSSTCTDSATRDISEGGESPVVQSDEEEVQVDTALATSHTDREATPDGGEDSDS

SEQ ID NO: 44533 - protein, 352 aa, Homo sapiens
MLETLRERLLSVQQDFTSGLKTLSDKSREAKVKSKPRTVPFLPKYSAGLELLSRYEDTWAALHRRAKDCASAGELVDSEVVMLSAHWEKKKTSLVELQEQLQQLPALIADLESMTANLTHLEASFEEVENNLLHLEDLCGQCELERCKHMQSQQLENYKKNKRKELEVTFRSELDAEHAQKVLEMEHTQQMKLKERQKFFEEAFQQDMEQYLSTGYLQIAERREPIGSMSSMEVNVDMLEQMDLMDISDQEALDVFLNSGGEENTVLSPALGPESSTCQNEITLQVPNPSELRAKPPSSSSTCTDSATRDISEGGESPVVQSDEEEVQVDTALATSHTDREATPDGGEDSDS

SEQ ID NO: 44534 - protein, 270 aa, Homo sapiens
MLSAHWEKKKTSLVELQEQLQQLPALIADLESMTANLTHLEASFEEVENNLLHLEDLCGQCELERCKHMQSQQLENYKKNKRRRLRTFKTELDAEHAQKVLEMEHTQQMKLKERQKFFEEAFQQDMEQYLSTGYLQIAERREPIGSMSSMEVNVDMLEQMDLMDISDQEALDVFLNSGGEENTVLSPALGPESSTCQNEITLQVPNPSELRAKPPSSSSTCTDSATRDISEGGESPVVQSDEEEVQVDTALATSHTDREATPDGGEDSDS

SEQ ID NO: 44535 - protein, 303 aa, Homo sapiens
MLETLRERLLSVQQDFTSGLKTLSDKSREAKVKSKPRTVPFLPKYSAGLELLSRYEDTWAALHRRAKDCASAGELVDSEVVMLSAHWEKKKTSLVELQEQLQQLPALIADLESMTANLTHLEASFEEVENNLLHLEDLCGQCELERCKHMQSQQLENYKKNKSKELGTGKAELDAEHAQKVLEMEHTQQMKLKERQKFFEEAFQQDMEQYLSTGYLQIAERREPIGSMSSMEVNVDMLEQMDLMDISDQEALDVFLNSGGEENTVLSPALGRVDKLALAEPGQYRCHSPPKVRRENHLPVTYA

SEQ ID NO: 44536 - protein, 44 aa, Homo sapiens
MLETLRERLLSVQQDFTSGLKTLSDKSREAKVKSKPSWLNQEQF

SEQ ID NO: 44537 - protein, 208 aa, Homo sapiens
MLETLRERLLSVQQDFTSGLKTLSDKSREAKVKSKPRYEDTWAALHRRAKDCASAGELVDSEVVMLSAHWEKKKTSLVELQEQLQQLPALIADLESMTANLTHLEASFEEVENNLLHLEDLCGQCELERCKHMQSQQLENYKKNKRKELETFKAELDAEHAQKVLEMEHTQQMKLKERQKFFEEAFQQDMEQYLSTGYLQIAERRGDP

SEQ ID NO: 44538 - protein, 744 aa, Homo sapiens
MIEDSGKRGNTMAERRQLFAEMRAQDLDRIRLSTYRTACKLRFVQKKCNLHLVDIWNVIEALRENALNNLDPNTELNVSRLEAVLSTIFYQLNKRMPTTHQIHVEQSISLLLNFLLAAFDPEGHGKISVFAVKMALATLCGGKIMDKLRYIFSMISDSSGVMVYGRYDQFLREVLKLPTAVFEGPSFGYTEQSARSCFSQQKKVTLNGFLDTLMSDPPPQCLVWLPLLHRLANVENVFHPVECSYCHSESMMGFRYRCQQCHNYQLCQDCFWRGHAGGSHSNQHQMKEYTSWKSPAKKLTNALSKSLSCASSREPLHPMFPDQPEKPLNLAHIVLDNMPPRPVTSMNDTLFSHSVPSSGSPFITRSSPPKDSEVEQNKLLARAAPAFLKGKGIQYSLNVADRLADEHVLIGLYVNMLRNNPSCMLESSNRLDEEHRLIARYAARLAAESSSSQPPQQRSAPDISFTIDANKQQRQLIAELENKNREILQEIQRLRLEHEQASQPTPEKAQQNPTLLAELRLLRQRKDELEQRMSALQESRRELMVQLEGLMKLLKTQGAGSPRSSPSHTISRPIPMPIRSASACSTPTHTPQDSLTGVGGDVQEAFAQSSRRNLRNDLLVAADSITNTMSSLVKELNSEVGSETESNVDSEFARTQFEDLVPSPTSEKAFLAQIHARKPGYIHSGATTSTMRGDMVTEDADPYVQPEDENYENDSVRQLENELQMEEYLKQKLQDEAYQVSLQG

SEQ ID NO: 44539 - protein, 570 aa, Homo sapiens
MIEDSGKRGNTMAERRQLFAEMRAQDLDRIRLSTYRTACKLRFVQKKCNLHLVDIWNVIEALRENALNNLDPNTELNVSRLEAVLSTIFYQLNKRMPTTHQIHVEQSISLLLNFLLAAFDPEGHGKISVFAVKMALATLCGGKIMDKLRYIFSMISDSSGVMVYGRYDQFLREVLKLPTAVFEGPSFGYTEQSARSCFSQQKKVTLNGFLDTLMSDPPPQCLVWLPLLHRLANVENVFHPVECSYCHSESMMGFRYRCQQCHNYQLCQDCFWRGHAGGSHSNQHQMKEYTSWKSPAKKLTNALSKSLSCASSREPLHPMFPDQPEKPLNLAHIVDTWPPRPVTSMNDTLFSHSVPSSGSPFITRSSPPKDSEVEQNKLLARAAPAFLKGKGIQYSLNVADRLADEHVLIGLYVNMLRNNPSCMLESSNRLDEEHRLIARYAARLAAESSSSQPPQQRSAPDISFTIDANKQQRQLIAELENKNREILQEIQRLRLEHEQASQPTPEKAQQNPTLLAELRLLRQRKDELEQRMSALQESRRELMVQLEGLMKLLKEEELKQGVSYVPYCRS

SEQ ID NO: 44540 - protein, 686 aa, Homo sapiens
MIEDSGKRGNTMAERRQLFAEMRAQDLDRIRLSTYRTACKLRFVQKKCNLHLVDIWNVIEALRENALNNLDPNTELNVSRLEAVLSTIFYQLNKRMPTTHQIHVEQSISLLLNFLLAAFDPEGHGKISVFAVKMALATLCGGKIMDKLRYIFSMISDSSGVMVYGRYDQFLREVLKLPTAVFEGPSFGYTEQSARSCFSQQKKVTLNGFLDTLMSDPPPQCLVWLPLLHRLANVENVFHPVECSYCHSESMMGFRYRCQQCHNYQLCQDCFWRGHAGGSHSNQHQMKEYTSWKSPAKKLTNALSKSLSCASSREPLHPMFPDQPEKPLNLAHIVDTWPPRPVTSMNDTLFSHSVPSSGSPFITRSMLESSNRLDEEHRLIARYAARLAAESSSSQPPQQRSAPDISFTIDANKQQRQLIAELENKNREILQEIQRLRLEHEQASQPTPEKAQQNPTLLAELRLLRQRKDELEQRMSALQESRRELMVQLEGLMKLLKTQGAGSPRSSPSHTISRPIPMPIRSASACSTPTHTPQDSLTGVGGDVQEAFAQSSRRNLRNDLLVAADSITNTMSSLVKELNSEVGSETESNVDSEFARTQFEDLVPSPTSEKAFLAQIHARKPGYIHSGATTSTMRGDMVTEDADPYVQPEDENYENDSVRQLENELQMEEYLKQKLQDEAYQVSLQG

SEQ ID NO: 44541 - protein, 374 aa, Homo sapiens
MIEDSGKRGNTMAERRQLFAEMRAQDLDRIRLSTYRTACKLRFVQKKCNLHLVDIWNVIEALRENALNNLDPNTELNVSRLEAVLSTIFYQLNKRMPTTHQIHVEQSISLLLNFLLAAFDPEGHGKISVFAVKMALATLCGGKIMDKLRYIFSMISDSSGVMVYGRYDQFLREVLKLPTAVFEGPSFGYTEQSARSCFSQQKKVTLNGFLDTLMSDPPPQCLVWLPLLHRLANVENVFHPVECSYCHSESMMGFRYRCQQCHNYQLCQDCFWRGHAGGSHSNQHQMKEYTSWKSPAKKLTNALSKSLSCASSREPLHPMFPDQPEKPLNLAHIVDTWPPRPVTSMNDTLFSHSVPSSGSPFITRSSDGAFGGCV

SEQ ID NO: 44542 - protein, 567 aa, Homo sapiens
MIEDSGKRGNTMAERRQLFAEMRAQDLDRIRLSTYRTACKLRFVQKKCNLHLVDIWNVIEALRENALNNLDPNTELNVSRLEAVLSTIFYQLNKRMPTTHQIHVEQSISLLLNFLLAAFDPEGHGKISVFAVKMALATLCGGKIMDKLRYIFSMISDSSGVMVYGRYDQFLREVLKLPTAVFEGPSFGYTEQSARSCFSQQKKVTLNGFLDTLMSDPPPQCLVWLPLLHRLANVENVFHPVECSYCHSESMMGFRYRCQQCHNYQLCQDCFWRGHAGGSHSNQHQMKEYTSWKSPAKKLTNALSKSLSCASSREPLHPMFPDQPEKPLNLAHIVPPRPVTSMNDTLFSHSVPSSGSPFITRSSPPKDSEVEQNKLLARAAPAFLKGKGIQYSLNVADRLADEHVLIGLYVNMLRNNPSCMLESSNRLDEEHRLIARYAARLAAESSSSQPPQQRSAPDISFTIDANKQQRQLIAELENKNREILQEIQRLRLEHEQASQPTPEKAQQNPTLLAELRLLRQRKDELEQRMSALQESRRELMVQLEGLMKLLKEEELKQGVSYVPYCRS

SEQ ID NO: 44543 - protein, 391 aa, Homo sapiens
MFPDQPEKPLNLAHIVPPRPVTSMNDTLFSHSVPSSGSPFITRSSPPKDSEVEQNKLLARAAPAFLKGKGMLESSNRLDEEHRLIARYAARLAAESSSSQPPQQRSAPDISFTIDANKQQRQLIAELENKNREILQEIQRLRLEHEQASQPTPEKAQQNPTLLAELRLLRQRKDELEQRMSALQESRRELMVQLEGLMKLLKTQGAGSPRSSPSHTISRPIPMPIRSASACSTPTHTPQDSLTGVGGDVQEAFAQSSRRNLRNDLLVAADSITNTMSSLVKELNSEVGSETESNVDSEFARTQFEDLVPSPTSEKAFLAQIHARKPGYIHSGATTSTMRGDMVTEDADPYVQPEDENYENDSVRQLENELQMEEYLKQKLQDEAYQVSLQG

SEQ ID NO: 44544 - protein, 743 aa, Homo sapiens
MIEDSGKRGNTMAERRQLFAEMRAQDLDRIRLSTYRTACKLRFVQKKCNLHLVDIWNVIEALRENALNNLDPNTELNVSRLEAVLSTIFYQLNKRMPTTHQIHVEQSISLLLNFLLAAFDPEGHGKISVFAVKMALATLCGGKIMDKLRYIFSMISDSSGVMVYGRYDQFLREVLKLPTAVFEGPSFGYTEQSARSCFSQQKKVTLNGFLDTLMSDPPPQCLVWLPLLHRLANVENVFHPVECSYCHSESMMGFRYRCQQCHNYQLCQDCFWRGHAGGSHSNQHQMKEYTSWKSPAKKLTNALSKSLSCASSREPLHPMFPDQPEKPLNLAHIVDTWPPRPVTSMNDTLFSHSVPSSGSPFITRSSPPKDSEVEQNKLLARAAPAFLKGKGIQYSLNVADRLADEHVLIGLYVNMLRNNPSCMLESSNRLDEEHRLIARYAARLAAESSSSQPPQQRSAPDISFTIDANKQQRQLIAELENKNREILQEIQRLRLEHEQASQPTPEKAQQNPTLLAELRLLRQRKDELEQRMSALQESRRELMVQLEGLMKLLKTQGAGSPRSSPSHTISRPIPMPIRSASACSTPTHTPQDSLTGVGGDVQEAFAQSSRRNLRNDLLVAADSITNTMSSLVKELNSEVGSETESNVDSEFARTQFEDLVPSPTSEKAFLAQIHARKPGYIHSGATTSTMRGDMVTEDADPYVQPEDENYENDSVRQLENELQMEEYLKQKLQDEAYQVSLQG

SEQ ID NO: 44545 - protein, 690 aa, Homo sapiens
MIEDSGKRGNTMAERRQLFAEMRAQDLDRIRLSTYRTACKLRFVQKKCNLHLVDIWNVIEALRENALNNLDPNTELNVSRLEAVLSTIFYQLNKRMPTTHQIHVEQSISLLLNFLLAAFDPEGHGKISVFAVKMALATLCGGKIMDKLRYIFSMISDSSGVMVYGRYDQFLREVLKLPTAVFEGPSFGYTEQSARSCFSQQKKVTLNGFLDTLMSDPPPQCLVWLPLLHRLANVENVFHPVECSYCHSESMMGFRYRCQQCHNYQLCQDCFWRGHAGGSHSNQHQMKEYTSWKSPAKKLTNALSKSLSCASSREPLHPMFPDQPEKPLNLAHIVPPRPVTSMNDTLFSHSVPSSGSPFITRSMLESSNRLDEEHRLIARYAARLAAESSSSQPPQQRSAPDISFTIDANKQQRQLIAELENKNREILQEIQRLRLEHEQASQPTPEKAQQNPTLLAELRLLRQRKDELEQRMSALQESRRELMVQLEGLMKLLKEEELKQGTQGAGSPRSSPSHTISRPIPMPIRSASACSTPTHTPQDSLTGVGGDVQEAFAQSSRRNLRNDLLVAADSITNTMSSLVKELNSEVGSETESNVDSEFARTQFEDLVPSPTSEKAFLAQIHARKPGYIHSGATTSTMRGDMVTEDADPYVQPEDENYENDSVRQLENELQMEEYLKQKLQDEAYQVSLQG

SEQ ID NO: 44546 - protein, 686 aa, Homo sapiens
MIEDSGKRGNTMAERRQLFAEMRAQDLDRIRLSTYRTACKLRFVQKKCNLHLVDIWNVIEALRENALNNLDPNTELNVSRLEAVLSTIFYQLNKRMPTTHQIHVEQSISLLLNFLLAAFDPEGHGKISVFAVKMALATLCGGKIMDKLRYIFSMISDSSGVMVYGRYDQFLREVLKLPTAVFEGPSFGYTEQSARSCFSQQKKVTLNGFLDTLMSDPPPQCLVWLPLLHRLANVENVFHPVECSYCHSESMMGFRYRCQQCHNYQLCQDCFWRGHAGGSHSNQHQMKEYTSWKSPAKKLTNALSKSLSCASSREPLHPMFPDQPEKPLNLAHIVCFRPPRPVTSMNDTLFSHSVPSSGSPFITRSMLESSNRLDEEHRLIARYAARLAAESSSSQPPQQRSAPDISFTIDANKQQRQLIAELENKNREILQEIQRLRLEHEQASQPTPEKAQQNPTLLAELRLLRQRKDELEQRMSALQESRRELMVQLEGLMKLLKTQGAGSPRSSPSHTISRPIPMPIRSASACSTPTHTPQDSLTGVGGDVQEAFAQSSRRNLRNDLLVAADSITNTMSSLVKELNSEVGSETESNVDSEFARTQFEDLVPSPTSEKAFLAQIHARKPGYIHSGATTSTMRGDMVTEDADPYVQPEDENYENDSVRQLENELQMEEYLKQKLQDEAYQVSLQG

SEQ ID NO: 44547 - protein, 743 aa, Homo sapiens
MIEDSGKRGNTMAERRQLFAEMRAQDLDRIRLSTYRTACKLRFVQKKCNLHLVDIWNVIEALRENALNNLDPNTELNVSRLEAVLSTIFYQLNKRMPTTHQIHVEQSISLLLNFLLAAFDPEGHGKISVFAVKMALATLCGGKIMDKLRYIFSMISDSSGVMVYGRYDQFLREVLKLPTAVFEGPSFGYTEQSARSCFSQQKKVTLNGFLDTLMSDPPPQCLVWLPLLHRLANVENVFHPVECSYCHSESMMGFRYRCQQCHNYQLCQDCFWRGHAGGSHSNQHQMKEYTSWKSPAKKLTNALSKSLSCASSREPLHPMFPDQPEKPLNLAHIVCFRPPRPVTSMNDTLFSHSVPSSGSPFITRSSPPKDSEVEQNKLLARAAPAFLKGKGIQYSLNVADRLADEHVLIGLYVNMLRNNPSCMLESSNRLDEEHRLIARYAARLAAESSSSQPPQQRSAPDISFTIDANKQQRQLIAELENKNREILQEIQRLRLEHEQASQPTPEKAQQNPTLLAELRLLRQRKDELEQRMSALQESRRELMVQLEGLMKLLKTQGAGSPRSSPSHTISRPIPMPIRSASACSTPTHTPQDSLTGVGGDVQEAFAQSSRRNLRNDLLVAADSITNTMSSLVKELNSEVGSETESNVDSEFARTQFEDLVPSPTSEKAFLAQIHARKPGYIHSGATTSTMRGDMVTEDADPYVQPEDENYENDSVRQLENELQMEEYLKQKLQDEAYQVSLQG

SEQ ID NO: 44548 - protein, 743 aa, Homo sapiens; identical to SEQ ID NO: 44544

SEQ ID NO: 44549 - protein, 391 aa, Homo sapiens; identical to SEQ ID NO: 44543

SEQ ID NO: 44550 - protein, 371 aa, Homo sapiens; identical to SEQ ID NO: 44528

SEQ ID NO: 44551 - protein, 597 aa, Homo sapiens
MIEESGNKRKTMAEKRQLFIEMRAQNFDVIRLSTYRTACKLRFVQKRCNLHLVDIWNMIEAFRDNGLNTLDHTTEISVSRLETVISSIYYQLNKRLPSTHQISVEQSISLLLNFMIAAYDSEGRGKLTVFSVKAMLATMCGGKMLDKLRYVFSQMSDSNGLMIFSKFDQFLKEVLKLPTAVFEGPSFGYTEHSVRTCFPQQRKIMLNMFLDTMMADPPPQCLVWLPLMHRLAHVENVFHPVECSYCRCESMMGFRYRCQQCHNYQLCQNCFWRGHAGGPHSNQHQMKEHSSWKSPAKKLSHAISKSLGCVPTREPPHPVFPEQPEKPLDLAHIVPPRPLTNMNDTMVSHMSSGVPTPTKRLQYSQDIPSHLADEHALIASYVARLQHCARVLDSPSRLDEEHRLIARYAARLAAEAGNVTRPPTDLSFNFDANKQQRQLIAELENKNREILQEIQRLRLEHEQASQPTPEKAQQNPTLLAELRLLRQRKDELEQRMSALQESRRELMVQLEELMKLLKEAEARESAQATGSPHTSPTHGGGRPMPMPVRSTSAGSTPTHCPQDSLSGVGGDVQEAFAQAEEGAEEEEEKMQNGKDRG

SEQ ID NO: 44552 - protein, 188 aa, Homo sapiens
MIEESGNKRKTMAEKRQLFIEMRAQNFDVIRLSTYRTACKLRFVQKRCNLHLVDIWNMIEAFRDNGLNTLDHTTEISVSRLETVISSIYYQLNKRLPSTHQISVEQSISLLLNFMIAAYDSEGRGKLTVFSVKAMLATMCGGKMLDKLRYVFSQMSDSNGLMIFSKFDQFLKEVLKLPTAVFEGPSFG

SEQ ID NO: 44553 - protein, 132 aa, Homo sapiens
MIEESGNKRKTMAEKRQLFIEMRAQNFDVIRLSTYRTACKLRFVQKRCNLHLVDIWNMIEAFRDNGLNTLDHTTEISVSRLETVISSIYYQLNKRLPSTHQISVEQSISLLLNFMIAAYDSEGRGKLTVFSV

SEQ ID NO: 44554 - protein, 149 aa, Homo sapiens
MIEESGNKRKTMAEKRQLFIEMRAQNFDVIRLSTYRTACKLRFVQKRCNLHLVDIWNMIEAFRDNGLNTLDHTTEISVSRLETVISSIYYQLNKRLPSTHQISVEQSISLLLNFMIAAYDSEGRGKLTVFSVKAMLATMCGGKMLDKLR

SEQ ID NO: 44555 - protein, 597 aa, Homo sapiens
MIEESGNKRKTMAEKRQLFIEMRAQNFDVIRLSTYRTACKLRFVQKRCNLHLVDIWNMIEAFRDNGLNTLDHTTEISVSRLETVISSIYYQLNKRLPSTHQISVEQSISLLLNFMIAAYDSEGRGKLTVFSVKAMLATMCGGKMLDKLRYVFSQMSDSNGLMIFSKFDQFLKEVLKLPTAVFEGPSFGYTEHSVRTCFPQQRKIMLNMFLDTMMADPPPQCLVWLPLMHRLAHVENVFHPVECSYCRCESMMGFRYRCQQCHNYQLCQNCFWRGHAGGPHSNQHQMKEHSSWKSPAKKLSHAISKSLGCVPTREPPHPVFPEQPEKPLDLAHIVPPRPLTNMNDTMVSHMSSGVPTPTKRLQYSQDIPSHLADEHALIASYVARLQHCARVLDSPSRLDEEHRLIARYAARLAAEAGNVTRPPTDLSFNFDANKQQRQLIAELENKNREILQEIQRLRLEHEQASQPTPEKAQQNPTLLAELRLLRQRKDELEQRMSALQESRRELMVQLEELMKLLKEEEQKQAAQATGSPHTSPTHGGGRPMPMPVRSTSAGSTPTHCPQDSLSGVGGDVQEAFAQAEEGAEEEEEKMQNGKDRG

SEQ ID NO: 44556 - protein, 560 aa, Homo sapiens
MIEESGNKRKTMAEKRQLFIEMRAQNFDVIRLSTYRTACKLRFVQKRCNLHLVDIWNMIEAFRDNGLNTLDHTTEISVSRLETVISSIYYQLNKRLPSTHQISVEQSISLLLNFMIAAYDSEGRGKLTVFSVKAMLATMCGGKMLDKLRYVFSQMSDSNGLMIFSKFDQFLKEVLKLPTAVFEGPSFGYTEHSVRTCFPQQRKIMLNMFLDTMMADPPPQCLVWLPLMHRLAHVENVFHPVECSYCRCESMMGFRYRCQQCHNYQLCQNCFWRGHAGGPHSNQHQMKEHSSWKSPAKKLSHAISKSLGCVPTREPPHPVFPEQPEKPLDLAHIVPPRPLTNMNDTMVSHMSSGVPTPTKSVLDSPSRLDEEHRLIARYAARLAAEAGNVTRPPTDLSFNFDANKQQRQLIAELENKNREILQEIQRLRLEHEQASQPTPEKAQQNPTLLAELRLLRQRKDELEQRMSALQESRRELMVQLEELMKLLKAQATGSPHTSPTHGGGRPMPMPVRSTSAGSTPTHCPQDSLSGVGGDVQEAFAQAEEGAEEEEEKMQNGKDRG

SEQ ID NO: 44557 - protein, 627 aa, Homo sapiens
MIEESGNKRKTMAEKRQLFIEMRAQNFDVIRLSTYRTACKLRFVQKRCNLHLVDIWNMIEAFRDNGLNTLDHTTEISVSRLETVISSIYYQLNKRLPSTHQISVEQSISLLLNFMIAAYDSEGRGKLTVFSVKAMLATMCGGKMLDKLRYVFSQMSDSNGLMIFSKFDQFLKEVLKLPTAVFEGPSFGYTEHSVRTCFPQQRKIMLNMFLDTMMADPPPQCLVWLPLMHRLAHVENVFHPVECSYCRCESMMGFRYRCQQCHNYQLCQNCFWRGHAGGPHSNQHQMKEHSSWKSPAKKLSHAISKSLGCVPTREPPHPVFPEQPEKPLDLAHIVPPRPLTNMNDTMVSHMSSGVPTPTKRLQYSQDIPSHLADEHALIASYVARLQHCARVLDSPSRLDEEHRLIARYAARLAAEAGNVTRPPTDLSFNFDANKQQRQLIAELENKNREILQEIQRLRLEHEQASQPTPEKAQQNPTLLAELRLLRQRKDELEQRMSALQESRRELMVQLEELMKLLKEEEQKQAAQATGSPHTSPTHGGGRPMPMPVRSTSAGSTPTHCPQDSLSGVGGDVQEAFAQGTRRNLRNDLLVAADSITNTMSSLVKELHSAEEGAEEEEEKMQNGKDRG

SEQ ID NO: 44558 - protein, 567 aa, Homo sapiens
MIEESGNKRKTMAEKRQLFIEMRAQNFDVIRLSTYRTACKLRFVQKRCNLHLVDIWNMIEAFRDNGLNTLDHTTEISVSRLETVISSIYYQLNKRLPSTHQISVEQSISLLLNFMIAAYDSEGRGKLTVFSVKAMLATMCGGKMLDKLRYVFSQMSDSNGLMIFSKFDQFLKEVLKLPTAVFEGPSFGYTEHSVRTCFPQQRKIMLNMFLDTMMADPPPQCLVWLPLMHRLAHVENVFHPVECSYCRCESMMGFRYRCQQCHNYQLCQNCFWRGHAGGPHSNQHQMKEHSSWKSPAKKLSHAISKSLGCVPTREPPHPVFPEQPEKPLDLAHIVPPRPLTNMNDTMVSHMSSGVPTPTKSVLDSPSRLDEEHRLIARYAARLAAEAGNVTRPPTDLSFNFDANKQQRQLIAELENKNREILQEIQRLRLEHEQASQPTPEKAQQNPTLLAELRLLRQRKDELEQRMSALQESRRELMVQLEELMKLLKEEEQKQAAQATGSPHTSPTHGGGRPMPMPVRSTSAGSTPTHCPQDSLSGVGGDVQEAFAQAEEGAEEEEEKMQNGKDRG

SEQ ID NO: 44559 - protein, 590 aa, Homo sapiens
MIEESGNKRKTMAEKRQLFIEMRAQNFDVIRLSTYRTACKLRFVQKRCNLHLVDIWNMIEAFRDNGLNTLDHTTEISVSRLETVISSIYYQLNKRLPSTHQISVEQSISLLLNFMIAAYDSEGRGKLTVFSVKAMLATMCGGKMLDKLRYVFSQMSDSNGLMIFSKFDQFLKEVLKLPTAVFEGPSFGYTEHSVRTCFPQQRKIMLNMFLDTMMADPPPQCLVWLPLMHRLAHVENVFHPVECSYCRCESMMGFRYRCQQCHNYQLCQNCFWRGHAGGPHSNQHQMKEHSSWKSPAKKLSHAISKSLGCVPTREPPHPVFPEQPEKPLDLAHIVPPRPLTNMNDTMVSHMSSGVPTPTKSVLDSPSRLDEEHRLIARYAARLAAEAGNVTRPPTDLSFNFDANKQQRQLIAELENKNREILQEIQRLRLEHEQASQPTPEKAQQNPTLLAELRLLRQRKDELEQRMSALQESRRELMVQLEELMKLLKAQATGSPHTSPTHGGGRPMPMPVRSTSAGSTPTHCPQDSLSGVGGDVQEAFAQGTRRNLRNDLLVAADSITNTMSSLVKELHSAEEGAEEEEEKMQNGKDRG

SEQ ID NO: 44560 - protein, 609 aa, Homo sapiens
MIEESGNKRKTMAEKRQLFIEMRAQNFDVIRLSTYRTACKLRFVQKRCNLHLVDIWNMIEAFRDNGLNTLDHTTEISVSRLETVISSIYYQLNKRLPSTHQISVEQSISLLLNFMIAAYDSEGRGKLTVFSVKAMLATMCGGKMLDKLRYVFSQMSDSNGLMIFSKFDQFLKEVLKLPTAVFEGPSFGYTEHSVRTCFPQQRKIMLNMFLDTMMADPPPQCLVWLPLMHRLAHVENVFHPVECSYCRCESMMGFRYRCQQCHNYQLCQNCFWRGHAGGPHSNQHQMKEHSSWKSPAKKLSHAISKSLGCVPTREPPHPVFPEQPEKPLDLAHIVPPRPLTNMNDTMVSHMSSGVPTPTKRLQYSQDIPSHLADEHALIASYVARLQHCARVLDSPSRLDEEHRLIARYAARLAAEAGNVTRPPTDLSFNFDANKQQRQLIAELENKNREILQEIQRLRLEHEQASQPTPEKAQQNPTLLAELRLLRQRKDELEQRMSALQESRRELMVQLEELMKLLKEEEQKQAAQATGSPHTSPTHGGGRPMPMPVRSTSAGSTPTHCPQDSLSGVGGDVQEAFAQGTRRNLRNDLLVAADSITNTMSSLVKELHSG

SEQ ID NO: 44561 - protein, 545 aa, Homo sapiens
MIEAFRDNGLNTLDHTTEISVSRLETVISSIYYQLNKRLPSTHQISVEQSISLLLNFMIAAYDSEGRGKLTVFSVKAMLATMCGGKMLDKLRYVFSQMSDSNGLMIFSKFDQFLKEVLKLPTAVFEGPSFGYTEHSVRTCFPQQRKIMLNMFLDTMMADPPPQCLVWLPLMHRLAHVENVFHPVECSYCRCESMMGFRYRCQQCHNYQLCQNCFWRGHAGGPHSNQHQMKEHSSWKSPAKKLSHAISKSLGCVPTREPPHPVFPEQPEKPLDLAHIVPPRPLTNMNDTMVSHMSSGVPTPTKRLQYSQDIPSHLADEHALIASYVARLQHCARVLDSPSRLDEEHRLIARYAARLAAEAGNVTRPPTDLSFNFDANKQQRQLIAELENKNREILQEIQRLRLEHEQASQPTPEKAQQNPTLLAELRLLRQRKDELEQRMSALQESRRELMVQLEELMKLLKAQATGSPHTSPTHGGGRPMPMPVRSTSAGSTPTHCPQDSLSGVGGDVQEAFAQGTRRNLRNDLLVAADSITNTMSSLVKELHSG

SEQ ID NO: 44562 - protein, 319 aa, Homo sapiens
MTDVFSQMSDSNGLMIFSKFDQFLKEVLKLPTAVFEGPSFGYTEHSVRTCFPQQRKIMLNMFLDTMMADPPPQCLVWLPLMHRLAHVENVFHPVECSYCRCESMMGFRYRCQQCHNYQLCQNCFWRGHAGGPHSNQHQMKEHSSWKSPAKKLSHAISKSLGCVPTREPPHPVFPEQPEKPLDLAHIVPPRPLTNMNDTMVSHMSSGVPTPTKRLQYSQDIPSHLADEHALIASYVARLQHCARVLDSPSRLDEEHRLIARYAARLAAEAGNVTRPPTDLSFNFDANKQQRQLIAELENKNREILQEIQRLRLEHEQASQ

SEQ ID NO: 44563 - protein, 416 aa, Homo sapiens
MLNMFLDTMMADPPPQCLVWLPLMHRLAHVENVFHPVECSYCRCESMMGFRYRCQQCHNYQLCQNCFWRGHAGGPHSNQHQMKEHSSWKSPAKKLSHAISKSLGCVPTREPPHPVFPEQPEKPLDLAHIVPPRPLTNMNDTMVSHMSSGVPTPTKRLQYSQDIPSHLADEHALIASYVARLQHCARVLDSPSRLDEEHRLIARYAARLAAEAGNVTRPPTDLSFNFDANKQQRQLIAELENKNREILQEIQRLRLEHEQASQPTPEKAQQNPTLLAELRLLRQRKDELEQRMSALQESRRELMVQLEELMKLLKAQATGSPHTSPTHGGGRPMPMPVRSTSAGSTPTHCPQDSLSGVGGDVQEAFAQGTRRNLRNDLLVAADSITNTMSSLVKELHSAEEGAEEEEEKMQNGKDRG

SEQ ID NO: 44564 - protein, 895 aa, Homo sapiens
MRMSVGLSLLLPLSGRTFLLLLSVVMAQSHWPSEPSEAVRDWENQLEASMHSVLSDLHEAVPTVVGIPDGTAVVGRSFRVTIPTDLIASSGDIIKVSAAGKEALPSWLHWDSQSHTLEGLPLDTDKGVHYISVSATRLGANGSHIPQTSSVFSIEVYPEDHSELQSVRTASPDPGEVVSSACAADEPVTVLTVILDADLTKMTPKQRIDLLHRMRSFSEVELHNMKLVPVVNNRLFDMSAFMAGPGNAKKVVENGALLSWKLGCSLNQNSVPDIHGVEAPAREGAMSAQLGYPVVGWHIANKKPPLPKRVRRQIHATPTPVTAIGPPTTAIQEPPSRIVPTPTSPAIAPPTETMAPPVRDPVPGKPTVTIRTRGAIIQTPTLGPIQPTRVSEAGTTVPGQIRPTMTIPGYVEPTAVATPPTTTTKKPRVSTPKPATPSTDSTTTTTRRPTKKPRTPRPVPRVTTKVSITRLETASPPTRIRTTTSGVPRGGEPNQRPELKNHIDRVDAWVGTYFEVKIPSDTFYDHEDTTTDKLKLTLKLREQQLVGEKSWVQFNSNSQLMYGLPDSSHVGKHEYFMHATDKGGLSAVDAFEIHVHRRPQGDRAPARFKAKFVGDPALVLNDIHKKIALVKKLAFAFGDRNCSTITLQNITRGSIVVEWTNNTLPLEPCPKEQIAGLSRRIAEDDGKPRPAFSNALEPDFKATSITVTGSGSCRHLQFIPVVPPRRVPSEAPPTEVPDRDPEKSSEDDVYLHTVIPAVVVAAILLIAGIIAMICYRKKRKGKLTLEDQATFIKKGVPIIFADELDDSKPPPSSSMPLILQEEKAPLPPPEYPNQSVPETTPLNQDTMGEYTPLRDEDPNAPPYQPPPPFTAPMEGKGSRPKNMTPYRSPPPYVPP

SEQ ID NO: 44565 - protein, 143 aa, Homo sapiens
MTPKQRIDLLHRMRSFSEVELHNMKLVPVVNNRLFDMSAFMAGPGNAKKVVENGALLSWKLGCSLNQNSVPDIHGVEAPAREGAMSAQLGYPVVGWHIANKKPPALSGPPKPQSSWRDFGDFFIFIFCLTAFGLFIENSSLHF

SEQ ID NO: 44566 - protein, 88 aa, Homo sapiens
MRMSVGLSLLLPLSGRTFLLLLSVVMAQSHWPSEPSEAVRDWENQLEASMHSVLSDLHEAVPTVVGIPDGTAVVGRSFRVTIPTDLIA

SEQ ID NO: 44567 - protein, 15 aa, Homo sapiens
MRMSVGLSLLLPLSG

SEQ ID NO: 44568 - protein, 106 aa, Homo sapiens
MRMSVGLSLLLPLSGRTFLLLLSVVMAQSHWPSEPSEAVRDWENQLEASMHSVLSDLHEAVPTVVGIPDGTAVVGRSFRVTIPTDLIASSGDIIKVSAAGKEALPS

SEQ ID NO: 44569 - protein, 96 aa, Homo sapiens
MRMSVGLSLLLPLSGRTFLLLLSVVMAQSHWPSEPSEAVRDWENQLEASMHSVLSDLHEAVPTVVGIPDGTAVVGRSFRVTIPTDLIASSGDIIKV

SEQ ID NO: 44570 - protein, 9 aa, Homo sapiens
MRMSVGLSL

SEQ ID NO: 44571 - protein, 117 aa, Homo sapiens
MRMSVGLSLLLPLSGRTFLLLLSVVMAQSHWPSEPSEAVRDWENQLEASMHSVLSDLHEAVPTVVGIPDGTAVVGRSFRVTIPTDLIASSGDIIKVSAAGKEALPSWLHWDSQSHTL

SEQ ID NO: 44572 - protein, 52 aa, Homo sapiens
MRMSVGLSLLLPLSGRTFLLLLSVVMAQSHWPSEPSEAVRDWENQLEASMHS

SEQ ID NO: 44573 - protein, 86 aa, Homo sapiens
MRMSVGLSLLLPLSGRTFLLLLSVVMAQSHWPSEPSEAVRDWENQLEASMHSVLSDLHEAVPTVVGIPDGTAVVGRSFRVTIPTDL

SEQ ID NO: 44574 - protein, 41 aa, Homo sapiens
MRMSVGLSLLLPLSGRTFLLLLSVVMAQSHWPSEPSEAVRD

SEQ ID NO: 44575 - protein, 895 aa, Homo sapiens; identical to SEQ ID NO: 44564

SEQ ID NO: 44576 - protein, 895 aa, Homo sapiens; identical to SEQ ID NO: 44564

SEQ ID NO: 44577 - protein, 895 aa, Homo sapiens; identical to SEQ ID NO: 44564

SEQ ID NO: 44578 - protein, 895 aa, Homo sapiens; identical to SEQ ID NO: 44564

SEQ ID NO: 44579 - protein, 895 aa, Homo sapiens; identical to SEQ ID NO: 44564

SEQ ID NO: 44580 - protein, 674 aa, Homo sapiens
MAAGGAEGGSGPGAAMGDCAEIKSQFRTREGFYKLLPGDGAARRSGPASAQTPVPPQPPQPPPGPASASGPGAAGPASSPPPAGPGPGPALPAVRLSLVRLGEPDSAGAGEPPATPAGLGSGGDRVCFNLGRELYFYPGCCRRGSQRSIDLNKPIDKRIYKGTQPTCHDFNQFTAATETISLLVGFSAGQVQYLDLIKKDTSKLFNEERLIDKTKVTYLKWLPESESLFLASHASGHLYLYNVSHPCASAPPQYSLLKQGEGFSVYAAKSKAPRNPLAKWAVGEGPLNEFAFSPDGRHLACVSQDGCLRVFHFDSMLLRGLMKSYFGGLLCVCWSPDGRYVVTGGEDDLVTVWSFTEGRVVARGHGHKSWVNAVAFDPYTTRAEEAATAAGADGERSGEEEEEEPEAAGTGSAGGAPLSPLPKAGSITYRFGSAGQDTQFCLWDLTEDVLYPHPPLARTRTLPGTPGTTPPAASSSRGGEPGPGPLPRSLSRSNSLPHPAGGGKAGGPGVAAEPGTPFSIGRFATLTLQERRDRGAEKEHKRYHSLGNISRGGSGGSGSGGEKPSGPVPRSRLDPAKVLGTALCPRIHEVPLLEPLVCKKIAQERLTVLLFLEDCIITACQEGLICTWARPGKAFTDEETEAQTGEGSWPRSPSKSVVEGISSQPGNSPSGTVV

SEQ ID NO: 44581 - protein, 629 aa, Homo sapiens
MSAEVRLRRLQQLVLDPGFLGLEPLLDLLLGVHQELGASELAQDKYVADFLQWAEPIVVRLKEVRLQRDDFEILKVIGRGAFSEVAVVKMKQTGQVYAMKIMNKWDMLKRGEVSCFREERDVLVNGDRRWITQLHFAFQDENYLYLVMEYYVGGDLLTLLSKFGERIPAEMARFYLAEIVMAIDSVHRLGYVHRDIKPDNILLDRCGHIRLADFGSCLKLRADGTVRSLVAVGTPDYLSPEILQAVGGGPGTGSYGPECDWWALGVFAYEMFYGQTPFYADSTAETYGKIVHYKEHLSLPLVDEGVPEEARDFIQRLLCPPETRLGRGGAGDFRTHPFFFGLDWDGLRDSVPPFTPDFEGATDTCNFDLVEDGLTAMVSGGGETLSDIREGAPLGVHLPFVGYSYSCMALRDSEVPGPTPMELEAEQLLEPHVQAPSLEPSVSPQDETAEVAVPAAVPAAEAEAEVTLRELQEALEEEVLTRQSLSREMEAIRTDNQNFASQLREAEARNRDLEAHVRQLQERMELLQAEGATAVTGVPSPRATDPPSHLDGPPAVAVGQCPLVGPGPMHRRHLLLPARVPRPGLSEALSLLLFAVVLSRAAALGCIGLVAHAGQLTAVWRRPGAARAP

SEQ ID NO: 44582 - protein, 655 aa, Homo sapiens
MVLPVQHVSRGAAEAAPAAGVGPGLPGAGAPARPSPGRPPGAGRLRTGPGQVRGRLLAVGPKSRVFQSVVQEPPASESRAEPIVVRLKEVRLQRDDFEILKVIGRGAFSEVAVVKMKQTGQVYAMKIMNKWDMLKRGEVSCFREERDVLVNGDRRWITQLHFAFQDENYLYLVMEYYVGGDLLTLLSKFGERIPAEMARFYLAEIVMAIDSVHRLGYVHRDIKPDNILLDRCGHIRLADFGSCLKLRADGTVRSLVAVGTPDYLSPEILQAVGGGPGTGSYGPECDWWALGVFAYEMFYGQTPFYADSTAETYGKIVHYKEHLSLPLVDEGVPEEARDFIQRLLCPPETRLGRGGAGDFRTHPFFFGLDWDGLRDSVPPFTPDFEGATDTCNFDLVEDGLTAMVSGGGETLSDIREGAPLGVHLPFVGYSYSCMALRDSEVPGPTPMELEAEQLLEPHVQAPSLEPSVSPQDETAEVAVPAAVPAAEAEAEVTLRELQEALEEEVLTRQSLSREMEAIRTDNQNFASQLREAEARNRDLEAHVRQLQERMELLQAEGATAVTGVPSPRATDPPSHLDGPPAVAVGQCPLVGPGPMHRRHLLLPARVPRPGLSEALSLLLFAVVLSRAAALGCIGLVAHAGQLTAVWRRPGAARAP

SEQ ID NO: 44583 - protein, 639 aa, Homo sapiens
MGGHFWPPEPYTVFMWGSPWEADSPRVKLRGREKGRQTEGGAFPLVSSALSGDPRFFSPTTPPAEPIVVRLKEVRLQRDDFEILKVIGRGAFSEVAVVKMKQTGQVYAMKIMNKWDMLKRGEVSCFREERDVLVNGDRRWITQLHFAFQDENYLYLVMEYYVGGDLLTLLSKFGERIPAEMARFYLAEIVMAIDSVHRLGYVHRDIKPDNILLDRCGHIRLADFGSCLKLRADGTVRSLVAVGTPDYLSPEILQAVGGGPGTGSYGPECDWWALGVFAYEMFYGQTPFYADSTAETYGKIVHYKEHLSLPLVDEGVPEEARDFIQRLLCPPETRLGRGGAGDFRTHPFFFGLDWDGLRDSVPPFTPDFEGATDTCNFDLVEDGLTAMVSGGGETLSDIREGAPLGVHLPFVGYSYSCMALRDSEVPGPTPMELEAEQLLEPHVQAPSLEPSVSPQDETAEVAVPAAVPAAEAEAEVTLRELQEALEEEVLTRQSLSREMEAIRTDNQNFASQLREAEARNRDLEAHVRQLQERMELLQAEGATAVTGVPSPRATDPPSHLDGPPAVAVGQCPLVGPGPMHRRHLLLPARVPRPGLSEALSLLLFAVVLSRAAALGCIGLVAHAGQLTAVWRRPGAARAP

SEQ ID NO: 44584 - protein, 609 aa, Homo sapiens
MGGHFWPPEPYTVFMWGSPWEADSPRVKLRGREKGRQTEGGAFPLVSSALSGDPRFFSPTTPPAEPIVVRLKEVRLQRDDFEILKVIGRGAFSEVAVVKMKQTGQVYAMKIMNKWDMLKRGEVSCFREERDVLVNGDRRWITQLHFAFQDENYLYLVMEYYVGGDLLTLLSKFGERIPAEMARFYLAEIVMAIDSVHRLGYVHRDIKPDNILLDRCGHIRLADFGSCLKLRADGTVRSLVAVGTPDYLSPEILQAVGGGPGTGSYGPECDWWALGVFAYEMFYGQTPFYADSTAETYGKIVHYKEHLSLPLVDEGVPEEARDFIQRLLCPPETRLGRGGAGDFRTHPFFFGLDWDGLRDSVPPFTPDFEGATDTCNFDLVEDGLTAMVSGGGETLSDIREGAPLGVHLPFVGYSYSCMALRDSEVPGPTPMELEAEQLLEPHVQAPSLEPSVSPQDETAEVAVPAAVPAAEAEAEVTLRELQEALEEEVLTRQSLSREMEAIRTDNQNFASQLREAEARNRDLEAHVRQLQERMELLQAEGATAVTGVPSPRATDPPSHVPRPGLSEALSLLLFAVVLSRAAALGCIGLVAHAGQLTAVWRRPGAARAP

SEQ ID NO: 44585 - protein, 530 aa, Homo sapiens
MSAEVRLRRLQQLVLDPGFLGLEPLLDLLLGVHQELGASELAQDKYVADFLQWAEPIVVRLKEVRLQRDDFEILKVIGRGAFSEVAVVKMKQTGQVYAMKIMNKWDMLKRGEVSCFREERDVLVNGDRRWITQLHFAFQDENYLYLVMEYYVGGDLLTLLSKFGERIPAEMARFYLAEIVMAIDSVHRLGYVHRDIKPDNILLDRCGHIRLADFGSCLKLRADGTVRSLVAVGTPDYLSPEILQAVGGGPGTGSYGPECDWWALGVFAYEMFYGQTPFYADSTAETYGKIVHYKEHLSLPLVDEGVPEEARDFIQRLLCPPETRLGRGGAGDFRTHPFFFGLDWDGLRDSVPPFTPDFEGATDTCNFDLVEDGLTAMETLSDIREGAPLGVHLPFVGYSYSCMALRDSEVPGPTPMELEAEQLLEPHVQAPSLEPSVSPQDETAEVAVPAAVPAAEAEAEVTLRELQEALEEEVLTRQSLSREMEAIRTDNQNFASQLREAEARNRDLEAHVRQLQERMELLQAEGATGP

SEQ ID NO: 44586 - protein, 621 aa, Homo sapiens
MSAEVRLRRLQQLVLDPGFLGLEPLLDLLLGVHQELGASELAQDKYVADFLQWAEPIVVRLKEVRLQRDDFEILKVIGRGAFSEVAVVKMKQTGQVYAMKIMNKWDMLKRGEVSCFREERDVLVNGDRRWITQLHFAFQDENYLYLVMEYYVGGDLLTLLSKFGERIPAEMARFYLAEIVMAIDSVHRLGYVHRDIKPDNILLDRCGHIRLADFGSCLKLRADGTVRSLVAVGTPDYLSPEILQAVGGGPGTGSYGPECDWWALGVFAYEMFYGQTPFYADSTAETYGKIVHYKEHLSLPLVDEGVPEEARDFIQRLLCPPETRLGRGGAGDFRTHPFFFGLDWDGLRDSVPPFTPDFEGATDTCNFDLVEDGLTAMETLSDIREGAPLGVHLPFVGYSYSCMALRDSEVPGPTPMELEAEQLLEPHVQAPSLEPSVSPQDETAEVAVPAAVPAAEAEAEVTLRELQEALEEEVLTRQSLSREMEAIRTDNQNFASQLREAEARNRDLEAHVRQLQERMELLQAEGATAVTGVPSPRATDPPSHLDGPPWLWASARWWGQMHRRHLLLPARVPRPGLSEALSLLLFAVVLSRAAALGCIGLVAHAGQLTAVWRRPGAARAP

SEQ ID NO: 44587 - protein, 624 aa, Homo sapiens
MSAEVRLRRLQQLVLDPGFLGLEPLLDLLLGVHQELGASELAQDKYVADFLQWAEPIVVRLKEVRLQRDDFEILKVIGRGAFSEVAVVKMKQTGQVYAMKIMNKWDMLKRGEVSCFREERDVLVNGDRRWITQLHFAFQDENYLYLVMEYYVGGDLLTLLSKFGERIPAEMARFYLAEIVMAIDSVHRLGYVHRDIKPDNILLDRCGHIRLADFGSCLKLRADGTVRSLVAVGTPDYLSPEILQAVGGGPGTGSYGPECDWWALGVFAYEMFYGQTPFYADSTAETYGKIVHYKEHLSLPLVDEGVPEEARDFIQRLLCPPETRLGRGGAGDFRTHPFFFGLDWDGLRDSVPPFTPDFEGATDTCNFDLVEDGLTAMETLSDIREGAPLGVHLPFVGYSYSCMALRDSEVPGPTPMELEAEQLLEPHVQAPSLEPSVSPQDETAEVAVPAAVPAAEAEAEVTLRELQEALEEEVLTRQSLSREMEAIRTDNQNFASQLREAEARNRDLEAHVRQLQERMELLQAEGATAVTGVPSPRATDPPSHLDGPPAVAVGQCPLVGPGPMHRRHLLLPARVPRPGLSEALSLLLFAVVLSRAAALGCIGLVAHAGQLTAVWRRPGAARAP

SEQ ID NO: 44588 - protein, 625 aa, Homo sapiens
MSAEVRLRRLQQLVLDPGFLGLEPLLDLLLGVHQELGASELAQDKYVADFLQWAEPIVVRLKEVRLQRDDFEILKVIGRGAFSEVAVVKMKQTGQVYAMKIMNKWDMLKRGEVSCFREERDVLVNGDRRWITQLHFAFQDENYLYLVMEYYVGGDLLTLLSKFGERIPAEMARFYLAEIVMAIDSVHRLGYVHRDIKPDNILLDRCGHIRLADFGSCLKLRADGTVRSLVAVGTPDYLSPEILQAVGGGPGTGSYGPECDWWALGVFAYEMFYGQTPFYADSTAETYGKIVHYKEHLSLPLVDEGVPEEARDFIQRLLCPPETRLGRGGAGDFRTHPFFFGLDWDGLRDSVPPFTPDFEGATDTCNFDLVEDGLTAMETLSDIREGAPLGVHLPFVGYSYSCMALRDSEVPGPTPMELEAEQLLEPHVQAPSLEPSVSPQDETAEVAVPAAVPAAEAEAEVTLRELQEALEEEVLTRQSLSREMEAIRTDNQNFASQLREAEARNRDLEAHVRQLQERMELLQAEGATAVTGVPSPRATDPPSHMAPRPWLWASARWWGQAPCTAATCCSLPGSLGLAYRRRFPCSCSPLFCLVPPPWAALGWWPTPANSPQSGAAQEPPALPEP

SEQ ID NO: 44589 - protein, 42 aa, Homo sapiens
MELLQAEGATARWPPGRGCGPVPAGGARPHAPPPPAAPCQGP

SEQ ID NO: 44590 - protein, 1133 aa, Homo sapiens
MPSSLMLEVPALADFNRAWTELTDWLSLLDQVIKSQRVMVGDLEDINEMIIKQKATMQDLEQRRPQLEELITAAQNLKNKTSNQEARTIITDRIERIQNQWDEVQEHLQNRRQQLNEMLKDSTQWLEAKEEAEQVLGQARAKLESWKEGPYTVDAIQKKITETKQLAKDLRQWQTNVDVANDLALKLLRDYSADDTRKVHMITENINASWRSIHKRVSEREAALEETHRLLQQFPLDLEKFLAWLTEAETTANVLQDATRKERLLEDSKGVKELMKQWQDLQGEIEAHTDVYHNLDENSQKILRSLEGSDDAVLLQRRLDNMNFKWSELRKKSLNIRSHLEASSDQWKRLHLSLQELLVWLQLKDDELSRQAPIGGDFPAVQKQNDVHRAFKRELKTKEPVIMSTLETVRIFLTEQPLEGLEKLYQEPRELPPEERAQNVTRLLRKQAEEVNTEWEKLNLHSADWQRKIDETLERLRELQEATDELDLKLRQAEVIKGSWQPVGDLLIDSLQDHLEKVKALRGEIAPLKENVSHVNDLARQLTTLGIQLSPYNLSTLEDLNTRWKLLQVAVEDRVRQLHEAHRDFGPASQHFLSTSVQGPWERAISPNKVPYYINHETQTTCWDHPKMTELYQSLADLNNVRFSAYRTAMKLRRLQKALCLDLLSLSAACDALDQHNLKQNDQPMDILQIINCLTTIYDRLEQEHNNLVNVPLCVDMCLNWLLNVYDTGRTGRIRVLSFKTGIISLCKAHLEDKYRYLFKQVASSTGFCDQRRLGLLLHDSIQIPRQLGEVASFGGSNIEPSVRSCFQFANNKPEIEAALFLDWMRLEPQSMVWLPVLHRVAAAETAKHQAKCNICKECPIIGFRYRSLKHFNYDICQSCFFSGRVAKGHKMHYPMVEYCTPTTSGEDVRDFAKVLKNKFRTKRYFAKHPRMGYLPVQTVLEGDNMETNLQAEYDRLKQQHEHKGLSPLPSPPEMMPTSPQSPRDAELIAEAKLLRQHKGRLEARMQILEDHNKQLESQLHRLRQLLEQPQAEAKVNGTTVSSPSTSLQRSDSSQPMLLRVVGSQTSDSMGEEDLLSPPQDTSTGLEEVMEQLNNSFPSSRGHNVGSLFHMADDLGRAMESLVSVMTDEEGAE

SEQ ID NO: 44591 - protein, 3685 aa, Homo sapiens
MLWWEEVEDCYEREDVQKKTFTKWVNAQFSKFGKQHIENLFSDLQDGRRLLDLLEGLTGQKLPKEKGSTRVHALNNVNKALRVLQNNNVDLVNIGSTDIVDGNHKLTLGLIWNIILHWQVKNVMKNIMAGLQQTNSEKILLSWVRQSTRNYPQVNVINFTTSWSDGLALNALIHSHRPDLFDWNSVVCQQSATQRLEHAFNIARYQLGIEKLLDPEDVDTTYPDKKSILMYITSLFQVLPQQVSIEAIQEVEMLPRPPKVTKEEHFQLHHQMHYSQQITVSLAQGYERTSSPKPRFKSYAYTQAAYVTTSDPTRSPFPSQHLEAPEDKSFGSSLMESEVNLDRYQTALEEVLSWLLSAEDTLQAQGEISNDVEVVKDQFHTHEGYMMDLTAHQGRVGNILQLGSKLIGTGKLSEDEETEVQEQMNLLNSRWECLRVASMEKQSNLHRVLMDLQNQKLKELNDWLTKTEERTRKMEEEPLGPDLEDLKRQVQQHKVLQEDLEQEQVRVNSLTHMVVVVDESSGDHATAALEEQLKVLGDRWANICRWTEDRWVLLQDILLKWQRLTEEQCLFSAWLSEKEDAVNKIHTTGFKDQNEMLSSLQKLAVLKADLEKKKQSMGKLYSLKQDLLSTLKNKSVTQKTEAWLDNFARCWDNLVQKLEKSTAQISQAVTTTQPSLTQTTVMETVTTVTTREQILVKHAQEELPPPPPQKKRQITVDSEIRKRLDVDITELHSWITRSEAVLQSPEFAIFRKEGNFSDLKEKVNAIEREKAEKFRKLQDASRSAQALVEQMVNEGVNADSIKQASEQLNSRWIEFCQLLSERLNWLEYQNNIIAFYNQLQQLEQMTTTAENWLKIQPTTPSEPTAIKSQLKICKDEVNRLSDLQPQIERLKIQSIALKEKGQGPMFLDADFVAFTNHFKQVFSDVQAREKELQTIFDTLPPMRYQETMSAIRTWVQQSETKLSIPQLSVTDYEIMEQRLGELQALQSSLQEQQSGLYYLSTTVKEMSKKAPSEISRKYQSEFEEIEGRWKKLSSQLVEHCQKLEEQMNKLRKIQNHIQTLKKWMAEVDVFLKEEWPALGDSEILKKQLKQCRLLVSDIQTIQPSLNSVNEGGQKIKNEAEPEFASRLETELKELNTQWDHMCQQVYARKEALKGGLEKTVSLQKDLSEMHEWMTQAEEEYLERDFEYKTPDELQKAVEEMKRAKEEAQQKEAKVKLLTESVNSVIAQAPPVAQEALKKELETLTTNYQWLCTRLNGKCKTLEEVWACWHELLSYLEKANKWLNEVEFKLKTTENIPGGAEEISEVLDSLENLMRHSEDNPNQIRILAQTLTDGGVMDELINEELETFNSRWRELHEEAVRRQKLLEQSIQSAQETEKSLHLIQESLTFIDKQLAAYIADKVDAAQMPQEAQKIQSDLTSHEISLEEMKKHNQGKEAAQRVLSQIDVAQKKLQDVSMKFRLFQKPANFEQRLQESKMILDEVKMHLPALETKSVEQEVVQSQLNHCVNLYKSLSEVKSEVEMVIKTGRQIVQKKQTENPKELDERVTALKLHYNELGAKVTERKQQLEKCLKLSRKMRKEMNVLTEWLAATDMELTKRSAVEGMPSNLDSEVAWGKATQKEIEKQKVHLKSITEVGEALKTVLGKKETLVEDKLSLLNSNWIAVTSRAEEWLNLLLEYQKHMETFDQNVDHITKWIIQADTLLDESEKKKPQQKEDVLKRLKAELNDIRPKVDSTRDQAANLMANRGDHCRKLVEPQISELNHRFAAISHRIKTGKASIPLKELEQFNSDIQKLLEPLEAEIQQGVNLKEEDFNKDMNEDNEGTVKELLQRGDNLQQRITDERKREEIKIKQQLLQTKHNALKDLRSQRRKKALEISHQWYQYKRQADDLLKCLDDIEKKLASLPEPRDERKIKEIDRELQKKKEELNAVRRQAEGLSEDGAAMAVEPTQIQLSKRWREIESKFAQFRRLNFAQIHTVREETMMVMTEDMPLEISYVPSTYLTEITHVSQALLEVEQLLNAPDLCAKDFEDLFKQEESLKNIKDSLQQSSGRIDIIHSKKTAALQSATPVERVKLQEALSQLDFQWEKVNKMYKDRQGRFDRSVEKWRRFHYDIKIFNQWLTEAEQFLRKTQIPENWEHAKYKWYLKELQDGIGQRQTVVRTLNATGEEIIQQSSKTDASILQEKLGSLNLRWQEVCKQLSDRKKRLEEQKNILSEFQRDLNEFVLWLEEADNIASIPLEPGKEQQLKEKLEQVKLLVEELPLRQGILKQLNETGGPVLVSAPISPEEQDKLENKLKQTNLQWIKVSRALPEKQGEIEAQIKDLGQLEKKLEDLEEQLNHLLLWLSPIRNQLEIYNQPNQEGPFDVKETEIAVQAKQPDVEEILSKGQHLYKEKPATQPVKRKLEDLSSEWKAVNRLLQELRAKQPDLAPGLTTIGASPTQTVTLVTQPVVTKETAISKLEMPSSLMLEVPALADFNRAWTELTDWLSLLDQVIKSQRVMVGDLEDINEMIIKQKATMQDLEQRRPQLEELITAAQNLKNKTSNQEARTIITDRIERIQNQWDEVQEHLQNRRQQLNEMLKDSTQWLEAKEEAEQVLGQARAKLESWKEGPYTVDAIQKKITETKQLAKDLRQWQTNVDVANDLALKLLRDYSADDTRKVHMITENINASWRSIHKRVSEREAALEETHRLLQQFPLDLEKFLAWLTEAETTANVLQDATRKERLLEDSKGVKELMKQWQDLQGEIEAHTDVYHNLDENSQKILRSLEGSDDAVLLQRRLDNMNFKWSELRKKSLNIRSHLEASSDQWKRLHLSLQELLVWLQLKDDELSRQAPIGGDFPAVQKQNDVHRAFKRELKTKEPVIMSTLETVRIFLTEQPLEGLEKLYQEPRELPPEERAQNVTRLLRKQAEEVNTEWEKLNLHSADWQRKIDETLERLRELQEATDELDLKLRQAEVIKGSWQPVGDLLIDSLQDHLEKVKALRGEIAPLKENVSHVNDLARQLTTLGIQLSPYNLSTLEDLNTRWKLLQVAVEDRVRQLHEAHRDFGPASQHFLSTSVQGPWERAISPNKVPYYINHETQTTCWDHPKMTELYQSLADLNNVRFSAYRTAMKLRRLQKALCLDLLSLSAACDALDQHNLKQNDQPMDILQIINCLTTIYDRLEQEHNNLVNVPLCVDMCLNWLLNVYDTGRTGRIRVLSFKTGIISLCKAHLEDKYRYLFKQVASSTGFCDQRRLGLLLHDSIQIPRQLGEVASFGGSNIEPSVRSCFQFANNKPEIEAALFLDWMRLEPQSMVWLPVLHRVAAAETAKHQAKCNICKECPIIGFRYRSLKHFNYDICQSCFFSGRVAKGHKMHYPMVEYCTPTTSGEDVRDFAKVLKNKFRTKRYFAKHPRMGYLPVQTVLEGDNMETPVTLINFWPVDSAPASSPQLSHDDTHSRIEHYASRLAEMENSNGSYLNDSISPNESIDDEHLLIQHYCQSLNQDSPLSQPRSPAQILISLESEERGELERILADLEEENRNLQAEYDRLKQQHEHKGLSPLPSPPEMMPTSPQSPRDAELIAEAKLLRQHKGRLEARMQILEDHNKQLESQLHRLRQLLEQPQAEAKVNGTTVSSPSTSLQRSDSSQPMLLRVVGSQTSDSMGEEDLLSPPQDTSTGLEEVMEQLNNSFPSSRGRNTPGKPMREDTM

SEQ ID NO: 44592 - protein, 1230 aa, Homo sapiens
MPSSLMLEVPALADFNRAWTELTDWLSLLDQVIKSQRVMVGDLEDINEMIIKQKATMQDLEQRRPQLEELITAAQNLKNKTSNQEARTIITDRIERIQNQWDEVQEHLQNRRQQLNEMLKDSTQWLEAKEEAEQVLGQARAKLESWKEGPYTVDAIQKKITETKQLAKDLRQWQTNVDVANDLALKLLRDYSADDTRKVHMITENINASWRSIHKRVSEREAALEETHRLLQQFPLDLEKFLAWLTEAETTANVLQDATRKERLLEDSKGVKELMKQWQDLQGEIEAHTDVYHNLDENSQKILRSLEGSDDAVLLQRRLDNMNFKWSELRKKSLNIRSHLEASSDQWKRLHLSLQELLVWLQLKDDELSRQAPIGGDFPAVQKQNDVHRAFKRELKTKEPVIMSTLETVRIFLTEQPLEGLEKLYQEPRELPPEERAQNVTRLLRKQAEEVNTEWEKLNLHSADWQRKIDETLERLRELQEATDELDLKLRQAEVIKGSWQPVGDLLIDSLQDHLEKVKALRGEIAPLKENVSHVNDLARQLTTLGIQLSPYNLSTLEDLNTRWKLLQVAVEDRVRQLHEAHRDFGPASQHFLSTSVQGPWERAISPNKVPYYINHETQTTCWDHPKMTELYQSLADLNNVRFSAYRTAMKLRRLQKALCLDLLSLSAACDALDQHNLKQNDQPMDILQIINCLTTIYDRLEQEHNNLVNVPLCVDMCLNWLLNVYDTGRTGRIRVLSFKTGIISLCKAHLEDKYRYLFKQVASSTGFCDQRRLGLLLHDSIQIPRQLGEVASFGGSNIEPSVRSCFQFANNKPEIEAALFLDWMRLEPQSMVWLPVLHRVAAAETAKHQAKCNICKECPIIGFRYRSLKHFNYDICQSCFFSGRVAKGHKMHYPMVEYCTPTTSGEDVRDFAKVLKNKFRTKRYFAKHPRMGYLPVQTVLEGDNMETPASSPQLSHDDTHSRIEHYASRLAEMENSNGSYLNDSISPNESIDDEHLLIQHYCQSLNQDSPLSQPRSPAQILISLESEERGELERILADLEEENRNLQAEYDRLKQQHEHKGLSPLPSPPEMMPTSPQSPRDAELIAEAKLLRQHKGRLEARMQILEDHNKQLESQLHRLRQLLEQPQAEAKVNGTTVSSPSTSLQRSDSSQPMLLRVVGSQTSDSMGEEDLLSPPQDTSTGLEEVMEQLNNSFPSSRGHNVGSLFHMADDLGRAMESLVSVMTDEEGAE

SEQ ID NO: 44593 - protein, 622 aa, Homo sapiens
MREQLKGHETQTTCWDHPKMTELYQSLADLNNVRFSAYRTAMKLRRLQKALCLDLLSLSAACDALDQHNLKQNDQPMDILQIINCLTTIYDRLEQEHNNLVNVPLCVDMCLNWLLNVYDTGRTGRIRVLSFKTGIISLCKAHLEDKYRYLFKQVASSTGFCDQRRLGLLLHDSIQIPRQLGEVASFGGSNIEPSVRSCFQFANNKPEIEAALFLDWMRLEPQSMVWLPVLHRVAAAETAKHQAKCNICKECPIIGFRYRSLKHFNYDICQSCFFSGRVAKGHKMHYPMVEYCTPTTSGEDVRDFAKVLKNKFRTKRYFAKHPRMGYLPVQTVLEGDNMETPASSPQLSHDDTHSRIEHYASRLAEMENSNGSYLNDSISPNESIDDEHLLIQHYCQSLNQDSPLSQPRSPAQILISLESEERGELERILADLEEENRNLQAEYDRLKQQHEHKGLSPLPSPPEMMPTSPQSPRDAELIAEAKLLRQHKGRLEARMQILEDHNKQLESQLHRLRQLLEQPQAEAKVNGTTVSSPSTSLQRSDSSQPMLLRVVGSQTSDSMGEEDLLSPPQDTSTGLEEVMEQLNNSFPSSRGHNVGSLFHMADDLGRAMESLVSVMTDEEGAE

SEQ ID NO: 44594 - protein, 3681 aa, Homo sapiens
MSEVSSDEREDVQKKTFTKWVNAQFSKFGKQHIENLFSDLQDGRRLLDLLEGLTGQKLPKEKGSTRVHALNNVNKALRVLQNNNVDLVNIGSTDIVDGNHKLTLGLIWNIILHWQVKNVMKNIMAGLQQTNSEKILLSWVRQSTRNYPQVNVINFTTSWSDGLALNALIHSHRPDLFDWNSVVCQQSATQRLEHAFNIARYQLGIEKLLDPEDVDTTYPDKKSILMYITSLFQVLPQQVSIEAIQEVEMLPRPPKVTKEEHFQLHHQMHYSQQITVSLAQGYERTSSPKPRFKSYAYTQAAYVTTSDPTRSPFPSQHLEAPEDKSFGSSLMESEVNLDRYQTALEEVLSWLLSAEDTLQAQGEISNDVEVVKDQFHTHEGYMMDLTAHQGRVGNILQLGSKLIGTGKLSEDEETEVQEQMNLLNSRWECLRVASMEKQSNLHRVLMDLQNQKLKELNDWLTKTEERTRKMEEEPLGPDLEDLKRQVQQHKVLQEDLEQEQVRVNSLTHMVVVVDESSGDHATAALEEQLKVLGDRWANICRWTEDRWVLLQDILLKWQRLTEEQCLFSAWLSEKEDAVNKIHTTGFKDQNEMLSSLQKLAVLKADLEKKKQSMGKLYSLKQDLLSTLKNKSVTQKTEAWLDNFARCWDNLVQKLEKSTAQISQAVTTTQPSLTQTTVMETVTTVTTREQILVKHAQEELPPPPPQKKRQITVDSEIRKRLDVDITELHSWITRSEAVLQSPEFAIFRKEGNFSDLKEKVNAIEREKAEKFRKLQDASRSAQALVEQMVNEGVNADSIKQASEQLNSRWIEFCQLLSERLNWLEYQNNIIAFYNQLQQLEQMTTTAENWLKIQPTTPSEPTAIKSQLKICKDEVNRLSDLQPQIERLKIQSIALKEKGQGPMFLDADFVAFTNHFKQVFSDVQAREKELQTIFDTLPPMRYQETMSAIRTWVQQSETKLSIPQLSVTDYEIMEQRLGELQALQSSLQEQQSGLYYLSTTVKEMSKKAPSEISRKYQSEFEEIEGRWKKLSSQLVEHCQKLEEQMNKLRKIQNHIQTLKKWMAEVDVFLKEEWPALGDSEILKKQLKQCRLLVSDIQTIQPSLNSVNEGGQKIKNEAEPEFASRLETELKELNTQWDHMCQQVYARKEALKGGLEKTVSLQKDLSEMHEWMTQAEEEYLERDFEYKTPDELQKAVEEMKRAKEEAQQKEAKVKLLTESVNSVIAQAPPVAQEALKKELETLTTNYQWLCTRLNGKCKTLEEVWACWHELLSYLEKANKWLNEVEFKLKTTENIPGGAEEISEVLDSLENLMRHSEDNPNQIRILAQTLTDGGVMDELINEELETFNSRWRELHEEAVRRQKLLEQSIQSAQETEKSLHLIQESLTFIDKQLAAYIADKVDAAQMPQEAQKIQSDLTSHEISLEEMKKHNQGKEAAQRVLSQIDVAQKKLQDVSMKFRLFQKPANFEQRLQESKMILDEVKMHLPALETKSVEQEVVQSQLNHCVNLYKSLSEVKSEVEMVIKTGRQIVQKKQTENPKELDERVTALKLHYNELGAKVTERKQQLEKCLKLSRKMRKEMNVLTEWLAATDMELTKRSAVEGMPSNLDSEVAWGKATQKEIEKQKVHLKSITEVGEALKTVLGKKETLVEDKLSLLNSNWIAVTSRAEEWLNLLLEYQKHMETFDQNVDHITKWIIQADTLLDESEKKKPQQKEDVLKRLKAELNDIRPKVDSTRDQAANLMANRGDHCRKLVEPQISELNHRFAAISHRIKTGKASIPLKELEQFNSDIQKLLEPLEAEIQQGVNLKEEDFNKDMNEDNEGTVKELLQRGDNLQQRITDERKREEIKIKQQLLQTKHNALKDLRSQRRKKALEISHQWYQYKRQADDLLKCLDDIEKKLASLPEPRDERKIKEIDRELQKKKEELNAVRRQAEGLSEDGAAMAVEPTQIQLSKRWREIESKFAQFRRLNFAQIHTVREETMMVMTEDMPLEISYVPSTYLTEITHVSQALLEVEQLLNAPDLCAKDFEDLFKQEESLKNIKDSLQQSSGRIDIIHSKKTAALQSATPVERVKLQEALSQLDFQWEKVNKMYKDRQGRFDRSVEKWRRFHYDIKIFNQWLTEAEQFLRKTQIPENWEHAKYKWYLKELQDGIGQRQTVVRTLNATGEEIIQQSSKTDASILQEKLGSLNLRWQEVCKQLSDRKKRLEEQKNILSEFQRDLNEFVLWLEEADNIASIPLEPGKEQQLKEKLEQVKLLVEELPLRQGILKQLNETGGPVLVSAPISPEEQDKLENKLKQTNLQWIKVSRALPEKQGEIEAQIKDLGQLEKKLEDLEEQLNHLLLWLSPIRNQLEIYNQPNQEGPFDVKETEIAVQAKQPDVEEILSKGQHLYKEKPATQPVKRKLEDLSSEWKAVNRLLQELRAKQPDLAPGLTTIGASPTQTVTLVTQPVVTKETAISKLEMPSSLMLEVPALADFNRAWTELTDWLSLLDQVIKSQRVMVGDLEDINEMIIKQKATMQDLEQRRPQLEELITAAQNLKNKTSNQEARTIITDRIERIQNQWDEVQEHLQNRRQQLNEMLKDSTQWLEAKEEAEQVLGQARAKLESWKEGPYTVDAIQKKITETKQLAKDLRQWQTNVDVANDLALKLLRDYSADDTRKVHMITENINASWRSIHKRVSEREAALEETHRLLQQFPLDLEKFLAWLTEAETTANVLQDATRKERLLEDSKGVKELMKQWQDLQGEIEAHTDVYHNLDENSQKILRSLEGSDDAVLLQRRLDNMNFKWSELRKKSLNIRSHLEASSDQWKRLHLSLQELLVWLQLKDDELSRQAPIGGDFPAVQKQNDVHRAFKRELKTKEPVIMSTLETVRIFLTEQPLEGLEKLYQEPRELPPEERAQNVTRLLRKQAEEVNTEWEKLNLHSADWQRKIDETLERLRELQEATDELDLKLRQAEVIKGSWQPVGDLLIDSLQDHLEKVKALRGEIAPLKENVSHVNDLARQLTTLGIQLSPYNLSTLEDLNTRWKLLQVAVEDRVRQLHEAHRDFGPASQHFLSTSVQGPWERAISPNKVPYYINHETQTTCWDHPKMTELYQSLADLNNVRFSAYRTAMKLRRLQKALCLDLLSLSAACDALDQHNLKQNDQPMDILQIINCLTTIYDRLEQEHNNLVNVPLCVDMCLNWLLNVYDTGRTGRIRVLSFKTGIISLCKAHLEDKYRYLFKQVASSTGFCDQRRLGLLLHDSIQIPRQLGEVASFGGSNIEPSVRSCFQFANNKPEIEAALFLDWMRLEPQSMVWLPVLHRVAAAETAKHQAKCNICKECPIIGFRYRSLKHFNYDICQSCFFSGRVAKGHKMHYPMVEYCTPTTSGEDVRDFAKVLKNKFRTKRYFAKHPRMGYLPVQTVLEGDNMETPVTLINFWPVDSAPASSPQLSHDDTHSRIEHYASRLAEMENSNGSYLNDSISPNESIDDEHLLIQHYCQSLNQDSPLSQPRSPAQILISLESEERGELERILADLEEENRNLQAEYDRLKQQHEHKGLSPLPSPPEMMPTSPQSPRDAELIAEAKLLRQHKGRLEARMQILEDHNKQLESQLHRLRQLLEQPQAEAKVNGTTVSSPSTSLQRSDSSQPMLLRVVGSQTSDSMGEEDLLSPPQDTSTGLEEVMEQLNNSFPSSRGRNTPGKPMREDTM

SEQ ID NO: 44595 - protein, 2344 aa, Homo sapiens
MTEMILLIFFPAYFLNAVRRQKLLEQSIQSAQETEKSLHLIQESLTFIDKQLAAYIADKVDAAQMPQEAQKIQSDLTSHEISLEEMKKHNQGKEAAQRVLSQIDVAQKKLQDVSMKFRLFQKPANFEQRLQESKMILDEVKMHLPALETKSVEQEVVQSQLNHCVNLYKSLSEVKSEVEMVIKTGRQIVQKKQTENPKELDERVTALKLHYNELGAKVTERKQQLEKCLKLSRKMRKEMNVLTEWLAATDMELTKRSAVEGMPSNLDSEVAWGKATQKEIEKQKVHLKSITEVGEALKTVLGKKETLVEDKLSLLNSNWIAVTSRAEEWLNLLLEYQKHMETFDQNVDHITKWIIQADTLLDESEKKKPQQKEDVLKRLKAELNDIRPKVDSTRDQAANLMANRGDHCRKLVEPQISELNHRFAAISHRIKTGKASIPLKELEQFNSDIQKLLEPLEAEIQQGVNLKEEDFNKDMNEDNEGTVKELLQRGDNLQQRITDERKREEIKIKQQLLQTKHNALKDLRSQRRKKALEISHQWYQYKRQADDLLKCLDDIEKKLASLPEPRDERKIKEIDRELQKKKEELNAVRRQAEGLSEDGAAMAVEPTQIQLSKRWREIESKFAQFRRLNFAQIHTVREETMMVMTEDMPLEISYVPSTYLTEITHVSQALLEVEQLLNAPDLCAKDFEDLFKQEESLKNIKDSLQQSSGRIDIIHSKKTAALQSATPVERVKLQEALSQLDFQWEKVNKMYKDRQGRFDRSVEKWRRFHYDIKIFNQWLTEAEQFLRKTQIPENWEHAKYKWYLKELQDGIGQRQTVVRTLNATGEEIIQQSSKTDASILQEKLGSLNLRWQEVCKQLSDRKKRLEEQKNILSEFQRDLNEFVLWLEEADNIASIPLEPGKEQQLKEKLEQVKLLVEELPLRQGILKQLNETGGPVLVSAPISPEEQDKLENKLKQTNLQWIKVSRALPEKQGEIEAQIKDLGQLEKKLEDLEEQLNHLLLWLSPIRNQLEIYNQPNQEGPFDVKETEIAVQAKQPDVEEILSKGQHLYKEKPATQPVKRKLEDLSSEWKAVNRLLQELRAKQPDLAPGLTTIGASPTQTVTLVTQPVVTKETAISKLEMPSSLMLEVPALADFNRAWTELTDWLSLLDQVIKSQRVMVGDLEDINEMIIKQKATMQDLEQRRPQLEELITAAQNLKNKTSNQEARTIITDRIERIQNQWDEVQEHLQNRRQQLNEMLKDSTQWLEAKEEAEQVLGQARAKLESWKEGPYTVDAIQKKITETKQLAKDLRQWQTNVDVANDLALKLLRDYSADDTRKVHMITENINASWRSIHKRVSEREAALEETHRLLQQFPLDLEKFLAWLTEAETTANVLQDATRKERLLEDSKGVKELMKQWQDLQGEIEAHTDVYHNLDENSQKILRSLEGSDDAVLLQRRLDNMNFKWSELRKKSLNIRSHLEASSDQWKRLHLSLQELLVWLQLKDDELSRQAPIGGDFPAVQKQNDVHRAFKRELKTKEPVIMSTLETVRIFLTEQPLEGLEKLYQEPRELPPEERAQNVTRLLRKQAEEVNTEWEKLNLHSADWQRKIDETLERLRELQEATDELDLKLRQAEVIKGSWQPVGDLLIDSLQDHLEKVKALRGEIAPLKENVSHVNDLARQLTTLGIQLSPYNLSTLEDLNTRWKLLQVAVEDRVRQLHEAHRDFGPASQHFLSTSVQGPWERAISPNKVPYYINHETQTTCWDHPKMTELYQSLADLNNVRFSAYRTAMKLRRLQKALCLDLLSLSAACDALDQHNLKQNDQPMDILQIINCLTTIYDRLEQEHNNLVNVPLCVDMCLNWLLNVYDTGRTGRIRVLSFKTGIISLCKAHLEDKYRYLFKQVASSTGFCDQRRLGLLLHDSIQIPRQLGEVASFGGSNIEPSVRSCFQFANNKPEIEAALFLDWMRLEPQSMVWLPVLHRVAAAETAKHQAKCNICKECPIIGFRYRSLKHFNYDICQSCFFSGRVAKGHKMHYPMVEYCTPTTSGEDVRDFAKVLKNKFRTKRYFAKHPRMGYLPVQTVLEGDNMETPVTLINFWPVDSAPASSPQLSHDDTHSRIEHYASRLAEMENSNGSYLNDSISPNESIDDEHLLIQHYCQSLNQDSPLSQPRSPAQILISLESEERGELERILADLEEENRNLQAEYDRLKQQHEHKGLSPLPSPPEMMPTSPQSPRDAELIAEAKLLRQHKGRLEARMQILEDHNKQLESQLHRLRQLLEQPQAEAKVNGTTVSSPSTSLQRSDSSQPMLLRVVGSQTSDSMGEEDLLSPPQDTSTGLEEVMEQLNNSFPSSRGRNTPGKPMREDTP

SEQ ID NO: 44596 - protein, 2341 aa, Homo sapiens
MSARKLRNLSYKKAVRRQKLLEQSIQSAQETEKSLHLIQESLTFIDKQLAAYIADKVDAAQMPQEAQKIQSDLTSHEISLEEMKKHNQGKEAAQRVLSQIDVAQKKLQDVSMKFRLFQKPANFEQRLQESKMILDEVKMHLPALETKSVEQEVVQSQLNHCVNLYKSLSEVKSEVEMVIKTGRQIVQKKQTENPKELDERVTALKLHYNELGAKVTERKQQLEKCLKLSRKMRKEMNVLTEWLAATDMELTKRSAVEGMPSNLDSEVAWGKATQKEIEKQKVHLKSITEVGEALKTVLGKKETLVEDKLSLLNSNWIAVTSRAEEWLNLLLEYQKHMETFDQNVDHITKWIIQADTLLDESEKKKPQQKEDVLKRLKAELNDIRPKVDSTRDQAANLMANRGDHCRKLVEPQISELNHRFAAISHRIKTGKASIPLKELEQFNSDIQKLLEPLEAEIQQGVNLKEEDFNKDMNEDNEGTVKELLQRGDNLQQRITDERKREEIKIKQQLLQTKHNALKDLRSQRRKKALEISHQWYQYKRQADDLLKCLDDIEKKLASLPEPRDERKIKEIDRELQKKKEELNAVRRQAEGLSEDGAAMAVEPTQIQLSKRWREIESKFAQFRRLNFAQIHTVREETMMVMTEDMPLEISYVPSTYLTEITHVSQALLEVEQLLNAPDLCAKDFEDLFKQEESLKNIKDSLQQSSGRIDIIHSKKTAALQSATPVERVKLQEALSQLDFQWEKVNKMYKDRQGRFDRSVEKWRRFHYDIKIFNQWLTEAEQFLRKTQIPENWEHAKYKWYLKELQDGIGQRQTVVRTLNATGEEIIQQSSKTDASILQEKLGSLNLRWQEVCKQLSDRKKRLEEQKNILSEFQRDLNEFVLWLEEADNIASIPLEPGKEQQLKEKLEQVKLLVEELPLRQGILKQLNETGGPVLVSAPISPEEQDKLENKLKQTNLQWIKVSRALPEKQGEIEAQIKDLGQLEKKLEDLEEQLNHLLLWLSPIRNQLEIYNQPNQEGPFDVKETEIAVQAKQPDVEEILSKGQHLYKEKPATQPVKRKLEDLSSEWKAVNRLLQELRAKQPDLAPGLTTIGASPTQTVTLVTQPVVTKETAISKLEMPSSLMLEVPALADFNRAWTELTDWLSLLDQVIKSQRVMVGDLEDINEMIIKQKATMQDLEQRRPQLEELITAAQNLKNKTSNQEARTIITDRIERIQNQWDEVQEHLQNRRQQLNEMLKDSTQWLEAKEEAEQVLGQARAKLESWKEGPYTVDAIQKKITETKQLAKDLRQWQTNVDVANDLALKLLRDYSADDTRKVHMITENINASWRSIHKRVSEREAALEETHRLLQQFPLDLEKFLAWLTEAETTANVLQDATRKERLLEDSKGVKELMKQWQDLQGEIEAHTDVYHNLDENSQKILRSLEGSDDAVLLQRRLDNMNFKWSELRKKSLNIRSHLEASSDQWKRLHLSLQELLVWLQLKDDELSRQAPIGGDFPAVQKQNDVHRAFKRELKTKEPVIMSTLETVRIFLTEQPLEGLEKLYQEPRELPPEERAQNVTRLLRKQAEEVNTEWEKLNLHSADWQRKIDETLERLRELQEATDELDLKLRQAEVIKGSWQPVGDLLIDSLQDHLEKVKALRGEIAPLKENVSHVNDLARQLTTLGIQLSPYNLSTLEDLNTRWKLLQVAVEDRVRQLHEAHRDFGPASQHFLSTSVQGPWERAISPNKVPYYINHETQTTCWDHPKMTELYQSLADLNNVRFSAYRTAMKLRRLQKALCLDLLSLSAACDALDQHNLKQNDQPMDILQIINCLTTIYDRLEQEHNNLVNVPLCVDMCLNWLLNVYDTGRTGRIRVLSFKTGIISLCKAHLEDKYRYLFKQVASSTGFCDQRRLGLLLHDSIQIPRQLGEVASFGGSNIEPSVRSCFQFANNKPEIEAALFLDWMRLEPQSMVWLPVLHRVAAAETAKHQAKCNICKECPIIGFRYRSLKHFNYDICQSCFFSGRVAKGHKMHYPMVEYCTPTTSGEDVRDFAKVLKNKFRTKRYFAKHPRMGYLPVQTVLEGDNMETPVTLINFWPVDSAPASSPQLSHDDTHSRIEHYASRLAEMENSNGSYLNDSISPNESIDDEHLLIQHYCQSLNQDSPLSQPRSPAQILISLESEERGELERILADLEEENRNLQAEYDRLKQQHEHKGLSPLPSPPEMMPTSPQSPRDAELIAEAKLLRQHKGRLEARMQILEDHNKQLESQLHRLRQLLEQPQAEAKVNGTTVSSPSTSLQRSDSSQPMLLRVVGSQTSDSMGEEDLLSPPQDTSTGLEEVMEQLNNSFPSSRGRNTPGKPMREDTP

SEQ ID NO: 44597 - protein, 617 aa, Homo sapiens
MREQLKGHETQTTCWDHPKMTELYQSLADLNNVRFSAYRTAMKLRRLQKALCLDLLSLSAACDALDQHNLKQNDQPMDILQIINCLTTIYDRLEQEHNNLVNVPLCVDMCLNWLLNVYDTGRTGRIRVLSFKTGIISLCKAHLEDKYRYLFKQVASSTGFCDQRRLGLLLHDSIQIPRQLGEVASFGGSNIEPSVRSCFQFANNKPEIEAALFLDWMRLEPQSMVWLPVLHRVAAAETAKHQAKCNICKECPIIGFRYRSLKHFNYDICQSCFFSGRVAKGHKMHYPMVEYCTPTTSGEDVRDFAKVLKNKFRTKRYFAKHPRMGYLPVQTVLEGDNMETPVTLINFWPVDSAPASSPQLSHDDTHSRIEHYASRLAEMENSNGSYLNDSISPNESIDDEHLLIQHYCQSLNQDSPLSQPRSPAQILISLESEERGELERILADLEEENRNLQAEYDRLKQQHEHKGLSPLPSPPEMMPTSPQSPRDAELIAEAKLLRQHKGRLEARMQILEDHNKQLESQLHRLRQLLEQPQAEAKVNGTTVSSPSTSLQRSDSSQPMLLRVVGSQTSDSMGEEDLLSPPQDTSTGLEEVMEQLNNSFPSSRGRNTPGKPMREDTM

SEQ ID NO: 44598 - protein, 1225 aa, Homo sapiens
MPSSLMLEVPALADFNRAWTELTDWLSLLDQVIKSQRVMVGDLEDINEMIIKQKATMQDLEQRRPQLEELITAAQNLKNKTSNQEARTIITDRIERIQNQWDEVQEHLQNRRQQLNEMLKDSTQWLEAKEEAEQVLGQARAKLESWKEGPYTVDAIQKKITETKQLAKDLRQWQTNVDVANDLALKLLRDYSADDTRKVHMITENINASWRSIHKRVSEREAALEETHRLLQQFPLDLEKFLAWLTEAETTANVLQDATRKERLLEDSKGVKELMKQWQDLQGEIEAHTDVYHNLDENSQKILRSLEGSDDAVLLQRRLDNMNFKWSELRKKSLNIRSHLEASSDQWKRLHLSLQELLVWLQLKDDELSRQAPIGGDFPAVQKQNDVHRAFKRELKTKEPVIMSTLETVRIFLTEQPLEGLEKLYQEPRELPPEERAQNVTRLLRKQAEEVNTEWEKLNLHSADWQRKIDETLERLRELQEATDELDLKLRQAEVIKGSWQPVGDLLIDSLQDHLEKVKALRGEIAPLKENVSHVNDLARQLTTLGIQLSPYNLSTLEDLNTRWKLLQVAVEDRVRQLHEAHRDFGPASQHFLSTSVQGPWERAISPNKVPYYINHETQTTCWDHPKMTELYQSLADLNNVRFSAYRTAMKLRRLQKALCLDLLSLSAACDALDQHNLKQNDQPMDILQIINCLTTIYDRLEQEHNNLVNVPLCVDMCLNWLLNVYDTGRTGRIRVLSFKTGIISLCKAHLEDKYRYLFKQVASSTGFCDQRRLGLLLHDSIQIPRQLGEVASFGGSNIEPSVRSCFQFANNKPEIEAALFLDWMRLEPQSMVWLPVLHRVAAAETAKHQAKCNICKECPIIGFRYRSLKHFNYDICQSCFFSGRVAKGHKMHYPMVEYCTPTTSGEDVRDFAKVLKNKFRTKRYFAKHPRMGYLPVQTVLEGDNMETPVTLINFWPVDSAPASSPQLSHDDTHSRIEHYASRLAEMENSNGSYLNDSISPNESIDDEHLLIQHYCQSLNQDSPLSQPRSPAQILISLESEERGELERILADLEEENRNLQAEYDRLKQQHEHKGLSPLPSPPEMMPTSPQSPRDAELIAEAKLLRQHKGRLEARMQILEDHNKQLESQLHRLRQLLEQPQAEAKVNGTTVSSPSTSLQRSDSSQPMLLRVVGSQTSDSMGEEDLLSPPQDTSTGLEEVMEQLNNSFPSSRGRNTPGKPMREDTM

SEQ ID NO: 44599 - protein, 635 aa, Homo sapiens
MREQLKGHETQTTCWDHPKMTELYQSLADLNNVRFSAYRTAMKLRRLQKALCLDLLSLSAACDALDQHNLKQNDQPMDILQIINCLTTIYDRLEQEHNNLVNVPLCVDMCLNWLLNVYDTGRTGRIRVLSFKTGIISLCKAHLEDKYRYLFKQVASSTGFCDQRRLGLLLHDSIQIPRQLGEVASFGGSNIEPSVRSCFQFANNKPEIEAALFLDWMRLEPQSMVWLPVLHRVAAAETAKHQAKCNICKECPIIGFRYRSLKHFNYDICQSCFFSGRVAKGHKMHYPMVEYCTPTTSGEDVRDFAKVLKNKFRTKRYFAKHPRMGYLPVQTVLEGDNMETPVTLINFWPVDSAPASSPQLSHDDTHSRIEHYASRLAEMENSNGSYLNDSISPNESIDDEHLLIQHYCQSLNQDSPLSQPRSPAQILISLESEERGELERILADLEEENRNLQAEYDRLKQQHEHKGLSPLPSPPEMMPTSPQSPRDAELIAEAKLLRQHKGRLEARMQILEDHNKQLESQLHRLRQLLEQPQAEAKVNGTTVSSPSTSLQRSDSSQPMLLRVVGSQTSDSMGEEDLLSPPQDTSTGLEEVMEQLNNSFPSSRGHNVGSLFHMADDLGRAMESLVSVMTDEEGAE

SEQ ID NO: 44600 - protein, 1243 aa, Homo sapiens
MPSSLMLEVPALADFNRAWTELTDWLSLLDQVIKSQRVMVGDLEDINEMIIKQKATMQDLEQRRPQLEELITAAQNLKNKTSNQEARTIITDRIERIQNQWDEVQEHLQNRRQQLNEMLKDSTQWLEAKEEAEQVLGQARAKLESWKEGPYTVDAIQKKITETKQLAKDLRQWQTNVDVANDLALKLLRDYSADDTRKVHMITENINASWRSIHKRVSEREAALEETHRLLQQFPLDLEKFLAWLTEAETTANVLQDATRKERLLEDSKGVKELMKQWQDLQGEIEAHTDVYHNLDENSQKILRSLEGSDDAVLLQRRLDNMNFKWSELRKKSLNIRSHLEASSDQWKRLHLSLQELLVWLQLKDDELSRQAPIGGDFPAVQKQNDVHRAFKRELKTKEPVIMSTLETVRIFLTEQPLEGLEKLYQEPRELPPEERAQNVTRLLRKQAEEVNTEWEKLNLHSADWQRKIDETLERLRELQEATDELDLKLRQAEVIKGSWQPVGDLLIDSLQDHLEKVKALRGEIAPLKENVSHVNDLARQLTTLGIQLSPYNLSTLEDLNTRWKLLQVAVEDRVRQLHEAHRDFGPASQHFLSTSVQGPWERAISPNKVPYYINHETQTTCWDHPKMTELYQSLADLNNVRFSAYRTAMKLRRLQKALCLDLLSLSAACDALDQHNLKQNDQPMDILQIINCLTTIYDRLEQEHNNLVNVPLCVDMCLNWLLNVYDTGRTGRIRVLSFKTGIISLCKAHLEDKYRYLFKQVASSTGFCDQRRLGLLLHDSIQIPRQLGEVASFGGSNIEPSVRSCFQFANNKPEIEAALFLDWMRLEPQSMVWLPVLHRVAAAETAKHQAKCNICKECPIIGFRYRSLKHFNYDICQSCFFSGRVAKGHKMHYPMVEYCTPTTSGEDVRDFAKVLKNKFRTKRYFAKHPRMGYLPVQTVLEGDNMETPVTLINFWPVDSAPASSPQLSHDDTHSRIEHYASRLAEMENSNGSYLNDSISPNESIDDEHLLIQHYCQSLNQDSPLSQPRSPAQILISLESEERGELERILADLEEENRNLQAEYDRLKQQHEHKGLSPLPSPPEMMPTSPQSPRDAELIAEAKLLRQHKGRLEARMQILEDHNKQLESQLHRLRQLLEQPQAEAKVNGTTVSSPSTSLQRSDSSQPMLLRVVGSQTSDSMGEEDLLSPPQDTSTGLEEVMEQLNNSFPSSRGHNVGSLFHMADDLGRAMESLVSVMTDEEGAE

SEQ ID NO: 44601 - protein, 3677 aa, Homo sapiens
ILDEREDVQKKTFTKWVNAQFSKFGKQHIENLFSDLQDGRRLLDLLEGLTGQKLPKEKGSTRVHALNNVNKALRVLQNNNVDLVNIGSTDIVDGNHKLTLGLIWNIILHWQVKNVMKNIMAGLQQTNSEKILLSWVRQSTRNYPQVNVINFTTSWSDGLALNALIHSHRPDLFDWNSVVCQQSATQRLEHAFNIARYQLGIEKLLDPEDVDTTYPDKKSILMYITSLFQVLPQQVSIEAIQEVEMLPRPPKVTKEEHFQLHHQMHYSQQITVSLAQGYERTSSPKPRFKSYAYTQAAYVTTSDPTRSPFPSQHLEAPEDKSFGSSLMESEVNLDRYQTALEEVLSWLLSAEDTLQAQGEISNDVEVVKDQFHTHEGYMMDLTAHQGRVGNILQLGSKLIGTGKLSEDEETEVQEQMNLLNSRWECLRVASMEKQSNLHRVLMDLQNQKLKELNDWLTKTEERTRKMEEEPLGPDLEDLKRQVQQHKVLQEDLEQEQVRVNSLTHMVVVVDESSGDHATAALEEQLKVLGDRWANICRWTEDRWVLLQDILLKWQRLTEEQCLFSAWLSEKEDAVNKIHTTGFKDQNEMLSSLQKLAVLKADLEKKKQSMGKLYSLKQDLLSTLKNKSVTQKTEAWLDNFARCWDNLVQKLEKSTAQISQAVTTTQPSLTQTTVMETVTTVTTREQILVKHAQEELPPPPPQKKRQITVDSEIRKRLDVDITELHSWITRSEAVLQSPEFAIFRKEGNFSDLKEKVNAIEREKAEKFRKLQDASRSAQALVEQMVNEGVNADSIKQASEQLNSRWIEFCQLLSERLNWLEYQNNIIAFYNQLQQLEQMTTTAENWLKIQPTTPSEPTAIKSQLKICKDEVNRLSDLQPQIERLKIQSIALKEKGQGPMFLDADFVAFTNHFKQVFSDVQAREKELQTIFDTLPPMRYQETMSAIRTWVQQSETKLSIPQLSVTDYEIMEQRLGELQALQSSLQEQQSGLYYLSTTVKEMSKKAPSEISRKYQSEFEEIEGRWKKLSSQLVEHCQKLEEQMNKLRKIQNHIQTLKKWMAEVDVFLKEEWPALGDSEILKKQLKQCRLLVSDIQTIQPSLNSVNEGGQKIKNEAEPEFASRLETELKELNTQWDHMCQQVYARKEALKGGLEKTVSLQKDLSEMHEWMTQAEEEYLERDFEYKTPDELQKAVEEMKRAKEEAQQKEAKVKLLTESVNSVIAQAPPVAQEALKKELETLTTNYQWLCTRLNGKCKTLEEVWACWHELLSYLEKANKWLNEVEFKLKTTENIPGGAEEISEVLDSLENLMRHSEDNPNQIRILAQTLTDGGVMDELINEELETFNSRWRELHEEAVRRQKLLEQSIQSAQETEKSLHLIQESLTFIDKQLAAYIADKVDAAQMPQEAQKIQSDLTSHEISLEEMKKHNQGKEAAQRVLSQIDVAQKKLQDVSMKFRLFQKPANFEQRLQESKMILDEVKMHLPALETKSVEQEVVQSQLNHCVNLYKSLSEVKSEVEMVIKTGRQIVQKKQTENPKELDERVTALKLHYNELGAKVTERKQQLEKCLKLSRKMRKEMNVLTEWLAATDMELTKRSAVEGMPSNLDSEVAWGKATQKEIEKQKVHLKSITEVGEALKTVLGKKETLVEDKLSLLNSNWIAVTSRAEEWLNLLLEYQKHMETFDQNVDHITKWIIQADTLLDESEKKKPQQKEDVLKRLKAELNDIRPKVDSTRDQAANLMANRGDHCRKLVEPQISELNHRFAAISHRIKTGKASIPLKELEQFNSDIQKLLEPLEAEIQQGVNLKEEDFNKDMNEDNEGTVKELLQRGDNLQQRITDERKREEIKIKQQLLQTKHNALKDLRSQRRKKALEISHQWYQYKRQADDLLKCLDDIEKKLASLPEPRDERKIKEIDRELQKKKEELNAVRRQAEGLSEDGAAMAVEPTQIQLSKRWREIESKFAQFRRLNFAQIHTVREETMMVMTEDMPLEISYVPSTYLTEITHVSQALLEVEQLLNAPDLCAKDFEDLFKQEESLKNIKDSLQQSSGRIDIIHSKKTAALQSATPVERVKLQEALSQLDFQWEKVNKMYKDRQGRFDRSVEKWRRFHYDIKIFNQWLTEAEQFLRKTQIPENWEHAKYKWYLKELQDGIGQRQTVVRTLNATGEEIIQQSSKTDASILQEKLGSLNLRWQEVCKQLSDRKKRLEEQKNILSEFQRDLNEFVLWLEEADNIASIPLEPGKEQQLKEKLEQVKLLVEELPLRQGILKQLNETGGPVLVSAPISPEEQDKLENKLKQTNLQWIKVSRALPEKQGEIEAQIKDLGQLEKKLEDLEEQLNHLLLWLSPIRNQLEIYNQPNQEGPFDVKETEIAVQAKQPDVEEILSKGQHLYKEKPATQPVKRKLEDLSSEWKAVNRLLQELRAKQPDLAPGLTTIGASPTQTVTLVTQPVVTKETAISKLEMPSSLMLEVPALADFNRAWTELTDWLSLLDQVIKSQRVMVGDLEDINEMIIKQKATMQDLEQRRPQLEELITAAQNLKNKTSNQEARTIITDRIERIQNQWDEVQEHLQNRRQQLNEMLKDSTQWLEAKEEAEQVLGQARAKLESWKEGPYTVDAIQKKITETKQLAKDLRQWQTNVDVANDLALKLLRDYSADDTRKVHMITENINASWRSIHKRVSEREAALEETHRLLQQFPLDLEKFLAWLTEAETTANVLQDATRKERLLEDSKGVKELMKQWQDLQGEIEAHTDVYHNLDENSQKILRSLEGSDDAVLLQRRLDNMNFKWSELRKKSLNIRSHLEASSDQWKRLHLSLQELLVWLQLKDDELSRQAPIGGDFPAVQKQNDVHRAFKRELKTKEPVIMSTLETVRIFLTEQPLEGLEKLYQEPRELPPEERAQNVTRLLRKQAEEVNTEWEKLNLHSADWQRKIDETLERLRELQEATDELDLKLRQAEVIKGSWQPVGDLLIDSLQDHLEKVKALRGEIAPLKENVSHVNDLARQLTTLGIQLSPYNLSTLEDLNTRWKLLQVAVEDRVRQLHEAHRDFGPASQHFLSTSVQGPWERAISPNKVPYYINHETQTTCWDHPKMTELYQSLADLNNVRFSAYRTAMKLRRLQKALCLDLLSLSAACDALDQHNLKQNDQPMDILQIINCLTTIYDRLEQEHNNLVNVPLCVDMCLNWLLNVYDTGRTGRIRVLSFKTGIISLCKAHLEDKYRYLFKQVASSTGFCDQRRLGLLLHDSIQIPRQLGEVASFGGSNIEPSVRSCFQFANNKPEIEAALFLDWMRLEPQSMVWLPVLHRVAAAETAKHQAKCNICKECPIIGFRYRSLKHFNYDICQSCFFSGRVAKGHKMHYPMVEYCTPTTSGEDVRDFAKVLKNKFRTKRYFAKHPRMGYLPVQTVLEGDNMETPVTLINFWPVDSAPASSPQLSHDDTHSRIEHYASRLAEMENSNGSYLNDSISPNESIDDEHLLIQHYCQSLNQDSPLSQPRSPAQILISLESEERGELERILADLEEENRNLQAEYDRLKQQHEHKGLSPLPSPPEMMPTSPQSPRDAELIAEAKLLRQHKGRLEARMQILEDHNKQLESQLHRLRQLLEQPQAEAKVNGTTVSSPSTSLQRSDSSQPMLLRVVGSQTSDSMGEEDLLSPPQDTSTGLEEVMEQLNNSFPSSRGRNTPGKPMREDTP

SEQ ID NO: 44602 - protein, 3562 aa, Homo sapiens
MKNIMAGLQQTNSEKILLSWVRQSTRNYPQVNVINFTTSWSDGLALNALIHSHRPDLFDWNSVVCQQSATQRLEHAFNIARYQLGIEKLLDPEDVDTTYPDKKSILMYITSLFQVLPQQVSIEAIQEVEMLPRPPKVTKEEHFQLHHQMHYSQQITVSLAQGYERTSSPKPRFKSYAYTQAAYVTTSDPTRSPFPSQHLEAPEDKSFGSSLMESEVNLDRYQTALEEVLSWLLSAEDTLQAQGEISNDVEVVKDQFHTHEGYMMDLTAHQGRVGNILQLGSKLIGTGKLSEDEETEVQEQMNLLNSRWECLRVASMEKQSNLHRVLMDLQNQKLKELNDWLTKTEERTRKMEEEPLGPDLEDLKRQVQQHKVLQEDLEQEQVRVNSLTHMVVVVDESSGDHATAALEEQLKVLGDRWANICRWTEDRWVLLQDILLKWQRLTEEQCLFSAWLSEKEDAVNKIHTTGFKDQNEMLSSLQKLAVLKADLEKKKQSMGKLYSLKQDLLSTLKNKSVTQKTEAWLDNFARCWDNLVQKLEKSTAQISQAVTTTQPSLTQTTVMETVTTVTTREQILVKHAQEELPPPPPQKKRQITVDSEIRKRLDVDITELHSWITRSEAVLQSPEFAIFRKEGNFSDLKEKVNAIEREKAEKFRKLQDASRSAQALVEQMVNEGVNADSIKQASEQLNSRWIEFCQLLSERLNWLEYQNNIIAFYNQLQQLEQMTTTAENWLKIQPTTPSEPTAIKSQLKICKDEVNRLSDLQPQIERLKIQSIALKEKGQGPMFLDADFVAFTNHFKQVFSDVQAREKELQTIFDTLPPMRYQETMSAIRTWVQQSETKLSIPQLSVTDYEIMEQRLGELQALQSSLQEQQSGLYYLSTTVKEMSKKAPSEISRKYQSEFEEIEGRWKKLSSQLVEHCQKLEEQMNKLRKIQNHIQTLKKWMAEVDVFLKEEWPALGDSEILKKQLKQCRLLVSDIQTIQPSLNSVNEGGQKIKNEAEPEFASRLETELKELNTQWDHMCQQVYARKEALKGGLEKTVSLQKDLSEMHEWMTQAEEEYLERDFEYKTPDELQKAVEEMKRAKEEAQQKEAKVKLLTESVNSVIAQAPPVAQEALKKELETLTTNYQWLCTRLNGKCKTLEEVWACWHELLSYLEKANKWLNEVEFKLKTTENIPGGAEEISEVLDSLENLMRHSEDNPNQIRILAQTLTDGGVMDELINEELETFNSRWRELHEEAVRRQKLLEQSIQSAQETEKSLHLIQESLTFIDKQLAAYIADKVDAAQMPQEAQKIQSDLTSHEISLEEMKKHNQGKEAAQRVLSQIDVAQKKLQDVSMKFRLFQKPANFEQRLQESKMILDEVKMHLPALETKSVEQEVVQSQLNHCVNLYKSLSEVKSEVEMVIKTGRQIVQKKQTENPKELDERVTALKLHYNELGAKVTERKQQLEKCLKLSRKMRKEMNVLTEWLAATDMELTKRSAVEGMPSNLDSEVAWGKATQKEIEKQKVHLKSITEVGEALKTVLGKKETLVEDKLSLLNSNWIAVTSRAEEWLNLLLEYQKHMETFDQNVDHITKWIIQADTLLDESEKKKPQQKEDVLKRLKAELNDIRPKVDSTRDQAANLMANRGDHCRKLVEPQISELNHRFAAISHRIKTGKASIPLKELEQFNSDIQKLLEPLEAEIQQGVNLKEEDFNKDMNEDNEGTVKELLQRGDNLQQRITDERKREEIKIKQQLLQTKHNALKDLRSQRRKKALEISHQWYQYKRQADDLLKCLDDIEKKLASLPEPRDERKIKEIDRELQKKKEELNAVRRQAEGLSEDGAAMAVEPTQIQLSKRWREIESKFAQFRRLNFAQIHTVREETMMVMTEDMPLEISYVPSTYLTEITHVSQALLEVEQLLNAPDLCAKDFEDLFKQEESLKNIKDSLQQSSGRIDIIHSKKTAALQSATPVERVKLQEALSQLDFQWEKVNKMYKDRQGRFDRSVEKWRRFHYDIKIFNQWLTEAEQFLRKTQIPENWEHAKYKWYLIALKDGIGQRQTVVRTLNATGEEIIQQSSKTDASILQEKLGSLNLRWQEVCKQLSDRKKRLEEQKNILSEFQRDLNEFVLWLEEADNIASIPLEPGKEQQLKEKLEQVKLLVEELPLRQGILKQLNETGGPVLVSAPISPEEQDKLENKLKQTNLQWIKVSRALPEKQGEIEAQIKDLGQLEKKLEDLEEQLNHLLLWLSPIRNQLEIYNQPNQEGPFDVKETEIAVQAKQPDVEEILSKGQHLYKEKPATQPVKRKLEDLSSEWKAVNRLLQELRAKQPDLAPGLTTIGASPTQTVTLVTQPVVTKETAISKLEMPSSLMLEVPALADFNRAWTELTDWLSLLDQVIKSQRVMVGDLEDINEMIIKQKATMQDLEQRRPQLEELITAAQNLKNKTSNQEARTIITDRIERIQNQWDEVQEHLQNRRQQLNEMLKDSTQWLEAKEEAEQVLGQARAKLESWKEGPYTVDAIQKKITETKQLAKDLRQWQTNVDVANDLALKLLRDYSADDTRKVHMITENINASWRSIHKRVSEREAALEETHRLLQQFPLDLEKFLAWLTEAETTANVLQDATRKERLLEDSKGVKELMKQWQDLQGEIEAHTDVYHNLDENSQKILRSLEGSDDAVLLQRRLDNMNFKWSELRKKSLNIRSHLEASSDQWKRLHLSLQELLVWLQLKDDELSRQAPIGGDFPAVQKQNDVHRAFKRELKTKEPVIMSTLETVRIFLTEQPLEGLEKLYQEPRELPPEERAQNVTRLLRKQAEEVNTEWEKLNLHSADWQRKIDETLERLRELQEATDELDLKLRQAEVIKGSWQPVGDLLIDSLQDHLEKVKALRGEIAPLKENVSHVNDLARQLTTLGIQLSPYNLSTLEDLNTRWKLLQVAVEDRVRQLHEAHRDFGPASQHFLSTSVQGPWERAISPNKVPYYINHETQTTCWDHPKMTELYQSLADLNNVRFSAYRTAMKLRRLQKALCLDLLSLSAACDALDQHNLKQNDQPMDILQIINCLTTIYDRLEQEHNNLVNVPLCVDMCLNWLLNVYDTGRTGRIRVLSFKTGIISLCKAHLEDKYRYLFKQVASSTGFCDQRRLGLLLHDSIQIPRQLGEVASFGGSNIEPSVRSCFQFANNKPEIEAALFLDWMRLEPQSMVWLPVLHRVAAAETAKHQAKCNICKECPIIGFRYRSLKHFNYDICQSCFFSGRVAKGHKMHYPMVEYCTPTTSGEDVRDFAKVLKNKFRTKRYFAKHPRMGYLPVQTVLEGDNMETPVTLINFWPVDSAPASSPQLSHDDTHSRIEHYASRLAEMENSNGSYLNDSISPNESIDDEHLLIQHYCQSLNQDSPLSQPRSPAQILISLESEERGELERILADLEEENRNLQAEYDRLKQQHEHKGLSPLPSPPEMMPTSPQSPRDAELIAEAKLLRQHKGRLEARMQILEDHNKQLESQLHRLRQLLEQPQAEAKVNGTTVSSPSTSLQRSDSSQPMLLRVVGSQTSDSMGEEDLLSPPQDTSTGLEEVMEQLNNSFPSSRGRNTPGKPMREDTM

SEQ ID NO: 44603 - protein, 1115 aa, Homo sapiens
MPSSLMLEVPALADFNRAWTELTDWLSLLDQVIKSQRVMVGDLEDINEMIIKQKATMQDLEQRRPQLEELITAAQNLKNKTSNQEARTIITDRIERIQNQWDEVQEHLQNRRQQLNEMLKDSTQWLEAKEEAEQVLGQARAKLESWKEGPYTVDAIQKKITETKQLAKDLRQWQTNVDVANDLALKLLRDYSADDTRKVHMITENINASWRSIHKRVSEREAALEETHRLLQQFPLDLEKFLAWLTEAETTANVLQDATRKERLLEDSKGVKELMKQWQDLQGEIEAHTDVYHNLDENSQKILRSLEGSDDAVLLQRRLDNMNFKWSELRKKSLNIRSHLEASSDQWKRLHLSLQELLVWLQLKDDELSRQAPIGGDFPAVQKQNDVHRAFKRELKTKEPVIMSTLETVRIFLTEQPLEGLEKLYQEPRELPPEERAQNVTRLLRKQAEEVNTEWEKLNLHSADWQRKIDETLERLRELQEATDELDLKLRQAEVIKGSWQPVGDLLIDSLQDHLEKVKALRGEIAPLKENVSHVNDLARQLTTLGIQLSPYNLSTLEDLNTRWKLLQVAVEDRVRQLHEAHRDFGPASQHFLSTSVQGPWERAISPNKVPYYINHETQTTCWDHPKMTELYQSLADLNNVRFSAYRTAMKLRRLQKALCLDLLSLSAACDALDQHNLKQNDQPMDILQIINCLTTIYDRLEQEHNNLVNVPLCVDMCLNWLLNVYDTGRTGRIRVLSFKTGIISLCKAHLEDKYRYLFKQVASSTGFCDQRRLGLLLHDSIQIPRQLGEVASFGGSNIEPSVRSCFQFANNKPEIEAALFLDWMRLEPQSMVWLPVLHRVAAAETAKHQAKCNICKECPIIGFRYRSLKHFNYDICQSCFFSGRVAKGHKMHYPMVEYCTPTTSGEDVRDFAKVLKNKFRTKRYFAKHPRMGYLPVQTVLEGDNMETNLQAEYDRLKQQHEHKGLSPLPSPPEMMPTSPQSPRDAELIAEAKLLRQHKGRLEARMQILEDHNKQLESQLHRLRQLLEQPQAEAKVNGTTVSSPSTSLQRSDSSQPMLLRVVGSQTSDSMGEEDLLSPPQDTSTGLEEVMEQLNNSFPSSRGRNTPGKPMREDTM

SEQ ID NO: 44604 - protein, 3685 aa, Homo sapiens
MLWWEEVEDCYEREDVQKKTFTKWVNAQFSKFGKQHIENLFSDLQDGRRLLDLLEGLTGQKLPKEKGSTRVHALNNVNKALRVLQNNNVDLVNIGSTDIVDGNHKLTLGLIWNIILHWQVKNVMKNIMAGLQQTNSEKILLSWVRQSTRNYPQVNVINFTTSWSDGLALNALIHSHRPDLFDWNSVVCQQSATQRLEHAFNIARYQLGIEKLLDPEDVDTTYPDKKSILMYITSLFQVLPQQVSIEAIQEVEMLPRPPKVTKEEHFQLHHQMHYSQQITVSLAQGYERTSSPKPRFKSYAYTQAAYVTTSDPTRSPFPSQHLEAPEDKSFGSSLMESEVNLDRYQTALEEVLSWLLSAEDTLQAQGEISNDVEVVKDQFHTHEGYMMDLTAHQGRVGNILQLGSKLIGTGKLSEDEETEVQEQMNLLNSRWECLRVASMEKQSNLHRVLMDLQNQKLKELNDWLTKTEERTRKMEEEPLGPDLEDLKRQVQQHKVLQEDLEQEQVRVNSLTHMVVVVDESSGDHATAALEEQLKVLGDRWANICRWTEDRWVLLQDILLKWQRLTEEQCLFSAWLSEKEDAVNKIHTTGFKDQNEMLSSLQKLAVLKADLEKKKQSMGKLYSLKQDLLSTLKNKSVTQKTEAWLDNFARCWDNLVQKLEKSTAQISQAVTTTQPSLTQTTVMETVTTVTTREQILVKHAQEELPPPPPQKKRQITVDSEIRKRLDVDITELHSWITRSEAVLQSPEFAIFRKEGNFSDLKEKVNAIEREKAEKFRKLQDASRSAQALVEQMVNEGVNADSIKQASEQLNSRWIEFCQLLSERLNWLEYQNNIIAFYNQLQQLEQMTTTAENWLKIQPTTPSEPTAIKSQLKICKDEVNRLSDLQPQIERLKIQSIALKEKGQGPMFLDADFVAFTNHFKQVFSDVQAREKELQTIFDTLPPMRYQETMSAIRTWVQQSETKLSIPQLSVTDYEIMEQRLGELQALQSSLQEQQSGLYYLSTTVKEMSKKAPSEISRKYQSEFEEIEGRWKKLSSQLVEHCQKLEEQMNKLRKIQNHIQTLKKWMAEVDVFLKEEWPALGDSEILKKQLKQCRLLVSDIQTIQPSLNSVNEGGQKIKNEAEPEFASRLETELKELNTQWDHMCQQVYARKEALKGGLEKTVSLQKDLSEMHEWMTQAEEEYLERDFEYKTPDELQKAVEEMKRAKEEAQQKEAKVKLLTESVNSVIAQAPPVAQEALKKELETLTTNYQWLCTRLNGKCKTLEEVWACWHELLSYLEKANKWLNEVEFKLKTTENIPGGAEEISEVLDSLENLMRHSEDNPNQIRILAQTLTDGGVMDELINEELETFNSRWRELHEEAVRRQKLLEQSIQSAQETEKSLHLIQESLTFIDKQLAAYIADKVDAAQMPQEAQKIQSDLTSHEISLEEMKKHNQGKEAAQRVLSQIDVAQKKLQDVSMKFRLFQKPANFEQRLQESKMILDEVKMHLPALETKSVEQEVVQSQLNHCVNLYKSLSEVKSEVEMVIKTGRQIVQKKQTENPKELDERVTALKLHYNELGAKVTERKQQLEKCLKLSRKMRKEMNVLTEWLAATDMELTKRSAVEGMPSNLDSEVAWGKATQKEIEKQKVHLKSITEVGEALKTVLGKKETLVEDKLSLLNSNWIAVTSRAEEWLNLLLEYQKHMETFDQNVDHITKWIIQADTLLDESEKKKPQQKEDVLKRLKAELNDIRPKVDSTRDQAANLMANRGDHCRKLVEPQISELNHRFAAISHRIKTGKASIPLKELEQFNSDIQKLLEPLEAEIQQGVNLKEEDFNKDMNEDNEGTVKELLQRGDNLQQRITDERKREEIKIKQQLLQTKHNALKDLRSQRRKKALEISHQWYQYKRQADDLLKCLDDIEKKLASLPEPRDERKIKEIDRELQKKKEELNAVRRQAEGLSEDGAAMAVEPTQIQLSKRWREIESKFAQFRRLNFAQIHTVREETMMVMTEDMPLEISYVPSTYLTEITHVSQALLEVEQLLNAPDLCAKDFEDLFKQEESLKNIKDSLQQSSGRIDIIHSKKTAALQSATPVERVKLQEALSQLDFQWEKVNKMYKDRQGRFDRSVEKWRRFHYDIKIFNQWLTEAEQFLRKTQIPENWEHAKYKWYLIALKDGIGQRQTVVRTLNATGEEIIQQSSKTDASILQEKLGSLNLRWQEVCKQLSDRKKRLEEQKNILSEFQRDLNEFVLWLEEADNIASIPLEPGKEQQLKEKLEQVKLLVEELPLRQGILKQLNETGGPVLVSAPISPEEQDKLENKLKQTNLQWIKVSRALPEKQGEIEAQIKDLGQLEKKLEDLEEQLNHLLLWLSPIRNQLEIYNQPNQEGPFDVKETEIAVQAKQPDVEEILSKGQHLYKEKPATQPVKRKLEDLSSEWKAVNRLLQELRAKQPDLAPGLTTIGASPTQTVTLVTQPVVTKETAISKLEMPSSLMLEVPALADFNRAWTELTDWLSLLDQVIKSQRVMVGDLEDINEMIIKQKATMQDLEQRRPQLEELITAAQNLKNKTSNQEARTIITDRIERIQNQWDEVQEHLQNRRQQLNEMLKDSTQWLEAKEEAEQVLGQARAKLESWKEGPYTVDAIQKKITETKQLAKDLRQWQTNVDVANDLALKLLRDYSADDTRKVHMITENINASWRSIHKRVSEREAALEETHRLLQQFPLDLEKFLAWLTEAETTANVLQDATRKERLLEDSKGVKELMKQWQDLQGEIEAHTDVYHNLDENSQKILRSLEGSDDAVLLQRRLDNMNFKWSELRKKSLNIRSHLEASSDQWKRLHLSLQELLVWLQLKDDELSRQAPIGGDFPAVQKQNDVHRAFKRELKTKEPVIMSTLETVRIFLTEQPLEGLEKLYQEPRELPPEERAQNVTRLLRKQAEEVNTEWEKLNLHSADWQRKIDETLERLRELQEATDELDLKLRQAEVIKGSWQPVGDLLIDSLQDHLEKVKALRGEIAPLKENVSHVNDLARQLTTLGIQLSPYNLSTLEDLNTRWKLLQVAVEDRVRQLHEAHRDFGPASQHFLSTSVQGPWERAISPNKVPYYINHETQTTCWDHPKMTELYQSLADLNNVRFSAYRTAMKLRRLQKALCLDLLSLSAACDALDQHNLKQNDQPMDILQIINCLTTIYDRLEQEHNNLVNVPLCVDMCLNWLLNVYDTGRTGRIRVLSFKTGIISLCKAHLEDKYRYLFKQVASSTGFCDQRRLGLLLHDSIQIPRQLGEVASFGGSNIEPSVRSCFQFANNKPEIEAALFLDWMRLEPQSMVWLPVLHRVAAAETAKHQAKCNICKECPIIGFRYRSLKHFNYDICQSCFFSGRVAKGHKMHYPMVEYCTPTTSGEDVRDFAKVLKNKFRTKRYFAKHPRMGYLPVQTVLEGDNMETPVTLINFWPVDSAPASSPQLSHDDTHSRIEHYASRLAEMENSNGSYLNDSISPNESIDDEHLLIQHYCQSLNQDSPLSQPRSPAQILISLESEERGELERILADLEEENRNLQAEYDRLKQQHEHKGLSPLPSPPEMMPTSPQSPRDAELIAEAKLLRQHKGRLEARMQILEDHNKQLESQLHRLRQLLEQPQAEAKVNGTTVSSPSTSLQRSDSSQPMLLRVVGSQTSDSMGEEDLLSPPQDTSTGLEEVMEQLNNSFPSSRGRNTPGKPMREDTM

SEQ ID NO: 44605 - protein, 957 aa, Homo sapiens
MQPMVMQGCPYTLPRCHDWQAADQFHHSSSLRSTCPHPQVRAAVTSPAPPQDGAGVPCLSLKLLNGSVGASGPLEPPAMNLCWNEIKKKSHNLRARLEAFSDHSGKLQLPLQEIIDWLSQKDEELSAQLPLQGDVALVQQEKETHAAFMEEVKSRGPYIYSVLESAQAFLSQHPFEELEEPHSESKDTSPKQRIQNLSRFVWKQATVASELWEKLTARCVDQHRHIERTLEQLLEIQGAMEELSTTLSQAEGVRATWEPIGDLFIDSLPEHIQAIKLFKEEFSPMKDGVKLVNDLAHQLAISDVHLSMENSQALEQINVRWKQLQASVSERLKQLQDAHRDFGPGSQHFLSSSVQVPWERAISPNKVPYYINHQAQTTCWDHPKMTELYQTLADLNNIKFSAYRTAMKLRRVQKALRLDLVTLTTALEIFNEHDLQASEHVMDVVEVIHCLTALYERLEEERGILVNVPLCVDMSLNWLLNVFDSGRSGKMRALSFKTGIACLCGTEVKEKLQYLFSQVANSGSQCDQRHLGVLLHEAIQVPRQLGEVAAFGGSNVEPSVRSCFRFSTGKPVIEASQFLEWVNLEPQSMVWLAVLHRVTIAEQVKHQTKCSICRQCPIKGFRYRSLKQFNVDICQTCFLTGRASKGNKLHYPIMEYYTPTTSSENMRDFATTLKNKFRSKHYFSKHPQRGYLPVQSVLEADYSETPASSPMWPHADTHSRIEHFASRLAEMESQNCSFFNDSLSPDDSIDEDQYLLRHSSPITDREPAFGQQAPCSVATESKGELQKILAHLEDENRILQGELRRLKWQHEEAAEAPSLADGSTEAATDHRNEELLAEARILRQHKSRLETRMQILEDHNKQLESQLQRLRELLLQPPTESDGSGSAGSSLASSPQQSEGSHPREKGQTTPDTEAADDVGSKSQDVSLCLEDIMEKLRHAFPSVRSSDVTANTLLAS

SEQ ID NO: 44606 - protein, 957 aa, Homo sapiens; identical to SEQ ID NO: 44605

SEQ ID NO: 44607 - protein, 957 aa, Homo sapiens; identical to SEQ ID NO: 44605

SEQ ID NO: 44608 - protein, 879 aa, Homo sapiens
MNLCWNEIKKKSHNLRARLEAFSDHSGKLQLPLQEIIDWLSQKDEELSAQLPLQGDVALVQQEKETHAAFMEEVKSRGPYIYSVLESAQAFLSQHPFEELEEPHSESKDTSPKQRIQNLSRFVWKQATVASELWEKLTARCVDQHRHIERTLEQLLEIQGAMEELSTTLSQAEGVRATWEPIGDLFIDSLPEHIQAIKLFKEEFSPMKDGVKLVNDLAHQLAISDVHLSMENSQALEQINVRWKQLQASVSERLKQLQDAHRDFGPGSQHFLSSSVQVPWERAISPNKVPYYINHQAQTTCWDHPKMTELYQTLADLNNIKFSAYRTAMKLRRVQKALRLDLVTLTTALEIFNEHDLQASEHVMDVVEVIHCLTALYERLEEERGILVNVPLCVDMSLNWLLNVFDSGRSGKMRALSFKTGIACLCGTEVKEKLQYLFSQVANSGSQCDQRHLGVLLHEAIQVPRQLGEVAAFGGSNVEPSVRSCFRFSTGKPVIEASQFLEWVNLEPQSMVWLAVLHRVTIAEQVKHQTKCSICRQCPIKGFRYRSLKQFNVDICQTCFLTGRASKGNKLHYPIMEYYTPTTSSENMRDFATTLKNKFRSKHYFSKHPQRGYLPVQSVLEADYSETPASSPMWPHADTHSRIEHFASRLAEMESQNCSFFNDSLSPDDSIDEDQYLLRHSSPITDREPAFGQQAPCSVATESKGELQKILAHLEDENRILQGELRRLKWQHEEAAEAPSLADGSTEAATDHRNEELLAEARILRQHKSRLETRMQILEDHNKQLESQLQRLRELLLQPPTESDGSGSAGSSLASSPQQSEGSHPREKGQTTPDTEAADDVGSKSQDVSLCLEDIMEKLRHAFPSVRSSDVTANTLLAS

SEQ ID NO: 44609 - protein, 3042 aa, Homo sapiens
MHHGTGPQNVQHQLQRSRACPGSEGEEQPAHPNPPPSPAAPFAPSASPSAPQSPSYQIQQLMNRSPATGQNVNITLQSVGPVVGGNQQITLAPLPLPSPTSPGFQFSAQPRRFEHGSPSYIQVTSPLSQQVQTQSPTQPSPGPGQALQNVRAGAPGPGLGLCSSSPTGGFVDASVLVRQISLSPSSGGHFVFQDGSGLTQIAQGAQVQLQHPGTPITVRERRPSQPHTQSGGTIHHLGPQSPAAAGGAGLQPLASPSHITTANLPPQISSIIQGQLVQQQQVLQGPPLPRPLGFERTPGVLLPGAGGAAGFGMTSPPPPTSPSRTAVPPGLSSLPLTSVGNTGMKKVPKKLEEIPPASPEMAQMRKQCLDYHYQEMQALKEVFKEYLIELFFLQHFQGNMMDFLAFKKKHYAPLQAYLRQNDLDIEEEEEEEEEEEEKSEVINDEQQALAGSLVAGAGSTVETDLFKRQQAMPSTGMAEQSKRPRLEVGHQGVVFQHPGADAGVPLQQLMPTAQGGMPPTPQAAQLAGQRQSQQQYDPSTGPPVQNAASLHTPLPQLPGRLPPAGVPTAALSSALQFAQQPQVVEAQTQLQIPVKTQQPNVPIPAPPSSQLPIPPSQPAQLALHVPTPGKVQVQASQLSSLPQMVASTRLPVDPAPPCPRPLPTSSTSSLAPVSGSGPGPSPARSSPVNRPSSATNKALSPVTSRTPGVVASAPTKPQSPAQNATSSQDSSQDTLTEQITLENQVHQRIAELRKAGLWSQRRLPKLQEAPRPKSHWDYLLEEMQWMATDFAQERRWKVAAAKKLVRTVVRHHEEKQLREERGKKEEQSRLRRIAASTAREIECFWSNIEQVVEIKLRVELEEKRKKALNLQKVSRRGKELRPKGFDALQESSLDSGMSGRKRKASISLTDDEVDDEEETIEEEEANEGVVDHQTELSNLAKEAELPLLDLMKLYEGAFLPSSQWPRPKPDGEDTSGEEDADDCPGDRESRKDLVLIDSLFIMDQFKAAERMNIGKPNAKDIADVTAVAEAILPKGSARVTTSVKFNAPSLLYGALRDYQKIGLDWLAKLYRKNLNGILADEAGLGKTVQIIAFFAHLACNEGNWGPHLVVVRSCNILKWELELKRWCPGLKILSYIGSHRELKAKRQEWAEPNSFHVCITSYTQFFRGLTAFTRVRWKCLVIDEMQRVKGMTERHWEAVFTLQSQQRLLLIDSPLHNTFLELWTMVHFLVPGISRPYLSSPLRAPSEESQDYYHKVVIRLHRVTQPFILRRTKRDVEKQLTKKYEHVLKCRLSNRQKALYEDVILQPGTQEALKSGHFVNVLSILVRLQRICNHPGLVEPRHPGSSYVAGPLEYPSASLILKALERDFWKEADLSMFDLIGLENKITRHEAELLSKKKIPRKLMEEISTSAAPAARPAAAKLKASRLFQPVQYGQKPEGRTVAFPSTHPPRTAAPTTASAAPQGPLRGRPPIATFSANPEAKGGEVVKIAQLASITGPQSRVAQPETPVTLQFQGSKFTLSHSQLRQLTAGQPLQLQGSVLQIVSAPGQPYLRAPGPVVMQTVSQAGAVHGALGSKPPAGGPSPAPLTPQVGVPGRVAVNALAVGEPGTASKPASPIGGPTQEEKTRLLKERLDQIYLVNERRCSQAPVYGRDLLRICALPSHGRVQWRGSLDGRRGKEAGPAHSYTSSSESPSELMLTLCRCGESLQDVIDRVAFVIPPVVAAPPSLRVPRPPPLYSHRMRILRQGLREHAAPYFQQLRQTTAPRLLQFPELRLVQFDSGKLEALAILLQKLKSEGRRVLILSQMILMLDILEMFLNFHYLTYVRIDENASSEQRQELMRSFNRDRRIFCAILSTHSRTTGINLVEADTVVFYDNDLNPVMDAKAQEWCDRIGRCKDIHIYRLVSGNSIEEKLLKNGTKDLIREVAAQGNDYSMAFLTQRTIQELFEVYSPMDDAGFPVKAEEFVVLSQEPSVTETIAPKIARPFIEALKSIEYLEEDAQKSAQEGVLGPHTDALSSDSENMPCDEEPSQLEELADFMEQLTPIEKYALNYLELFHTSIEQEKERNSEDAVMTAVRAWEFWNLKTLQEREARLRLEQEEAELLTYTREDAYSMEYVYEDVDGQTEVMPLWTPPTPPQDDSDIYLDSVMCLMYEATPIPEAKLPPVYVRKERKRHKTDPSAAGRKKKQRHGEAVVPPRSLFDRATPGLLKIRREGKEQKKNILLKQQVPFAKPLPTFAKPTAEPGQDNPEWLISEDWALLQAVKQLLELPLNLTIVSPAHTPNWDLVSDVVNSCSRIYRSSKQCRNRYENVIIPREEGKSKNNRPLRTSQIYAQDENATHTQLYTSHFDLMKMTAGKRSPPIKPLLGMNPFQKNPKHASVLAESGINYDKPLPPIQVASLRAERIAKEKKALADQQKAQQPAVAQPPPPQPQPPPPPQQPPPPLPQPQAAGSQPPAGPPAVQPQPQPQPQTQPQPVQAPAKAQPAITTGGSAAVLAGTIKTSVTGTSMPTGAVSGNVIVNTIAGVPAATFQSINKRLASPVAPGALTTPGGSAPAQVVHTQPPPRAVGSPATATPDLVSMATTQGVRAVTSVTASAVVTTNLTPVQTPARSLVPQVSQATGVQLPGKTITPAHFQLLRQQQQQQQQQQQQQQQQQQQQQQQQQQQQQTTTTSQVQVPQIQGQAQSPAQIKAVGKLTPEHLIKMQKQKLQMPPQPPPPQAQSAPPQPTAQVQVQTSQPPQQQSPQLTTVTAPRPGALLTGTTVANLQVARLTRVPTSQLQAQGQMQTQAPQPAQVALAKPPVVSVPAAVVSSPGVTTLPMNVAGISVAIGQPQKAAGQTVVAQPVHMQQLLKLKQQAVQQQKAIQPQAAQGPAAVQQKITAQQITTPGAQQKVAYAAQPALKTQFLTTPISQAQKLAGAQQVQTQIQVAKLPQVVQQQTPVASIQQVASASQQASPQTVALTQATAAGQQVQMIPAVTATAQVVQQKLIQQQVVTTASAPLQTPGAPNPAQVPASSDSPSQQPKLQMRVPAVRLKTPTKPPCQ

SEQ ID NO: 44610 - protein, 3086 aa, Homo sapiens
MHHGTGPQNVQHQLQRSRACPGSEGEEQPAHPNPPPSPAAPFAPSASPSAPQSPSYQIQQLMNRSPATGQNVNITLQSVGPVVGGNQQITLAPLPLPSPTSPGFQFSAQPRRFEHGSPSYIQVTSPLSQQVQTQSPTQPSPGPGQALQNVRAGAPGPGLGLCSSSPTGGFVDASVLVRQISLSPSSGGHFVFQDGSGLTQIAQGAQVQLQHPGTPITVRERRPSQPHTQSGGTIHHLGPQSPAAAGGAGLQPLASPSHITTANLPPQISSIIQGQLVQQQQVLQGPPLPRPLGFERTPGVLLPGAGGAAGFGMTSPPPPTSPSRTAVPPGLSSLPLTSVGNTGMKKVPKKLEEIPPASPEMAQMRKQCLDYHYQEMQALKEVFKEYLIELFFLQHFQGNMMDFLAFKKKHYAPLQAYLRQNDLDIEEEEEEEEEEEEKSEVINDEQALAGSLVAGAGSTVETDLFKRQQAMPSTGMAGGMPPTPQAAQLAGQRQSQQQYDPSTGPPVQNAASLHTPLPQLPGRLPPAGVPTAALSSALQFAQQPQVVEAQTQLQIPVKTQQPNVPIPAPPSSQLPIPPSQPAQLALHVPTPGKVQVQASQLSSLPQMVASTRLPVDPAPPCPRPLPTSSTSSLAPVSGSGPGPSPARSSPVNRPSSATNKALSPVTSRTPGVVASAPTKPQSPAQNATSSQDSSQDTLTEQITLENQVHQRIAELRKAGLWSQRRLPKLQEAPRPKSHWDYLLEEMQWMATDFAQERRWKVAAAKKLVRTVVRHHEEKQLREERGKKEEQSRLRRIAASTAREIECFWSNIEQVVEIKLRVELEEKRKKALNLQKVSRRGKELRPKGFDALQESSLDSGMSGRKRKASISLTDDEVDDEEETIEEEEANEGVVDHQTELSNLAKEAELPLLDLMKLYEGAFLPSSQWPRPKPDGEDTSGEEDADDCPGDRESRKDLVLIDSLFIMDQFKAAERMNIGKPNAKDIADVTAVAEAILPKGSARVTTSVKFNAPSLLYGALRDYQKIGLDWLAKLYRKNLNGILADEAGLGKTVQIIAFFAHLACNEGNWGPHLVVVRSCNILKWELELKRWCPGLKILSYIGSHRELKAKRQEWAEPNSFHVCITSYTQFFRGLTAFTRVRWKCLVIDEMQRVKGMTERHWEAVFTLQSQQRLLLIDSPLHNTFLELWTMVHFLVPGISRPYLSSPLRAPSEESQDYYHKVVIRLHRVTQPFILRRTKRDVEKQLTKKYEHVLKCRLSNRQKALYEDVILQPGTQEALKSGHFVNVLSILVRLQRICNHPGLVEPRHPGSSYVAGPLEYPSASLILKALERDFWKEADLSMFDLIGLENKITRHEAELLSKKKIPRKLMEEISTSAAPAARPAAAKLKASRLFQPVQYGQKPEGRTVAFPSTHPPRTAAPTTASAAPQGPLRGRPPIATFSANPEAKAAAAPFQTSQASASAPRHQPASASSTAASPAHPAKLRAQTTAQASTPGQPPPQPQAPSHAAGQSALPQRLVLPSQAQARLPSGEVVKIAQLASITGPQSRVAQPETPVTLQFQGSKFTLSHSQLRQLTAGQPLQLQGSVLQIVSAPGQPYLRAPGPVVMQTVSQAGAVHGALGSKPPAGGPSPAPLTPQVGVPGRVAVNALAVGEPGTASKPASPIGGPTQEEKTRLLKERLDQIYLVNERRCSQAPVYGRDLLRICALPSHGRVQWRGSLDGRRGKEAGPAHSYTSSSESPSELMLTLCRCGESLQDVIDRVAFVIPPVVAAPPSLRVPRPPPLYSHRMRILRQGLREHAAPYFQQLRQTTAPRLLQFPELRLVQFDSGKLEALAILLQKLKSEGRRVLILSQMILMLDILEMFLNFHYLTYVRIDENASSEQRQELMRSFNRDRRIFCAILSTHSRTTGINLVEADTVVFYDNDLNPVMDAKAQEWCDRIGRCKDIHIYRLVSGNSIEEKLLKNGTKDLIREVAAQGNDYSMAFLTQRTIQELFEVYSPMDDAGFPVKAEEFVVLSQEPSVTETIAPKIARPFIEALKSIEYLEEDAQKSAQEGVLGPHTDALSSDSENMPCDEEPSQLEELADFMEQLTPIEKYALNYLELFHTSIEQEKERNSEDAVMTAVRAWEFWNLKTLQEREARLRLEQEEAELLTYTREDAYSMEYVYEDVDGQTEVMPLWTPPTPPQDDSDIYLDSVMCLMYEATPIPEAKLPPVYVRKERKRHKTDPSAAGRKKKQRHGEAVVPPRSLFDRATPGLLKIRREGKEQKKNILLKQQVPFAKPLPTFAKPTAEPGQDNPEWLISEDWALLQAVKQLLELPLNLTIVSPAHTPNWDLVSDVVNSCSRIYRSSKQCRNRYENVIIPREEGKSKNNRPLRTSQIYAQDENATHTQLYTSHFDLMKMTAGKRSPPIKPLLGMNPFQKNPKHASVLAESGINYDKPLPPIQVASLRAERIAKEKKALADQQKAQQPAVAQPPPPQPQPPPPPQQPPPPLPQPQAAGSQPPAGPPAVQPQPQPQPQTQPQPVQAPAKAQPAITTGGSAAVLAGTIKTSVTGTSMPTGAVSGNVIVNTIAGVPAATFQSINKRLASPVAPGALTTPGGSAPAQVVHTQPPPRAVGSPATATPDLVSMATTQGVRAVTSVTASAVVTTNLTPVQTPARSLVPQVSQATGVQLPGKTITPAHFQLLRQQQQQQQQQQQQQQQQQQQQQQQQQQQQQTTTTSQVQVPQIQGQAQSPAQIKAVGKLTPEHLIKMQKQKLQMPPQPPPPQAQSAPPQPTAQVQVQTSQPPQQQSPQLTTVTAPRPGALLTGTTVANLQVARLTRVPTSQLQAQGQMQTQAPQPAQVALAKPPVVSVPAAVVSSPGVTTLPMNVAGISVAIGQPQKAAGQTVVAQPVHMQQLLKLKQQAVQQQKAIQPQAAQGPAAVQQKITAQQITTPGAQQKVAYAAQPALKTQFLTTPISQAQKLAGAQQVQTQIQVAKLPQVVQQQTPVASIQQVASASQQASPQTVALTQATAAGQQVQMIPAVTATAQVVQQKLIQQQVVTTASAPLQTPGAPNPAQVPASSDSPSQQPKLQMRVPAVRLKTPTKPPCQ

SEQ ID NO: 44611 - protein, 3159 aa, Homo sapiens
MHHGTGPQNVQHQLQRSRACPGSEGEEQPAHPNPPPSPAAPFAPSASPSAPQSPSYQIQQLMNRSPATGQNVNITLQSVGPVVGGNQQITLAPLPLPSPTSPGFQFSAQPRRFEHGSPSYIQVTSPLSQQVQTQSPTQPSPGPGQALQNVRAGAPGPGLGLCSSSPTGGFVDASVLVRQISLSPSSGGHFVFQDGSGLTQIAQGAQVQLQHPGTPITVRERRPSQPHTQSGGTIHHLGPQSPAAAGGAGLQPLASPSHITTANLPPQISSIIQGQLVQQQQVLQGPPLPRPLGFERTPGVLLPGAGGAAGFGMTSPPPPTSPSRTAVPPGLSSLPLTSVGNTGMKKVPKKLEEIPPASPEMAQMRKQCLDYHYQEMQALKEVFKEYLIELFFLQHFQGNMMDFLAFKKKHYAPLQAYLRQNDLDIEEEEEEEEEEEEKSEVINDEVKVVTGKDGQTGTPVAIATQLPPKVSAAFSSQQQPFQQALAGSLVAGAGSTVETDLFKRQQAMPSTGMAEQSKRPRLEVGHQGVVFQHPGADAGVPLQQLMPTAQGGMPPTPQAAQLAGQRQSQQQYDPSTGPPVQNAASLHTPLPQLPGRLPPAGVPTAALSSALQFAQQPQVVEAQTQLQIPVKTQQPNVPIPAPPSSQLPIPPSQPAQLALHVPTPGKVQVQASQLSSLPQMVASTRLPVDPAPPCPRPLPTSSTSSLAPVSGSGPGPSPARSSPVNRPSSATNKALSPVTSRTPGVVASAPTKPQSPAQNATSSQDSSQDTLTEQITLENQVHQRIAELRKAGLWSQRRLPKLQEAPRPKSHWDYLLEEMQWMATDFAQERRWKVAAAKKLVRTVVRHHEEKQLREERGKKEEQSRLRRIAASTAREIECFWSNIEQVVEIKLRVELEEKRKKALNLQKVSRRGKELRPKGFDALQESSLDSGMSGRKRKASISLTDDEVDDEEETIEEEEANEGVVDHQTELSNLAKEAELPLLDLMKLYEGAFLPSSQWPRPKPDGEDTSGEEDADDCPGDRESRKDLVLIDSLFIMDQFKAAERMNIGKPNAKDIADVTAVAEAILPKGSARVTTSVKFNAPSLLYGALRDYQKIGLDWLAKLYRKNLNGILADEAGLGKTVQIIAFFAHLACNEGNWGPHLVVVRSCNILKWELELKRWCPGLKILSYIGSHRELKAKRQEWAEPNSFHVCITSYTQFFRGLTAFTRVRWKCLVIDEMQRVKGMTERHWEAVFTLQSQQRLLLIDSPLHNTFLELWTMVHFLVPGISRPYLSSPLRAPSEESQDYYHKVVIRLHRVTQPFILRRTKRDVEKQLTKKYEHVLKCRLSNRQKALYEDVILQPGTQEALKSGHFVNVLSILVRLQRICNHPGLVEPRHPGSSYVAGPLEYPSASLILKALERDFWKEADLSMFDLIGLENKITRHEAELLSKKKIPRKLMEEISTSAAPAARPAAAKLKASRLFQPVQYGQKPEGRTVAFPSTHPPRTAAPTTASAAPQGPLRGRPPIATFSANPEAKAAAAPFQTSQASASAPRHQPASASSTAASPAHPAKLRAQTTAQASTPGQPPPQPQAPSHAAGQSALPQRLVLPSQAQARLPSGEVVKIAQLASITGPQSRVAQPETPVTLQFQGSKFTLSHSQLRQLTAGQPLQLQGSVLQIVSAPGQPYLRAPGPVVMQTVSQAGAVHGALGSKPPAGGPSPAPLTPQVGVPGRVAVNALAVGEPGTASKPASPIGGPTQEEKTRLLKERLDQIYLVNERRCSQAPVYGRDLLRICALPSHGRVQWRGSLDGRRGKEAGPAHSYTSSSESPSELMLTLCRCGESLQDVIDRVAFVIPPVVAAPPSLRVPRPPPLYSHRMRILRQGLREHAAPYFQQLRQTTAPRLLQFPELRLVQFDSGKLEALAILLQKLKSEGRRVLILSQMILMLDILEMFLNFHYLTYVRIDENASSEQRQELMRSFNRDRRIFCAILSTHSRTTGINLVEADTVVFYDNDLNPVMDAKAQEWCDRIGRCKDIHIYRLVSGNSIEEKLLKNGTKDLIREVAAQGNDYSMAFLTQRTIQELFEVYSPMDDAGFPVKAEEFVVLSQEPSVTETIAPKIARPFIEALKSIEYLEEDAQKSAQEGVLGPHTDALSSDSENMPCDEEPSQLEELADFMEQLTPIEKYALNYLELFHTSIEQEKERNSEDAVMTAVRAWEFWNLKTLQEREARLRLEQEEAELLTYTREDAYSMEYVYEDVDGQTEVMPLWTPPTPPQDDSDIYLDSVMCLMYEATPIPEAKLPPVYVRKERKRHKTDPSAAGRKKKQRHGEAVVPPRSLFDRATPGLLKIRREGKEQKKNILLKQQVPFAKPLPTFAKPTAEPGQDNPEWLISEDWALLQAVKQLLELPLNLTIVSPAHTPNWDLVSDVVNSCSRIYRSSKQCRNRYENVIIPREEGKSKNNRPLRTSQIYAQDENATHTQLYTSHFDLMKMTAGKRSPPIKPLLGMNPFQKNPKHASVLAESGINYDKPLPPIQVASLRAERIAKEKKALADQQKAQQPAVAQPPPPQPQPPPPPQQPPPPLPQPQAAGSQPPAGPPAVQPQPQPQPQTQPQPVQAPAKAQPAITTGGSAAVLAGTIKTSVTGTSMPTGAVSGNVIVNTIAGVPAATFQSINKRLASPVAPGALTTPGGSAPAQVVHTQPPPRAVGSPATATPDLVSMATTQGVRAVTSVTASAVVTTNLTPVQTPARSLVPQVSQATGVQLPGKTITPAHFQLLRQQQQQQQQQQQQQQQQQQQQQQQQQQQQQTTTTSQVQVPQIQGQAQSPAQIKAVGKLTPEHLIKMQKQKLQMPPQPPPPQAQSAPPQPTAQVQVQTSQPPQQQSPQLTTVTAPRPGALLTGTTVANLQVARLTRVPTSQLQAQGQMQTQAPQPAQVALAKPPVVSVPAAVVSSPGVTTLPMNVAGISVAIGQPQKAAGQTVVAQPVHMQQLLKLKQQAVQQQKAIQPQAAQGPAAVQQKITAQQITTPGAQQKVAYAAQPALKTQFLTTPISQAQKLAGAQQVQTQIQVAKLPQVVQQQTPVASIQQVASASQQASPQTVALTQATAAGQQVQMIPAVTATAQVVQQKLIQQQVVTTASAPLQTPGAPNPAQVPASSDSPSQQPKLQMRVPAVRLKTPTKPPCQ

SEQ ID NO: 44612 - protein, 3123 aa, Homo sapiens
MHHGTGPQNVQHQLQRSRACPGSEGEEQPAHPNPPPSPAAPFAPSASPSAPQSPSYQIQQLMNRSPATGQNVNITLQSVGPVVGGNQQITLAPLPLPSPTSPGFQFSAQPRRFEHGSPSYIQVTSPLSQQVQTQSPTQPSPGPGQALQNVRAGAPGPGLGLCSSSPTGGFVDASVLVRQISLSPSSGGHFVFQDGSGLTQIAQGAQVQLQHPGTPITVRERRPSQPHTQSGGTIHHLGPQSPAAAGGAGLQPLASPSHITTANLPPQISSIIQGQLVQQQQVLQGPPLPRPLGFERTPGVLLPGAGGAAGFGMTSPPPPTSPSRTAVPPGLSSLPLTSVGNTGMKKVPKKLEEIPPASPEMAQMRKQCLDYHYQEMQALKEVFKEYLIELFFLQHFQGNMMDFLAFKKKHYAPLQAYLRQNDLDIEEEEEEEEEEEEKSEVINDEQQALAGSLVAGAGSTVETDLFKRQQAMPSTGMAEQSKRPRLEVGHQGVVFQHPGADAGVPLQQLMPTAQGGMPPTPQAAQLAGQRQSQQQYDPSTGPPVQNAASLHTPLPQLPGRLPPAGVPTAALSSALQFAQQPQVVEAQTQLQIPVKTQQPNVPIPAPPSSQLPIPPSQPAQLALHVPTPGKVQVQASQLSSLPQMVASTRLPVDPAPPCPRPLPTSSTSSLAPVSGSGPGPSPARSSPVNRPSSATNKALSPVTSRTPGVVASAPTKPQSPAQNATSSQDSSQDTLTEQITLENQVHQRIAELRKAGLWSQRRLPKLQEAPRPKSHWDYLLEEMQWMATDFAQERRWKVAAAKKLVRTVVRHHEEKQLREERGKKEEQSRLRRIAASTAREIECFWSNIEQVVEIKLRVELEEKRKKALNLQKVSRRGKELRPKGFDALQESSLDSGMSGRKRKASISLTDDEVDDEEETIEEEEANEGVVDHQTELSNLAKEAELPLLDLMKLYEGAFLPSSQWPRPKPDGEDTSGEEDADDCPGDRESRKDLVLIDSLFIMDQFKAAERMNIGKPNAKDIADVTAVAEAILPKGSARVTTSVKFNAPSLLYGALRDYQKIGLDWLAKLYRKNLNGILADEAGLGKTVQIIAFFAHLACNEGNWGPHLVVVRSCNILKWELELKRWCPGLKILSYIGSHRELKAKRQEWAEPNSFHVCITSYTQFFRGLTAFTRVRWKCLVIDEMQRVKGMTERHWEAVFTLQSQQRLLLIDSPLHNTFLELWTMVHFLVPGISRPYLSSPLRAPSEESQDYYHKVVIRLHRVTQPFILRRTKRDVEKQLTKKYEHVLKCRLSNRQKALYEDVILQPGTQEALKSGHFVNVLSILVRLQRICNHPGLVEPRHPGSSYVAGPLEYPSASLILKALERDFWKEADLSMFDLIGLENKITRHEAELLSKKKIPRKLMEEISTSAAPAARPAAAKLKASRLFQPVQYGQKPEGRTVAFPSTHPPRTAAPTTASAAPQGPLRGRPPIATFSANPEAKAAAAPFQTSQASASAPRHQPASASSTAASPAHPAKLRAQTTAQASTPGQPPPQPQAPSHAAGQSALPQRLVLPSQAQARLPSGEVVKIAQLASITGPQSRVAQPETPVTLQFQGSKFTLSHSQLRQLTAGQPLQLQGSVLQIVSAPGQPYLRAPGPVVMQTVSQAGAVHGALGSKPPAGGPSPAPLTPQVGVPGRVAVNALAVGEPGTASKPASPIGGPTQEEKTRLLKERLDQIYLVNERRCSQAPVYGRDLLRICALPSHGRVQWRGSLDGRRGKEAGPAHSYTSSSESPSELMLTLCRCGESLQDVIDRVAFVIPPVVAAPPSLRVPRPPPLYSHRMRILRQGLREHAAPYFQQLRQTTAPRLLQFPELRLVQFDSGKLEALAILLQKLKSEGRRVLILSQMILMLDILEMFLNFHYLTYVRIDENASSEQRQELMRSFNRDRRIFCAILSTHSRTTGINLVEADTVVFYDNDLNPVMDAKAQEWCDRIGRCKDIHIYRLVSGNSIEEKLLKNGTKDLIREVAAQGNDYSMAFLTQRTIQELFEVYSPMDDAGFPVKAEEFVVLSQEPSVTETIAPKIARPFIEALKSIEYLEEDAQKSAQEGVLGPHTDALSSDSENMPCDEEPSQLEELADFMEQLTPIEKYALNYLELFHTSIEQEKERNSEDAVMTAVRAWEFWNLKTLQEREARLRLEQEEAELLTYTREDAYSMEYVYEDVDGQTEVMPLWTPPTPPQDDSDIYLDSVMCLMYEATPIPEAKLPPVYVRKERKRHKTDPSAAGRKKKQRHGEAVVPPRSLFDRATPGLLKIRREGKEQKKNILLKQQVPFAKPLPTFAKPTAEPGQDNPEWLISEDWALLQAVKQLLELPLNLTIVSPAHTPNWDLVSDVVNSCSRIYRSSKQCRNRYENVIIPREEGKSKNNRPLRTSQIYAQDENATHTQLYTSHFDLMKMTAGKRSPPIKPLLGMNPFQKNPKHASVLAESGINYDKPLPPIQVASLRAERIAKEKKALADQQKAQQPAVAQPPPPQPQPPPPPQQPPPPLPQPQAAGSQPPAGPPAVQPQPQPQPQTQPQPVQAPAKAQPAITTGGSAAVLAGTIKTSVTGTSMPTGAVSGNVIVNTIAGVPAATFQSINKRLASPVAPGALTTPGGSAPAQVVHTQPPPRAVGSPATATPDLVSMATTQGVRAVTSVTASAVVTTNLTPVQTPARSLVPQVSQATGVQLPGKTITPAHFQLLRQQQQQQQQQQQQQQQQQQQQQQQQQQQQQTTTTSQVQVPQIQGQAQSPAQIKAVGKLTPEHLIKMQKQKLQMPPQPPPPQAQSAPPQPTAQVQVQTSQPPQQQSPQLTTVTAPRPGALLTGTTVANLQVARLTRVPTSQLQAQGQMQTQAPQPAQVALAKPPVVSVPAAVVSSPGVTTLPMNVAGISVAIGQPQKAAGQTVVAQPVHMQQLLKLKQQAVQQQKAIQPQAAQGPAAVQQKITAQQITTPGAQQKVAYAAQPALKTQFLTTPISQAQKLAGAQQVQTQIQVAKLPQVVQQQTPVASIQQVASASQQASPQTVALTQATAAGQQVQMIPAVTATAQVVQQKLIQQQVVTTASAPLQTPGAPNPAQVPASSDSPSQQPKLQMRVPAVRLKTPTKPPCQ

SEQ ID NO: 44613 - protein, 3122 aa, Homo sapiens
MHHGTGPQNVQHQLQRSRACPGSEGEEQPAHPNPPPSPAAPFAPSASPSAPQSPSYQIQQLMNRSPATGQNVNITLQSVGPVVGGNQQITLAPLPLPSPTSPGFQFSAQPRRFEHGSPSYIQVTSPLSQQVQTQSPTQPSPGPGQALQNVRAGAPGPGLGLCSSSPTGGFVDASVLVRQISLSPSSGGHFVFQDGSGLTQIAQGAQVQLQHPGTPITVRERRPSQPHTQSGGTIHHLGPQSPAAAGGAGLQPLASPSHITTANLPPQISSIIQGQLVQQQQVLQGPPLPRPLGFERTPGVLLPGAGGAAGFGMTSPPPPTSPSRTAVPPGLSSLPLTSVGNTGMKKVPKKLEEIPPASPEMAQMRKQCLDYHYQEMQALKEVFKEYLIELFFLQHFQGNMMDFLAFKKKHYAPLQAYLRQNDLDIEEEEEEEEEEEEKSEVINDEQALAGSLVAGAGSTVETDLFKRQQAMPSTGMAEQSKRPRLEVGHQGVVFQHPGADAGVPLQQLMPTAQGGMPPTPQAAQLAGQRQSQQQYDPSTGPPVQNAASLHTPLPQLPGRLPPAGVPTAALSSALQFAQQPQVVEAQTQLQIPVKTQQPNVPIPAPPSSQLPIPPSQPAQLALHVPTPGKVQVQASQLSSLPQMVASTRLPVDPAPPCPRPLPTSSTSSLAPVSGSGPGPSPARSSPVNRPSSATNKALSPVTSRTPGVVASAPTKPQSPAQNATSSQDSSQDTLTEQITLENQVHQRIAELRKAGLWSQRRLPKLQEAPRPKSHWDYLLEEMQWMATDFAQERRWKVAAAKKLVRTVVRHHEEKQLREERGKKEEQSRLRRIAASTAREIECFWSNIEQVVEIKLRVELEEKRKKALNLQKVSRRGKELRPKGFDALQESSLDSGMSGRKRKASISLTDDEVDDEEETIEEEEANEGVVDHQTELSNLAKEAELPLLDLMKLYEGAFLPSSQWPRPKPDGEDTSGEEDADDCPGDRESRKDLVLIDSLFIMDQFKAAERMNIGKPNAKDIADVTAVAEAILPKGSARVTTSVKFNAPSLLYGALRDYQKIGLDWLAKLYRKNLNGILADEAGLGKTVQIIAFFAHLACNEGNWGPHLVVVRSCNILKWELELKRWCPGLKILSYIGSHRELKAKRQEWAEPNSFHVCITSYTQFFRGLTAFTRVRWKCLVIDEMQRVKGMTERHWEAVFTLQSQQRLLLIDSPLHNTFLELWTMVHFLVPGISRPYLSSPLRAPSEESQDYYHKVVIRLHRVTQPFILRRTKRDVEKQLTKKYEHVLKCRLSNRQKALYEDVILQPGTQEALKSGHFVNVLSILVRLQRICNHPGLVEPRHPGSSYVAGPLEYPSASLILKALERDFWKEADLSMFDLIGLENKITRHEAELLSKKKIPRKLMEEISTSAAPAARPAAAKLKASRLFQPVQYGQKPEGRTVAFPSTHPPRTAAPTTASAAPQGPLRGRPPIATFSANPEAKAAAAPFQTSQASASAPRHQPASASSTAASPAHPAKLRAQTTAQASTPGQPPPQPQAPSHAAGQSALPQRLVLPSQAQARLPSGEVVKIAQLASITGPQSRVAQPETPVTLQFQGSKFTLSHSQLRQLTAGQPLQLQGSVLQIVSAPGQPYLRAPGPVVMQTVSQAGAVHGALGSKPPAGGPSPAPLTPQVGVPGRVAVNALAVGEPGTASKPASPIGGPTQEEKTRLLKERLDQIYLVNERRCSQAPVYGRDLLRICALPSHGRVQWRGSLDGRRGKEAGPAHSYTSSSESPSELMLTLCRCGESLQDVIDRVAFVIPPVVAAPPSLRVPRPPPLYSHRMRILRQGLREHAAPYFQQLRQTTAPRLLQFPELRLVQFDSGKLEALAILLQKLKSEGRRVLILSQMILMLDILEMFLNFHYLTYVRIDENASSEQRQELMRSFNRDRRIFCAILSTHSRTTGINLVEADTVVFYDNDLNPVMDAKAQEWCDRIGRCKDIHIYRLVSGNSIEEKLLKNGTKDLIREVAAQGNDYSMAFLTQRTIQELFEVYSPMDDAGFPVKAEEFVVLSQEPSVTETIAPKIARPFIEALKSIEYLEEDAQKSAQEGVLGPHTDALSSDSENMPCDEEPSQLEELADFMEQLTPIEKYALNYLELFHTSIEQEKERNSEDAVMTAVRAWEFWNLKTLQEREARLRLEQEEAELLTYTREDAYSMEYVYEDVDGQTEVMPLWTPPTPPQDDSDIYLDSVMCLMYEATPIPEAKLPPVYVRKERKRHKTDPSAAGRKKKQRHGEAVVPPRSLFDRATPGLLKIRREGKEQKKNILLKQQVPFAKPLPTFAKPTAEPGQDNPEWLISEDWALLQAVKQLLELPLNLTIVSPAHTPNWDLVSDVVNSCSRIYRSSKQCRNRYENVIIPREEGKSKNNRPLRTSQIYAQDENATHTQLYTSHFDLMKMTAGKRSPPIKPLLGMNPFQKNPKHASVLAESGINYDKPLPPIQVASLRAERIAKEKKALADQQKAQQPAVAQPPPPQPQPPPPPQQPPPPLPQPQAAGSQPPAGPPAVQPQPQPQPQTQPQPVQAPAKAQPAITTGGSAAVLAGTIKTSVTGTSMPTGAVSGNVIVNTIAGVPAATFQSINKRLASPVAPGALTTPGGSAPAQVVHTQPPPRAVGSPATATPDLVSMATTQGVRAVTSVTASAVVTTNLTPVQTPARSLVPQVSQATGVQLPGKTITPAHFQLLRQQQQQQQQQQQQQQQQQQQQQQQQQQQQQTTTTSQVQVPQIQGQAQSPAQIKAVGKLTPEHLIKMQKQKLQMPPQPPPPQAQSAPPQPTAQVQVQTSQPPQQQSPQLTTVTAPRPGALLTGTTVANLQVARLTRVPTSQLQAQGQMQTQAPQPAQVALAKPPVVSVPAAVVSSPGVTTLPMNVAGISVAIGQPQKAAGQTVVAQPVHMQQLLKLKQQAVQQQKAIQPQAAQGPAAVQQKITAQQITTPGAQQKVAYAAQPALKTQFLTTPISQAQKLAGAQQVQTQIQVAKLPQVVQQQTPVASIQQVASASQQASPQTVALTQATAAGQQVQMIPAVTATAQVVQQKLIQQQVVTTASAPLQTPGAPNPAQVPASSDSPSQQPKLQMRVPAVRLKTPTKPPCQ

SEQ ID NO: 44614 - protein, 824 aa, Homo sapiens
MHHGTGPQNVQHQLQRSRACPGSEGEEQPAHPNPPPSPAAPFAPSASPSAPQSPSYQIQQLMNRSPATGQNVNITLQSVGPVVGGNQQITLAPLPLPSPTSPGFQFSAQPRRFEHGSPSYIQVTSPLSQQVQTQSPTQPSPGPGQALQNVRAGAPGPGLGLCSSSPTGGFVDASVLVRQISLSPSSGGHFVFQDGSGLTQIAQGAQVQLQHPGTPITVRERRPSQPHTQSGGTIHHLGPQSPAAAGGAGLQPLASPSHITTANLPPQISSIIQGQLVQQQQVLQGPPLPRPLGFERTPGVLLPGAGGAAGFGMTSPPPPTSPSRTAVPPGLSSLPLTSVGNTGMKKVPKKLEEIPPASPEMAQMRKQCLDYHYQEMQALKEVFKEYLIELFFLQHFQGNMMDFLAFKKKHYAPLQAYLRQNDLDIEEEEEEEEEEEEKSEVINDEQALAGSLVAGAGSTVETDLFKRQQAMPSTGMAGGMPPTPQAAQLAGQRQSQQQYDPSTGPPVQNAASLHTPLPQLPGRLPPAGVPTAALSSALQFAQQPQVVEAQTQLQIPVKTQQPNVPIPAPPSSQLPIPPSQPAQLALHVPTPGKVQVQASQLSSLPQMVASTRLPVDPAPPCPRPLPTSSTSSLAPVSGSGPGPSPARSSPVNRPSSATNKALSPVTSRTPGVVASAPTKPQSPAQNATSSQDSSQDTLTEQITLENQVHQRIAELRKAGLWSQRRLPKLQEAPRPKSHWDYLLEEMQWMATDFAQERRWKVAAAKKLVRTVVRHHEEKQLREERGKKEEQSRLRRIAASTAREIECFWSNIEQVVEIKLRVELE

SEQ ID NO: 44615 - protein, 3123 aa, Homo sapiens; identical to SEQ ID NO: 44612

SEQ ID NO: 44616 - protein, 437 aa, Homo sapiens
MLQGPRALASAAGQTPKVVPAMSPTELWPSGLSSPQLCPATATYYTPLYPQTAPPAAAPGTCLDATPHGPEGQVVRCLPAGRLPAKRKLDLEGIGRPVVPEFPTPKGKCIRVDGLPSPKTPKSPGEKTRYDTSLGLLTKKFIYLLSESEDGVLDLNWAAEVLDVQKRRIYDITNVLEGIQLIRKKAKNNIQWVGRGMFEDPTRPGKQQQLGQELKELMNTEQALDQLIQSCSLSFKHLTEDKANKRLAYVTYQDIRAVGNFKEQTVIAVKAPPQTRLEVPDRTEDNLQIYLKSTQGPIEVYLCPEEVQEPDSPSEEPLPSTSTLCPSPDSAQPSSSTDPSIMEPTASSVPAPAPTPQQAPPPPSLVPLEATDSLLELPHPLLQQTEDQFLSPTLACSSPLISFSPSLDQDDYLWGLEAGEGISDLFDSYDLGDLLIN

SEQ ID NO: 44617 - protein, 465 aa, Homo sapiens
MRKGIQPALEQYLVTAGGGEGAAVVAAAAAASMDKRALLASPGFAAAAAAAAAPGAYIQILTTNTSTTSCSSSLQSGAVAAGPLLPSAPGAEQTAGSLLYTTPHGPSSRAGLLQQPPALGRGGSGGGGGPPAKRRLELGESGHQYLSDGLKTPKGKGRAALRSPDSPKTPKSPSEKTRYDTSLGLLTKKFIQLLSQSPDGVLDLNKAAEVLKVQKRRIYDITNVLEGIHLIKKKSKNNVQWMGCSLSEDGGMLAQCQGLSKEVTELSQEEKKLDELIQSCTLDLKLLTEDSENQRLAYVTYQDIRKISGLKDQTVIVVKAPPETRLEVPDSIESLQIHLASTQGPIEVYLCPEETETHSPMKTNNQDHNGNIPKPASKDLASTNSGHSDCSVSMGNLSPLASPANLLQQTEDQIPSNLEGPFVNLLPPLLQEDYLLSLGEEEGISDLFDAYDLEKLPLVEDFMCS

SEQ ID NO: 44618 - protein, 128 aa, Homo sapiens
MDKRALLASGGGGGPPAKRRLELGESGHQYLSDGLKTPKGKGRAALRSPDSPKKKTRYDTSLGLLTKKFIQLLSQSPDGVLDLNKAAEVLKVQKRRIYDITNVLEGISDLFDAYDLEKLPLVEDFMCS

SEQ ID NO: 44619 - protein, 334 aa, Homo sapiens
MPLQQQAKRRLELGESGHQYLSDGLKTPKGKGRAALRSPDSPKKKTRYDTSLGLLTKKFIQLLSQSPDGVLDLNKAAEVLKVQKRRIYDITNVLEGIHLIKKKSKNNVQWMGCSLSEDGGMLAQCQGLSKEVTELSQEEKKLDELIQSCTLDLKLLTEDSENQRLAYVTYQDIRKISGLKDQTVIVVKAPPETRLEVPDSIESLQIHLASTQGPIEVYLCPEETETHSPMKTNNQDHNGNIPKPASKDLASTNSGHSDCSVSMGNLSPLASPANLLQQTEDQIPSNLEGPFVNLLPPLLQEDYLLSLGEEEGISDLFDAYDLEKLPLVEDFMCS

SEQ ID NO: 44620 - protein, 911 aa, Homo sapiens
MEVNCLTLKDLISPRQPRLDFAVEDGENAQKENIFVDRSRMAPKTPIKNEPIDLSKQKKFTPERNPITPVKFVDRQQAEPWTPTANLKMLISAASPDIRDREKKKGLFRPIENKDDAFTDSLQLDVVGDSAVDEFEKQRPSRKQKSLGLLCQKFLARYPSYPLSTEKTTISLDEVAVSLGVERRRIYDIVNVLESLHLVSRVAKNQYGWHGRHSLPKTLRNLQRLGEEQKYEEQMAYLQQKELDLIDYKFGERKKDGDPDSQEQQLLDFSEPDCPSSSANSRKDKSLRIMSQKFVMLFLVSKTKIVTLDVAAKILIEESQDAPDHSKFKTKVRRLYDIANVLTSLALIKKVHVTEERGRKPAFKWIGPVDFSSSDEELVDVSASVLPELKRETYGQIQVCAKQKLARHGSFNTVQASERIQRKVNSEPSSPYREEQGSGGYSLEIGSLAAVYRQKIEDNSQGKAFASKRVVPPSSSLDPVAPFPVLSVDPEYCVNPLAHPVFSVAQTDLQAFSMQNGLNGQVDVSLASAASAVESLKPALLAGQPLVYVPSASLFMLYGSLQEGPASGSGSERDDRSSEAPATVELSSAPSAQKRLCEERKPQEEDEPATKRQSREYEDGPLSLVMPKKPSDSTDLASPKTMGNRASIPLKDIHVNGQLPAAEEISGKATANSLVSSEWGNPSRNTDVEKPSKENESTKEPSLLQYLCVQSPAGLNGFNVLLSGSQTPPTVGPSSGQLPSFSVPCMVLPSPPLGPFPVLYSPAMPGPVSSTLGALPNTGPVNFSLPGLGSIAQLLVGPTAVVNPKSSTLPSADPQLQSQPSLNLSPVMSRSHSVVQQPESPVYVGHPVSVVKLHQSPVPVTPKSIQRTHRETFFKTPGSLGDPVLKRRERNQSRNTSSAQRRLEIPSGGAD

SEQ ID NO: 44621 - protein, 382 aa, Homo sapiens
MQNGLNGQVDVSLASAASAVESLKPALLAGQPLVYVPSASLFMLYGSLQEGPASGSGSERDDRSSEAPATVELSSAPSAQKRLCEERKPQEEDEPATKRQSREYEDGPLSLVMPKKPSDSTDLASPKTMGNRASIPLKDIHVNGQLPAAEEISGKATANSLVSSEWGNPSRNTDVEKPSKENESTKEPSLLQYLCVQSPAGLNGFNVLLSGSQTPPTVGPSSGQLPSFSVPCMVLPSPPLGPFPVLYSPAMPGPVSSTLGSIAQLLVGPTAVVNPKSSTLPSADPQLQSQPSLNLSPVMSRSHSVVQQPESPVYVGHPVSVVKLHQSPVPVTPKSIQRTHRETFFKTPGSLGDPVLKRRERNQSRNTSSAQRRLEIPSGGAD

SEQ ID NO: 44622 - protein, 728 aa, Homo sapiens
MEVNCLTLKDLISPRQPRLDFAVEDGENAQKENIFVDRSRMAPKTPIKNEPIDLSKQKKFTPERNPITPVKFVDRQQAEPWTPTANLKMLISAASPDIRDREKKKGLFRPIENKDDAFTDSLQLDVVGDSAVDEFEKQRPSRKQKSLGLLCQKFLARYPSYPLSTEKTTISLDEVAVSLGVERRRIYDIVNVLESLHLVSRVAKNQYGWHGRHSLPKTLRNLQRLGEEQKYEEQMAYLQQKELDLIDYKFGERKKDGDPDSQEQQLLDFSEPDCPSSSANSRKDKSLRIMSQKFVMLFLVSKTKIVTLDVAAKILIEESQDAPDHSKFKTKVRRLYDIANVLTSLALIKKVHVTEERGRKPAFKWIGPVDFSSSDEELVDVSASVLPELKRETYGQIQVCAKQKLARHGSFNTVQASERIQRKVNSEPSSPYREEQGSGGYSLEIGSLAAVYRQKIEDNSQGKAFASKRVVPPSSSLDPVAPFPVLSVDPEYCVNPLAHPVFSVAQTDLQAFSMQNGLNGQVDVSLASAASAVESLKPALLAGQPLVYVPSASLFMLYGSLQEGPASGSGSERDDRSSEAPATVELSSAPSAQKRLCEERKPQEEDEPATKRQSREYEDGPLSLVMPKKPSDSTDLASPKTMGNRASIPLKDIHVNGQLPAAEEISGKATANSLVSSEWGNPSRNTDVEKPSKENESTKEPSLLQYLCVQSPAVTSSSDPQEHPTHTS

SEQ ID NO: 44623 - protein, 115 aa, Homo sapiens
MEVNCLTLKDLISPRQPRLDFAVEDGENAQKENIFVDRSRMAPKTPIKNEPIDLSKQKKFTPERNPITPVKFVDRQQAEPWTPTANLKMLISAASPDIRDREKKKGLFRPIENKD

SEQ ID NO: 44624 - protein, 867 aa, Homo sapiens
MENEKENLFCEPHKRGLMKTPLKESTTANIVLAEIQPDFGPLTTPTKPKEGSQGEPWTPTANLKMLISAVSPEIRNRDQKRGLFDNRSGLPEAKDCIHEHLSGDEFEKSQPSRKEKSLGLLCHKFLARYPNYPNPAVNNDICLDEVAEELNVERRRIYDIVNVLESLHMVSRLAKNRYTWHGRHNLNKTLGTLKSIGEENKYAEQIMMIKKKEYEQEFDFIKSYSIEDHIIKSNTGPNGHPDMCFVELPGVEFRAASVNSRKDKSLRVMSQKFVMLFLVSTPQIVSLEVAAKILIGEDHVEDLDKSKFKTKIRRLYDIANVLSSLDLIKKVHVTEERGRKPAFKWTGPEISPNTSGSSPVIHFTPSDLEVRRSSKENCAKNLFSTRGKPNFTRHPSLIKLVKSIESDRRKINSAPSSPIKTNKAESSQNSAPFPSKMAQLAAICKMQLEEQSSESRQKVKVQLARSGPCKPVAPLDPPVNAEMELTAPSLIQPLGMVPLIPSPLSSAVPLILPQAPSGPSYAIYLQPTQAHQSVTPPQGLSPTVCTTHSSKATGSKDSTDATTEKAANDTSKASASTRPGSLLPAPERQGAKSRTREPAGERGSKRASMLEDSGSKKKFKEDLKGLENVSATLFPSGYLIPLTQCSSLGAESILSGKENSSALSPNHRIYSSPIAGVIPVTSSELTAVNFPSFHVTPLKLMVSPTSVAAVPVGNSPALASSHPVPIQNPSSAIVNFTLQHLGLISPNVQLSASPGSGIVPVSPRIESVNVAPENAGTQQGRATNYDSPVPGQSQPNGQSVAVTGAQQPVPVTPKGSQLVAESFFRTPGGPTKPTSSSCMDFEGANKTSLGTLFVPQRKLEVSTEDVH

SEQ ID NO: 44625 - protein, 867 aa, Homo sapiens
MQKKKENLFCEPHKRGLMKTPLKESTTANIVLAEIQPDFGPLTTPTKPKEGSQGEPWTPTANLKMLISAVSPEIRNRDQKRGLFDNRSGLPEAKDCIHEHLSGDEFEKSQPSRKEKSLGLLCHKFLARYPNYPNPAVNNDICLDEVAEELNVERRRIYDIVNVLESLHMVSRLAKNRYTWHGRHNLNKTLGTLKSIGEENKYAEQIMMIKKKEYEQEFDFIKSYSIEDHIIKSNTGPNGHPDMCFVELPGVEFRAASVNSRKDKSLRVMSQKFVMLFLVSTPQIVSLEVAAKILIGEDHVEDLDKSKFKTKIRRLYDIANVLSSLDLIKKVHVTEERGRKPAFKWTGPEISPNTSGSSPVIHFTPSDLEVRRSSKENCAKNLFSTRGKPNFTRHPSLIKLVKSIESDRRKINSAPSSPIKTNKAESSQNSAPFPSKMAQLAAICKMQLEEQSSESRQKVKVQLARSGPCKPVAPLDPPVNAEMELTAPSLIQPLGMVPLIPSPLSSAVPLILPQAPSGPSYAIYLQPTQAHQSVTPPQGLSPTVCTTHSSKATGSKDSTDATTEKAANDTSKASASTRPGSLLPAPERQGAKSRTREPAGERGSKRASMLEDSGSKKKFKEDLKGLENVSATLFPSGYLIPLTQCSSLGAESILSGKENSSALSPNHRIYSSPIAGVIPVTSSELTAVNFPSFHVTPLKLMVSPTSVAAVPVGNSPALASSHPVPIQNPSSAIVNFTLQHLGLISPNVQLSASPGSGIVPVSPRIESVNVAPENAGTQQGRATNYDSPVPGQSQPNGQSVAVTGAQQPVPVTPKGSQLVAESFFRTPGGPTKPTSSSCMDFEGANKTSLGTLFVPQRKLEVSTEDVH

SEQ ID NO: 44626 - protein, 867 aa, Homo sapiens; identical to SEQ ID NO: 44624

SEQ ID NO: 44627 - protein, 784 aa, Homo sapiens
MEGAMAVRVTAAHTAEAQAEAGREAGEGAVAAVAAALAPSGFLGLPAPFSEEDEDDVHRCGRCQAEFTALEDFVQHKIQKACQRAPPEALPATPATTALLGQEVVPAAPGPEEPITVAHIVVEAASLAADISHASDLVGGGHIKEVIVAAEAELGDGEMAEAPGSPRQQGLGLAGEGEQAQVKLLVNKDGRYVCALCHKTFKTGSILKAHMVTHSSRKDHECKLCGASFRTKGSLIRHHRRHTDERPYKCSKCGKSFRESGALTRHLKSLTPCTEKIRFSVSKDVVVSKEDARAGSGAGAAGLGTATSSVTGEPIETSPVIHLVTDAKGTVIHEVHVQMQELSLGMKALAPEPPVSQELPCSSEGSRENLLHQAMQNSGIVLERAAGEEGALEPAPAAGSSPQPLAVAAPQLPVLEVQPLETQVASEASAVPRTHPCPQCSETFPTAATLEAHKRGHTGPRPFACAQCGKAFPKAYLLKKHQEVHVRERRFRCGDCGKLYKTIAHVRGHRRVHSDERPYPCPKCGKRYKTKNAQQVHFRTHLEEKPHVCQFCSRGFREKGSLVRHVRHHTGEKPFKCYKCGRGFAEHGTLNRHLRTKGGCLLEVEELLVSEDSPAAATTVLTEDPHTVLVEFSSVVADTQEYIIEATADDAETSEATEIIEGTQTEVDSHIMKVVQQIVHQASAGHQIIVQNVTMDEETALGPEAAAADTITIATPESLTEQVAMTLASAISEGTVLAARAGTSGTEQATVTMVSSEDIEILEHAGELVIASPEGQLEVQTVIV

SEQ ID NO: 44628 - protein, 348 aa, Homo sapiens
MAATCEISNIFSNYFSAMYSSEDSTLASVPPAATFGADDLVLTLSNPQMSLEGTEKASWLGEQPQFWSKTQVLDWISYQVEKNKYDASAIDFSRCDMDGATLCNCALEELRLVFGPLGDQLHAQLRDLTSSSSDELSWIIELLEKDGMAFQEALDPGPFDQGSPFAQELLDDVSTAGTGASRSSHSSDSGGSDVDLDPTDGKLFPSDGFRDCKKGDPKHGKRKRGRPRKLSKEYWDCLEGKKSKHAPRGTHLWEFIRDILIHPELNEGLMKWENRHEGVFKFLRSEAVAQLWGQKKKNSNMTYEKLSRAMRYYYKREILERVDGRRLVYKFGKNSSGWKEEEVLQSRN

SEQ ID NO: 44629 - protein, 371 aa, Homo sapiens
MAATCEISNIFSNYFSAMYSSEDSTLASVPPAATFGADDLVLTLSNPQMSLEGTEKASWLGEQPQFWSKTQVLDWISYQVEKNKYDASAIDFSRCDMDGATLCNCALEELRLVFGPLGDQLHAQLRDLTSSSSDELSWIIELLEKDGMAFQEALDPGPFDQGSPFAQELLDDGQQASPYHPGSCGAGAPSPGSSDVSTAGTGASRSSHSSDSGGSDVDLDPTDGKLFPSDGFRDCKKGDPKHGKRKRGRPRKLSKEYWDCLEGKKSKHAPRGTHLWEFIRDILIHPELNEGLMKWENRHEGVFKFLRSEAVAQLWGQKKKNSNMTYEKLSRAMRYYYKREILERVDGRRLVYKFGKNSSGWKEEEVLQSRN

SEQ ID NO: 44630 - protein, 371 aa, Homo sapiens; identical to SEQ ID NO: 44629

SEQ ID NO: 44631 - protein, 371 aa, Homo sapiens; identical to SEQ ID NO: 44629

SEQ ID NO: 44632 - protein, 232 aa, Homo sapiens
MAATCEISNIFSNYFSAMYSSEDSTLASVPPAATFGADDLVLTLSNPQMSLEEKASWLGEQPQFWSKTQVLDWISYQVEKNKYDASAIDFSRCDMDGATLCNCALEELRLVFGPLGDQLHAQLRDLTSSSSDELSWIIELLEKDGMAFQEALDPGPFDQGSPFAQELLDDGQQASPYHPGSCGAGAPSPGSSDVSTAGTGASRSSHSSDSGGSDVDLDPTDGKLFPSDGFRD

SEQ ID NO: 44633 - protein, 663 aa, Homo sapiens
MAITLQPSDLIFEFASNGMDDDIHQLEDPSVFPAVIVEQVPYPDLLHLYSGLELDDVHNGIITDGTLCMTQDQILEGSFLLTDDNEATSHTMSTAEVLLNMESPSDILDEKQIFSTSEMLPDSDPAPAVTLPNYLFPASEPDALNRAGDTSDQEGHSLEEKASREESAKKTGKSKKRIRKTKGNRSTSPVTDPSIPIRKKSKDGKGSTIYLWEFLLALLQDRNTCPKYIKWTQREKGIFKLVDSKAVSKLWGKQKNKPDMNYETMGRALRYYYQRGILAKVEGQRLVYQFKEMPKDLVVIEDEDESSEATAAPPQASTASVASASTTRRTSSRVSSRSAPQGKGSSSWEKPKIQHVGLQPSASLELGPSLDEEIPTTSTMLVSPAEGQVKLTKAVSASSVPSNIHLGVAPVGSGSALTLQTIPLTTVLTNGPPASTTAPTQLVLQSVPAASTFKDTFTLQASFPLNASFQDSQVAAPGAPLILSGLPQLLAGANRPTNPAPPTVTGAGPAGPSSQPPGTVIAAFIRTSGTTAAPRVKEGPLRSSSYVQGMVTGAPMEGLLVPEETLRELLRDQAHLQPLPTQVVSRGSHNPSLLGNQTLSPPSRPTVGLTPVAELELSSGSGSLLMAEPSVTTSGSLLTRSPTPAPFSPFNPTSLIKMEPHDI

SEQ ID NO: 44634 - protein, 663 aa, Homo sapiens; identical to SEQ ID NO: 44633

SEQ ID NO: 44635 - protein, 77 aa, Homo sapiens
MDDDIHQLEDPSVFPAVIVEQVPYPDLLHLYSGLELDDVHNGIITDGTLCMTQDQILEGSFLLTDDNEATSHTMSTA

SEQ ID NO: 44636 - protein, 255 aa, Homo sapiens
MLDSVTHSTFLPNASFCDPLMSWTDLFSNEEYYPAFEHQTACDSYWTSVHPEYWTKRHVWEWLQFCCDQYKLDTNCISFCNFNISGLQLCSMTQEEFVEAAGLCGEYLYFILQNIRTQGYSFFNDAEESKATIKDYADSNCLKTSGIKSQDCHSHSRTSLQSSHLWEFVRDLLLSPEENCGILEWEDREQGIFRVVKSEALAKMWGQRKKNDRMTYEKLSRALRYYYKTGILERVDRRLVYKFGKNAHGWQEDKL

SEQ ID NO: 44637 - protein, 265 aa, Homo sapiens
MPSLPHSHRVMLDSVTHSTFLPNASFCDPLMSWTDLFSNEEYYPAFEHQTACDSYWTSVHPEYWTKRHVWEWLQFCCDQYKLDTNCISFCNFNISGLQLCSMTQEEFVEAAGLCGEYLYFILQNIRTQGYSFFNDAEESKATIKDYADSNCLKTSGIKSQDCHSHSRTSLQSSHLWEFVRDLLLSPEENCGILEWEDREQGIFRVVKSEALAKMWGQRKKNDRMTYEKLSRALRYYYKTGILERVDRRLVYKFGKNAHGWQEDKL

SEQ ID NO: 44638 - protein, 160 aa, Homo sapiens
MLDSVTHSTFLPNASFCDPLMSWTDLFSNEEYYPAFEHQTDADSNCLKTSGIKSQDCHSHSRTSLQSSHLWEFVRDLLLSPEENCGILEWEDREQGIFRVVKSEALAKMWGQRKKNDRMTYEKLSRALRYYYKTGILERVDRRLVYKFGKNAHGWQEDKL

SEQ ID NO: 44639 - protein, 575 aa, Homo sapiens
MFGIQDTLGRGPTLKEKSLGAEMDSVRSWVRNVGVVDANVAAQSGVALSRAHFEKQPPSNLRKSNFFHFVLALYDRQGQPVEIERTAFVDFVENDKEQGNEKTNNGTHYKLQLLYSNGVRTEQDLYVRLIDSVTKQPIAYEGQNKNPEMCRVLLTHEVMCSRCCEKKSCGNRNETPSDPVIIDRFFLKFFLKCNQNCLKTAGNPRDMRRFQVVLSTTVNVDGHVLAVSDNMFVHNNSKHGRRARRLDPSEATPCIKAISPSEGWTTGGAMVIIIGDNFFDGLQVVFGTMLVWSELITPHAIRVQTPPRHIPGVVEVTLSYKSKQFCKGAPGRFIYTALNEPTIDYGFQRLQKVIPRHPGDPERLAKEMLLKRAADLVEALYGTPHNNQDIILKRAADIAEALYSVPRNPSQLPALSSSPAHSGMMGINSYGSQLGVSISESTQGNNQGYIRNTSSISPRGYSSSSTPQQSNYSTSSNSMNGYSNVPMANLGVPGSPGFLNGSPTGSPYGIMSSSPTVGSSSTSSILPFSSSVFPAVKQKSAFAPVIRPQGSPSPACSSGNGNGFRAMTGLVVPPM

SEQ ID NO: 44640 - protein, 264 aa, Homo sapiens
MVIIIGDNFFDGLQVVFGTMLVWSELITPHAIRVQTPPRHIPGVVEVTLSYKSKQFCKGAPGRFIYTALNEPTIDYGFQRLQKVIPRHPGDPERLAKEMLLKRAADLVEALYGTPHNNQDIILKRAADIAEALYSVPRNPSQLPALSSSPAHSGMMGINSYGSQLGVSISESTQGNNQGYIRNTSSISPRGYSSSSTPQQSNYSTSSNSMNGYSNVPMANLGVPGSPGFLNGSPTGSPYGTGLWLTWLLKAFWGKKRIETIPFL

SEQ ID NO: 44641 - protein, 596 aa, Homo sapiens
MFGIQENIPRGGTTMKEEPLGSGMNPVRSWMHTAGVVDANTAAQSGVGLARAHFEKQPPSNLRKSNFFHFVLALYDRQGQPVEIERTAFVDFVEKEKEPNNEKTNNGIHYKLQLLYSNGVRTEQDLYVRLIDSMTKQAIVYEGQDKNPEMCRVLLTHEIMCSRCCDKKSCGNRNETPSDPVIIDRFFLKFFLKCNQNCLKNAGNPRDMRRFQVVVSTTVNVDGHVLAVSDNMFVHNNSKHGRRARRLDPSEGTAPSYLENATPCIKAISPSEGWTTGGATVIIIGDNFFDGLQVVFGTMLVWSELITPHAIRVQTPPRHIPGVVEVTLSYKSKQFCKGAPGRFVYTALNEPTIDYGFQRLQKVIPRHPGDPERLPKEVLLKRAADLVEALYGMPHNNQEIILKRAADIAEALYSVPRNHNQIPTLGNNPAHTGMMGVNSFSSQLAVNVSETSQANDQVGYSRNTSSVSPRGYVPSSTPQQSNYNTVSTSMNGYGSGAMASLGVPGSPGFLNGSSANSPYGIVPSSPTMAASSVTLPSNCSSTHGIFSFSPANVISAVKQKSAFAPVVRPQASPPPSCTSANGNGLQAMSGLVVPPM

SEQ ID NO: 44642 - protein, 551 aa, Homo sapiens
MFGIQENIPRGGTTMKEEPLGSGMNPVRSWMHTAGVVDANTAAQSGVGLARAHFEKQPPSNLRKSNFFHFVLALYDRQGQPVEIERTAFVDFVEKEKEPNNEKTNNGIHYKLQLLYSNGVRTEQDLYVRLIDSMTKQAIVYEGQDKNPEMCRVLLTHEIMCSRCCDKKSCGNRNETPSDPVIIDRFFLKFFLKCNQNCLKNAGNPRDMRRFQVVVSTTVNVDGHVLAVSDNMFVHNNSKHGRRARRLDPSEATPCIKAISPSEGWTTGGATVIIIGDNFFDGLQVVFGTMLVWSELITPHAIRVQTPPRHIPGVVEVTLSYKSKQFCKGAPGRFVYTALNEPTIDYGFQRLQKVIPRHPGDPERLPKEVLLKRAADLVEALYGMPHNNQEIILKRAADIAEALYSVPRNHNQIPTLGNNPAHTGMMGVNSFSSQLAVNVSETSQANDQVGYSRNTSSVSPRGYVPSSTPQQSNYNTVSTSMNGYGSGAMASLGVPGSPGFLNGSSANSPYGMKQKSAFAPVVRPQASPPPSCTSANGNGLQAMSGLVVPPM

SEQ ID NO: 44643 - protein, 191 aa, Homo sapiens
  VARIANT 1: note = MOD_RES - Any amino acid
XFSSQLAVNVSETSQANDQVGYSRNTSSVSPRGYVPSSTPQQSNYNTVSTSMNGYGSGAMASLGVPGSPGFLNGSSANSPYGIVPSSPTMAASSVTLPSNCSSTHGIFSFSPANVISAVKQKSAFAPVVRPQASPPPSCTSANGNGLQGSLLGAEDVAAEKTNWPFCEVGGIFHFDELMLKKGTGKLCLGW

SEQ ID NO: 44644 - protein, 602 aa, Homo sapiens
MFPAQDALPRSGLNLKEEPLLPAGLGSVRSWMQGAGILDASTAAQSGVGLARAHFEKQPPSNLRKSNFFHFVLAMYDRQGQPVEVERTAFIDFVEKDREPGAEKTNNGIHYRLRLVYNNGLRTEQDLYVRLIDSMSKQAIIYEGQDKNPEMCRVLLTHEIMCSRCCDRKSCGNRNETPSDPVIIDRFFLKFFLKCNQNCLKNAGNPRDMRRFQVVVSTTVSVDGHVLAVSDNMFVHNNSKHGRRARRLDPSEAATPCIKAISPGEGWTTGGATVIVIGDNFFDGLQVVFGNVLVWSELITPHAIRVQTPPRHIPGVVEVTLSYKSKQFCKGCPGRFVYTALNEPTIDYGFQRLQKVIPRHPGDPERLPKEVLLKRAADLAEALYGVPGSNQELLLKRAADVAEALYSTPRAPGPLAPLAPSHPHPAVVGINAFSSPLAIAVGDATPGPEPGYARSCSSASPRGFAPSPGSQQSGYGGGLGAGLGGYGAPGVAGLGVPGSPSFLNGSTATSPFAIMPSSPPLAAASSMSLPAAAPTTSVFSFSPVNMISAVKQRSAFAPVLRPPSSPPQACPRAHGEGLPDQSFEDSDKFHSPARGLQGLAYS

SEQ ID NO: 44645 - protein, 598 aa, Homo sapiens
MDALPRSGLNLKEEPLLPAGLGSVRSWMQGAGILDASTAAQSGVGLARAHFEKQPPSNLRKSNFFHFVLAMYDRQGQPVEVERTAFIDFVEKDREPGAEKTNNGIHYRLRLVYNNGLRTEQDLYVRLIDSMSKQAIIYEGQDKNPEMCRVLLTHEIMCSRCCDRKSCGNRNETPSDPVIIDRFFLKFFLKCNQNCLKNAGNPRDMRRFQVVVSTTVSVDGHVLAVSDNMFVHNNSKHGRRARRLDPSEAATPCIKAISPGEGWTTGGATVIVIGDNFFDGLQVVFGNVLVWSELITPHAIRVQTPPRHIPGVVEVTLSYKSKQFCKGCPGRFVYTALNEPTIDYGFQRLQKVIPRHPGDPERLPKEVLLKRAADLAEALYGVPGSNQELLLKRAADVAEALYSTPRAPGPLAPLAPSHPHPAVVGINAFSSPLAIAVGDATPGPEPGYARSCSSASPRGFAPSPGSQQSGYGGGLGAGLGGYGAPGVAGLGVPGSPSFLNGSTATSPFAIMPSSPPLAAASSMSLPAAAPTTSVFSFSPVNMISAVKQRSAFAPVLRPPSSPPQACPRAHGEGLPDQSFEDSDKFHSPARGLQGLAYS

SEQ ID NO: 44646 - protein, 184 aa, Homo sapiens
RGSVQHPPVVGINAFSSPLAIAVGDATPGPEPGYARSCSSASPRGFAPSPGSQQSGYGGGLGAGLGGYGAPGVAGLGVPGSPSFLNGSTATSPFAIMPSSPPLAAASSMSLPAAAPTTSVFSFSPVNMISAVKQRSAFAPVLRPPSSPPQACPRAHGEGLPDQSFEDSDKFHSPARGLQGLAYS

SEQ ID NO: 44647 - protein, 543 aa, Homo sapiens
MAAAKAEMQLMSPLQISDPFGSFPHSPTMDNYPKLEEMMLLSNGAPQFLGAAGAPEGSGSNSSSSSSGGGGGGGGGSNSSSSSSTFNPQADTGEQPYEHLTAESFPDISLNNEKVLVETSYPSQTTRLPPITYTGRFSLEPAPNSGNTLWPEPLFSLVSGLVSMTNPPASSSSAPSPAASSASASQSPPLSCAVPSNDSSPIYSAAPTFPTPNTDIFPEPQSQAFPGSAGTALQYPPPAYPAAKGGFQVPMIPDYLFPQQQGDLGLGTPDQKPFQGLESRTQQPSLTPLSTIKAFATQSGSQDLKALNTSYQSQLIKPSRMRKYPNRPSKTPPHERPYACPVESCDRRFSRSDELTRHIRIHTGQKPFQCRICMRNFSRSDHLTTHIRTHTGEKPFACDICGRKFARSDERKRHTKIHLRQKDKKADKSVVASSATSSLSSYPSPVATSYPSPVTTSYPSPATTSYPSPVPTSFSSPGSSTYPSPVHSGFPSPSVATTYSSVPPAFPAQVSSFPSSAVTNSFSASTGLSDMTATFSPRTIEIC

SEQ ID NO: 44648 - protein, 200 aa, Homo sapiens
MAAAKAEMQLMSPLQISDPFGSFPHSPTMDNYPKLEEMMLLSNGAPQFLGAAGAPEGSGSNSSSSSSGGGGGGGGGSNSSSSSSTFNPQADTGEQPYEHLTAESFPDISLNNEKVLVETSYPSQTTRLPPITYTGRFSLEPAPNSGFPSPSVATTYSSVPPAFPAQVSSFPSSAVTNSFSASTGLSDMTATFSPRTIEIC

SEQ ID NO: 44649 - protein, 232 aa, Homo sapiens
MAAAKAEMQLMSPLQISDPFGSFPHSPTMDNYPKLEEMMLLSNGAPQFLGAAGAPEGSGSNSSSSSSGGGGGGGGGSNSSSSSSTFNPQADTGEQPYEHLTAESFPDISLNNEKVLVETSYPSQTTRLPPITYTGRFSLEPAPNSGNTLWPEPLFSLVSGLVSMTNPPASSSSAPSPAASSASASQSPPLSCAVPSNDSSPIYSAAPTFPTPNTDIFPETAMSKFFTSIQRT

SEQ ID NO: 44650 - protein, 476 aa, Homo sapiens
MMTAKAVDKIPVTLSGFVHQLSDNIYPVEDLAATSVTIFPNAELGGPFDQMNGVAGDGMINIDMTGEKRSLDLPYPSSFAPVSAPRNQTFTYMGKFSIDPQYPGASCYPEGIINIVSAGILQGVTSPASTTASSSVTSASPNPLATGPLGVCTMSQTQPDLDHLYSPPPPPPPYSGCAGDLYQDPSAFLSAATTSTSSSLAYPPPPSYPSPKPATDPGLFPMIPDYPGFFPSQCQRDLHGTAGPDRKPFPCPLDTLRVPPPLTPLSTIRNFTLGGPSAGVTGPGASGGSEGPRLPGSSSAAAAAAAAAAYNPHHLPLRPILRPRKYPNRPSKTPVHERPYPCPAEGCDRRFSRSDELTRHIRIHTGHKPFQCRICMRNFSRSDHLTTHIRTHTGEKPFACDYCGRKFARSDERKRHTKIHLRQKERKSSAPSASVPAPSTASCSGGVQPGGTLCSSNSSSLGGGPLAPCSSRTRTP

SEQ ID NO: 44651 - protein, 426 aa, Homo sapiens
MNGVAGDGMINIDMTGEKRSLDLPYPSSFAPVSAPRNQTFTYMGKFSIDPQYPGASCYPEGIINIVSAGILQGVTSPASTTASSSVTSASPNPLATGPLGVCTMSQTQPDLDHLYSPPPPPPPYSGCAGDLYQDPSAFLSAATTSTSSSLAYPPPPSYPSPKPATDPGLFPMIPDYPGFFPSQCQRDLHGTAGPDRKPFPCPLDTLRVPPPLTPLSTIRNFTLGGPSAGVTGPGASGGSEGPRLPGSSSAAAAAAAAAAYNPHHLPLRPILRPRKYPNRPSKTPVHERPYPCPAEGCDRRFSRSDELTRHIRIHTGHKPFQCRICMRNFSRSDHLTTHIRTHTGEKPFACDYCGRKFARSDERKRHTKIHLRQKERKSSAPSASVPAPSTASCSGGVQPGGTLCSSNSSSLGGGPLAPCSSRTRTP

SEQ ID NO: 44652 - protein, 261 aa, Homo sapiens
MRVGLPSEASSCPWSARGPRDPPERRRSGLAHVLSDNIYPVEDLAATSVTIFPNAELGGPFDQMNGVAGDGMINIDMTGEKRSLDLPYPSSFAPVSAPRNQTFTYMGKFSIDPQYPGASCYPEGIINIVSAGILQGVTSPASTTASSSVTSASPNPLATGPLGVCTMSQTQPDLDHLYSPPPPPPPYSGCAGDLYQDPSAFLSAATTSTSSSLAYPPPPSYPSPKPVEAARDPGCLVAAQQQQQPPPPPPITHTTCHCGPF

SEQ ID NO: 44653 - protein, 476 aa, Homo sapiens; identical to SEQ ID NO: 44650

SEQ ID NO: 44654 - protein, 486 aa, Homo sapiens
MLHLSEFSEPDALLVKSTEGCCAEPSAELPRLPARDAPAATGYPGAGDFLSWALNSCGASGDLADSCFLEGPAPTPPPGLSYSGSFFIQAVPEHPHDPEALFNLMSGILGLAPFPGPEAAASRSPLDAPFPAGSDALLPGPPDLYSPDLGAAPFPEAFWEASPCAGAPSQCLYEPQLSPPDVKPGLRAPPASPALDAVSAFKGPYAPWELLSVGAPGNCGSQGDYQAAPEARFPVIGTKIEDLLSISCPAELPAVPANRLYPSGAYDAFPLAPGDLGEGAEGLPGLLTPPSGEGGSSGDGGEFLASTQPQLSPLGLRSAAAADFPKPLVADIPGSSGVAAPPVPPPPPTPFPQAKARRKGRRGGKCSTRCFCPRPHAKAFACPVESCVRSFARSDELNRHLRIHTGHKPFQCRICLRNFSRSDHLTTHVRTHTGEKPFACDVCGRRFARSDEKKRHSKVHLKQKARAEERLKGLGFYSLGLSFASL

SEQ ID NO: 44655 - protein, 589 aa, Homo sapiens
MAVARGVGSPEPAPPQLYKWGGCGLGEPGSALERRGAAARGRCGRARAPRLPDSFPRGECPKPGARAPRSVRCGEPLPPASPPPARPQAQRARPRAPHSRRRAMLHLSEFSEPDALLVKSTEGCCAEPSAELPRLPARDAPAATGYPGAGDFLSWALNSCGASGDLADSCFLEGPAPTPPPGLSYSGSFFIQAVPEHPHDPEALFNLMSGILGLAPFPGPEAAASRSPLDAPFPAGSDALLPGPPDLYSPDLGAAPFPEAFWEASPCAGAPSQCLYEPQLSPPDVKPGLRAPPASPALDAVSAFKGPYAPWELLSVGAPGNCGSQGDYQAAPEARFPVIGTKIEDLLSISCPAELPAVPANRLYPSGAYDAFPLAPGDLGEGAEGLPGLLTPPSGEGGSSGDGGEFLASTQPQLSPLGLRSAAAADFPKPLVADIPGSSGVAAPPVPPPPPTPFPQAKARRKGRRGGKCSTRCFCPRPHAKAFACPVESCVRSFARSDELNRHLRIHTGHKPFQCRICLRNFSRSDHLTTHVRTHTGEKPFACDVCGRRFARSDEKKRHSKVHLKQKARAEERLKGLGFYSLGLSFASL

SEQ ID NO: 44656 - protein, 306 aa, Homo sapiens
MDTPPLSDSESESDESLVTDRELQDAFSRGLLKPGLNVVLEGPKKAVNDVNGLKQCLAEFKRDLEWVERLDVTLGPVPEIGGSEAPAPQNKDQKAVDPEDDFQREMSFYRQAQAAVLAVLPRLHQLKVPTKRPTDYFAEMAKSDLQMQKIRQKLQTKQAAMERSEKAKQLRALRKYGKKVQTEVLQKRQQEKAHMMNAIKKYQKGFSDKLDFLEGDQKPLAQRKKAGAKGQQMRKGPSAKRRYKNQKFGFGGKKKGSKWNTRESYDDVSSFRAKTAHGRGLKRPGKKGSNKRPGKRTREKMKNRTH

SEQ ID NO: 44657 - protein, 361 aa, Homo sapiens
MYPEALPVGILSNPDTFKRRSGSYSNDKPEVWFAAGSGSPNQKLSSSCVGRACGEMDTPPLSDSESESDESLVTDRELQDAFSRGLLKPGLNVVLEGPKKAVNDVNGLKQCLAEFKRDLEWVERLDVTLGPVPEIGGSEAPAPQNKDQKAVDPEDDFQREMSFYRQAQAAVLAVLPRLHQLKVPTKRPTDYFAEMAKSDLQMQKIRQKLQTKQAAMERSEKAKQLRALRKYGKKVQTEVLQKRQQEKAHMMNAIKKYQKGFSDKLDFLEGDQKPLAQRKKAGAKGQQMRKGPSAKRRYKNQKFGFGGKKKGSKWNTRESYDDVSSFRAKTAHGRGLKRPGKKGSNKRPGKRTREKMKNRTH

SEQ ID NO: 44658 - protein, 815 aa, Homo sapiens
MEDGFSSYSSLYDTSSLLQFCNDDSASAASSMEVTDRIASLEQRVQMQEDDIQLLKSALADVVRRLNITEEQQAVLNRKGPTKARPLMQTLPLRTTVNNGTVLPKKPTGSLPSPSGVRKETAVPATKSNIKRTSSSERVSPGGRRESNGDSRGNRNRTGSTSSSSSGKKNSESKPKEPVFSAEEGYVKMFLRGRPVTMYMPKDQVDSYSLEAKVELPTKRLKLEWVYGYRGRDCRNNLYLLPTGETVYFIASVVVLYNVEEQLQRHYAGHNDDVKCLAVHPDRITIATGQVAGTSKDGKQLPPHVRIWDSVTLNTLHVIGIGFFDRAVTCIAFSKSNGGTNLCAVDDSNDHVLSVWDWQKEEKLADVKCSNEAVFAADFHPTDTNIIVTCGKSHLYFWTLEGSSLNKKQGLFEKQEKPKFVLCVTFSENGDTITGDSSGNILVWGKGTNRISYAVQGAHEGGIFALCMLRDGTLVSGGGKDRKLISWSGNYQKLRKTEIPEQFGPIRTVAEGKGDVILIGTTRNFVLQGTLSGDFTPITQGHTDELWGLAIHASKSQFLTCGHDKHATLWDAVGHRPVWDKIIEDPAQSSGFHPSGSVVAVGTLTGRWFVFDTETKDLVTVHTDGNEQLSVMRYSPDGNFLAIGSHDNCIYIYGVSDNGRKYTRVGKCSGHSSFITHLDWSVNSQFLVSNSGDYEILYWVPSACKQVVSVETTRDIEWATYTCTLGFHVFGVWPEGSDGTDINAVCRAHEKKLLSTGDDFGKVHLFSYPCSQFRAPSHIYGGHSSHVTNVDFLCEDSHLISTGGKDTSIMQWRVI

SEQ ID NO: 44659 - protein, 834 aa, Homo sapiens
MEDGFSSYSSLYDTSSLLQFCNDDSASAASSMEVTDRIASLEQRVQMQEDDIQLLKSALADVVRRLNITEEQQAVLNRKGPTKARPLMQTLPLRTTVNNGTVLPKKPTGSLPSPSGVRKETAVPATKRLNRSVSLLNACKLNRSTPSNIKRTSSSERVSPGGRRESNGDSRGNRNRTGSTSSSSSGKKNSESKPKEPVFSAEEGYVKMFLRGRPVTMYMPKDQVDSYSLEAKVELPTKRLKLEWVYGYRGRDCRNNLYLLPTGETVYFIASVVVLYNVEEQLQRHYAGHNDDVKCLAVHPDRITIATGQVAGTSKDGKQLPPHVRIWDSVTLNTLHVIGIGFFDRAVTCIAFSKSNGGTNLCAVDDSNDHVLSVWDWQKEEKLADVKCSNEAVFAADFHPTDTNIIVTCGKSHLYFWTLEGSSLNKKQGLFEKQEKPKFVLCVTFSENGDTITGDSSGNILVWGKGTNRISYAVQGAHEGGIFALCMLRDGTLVSGGGKDRKLISWSGNYQKLRKTEIPEQFGPIRTVAEGKGDVILIGTTRNFVLQGTLSGDFTPITQGHTDELWGLAIHASKSQFLTCGHDKHATLWDAVGHRPVWDKIIEDPAQSSGFHPSGSVVAVGTLTGRWFVFDTETKDLVTVHTDGNEQLSVMRYSPDGNFLAIGSHDNCIYIYGVSDNGRKYTRVGKCSGHSSFITHLDWSVNSQFLVSNSGDYEILYWVPSACKQVVSVETTRDIEWATYTCTLGFHVFGVWPEGSDGTDINAVCRAHEKKLLSTGDDFGKVHLFSYPCSQFRAPSHIYGGHSSHVTNVDFLCEDSHLISTGGKDTSIMQWRVI

SEQ ID NO: 44660 - protein, 834 aa, Homo sapiens; identical to SEQ ID NO: 44659

SEQ ID NO: 44661 - protein, 981 aa, Homo sapiens
MDGFAGSLDDSISAASTSDVQDRLSALESRVQQQEDEITVLKAALADVLRRLAISEDHVASVKKSVSSKGQPSPRAVIPMSCITNGSGANRKPSHTSAVSIAGKETLSSAAKSGTEKKKEKPQGQREKKEESHSNDQSPQIRASPSPQPSSQPLQIHRQTPESKNATPTKSIKRPSPAEKSHNSWENSDDSRNKLSKIPSTPKLIPKVTKTADKHKDVIINQEGEYIKMFMRGRPITMFIPSDVDNYDDIRTELPPEKLKLEWAYGYRGKDCRANVYLLPTGKIVYFIASVVVLFNYEERTQRHYLGHTDCVKCLAIHPDKIRIATGQIAGVDKDGRPLQPHVRVWDSVTLSTLQIIGLGTFERGVGCLDFSKADSGVHLCIIDDSNEHMLTVWDWQKKAKGAEIKTTNEVVLAVEFHPTDANTIITCGKSHIFFWTWSGNSLTRKQGIFGKYEKPKFVQCLAFLGNGDVLTGDSGGVMLIWSKTTVEPTPGKGPKGVYQISKQIKAHDGSVFTLCQMRNGMLLTGGGKDRKIILWDHDLNPEREIEVPDQYGTIRAVAEGKADQFLVGTSRNFILRGTFNDGFQIEVQGHTDELWGLATHPFKDLLLTCAQDRQVCLWNSMEHRLEWTRLVDEPGHCADFHPSGTVVAIGTHSGRWFVLDAETRDLVSIHTDGNEQLSVMRYSIDGTFLAVGSHDNFIYLYVVSENGRKYSRYGRCTGHSSYITHLDWSPDNKYIMSNSGDYEILYWDIPNGCKLIRNRSDCKDIDWTTYTCVLGFQVFGVWPEGSDGTDINALVRSHNRKVIAVADDFCKVHLFQYPCSKAKAPSHKYSAHSSHVTNVSFTHNDSHLISTGGKDMSIIQWKLVEKLSLPQNETVADTTLTKAPVSSTESVIQSNTPTPPPSQPLNETAEEESRISSSPTLLENSLEQTVEPSEDHSEEESEEGSGDLGEPLYEEPCNEISKEQAKATLLEDQQDPSPSS

SEQ ID NO: 44662 - protein, 245 aa, Homo sapiens [sequence omitted]

SEQ ID NO: 44663 - protein, 923 aa, Homo sapiens
MDGFAGSLDDSISAASTSDVQDRLSALESRVQQQEDEITVLKAALADVLRRLAISEDHVASVKKSVSSKGQPSPRAVIPMSCITNGSGANRKPSHTSAVSIAGKETLSSAAKSIKRPSPAEKSHNSWENSDDSRNKLSKIPSTPKLIPKVTKTADKHKDVIINQEGEYIKMFMRGRPITMFIPSDVDNYDDIRTELPPEKLKLEWAYGYRGKDCRANVYLLPTGKIVYFIASVVVLFNYEERTQRHYLGHTDCVKCLAIHPDKIRIATGQIAGVDKDGRPLQPHVRVWDSVTLSTLQIIGLGTFERGVGCLDFSKADSGVHLCIIDDSNEHMLTVWDWQKKAKGAEIKTTNEVVLAVEFHPTDANTIITCGKSHIFFWTWSGNSLTRKQGIFGKYEKPKFVQCLAFLGNGDVLTGDSGGVMLIWSKTTVEPTPGKGPKGVYQISKQIKAHDGSVFTLCQMRNGMLLTGGGKDRKIILWDHDLNPEREIEVPDQYGTIRAVAEGKADQFLVGTSRNFILRGTFNDGFQIEVQGHTDELWGLATHPFKDLLLTCAQDRQVCLWNSMEHRLEWTRLVDEPGHCADFHPSGTVVAIGTHSGRWFVLDAETRDLVSIHTDGNEQLSVMRYSIDGTFLAVGSHDNFIYLYVVSENGRKYSRYGRCTGHSSYITHLDWSPDNKYIMSNSGDYEILYWDIPNGCKLIRNRSDCKDIDWTTYTCVLGFQVFGVWPEGSDGTDINALVRSHNRKVIAVADDFCKVHLFQYPCSKAKAPSHKYSAHSSHVTNVSFTHNDSHLISTGGKDMSIIQWKLVEKLSLPQNETVADTTLTKAPVSSTESVIQSNTPTPPPSQPLNETAEEESRISSSPTLLENSLEQTVEPSEDHSEEESEEGSGDLGEPLYEEPCNEISKEQAKATLLEDQQDPSPSS

SEQ ID NO: 44664 - protein, 259 aa, Homo sapiens
MLLRSWFGNKDFQALPILARLPSMPTDMEHTGHYLHLAFLMTTVFSLSPGTKANYTRLWANSTSSWDSVIQNKTGRNQNENINTNPITPEVDYKGNSTNMPETSHIVALTSKSEQELYIPSVVSNSPSTVQSIENTSKSHGEIFKKDVCAENNNNMAMLICLIIIAVLFLICTFLFLSTVVLANKVSSLRRSKQVGKRQPRSNGDFLASGLWPAESDTWKRTKQLTGPNLVMQSTGVLTATRERKDEEGTEKLTNKQIG

SEQ ID NO: 44665 - protein, 236 aa, Homo sapiens
MPTDMEHTGHYLHLAFLMTTVFSLSPGTKANYTRLWANSTSSWDSVIQNKTGRNQNENINTNPITPEVDYKGNSTNMPETSHIVALTSKSEQELYIPSVVSNSPSTVQSIENTSKSHGEIFKKDVCAENNNNMAMLICLIIIAVLFLICTFLFLSTVVLANKVSSLRRSKQVGKRQPRSNGDFLASGLWPAESDTWKRTKQLTGPNLVMQSTGVLTATRERKDEEGTEKLTNKQIG

SEQ ID NO: 44666 - protein, 236 aa, Homo sapiens; identical to SEQ ID NO: 44665

SEQ ID NO: 44667 - protein, 232 aa, Homo sapiens
MEHTGHYLHLAFLMTTVFSLSPGTKANYTRLWANSTSSWDSVIQNKTGRNQNENINTNPITPEVDYKGNSTNMPETSHIVALTSKSEQELYIPSVVSNSPSTVQSIENTSKSHGEIFKKDVCAENNNNMAMLICLIIIAVLFLICTFLFLSTVVLANKVSSLRRSKQVGKRQPRSNGDFLASGLWPAESDTWKRTKQLTGPNLVMQSTGVLTATRERKDEEGTEKLTNKQIG

SEQ ID NO: 44668 - protein, 448 aa, Homo sapiens
MDPKYFILILFCGHLNNTFFSKTETITTEKQSQPTLFTSSMSQVLANSQNTTGNPLGQPTQFSDTFSGQSISPAKVTAGQPTPAVYTSSEKPEAHTSAGQPLAYNTKQPTPIANTSSQQAVFTSARQLPSARTSTTQPPKSFVYTFTQQSSSVQIPSRKQITVHNPSTQPTSTVKNSPRSTPGFILDTTSNKQTPQKNNYNSIAAILIGVLLTSMLVAIIIIVLWKCLRKPVLNDQNWAGRSPFADGETPDICMDNIRENEISTKRTSIISLTPWKPSKSTLLADDLEIKLFESSENIEDSNNPKTEKIKDQVNGTSEDSADGSTVGTAVSSSDDADLPPPPPLLDLEGQESNQSDKPTMTIVSPLPNDSTSLPPSLDCLNQDCGDHKSEIIQSFPPLDSLNLPLPPVDFMKNQEDSNLEIQCQEFSIPPNSDQDLNESLPPPPAELL

SEQ ID NO: 44669 - protein, 463 aa, Homo sapiens
MLFRYAEKITRKYSEMDPKYFILILFCGHLNNTFFSKTETITTEKQSQPTLFTSSMSQVLANSQNTTGNPLGQPTQFSDTFSGQSISPAKVTAGQPTPAVYTSSEKPEAHTSAGQPLAYNTKQPTPIANTSSQQAVFTSARQLPSARTSTTQPPKSFVYTFTQQSSSVQIPSRKQITVHNPSTQPTSTVKNSPRSTPGFILDTTSNKQTPQKNNYNSIAAILIGVLLTSMLVAIIIIVLWKCLRKPVLNDQNWAGRSPFADGETPDICMDNIRENEISTKRTSIISLTPWKPSKSTLLADDLEIKLFESSENIEDSNNPKTEKIKDQVNGTSEDSADGSTVGTAVSSSDDADLPPPPPLLDLEGQESNQSDKPTMTIVSPLPNDSTSLPPSLDCLNQDCGDHKSEIIQSFPPLDSLNLPLPPVDFMKNQEDSNLEIQCQEFSIPPNSDQDLNESLPPPPAELL

SEQ ID NO: 44670 - protein, 307 aa, Homo sapiens
MNQAELMQLDMEGMLQHFQKVIPHQFDGVPDKLIQAAYQVKYNSKKMKKLEKEYTTIKTKEMEEQVEIKRLRTENRLLKQRIETLEKESASLADRLIQGQVTRAQEAEENYLIKRELATIKQQSDEASAKLEQAENTIRKLQHQQQWHKCSSNYNEDFVLQLEKELVQARLSEAESQCALKEMQDKVLDIEKRNNSLPDENNIARLQEELIAVKLREAEAIMGLKELRQQVKDLEEHWQRHLARTTGRWKDPPKKNAMNELQDELMTIRLREAETQAEIREIKQRMMEMETQSGTCGPLLKIIFFNA

SEQ ID NO: 44671 - protein, 810 aa, Homo sapiens
MVTNKMTAAFRNPSGKQVATDKVAEKLSSTLSWVKNTVSHTVSQMASQVASPSTSLHTTSSSTTLSTPALSPSSPSQLSPDDLELLAKLEEQNRLLETDSKSLRSVNGSRRNSGSSLVSSSSASSNLSHLEEDSWILWGRIVNEWEDVRKKKEKQVKELVHKGIPHHFRAIVWQLLCSAQSMPIKDQYSELLKMTSPCEKLIRRDIARTYPEHNFFKEKDSLGQEVLFNVMKAYSLVDREVGYCQGSAFIVGLLLMQMPEEEAFCVFVKLMQDYRLRELFKPSMAELGLCMYQFECMIQEHLPELFVHFQSQSFHTSMYASSWFLTIFLTTFPLPIATRIFDIFMSEGLEIVFRVGLALLQMNQAELMQLDMEGMLQHFQKVIPHQFDGVPDKLIQAAYQVKYNSKKMKKLEKEYTTIKTKEMEEQVEIKRLRTENRLLKQRIETLEKHKCSSNYNEDFVLQLEKELVQARLSEAESQCALKEMQDKVLDIEKRNNSLPDENNIARLQEELIAVKLREAEAIMGLKELRQQVKDLEEHWQRHLARTTGRWKDPPKKNAMNELQDELMTIRLREAETQAEIREIKQRMMEMETQNQINSNHLRRAEQEVISLQEKVQYLSAQNKGLLTQLSEAKRKQAEIECKNKEEVMAVRLREADSIAAVAELRQHIAELEIQKEEGKLQGQLNKSDSNQYIGELKDQIAELNHELRCLKGQRGFSGQPPFDGIHIVNHLIGDDESFHSSDEDFIDNSLQETGVGFPLHGKSGSMSLDPAVADGSESETEDSVLETRESNQVVQKERPPRRRESYSTTV

SEQ ID NO: 44672 - protein, 810 aa, Homo sapiens; identical to SEQ ID NO: 44671

SEQ ID NO: 44673 - protein, 821 aa, Homo sapiens
MVTNKMTAAFRNPSGKQVATDKVAEKLSSTLSWVKNTVSHTVSQMASQVASPSTSLHTTSSSTTLSTPALSPSSPSQLSPDDLELLAKLEEQNRLLETDSKSLRSVNGSRRNSGSSLVSSSSASSNLSHLEEDSWILWGRIVNEWEDVRKKKEKQVKELVHKGIPHHFRAIVWQLLCSAQSMPIKDQYSELLKMTSPCEKLIRRDIARTYPEHNFFKEKDSLGQEVLFNVMKAYSLVDREVGYCQGSAFIVGLLLMQMPEEEAFCVFVKLMQDYRLRELFKPSMAELGLCMYQFECMIQEHLPELFVHFQSQSFHTSMYASSWFLTIFLTTFPLPIATRIFDIFMSEGLEIVFRVGLALLQMNQAELMQLDMEGMLQHFQKVIPHQFDGVPDKLIQAAYQVKYNSKKMKKLEKEYTTIKTKEMEEQVEIKRLRTENRLLKQRIETLEKESASLADRLIQHKCSSNYNEDFVLQLEKELVQARLSEAESQCALKEMQDKVLDIEKRNNSLPDENNIARLQEELIAVKLREAEAIMGLKELRQQVKDLEEHWQRHLARTTGRWKDPPKKNAMNELQDELMTIRLREAETQAEIREIKQRMMEMETQNQINSNHLRRAEQEVISLQEKVQYLSAQNKGLLTQLSEAKRKQAEIECKNKEEVMAVRLREADSIAAVAELRQHIAELEIQKEEGKLQGQLNKSDSNQYIGELKDQIAELNHELRCLKGQRGFSGQPPFDGIHIVNHLIGDDESFHSSDEDFIDNSLQETGVGFPLHGKSGSMSLDPAVADGSESETEDSVLETRESNQVVQKERPPRRRESYSTTV

SEQ ID NO: 44674 - protein, 296 aa, Homo sapiens
MSWVQATLLARGLCRAWGGTCGAALTGTSISQVPRRLPRGLHCSAAAHSSEQSLVPSPPEPRQRPTKALVPFEDLFGQAPGGERDKASFLQTVQKFAEHSVRKRGHIDFIYLALRKMREYGVERDLAVYNQLLNIFPKEVFRPRNIIQRIFVHYPRQQECGIAVLEQMENHGVMPNKETEFLLIQIFGRKSYPMLKLVRLKLWFPRFMNVNPFPVPRDLPQDPVELAMFGLRHMEPDLSARVTIYQVPLPKDSTGAADPPQPHIVGSGRDAGGVEPLLPDAAGPGVCEEWLGQLRV

SEQ ID NO: 44675 - protein, 431 aa, Homo sapiens
MSWVQATLLARGLCRAWGGTCGAALTGTSISQVPRRLPRGLHCSAAAHSSEQSLVPSPPEPRQRPTKALVPFEDLFGQAPGGERDKASFLQTVQKFAEHSVRKRGHIDFIYLALRKMREYGVERDLAVYNQLLNIFPKEVFRPRNIIQRIFVHYPRQQECGIAVLEQMENHGVMPNKETEFLLIQIFGRKSYPMLKLVRLKLWFPRFMNVNPFPVPRDLPQDPVELAMFGLRHMEPDLSARVTIYQVPLPKDSTGAADPPQPHIVGIQSPDQQAALARHNPARPVFVEGPFSLWLRNKCVYYHILRADLLPPEEREVEETPEEWNLYYPMQLDLEYVRSGWDNYEFDINEVEEGPVFAMCMAGAHDQATMAKWIQGLQETNPTLAQIPVVFRLAGSTRELQTSSAGLEEPPLPEDHQEEDDNLQRQQQGQS

SEQ ID NO: 44676 - protein, 217 aa, Homo sapiens
MSWVQATLLARGLCRAWGGTCGAALTGTSISQVPLPKDSTGAADPPQPHIVGIQSPDQQAALARHNPARPVFVEGPFSLWLRNKCVYYHILRADLLPPEEREVEETPEEWNLYYPMQLDLEYVRSGWDNYEFDINEVEEGPVFAMCMAGAHDQATMAKWIQGLQETNPTLAQIPVVFRLAGSTRELQTSSAGLEEPPLPEDHQEEDDNLQRQQQGQS

SEQ ID NO: 44677 - protein, 296 aa, Homo sapiens
MSWVQATLLARGLCRAWGGTCGAALTGTSISQVPRRLPRGLHCSAAAHSSEQSLVPSPPEPRQRPTKALVPFEDLFGQAPGGERDKASFLQTVQKFAEHSVRKRGHIDFIYLALRKMREYGVERDLAVYNQLLNIFPKEVFRPRNIIQRIFVHYPRQQECGIAVLEQMENHGVMPNKETEFLLIQIFGRKSYPMLKLVRLKLWFPRFMNVNPFPVPRDLPQDPVELAMFGLRHMEPDLSARVTIYQVPLPKDSTGAADPPQPHIVELTCCPRRRGKWKRRRRSGTSTTRCSWTWSM

SEQ ID NO: 44678 - protein, 589 aa, Homo sapiens
MSVSVHENRKSRASSGSINIYLFHKSSYADSVLTHLNLLRQQRLFTDVLLHAGNRTFPCHRAVLAACSRYFEAMFSGGLKESQDSEVNFDNSIHPEVLELLLDYAYSSRVIINEENAESLLEAGDMLEFQDIRDACAEFLEKNLHPTNCLGMLLLSDAHQCTKLYELSWRMCLSNFQTIRKNEDFLQLPQDMVVQLLSSEELETEDERLVYESAINWISYDLKKRYCYLPELLQTVRLALLPAIYLMENVAMEELITKQRKSKEIVEEAIRCKLKILQNDGVVTSLCARPRKTGHALFLLGGQTFMCDKLYLVDQKAKEIIPKADIPSPRKEFSACAIGCKVYITGGRGSENGVSKDVWVYDTLHEEWSKAAPMLVARFGHGSAELKHCLYVVGGHTAATGCLPASPSVSLKQVEHYDPTINKWTMVAPLREGVSNAAVVSAKLKLFAFGGTSVSHDKLPKVQCYDQCENRWTVPATCPQPWRYTAAAVLGNQIFIMGGDTEFSACSAYKFNSETYQWTKVGDVTAKRMSCHAVASGNKLYVVGGYFGIQRCKTLDCYDPTLDVWNSITTVPYSLIPTAFVSTWKHLPS

SEQ ID NO: 44679 - protein, 50 aa, Homo sapiens
MSVSVHENRKSRASSGSINIYLFHKSSYADSVLTHLNLLRQQRLFTDVLL

SEQ ID NO: 44680 - protein, 4 aa, Homo sapiens
MSVS

SEQ ID NO: 44681 - protein, 589 aa, Homo sapiens; identical to SEQ ID NO: 44678

SEQ ID NO: 44682 - protein, 516 aa, Homo sapiens
MFSGGLKESQDSEVNFDNSIHPEVLELLLDYAYSSRVIINEENAESLLEAGDMLEFQDIRDACAEFLEKNLHPTNCLGMLLLSDAHQCTKLYELSWRMCLSNFQTIRKNEDFLQLPQDMVVQLLSSEELETEDERLVYESAINWISYDLKKRYCYLPELLQTVRLALLPAIYLMENVAMEELITKQRKSKEIVEEAIRCKLKILQNDGVVTSLCARPRKTGHALFLLGGQTFMCDKLYLVDQKAKEIIPKADIPSPRKEFSACAIGCKVYITGGRGSENGVSKDVWVYDTLHEEWSKAAPMLVARFGHGSAELKHCLYVVGGHTAATGCLPASPSVSLKQVEHYDPTINKWTMVAPLREGVSNAAVVSAKLKLFAFGGTSVSHDKLPKVQCYDQCENRWTVPATCPQPWRYTAAAVLGNQIFIMGGDTEFSACSAYKFNSETYQWTKVGDVTAKRMSCHAVASGNKLYVVGGYFGIQRCKTLDCYDPTLDVWNSITTVPYSLIPTAFVSTWKHLPS

SEQ ID NO: 44683 - protein, 643 aa, Homo sapiens
MVDAGGVENITQLPQELPQMMAAAADGLGSIAIDTTQLNMSVTDPTAWATAMNNLGMVPVGLPGQQLVSDSICVPGFDPSLNMMTGITPINPMIPGLGLVPPPPPTEVAVVKEIIHCKSCTLFPQNPNLPPPSTRERPPGCKTVFVGGLPENATEEIIQEVFEQCGDITAIRKSKKNFCHIRFAEEFMVDKAIYLSGYRMRLGSSTDKKDSGRLHVDFAQARDDFYEWECKQRMRAREERHRRKLEEDRLRPPSPPAIMHYSEHEAALLAEKLKDDSKFSEAITVLLSWIERGEVNRRSANQFYSMVQSANSHVRRLMNEKATHEQEMEEAKENFKNALTGILTQFEQIVAVFNASTRQKAWDHFSKAQRKNIDIWRKHSEELRNAQSEQLMGIRREEEMEMSDDENCDSPTKKMRVDESALAAQAYALKEENDSLRWQLDAYRNEVELLKQEKEQLFRTEENLTKDQQLQFLQQTMQGMQQQLLTIQEELNNKKSELEQAKEEQSHTQALLKVLQEQLKGTKELVETNGHSHEDSNEINVLTVALVNQDRENNIEKRSQGLKSEKEALLIGIISTFLHVHPFGANIEYLWSYMQQLDSKISANEIEMLLMRLPRMFKQEFTGVGATLEKRWKLCAFEGIKTT

SEQ ID NO: 44684 - protein, 643 aa, Homo sapiens; identical to SEQ ID NO: 44683

SEQ ID NO: 44685 - protein, 235 aa, Homo sapiens
MVDKAIYLSGYRMRLGSSTDKKDSGRLHVDFAQARDDFYEWECKQRMRAREERHRRKLEEDRLRPPSPPAIMHYSEHEAALLAEKLKDDSKFSEAITVLLSWIERGEVNRRSANQFYSMVQSANSHVRRLMNEKATHEQEMEEAKENFKNALTGILTQFEQIVAVFNASTRQKAWDHFSKAQRKNIDIWRKHSEELRNAQSEQLMGIRREEEMEMSDDENCDSPTKKMRVDESGA

SEQ ID NO: 44686 - protein, 610 aa, Homo sapiens
MQRDFRWLWVYEIGYAADNSRTLNVDSTAMTLPMSDPTAWATAMNNLGMAPLGIAGQPILPDFDPALGMMTGIPPITPMMPGLGIVPPPIPPDMPVVKEIIHCKSCTLFPPNPNLPPPATRERPPGCKTVFVGGLPENGTEQIIVEVFEQCGEIIAIRKSKKNFCHIRFAEEYMVDKALYLSGYRIRLGSSTDKKDTGRLHVDFAQARDDLYEWECKQRMLAREERHRRRMEEERLRPPSPPPVVHYSDHECSIVAEKLKDDSKFSEAVQTLLTWIERGEVNRRSANNFYSMIQSANSHVRRLVNEKAAHEKDMEEAKEKFKQALSGILIQFEQIVAVYHSASKQKAWDHFTKAQRKNISVWCKQAEEIRNIHNDELMGIRREEEMEMSDDEIEEMTETKETEESALVSQAEALKEENDSLRWQLDAYRNEVELLKQEQGKVHREDDPNKEQQLKLLQQALQGMQQHLLKVQEEYKKKEAELEKLKDDKLQVEKMLENLKEKESCASRLCASNQDSEYPLEKTMNSSPIKSEREALLVGIISTFLHVHPFGASIEYICSYLHRLDNKICTSDVECLMGRLQHTFKQEMTGVGASLEKRWKFCGFEGLKLT

SEQ ID NO: 44687 - protein, 638 aa, Homo sapiens
LPFDPANNNEPLQFGSASGPLVTEGLIENGGESSKKRKRTNTPSADNSRTLNVDSTAMTLPMSDPTAWATAMNNLGMAPLGIAGQPILPDFDPALGMMTGIPPITPMMPGLGIVPPPIPPDMPVVKEIIHCKSCTLFPPNPNLPPPATRERPPGCKTVFVGGLPENGTEQIIVEVFEQCGEIIAIRKSKKNFCHIRFAEEYMVDKALYLSGYRIRLGSSTDKKDTGRLHVDFAQARDDLYEWECKQRMLAREERHRRRMEEERLRPPSPPPVVHYSDHECSIVAEKLKDDSKFSEAVQTLLTWIERGEVNRRSANNFYSMIQSANSHVRRLVNEKAAHEKDMEEAKEKFKQALSGILIQFEQIVAVYHSASKQKAWDHFTKAQRKNISVWCKQAEEIRNIHNDELMGIRREEEMEMSDDEIEEMTETKETEESALVSQAEALKEENDSLRWQLDAYRNEVELLKQEQGKVHREDDPNKEQQLKLLQQALQGMQQHLLKVQEEYKKKEAELEKLKDDKLQVEKMLENLKEKESCASRLCASNQDSEYPLEKTMNSSPIKSEREALLVGIISTFLHVHPFGASIEYICSYLHRLDNKICTSDVECLMGRLQHTFKQEMTGVGASLEKRWKFCGFEGLKLT

SEQ ID NO: 44688 - protein, 610 aa, Homo sapiens; identical to SEQ ID NO: 44686

SEQ ID NO: 44689 - protein, 581 aa, Homo sapiens
MTLPMSDPTAWATAMNNLGMAPLGIAGQPILPDFDPALGMMTGIPPITPMMPGLGIVPPPIPPDMPVVKEIIHCKSCTLFPPNPNLPPPATRERPPGCKTVFVGGLPENGTEQIIVEVFEQCGEIIAIRKSKKNFCHIRFAEEYMVDKALYLSGYRIRLGSSTDKKDTGRLHVDFAQARDDLYEWECKQRMLAREERHRRRMEEERLRPPSPPPVVHYSDHECSIVAEKLKDDSKFSEAVQTLLTWIERGEVNRRSANNFYSMIQSANSHVRRLVNEKAAHEKDMEEAKEKFKQALSGILIQFEQIVAVYHSASKQKAWDHFTKAQRKNISVWCKQAEEIRNIHNDELMGIRREEEMEMSDDEIEEMTETKETEESALVSQAEALKEENDSLRWQLDAYRNEVELLKQEQGKVHREDDPNKEQQLKLLQQALQGMQQHLLKVQEEYKKKEAELEKLKDDKLQVEKMLENLKEKESCASRLCASNQDSEYPLEKTMNSSPIKSEREALLVGIISTFLHVHPFGASIEYICSYLHRLDNKICTSDVECLMGRLQHTFKQEMTGVGASLEKRWKFCGFEGLKLT

SEQ ID NO: 44690 - protein, 581 aa, Homo sapiens; identical to SEQ ID NO: 44689

SEQ ID NO: 44691 - protein, 376 aa, Homo sapiens
MTLPMSDPTAWATAMNNLGMAPLGIAGQPILPDFDPALGMMTGIPPITPMMPGLGIVPPPIPPDMPVVKEIIHCKSCTLFPPNPNLPPPATRERPPGCKTVFVGGLPENGTEQIIVEVFEQCGEIIAIRKSKKNFCHIRFAEEYMVDKALYLSGYRIRLGSSTDKKDTGRLHVDFAQARDDLYEWECKQRMLAREERHRRRMEEERLRPPSPPPVVHYSDHECSIVAEKLKDDSKFSEAVQTLLTWIERGEVNRRSANNFYSMIQSANSHVRRLVNEKAAHEKDMEEAKEKFKQALSGILIQFEQIVAVYHSASKQKAWDHFTKAQRKNISVWCKQAEEIRNIHNDELMGIRREEEMEMSDDEIEEMTETKETEES

SEQ ID NO: 44692 - protein, 468 aa, Homo sapiens
MTLPMSDPTAWATAMNNLGMAPLGIAGQPILPDFDPALGMMTGIPPITPMMPGLGIVPPPIPPDMPVVKEIIHCKSCTLFPPNPNLPPPATRERPPGCKTVFVGGLPENGTEQIIVEVFEQCGEIIAIRKSKKNFCHIRFAEEYMVDKALYLSGYRIRLGSSTDKKDTGRLHVDFAQARDDLYEWECKQRMLAREERHRRRMEEERLRPPSPPPVVHYSDHECSIVAEKLKDDSKFSEAVQTLLTWIERGEVNRRSANNFYSMIQSANSHVRRLVNEKAAHEKDMEEAKEKFKQALSGILIQFEQIVAVYHSASKQKAWDHFTKAQRKNISVWCKQAEEIRNIHNDELMGIRREEEMEMSDDEIEEMTETKETEESALVSQAEALKEENDSLRWQLDAYRNEVELLKQEQGKVHREDDPNKEQQLKLLQQALQGMQQHLLKVQEEYKKKEAELEKLKDDKLQVEKMKK

SEQ ID NO: 44693 - protein, 372 aa, Homo sapiens
MESEELADRVLDVVERSLSNYPFDFQGARIITGQEEGAYGWITINYLLGKFSQKTRWFSIVPYETNNQETFGALDLGGASTQVTFVPQNQTIESPDNALQFRLYGKDYNVYTHSFLCYGKDQALWQKLAKDIQVASNEILRDPCFHPGYKKVVNVSDLYKTPCTKRFEMTLPFQQFEIQGIGNYQQCHQSILELFNTSYCPYSQCAFNGIFLPPLQGDFGAFSAFYFVMKFLNLTSEKVSQEKVTEMMKKFCAQPWEEIKTSYAGVKEKYLSEYCFSGTYILSLLLQGYHFTADSWEHIHFIGKIQGSDAGWTLGYMLNLTNMIPAEQPLSTPLSHSTYVFLMVLFSLVLFTVAIIGLLIFHKPSYFWKDMV

SEQ ID NO: 44694 - protein, 510 aa, Homo sapiens
MEDTKESNVKTFCSKNILAILGFSSIIAVIALLAVGLTQNKALPENVKYGIVLDAGSSHTSLYIYKWPAEKENDTGVVHQVEECRVKGPGISKFVQKVNEIGIYLTDCMERAREVIPRSQHQETPVYLGATAGMRLLRMESEELADRVLDVVERSLSNYPFDFQGARIITGQEEGAYGWITINYLLGKFSQKTRWFSIVPYETNNQETFGALDLGGASTQVTFVPQNQTIESPDNALQFRLYGKDYNVYTHSFLCYGKDQALWQKLAKDIQVASNEILRDPCFHPGYKKVVNVSDLYKTPCTKRFEMTLPFQQFEIQGIGNYQQCHQSILELFNTSYCPYSQCAFNGIFLPPLQGDFGAFSAFYFVMKFLNLTSEKVSQEKVTEMMKKFCAQPWEEIKTSYAGVKEKYLSEYCFSGTYILSLLLQGYHFTADSWEHIHFIGKIQGSDAGWTLGYMLNLTNMIPAEQPLSTPLSHSTYVFLMVLFSLVLFTVAIIGLLIFHKPSYFWKDMV

SEQ ID NO: 44695 - protein, 306 aa, Homo sapiens
MKGTKDLTSQQKESNVKTFCSKNILAILGFSSIIAVIALLAVGLTQNKALPENVKYGIVLDAGSSHTSLYIYKWPAEKENDTGVVHQVEECRVKGPGISKFVQKVNEIGIYLTDCMERAREVIPRSQHQETPVYLGATAGMRLLRMESEELADRVLDVVERSLSNYPFDFQGARIITGQEEGAYGWITINYLLGKFSQKTRWFSIVPYETNNQETFGALDLGGASTQVTFVPQNQTIESPDNALQFRLYGKDYNVYTHSFLCYGKDQALWQKLAKDIQASITQSRPAPFTSAPPAPTSCCFLFQIQ

SEQ ID NO: 44696 - protein, 522 aa, Homo sapiens
MGREELFLTFSFSSGFQESNVKTFCSKNILAILGFSSIIAVIALLAVGLTQNKALPENVKYGIVLDAGSSHTSLYIYKWPAEKENDTGVVHQVEECRVKGPGISKFVQKVNEIGIYLTDCMERAREVIPRSQHQETPVYLGATAGMRLLRMESEELADRVLDVVERSLSNYPFDFQGARIITGQEEGAYGWITINYLLGKFSQKTRWFSIVPYETNNQETFGALDLGGASTQVTFVPQNQTIESPDNALQFRLYGKDYNVYTHSFLCYGKDQALWQKLAKDIQVASNEILRDPCFHPGYKKVVNVSDLYKTPCTKRFEMTLPFQQFEIQGIGNYQQCHQSILELFNTSYCPYSQCAFNGIFLPPLQGDFGAFSAFYFVMKFLNLTSEKVSQEKVTEMMKKFCAQPWEEIKTSYAGVKEKYLSEYCFSGTYILSLLLQGYHFTADSWEHIHFIGKIQGSDAGWTLGYMLNLTNMIPAEQPLSTPLSHSTYVFLMVLFSLVLFTVAIIGLLIFHKPSYFWKDMV

SEQ ID NO: 44697 - protein, 517 aa, Homo sapiens
MKGTKDLTSQQKESNVKTFCSKNILAILGFSSIIAVIALLAVGLTQNKALPENVKYGIVLDAGSSHTSLYIYKWPAEKENDTGVVHQVEECRVKGPGISKFVQKVNEIGIYLTDCMERAREVIPRSQHQETPVYLGATAGMRLLRMESEELADRVLDVVERSLSNYPFDFQGARIITGQEEGAYGWITINYLLGKFSQKTRWFSIVPYETNNQETFGALDLGGASTQVTFVPQNQTIESPDNALQFRLYGKDYNVYTHSFLCYGKDQALWQKLAKDIQVASNEILRDPCFHPGYKKVVNVSDLYKTPCTKRFEMTLPFQQFEIQGIGNYQQCHQSILELFNTSYCPYSQCAFNGIFLPPLQGDFGAFSAFYFVMKFLNLTSEKVSQEKVTEMMKKFCAQPWEEIKTSYAGVKEKYLSEYCFSGTYILSLLLQGYHFTADSWEHIHFIGKIQGSDAGWTLGYMLNLTNMIPAEQPLSTPLSHSTYVFLMVLFSLVLFTVAIIGLLIFHKPSYFWKDMV

SEQ ID NO: 44698 - protein, 372 aa, Homo sapiens; identical to SEQ ID NO: 44693

SEQ ID NO: 44699 - protein, 402 aa, Homo sapiens
MERAREVIPRSQHQETPVYLGATAGMRLLRMESEELADRVLDVVERSLSNYPFDFQGARIITGQEEGAYGWITINYLLGKFSQKTRWFSIVPYETNNQETFGALDLGGASTQVTFVPQNQTIESPDNALQFRLYGKDYNVYTHSFLCYGKDQALWQKLAKDIQVASNEILRDPCFHPGYKKVVNVSDLYKTPCTKRFEMTLPFQQFEIQGIGNYQQCHQSILELFNTSYCPYSQCAFNGIFLPPLQGDFGAFSAFYFVMKFLNLTSEKVSQEKVTEMMKKFCAQPWEEIKTSYAGVKEKYLSEYCFSGTYILSLLLQGYHFTADSWEHIHFIGKIQGSDAGWTLGYMLNLTNMIPAEQPLSTPLSHSTYVFLMVLFSLVLFTVAIIGLLIFHKPSYFWKDMV

SEQ ID NO: 44700 - protein, 472 aa, Homo sapiens
MAGKVRSLLPPLLLAAAGLAGLLLLCVPTRDVREPPALKYGIVLDAGSSHTSMFIYKWPADKENDTGIVGQHSSCDVPGGGISSYADNPSGASQSLVGCLEQALQDVPKERHAGTPLYLGATAGMRLLNLTNPEASTSVLMAVTHTLTQYPFDFRGARILSGQEEGVFGWVTANYLLENFIKYGWVGRWFRPRKGTLGAMDLGGASTQITFETTSPAEDRASEVQLHLYGQHYRVYTHSFLCYGRDQVLQRLLASALQTHGFHPCWPRGFSTQVLLGDVYQSPCTMAQRPQNFNSSARVSLSGSSDPHLCRDLVSGLFSFSSCPFSRCSFNGVFQPPVAGNFVAFSAFFYTVDFLRTSMGLPVATLQQLEAAAVNVCNQTWAQQLLSRGYGFDERAFGGVIFQKKAADTAVGWALGYMLNLTNLIPADPPGLRKGTDFSSWVVLLLLFASALLAALVLLLRQVHSAKLPSTI

SEQ ID NO: 44701 - protein, 495 aa, Homo sapiens
MAGKVRSLLPPLLLAAAGLAGLLLLCVPTRDVREPPALKYGIVLDAGSSHTSMFIYKWPADKENDTGIVGQHSSCDVPGGGISSYADNPSGASQSLVGCLEQALQDVPKERHAGTPLYLGATAGMRLLNLTNPEASTSVLMAVTHTLTQYPFDFRGARILSGQEEGVFGWVTANYLLENFIKYGWVGRWFRPRKGTLGAMDLGGASTQITFETTSPAEDRASEVQLHLYGQHYRVYTHSFLCYGRDQVLQRLLASALQTHGFHPCWPRGFSTQVLLGDVYQSPCTMAQRPQNFNSSARVSLSGSSDPHLCRDLVSGLFSFSSCPFSRCSFNGVFQPPVAGNFVAFSAFFYTVDFLRTSMGLPVATLQQLEAAAVNVCNQTWAQLQARVPGQRARLADYCAGAMFVQQLLSRGYGFDERAFGGVIFQKKAADTAVGWALGYMLNLTNLIPADPPGLRKGTDFSSWVVLLLLFASALLAALVLLLRQVHSAKLPSTI

SEQ ID NO: 44702 - protein, 529 aa, Homo sapiens
MFTVLTRQPCEQAGLKALYRTPTIIALVVLLVSIVVLVSITVIQIHKQEVLPPGLKYGIVLDAGSSRTTVYVYQWPAEKENNTGVVSQTFKCSVKGSGISSYGNNPQDVPRAFEECMQKVKGQVPSHLHGSTPIHLGATAGMRLLRLQNETAANEVLESIQSYFKSQPFDFRGAQIISGQEEGVYGWITANYLMGNFLEKNLWHMWVHPHGVETTGALDLGGASTQISFVAGEKMDLNTSDIMQVSLYGYVYTLYTHSFQCYGRNEAEKKFLAMLLQNSPTKNHLTNPCYPRDYSISFTMGHVFDSLCTVDQRPESYNPNDVITFEGTGDPSLCKEKVASIFDFKACHDQETCSFDGVYQPKIKGPFVAFAGFYYTASALNLSGSFSLDTFNSSTWNFCSQNWSQLPLLLPKFDEVYARSYCFSANYIYHLFVNGYKFTEETWPQIHFEKEVGNSSIAWSLGYMLSLTNQIPAESPLIRLPIEPPVFVGTLAFFTAAALLCLAFLAYLCSATRRKRHSEHAFDHAVDSD

SEQ ID NO: 44703 - protein, 529 aa, Homo sapiens; identical to SEQ ID NO: 44702

SEQ ID NO: 44704 - protein, 428 aa, Homo sapiens
MATSWGTVFFMLVVSCVCSAVSHRNQQTWFEGIFLSSMCPINVSASTLYGIMFDAGSTGTRIHVYTFVQKMPGQLPILEGEVFDSVKPGLSAFVDQPKQGAETVQGLLEVAKDSIPRSHWKKTPVVLKATAGLRLLPEHKAKALLFEVKEIFRKSPFLVPKGSVSIMDGSDEGILAWVTVNFLTGQLHGHRQETVGTLDLGGASTQITFLPQFEKTLEQTPRGYLTSFEMFNSTYKLYTHSYLGFGLKAARLATLGALETEGTDGHTFRSACLPRWLEAEWIFGGVKYQYGGNQEGEVGFEPCYAEVLRVVRGKLHQPEEVQRGSFYAFSYYYDRAVDTDMIDYEKGGILKVEDFERKAREVCDNLENFTSGSPFLCMDLSYITALLKDGFGFADSTVLQLTKKVNNIETGWALGATFHLLQSLGISH

SEQ ID NO: 44705 - protein, 467 aa, Homo sapiens
MQPQHGPWQTRMRKISNHGSLRVAKVAYPLGLCVGVFIYVAYIKWHRATATQAFFSITRAAPGARWGQQAHSPLGTAADGHEVFYGIMFDAGSTGTRVHVFQFTRPPRETPTLTHETFKALKPGLSAYADDVEKSAQGIRELLDVAKQDIPFDFWKATPLVLKATAGLRLLPGEKAQKLLQKVKKVFKASPFLVGDDCVSIMNGTDEGVSAWITINFLTGSLKTPGGSSVGMLDLGGGSTQIAFLPRVEGTLQASPPGYLTALRMFNRTYKLYSYSYLGLGLMSARLAILGGVEGQPAKDGKELVSPCLSPSFKGEWEHAEVTYRVSGQKAAASLHELCAARVSEVLQNRVHRTEEVKHVDFYAFSYYYDLAAGVGLIDAEKGGSLVVGDFEIAAKYVCRTLETQPQSSPFSCMDLTYVSLLLQEFGFPRSKVLKLTRKIDNVETSWALGAIFHYIDSLNRQKSPAS

SEQ ID NO: 44706 - protein, 483 aa, Homo sapiens
MKKGIRYETSRKTSYIFQPQHGPWQTRMRKISNHGSLRVAKVAYPLGLCVGVFIYVAYIKWHRATATQAFFSITRAAPGARWGQQAHSPLGTAADGHEVFYGIMFDAGSTGTRVHVFQFTRPPRETPTLTHETFKALKPGLSAYADDVEKSAQGIRELLDVAKQDIPFDFWKATPLVLKATAGLRLLPGEKAQKLLQKVKKVFKASPFLVGDDCVSIMNGTDEGVSAWITINFLTGSLKTPGGSSVGMLDLGGGSTQIAFLPRVEGTLQASPPGYLTALRMFNRTYKLYSYSYLGLGLMSARLAILGGVEGQPAKDGKELVSPCLSPSFKGEWEHAEVTYRVSGQKAAASLHELCAARVSEVLQNRVHRTEEVKHVDFYAFSYYYDLAAGVGLIDAEKGGSLVVGDFEIAAKYVCRTLETQPQSSPFSCMDLTYVSLLLQEFGFPRSKVLKLTRKIDNVETSWALGAIFHYIDSLNRQKSPAS

SEQ ID NO: 44707 - protein, 367 aa, Homo sapiens
MFDAGSTGTRVHVFQFTRPPRETPTLTHETFKALKPGLSAYADDVEKSAQGIRELLDVAKQDIPFDFWKATPLVLKATAGLRLLPGEKAQKLLQKVKKVFKASPFLVGDDCVSIMNGTDEGVSAWITINFLTGSLKTPGGSSVGMLDLGGGSTQIAFLPRVEGTLQASPPGYLTALRMFNRTYKLYSYSYLGLGLMSARLAILGGVEGQPAKDGKELVSPCLSPSFKGEWEHAEVTYRVSGQKAAASLHELCAARVSEVLQNRVHRTEEVKHVDFYAFSYYYDLAAGVGLIDAEKGGSLVVGDFEIAAKYGGSHLEREGTCLIPSVSDPGDTAAEQPLLMHGPHLRQPATPGVRLSQEQSAEAHSEN

SEQ ID NO: 44708 - protein, 484 aa, Homo sapiens
MKKGIRYETSRKTSYIFQQPQHGPWQTRMRKISNHGSLRVAKVAYPLGLCVGVFIYVAYIKWHRATATQAFFSITRAAPGARWGQQAHSPLGTAADGHEVFYGIMFDAGSTGTRVHVFQFTRPPRETPTLTHETFKALKPGLSAYADDVEKSAQGIRELLDVAKQDIPFDFWKATPLVLKATAGLRLLPGEKAQKLLQKVKKVFKASPFLVGDDCVSIMNGTDEGVSAWITINFLTGSLKTPGGSSVGMLDLGGGSTQIAFLPRVEGTLQASPPGYLTALRMFNRTYKLYSYSYLGLGLMSARLAILGGVEGQPAKDGKELVSPCLSPSFKGEWEHAEVTYRVSGQKAAASLHELCAARVSEVLQNRVHRTEEVKHVDFYAFSYYYDLAAGVGLIDAEKGGSLVVGDFEIAAKYVCRTLETQPQSSPFSCMDLTYVSLLLQEFGFPRSKVLKLTRKIDNVETSWALGAIFHYIDSLNRQKSPAS

SEQ ID NO: 44709 - protein, 295 aa, Homo sapiens
  VARIANT 1: note = MOD_RES - Any amino acid
XVLKATAGLRLLPGEKAQKLLQKVKKVFKASPFLVGDDCVSIMNGTDEGVSAWITINFLTGSLKTPGGSSVGMLDLGGGSTQIAFLPRVEGTLQASPPGYLTALRMFNRTYKLYSYSYLGLGLMSARLAILGGVEGQPAKDGKELVSPCLSPSFKGEWEHAEVTYRVSGQKAAASLHELCAARVSEVLQNRVHRTEEVKHVDFYAFSYYYDLAAGVGLIDAEKGGSLVVGDFEIAAKYGGSHLEREGTCLIPSVSDPGDTAAEQPLLMHGPHLRQPATPGVRLSQEQSAEAHSEN

SEQ ID NO: 44710 - protein, 226 aa, Homo sapiens
MPQHGPWQTRMRKISNHGSLRVAKVAYPLGLCVGVFIYVAYIKWHRATATQAFFSITRAAPGARWGQQAHSPLGTAADGHEVFYGIMFDAGSTGTRVHVFQFTRPPRETPTLTHETFKALKPGLSAYADDVEKVKKVFKASPFLVGDDCVSIMNGTDEGVSAWITINFLTGSLKTPGGSSVGMLDLGGGSTQIAFLPRVEGTLQASPPGYLTALRMFNRTYKLYSY

SEQ ID NO: 44711 - protein, 195 aa, Homo sapiens
MQPQHGPWQTRMRKISNHGSLRVAKVAYPLGLCVGVFIYVAYIKWHRATATQAFFSITRAAPGARWGQQAHSPLGTAADGHEVFYGIMFDAGSTGTRVHVFQFTRPPRETPTLTHETFKALKPGLSAYADDVEKVKKVFKASPFLVGDDCVSIMNGTDEGVSAWITINFLTGSLKTPGGSSVGMLDLGGGSTQIA

SEQ ID NO: 44712 - protein, 300 aa, Homo sapiens
MKKGIRYETSRKTSYIFQQPQHGPWQTRMRKISNHGSLRVAKVAYPLGLCVGVFIYVAYIKWHRATATQAFFSITRAAPGARWGQQAHSPLGTAADGHEVFYGIMFDAGSTGTRVHVFQFTRPPRETPTLTHETFKALKPGLSAYADDVEKVKKVFKASPFLVGDDCVSIMNGTDEGVSAWITINFLTGSLKTPGGSSVGMLDLGGGSTQIAFLPRVEGTLQASPPGYLTALRMFNRTYKLYSYSYLGLGLMSARLAILGGVEGQPAKDGKELVSPCLSPSFKGEWEHAEVTYRVSGQKA

SEQ ID NO: 44713 - protein, 150 aa, Homo sapiens
  VARIANT 1: note = MOD_RES - Any amino acid
XPGRGSPKDRLPPAPRKRALVSVGVAERAVHETPTLTHETFKALKPGLSAYADDVEKVKKVFKASPFLVGDDCVSIMNGTDEGVSAWITINFLTGSLKTPGGSSVGMLDLGGGSTQIAFLPRVEGTLQASPPGYLTALRMFNRTYKLYSY

SEQ ID NO: 44714 - protein, 437 aa, Homo sapiens
MKKGIRYETSRKTSYIFQQPQHGPWQTRMRKISNHGSLRVAKVAYPLGLCVGVFIYVAYIKWHRATATQAFFSITRAAPGARWGQQAHSPLGTAADGHEVFYGIMFDAGSTGTRVHVFQFTRPPRETPTLTHETFKALKPGLSAYADDVEKSAQGIRELLDVAKQDIPFDFWKATPLVLKATAGLRLLPGEKAQKLLQKVKKVFKASPFLVGDDCVSIMNGTDEGVSAWITINFLTGSLKTPGGSSVGMLDLGGGSTQIAFLPRVEGTLQASPPGYLTALRMFNRTYKLYSYSYLGLGLMSARLAILGGVEGQPAASLHELCAARVSEVLQNRVHRTEEVKHVDFYAFSYYYDLAAGVGLIDAEKGGSLVVGDFEIAAKYGGSHLEREGTCLIPSVSDPGDTAAEQPLLMHGPHLRQPATPGVRLSQEQSAEAHSEN

SEQ ID NO: 44715 - protein, 314 aa, Homo sapiens
  VARIANT 1: note = MOD_RES - Any amino acid
XNRGVVSRGWRPGWRRPGRGSPKDRLPPAPRKRALVSVGVAERAVHETPTLTHETFKALKPGLSAYADDVEKSAQGIRELLDVAKQDIPFDFWKATPLVLKATAGLRLLPGEKAQKLLQKVKKVFKASPFLVGDDCVSIMNGTDEGVSAWITINFLTGSLKTPGGSSVGMLDLGGGSTQIAFLPRVEGTLQASPPGYLTALRMFNRTYKLYSYSYLGLGLMSARLAILGGVEGQPAKDGKELVSPCLSPSFKGEWEHAEVTYRVSGQKAAASLHELCAARVSEVLQNRVHRTEEVKHVDFYAFSYYYDLAAGVG

SEQ ID NO: 44716 - protein, 188 aa, Homo sapiens
MKKGIRYETSRKTSYIFQPQHGPWQTRMRKISNHGSLRVAKVAYPLGLCVGVFIYVAYIKWHRATATQAFFSITRAAPGARWGQQAHSPLGTAADGHEVFYGIMFDAGSTGTRVHVFQFTRPPRETPTLTHETFKALKPGLSAYADDVEKSAQGIRELLDVAKQDIPFDFWKATPLVLKATAGLRLLP

SEQ ID NO: 44717 - protein, 296 aa, Homo sapiens
MPQHGPWQTRMRKISNHGSLRVAKVAYPLGLCVGVFIYVAYIKWHRATATQAFFSITRAAPGARWGQQAHSPLGTAADGHEVFYGIMFDAGSTGTRVHVFQFTRPPRETPTLTHETFKALKPGLSAYADDVEKSAQGIRELLDVAKQDIPFDFWKATPLVLKATAGLRLLPGEKAQKLLQKVKKVFKASPFLVGDDCVSIMNGTDEGVSAWITINFLTGSLKTPGGSSVGMLDLGGGSTQIAFLPRVEGTLQASPPGYLTALRMFNRTYKLYSYSYLGLGLMSARLAILGGVEGQP

SEQ ID NO: 44718 - protein, 311 aa, Homo sapiens
  VARIANT 1: note = MOD_RES - Any amino acid
XGSTGTRVHVFQFTRPPRETPTLTHETFKALKPGLSAYADDVEKSAQGIRELLDVAKQDIPFDFWKATPLVLKATAGLRLLPGEKAQKLLQKVKKVFKASPFLVGDDCVSIMNGTDEGVSAWITINFLTGSLKTPGGSSVGMLDLGGGSTQIAFLPRVEGTLQASPPGYLTALRMFNRTYKLYSYSYLGLGLMSARLAILGGVEGQPAASLHELCAARVSEVLQNRVHRTEEVKHVDFYAFSYYYDLAAGVGLIDAEKGGSLVVGDFEIAAKYVCRTLETQPQSSPFSCMDLTYVSLLLQEFGFPRSKVLK

SEQ ID NO: 44719 - protein, 313 aa, Homo sapiens
NRGVVSRGWRPGWRRPGRGSPKDRLPPAPRKRALVSVGVAERAVHETPTLTHETFKALKPGLSAYADDVEKSAQGIRELLDVAKQDIPFDFWKATPLVLKATAGLRLLPGEKAQKLLQKVKKVFKASPFLVGDDCVSIMNGTDEGVSAWITINFLTGSLKTPGGSSVGMLDLGGGSTQIAFLPRVEGTLQASPPGYLTALRMFNRTYKLYSYSYLGLGLMSARLAILGGVEGQPAKDGKELVSPCLSPSFKGEWEHAEVTYRVSGQKAAASLHELCAARVSEVLQNRVHRTEEVKHVDFYAFSYYYDLAAGVG

SEQ ID NO: 44720 - protein, 925 aa, Homo sapiens
MERDGCAGGGSRGGEGGRAPREGPAGNGRDRGRSHAAEAPGDPQAAASLLAPMDVGEEPLEKAARARTAKDPNTYKVLSLVLSVCVLTTILGCIFGLKPSCAKEVKSCKGRCFERTFGNCRCDAACVELGNCCLDYQETCIEPEHIWTCNKFRCGEKRLTRSLCACSDDCKDKGDCCINYSSVCQGEKSWVEEPCESINEPQCPAGFETPPTLLFSLDGFRAEYLHTWGGLLPVISKLKKCGTYTKNMRPVYPTKTFPNHYSIVTGLYPESHGIIDNKMYDPKMNASFSLKSKEKFNPEWYKGEPIWVTAKYQGLKSGTFFWPGSDVEINGIFPDIYKMYNGSVPFEERILAVLQWLQLPKDERPHFYTLYLEEPDSSGHSYGPVSSEVIKALQRVDGMVGMLMDGLKELNLHRCLNLILISDHGMEQGSCKKYIYLNKYLGDVKNIKVIYGPAARLRPSDVPDKYYSFNYEGIARNLSCREPNQHFKPYLKHFLPKRLHFAKSDRIEPLTFYLDPQWQLALNPSERKYCGSGFHGSDNVFSNMQALFVGYGPGFKHGIEADTFENIEVYNLMCDLLNLTPAPNNGTHGSLNHLLKNPVYTPKHPKEVHPLVQCPFTRNPRDNLGCSCNPSILPIEDFQTQFNLTVAEEKIIKHETLPYGRPRVLQKENTICLLSQHQFMSGYSQDILMPLWTSYTVDRNDSFSTEDFSNCLYQDFRIPLSPVHKCSFYKNNTKVSYGFLSPPQLNKNSSGIYSEALLTTNIVPMYQSFQVIWRYFHDTLLRKYAEERNGVNVVSGPVFDFDYDGRCDSLENLRQKRRVIRNQEILIPTHFFIVLTSCKDTSQTPLHCENLDTLAFILPHRTDNSESCVHGKHDSSWVEELLMLHRARITDVEHITGLSFYQQRKEPVSDILKLKTHLPTFSQED

SEQ ID NO: 44721 - protein, 863 aa, Homo sapiens
MARRSSFQSCQIISLFTFAVGVNICLGFTAHRIKRAEGWEEGPPTVLSDSPWTNISGSCKGRCFELQEAGPPDCRCDNLCKSYTSCCHDFDELCLKTARGWECTKDRCGEVRNEENACHCSEDCLARGDCCTNYQVVCKGESHWVDDDCEEIKAAECPAGFVRPPLIIFSVDGFRASYMKKGSKVMPNIEKLRSCGTHSPYMRPVYPTKTFPNLYTLATGLYPESHGIVGNSMYDPVFDATFHLRGREKFNHRWWGGQPLWITATKQGVKAGTFFWSVVIPHERRILTILQWLTLPDHERPSVYAFYSEQPDFSGHKYGPFGPEMTNPLREIDKIVGQLMDGLKQLKLHRCVNVIFVGDHGMEDVTCDRTEFLSNYLTNVDDITLVPGTLGRIRSKFSNNAKYDPKAIIANLTCKKPDQHFKPYLKQHLPKRLHYANNRRIEDIHLLVERRWHVARKPLDVYKKPSGKCFFQGDHGFDNKVNSMQTVFVGYGSTFKYKTKVPPFENIELYNVMCDLLGLKPAPNNGTHGSLNHLLRTNTFRPTMPEEVTRPNYPGIMYLQSDFDLGCTCDDKVEPKNKLDELNKRLHTKGSTEERHLLYGRPAVLYRTRYDILYHTDFESGYSEIFLMPLWTSYTVSKQAEVSSVPDHLTSCVRPDVRVSPSFSQNCLAYKNDKQMSYGFLFPPYLSSSPEAKYDAFLVTNMVPMYPAFKRVWNYFQRVLVKKYASERNGVNVISGPIFDYDYDGLHDTEDKIKQYVEGSSIPVPTHYYSIITSCLDFTQPADKCDGPLSVSSFILPHRPDNEESCNSSEDESKWVEELMKMHTARVRDIEHLTSLDFFRKTSRSYPEILTLKTYLHTYESEI

SEQ ID NO: 44722 - protein, 915 aa, Homo sapiens
MARRSSFQSCQIISLFTFAVGVNICLGFTAHRIKRAEGWEEGPPTVLSDSPWTNISGSCKGRCFELQEAGPPDCRCDNLCKSYTSCCHDFDELCLKTARGWECTKDRCGEVRNEENACHCSEDCLARGDCCTNYQVVCKGESHWVDDDCEEIKAAECPAGFVRPPLIIFSVDGFRASYMKKGSKVMPNIEKLRSCGTHSPYMRPVYPTKTFPNLYTLATGLYPESHGIVGNSMYDPVFDATFHLRGREKFNHRWWGGQPLWITATKQGVKAGTFFWSVVIPHERRILTILQWLTLPDHERPSVYAFYSEQPDFSGHKYGPFGPEESSYGSPFTPAKRPKRKVAPKRRQERPVAPPKKRRRKIHRMDHYAAETRQDKMTNPLREIDKIVGQLMDGLKQLKLHRCVNVIFVGDHGMEDVTCDRTEFLSNYLTNVDDITLVPGTLGRIRSKFSNNAKYDPKAIIANLTCKKPDQHFKPYLKQHLPKRLHYANNRRIEDIHLLVERRWHVARKPLDVYKKPSGKCFFQGDHGFDNKVNSMQTVFVGYGSTFKYKTKVPPFENIELYNVMCDLLGLKPAPNNGTHGSLNHLLRTNTFRPTMPEEVTRPNYPGIMYLQSDFDLGCTCDDKVEPKNKLDELNKRLHTKGSTEERHLLYGRPAVLYRTRYDILYHTDFESGYSEIFLMPLWTSYTVSKQAEVSSVPDHLTSCVRPDVRVSPSFSQNCLAYKNDKQMSYGFLFPPYLSSSPEAKYDAFLVTNMVPMYPAFKRVWNYFQRVLVKKYASERNGVNVISGPIFDYDYDGLHDTEDKIKQYVEGSSIPVPTHYYSIITSCLDFTQPADKCDGPLSVSSFILPHRPDNEESCNSSEDESKWVEELMKMHTARVRDIEHLTSLDFFRKTSRSYPEILTLKTYLHTYESEI

SEQ ID NO: 44723 - protein, 888 aa, Homo sapiens
MARRSSFQSCQIISLFTFAVGVNICLGFTAHRIKRAEGWEEGPPTVLSDSPWTNISGSCKGRCFELQEAGPPDCRCDNLCKSYTSCCHDFDELCLKTARGWECTKDRCGEVRNEENACHCSEDCLARGDCCTNYQVVCKGESHWVDDDCEEIKAAECPAGFVRPPLIIFSVDGFRASYMKKGSKVMPNIEKLRSCGTHSPYMRPVYPTKTFPNLYTLATGLYPESHGIVGNSMYDPVFDATFHLRGREKFNHRWWGGQPLWITATKQGVKAGTFFWSVVIPHERRILTILQWLTLPDHERPSVYAFYSEQPDFSGHKYGPFGPEMTNPLREIDKIVGQLMDGLKQLKLHRCVNVIFVGDHGMEDVTCDRTEFLSNYLTNVDDITLVPGTLGRIRSKFSNNAKYDPKAIIANLTCKKPDQHFKPYLKQHLPKRLHYANNRRIEDIHLLVERRWHVARKPLDVYKKPSGKCFFQGDHGFDNKVNSMQTVFVGYGSTFKYKTKVPPFENIELYNVMCDLLGLKPAPNNGTHGSLNHLLRTNTFRPTMPEEVTRPNYPGIMYLQSDFDLGCTCDDKVEPKNKLDELNKRLHTKGSTEAETRKFRGSRNENKENINGNFEPRKERHLLYGRPAVLYRTRYDILYHTDFESGYSEIFLMPLWTSYTVSKQAEVSSVPDHLTSCVRPDVRVSPSFSQNCLAYKNDKQMSYGFLFPPYLSSSPEAKYDAFLVTNMVPMYPAFKRVWNYFQRVLVKKYASERNGVNVISGPIFDYDYDGLHDTEDKIKQYVEGSSIPVPTHYYSIITSCLDFTQPADKCDGPLSVSSFILPHRPDNEESCNSSEDESKWVEELMKMHTARVRDIEHLTSLDFFRKTSRSYPEILTLKTYLHTYESEI

SEQ ID NO: 44724 - protein, 875 aa, Homo sapiens [sequence omitted]

SEQ ID NO: 44725 - protein, 663 aa, Homo sapiens
MESTLTLATEQPVKKNTLKKYKIACIVLLALLVIMSLGLGLGLGLRKLEKQGSCRKKCFDASFRGLENCRCDVACKDRGDCCWDFEDTCVESTRIWMCNKFRCGETRLEASLCSCSDDCLQRKDCCADYKSVCQGETSWLEENCDTAQQSQCPEGFDLPPVILFSMDGFRAEYLYTWDTLMPNINKLKTCGIHSKYMRAMYPTKTFPNHYTIVTGLYPESHGIIDNNMYDVNLNKNFSLSSKEQNNPAWWHGQPMWLTAMYQGLKAATYFWPGSEVAINGSFPSIYMPYNGSVPFEERISTLLKWLDLPKAERPRFYTMYFEEPDSSGHAGGPVSARVIKALQVVDHAFGMLMEGLKQRNLHNCVNIILLADHGMDQTYCNKMEYMTDYFPRINFFYMYEGPAPRIRAHNIPHDFFSFNSEEIVRNLSCRKPDQHFKPYLTPDLPKRLHYAKNVRIDKVHLFVDQQWLAVRSKSNTNCGGGNHGYNNEFRSMEAIFLAHGPSFKEKTEVEPFENIEVYNLMCDLLRIQPAPNNGTHGSLNHLLKVPFYEPSHAEEVSKFSVCGFANPLPTESLDCFCPHLQNSTQLEQVNQMLNLTQEEITATVKVNLPFGRPRVLQKNVDHCLLYHREYVSGFGKAMRMPMWSSYTVPQLPAIEHQIANMML

SEQ ID NO: 44726 - protein, 875 aa, Homo sapiens [sequence omitted]

SEQ ID NO: 44727 - protein, 254 aa, Homo sapiens
MSLGLGLGLGLRKLEKQGSCRKKCFDASFRGLENCRCDVACKDRGDCCWDFEDTCVESTRIWMCNKFRCGETRLEASLCSCSDDCLQRKDCCADYKSVCQGETSWLEENCDTAQQSQCPEGFDLPPVILFSMDGFRAEYLYTWDTLMPNINKLKTCGIHSKYMRAMYPTKTFPNHYTIVTGLYPESHGIIDNNMYDVNLNKNFSLSSKEQNNPAWWHGQPVCSILHVATEVTSISQCDRRTLFSLSGASSMSPI

SEQ ID NO: 44728 - protein, 257 aa, Homo sapiens
MSLGLGLGLGLRKLEKQGSCRKKCFDASFRGLENCRCDVACKDRGDCCWDFEDTCVESTRIWMCNKFRCGETRLEASLCSCSDDCLQRKDCCADYKSVCQGETSWLEENCDTAQQSQCPEGFDLPPVILFSMDGFRAEYLYTWDTLMPNINKLKTCGIHSKYMRAMYPTKTFPNHYTIVTGLYPESHGIIDNNMYDVNLNKNFSLSSKEQNNPAWWHGQPMWLTAMYQGLKAATYFWPGSEVAINGSFPSIYMPYNG

SEQ ID NO: 44729 - protein, 399 aa, Homo sapiens
MASPGKPGADEAQEEEGELEGGSAGPRAAILEQAEELFLLCDKEAKGFITKHDLQGLQSDLPLTPEQLEAVFESLDRAHTGFLTAREFCLGLGMFVGVASAQGANPCRTPEETFESGGLDVQGTAGSLDEEEEEEERFHTVLEQLGVAPVLGKQRAVRTLWARLQRERPELLGSFEDVLIRASACLEEAARERDGLEQALRRRESEHEREVRALYEETEQLREQSRRPPSQNFARGERRSRLELELQSREQDLERAGLRQRELEQQLHAQAAEHLEAQAQNSQLWRAHEALRTQLEGAQEQIRRLESEARGRQEQTQRDVVAVSRNMQKEKVSLLRQLELLRELNTRLRDDRDACEARRAGSSCRKALTTARLPGPTCCCCCCWARPPRRGSGHLPSAR

SEQ ID NO: 44730 - protein, 294 aa, Homo sapiens
MASPGKPGADEAQEEEGELEGGSAGPRAAILEQAEELFLLCDKEAKGFITKHDLQGLQSDLPLTPEQLEAVFESLDRAHTGFLTAREFCLGLGMFVGVASAQGANPCRTPEETFESGGLDVQGTAGSLDEEEEEEERFHTVLEQLGVAPVLGKQRAVRTLWARLQRERPELLGSFEDVLIRASACLEEAARERDGLEQALRRRESEHEREVRALYEETEQLREQSRRPPSQNFARGERRSRLELELQSREQDLERAGLRQRERRGRRLQEHAERESQPATATGAAQGAEYTAAG

SEQ ID NO: 44731 - protein, 88 aa, Homo sapiens
MASPGKPGADEAQEEEGELEGGSAGPRAAILEQAEELFLLCDKEAKGFITKHDLQGLQSDLPLTPEQLEAVFESLDRAHTGFLTAREF

SEQ ID NO: 44732 - protein, 34 aa, Homo sapiens
MASPGKPGADEAQEEEGELEGGSAGPRAAILEQA

SEQ ID NO: 44733 - protein, 294 aa, Homo sapiens; identical to SEQ ID NO: 44730

SEQ ID NO: 44734 - protein, 53 aa, Homo sapiens
MASPGKPGADEAQEEEGELEGGSAGPRAAILEQAEELFLLCDKEAKGFITKHD

SEQ ID NO: 44735 - protein, 81 aa, Homo sapiens
MASPGKPGADEAQEEEGELEGGSAGPRAAILEQAEELFLLCDKEAKGFITKHDLQGLQSDLPLTPEQLEAVFESLDRAHTG

SEQ ID NO: 44736 - protein, 395 aa, Homo sapiens
MAAPDGRVVSRPQRLGQGSGQGPKGSGACLHPLDSLEQKETQEQTSGQLVMLRKAQEFFQTCDAEGKGFIARKDMQRLHKELPLSLEELEDVFDALDADGNGYLTPQEFTTGFSHFFFSQNNPSQEDAGEQVAQRHEEKVYLSRGDEDLGDMGEDEEAQFRMLMDRLGAQKVLEDESDVKQLWLQLKKEEPHLLSNFEDFLTRIISQLQEAHEEKNELECALKRKIAAYDEEIQHLYEEMEQQIKSEKEQFLLKDTERFQARSQELEQKLLCKEQELEQLTQKQKRLEGQCTALHHDKHETKAENTKLKLTNQELARELERTSWELQDAQQQLESLQQEACKLHQEKEMEVYRVTESLQREKAGLLKQLDFLRCVGGHWPVLRAPPRSLGSEGPV

SEQ ID NO: 44737 - protein, 731 aa, Homo sapiens
MAAPDGRVVSRPQRLGQGSGQGPKGSGACLHPLDSLEQKETQEQTSGQLVMLRKAQEFFQTCDAEGKGFIARKDMQRLHKELPLSLEELEDVFDALDADGNGYLTPQEFTTGFSHFFFSQNNPSQEDAGEQVAQRHEEKVYLSRGDEDLGDMGEDEEAQFRMLMDRLGAQKVLEDESDVKQLWLQLKKEEPHLLSNFEDFLTRIISQLQEAHEEKNELECALKRKIAAYDEEIQHLYEEMEQQIKSEKEQFLLKDTERFQARSQELEQKLLCKEQELEQLTQKQKRLEGQCTALHHDKHETKAENTKLKLTNQELARELERTSWELQDAQQQLESLQQEACKLHQEKEMEVYRVTESLQREKAGLLKQLDFLRERNKHLRDERDICFQKNKAAKANTAASRASWKKRSGSVIGKYVDSRGILRSQSEEEEEVFGIPRRSSLGLSGYPLTEEEPGTGEPGPGGPYPRPLRRIISVEEDPLPQLLDGGFEQPLSKCSEEEEVSDQGVQGQIPEAPPLKLTPTSPRGQPVGKEALCKEESSPSAPDRLFKIVFVGNSAVGKTSFLRRFCEDRFSPGMAATVGIDYRVKTLNVDNSQVALQLWDTAGQERYRCITQQFFRKADGVIVMYDLTDKQSFLSVRRWLSSVEEAVGDRVPVLLLGNKLDNEKEREVPRGLGEQLATENNLIFYECSAYSGHNTKESLLHLARFLKEQEDTVREDTIQVGHPAKKKSCCG

SEQ ID NO: 44738 - protein, 462 aa, Homo sapiens
MAAPDGRVVSRPQRLGQGSGQGPKGSGACLHPLDSLEQKETQEQTSGQLVMLRKAQEFFQTCDAEGKGFIARKDMQRLHKELPLSLEELEDVFDALDADGNGYLTPQEFTTGFSHFFFSQNNPSQEDAGEQVAQRHEEKVYLSRGDEDLGDMGEDEEAQFRMLMDRLGAQKVLEDESDVKQLWLQLKKEEPHLLSNFEDFLTRIISQLQEAHEEKNELECALKRKIAAYDEEIQHLYEEMEQQIKSEKEQFLLKDTERFQARSQELEQKLLCKEQELEQLTQKQKRLEGQCTALHHDKHETKAENTKLKLTNQELARELERTSWELQDAQQQLESLQQEACKLHQEKEMEVYRVTESLQREKAGLLKQLDFLRERNKHLRDERDICFQKNKAAKANTAASRASWKKRSGSVIGKYVDSRGILRRWPQRDRGIPTLQYQTQRDLEDCKHEMKKICKAEVTLEM

SEQ ID NO: 44739 - protein, 118 aa, Homo sapiens
  VARIANT 1: note = MOD_RES - Any amino acid
XEKEMEVYRVTESLQREKAGLLKQLDFLRERNKHLRDERDICFQKNKAAKANTAASRASWKKRSGSVIGKYVDSRGILRRWPQRDRGIPTLQYQTQRDLEDCKHEMKKICKAEVTLEM

SEQ ID NO: 44740 - protein, 640 aa, Homo sapiens
MVSNPVHGLPFLPGTSFKDSTKTAFHRSQTLSYRNGYAIVRRPTVGIGGDRLQFNQLSQAELDELASKAPVLTYGQPKQAPPADFIPAHVAFDKKVLKFDAYFQEDVPMSTEEQYRIRQVNIYYYLEDDSMSVIEPVVENSGILQGKLIKRQRLAKNDRGDHYHWKDLNRGINITIYGKTFRVVDCDQFTQVFLESQGIELNPPEKMALDPYTELRKQPLRKYVTPSDFDQLKQFLTFDKQVLRFYAIWDDTDSMYGECRTYIIHYYLMDDTVEIREVHERNDGRDPFPLLMNRQRVPKVLVENAKNFPQCVLEISDQEVLEWYTAKDFIVGKSLTILGRTFFIYDCDPFTRRYYKEKFGITDLPRIDVSKREPPPVKQELPPYNGFGLVEDSAQNCFALIPKAPKKDVIKMLVNDNKVLRYLAVLESPIPEDKDRRFVFSYFLATDMISIFEPPVRNSGIIGGKYLGRTKVVKPYSTVDNPVYYGPSDFFIGAVIEVFGHRFIILDTDEYVLKYMESNAAQYSPEALASIQNHVRKREAPAPEAESKQTEKDPGVQELEALIDTIQKQLKDHSCKDNIREAFQIYDKEASGYVDRDMFFKICESLNVPVDDSLVKELIRMCSHGEGKINYYNFVRAFSN

SEQ ID NO: 44741 - protein, 550 aa, Homo sapiens
MSWPVLKFDAYFQEDVPMSTEEQYRIRQVNIYYYLEDDSMSVIEPVVENSGILQGKLIKRQRLAKNDRGDHYHWKDLNRGINITIYGKTFRVVDCDQFTQVFLESQGIELNPPEKMALDPYTELRKQPLRKYVTPSDFDQLKQFLTFDKQVLRFYAIWDDTDSMYGECRTYIIHYYLMDDTVEIREVHERNDGRDPFPLLMNRQRVPKVLVENAKNFPQCVLEISDQEVLEWYTAKDFIVGKSLTILGRTFFIYDCDPFTRRYYKEKFGITDLPRIDVSKREPPPVKQELPPYNGFGLVEDSAQNCFALIPKAPKKDVIKMLVNDNKVLRYLAVLESPIPEDKDRRFVFSYFLATDMISIFEPPVRNSGIIGGKYLGRTKVVKPYSTVDNPVYYGPSDFFIGAVIEVFGHRFIILDTDEYVLKYMESNAAQYSPEALASIQNHVRKREAPAPEAESKQTEKDPGVQELEALIDTIQKQLKDHSCKDNIREAFQIYDKEASGYVDRDMFFKICESLNVPVDDSLVKEVTCKRLLLPAFTFPSPVWIPLCGL

SEQ ID NO: 44742 - protein, 621 aa, Homo sapiens
MLKTAFHRSQTLSYRNGYAIVRRPTVGIGGDRLQFNQLSQAELDELASKAPVLTYGQPKQAPPADFIPAHVAFDKKVLKFDAYFQEDVPMSTEEQYRIRQVNIYYYLEDDSMSVIEPVVENSGILQGKLIKRQRLAKNDRGDHYHWKDLNRGINITIYGKTFRVVDCDQFTQVFLESQGIELNPPEKMALDPYTELRKQPLRKYVTPSDFDQLKQFLTFDKQVLRFYAIWDDTDSMYGECRTYIIHYYLMDDTVEIREVHERNDGRDPFPLLMNRQRVPKVLVENAKNFPQCVLEISDQEVLEWYTAKDFIVGKSLTILGRTFFIYDCDPFTRRYYKEKFGITDLPRIDVSKREPPPVKQELPPYNGFGLVEDSAQNCFALIPKAPKKDVIKMLVNDNKVLRYLAVLESPIPEDKDRRFVFSYFLATDMISIFEPPVRNSGIIGGKYLGRTKVVKPYSTVDNPVYYGPSDFFIGAVIEVFGHRFIILDTDEYVLKYMESNAAQYSPEALASIQNHVRKREAPAPEAESKQTEKDPGVQELEALIDTIQKQLKDHSCKDNIREAFQIYDKEASGYVDRDMFFKICESLNVPVDDSLVKELIRMCSHGEGKINYYNFVRAFSN

SEQ ID NO: 44743 - protein, 749 aa, Homo sapiens
MALPLLPGNSFNRNVGKEKFHKSQHWGFCNNVMMLVSDEKPGIGGEPLLGQKIKPKCSIYPKGDGSDVPSWVAFDKQVLSFDAYLEEEVLDKSQTNYRIRYYKIYFYPEDDTIQVNEPEVKNSGLLQGTSIRRHRITLPPPDEDQFYTVYHFNVGTEVVFYGRTFKIYDCDAFTRNFLRKIGVKVNPPVQCPEDPYMKIRREVVEHVEPLRPYESLDTLKQFLQYHGKILCFFCLWDDSVSMFGDRRELILHYFLCDDTIEIKELLPHSSGRDALKMFLRRSKLPKNCPPRVYQPGQITDRAVLNSYGDFIKNQADGYLFDRYKLGKVDQEFYKDSDLSLGVTINVWGRKVLLYDCDEFTKSYYKSKYGIENFTSVSCKPPSPPPKIERKFPPYNGFGSEEDSLRNCIDLKPTPHRRNFKKFMEKDSYGSKSNILRFFAKLVTDKCVDLDRMFVISYYLGDDTISVFEPIERNSGIAGGMFLKRSRVKKPGQEVFKSELSEYIKAEELYIGVTVNVNGYLFRLLNADEYTLNYMEQNTDKYPFSNLKLALQKLKQEEGKSRELKQVFKAADSKHTNMVDYNTFRDILMSLTVGNLAEQEFVTIARHYRVPEGTCSDMDFLIALAHEKFKKNMFENFDTFIYSCVYEDREKKNVLPTKDIKRLCKSSRLPLSDDLLESLLSRFEDSEKQIDYKSFFSALNWRKNPVPELQPASYLKERCEDVWLGMPSPIPAKYIDYWTFLKDAFGLEEE

SEQ ID NO: 44744 - protein, 162 aa, Homo sapiens
MSLTVGNLAEQEFVTIARHYRVPEGTCSDMDFLIALAHEKFKKNMFENFDTFIYSCVYEDREKKNVLPTKDIKRLCKSSRLPLSDDLLESLLSRFEDSEKQIDYKSFFSALNWRKNPVPELQPASYLKERCEDVWLGMPSPIPAKYIDYWTFLKDAFGLEEE

SEQ ID NO: 44745 - protein, 250 aa, Homo sapiens
MKIRREVVEHVEPLRPYESLDTLKQFLQYHGKILCFFCLWDDSVSMFGDRRELILHYFLCDDTIEIKELLPHSSGRDALKMFLRRSKLPKNCPPRVYQPGQITDRAVLNSYGDFIKNQADGYLFDRYKLGKVDQEFYKDSDLSLGVTINVWGRKVLLYDCDEFTKSYYKSKYGIENFTSVSCKPPSPPPKIERKFPPYNGFGSEEDSLRNCIDLKPTPHRRNFKKFMEKDSYGSKSNILFFCKTSHRQMC

SEQ ID NO: 44746 - protein, 777 aa, Homo sapiens
GGQTTRPGGAAACRALSSGTLDFRTLSAMALPLLPGNSFNRNVGKEKFHKSQHWGFCNNVMMLVSDEKPGIGGEPLLGQKIKPKCSIYPKGDGSDVPSWVAFDKQVLSFDAYLEEEVLDKSQTNYRIRYYKIYFYPEDDTIQVNEPEVKNSGLLQGTSIRRHRITLPPPDEDQFYTVYHFNVGTEVVFYGRTFKIYDCDAFTRNFLRKIGVKVNPPVQCPEDPYMKIRREVVEHVEPLRPYESLDTLKQFLQYHGKILCFFCLWDDSVSMFGDRRELILHYFLCDDTIEIKELLPHSSGRDALKMFLRRSKLPKNCPPRVYQPGQITDRAVLNSYGDFIKNQADGYLFDRYKLGKVDQEFYKDSDLSLGVTINVWGRKVLLYDCDEFTKSYYKSKYGIENFTSVSCKPPSPPPKIERKFPPYNGFGSEEDSLRNCIDLKPTPHRRNFKKFMEKDSYGSKSNILRFFAKLVTDKCVDLDRMFVISYYLGDDTISVFEPIERNSGIAGGMFLKRSRVKKPGQEVFKSELSEYIKAEELYIGVTVNVNGYLFRLLNADEYTLNYMEQNTDKYPFSNLKLALQKLKQEEGKSRELKQVFKAADSKHTNMVDYNTFRDILMSLTVGNLAEQEFVTIARHYRVPEGTCSDMDFLIALAHEKFKKNMFENFDTFIYSCVYEDREKKNVLPTKDIKRLCKSSRLPLSDDLLESLLSRFEDSEKQIDYKSFFSALNWRKNPVPELQPASYLKERCEDVWLGMPSPIPAKYIDYWTFLKDAFGLEEE

SEQ ID NO: 44747 - protein, 730 aa, Homo sapiens
  VARIANT 1: note = MOD_RES - Any amino acid
XNNTAGRRRCLPGPLFWDPGFSDTERHGPASAAGQQLQPQREKGDGSDVPSWVAFDKQVLSFDAYLEEEVLDKSQTNYRIRYYKIYFYPEDDTIQVNEPEVKNSGLLQGTSIRRHRITLPPPDEDQFYTVYHFNVGTEVVFYGRTFKIYDCDAFTRNFLRKIGVKVNPPVQCPEDPYMKIRREVVEHVEPLRPYESLDTLKQFLQYHGKILCFFCLWDDSVSMFGDRRELILHYFLCDDTIEIKELLPHSSGRDALKMFLRRSKLPKNCPPRVYQPGQITDRAVLNSYGDFIKNQADGYLFDRYKLGKVDQEFYKDSDLSLGVTINVWGRKVLLYDCDEFTKSYYKSKYGIENFTSVSCKPPSPPPKIERKFPPYNGFGSEEDSLRNCIDLKPTPHRRNFKKFMEKDSYGSKSNILRFFAKLVTDKCVDLDRMFVISYYLGDDTISVFEPIERNSGIAGGMFLKRSRVKKPGQEVFKSELSEYIKAEELYIGVTVNVNGYLFRLLNADEYTLNYMEQNTDKYPFSNLKLALQKLKQEEGKSRELKQVFKAADSKHTNMVDYNTFRDILMSLTVGNLAEQEFVTIARHYRVPEGTCSDMDFLIALAHEKFKKNMFENFDTFIYSCVYEDREKKNVLPTKDIKRLCKSSRLPLSDDLLESLLSRFEDSEKQIDYKSFFSALNWRKNPVPELQPASYLKERCEDVWLGMPSPIPAKYIDYWTFLKDAFGLEEE

SEQ ID NO: 44748 - protein, 239 aa, Homo sapiens
MASEELACKLERRLRREEAEESGPQLAPLGAPAPEPKPEPEPPARAPTASADAELSAQLSRRLDINEGAARPRRCRVFNPYTEFPEFSRRLIKDLESMFKLYDAGRDGFIDLMELKLMMEKLGAPQTHLGLKSMIKEVDEDFDGKLSFREFLLIFHKAAAGELQEDSGLMALAKLSEIDVALEGVKGAKNFFEAKVQALSSASKFEAELKAEQDERKREEEERRLRQAAFQKLKANFNT

SEQ ID NO: 44749 - protein, 143 aa, Homo sapiens
MGELQYDAGRDGFIDLMELKLMMEKLGAPQTHLGLKSMIKEVDEDFDGKLSFREFLLIFHKAAAGELQEDSGLMALAKLSEIDVALEGVKGAKNFFEAKVQALSSASKFEAELKAEQDERKREEEERRLRQAAFQKLKANFNT

SEQ ID NO: 44750 - protein, 127 aa, Homo sapiens
MELKLMMEKLGAPQTHLGLKSMIKEVDEDFDGKLSFREFLLIFHKAAAGELQEDSGLMALAKLSEIDVALEGVKGAKNFFEAKVQALSSASKFEAELKAEQDERKREEEERRLRQAAFQKLKANFNT

SEQ ID NO: 44751 - protein, 127 aa, Homo sapiens; identical to SEQ ID NO: 44750

SEQ ID NO: 44752 - protein, 142 aa, Homo sapiens
MFKLYDAGRDGFIDLMELKLMMEKLGAPQTHLGLKSMIKEVDEDFDGKLSFREFLLIFHKAAAGELQEDSGLMALAKLSEIDVALEGVKGAKNFFEAKVQALSSASKFEAELKAEQDERKREEEERRLRQAAFQKLKANFNT

SEQ ID NO: 44753 - protein, 821 aa, Homo sapiens
MPTRVCCCCSALRPRYKRLVDNIFPEDPKDGLVKTDMEKLTFYAVSAPEKLDRIGSYLAERLSRDVVRHRSGYVLIAMEALDQLLMACHSQSIKPFVESFLHMVAKLLESGEPKLQVLGTNSFVKFANIEEDTPSYHRRYDFFVSRFSAMCHSCHSDPEIRTEIRIAGIRGIQGVVRKTVNDELRATIWEPQHMDKIVPSLLFNMQKIEEVDSRIGPPSSPSATDKEENPAVLAENCFRELLGRATFGNMNNAVRPVFAHLDHHKLWDPNEFAVHCFKIIMYSIQAQYSHHVIQEILGHLDARKKDAPRVRAGIIQVLLEAVAIAAKGSIGPTVLEVFNTLLKHLRLSVEFEANDLQGGSVGSVNLNTSSKDNDEKIVQNAIIQTIGFFGSNLPDYQRSEIMMFIMGKVPVFGTSTHTLDISQLGDLGTRRIQIMLLRSLLMVTSGYKAKTIVTALPGSFLDPLLSPSLMEDYELRQLVLEVMHNLMDRHDNRAKLRGIRIIPDVADLKIKREKICRQDTSFMKKNGQQLYRHIYLGCKEEDNVQKNYELLYTSLALITIELANEEVVIDLIRLAIALQDSAIINEDNLPMFHRCGIMALVAAYLNFVSQMIAVPAFCQHVSKVIEIRTMEAPYFLPEHIFRDKCMLPKSLEKHEKDLYFLTNKIAESLGGSGYSVERLSVPYVPQVTDEDRLSRRKSIVDTVSIQVDILSNNVPSDDVVSNTEEITFEALKKAIDTSGMEEQEKEKRRLVIEKFQKAPFEEIAAQCESKANLLHDRLAQILELTIRPPPSPSGTLTITSGHAQYQSVPVYEMKFPDLCVY

SEQ ID NO: 44754 - protein, 821 aa, Homo sapiens
MKSRVCCCCSALRPRYKRLVDNIFPEDPKDGLVKTDMEKLTFYAVSAPEKLDRIGSYLAERLSRDVVRHRSGYVLIAMEALDQLLMACHSQSIKPFVESFLHMVAKLLESGEPKLQVLGTNSFVKFANIEEDTPSYHRRYDFFVSRFSAMCHSCHSDPEIRTEIRIAGIRGIQGVVRKTVNDELRATIWEPQHMDKIVPSLLFNMQKIEEVDSRIGPPSSPSATDKEENPAVLAENCFRELLGRATFGNMNNAVRPVFAHLDHHKLWDPNEFAVHCFKIIMYSIQAQYSHHVIQEILGHLDARKKDAPRVRAGIIQVLLEAVAIAAKGSIGPTVLEVFNTLLKHLRLSVEFEANDLQGGSVGSVNLNTSSKDNDEKIVQNAIIQTIGFFGSNLPDYQRSEIMMFIMGKVPVFGTSTHTLDISQLGDLGTRRIQIMLLRSLLMVTSGYKAKTIVTALPGSFLDPLLSPSLMEDYELRQLVLEVMHNLMDRHDNRAKLRGIRIIPDVADLKIKREKICRQDTSFMKKNGQQLYRHIYLGCKEEDNVQKNYELLYTSLALITIELANEEVVIDLIRLAIALQDSAIINEDNLPMFHRCGIMALVAAYLNFVSQMIAVPAFCQHVSKVIEIRTMEAPYFLPEHIFRDKCMLPKSLEKHEKDLYFLTNKIAESLGGSGYSVERLSVPYVPQVTDEDRLSRRKSIVDTVSIQVDILSNNVPSDDVVSNTEEITFEALKKAIDTSGMEEQEKEKRRLVIEKFQKAPFEEIAAQCESKANLLHDRLAQILELTIRPPPSPSGTLTITSGHAQYQSVPVYEMKFPDLCVY

SEQ ID NO: 44755 - protein, 777 aa, Homo sapiens
MPKGVCCCCSALRPRYKRLVDNIFPEDPKDGLVKTDMEKLTFYAVSAPEKLDRIGSYLAERLSRDVVRHRSGYVLIAMEALDQLLMACHSQSIKPFVESFLHMVAKLLESGEPKLQVLGTNSFVKFANIEEDTPSYHRRYDFFVSRFSAMCHSCHSDPEIRTEIRIAGIRGIQGVVRKTVNDELRATIWEPQHMDKIVPSLLFNMQKIEEVDSRIGPPSSPSATDKEENPAVLAENCFRELLGRATFGNMNNAVRPVFAHLDHHKLWDPNEFAVHCFKIIMYSIQAQYSHHVIQEILGHLDARKKDAPRVRAGIIQVLLEAVAIAAKGSIGPTVLEVFNTLLKHLRLSVEFEANDLQGGSVGSVNLNTSSKDNDEKIVQNAIIQTIGFFGSNLPDYQRSEIMMFIMGKVPVFGTSTHTLDISQLGDLGTRRIQIMLLRSLLMVTSGYKAKTIVTALPGSFLDPLLSPSLMEDYELRQLVLEVMHNLMDRHDNRAKLRGIRIIPDVADLKIKREKICRQDTSFMKKNGQQLYRHIYLGCKEEDNVQKNYELLYTSLALITIELANEEVVIDLIRLAIALQDSAIINEDNLPMFHRCGIMALVAAYLNFVSQMIAVPAFCHKIAESLGGSGYSVERLSVPYVPQVTDEDRLSRRKSIVDTVSIQVDILSNNVPSDDVVSNTEEITFEALKKAIDTSGMEEQEKEKRRLVIEKFQKAPFEEIAAQCESKANLLHDRLAQILELTIRPPPSPSGTLTITSGHAQYQSVPVYEMKFPDLCVY

SEQ ID NO: 44756 - protein, 200 aa, Homo sapiens
MLARLLKFEEAPYFLPEHIFRDKCMLPKSLEKHEKDLYFLTNKIAESLGGSGYSVERLSVPYVPQVTDEDRLSRRKSIVDTVSIQVDILSNNVPSDDVVSNTEEITFEALKKAIDTSGMEEQEKEKRRLVIEKFQKAPFEEIAAQCESKANLLHDRLAQILELTIRPPPSPSGTLTITSGHAQYQSVPVYEMKFPDLCVY

SEQ ID NO: 44757 - protein, 785 aa, Homo sapiens
MEKLTFYAVSAPEKLDRIGSYLAERLSRDVVRHRSGYVLIAMEALDQLLMACHSQSIKPFVESFLHMVAKLLESGEPKLQVLGTNSFVKFANIEEDTPSYHRRYDFFVSRFSAMCHSCHSDPEIRTEIRIAGIRGIQGVVRKTVNDELRATIWEPQHMDKIVPSLLFNMQKIEEVDSRIGPPSSPSATDKEENPAVLAENCFRELLGRATFGNMNNAVRPVFAHLDHHKLWDPNEFAVHCFKIIMYSIQAQYSHHVIQEILGHLDARKKDAPRVRAGIIQVLLEAVAIAAKGSIGPTVLEVFNTLLKHLRLSVEFEANDLQGGSVGSVNLNTSSKDNDEKIVQNAIIQTIGFFGSNLPDYQRSEIMMFIMGKVPVFGTSTHTLDISQLGDLGTRRIQIMLLRSLLMVTSGYKAKTIVTALPGSFLDPLLSPSLMEDYELRQLVLEVMHNLMDRHDNRAKLRGIRIIPDVADLKIKREKICRQDTSFMKKNGQQLYRHIYLGCKEEDNVQKNYELLYTSLALITIELANEEVVIDLIRLAIALQDSAIINEDNLPMFHRCGIMALVAAYLNFVSQMIAVPAFCQHVSKVIEIRTMEAPYFLPEHIFRDKCMLPKSLEKHEKDLYFLTNKIAESLGGSGYSVERLSVPYVPQVTDEDRLSRRKSIVDTVSIQVDILSNNVPSDDVVSNTEEITFEALKKAIDTSGMEEQEKEKRRLVIEKFQKAPFEEIAAQCESKANLLHDRLAQILELTIRPPPSPSGTLTITSGHAQYQSVPVYEMKFPDLCVY

SEQ ID NO: 44758 - protein, 493 aa, Homo sapiens
MLKALFLTMLTLALVKSQDTEETITYTQCTDGYEWDPVRQQCKDIDECDIVPDACKGGMKCVNHYGGYLCLPKTAQIIVNNEQPQQETQPAEGTSGATTGVVAASSMATSGVLPGGGFVASAAAVAGPEMQTGRNNFVIRRNPADPQRIPSNPSHRIQCAAGYEQSEHNVCQDIDECTAGTHNCRADQVCINLRGSFACQCPPGYQKRGEQCVDIDECTIPPYCHQRCVNTPGSFYCQCSPGFQLAANNYTCVDINECDASNQCAQQCYNILGSFICQCNQGYELSSDRLNCEDIDECRTSSYLCQYQCVNEPGKFSCMCPQGYQVVRSRTCQDINECETTNECREDEMCWNYHGGFRCYPRNPCQDPYILTPENRCVCPVSNAMCRELPQSIVYKYMSIRSDRSVPSDIFQIQATTIYANTINTFRIKSGNENGEFYLRQTSPVSAMLVLVKSLSGPREHIVDLEMLTVSSIGTFRTSSVLRLTIIVGPFSF

SEQ ID NO: 44759 - protein, 493 aa, Homo sapiens; identical to SEQ ID NO: 44758

SEQ ID NO: 44760 - protein, 493 aa, Homo sapiens; identical to SEQ ID NO: 44758

SEQ ID NO: 44761 - protein, 349 aa, Homo sapiens
MEDTSAFRKQPRLLSIMNSLSSEHNVCQDIDECTAGTHNCRADQVCINLRGSFACQCPPGYQKRGEQCVDIDECTIPPYCHQRCVNTPGSFYCQCSPGFQLAANNYTCVDINECDASNQCAQQCYNILGSFICQCNQGYELSSDRLNCEDIDECRTSSYLCQYQCVNEPGKFSCMCPQGYQVVRSRTCQDINECETTNECREDEMCWNYHGGFRCYPRNPCQDPYILTPENRCVCPVSNAMCRELPQSIVYKYMSIRSDRSVPSDIFQIQATTIYANTINTFRIKSGNENGEFYLRQTSPVSAMLVLVKSLSGPREHIVDLEMLTVSSIGTFRTSSVLRLTIIVGPFSF

SEQ ID NO: 44762 - protein, 52 aa, Homo sapiens
MLKALFLTMLTLALVKSQDTEETITYTQCTDGYEWDPVRQQCKDIDECDIVP

SEQ ID NO: 44763 - protein, 27 aa, Homo sapiens
MLKALFLTMLTLALVKSQDTEETITYT

SEQ ID NO: 44764 - protein, 355 aa, Homo sapiens
MKCVNHYGGYLCLPKTAQIIVNNEQPQQETQPAEGTSGATTGVVAASSMATSGVLPGGGFVASAAAVAGPEMQTGRNNFVIRRNPADPQRIPSNPSHRIQCAAGYEQSEHNVCQDIDECTAGTHNCRADQVCINLRGSFACQCPPGYQKRGEQCVDIDECRTSSYLCQYQCVNEPGKFSCMCPQGYQVVRSRTCQDINECETTNECREDEMCWNYHGGFRCYPRNPCQDPYILTPENRCVCPVSNAMCRELPQSIVYKYMSIRSDRSVPSDIFQIQATTIYANTINTFRIKSGNENGEFYLRQTSPVSAMLVLVKSLSGPREHIVDLEMLTVSSIGTFRTSSVLRLTIIVGPFSF

SEQ ID NO: 44765 - protein, 87 aa, Homo sapiens
MLKALFLTMLTLALVKSQDTEETITYTQCTDGYEWDPVRQQCKDIDECDIVPDACKGGMKCVNHYGGYLCLPKTAQIIVNNEQPQQE

SEQ ID NO: 44766 - protein, 172 aa, Homo sapiens
MLKALFLTMLTLALVKSQDTEETITYTQCTDGYEWDPVRQQCKDIDECDIVPDACKGGMKCVNHYGGYLCLPKTAQIIVNNEQPQQETQPAEGTSGATTGVVAASSMATSGVLPGGGFVASAAAVAGPEMQTGRNNFVIRRNPADPQRIPSNPSHRIQCAAGYEQSEHNVCQ

SEQ ID NO: 44767 - protein, 119 aa, Homo sapiens
MLKALFLTMLTLALVKSQDTEETITYTQCTDGYEWDPVRQQCKDIDECDIVPDACKGGMKCVNHYGGYLCLPKTAQIIVNNEQPQQETQPAEGTSGATTGVVAASSMATSGVLPGGGFV

SEQ ID NO: 44768 - protein, 106 aa, Homo sapiens
MLKALFLTMLTLALVKSQDTEETITYTQCTDGYEWDPVRQQCKDIDECDIVPDACKGGMKCVNHYGGYLCLPKTAQIIVNNEQPQQETQPAEGTSGATTGVVAASS

SEQ ID NO: 44769 - protein, 62 aa, Homo sapiens
MLKALFLTMLTLALVKSQDTEETITYTQCTDGYEWDPVRQQCKDIDECDIVPDACKGGMKCV

SEQ ID NO: 44770 - protein, 443 aa, Homo sapiens
MLPCASCLPGSLLLWALLLLLLGSASPQDSEEPDSYTECTDGYEWDPDSQHCRDVNECLTIPEACKGEMKCINHYGGYLCLPRSAAVINDLHGEGPPPPVPPAQHPNPCPPGYEPDDQDSCVDVDECAQALHDCRPSQDCHNLPGSYQCTCPDGYRKIGPECVDIDECRYRYCQHRCVNLPGSFRCQCEPGFQLGPNNRSCVDVNECDMGAPCEQRCFNSYGTFLCRCHQGYELHRDGFSCSDIDECSYSSYLCQYRCINEPGRFSCHCPQGYQLLATRLCQDIDECESGAHQCSEAQTCVNFHGGYRCVDTNRCVEPYIQVSENRCLCPASNPLCREQPSSIVHRYMTITSERSVPADVFQIQATSVYPGAYNAFQIRAGNSQGDFYIRQINNVSAMLVLARPVTGPREYVLDLEMVTMNSLMSYRASSVLRLTVFVGAYTF

SEQ ID NO: 44771 - protein, 202 aa, Homo sapiens
MLPCASCLPGSLLLWALLLLLLGSASPQDSEEPDSYTECTDGYEWDPDSQHCRDVNECLTIPEACKGEMKCINHYGGYLCLPRSAAVINDLHGEGPPPPVPPAQHPNPCPPGYEPDDQDSCVDVDECAQALHDCRPSQDCHNLPGSYQCTCPDGYRKIGPECVDIDECRYRYCQHRCVNLPGSFRCQCEPGFQLGPNNRSCV

SEQ ID NO: 44772 - protein, 183 aa, Homo sapiens
MLPCASCLPGSLLLWALLLLLLGSASPQDSEEPDSYTECTDGYEWDPDSQHCRDVNECLTIPEACKGEMKCINHYGGYLCLPRSAAVINDLHGEGPPPPVPPAQHPNPCPPGYEPDDQDSCVDVDECAQALHDCRPSQDCHNLPGSYQCTCPDGYRKIGPECVDIDECRYRYCQHRCVNLPGS

SEQ ID NO: 44773 - protein, 443 aa, Homo sapiens; identical to SEQ ID NO: 44770

SEQ ID NO: 44774 - protein, 821 aa, Homo sapiens
MRGFNLLLFWGCCVMHSWEGHIRPTRKPNTKGNNCRDSTLCPAYATCTNTVDSYYCACKQGFLSSNGQNHFKDPGVRCKDIDECSQSPQPCGPNSSCKNLSGRYKCSCLDGFSSPTGNDWVPGKPGNFSCTDINECLTSSVCPEHSDCVNSMGSYSCSCQVGFISRNSTCEDVDECADPRACPEHATCNNTVGNYSCFCNPGFESSSGHLSFQGLKASCEDIDECTEMCPINSTCTNTPGSYFCTCHPGFAPSNGQLNFTDQGVECRDIDECRQDPSTCGPNSICTNALGSYSCGCIAGFHPNPEGSQKDGNFSCQRVLFKCKEDVIPDNKQIQQCQEGTAVKPAYVSFCAQINNIFSVLDKVCENKTTVVSLKNTTESFVPVLKQISTWTKFTKEETSSLATVFLESVESMTLASFWKPSANITPAVRTEYLDIESKVINKECSEENVTLDLVAKGDKMKIGCSTIEESESTETTGVAFVSFVGMESVLNERFFKDHQAPLTTSEIKLKMNSRVVGGIMTGEKKDGFSDPIIYTLENIQPKQKFERPICVSWSTDVKGGRWTSFGCVILEASETYTICSCNQMANLAVIMASGELTMGCAIIAGFLHYLFLACFFWMLVEAVILFLMVRNLKVVNYFSSRNIKMLHICAFGYGLPMLVVVISASVQPQGYGMHNRCWLNTETGFIWSFLGPVCTVIVINSLLLTWTLWILRQRLSSVNAEVSTLKDTRLLTFKAFAQLFILGCSWVLGIFQIGPVAGVMAYLFTIINSLQGAFIFLIHCLLNGQVREEYKRWITGKTKPSSQSQTSRILLSSMPSASKTG

SEQ ID NO: 44775 - protein, 886 aa, Homo sapiens
MRGFNLLLFWGCCVMHSWEGHIRPTRKPNTKGNNCRDSTLCPAYATCTNTVDSYYCACKQGFLSSNGQNHFKDPGVRCKDIDECSQSPQPCGPNSSCKNLSGRYKCSCLDGFSSPTGNDWVPGKPGNFSCTDINECLTSSVCPEHSDCVNSMGSYSCSCQVGFISRNSTCEDVDECADPRACPEHATCNNTVGNYSCFCNPGFESSSGHLSFQGLKASCEDIDECTEMCPINSTCTNTPGSYFCTCHPGFAPSNGQLNFTDQGVECRDIDECRQDPSTCGPNSICTNALGSYSCGCIAGFHPNPEGSQKDGNFSCQRVLFKCKEDVIPDNKQIQQCQEGTAVKPAYVSFCAQINNIFSVLDKVCENKTTVVSLKNTTESFVPVLKQISTWTKFTKEETSSLATVFLESVESMTLASFWKPSANITPAVRTEYLDIESKVINKECSEENVTLDLVAKGDKMKIGCSTIEESESTETTGVAFVSFVGMESVLNERFFKDHQAPLTTSEIKLKMNSRVVGGIMTGEKKDGFSDPIIYTLENIQPKQKFERPICVSWSTDVKGGRWTSFGCVILEASETYTICSCNQMANLAVIMASGELTMDFSLYIISHVGIIISLVCLVLAIATFLLCRSIRNHNTYLHLHLCVCLLLAKTLFLAGIHKTDNKMGCAIIAGFLHYLFLACFFWMLVEAVILFLMVRNLKVVNYFSSRNIKMLHICAFGYGLPMLVVVISASVQPQGYGMHNRCWLNTETGFIWSFLGPVCTVIVINSLLLTWTLWILRQRLSSVNAEVSTLKDTRLLTFKAFAQLFILGCSWVLGIFQIGPVAGVMAYLFTIINSLQGAFIFLIHCLLNGQVREEYKRWITGKTKPSSQSQTSRILLSSMPSASKTG

SEQ ID NO: 44776 - protein, 867 aa, Homo sapiens
MRGFNLLLFWGCCVMHSWEGHIRPTRKPNTKGNNCRDSTLCPAYATCTNTVDSYYCACKQGFLSSNGQNHFKDPGVRCKDINECLTSSVCPEHSDCVNSMGSYSCSCQVGFISRNSTCEDVDECADPRACPEHATCNNTVGNYSCFCNPGFESSSGHLSFQGLKASCEDIDECTEMCPINSTCTNTPGSYFCTCHPGFAPSNGQLNFTDQGVECRDIDECRQDPSTCGPNSICTNALGSYSCGCIAGFHPNPEGSQKDGNFSCQRVLFKCKEDVIPDNKQIQQCQEGTAVKPAYVSFCAQINNIFSVLDKVCENKTTVVSLKNTTESFVPVLKQISTWTKFTKEETSSLATVFLESVESMTLASFWKPSANITPAVRTEYLDIESKVINKECSEENVTLDLVAKGDKMKIGCSTIEESESTETTGVAFVSFVGMESVLNERFFKDHQAPLTTSEIKLKMNSRVVGGIMTGEKKDGFSDPIIYTLENIQPKQKFERPICVSWSTDVKGGRWTSFGCVILEASETYTICSCNQMANLAVIMASGELTMDFSLYIISHVGIIISLVCLVLAIATFLLCRSIRNHNTYLHLHLCVCLLLAKTLFLAGIHKTDNKMGCAIIAGFLHYLFLACFFWMLVEAVILFLMVRNLKVVNYFSSRNIKMLHICAFGYGLPMLVVVISASVQPQGYGMHNRCWLNTETGFIWSFLGPVCTVIVVSKYYNSLAKCVLKEEQGDLRDLEFPGTCAAERINSLLLTWTLWILRQRLSSVNAEVSTLKDTRLLTFKAFAQLFILGCSWVLGIFQIGPVAGVMAYLFTIINSLQGAFIFLIHCLLNGQVREEYKRWITGKTKPSSQSQTSRILLSSMPSASKTG

SEQ ID NO: 44777 - protein, 745 aa, Homo sapiens
MRGFNLLLFWGCCVMHSWEGHIRPTRKPNTKGNNCRDSTLCPAYATCTNTVDSYYCACKQGFLSSNGQNHFKDPGVRCKDIDECTEMCPINSTCTNTPGSYFCTCHPGFAPSNGQLNFTDQGVECRDIDECRQDPSTCGPNSICTNALGSYSCGCIAGFHPNPEGSQKDGNFSCQRVLFKCKEDVIPDNKQIQQCQEGTAVKPAYVSFCAQINNIFSVLDKVCENKTTVVSLKNTTESFVPVLKQISTWTKFTKEETSSLATVFLESVESMTLASFWKPSANITPAVRTEYLDIESKVINKECSEENVTLDLVAKGDKMKIGCSTIEESESTETTGVAFVSFVGMESVLNERFFKDHQAPLTTSEIKLKMNSRVVGGIMTGEKKDGFSDPIIYTLENIQPKQKFERPICVSWSTDVKGGRWTSFGCVILEASETYTICSCNQMANLAVIMASGELTMDFSLYIISHVGIIISLVCLVLAIATFLLCRSIRNHNTYLHLHLCVCLLLAKTLFLAGIHKTDNKMGCAIIAGFLHYLFLACFFWMLVEAVILFLMVRNLKVVNYFSSRNIKMLHICAFGYGLPMLVVVISASVQPQGYGMHNRCWLNTETGFIWSFLGPVCTVIVINSLLLTWTLWILRQRLSSVNAEVSTLKDTRLLTFKAFAQLFILGCSWVLGIFQIGPVAGVMAYLFTIINSLQGAFIFLIHCLLNGQVREEYKRWITGKTKPSSQSQTSRILLSSMPSASKTG

SEQ ID NO: 44778 - protein, 709 aa, Homo sapiens
MRGFNLLLFWGCCVMHSWEGHIRPTRKPNTKGNNCRDSTLCPAYATCTNTVDSYYCACKQGFLSSNGQNHFKDPGVRCKDIDECSQSPQPCGPNSSCKNLSGRYKCSCLDGFSSPTGNDWVPGKPGNFSCTDINECLTSRVLFKCKEDVIPDNKQIQQCQEGTAVKPAYVSFCAQINNIFSVLDKVCENKTTVVSLKNTTESFVPVLKQISTWTKFTKEETSSLATVFLESVESMTLASFWKPSANITPAVRTEYLDIESKVINKECSEENVTLDLVAKGDKMKIGCSTIEESESTETTGVAFVSFVGMESVLNERFFKDHQAPLTTSEIKLKMNSRVVGGIMTGEKKDGFSDPIIYTLENIQPKQKFERPICVSWSTDVKGGRWTSFGCVILEASETYTICSCNQMANLAVIMASGELTMDFSLYIISHVGIIISLVCLVLAIATFLLCRSIRNHNTYLHLHLCVCLLLAKTLFLAGIHKTDNKMGCAIIAGFLHYLFLACFFWMLVEAVILFLMVRNLKVVNYFSSRNIKMLHICAFGYGLPMLVVVISASVQPQGYGMHNRCWLNTETGFIWSFLGPVCTVIVINSLLLTWTLWILRQRLSSVNAEVSTLKDTRLLTFKAFAQLFILGCSWVLGIFQIGPVAGVMAYLFTIINSLQGAFIFLIHCLLNGQVREEYKRWITGKTKPSSQSQTSRILLSSMPSASKTG

SEQ ID NO: 44779 - protein, 821 aa, Homo sapiens; identical to SEQ ID NO: 44774

SEQ ID NO: 44780 - protein, 553 aa, Homo sapiens
MPLPWSLALPLLLSWVAGGFGNAASARHHGLLASARQPGVCHYGTKLACCYGWRRNSKGVCEATCEPGCKFGECVGPNKCRCFPGYTGKTCSQDVNECGMKPRPCQHRCVNTHGSYKCFCLSGHMLMPDATCVNSRTCAMINCQYSCEDTEEGPQCLCPSSGLRLAPNGRDCLDIDECASGKVICPYNRRCVNTFGSYYCKCHIGFELQYISGRYDCIDINECTMDSHTCSHHANCFNTQGSFKCKCKQGYKGNGLRCSAIPENSVKEVLRAPGTIKDRIKKLLAHKNSMKKKAKIKNVTPEPTRTPTPKVNLQPFNYEEIVSRGGNSHGGKKGNEEKMKEGLEDEKREEKALKNDIEERSLRGDVFFPKVNEAGEFGLILVQRKALTSKLEHKDLNISVDCSFNHGICDWKQDREDDFDWNPADRDNAIGFYMAVPALAGHKKDIGRLKLLLPDLQPQSNFCLLFDYRLAGDKVGKLRVFVKNSNNALAWEKTTSEDEKWKTGKIQLYQGTDATKSIIFEAERGKGKTGEIAVDGVLLVSGLCPDSLLSVDD

SEQ ID NO: 44781 - protein, 554 aa, Homo sapiens
MPLPWSLALPLLLSWVAGGFGNAASARHHGLLASARQPGVCHYGTKLACCYGWRRNSKGVCEATCEPGCKFGECVGPNKCRCFPGYTGKTCSQDVNECGMKPRPCQHRCVNTHGSYKCFCLSGHMLMPDATCVNSRTCAMINCQYSCEDTEEGPQCLCPSSGLRLAPNGRDCLDIDECASGKVICPYNRRCVNTFGSYYCKCHIGFELQYISGRYDCIDINECTMDSHTCSHHANCFNTQGSFKCKCKQGYKGNGLRCSAIPENSVKEVLRAPGTIKDRIKKLLAHKNSMKKKAKIKNVTPEPTRTPTPKVNLQPFNYEEIVSRGGNSHGGKKGNEEKMKEGLEDEKREEKALKNDIEERSLRGDVFFPKVNEAGEFGLILVQRKALTSKLEHKADLNISVDCSFNHGICDWKQDREDDFDWNPADRDNAIGFYMAVPALAGHKKDIGRLKLLLPDLQPQSNFCLLFDYRLAGDKVGKLRVFVKNSNNALAWEKTTSEDEKWKTGKIQLYQGTDATKSIIFEAERGKGKTGEIAVDGVLLVSGLCPDSLLSVDD

SEQ ID NO: 44782 - protein, 273 aa, Homo sapiens
MRGSQEVLLMWLLVLAVGGTEHAYRPGRRVCAVRAHGDPVSESFVQRVYQPFLTTCDGHRACSTYRTIYRTAYRRSPGLAPARPRYACCPGWKRTSGLPGACGAAICQPPCRNGGSCVQPGRCRCPAGWRGDTCQSDVDECSARRGGCPQRCVNTAGSYWCQCWEGHSLSADGTLCVPKGGPPRVAPNPTGVDSAMKEEVQRLQSRVDLLEEKLQLVLAPLHSLASQALEHGLPDPGSLLVHSFQQLGRIDSLSEQISFLEEQLGSCSCKKDS

SEQ ID NO: 44783 - protein, 273 aa, Homo sapiens; identical to SEQ ID NO: 44782

SEQ ID NO: 44784 - protein, 273 aa, Homo sapiens; identical to SEQ ID NO: 44782

SEQ ID NO: 44785 - protein, 273 aa, Homo sapiens; identical to SEQ ID NO: 44782

SEQ ID NO: 44786 - protein, 293 aa, Homo sapiens
MGSRAELCTLLGGFSFLLLLIPGEGAKGGSLRESQGVCSKQTLVVPLHYNESYSQPVYKPYLTLCAGRRICSTYRTMYRVMWREVRREVQQTHAVCCQGWKKRHPGALTCEAICAKPCLNGGVCVRPDQCECAPGWGGKHCHVDVDECRTSITLCSHHCFNTAGSFTCGCPHDLVLGVDGRTCMEGSPEPPTSASILSVAVREAEKDERALKQEIHELRGRLERLEQWAGQAGAWVRAVLPVPPEELQPEQVAELWGRGDRIESLSDQVLLLEERLGACSCEDNSLGLGVNHR

SEQ ID NO: 44787 - protein, 293 aa, Homo sapiens; identical to SEQ ID NO: 44786

SEQ ID NO: 44788 - protein, 293 aa, Homo sapiens [sequence omitted]

SEQ ID NO: 44789 - protein, 258 aa, Homo sapiens
MGSRAELCTLLGGFSFLLLLIPGEGAKGGSLRESQGVCSKQTLVVPLHYNESYSQPVYKPYLTLCAGRRICSTYRTMYRVMWREVRREVQQTHAVCCQGWKKRHPGALTCEAICAKPCLNGGVCVRPDQCECAPGWGGKHCHVGSFTCGCPHDLVLGVDGRTCMEGSPEPPTSASILSVAVREAEKDERALKQEIHELRGRLERLEQWAGQAGAWVRAVLPVPPEELQPEQVAELWGRGDRIESLSDQVLLLEERLGA

SEQ ID NO: 44790 - protein, 293 aa, Homo sapiens; identical to SEQ ID NO: 44786

SEQ ID NO: 44791 - protein, 293 aa, Homo sapiens; identical to SEQ ID NO: 44786

SEQ ID NO: 44792 - protein, 293 aa, Homo sapiens; identical to SEQ ID NO: 44786

SEQ ID NO: 44793 - protein, 258 aa, Homo sapiens; identical to SEQ ID NO: 44789

SEQ ID NO: 44794 - protein, 258 aa, Homo sapiens; identical to SEQ ID NO: 44789

SEQ ID NO: 44795 - protein, 258 aa, Homo sapiens
MGSRAELCTLLGGFSFLLLLIPGEGAKGGSLRESQGVCSKQTLVVPLHYNESYSQPVYKPYLTLCAGRRICSTYRTMYRVMWREVKREVQQTHAVCCQGWKKRHPGALTCEAICAKPCLNGGVCVRPDQCECAPGWGGKHCHVGSFTCGCPHDLVLGVDGRTCMEGSPEPPTSASILSVAVREAEKDERALKQEIHELRGRLERLEQWAGQAGAWVRAVLPVPPEELQPEQVAELWGRGDRIESLSDQVLLLEERLGA

SEQ ID NO: 44796 - protein, 293 aa, Homo sapiens; identical to SEQ ID NO: 44786

SEQ ID NO: 44797 - protein, 293 aa, Homo sapiens; identical to SEQ ID NO: 44786

SEQ ID NO: 44798 - protein, 293 aa, Homo sapiens; identical to SEQ ID NO: 44786

SEQ ID NO: 44799 - protein, 293 aa, Homo sapiens [sequence omitted]

SEQ ID NO: 44800 - protein, 293 aa, Homo sapiens; identical to SEQ ID NO: 44786

SEQ ID NO: 44801 - protein, 293 aa, Homo sapiens; identical to SEQ ID NO: 44786

SEQ ID NO: 44802 - protein, 293 aa, Homo sapiens; identical to SEQ ID NO: 44786

SEQ ID NO: 44803 - protein, 258 aa, Homo sapiens; identical to SEQ ID NO: 44789

SEQ ID NO: 44804 - protein, 293 aa, Homo sapiens; identical to SEQ ID NO: 44786

SEQ ID NO: 44805 - protein, 426 aa, Homo sapiens
MANDSGGPGGPSPSERDRQYCELCGKMENLLRCSRCRSSFYCCKEHQRQDWKKHKLVCQGSEGALGHGVGPHQHSGPAPPAAVPPPRAGAREPRKAAARRDNASGDAAKGKVKAKPPADPAAAASPCRAAAGGQGSAVAAEAEPGKEEPPARSSLFQEKANLYPPSNTPGDALSPGGGLRPNGQTKPLPALKLALEYIVPCMNKHGICVVDDFLGKETGQQIGDEVRALHDTGKFTDGQLVSQKSDSSKDIRGDKITWIEGKEPGCETIGLLMSSMDDLIRHCNGKLGSYKINGRTKAMVACYPGNGTGYVRHVDNPNGDGRCVTCIYYLNKDWDAKVSGGILRIFPEGKAQFADIEPKFDRLLFFWSDRRNPHEVQPAYATRYAITVWYFDADERARAKVKYLTGEKGVRVELNKPSDSVGKDVF

SEQ ID NO: 44806 - protein, 71 aa, Homo sapiens
MNKHGICVVDDFLGKETGQQIGDEVRALHDTGKFTDGSWSARRVTRPRTSEAIRSPGSRARSPAAKPLGCS

SEQ ID NO: 44807 - protein, 407 aa, Homo sapiens
MDSPCQPQPLSQALPQLPGSSSEPLEPEPGRARMGVESYLPCPLLPSYHCPGVPSEASAGSGTPRATATSTTASPLRDGFGGQDGGELRPLQSEGAAALVTKGCQRLAAQGARPEAPKRKWAEDGGDAPSPSKRPWARQENQEAEREGGMSCSCSSGSGEASAGLMEEALPSAPERLALDYIVPCMRYYGICVKDSFLGAALGGRVLAEVEALKRGGRLRDGQLVSQRAIPPRSIRGDQIAWVEGHEPGCRSIGALMAHVDAVIRHCAGRLGSYVINGRTKAMVACYPGNGLGYVRHVDNPHGDGRCITCIYYLNQNWDVKVHGGLLQIFPEGRPVVANIEPLFDRLLIFWSDRRNPHEVKPAYATRYAITVWYFDAKERAAAKDKYQLASGQKGVQVPVSQPPTPT

SEQ ID NO: 44808 - protein, 407 aa, Homo sapiens; identical to SEQ ID NO: 44807

SEQ ID NO: 44809 - protein, 239 aa, Homo sapiens
MPLGHIMRLDLEKIALEYIVPCLHEVGFCYLDNFLGEVVGDCVLERVKQLHCTGALRDGQLAGPRAGVSKRHLRGDQITWIGGNEEGCEAISFLLSLIDRLVLYCGSRLGKYYVKERSKAMVACYPGNGTGYVRHVDNPNGDGRCITCIYYLNKNWDAKLHGGILRIFPEGKSFIADVEPIFDRLLFFWSDRRNPHEVQPSYATRYAMTVWYFDAEERAEAKKKFRNLTRKTESALTED

SEQ ID NO: 44810 - protein, 239 aa, Homo sapiens; identical to SEQ ID NO: 44809

SEQ ID NO: 44811 - protein, 534 aa, Homo sapiens
MFSWVSKDARRKKEPELFQTVAEGLRQLYAQKLLPLEEHYRFHEFHSPALEDADFDNKPMVLLVGQYSTGKTTFIRHLIEQDFPGMRIGPEPTTDSFIAVMHGPTEGVVPGNALVVDPRRPFRKLNAFGNAFLNRFMCAQLPNPVLDSISIIDTPGILSGEKQRISRGYDFAAVLEWFAERVDRIILLFDAHKLDISDEFSEVIKALKNHEDKIRVVLNKADQIETQQLMRVYGALMWSLGKIINTPEVVRVYIGSFWSHPLLIPDNRKLFEAEEQDLFKDIQSLPRNAALRKLNDLIKRARLAKVHAYIISSLKKEMPNVFGKESKKKELVNNLGEIYQKIEREHQISPGDFPSLRKMQELLQTQDFSKFQALKPKLLDTVDDMLANDIARLMVMVRQEESLMPSQVVKGGAFDGTMNGPFGHGYGEGAGEGIDDVEWVVGKDKPTYDEIFYTLSPVNGKITGANAKKEMVKSKLPNTVLGKIWKLADVDKDGLLDDEEFALANHLIKVKLEGHELPADLPPHLVPPSKRRHE

SEQ ID NO: 44812 - protein, 534 aa, Homo sapiens; identical to SEQ ID NO: 44811

SEQ ID NO: 44813 - protein, 145 aa, Homo sapiens
MFSWVSKDARRKKEPELFQTVAEGLRQLYAQKLLPLEEHYRFHEFHSPALEDADFDNKPMVLLVGQYSTGKTTFIRHLIEQDFPGMRIGPEPTTDSFIAVMHGPTEGVVPGNALVVDPRRPFRKLNAFGNAFLNRFMCAQLPNPV

SEQ ID NO: 44814 - protein, 431 aa, Homo sapiens
MEQPGTAASPVSGSMFSWVSKDARRKKEPELFQTVAEGLRQLYAQKLLPLEEHYRFHEFHSPALEDADFDNKPMVLLVGQYSTGKTTFIRHLIEQDFPGMRIGPEPTTDSFIAVMHGPTEGVVPGNALVVDPRRPFRKLNAFGNAFLNRFMCAQLPNPVLDSISIIDTPGILSGEKQRISRGYDFAAVLEWFAERVDRIILLFDAHKLDISDEFSEVIKALKNHEDKIRVVLNKADQIETQQLMRVYGALMWSLGKIINTPEVVRVYIGSFWSHPLLIPDNRKLFEAEEQDLFKDIQSLPRNAALRKLNDLIKRARLAKVHAYIISSLKKEMPNVFGKESKKKELVNNLGEIYQKIEREHQISPGDFPSLRKMQELLQTQDFSKFQALKPKLLDDEEFALANHLIKVKLEGHELPADLPPHLVPPSKRRHE

SEQ ID NO: 44815 - protein, 148 aa, Homo sapiens
MFSWVSKDARRKKEPELFQTVAEGLRQLYAQKLLPLEEHYRFHEFHSPALEDADFDNKPMVLLVGQYSTGKTTFIRHLIEQDFPGMRIGPEPTTDSFIAVMHGPTEGVVPGNALVVDPRRPFRKLNAFGNAFLNRFMCAQLPNPVLDS

SEQ ID NO: 44816 - protein, 510 aa, Homo sapiens
MFSWVSKDARRKKEHYRFHEFHSPALEDADFDNKPMVLLVGQYSTGKTTFIRHLIEQDFPGMRIGPEPTTDSFIAVMHGPTEGVVPGNALVVDPRRPFRKLNAFGNAFLNRFMCAQLPNPVLDSISIIDTPGILSGEKQRISRGYDFAAVLEWFAERVDRIILLFDAHKLDISDEFSEVIKALKNHEDKIRVVLNKADQIETQQLMRVYGALMWSLGKIINTPEVVRVYIGSFWSHPLLIPDNRKLFEAEEQDLFKDIQSLPRNAALRKLNDLIKRARLAKVHAYIISSLKKEMPNVFGKESKKKELVNNLGEIYQKIEREHQISPGDFPSLRKMQELLQTQDFSKFQALKPKLLDTVDDMLANDIARLMVMVRQEESLMPSQVVKGGAFDGTMNGPFGHGYGEGAGEGIDDVEWVVGKDKPTYDEIFYTLSPVNGKITGANAKKEMVKSKLPNTVLGKIWKLADVDKDGLLDDEEFALANHLIKVKLEGHELPADLPPHLVPPSKRRHE

SEQ ID NO: 44817 - protein, 543 aa, Homo sapiens
MFSWLKRGGARGQQPEAIRTVTSALKELYRTKLLPLEEHYRFGAFHSPALEDADFDGKPMVLVAGQYSTGKTSFIQYLLEQEVPGSRVGPEPTTDCFVAVMHGDTEGTVPGNALVVDPDKPFRKLNPFGNTFLNRFMCAQLPNQVLESISIIDTPGILSGAKQRVSRGYDFPAVLRWFAERVDLIILLFDAHKLEISDEFSEAIGALRGHEDKIRVVLNKADMVETQQLMRVYGALMWALGKVVGTPEVLRVYIGSFWSQPLLVPDNRRLFELEEQDLFRDIQGLPRHAALRKLNDLVKRARLVRVHAYIISYLKKEMPSVFGKENKKKQLILKLPVIFAKIQLEHHISPGDFPDCQKMQELLMAHDFTKFHSLKPKLLEALDEMLTHDIAKLMPLLRQEELESTEVGVQGGAFEGTHMGPFVERGPDEAMEDGEEGSDDEAEWVVTKDKSKYDEIFYNLAPADGKLSGSKAKTWMVGTKLPNSVLGRIWKLSDVDRDGMLDDEEFALASHLIEAKLEGHGLPANLPRRLVPPSKRRHKGSAE

SEQ ID NO: 44818 - protein, 171 aa, Homo sapiens
MPSVFGKENKKKQLILKLPVIFAKIQLEHHISPGDFPDCQKMQELLMAHDFTKFHSLKPKLLEALDEMLTHDIAKLMPLLRQEELESTEVGVQGGAFEGTHMGPFVERGPDEAMEDQGQVQIRRDLLQPGACRRQAERLQGQDLDGGDQAPQLSAGAHLEAQRCGPRRHAG

SEQ ID NO: 44819 - protein, 407 aa, Homo sapiens
MCAQLPNQVLESISIIDTPGILSGAKQRVSRGYDFPAVLRWFAERVDLIILLFDAHKLEISDEFSEAIGALRGHEDKIRVVLNKADMVETQQLMRVYGALMWALGKVVGTPEVLRVYIGSFWSQPLLVPDNRRLFELEEQDLFRDIQGLPRHAALRKLNDLVKRARLVRVHAYIISYLKKEMPSVFGKENKKKQLILKLPVIFAKIQLEHHISPGDFPDCQKMQELLMAHDFTKFHSLKPKLLEALDEMLTHDIAKLMPLLRQEELESTEVGVQGGAFEGTHMGPFVERGPDEAMEDGEEGSDDEAEWVVTKDKSKYDEIFYNLAPADGKLSGSKAKTWMVGTKLPNSVLGRIWKLSDVDRDGMLDDEEFALASHLIEAKLEGHGLPANLPRRLVPPSKRRHKGSAE

SEQ ID NO: 44820 - protein, 413 aa, Homo sapiens
MFSWLKRGGARGQQPEAIRTVTSALKELYRTKLLPLEEHYRFGAFHSPALEDADFDGKPMVLVAGQYSTGKTSFIQYLLEQEVPGSRVGPEPTTDCFVAVMHGDTEGTVPGNALVVDPDKPFRKLNPFGNTFLNRFMCAQLPNQVLESISIIDTPGILSGAKQRVSRGYDFPAVLRWFAERVDLIILLFDAHKLEISDEFSEAIGALRGHEDKIRVVLNKADMVETQQLMRVYGALMWALGKVVGTPEVLRVYIGSFWSQPLLVPDNRRLFELEEQDLFRDIQGLPRHAALRKLNDLVKRARLVRVHAYIISYLKKEMPSVFGKENKKKQLILKLPVIFAKIQLEHHISPGDFPDCQKMQELLMAHDFTKFHSLKPKLLEALDEMLTHDIAKLMPLLRQEELESSPVAEMTSR

SEQ ID NO: 44821 - protein, 533 aa, Homo sapiens
MFSWLKRGGARGQQPEAIRTVTSALKELYRTKLLPLEEHYRFGAFHSPALEDADFDGKPMVLVAGQYSTGKTSFIQYLLEQEVPGSRVAVMHGDTEGTVPGNALVVDPDKPFRKLNPFGNTFLNRFMCAQLPNQVLESISIIDTPGILSGAKQRVSRGYDFPAVLRWFAERVDLIILLFDAHKLEISDEFSEAIGALRGHEDKIRVVLNKADMVETQQLMRVYGALMWALGKVVGTPEVLRVYIGSFWSQPLLVPDNRRLFELEEQDLFRDIQGLPRHAALRKLNDLVKRARLVRVHAYIISYLKKEMPSVFGKENKKKQLILKLPVIFAKIQLEHHISPGDFPDCQKMQELLMAHDFTKFHSLKPKLLEALDEMLTHDIAKLMPLLRQEELESTEVGVQGGAFEGTHMGPFVERGPDEAMEDGEEGSDDEAEWVVTKDKSKYDEIFYNLAPADGKLSGSKAKTWMVGTKLPNSVLGRIWKLSDVDRDGMLDDEEFALASHLIEAKLEGHGLPANLPRRLVPPSKRRHKGSAE

SEQ ID NO: 44822 - protein, 226 aa, Homo sapiens
MPSVFGKENKKKQLILKLPVIFAKIQLEHHISPGDFPDCQKMQELLMAHDFTKFHSLKPKLLEALDEMLTHDIAKLMPLLRQEELESTEVGVQGGAFEGTHMGPFVERGPDEAMEDGEEGSDDEAEWVVTKDKSKYDEIFYNLAPADGKLSGSKAKTWMVGTKLPNSVLGRIWKLSDVDRDGMLDDEEFALASHLIEAKLEGHGLPANLPRRLVPPSKRRHKGSAE

SEQ ID NO: 44823 - protein, 535 aa, Homo sapiens
MFSWLGTDDRRRKDPEVFQTVSEGLKKLYKSKLLPLEEHYRFHEFHSPALEDADFDNKPMVLLVGQYSTGKTTFIRYLLEQDFPGMRIGPEPTTDSFIAVMQGDMEGIIPGNALVVDPKKPFRKLNAFGNAFLNRFVCAQLPNPVLESISVIDTPGILSGEKQRISRGYDFAAVLEWFAERVDRIILLFDAHKLDISDEFSEVIKALKNHEDKMRVVLNKADQIETQQLMRVYGALMWSLGKIVNTPEVIRVYIGSFWSHPLLIPDNRKLFEAEEQDLFRDIQSLPRNAALRKLNDLIKRARLAKVHAYIISSLKKEMPSVFGKDNKKKELVNNLAEIYGRIEREHQISPGDFPNLKRMQDQLQAQDFSKFQPLKSKLLEVVDDMLAHDIAQLMVLVRQEESQRPIQMVKGGAFEGTLHGPFGHGYGEGAGEGIDDAEWVVARDKPMYDEIFYTLSPVDGKITGANAKKEMVRSKLPNSVLGKIWKLADIDKDGMLDDDEFALANHLIKVKLEGHELPNELPAHLLPPSKRKVAE

SEQ ID NO: 44824 - protein, 175 aa, Homo sapiens
MFSWLGTDDRRRKDPEVFQTVSEGLKKLYKSKLLPLEEHYRFHEFHSPALEDADFDNKPMVLLVGQYSTGKTTFIRYLLEQDFPGMRIGPEPTTDSFIAVMQGDMEGIIPGNALVVDPKKPFRKLNAFGNAFLNRFVCAQLPNPVLESISVIDTPGILSGEKQRISRGPAAGPGL

SEQ ID NO: 44825 - protein, 541 aa, Homo sapiens
MFSWMGRQAGGRERAGGADAVQTVTGGLRSLYLRKVLPLEEAYRFHEFHSPALEDADFENKPMILLVGQYSTGKTTFIRYLLEQDFPGMRIGPEPTTDSFIAVMYGETEGSTPGNALVVDPKKPFRKLSRFGNAFLNRFMCSQLPNQVLKSISVIDSPGILSGEKQRISRGYDFCQVLQWFAERVDRIILLFDAHKLDISDEFSEAIKAFRGQDDKIRVVLNKADQVDTQQLMRVYGALMWSLGKVINTPEVLRVYIGSFWAQPLQNTDNRRLFEAEAQDLFRDIQSLPQKAAVRKLNDLIKRARLAKVHAYIISYLKKEMPSVFGKENKKRELISRLPEIYIQLQREYQISAGDFPEVKAMQEQLENYDFTKFHSLKPKLIEAVDNMLSNKISPLMNLISQEETSTPTQLVQGGAFDGTTEGPFNQGYGEGAKEGADEEEWVVAKDKPVYDELFYTLSPINGKISGVNAKKEMVTSKLPNSVLGKIWKLADCDCDGMLDEEEFALAKHLIKIKLDGYELPSSLPPHLVPPSHRKSLPKAD

SEQ ID NO: 44826 - protein, 363 aa, Homo sapiens
MSMDVTFLGTGAAYPSPTRGASAVVLRCEGECWLFDCGEGTQTQLMKSQLKAGRITKIFITHLHGDHFFGLPGLLCTISLQSGSMVSKQPIEIYGPVGLRDFIWRTMELSHTELVFHYVVHELVPTADQCPAEELKEFAHVNRADSPPKEEQGRTILLDSEENSYLLFDDEQFVVKAFRLFHRIPSFGFSVVEKKRPGKLNAQKLKDLGVPPGPAYGKLKNGISVVLENGVTISPQDVLKKPIVGRKICILGDCSGVVGDGGVKLCFEADLLIHEATLDDAQMDKAKEHGHSTPQMAATFAKLCRAKRLVLTHFSQRYKPVALAREGETDGIAELKKQAESVLDLQEVTLAEDFMVISIPIKK

SEQ ID NO: 44827 - protein, 826 aa, Homo sapiens
MWALCSLLRSAAGRTMSQGRTISQAPARRERPRKDPLRHLRTREKRGPSGCSGGPNTVYLQVVAAGSRDSGAALYVFSEFNRYLFNCGEGVQRLMQEHKLKVARLDNIFLTRMHWSNVGGLSGMILTLKETGLPKCVLSGPPQLEKYLEAIKIFSGPLKGIELAVRPHSAPEYEDETMTVYQIPIHSEQRRGKHQPWQSPERPLSRLSPERSSDSESNENEPHLPHGVSQRRGVRDSSLVVAFICKLHLKRGNFLVLKAKEMGLPVGTAAIAPIIAAVKDGKSITHEGREILAEELCTPPDPGAAFVVVECPDESFIQPICENATFQRYQGKADAPVALVVHMAPASVLVDSRYQQWMERFGPDTQHLVLNENCASVHNLRSHKIQTQLNLIHPDIFPLLTSFRCKKEGPTLSVPMVQGECLLKYQLRPRREWQRDAIITCNPEEFIVEALQLPNFQQSVQEYRRSAQDGPAPAEKRSQYPEIIFLGTGSAIPMKIRNVSATLVNISPDTSLLLDCGEGTFGQLCRHYGDQVDRVLGTLAAVFVSHLHADHHTGLPSILLQRERALASLGKPLHPLLVVAPNQLKAWLQQYHNQCQEVLHHISMIPAKCLQEGAEISSPAVERLISSLLRTCDLEEFQTCLVRHCKHAFGCALVHTSGWKVVYSGDTMPCEALVRMGKDATLLIHEATLEDGLEEEAVEKTHSTTSQAISVGMRMNAEFIMLNHFSQRYAKVPLFSPNFSEKVGVAFDHMKVCFGDFPTMPKLIPPLKALFAGDIEEMEERREKRELRQVRAALLSRELAGGLEDGEPQQKRAHTEEPQAKKVRAQ

SEQ ID NO: 44828 - protein, 807 aa, Homo sapiens
MWALCSLLRSAAGRTMSQGRTISQAPARRERPRKDPLRHLRTREKRGPSGCSGGPNTVYLQVVAAGSRDSGVQRLMQEHKLKVARLDNIFLTRMHWSNVGGLSGMILTLKETGLPKCVLSGPPQLEKYLEAIKIFSGPLKGIELAVRPHSAPEYEDETMTVYQIPIHSEQRRGKHQPWQSPERPLSRLSPERSSDSESNENEPHLPHGVSQRRGVRDSSLVVAFICKLHLKRGNFLVLKAKEMGLPVGTAAIAPIIAAVKDGKSITHEGREILAEELCTPPDPGAAFVVVECPDESFIQPICENATFQRYQGKADAPVALVVHMAPASVLVDSRYQQWMERFGPDTQHLVLNENCASVHNLRSHKIQTQLNLIHPDIFPLLTSFRCKKEGPTLSVPMVQGECLLKYQLRPRREWQRDAIITCNPEEFIVEALQLPNFQQSVQEYRRSAQDGPAPAEKRSQYPEIIFLGTGSAIPMKIRNVSATLVNISPDTSLLLDCGEGTFGQLCRHYGDQVDRVLGTLAAVFVSHLHADHHTGLPSILLQRERALASLGKPLHPLLVVAPNQLKAWLQQYHNQCQEVLHHISMIPAKCLQEGAEISSPAVERLISSLLRTCDLEEFQTCLVRHCKHAFGCALVHTSGWKVVYSGDTMPCEALVRMGKDATLLIHEATLEDGLEEEAVEKTHSTTSQAISVGMRMNAEFIMLNHFSQRYAKVPLFSPNFSEKVGVAFDHMKVCFGDFPTMPKLIPPLKALFAGDIEEMEERREKRELRQVRAALLSRELAGGLEDGEPQQKRAHTEEPQAKKVRAQ

SEQ ID NO: 44829 - protein, 786 aa, Homo sapiens
MWALCSLLRSAAGRTMSQGRTISQAPARRERPRKDPLRHLRTREKRGPSGCSGGPNTVYLQVVAAGSRDSGAALYVFSEFNRYLFNCGEGVQRLMQEHKLKVARLDNIFLTRMHWSNVGGLSGMILTLKETGLPKCVLSGPPQLEKYLEAIKIFSGPLKGIELAVRPHSAPEYEDETMTVYQIPIHSVSQRRGVRDSSLVVAFICKLHLKRGNFLVLKAKEMGLPVGTAAIAPIIAAVKDGKSITHEGREILAEELCTPPDPGAAFVVVECPDESFIQPICENATFQRYQGKADAPVALVVHMAPASVLVDSRYQQWMERFGPDTQHLVLNENCASVHNLRSHKIQTQLNLIHPDIFPLLTSFRCKKEGPTLSVPMVQGECLLKYQLRPRREWQRDAIITCNPEEFIVEALQLPNFQQSVQEYRRSAQDGPAPAEKRSQYPEIIFLGTGSAIPMKIRNVSATLVNISPDTSLLLDCGEGTFGQLCRHYGDQVDRVLGTLAAVFVSHLHADHHTGLPSILLQRERALASLGKPLHPLLVVAPNQLKAWLQQYHNQCQEVLHHISMIPAKCLQEGAEISSPAVERLISSLLRTCDLEEFQTCLVRHCKHAFGCALVHTSGWKVVYSGDTMPCEALVRMGKDATLLIHEATLEDGLEEEAVEKTHSTTSQAISVGMRMNAEFIMLNHFSQRYAKVPLFSPNFSEKVGVAFDHMKVCFGDFPTMPKLIPPLKALFAGDIEEMEERREKRELRQVRAALLSRELAGGLEDGEPQQKRAHTEEPQAKKVRAQ

SEQ ID NO: 44830 - protein, 286 aa, Homo sapiens
  VARIANT 1: note = MOD_RES - Any amino acid
XPHGVSQRRGVRDSSLVVAFICKLHLKRGNFLVLKAKEMGLPVGTAAIAPIIAAVKDGKSITHEGREVLQILAEELCTPPDPGAAFVVVECPDESFIQPICENATFQRYQGKADAPVALVVHMAPASVLVDSRYQQWMERFGPDTQHLVLNENCASVHNLRSHKIQTQLNLIHPDIFPLLTSFRCKKEGPTLSVPMVQGECLLKYQLRPRREWQRDAIITCNPEEFIVEALQLPNFQQSVQEYRRSAQDGPAPAEKRSQYPEIIFLGTGSAIPMKIRNVSATLVNI

SEQ ID NO: 44831 - protein, 278 aa, Homo sapiens
ILAEELCTPPDPGAAFVVVECPDESFIQPICENATFQRFGPDTQHLVLNENCASVHNLRSHKIQTQLNLIHPDIFPLLTSFRCKKEGPTLSVPMVQGECLLKYQLRPRREWQRDAIITCNPEEFIVEALQLPNFQQSVQEYRRSAQDGPAPAEKRSQYPEIIFLGTGSAIPMKIRNVSATLVNISPDTSLLLDCGEGTFGQLCRHYGDQVDRVLGTLAAVFVSHLHADHHTGLPSILLQRERALASLGKPLHPLLVVAPNQLKAWLQQYHNQCQEVLH

SEQ ID NO: 44832 - protein, 267 aa, Homo sapiens
MTLGRRLACLFLACVLPALLLGGTALASEIVGGRRARPHAWPFMVSLQLRGGHFCGATLIAPNFVMSAAHCVANVNVRAVRVVLGAHNLSRREPTRQVFAVQRIFENGYDPVNLLNDIVILQLNGSATINANVQVAQLPAQGRRLGNGVQCLAMGWGLLGRNRGIASVLQELNVTVVTSLCRRSNVCTLVRGRQAGVCFGDSGSPLVCNGLIHGIASFVRGGCASGLYPDAFAPVAQFVNWIDSIIQRSEDNPCPHPRDPDPASRTH

SEQ ID NO: 44833 - protein, 267 aa, Homo sapiens; identical to SEQ ID NO: 44832

SEQ ID NO: 44834 - protein, 1016 aa, Homo sapiens [sequence omitted]

SEQ ID NO: 44835 - protein, 347 aa, Homo sapiens
MADLGATKDRIISEINRLQQEATEHATESEERFRGLEEGQAQAGQCPSLEGRLGRLEGVCERLDTVAGGLQGLREGLSRHVAGLWAGLRETNTTSQMQAALLEKLVGGQAGLGRRLGALNSSLQLLEDRLHQLSLKDLTGEGTKGPAGEAGPPGPPGLQGPPGPAGPPGSPGKDGQEGPIGPPGPQGEQGVEGAPAAPVPQVAFSAALSLPRSEPGTVPFDRVLLNDGGYYDPETGVFTAPLAGRYLLSAVLTGHRHEKVEAVLSRSNQGVARVDSGGYEPEGLENKPVAESQPSPGTLGVFSLILPLQAGDTVCVDLVMGQLAHSEEPLTIFSGALLYGDPELEHA

SEQ ID NO: 44836 - protein, 353 aa, Homo sapiens
MGSGGRSAQVSTGQRAWLLPCRFLKNTMSNGYEDHMAEDCRGDIGRTNLIVNYLPQNMTQDELRSLFSSIGEVESAKLIRDKVAGHSLGYGFVNYVTAKDAERAINTLNGLRLQSKTIKVSYARPSSEVIKDANLYISGLPRTMTQKDVEDMFSRFGRIINSRVLVDQTTGLSRGVAFIRFDKRSEAEEAITSFNGHKPPGSSEPITVKFAANPNQNKNVALLSQLYHSPARRFGGPVHHQAQRFRFSPMGVDHMSGLSGVNVPGNASSGWCIFIYNLGQDADEGILWQMFGPFGAVTNVKVIRDFNTNKCKGFGFVTMTNYEEAAMAIASLNGYRLGDKILQVSFKTNKSHK

SEQ ID NO: 44837 - protein, 326 aa, Homo sapiens
MSNGYEDHMAEDCRGDIGRTNLIVNYLPQNMTQDELRSLFSSIGEVESAKLIRDKVAGHSLGYGFVNYVTAKDAERAINTLNGLRLQSKTIKVSYARPSSEVIKDANLYISGLPRTMTQKDVEDMFSRFGRIINSRVLVDQTTGLSRGVAFIRFDKRSEAEEAITSFNGHKPPGSSEPITVKFAANPNQNKNVALLSQLYHSPARRFGGPVHHQAQRFRFSPMGVDHMSGLSGVNVPGNASSGWCIFIYNLGQDADEGILWQMFGPFGAVTNVKVIRDFNTNKCKGFGFVTMTNYEEAAMAIASLNGYRLGDKILQVSFKTNKSHK

SEQ ID NO: 44838 - protein, 346 aa, Homo sapiens
METQLSNGPTCNNTANGPTTINNNCSSPVDSGNTEDSKTNLIVNYLPQNMTQEELKSLFGSIGEIESCKLVRDKITGQSLGYGFVNYIDPKDAEKAINTLNGLRLQTKTIKVSYARPSSASIRDANLYVSGLPKTMTQKELEQLFSQYGRIITSRILVDQVTGISRGVGFIRFDKRIEAEEAIKGLNGQKPPGATEPITVKFANNPSQKTNQAILSQLYQSPNRRYPGPLAQQAQRFRFSPMTIDGMTSLAGINIPGHPGTGWCIFVYNLAPDADESILWQMFGPFGAVTNVKVIRDFNTNKCKGFGFVTMTNYDEAAMAIASLNGYRLGDRVLQVSFKTNKTHKA

SEQ ID NO: 44839 - protein, 387 aa, Homo sapiens
MAVRLCDVASLLRSGSWAAEPWTGVIAAMETQLSNGPTCNNTANGPTTINNNCSSPVDSGNTEDSKTNLIVNYLPQNMTQEELKSLFGSIGEIESCKLVRDKITGQSLGYGFVNYIDPKDAEKAINTLNGLRLQTKTIKVSYARPSSASIRDANLYVSGLPKTMTQKELEQLFSQYGRIITSRILVDQVTGISRGVGFIRFDKRIEAEEAIKGLNGQKPPGATEPITVKFANNPSQKTNQAILSQLYQSPNRRYPGPLAQQAQRFRLDNLLNMAYGVKRFSPMTIDGMTSLAGINIPGHPGTGWCIFVYNLAPDADESILWQMFGPFGAVTNVKVIRDFNTNKCKGFGFVTMTNYDEAAMAIASLNGYRLGDRVLQVSFKTNKTHKA

SEQ ID NO: 44840 - protein, 346 aa, Homo sapiens; identical to SEQ ID NO: 44838

SEQ ID NO: 44841 - protein, 359 aa, Homo sapiens
METQLSNGPTCNNTANGPTTINNNCSSPVDSGNTEDSKTNLIVNYLPQNMTQEELKSLFGSIGEIESCKLVRDKITGQSLGYGFVNYIDPKDAEKAINTLNGLRLQTKTIKVSYARPSSASIRDANLYVSGLPKTMTQKELEQLFSQYGRIITSRILVDQVTGISRGVGFIRFDKRIEAEEAIKGLNGQKPPGATEPITVKFANNPSQKTNQAILSQLYQSPNRRYPGPLAQQAQRFRLDNLLNMAYGVKRFSPMTIDGMTSLAGINIPGHPGTGWCIFVYNLAPDADESILWQMFGPFGAVTNVKVIRDFNTNKCKGFGFVTMTNYDEAAMAIASLNGYRLGDRVLQVSFKTNKTHKA

SEQ ID NO: 44842 - protein, 359 aa, Homo sapiens; identical to SEQ ID NO: 44841

SEQ ID NO: 44843 - protein, 90 aa, Homo sapiens
MTQKELEQLFSQYGRIITSRILVDQVTGISRGVGFIRFDKRIEAEEAIKGLNGQKPPGATEPITVKFANNPSQKTNQAILSQLYQSPNRR

SEQ ID NO: 44844 - protein, 189 aa, Homo sapiens
METQLSNGPTCNNTANGPTTINNNCSSPVDSGNTEDSKTNLIVNYLPQNMTQEELKSLFGSIGEIESCKLVRDKITGQSLGYGFVNYIDPKDAEKAINTLNGLRLQTKTIKVSYARPSSASIRDANLYVSGLPKTMTQKELEQLFSQYGRIITSRILVDQVTGISRGVGFIRFDKRIEAEEAIKGLNGQ

SEQ ID NO: 44845 - protein, 359 aa, Homo sapiens; identical to SEQ ID NO: 44841

SEQ ID NO: 44846 - protein, 367 aa, Homo sapiens
MVTQILGAMESQVGGGPAGPALPNGPLLGTNGATDDSKTNLIVNYLPQNMTQDEFKSLFGSIGDIESCKLVRDKITGQSLGYGFVNYSDPNDADKAINTLNGLKLQTKTIKVSYARPSSASIRDANLYVSGLPKTMSQKEMEQLFSQYGRIITSRILVDQVTGVSRGVGFIRFDKRIEAEEAIKGLNGQKPLGAAEPITVKFANNPSQKTGQALLTHLYQSSARRYAGPLHHQTQRFRLDNLLNMAYGVKSPLSLIARFSPIAIDGMSGLAGVGLSGGAAGAGWCIFVYNLSPEADESVLWQLFGPFGAVTNVKVIRDFTTNKCKGFGFVTMTNYDEAAMAIASLNGYRLGERVLQVSFKTSKQHKA

SEQ ID NO: 44847 - protein, 360 aa, Homo sapiens
MVTQILGAMESQVGGGPAGPALPNGPLLGTNGATDDSKTNLIVNYLPQNMTQDEFKSLFGSIGDIESCKLVRDKITGQSLGYGFVNYSDPNDADKAINTLNGLKLQTKTIKVSYARPSSASIRDANLYVSGLPKTMSQKEMEQLFSQYGRIITSRILVDQVTGVSRGVGFIRFDKRIEAEEAIKGLNGQKPLGAAEPITVKFANNPSQKTGQALLTHLYQSSARRYAGPLHHQTQRFRLDNLLNMAYGVKRFSPIAIDGMSGLAGVGLSGGAAGAGWCIFVYNLSPEADESVLWQLFGPFGAVTNVKVIRDFTTNKCKGFGFVTMTNYDEAAMAIASLNGYRLGERVLQVSFKTSKQHKA

SEQ ID NO: 44848 - protein, 383 aa, Homo sapiens
MRLLLLREIVINESRNCSFMIISTMEPQVSNGPTSNTSNGPSSNNRNCPSPMQTGATTDDSKTNLIVNYLPQNMTQEEFRSLFGSIGEIESCKLVRDKITGQSLGYGFVNYIDPKDAEKAINTLNGLRLQTKTIKVSYARPSSASIRDANLYVSGLPKTMTQKELEQLFSQYGRIITSRILVDQVTGVSRGVGFIRFDKRIEAEEAIKGLNGQKPSGATEPITVKFANNPSQKSSQALLSQLYQSPNRRYPGPLHHQAQRFRLDNLLNMAYGVKRFSPITIDGMTSLVGMNIPGHTGTGWCIFVYNLSPDSDESVLWQLFGPFGAVNNVKVIRDFNTNKCKGFGFVTMTNYDEAAMAIASLNGYRLGDRVLQVSFKTNKAHKS

SEQ ID NO: 44849 - protein, 371 aa, Homo sapiens
MEWNGLKMIISTMEPQVSNGPTSNTSNGPSSNNRNCPSPMQTGATTDDSKTNLIVNYLPQNMTQEEFRSLFGSIGEIESCKLVRDKITGQSLGYGFVNYIDPKDAEKAINTLNGLRLQTKTIKVSYARPSSASIRDANLYVSGLPKTMTQKELEQLFSQYGRIITSRILVDQVTGVSRGVGFIRFDKRIEAEEAIKGLNGQKPSGATEPITVKFANNPSQKSSQALLSQLYQSPNRRYPGPLHHQAQRFRLDNLLNMAYGVKRFSPITIDGMTSLVGMNIPGHTGTGWCIFVYNLSPDSDESVLWQLFGPFGAVNNVKVIRDFNTNKCKGFGFVTMTNYDEAAMAIASLNGYRLGDRVLQVSFKTNKAHKS

SEQ ID NO: 44850 - protein, 385 aa, Homo sapiens
MEWNGLKMIISTMEPQVSNGPTSNTSNGPSSNNRNCPSPMQTGATTDDSKTNLIVNYLPQNMTQEEFRSLFGSIGEIESCKLVRDKITGQSLGYGFVNYIDPKDAEKAINTLNGLRLQTKTIKVSYARPSSASIRDANLYVSGLPKTMTQKELEQLFSQYGRIITSRILVDQVTGVSRGVGFIRFDKRIEAEEAIKGLNGQKPSGATEPITVKFANNPSQKSSQALLSQLYQSPNRRYPGPLHHQAQRFRLDNLLNMAYGVKRLMSGPVPPSACPPRFSPITIDGMTSLVGMNIPGHTGTGWCIFVYNLSPDSDESVLWQLFGPFGAVNNVKVIRDFNTNKCKGFGFVTMTNYDEAAMAIASLNGYRLGDRVLQVSFKTNKAHKS

SEQ ID NO: 44851 - protein, 380 aa, Homo sapiens
MVMIISTMEPQVSNGPTSNTSNGPSSNNRNCPSPMQTGATTDDSKTNLIVNYLPQNMTQEEFRSLFGSIGEIESCKLVRDKITGQSLGYGFVNYIDPKDAEKAINTLNGLRLQTKTIKVSYARPSSASIRDANLYVSGLPKTMTQKELEQLFSQYGRIITSRILVDQVTGVSRGVGFIRFDKRIEAEEAIKGLNGQKPSGATEPITVKFANNPSQKSSQALLSQLYQSPNRRYPGPLHHQAQRFRLDNLLNMAYGVKRLMSGPVPPSACPPRFSPITIDGMTSLVGMNIPGHTGTGWCIFVYNLSPDSDESVLWQLFGPFGAVNNVKVIRDFNTNKCKGFGFVTMTNYDEAAMAIASLNGYRLGDRVLQVSFKTNKAHKS

SEQ ID NO: 44852 - protein, 366 aa, Homo sapiens
MVMIISTMEPQVSNGPTSNTSNGPSSNNRNCPSPMQTGATTDDSKTNLIVNYLPQNMTQEEFRSLFGSIGEIESCKLVRDKITGQSLGYGFVNYIDPKDAEKAINTLNGLRLQTKTIKVSYARPSSASIRDANLYVSGLPKTMTQKELEQLFSQYGRIITSRILVDQVTGVSRGVGFIRFDKRIEAEEAIKGLNGQKPSGATEPITVKFANNPSQKSSQALLSQLYQSPNRRYPGPLHHQAQRFRLDNLLNMAYGVKRFSPITIDGMTSLVGMNIPGHTGTGWCIFVYNLSPDSDESVLWQLFGPFGAVNNVKVIRDFNTNKCKGFGFVTMTNYDEAAMAIASLNGYRLGDRVLQVSFKTNKAHKS

SEQ ID NO: 44853 - protein, 366 aa, Homo sapiens
MEQIISTMEPQVSNGPTSNTSNGPSSNNRNCPSPMQTGATTDDSKTNLIVNYLPQNMTQEEFRSLFGSIGEIESCKLVRDKITGQSLGYGFVNYIDPKDAEKAINTLNGLRLQTKTIKVSYARPSSASIRDANLYVSGLPKTMTQKELEQLFSQYGRIITSRILVDQVTGVSRGVGFIRFDKRIEAEEAIKGLNGQKPSGATEPITVKFANNPSQKSSQALLSQLYQSPNRRYPGPLHHQAQRFRLDNLLNMAYGVKRFSPITIDGMTSLVGMNIPGHTGTGWCIFVYNLSPDSDESVLWQLFGPFGAVNNVKVIRDFNTNKCKGFGFVTMTNYDEAAMAIASLNGYRLGDRVLQVSFKTNKAHKS

SEQ ID NO: 44854 - protein, 369 aa, Homo sapiens
MRLKNQIISTMEPQVSNGPTSNTSNGPSSNNRNCPSPMQTGATTDDSKTNLIVNYLPQNMTQEEFRSLFGSIGEIESCKLVRDKITGQSLGYGFVNYIDPKDAEKAINTLNGLRLQTKTIKVSYARPSSASIRDANLYVSGLPKTMTQKELEQLFSQYGRIITSRILVDQVTGVSRGVGFIRFDKRIEAEEAIKGLNGQKPSGATEPITVKFANNPSQKSSQALLSQLYQSPNRRYPGPLHHQAQRFRLDNLLNMAYGVKRFSPITIDGMTSLVGMNIPGHTGTGWCIFVYNLSPDSDESVLWQLFGPFGAVNNVKVIRDFNTNKCKGFGFVTMTNYDEAAMAIASLNGYRLGDRVLQVSFKTNKAHKS

SEQ ID NO: 44855 - protein, 284 aa, Homo sapiens
MFRAAAPGQLRRAVAQDLCKVAGIAKVLVAQHDVYKGLLPEELTPLILATQKQFNYTHICAGASAFGKNLLPRVAAKLEVAPISDIIAIKSPDTFVRTIYAGNALCTVKCDEKVKVFSVRGTSFDAAATSGGSASSEKASSTSPVEISEWLDQKLTKSDRPELTGAKVVVSGGRGLKSGENFKLLYDLADQLHAAVGASRAAVDAGFVPNDMQVGQTGKIVAPELYIAVGISGAIQHLAGMKDSKTIVAINKDPEAPIFQVADYGIVADLFKVVPEMTEILKKK

SEQ ID NO: 44856 - protein, 333 aa, Homo sapiens
MFRAAAPGQLRRAASLLRFQSTLVIAEHANDSLAPITLNTITAATRLGGEVSCLVAGTKCDKVAQDLCKVAGIAKVLVAQHDVYKGLLPEELTPLILATQKQFNYTHICAGASAFGKNLLPRVAAKLEVAPISDIIAIKSPDTFVRTIYAGNALCTVKCDEKVKVFSVRGTSFDAAATSGGSASSEKASSTSPVEISEWLDQKLTKSDRPELTGAKVVVSGGRGLKSGENFKLLYDLADQLHAAVGASRAAVDAGFVPNDMQVGQTGKIVAPELYIAVGISGAIQHLAGMKDSKTIVAINKDPEAPIFQVADYGIVADLFKVVPEMTEILKKK

SEQ ID NO: 44857 - protein, 255 aa, Homo sapiens
MAELRVLVAVKRVIDYAVKIRVKPDRTGVVTDGVKHSMNPFCEIAVEEAVRLKEKKLVKEVIAVSCGPAQCQETIRTALAMGADRGIHVEVPPAEAERLGPLQVARVLAKLAEKEKVDLVLLGKQAIDDDCNQTGQMTAGFLDWPQGTFASQVTLEGDKLKVEREIDGGLETLRLKLPAVVTADLRLNEPRYATLPNIMKAKKKKIEVIKPGDLGVDLTSKLSVISVEDPPQRTAGVKVETTEDLVAKLKEIGRI

SEQ ID NO: 44858 - protein, 346 aa, Homo sapiens
MYLSLWVTINTVNLRNTLSGLRGAVTTVGMIKSDVPGTQEWLDERRRQGDLPLPTNSNPVLSLELCDPGQGPAPFQAVVVLIQPGRGLALRPPPSCLFPPDPTPSPPAGQIRVKPDRTGVVTDGVKHSMNPFCEIAVEEAVRLKEKKLVKEVIAVSCGPAQCQETIRTALAMGADRGIHVEVPPAEAERLGPLQVARVLAKLAEKEKVDLVLLGKQAIDDDCNQTGQMTAGFLDWPQGTFASQVTLEGDKLKVEREIDGGLETLRLKLPAVVTADLRLNEPRYATLPNIMKAKKKKIEVIKPGDLGVDLTSKLSVISVEDPPQRTAGVKVETTEDLVAKLKEIGRI

SEQ ID NO: 44859 - protein, 570 aa, Homo sapiens
MLVPLAKLSCLGVNMERFAEEADVVIVGAGPAGLSAAVRLKQLAVAHEKDIRVCLVEKAAQIGAHTLSGACLDPGAFKELFPDWKEKGAPLNTPVTEDRFGILTEKYRIPVPILPGLPMNNHGNYIVRLGHLVSWMGEQAEALGVEVYPGYAAAEVLFHDDGSVKGIATNDVGIQKDGAPKATFERGLELHAKVTIFAEGCHGHLAKQLYKKFDLRANCEPQTYGIGLKELWVIDEKNWKPGRVDHTVGWPLDRHTYGGSFLYHLNEGEPLVALGLVVGLDYQNPYLSPFREFQRWKHHPSIRPTLEGGKRIAYGARALNEGGFQSIPKLTFPGGLLIGCSPGFMNVPKIKGTHTAMKSGILAAESIFNQLTSENLQSKTIGLHVTEYEDNLKNSWVWKELYSVRNIRPSCHGVLGVYGGMIYTGIFYWILRGMEPWTLKHKGSDFERLKPAKDCTPIEYPKPDGQISFDLLSSVALSGTNHEHDQPAHLTLRDDSIPVNRNLSIYDGPEQRFCPAGVYEFVPVEQGDGFRLQINAQNCVHCKTCDIKDPSQNINWVVPEGGGGPAYNGM

SEQ ID NO: 44860 - protein, 617 aa, Homo sapiens
MLVPLAKLSCLAYQCFHALKIKKNYLPLCATRWSSTSTVPRITTHYTIYPRDKDKRWEGVNMERFAEEADVVIVGAGPAGLSAAVRLKQLAVAHEKDIRVCLVEKAAQIGAHTLSGACLDPGAFKELFPDWKEKGAPLNTPVTEDRFGILTEKYRIPVPILPGLPMNNHGNYIVRLGHLVSWMGEQAEALGVEVYPGYAAAEVLFHDDGSVKGIATNDVGIQKDGAPKATFERGLELHAKVTIFAEGCHGHLAKQLYKKFDLRANCEPQTYGIGLKELWVIDEKNWKPGRVDHTVGWPLDRHTYGGSFLYHLNEGEPLVALGLVVGLDYQNPYLSPFREFQRWKHHPSIRPTLEGGKRIAYGARALNEGGFQSIPKLTFPGGLLIGCSPGFMNVPKIKGTHTAMKSGILAAESIFNQLTSENLQSKTIGLHVTEYEDNLKNSWVWKELYSVRNIRPSCHGVLGVYGGMIYTGIFYWILRGMEPWTLKHKGSDFERLKPAKDCTPIEYPKPDGQISFDLLSSVALSGTNHEHDQPAHLTLRDDSIPVNRNLSIYDGPEQRFCPAGVYEFVPVEQGDGFRLQINAQNCVHCKTCDIKDPSQNINWVVPEGGGGPAYNGM

SEQ ID NO: 44861 - protein, 428 aa, Homo sapiens
MDPSVTLWQFLLQLLREQGNGHIISWTSRDGGEFKLVDAEEVARLWGLRKNKTNMNYDKLSRALRYYYDKNIIRKVSGQKFVYKFVSYPEVAGCSTEDCPPQPEVSVTSTMPNVAPAAIHAAPGDTVSGKPGTPKGAGMAGPGGLARSSRNEYMRSGLYSTFTIQSLQPQPPPHPRPAVVLPSAAPAGAAAPPSGSRSTSPSPLEACLEAEEAGLPLQVILTPPEAPNLKSEELNVEPGLGRALPPEVKVEGPKEELEVAGERGFVPETTKAEPEVPPQEGVPARLPAVVMDTAGQAGGHAASSPEISQPQKGRKPRDLELPLSPSLLGGPGPERTPGSGSGSGLQAPGPALTPSLLPTHTLTPVLLTPSSLPPSIHFWSTLSPIAPRSPAKLSFQFPSSGSAQVHIPSISVDGLSTPVVLSPGPQKP

SEQ ID NO: 44862 - protein, 407 aa, Homo sapiens
MESAITLWQFLLQLLLDQKHEHLICWTSNDGEFKLLKAEEVAKLWGLRKNKTNMNYDKLSRALRYYYDKNIIKKVIGQKFVYKFVSFPEILKMDPHAVEISRESLLLQDSDCKASPEGREAHKHGLAALRSTSRNEYIHSGLYSSFTINSLQNPPDAFKAIKTEKLEEPPEDSPPVEEVRTVIRFVTNKTDKHVTRPVVSLPSTSEAAAASAFLASSVSAKISSLMLPNAASISSASPFSSRSPSLSPNSPLPSEHRSLFLEAACHDSDSLEPLNLSSGSKTKSPSLPPKAKKPKGLEISAPPLVLSGTDIGSIALNSPALPSGSLTPAFFTAQTPNGLLLTPSPLLSSIHFWSSLSPVAPLSPARLQGPSTLFQFPTLLNGHMPVPIPSLDRAASPVLLSSNSQKS

SEQ ID NO: 44863 - protein, 38 aa, Homo sapiens
MESAITLWQFLLQLLLDQKHEHLICWTSNDGEFKLLKA

SEQ ID NO: 44864 - protein, 160 aa, Homo sapiens
MESAITLWQFLLQLLLDQKHEHLICWTSNDGEFKLLKAEEVAKLWGLRKNKTNMNYDKLSRALRYYYDKNIIKKVIGQKFVYKFVSFPEILKMDPHAVEISRESLLLQDSDCKASPEGREAHKHGLAALRSTSRNEYIHSGLYSSFTINSLQNPPDAFKA

SEQ ID NO: 44865 - protein, 405 aa, Homo sapiens
MDSAITLWQFLLQLLQKPQNKHMICWTSNDGQFKLLQAEEVARLWGIRKNKPNMNYDKLSRALRYYYVKNIIKKVNGQKFVYKFVSYPEILNMDPMTVGRIEGDCESLNFSEVSSSSKDVENGGKDKPPQPGAKTSSRNDYIHSGLYSSFTLNSLNSSNVKLFKLIKTENPAEKLAEKKSPQEPTPSVIKFVTTPSKKPPVEPVAATISIGPSISPSSEETIQALETLVSPKLPSLEAPTSASNVMTAFATTPPISSIPPLQEPPRTPSPPLSSHPDIDTDIDSVASQPMELPENLSLEPKDQDSVLLEKDKVNNSSRSKKPKGLELAPTLVITSSDPSPLGILSPSLPTASLTPAFFSQVACSLFMVSPLLSFICPFKQIQNLYTQVCFLLLRFVLERLCVTVM

SEQ ID NO: 44866 - protein, 431 aa, Homo sapiens
MDSAITLWQFLLQLLQKPQNKHMICWTSNDGQFKLLQAEEVARLWGIRKNKPNMNYDKLSRALRYYYVKNIIKKVNGQKFVYKFVSYPEILNMDPMTVGRIEGDCESLNFSEVSSSSKDVENGGKDKPPQPGAKTSSRNDYIHSGLYSSFTLNSLNSSNVKLFKLIKTENPAEKLAEKKSPQEPTPSVIKFVTTPSKKPPVEPVAATISIGPSISPSSEETIQALETLVSPKLPSLEAPTSASNVMTAFATTPPISSIPPLQEPPRTPSPPLSSHPDIDTDIDSVASQPMELPENLSLEPKDQDSVLLEKDKVNNSSRSKKPKGLELAPTLVITSSDPSPLGILSPSLPTASLTPAFFSQTPIILTPSPLLSSIHFWSTLSPVAPLSPARLQGANTLFQFPSVLNSHGPFTLSGLDGPSTPGPFSPDLQKT

SEQ ID NO: 44867 - protein, 521 aa, Homo sapiens
RPQDPRRRCRVRGRGGRGARSRGGGRCGRLRAPGGLGLAAAAFYGSAAGVAAAAAPSSSFQREEEAEGGEAHRVRGGDRGGAPRAASLIAMDSAITLWQFLLQLLQKPQNKHMICWTSNDGQFKLLQAEEVARLWGIRKNKPNMNYDKLSRALRYYYVKNIIKKVNGQKFVYKFVSYPEILNMDPMTVGRIEGDCESLNFSEVSSSSKDVENGGKDKPPQPGAKTSSRNDYIHSGLYSSFTLNSLNSSNVKLFKLIKTENPAEKLAEKKSPQEPTPSVIKFVTTPSKKPPVEPVAATISIGPSISPSSEETIQALETLVSPKLPSLEAPTSASNVMTAFATTPPISSIPPLQEPPRTPSPPLSSHPDIDTDIDSVASQPMELPENLSLEPKDQDSVLLEKDKVNNSSRSKKPKGLELAPTLVITSSDPSPLGILSPSLPTASLTPAFFSQTPIILTPSPLLSSIHFWSTLSPVAPLSPARLQGANTLFQFPSVLNSHGPFTLSGLDGPSTPGPFSPDLQKT

SEQ ID NO: 44868 - protein, 268 aa, Homo sapiens
MNGTANPLLDREEHCLRLGESFEKRPRASFHTIRYDFKPASIDTSCEGELQVGKGDEVTITLPHIPGSTPPMTVFKGNKRPYQKDCVLIINHDTGEYVLEKLSSSIQVKKTRAEGSSKIQARMEQQPTRPPQTSQPPPPPPPMPFRAPTKPPVGPKTSPLKDNPSPEPQLDDIKRELRAEVDIIEQMSSSSGSSSSDSESSSGSDDDSSSSGGEDNGPASPPQPSHQQPYNSRPAVANGTSRPQGSNQLMNTLRNDLQLSESGSDSDD

SEQ ID NO: 44869 - protein, 167 aa, Homo sapiens
MKSQLHCHISLAEGSSKIQARMEQQPTRPPQTSQPPPPPPPMPFRAPTKPPVGPKTSPLKDNPSPEPQLDDIKRELRAEVDIIEQMSSSSGSSSSDSESSSGSDDDSSSSGGEDNGPASPPQPSHQQPYNSRPAVANGTSRPQGSNQLMNTLRNDLQLSESGSDSDD

SEQ ID NO: 44870 - protein, 992 aa, Homo sapiens
MARGGAACKSDARLLLGRDALRPAPALLAPAVLLGAALGLGLGLWLGCRAGRQRTRHQKDDTQNLLKNLESNAQTPSETGSPSRRRKREVQMSKDKEAVDECEPPSNSNITAFALKAKVIYPINQKFRPLADGSSNPSLHENLKQAVLPHQPVEASPSSSLGSLSQGEKDDCSSSSSVHSATSDDRFLSRTFLRVNAFPEVLACESVDVDLCIYSLHLKDLLHLDTALRQEKHMMFIQIFKMCLLDLLPKKKSDDELYQKILSKQEKDLEELEKGLQVKLSNTEMSGAGDSEYITLADVEKKEREYSEQLIDNMEAFWKQMANIQHFLVDQFKCSSSKARQLMMTLTERMIAAEGLLCDSQELQALDALERTMGRAHMAKVIEFLKLQVQEETRCRLAAISHGLELLAGEGKLSGRQKEELLTQQHKAFWQEAERFSREFVQRGKDLVTASLAHQVEGTAKLTLAQEEEQRSFLAEAQPTADPEKFLEAFHEVLERQRLMQCDLEEEENVRATEAVVALCQELYFSTVDTFQKFVDALFLQTLPGMTGLPPEECDYLRQEVQENAAWQLGKSNRFRRQQWKLFQELLEQDQQVWMEECALSSVLQTHLREDHEGTIRGVLGRLGGLTEESTRCVLQGHDLLLRSALRRLALRGNALATLTQMRLSGKKHLLQELREQRALEQGSSQCLDEHQWQLLRALEARVLEEASRLEEEAQQTRLQLQQRLLAEAQEVGQLLQQHMECAIGQALLVHARNAATKSRAKDRDDFKRTLMEAAVESVYVTSAGVSRLVQAYYQQIGRIMEDHEERKLQHLKTLQGERMENYKLRKKQELSNPSSGSRTAGGAHETSQAVHQRMLSQQKRFLAQFPVHQQMRLHAQQQQAGVMDLLEAQLETQLQEAEQNFISELAALARVPLAESKLLPAKRGLLEKPLRTKRKKPLPQERGDLGVPNNEDLASGDQTSGSLSSKRLSQQESEAGDSGNSKKMLKRRSNL

SEQ ID NO: 44871 - protein, 992 aa, Homo sapiens; identical to SEQ ID NO: 44870

SEQ ID NO: 44872 - protein, 1228 aa, Homo sapiens
MIWPKVECCHFKTAVEAPLGMKLDKKMEVFIPLSTSAASSGPWAHSLFAFIPSWPKKNLFKRESPITHRLYGDISREVQGTSENGVIFQKCALVSGSSEAQTARIWLLVNNTKTTSSANLSELLLLDSIAGLTIWDSVGNRTSEGFQAFSKKFLQVGDAFAVSYAATLQAGDLGNGESLKLPAQLTFQSSSRNRTQLKVLFSITAEENVTVLPHHGLHAAGFFIAFLLSLVLTWAALFLMVRYQCLKGNMLTRHRVWQYESKLEPLPFTSADGVNEDLSLNDQMIDILSSEDPGSMLQALEELEIATLNRADADLEACRTQISKDIIALLLKNLTSSGHLSPQVERKMSAVFKKQFLLLENEIQEEYDRKMVALTAECDLETRKKMENQYQREMMAMEEAEELLKRAGERSAVECSNLLRTLHGLEQEHLRKSLALQQEEDFAKAHRQLAVFQRNELHSIFFTQIKSAIFKGELKPEAAKMLLQNYSKIQENVEELMDFFQASKRYHLSKRFGHREYLVQNLQSSETRVQGLLSTAAAQLTHLIQKHERAGYLDEDQMEMLLERAQTEVFSIKQKLDNDLKQEKKKLHQKLITKRRRELLQKHREQRREQASVGEAFRTVEDAGQYLHQKRSLMEEHGATLEELQERLDQAALDDLRTLTLSLFEKATDELRRLQNSAMTQELLKRGVPWLFLQQILEEHGKEMAARAEQLEGEERDRDQEGVQSVRQRLKDDAPEAVTEEQAELRRWEHLIFMKLCSSVFSLSEEELLRMRQEVHGCFAQMDRSLALPKIRARVLLQQFQTAWREAEFVKLDQAVAAPELQQQSKVRKSRSKSKSKGELLKKCIEDKIHLCEEQASEDLVEKVRGELLRERVQRMEAQEGGFAQSLVALQFQKASRVTETLSAYTALLSIQDLLLEELSASEMLTKSACTQILESHSRELQELERKLEDQLVQQEAAQQQQALASWQQWVADGPGILNEPGEVDSERQVSTVLHQALSKSQTLLEQHQQCLREEQQNSVVLEDLLENMEADTFATLCSQELRLASYLARMAMVPGATLRRLLSVVLPTASQPQLLALLDSATERHVDHAAESDGGAEQADVGRRRKHQSWWQALDGKLRGDLISRGLEKMLWARKRKQSILKKTCLPLRERMIFSGKGSWPHLSLEPIGELAPVPIVGAETIDLLNTGEKLFIFRNPKEPEISLHVPPRKKKNFLNAKKAMRALGMD

SEQ ID NO: 44873 - protein, 1308 aa, Homo sapiens
MDPSGSRGRPTWVLAGGLLAVALALGGRGCLGASSRPRWRPLGAQPPRDPQVAPRSGPGLRIPPGRSGAGPESSTQDLPCMIWPKVECCHFKTAVEAPLGMKLDKKMEVFIPLSTSAASSGPWAHSLFAFIPSWPKKNLFKRESPITHRLYGDISREVQGTSENGVIFQKCALVSGSSEAQTARIWLLVNNTKTTSSANLSELLLLDSIAGLTIWDSVGNRTSEGFQAFSKKFLQVGDAFAVSYAATLQAGDLGNGESLKLPAQLTFQSSSRNRTQLKVLFSITAEENVTVLPHHGLHAAGFFIAFLLSLVLTWAALFLMVRYQCLKGNMLTRHRVWQYESKLEPLPFTSADGVNEDLSLNDQMIDILSSEDPGSMLQALEELEIATLNRADADLEACRTQISKDIIALLLKNLTSSGHLSPQVERKMSAVFKKQFLLLENEIQEEYDRKMVALTAECDLETRKKMENQYQREMMAMEEAEELLKRAGERSAVECSNLLRTLHGLEQEHLRKSLALQQEEDFAKAHRQLAVFQRNELHSIFFTQIKSAIFKGELKPEAAKMLLQNYSKIQENVEELMDFFQASKRYHLSKRFGHREYLVQNLQSSETRVQGLLSTAAAQLTHLIQKHERAGYLDEDQMEMLLERAQTEVFSIKQKLDNDLKQEKKKLHQKLITKRRRELLQKHREQRREQASVGEAFRTVEDAGQYLHQKRSLMEEHGATLEELQERLDQAALDDLRTLTLSLFEKATDELRRLQNSAMTQELLKRGVPWLFLQQILEEHGKEMAARAEQLEGEERDRDQEGVQSVRQRLKDDAPEAVTEEQAELRRWEHLIFMKLCSSVFSLSEEELLRMRQEVHGCFAQMDRSLALPKIRARVLLQQFQTAWREAEFVKLDQAVAAPELQQQSKVRKSRSKSKSKGELLKKCIEDKIHLCEEQASEDLVEKVRGELLRERVQRMEAQEGGFAQSLVALQFQKASRVTETLSAYTALLSIQDLLLEELSASEMLTKSACTQILESHSRELQELERKLEDQLVQQEAAQQQQALASWQQWVADGPGILNEPGEVDSERQVSTVLHQALSKSQTLLEQHQQCLREEQQNSVVLEDLLENMEADTFATLCSQELRLASYLARMAMVPGATLRRLLSVVLPTASQPQLLALLDSATERHVDHAAESDGGAEQADVGRRRKHQSWWQALDGKLRGDLISRGLEKMLWARKRKQSILKKTCLPLRERMIFSGKGSWPHLSLEPIGELAPVPIVGAETIDLLNTGEKLFIFRNPKEPEISLHVPPRKKKNFLNAKKAMRALGMD

SEQ ID NO: 44874 - protein, 1246 aa, Homo sapiens
MDPSGSRGRPTWVLAGGLLAVALALGGRGCLGASSRPRWRPLGAQPPRDPQVAPRSGPGLRIPPGRSGAGPESSTQDLPCMIWPKVECCHFKTAVEAPLGMKLDKKMEVFIPLSTSAASSGPWAHSLFAFIPSWPKKNLFKRESPITHRLYGDISREVQGTSENGVIFQKCALVSGSSEAQTARIWLLVNNTKTTSSANLSELLLLDSIAGLTIWDSVGNRTSEGFQAFSKKFLQVGDAFAVSYAATLQAGDLGNGESLKLPAQLTFQSSSRNRTQLKVLFSITAEENVTVLPHHGLHAAGFFIAFLLSLVLTWAALFLMVRYQCLKGNMLTRHRVWQYESKLEPLPFTSADGVNEDLSLNDQMIDILSSEDPGSMLQALEELEIATLNRADADLEACRTQISKDIIALLLKNLTSSGHLSPQVERKMSAVFKKQFLLLENEIQEEYDRKMVALTAECDLETRKKMENQYQREMMAMEEAEELLKRAGERSAVECSNLLRTLHGLEQEHLRKSLALQQEEDFAKAHRQLAVFQRNELHSIFFTQIKSAIFKGELKPEAAKMLLQNYSKIQENVEELMDFFQASKRYHLSKRFGHREYLVQNLQSSETRVQGLLSTAAAQLTHLIQKHERAGYLDEDQMEMLLERAQTEVFSIKQKLDNDLKQEKKKLHQKLITKRRRELLQKHREQRREQASVGEAFRTVEDAGQYLHQKRSLMEEHGATLEELQERLDQAALDDLRTLTLSLFEKATDELRRLQNSAMTQELLKRGVPWLFLQQILEEHGKEMAARAEQLEGEERDRDQEGVQSVRQRLKDDAPEAVTEEQAELRRWEHLIFMKLCSSVFSLSEEELLRMRQEVHGCFAQMDRSLALPKIRARVLLQQFQTAWREAEFVKLDQAVAAPELQQQSKVRKSRSKSKSKGELLKKCIEDKIHLCEEQASEDLVEKVRGELLRERVQRMEAQEGGFAQSLVALQFQKASRVTETLSAYTALLSIQDLLLEELSASEMLTKSACTQILESHSRELQELERKLEDQLVQQEAAQQQQALASWQQWVADGPGILNEPGEVDSERQVSTVLHQALSKSQTLLEQHQQCLREEQQNSVVLEDLLENMEADTFATLCSQELRLASYLARMAMVPGATLRRLLSVVLPTASQPQLLALLDSATERHVDHAAESDGGAEQADVGRRRKHQSWWQALDGKLRGDLISRGLEKMLWARKRKQRSGNQESFWQYLVGTPEIGLIEWMSEK

SEQ ID NO: 44875 - protein, 293 aa, Homo sapiens
MFISLWEFFYGHFFRFWMKWLLRQMTGKCELQRIFDTYVGAQRTHRIENSLTYSKNKVLQKATHVVQSEVDKYVDDIMKEKNINPEKDASFKICMKMCLLQITGYKQLYLDVESVRKRPYDSDNLQHEELLMKLWNLLMPTKKLNARISKQWAEIGFQGDDPKTDFRGMGILGLINLVYFSENYTSEAHQILSRSNHPKLGYSYAIVGINLTEMAYSLLKSEALKFHLYNLVPGIPTMEHFHQFYCYLVYEFDKFWFEEEPESIMYFNLYREKFHEKIKGLLLDCNVALTLKV

SEQ ID NO: 44876 - protein, 168 aa, Homo sapiens
MFISLWEFFYGHFFRFWMKWLLRQMTGKCELQRIFDTYVGAQRTHRIENSLTYSKNKVLQKATHVVQSEVDKYVDDIMKEKNINPEKDASFKICMKMCLLQITGYKQLYLDVESVRKRPYDSDNLQHEELLMKLWNLLMPTKKLNARISKQWAEIGFQGDDPKTDFRG

SEQ ID NO: 44877 - protein, 35 aa, Homo sapiens
MFISLWEFFYGHFFRFWMKWLLRQMTGKCELQRIF

SEQ ID NO: 44878 - protein, 621 aa, Homo sapiens
MAALKEDRSYGLSCGRVSDGSKVSVFHVKLTDSALRAFESYRARQDSVSLRPSIRFQGSQGHISIPQPDCPAEARTFSFYLSNIGRDNPQGSFDCIQQYVSSHGEVHLDCLGSIQDKITVCATDDSYQKARQSMAQAEEETRSRSAIVIKAGGRYLGKKVQFRKPAPGATDAVPSRKRATPINLASAIRKSGASAVSGGSGVSQRPFRDRVLHLLALRPYRKAELLLRLQKDGLTQADKDALDGLLQQVANMSAKDGTCTLQDCMYKDVQKDWPGYSEGDQQLLKRVLVRKLCQPQSTGSLLGDPAASSPPGERGRSASPPQKRLQPPDFIDPLANKKPRISHFTQRAQPAVNGKLGVPNGREALLPTPGPPASTDTLSSSTHLPPRLEPPRAHDPLADVSNDLGHSGRDCEHGEAAAPAPTVRLGLPLLTDCAQPSRPHGSPSRSKPKKKSKKHKDKERAAEDKPRAQLPDCAPATHATPGAPADTPGLNGTCSVSSVPTSTSETPDYLLKYAAISSSEQRQSYKNDFNAEYSEYRDLHARIERITRRFTQLDAQLRQLSQGSEEYETTRGQILQEYRKIKKTNTNYSQEKHRCEYLHSKLAHIKRLIAEYDQRQLQAWP

SEQ ID NO: 44879 - protein, 29 aa, Homo sapiens
IHRLVVAFQDSVSLRPSIRFQGSQGEMSL

SEQ ID NO: 44880 - protein, 397 aa, Homo sapiens
MEELQEPLRGQLRLCFTQAARTSLLLLRLNDAALRALQECQRQQVRPVIAFQGHRGYLRLPGPGWSCLFSFIVSQCCQEGAGGSLDLVCQRFLRSGPNSLHCLGSLRERLIIWAAMDSIPAPSSVQGHNLTEDARHPESWQNTGGYSEGDAVSQPQMALEEVSVSDPLASNQGQSLPGSSREHMAQWEVRSQTHVPNREPVQALPSSASRKRLDKKRSVPVATVELEEKRFRTLPLVPSPLQGLTNQDLQEGEDWEQEDEDMDPRLEHSSSVQEDSESPSPEDIPDYLLQYRAIHSAEQQHAYEQDFETDYAEYRILHARVGTASQRFIELGAEIKRVRRGTPEYKVLEDKIIQEYKKFRKQYPSYREEKRRCEYLHQKLSHIKGLILEFEEKNRGS

SEQ ID NO: 44881 - protein, 962 aa, Homo sapiens
MDTDLYDEFGNYIGPELDSDEDDDELGRETKDLDEMDDDDDDDDVGDHDDDHPGMEVVLHEVYGPEVETIVQEEDTQPLTEPIIKPVKTKKFTLMEQTLPVTVYEMDFLADLMDNSELIRNVTLCGHLHHGKTCFVDCLIEQTHPEIRKRYDQDLCYTDILFTEQERGVGIKSTPVTVVLPDTKGKSYLFNIMDTPGHVNFSDEVTAGLRISDGVVLFIDAAEGVMLNTERLIKHAVQERLAVTVCINKIDRLILELKLPPTDAYYKLRHIVDEVNGLISMYSTDENLILSPLLGNVCFSSSQYSICFTLGSFAKIYADTFGDINYQEFAKRLWGDIYFNPKTRKFTKKAPTSSSQRSFVEFILEPLYKILAQVVGDVDTSLPRTLDELGIHLTKEELKLNIRPLLRLVCKKFFGEFTGFVDMCVQHIPSPKVGAKPKIEHTYTGGVDSDLGEAMSDCDPDGPLMCHTTKMYSTDDGVQFHAFGRVLSGTIHAGQPVKVLGENYTLEDEEDSQICTVGRLWISVARYHIEVNRVPAGNWVLIEGVDQPIVKTATITEPRGNEEAQIFRPLKFNTTSVIKIAVEPVNPSELPKMLDGLRKVNKSYPSLTTKVEESGEHVILGTGELYLDCVMHDLRKMYSEIDIKVADPVVTFCETVVETSSLKCFAETPNKKNKITMIAEPLEKGLAEDIENEVVQITWNRKKLGEFFQTKYDWDLLAARSIWAFGPDATGPNILVDDTLPSEVDKALLGSVKDSIVQGFQWGTREGPLCDELIRNVKFKILDAVVAQEPLHRGGGQIIPTARRVVYSAFLMATPRLMEPYYFVEVQAPADCVSAVYTVLARRRGHVTQDAPIPGSPLYTIKAFIPAIDSFGFETDLRTHTQGQAFSLSVFHHWQIVPGDPLDKSIVIRPLEPQPAPHLAREFMIKTRRRKGLSEDVSISKFFDDPMLLELAKQDVVLNYPM

SEQ ID NO: 44882 - protein, 937 aa, Homo sapiens
MDDDDDDDDVGDHDDDHPGMEVVLHEDKKYYPTAEEVYGPEVETIVQEEDTQPLTEPIIKPVKTKKFTLMEQTLPVTVYEMDFLADLMDNSELIRNVTLCGHLHHGKTCFVDCLIEQTHPEIRKRYDQDLCYTDILFTEQERGVGIKSTPVTVVLPDTKGKSYLFNIMDTPGHVNFSDEVTAGLRISDGVVLFIDAAEGVMLNTERLIKHAVQERLAVTVCINKIDRLILELKLPPTDAYYKLRHIVDEVNGLISMYSTDENLILSPLLGNVCFSSSQYSICFTLGSFAKIYADTFGDINYQEFAKRLWGDIYFNPKTRKFTKKAPTSSSQRSFVEFILEPLYKILAQVVGDVDTSLPRTLDELGIHLTKEELKLNIRPLLRLVCKKFFGEFTGFVDMCVQHIPSPKVGAKPKIEHTYTGGVDSDLGEAMSDCDPDGPLMCHTTKMYSTDDGVQFHAFGRVLSGTIHAGQPVKVLGENYTLEDEEDSQICTVGRLWISVARYHIEVNRVPAGNWVLIEGVDQPIVKTATITEPRGNEEAQIFRPLKFNTTSVIKIAVEPVNPSELPKMLDGLRKVNKSYPSLTTKVEESGEHVILGTGELYLDCVMHDLRKMYSEIDIKVADPVVTFCETVVETSSLKCFAETPNKKNKITMIAEPLEKGLAEDIENEVVQITWNRKKLGEFFQTKYDWDLLAARSIWAFGPDATGPNILVDDTLPSEVDKALLGSVKDSIVQGFQWGTREGPLCDELIRNVKFKILDAVVAQEPLHRGGGQIIPTARRVVYSAFLMATPRLMEPYYFVEVQAPADCVSAVYTVLARRRGHVTQDAPIPGSPLYTIKAFIPAIDSFGFETDLRTHTQGQAFSLSVFHHWQIVPGDPLDKSIVIRPLEPQPAPHLAREFMIKTRRRKGLSEDVSISKFFDDPMLLELAKQDVVLNYPM

SEQ ID NO: 44883 - protein, 972 aa, Homo sapiens
MDTDLYDEFGNYIGPELDSDEDDDELGRETKDLDEMDDDDDDDDVGDHDDDHPGMEVVLHEDKKYYPTAEEVYGPEVETIVQEEDTQPLTEPIIKPVKTKKFTLMEQTLPVTVYEMDFLADLMDNSELIRNVTLCGHLHHGKTCFVDCLIEQTHPEIRKRYDQDLCYTDILFTEQERGVGIKSTPVTVVLPDTKGKSYLFNIMDTPGHVNFSDEVTAGLRISDGVVLFIDAAEGVMLNTERLIKHAVQERLAVTVCINKIDRLILELKLPPTDAYYKLRHIVDEVNGLISMYSTDENLILSPLLGNVCFSSSQYSICFTLGSFAKIYADTFGDINYQEFAKRLWGDIYFNPKTRKFTKKAPTSSSQRSFVEFILEPLYKILAQVVGDVDTSLPRTLDELGIHLTKEELKLNIRPLLRLVCKKFFGEFTGFVDMCVQHIPSPKVGAKPKIEHTYTGGVDSDLGEAMSDCDPDGPLMCHTTKMYSTDDGVQFHAFGRVLSGTIHAGQPVKVLGENYTLEDEEDSQICTVGRLWISVARYHIEVNRVPAGNWVLIEGVDQPIVKTATITEPRGNEEAQIFRPLKFNTTSVIKIAVEPVNPSELPKMLDGLRKVNKSYPSLTTKVEESGEHVILGTGELYLDCVMHDLRKMYSEIDIKVADPVVTFCETVVETSSLKCFAETPNKKNKITMIAEPLEKGLAEDIENEVVQITWNRKKLGEFFQTKYDWDLLAARSIWAFGPDATGPNILVDDTLPSEVDKALLGSVKDSIVQGFQWGTREGPLCDELIRNVKFKILDAVVAQEPLHRGGGQIIPTARRVVYSAFLMATPRLMEPYYFVEVQAPADCVSAVYTVLARRRGHVTQDAPIPGSPLYTIKAFIPAIDSFGFETDLRTHTQGQAFSLSVFHHWQIVPGDPLDKSIVIRPLEPQPAPHLAREFMIKTRRRKGLSEDVSISKFFDDPMLLELAKQDVVLNYPM

SEQ ID NO: 44884 - protein, 640 aa, Homo sapiens
MAAGGTGGLREEQRYGLSCGRLGQDNITVLHVKLTETAIRALETYQSHKNLIPFRPSIQFQGLHGLVKIPKNDPLNEVHNFNFYLSNVGKDNPQGSFDCIQQTFSSSGASQLNCLGFIQDKITVCATNDSYQMTRERMTQAEEESRNRSTKVIKPGGPYVGKRVQIRKAPQAVSDTVPERKRSTPMNPANTIRKTHSSSTISQRPYRDRVIHLLALKAYKKPELLARLQKDGVNQKDKNSLGAILQQVANLNSKDLSYTLKDYVFKELQRDWPGYSEIDRRSLESVLSRKLNPSQNAAGTSRSESPVCSSRDAVSSPQKRLLDSEFIDPLMNKKARISHLTNRVPPTLNGHLNPTSEKSAAGLPLPPAAAAIPTPPPLPSTYLPISHPPQIVNSNSNSPSTPEGRGTQDLPVDSFSQNDSIYEDQQDKYTSRTSLETLPPGSVLLKCPKPMEENHSMSHKKSKKKSKKHKEKDQIKKHDIETIEEKEEDLKREEEIAKLNNSSPNSSGGVKEDCTASMEPSAIELPDYLIKYIAIVSYEQRQNYKDDFNAEYDEYRALHARMETVARRFIKLDAQRKRLSPGSKEYQNVHEEVLQEYQKIKQSSPNYHEEKYRCEYLHNKLAHIKRLIGEFDQQQAESWS

SEQ ID NO: 44885 - protein, 390 aa, Homo sapiens
MAAGGTGGLREEQRYGLSCGRLGQDNITVLHVKLTETAIRALETYQSHKNLIPFRPSIQFQGLHGLVKIPKNDPLNEVHNFNFYLSNVGKDNPQGSFDCIQQTFSSSGASQLNCLGFIQDKITVCATNDSYQMTRERMTQIVNSNSNSPSTPEGRGTQDLPVDSFSQNDSIYEDQQDKYTSRTSLETLPPGSVLLKCPKPMEENHSMSHKKSKKKSKKHKEKDQIKKHDIETIEEKEEDLKREEEIAKLNNSSPNSSGGVKEDCTASMEPSAIELPDYLIKYIAIVSYEQRQNYKDDFNAEYDEYRALHARMETVARRFIKLDAQRKRLSPGSKEYQNVHEEVLQEYQKIKQSSPNYHEEKYRCEYLHNKLAHIKRLIGEFDQQQAESWS

SEQ ID NO: 44886 - protein, 547 aa, Homo sapiens
MRQKRKGDLSPAELMMLTIGDVIKQLIEAHEQGKDIDLNKVKTKTAAKYGLSAQPRLVDIIAAVPPQYRKVLMPKLKAKPIRTASGIAVVAVMCKPHRCPHISFTGNICVYCPGGPDSDFEYSTQSYTGYEPTSMRAIRARYDPFLQTRHRIEQLKQLGHSVDKVEFIVMGGTFMALPEEYRDYFIRNLHDALSGHTSNNIYEAVKYSERSLTKCIGITIETRPDYCMKRHLSDMLTYGCTRLEIGVQSVYEDVARDTNRGHTVKAVCESFHLAKDSGFKVVAHMMPDLPNVGLERDIEQFTEFFENPAFRPDGLKLYPTLVIRGTGLYELWKSGRYKSYSPSDLVELVARILALVPPWTRVYRVQRDIPMPLVSSGVEHGNLRELALARMKDLGIQCRDVRTREVGIQEIHHKVRPYQVELVRRDYVANGGWETFLSYEDPDQDILIGLLRLRKCSEETFRFELGGGVSIVRELHVYGSVVPVSSRDPTKFQHQGFGMLLMEEAERIAREEHGSGKIAVISGVGTRNYYRKIGYRLQGPYMVKMLK

SEQ ID NO: 44887 - protein, 455 aa, Homo sapiens
MCKPHRCPHISFTGNICVYCPGGPDSDFEYSTQSYTGYEPTSMRAIRARYDPFLQTRHRIEQLKQLGHSVDKVEFIVMGGTFMALPEEYRDYFIRNLHDALSGHTSNNIYEAVKYSERSLTKCIGITIETRPDYCMKRHLSDMLTYGCTRLEIGVQSVYEDVARDTNRGHTVKAVCESFHLAKDSGFKVVAHMMPDLPNVGLERDIEQFTEFFENPAFRPDGLKLYPTLVIRGTGLYELWKSGRYKSYSPSDLVELVARILALVPPWTRVYRVQRDIPMPLVSSGVEHGNLRELALARMKDLGIQCRDVRTREVGIQEIHHKVRPYQVELVRRDYVANGGWETFLSYEDPDQDILIGLLRLRKCSEETFRFELGGGVSIVRELHVYGSVVPVSSRDPTKFQHQGFGMLLMEEAERIAREEHGSGKIAVISGVGTRNYYRKIGYRLQGPYMVKMLK

SEQ ID NO: 44888 - protein, 113 aa, Homo sapiens
MMLTIGDVIKQLIEAHEQGKDIDLNKVKTKTAAKYGLSAQPRLVDIIAAVPPQYRKVLMPKLKAKPIRTASGIAVVAVMCKPHRCPHISFTGNICVYCPGGPDSDFEYSTQSY

SEQ ID NO: 44889 - protein, 533 aa, Homo sapiens
MMLTIGDVIKQLIEAHEQGKDIDLNKVKTKTAAKYGLSAQPRLVDIIAAVPPQYRKVLMPKLKAKPIRTASGIAVVAVMCKPHRCPHISFTGNICVYCPGGPDSDFEYSTQSYTGYEPTSMRAIRARYDPFLQTRHRIEQLKQLGHSVDKVEFIVMGGTFMALPEEYRDYFIRNLHDALSGHTSNNIYEAVKYSERSLTKCIGITIETRPDYCMKRHLSDMLTYGCTRLEIGVQSVYEDVARDTNRGHTVKAVCESFHLAKDSGFKVVAHMMPDLPNVGLERDIEQFTEFFENPAFRPDGLKLYPTLVIRGTGLYELWKSGRYKSYSPSDLVELVARILALVPPWTRVYRVQRDIPMPLVSSGVEHGNLRELALARMKDLGIQCRDVRTREVGIQEIHHKVRPYQVELVRRDYVANGGWETFLSYEDPDQDILIGLLRLRKCSEETFRFELGGGVSIVRELHVYGSVVPVSSRDPTKFQHQGFGMLLMEEAERIAREEHGSGKIAVISGVGTRNYYRKIGYRLQGPYMVKMLK

SEQ ID NO: 44890 - protein, 191 aa, Homo sapiens
MMLTIGDVIKQLIEAHEQGKDIDLNKVKTKTAAKYGLSAQPRLVDIIAAVPPQYRKVLMPKLKAKPIRTASGIAVVAVMCKPHRCPHISFTGNICVYCPGGPDSDFEYSTQSYTGYEPTSMRAIRARYDPFLQTRHRIEQLKQLGHSVDKVEFIVMGGTFMALPEEYRDYFIRNLHDALSGHTSNNIYEAV

SEQ ID NO: 44891 - protein, 428 aa, Homo sapiens
MSTHQFYRKYMCPTSMRAIRARYDPFLQTRHRIEQLKQLGHSVDKVEFIVMGGTFMALPEEYRDYFIRNLHDALSGHTSNNIYEAVKYSERSLTKCIGITIETRPDYCMKRHLSDMLTYGCTRLEIGVQSVYEDVARDTNRGHTVKAVCESFHLAKDSGFKVVAHMMPDLPNVGLERDIEQFTEFFENPAFRPDGLKLYPTLVIRGTGLYELWKSGRYKSYSPSDLVELVARILALVPPWTRVYRVQRDIPMPLVSSGVEHGNLRELALARMKDLGIQCRDVRTREVGIQEIHHKVRPYQVELVRRDYVANGGWETFLSYEDPDQDILIGLLRLRKCSEETFRFELGGGVSIVRELHVYGSVVPVSSRDPTKFQHQGFGMLLMEEAERIAREEHGSGKIAVISGVGTRNYYRKIGYRLQGPYMVKMLK

SEQ ID NO: 44892 - protein, 418 aa, Homo sapiens
MCPTSMRAIRARYDPFLQTRHRIEQLKQLGHSVDKVEFIVMGGTFMALPEEYRDYFIRNLHDALSGHTSNNIYEAVKYSERSLTKCIGITIETRPDYCMKRHLSDMLTYGCTRLEIGVQSVYEDVARDTNRGHTVKAVCESFHLAKDSGFKVVAHMMPDLPNVGLERDIEQFTEFFENPAFRPDGLKLYPTLVIRGTGLYELWKSGRYKSYSPSDLVELVARILALVPPWTRVYRVQRDIPMPLVSSGVEHGNLRELALARMKDLGIQCRDVRTREVGIQEIHHKVRPYQVELVRRDYVANGGWETFLSYEDPDQDILIGLLRLRKCSEETFRFELGGGVSIVRELHVYGSVVPVSSRDPTKFQHQGFGMLLMEEAERIAREEHGSGKIAVISGVGTRNYYRKIGYRLQGPYMVKMLK

SEQ ID NO: 44893 - protein, 424 aa, Homo sapiens
MAAVATCGSVAASTGSAVATASKSNVTSFQRRGPRASVTNDSGPRLVSIAGTRPSVRNGQLLVSTGLPALDQLLGGGLAVGTVLLIEEDKYNIYSPLLFKYFLAEGIVNGHTLLVASAKEDPANILQELPAPLLDDKCKKEFDEDVYNHKTPESNIKMKIAWRYQLLPKMEIGPVSSSRFGHYYDASKRMPQELIEASNWHGFFLPEKISSTLKVEPCSLTPGYTKLLQFIQNIIYEEGFDGSNPQKKQRNILRIGIQNLGSPLWGDDICCAENGGNSHSLTKFLYVLRGLLRTSLSACIITMPTHLIQNKAIIARVTTLSDVVVGLESFIGSERETNPLYKDYHGLIHIRQIPRLNNLICDESDVKDLAFKLKRKLFTIERLHLPPDLSDTVSRSSKMDLAESAKRLGPGCGMMAGGKKHLDF

SEQ ID NO: 44894 - protein, 476 aa, Homo sapiens
MAAVATCGSVAASTGSAVATASKSNVTSFQRRGPRASVTNDSGPRLVSIAGTRPSVRNGQLLVSTGLPALDQLLGGGLAVGTVLLIEEDKYNIYSPLLFKYFLAEGIVNGHTLLVASAKEDPANILQELPAPLLDDKCKKEFDEDVYNHKTPESNIKMKIAWRYQLLPKMEQIGPVSSSRFGHYYDASKRMPQELIEASNWHGFFLPEKISSTLKVEPCSLTPGYTKLLQFIQNIIYEEGFDGSNPQKKQRNILRIGIQNLGSPLWGDDICCAENGGNSHSLTKFLYVLRGLLRTSLSACIITMPTHLIQNKAIIARVTTLSDVVVGLESFIGSERETNPLYKDYHGLIHIRQIPRLNNLICDESDVKDLAFKLKRKLFTIEWVQDNYLRQERNIYPPGFSYLLKQKDSAWGEGSLQHSTFLMSFLAKATAFASRLVRHSEPLKQNGSGRIRQAAGPRLWHDGRRQEAPGLLGIPP

SEQ ID NO: 44895 - protein, 535 aa, Homo sapiens
MAAVATCGSVAASTGSAVATASKSNVTSFQRRGPRASVTNDSGPRLVSIAGTRPSVRNGQLLVSTGLPALDQLLGGGLAVGTVLLIEEDKYNIYSPLLFKYFLAEGIVNGHTLLVASAKEDPANILQELPAPLLDDKCKKEFDEDVYNHKTPESNIKMKIAWRYQLLPKMEIGPVSSSRFGHYYDASKRMPQELIEASNWHGFFLPEKISSTLKVEPCSLTPGYTKLLQFIQNIIYEEGFDGSNPQKKQRNILRIGIQNLGSPLWGDDICCAENGGNSHSLTKFLYVLRGLLRTSLSACIITMPTHLIQNKAIIARVTTLSDVVVGLESFIGSERETNPLYKDYHGLIHIRQIPRLNNLICDESDVKDLAFKLKRKLFTIEAGVQWHDLGSRQPRLLGSSNSPASASLVAGITGAHHHTQLIFVFLVEMGFHHVGQAGLELLTSGDSSASASQSAGITGMSYRARPRALYFKENKSKVGARQLLETREEHLSSRLLILTQAERLCMGRRFFTAFHIFNELPCKGDCICLQTCQTQ

SEQ ID NO: 44896 - protein, 279 aa, Homo sapiens
MEAVVNLYQEVMKHADPRIQGYPLMGSPLLMTSILLTYVYFVLSLGPRIMANRKPFQLRGFMIVYNFSLVALSLYIVYEFLMSGWLSTYTWRCDPVDYSNSPEALRMVRVAWLFLFSKFIELMDTVIFILRKKDGQVTFLHVFHHSVLPWSWWWGVKIAPGGMGSFHAMINSSVHVIMYLYYGLSAFGPVAQPYLWWKKHMTAIQLIQFVLVSLHISQYYFMSSCNYQYPVIIHLIWMYGTIFFMLFSNFWYHSYTKGKRLPRALQQNGAPGIAKVKAN

SEQ ID NO: 44897 - protein, 252 aa, Homo sapiens
MEAVVNLYQEVMKHADPRIQGYPLMGSPLLMTSILLTYVYFVLSLGPRIMANRKPFQLRGFMIVYNFSLVALSLYIVYEMVRVAWLFLFSKFIELMDTVIFILRKKDGQVTFLHVFHHSVLPWSWWWGVKIAPGGMGSFHAMINSSVHVIMYLYYGLSAFGPVAQPYLWWKKHMTAIQLIQFVLVSLHISQYYFMSSCNYQYPVIIHLIWMYGTIFFMLFSNFWYHSYTKGKRLPRALQQNGAPGIAKVKAN

SEQ ID NO: 44898 - protein, 296 aa, Homo sapiens
MEHLKAFDDEINAFLDNMFGPRDSRVRGWFMLDSYLPTFFLTVMYLLSIWLGNKYMKNRPALSLRGILTLYNLGITLLSAYMLAELILSTWEGGYNLQCQDLTSAGEADIRVAKVLWWYYFSKSVEFLDTIFFVLRKKTSQITFLHVYHHASMFNIWWCVLNWIPCGQSFFGPTLNSFIHILMYSYYGLSVFPSMHKYLWWKKYLTQAQLVQFVLTITHTMSAVVKPCGFPFGCLIFQSSYMLTLVILFLNFYVQTYRKKPMKKDMQEPPAGKEVKNGFSKAYFTAANGVMNKKAQ

SEQ ID NO: 44899 - protein, 270 aa, Homo sapiens
MVTAMNVSHEVNQLFQPYNFELSKDMRPFFEEYWATSFPIALIYLVLIAVGQNYMKERKGFNLQGPLILWSFCLAIFSILGAVRMWGIMGTVLLTGGLKQTVCFINFIDNSTVKFWSWVFLLSKVIELGDTAFIILRKRPLIFIHWYHHSTVLVYTSFGYKNKVPAGGWFVTMNFGVHAIMYTYYTLKAANVKPPKMLPMLITSLQILQMFVGAIVSILTYIWRQDQGCHTTMEHLFWSFILYMTYFILFAHFFCQTYIRPKVKAKTKSQ

SEQ ID NO: 44900 - protein, 314 aa, Homo sapiens
MGLLDSEPGSVLNVVSTALNDTVEFYRWTWSIADKRVENWPLMQSPWPTLSISTLYLLFVWLGPKWMKDREPFQMRLVLIIYNFGMVLLNLFIFRELFMGSYNAGYSYICQSVDYSNNVHEVRIAAALWWYFVSKGVEYLDTVFFILRKKNNQVSFLHVYHHCTMFTLWWIGIKWVAGGQAFFGAQLNSFIHVIMYSYYGLTAFGPWIQKYLWWKRYLTMLQLIQFHVTIGHTALSLYTDCPFPKWMHWALIAYAISFIFLFLNFYIRTYKEPKKPKAGKTAMNGISANGVSKSEKQLMIENGKKQKNGKAKGD

SEQ ID NO: 44901 - protein, 299 aa, Homo sapiens
MEHFDASLSTYFKALLGPRDTRVKGWFLLDNYIPTFICSVIYLLIVWLGPKYMRNKQPFSCRGILVVYNLGLTLLSLYMFCELVTGVWEGKYNFFCQGTRTAGESDMKIIRVLWWYYFSKLIEFMDTFFFILRKNNHQITVLHVYHHASMLNIWWFVMNWVPCGHSYFGATLNSFIHVLMYSYYGLSSVPSMRPYLWWKKYITQGQLLQFVLTIIQTSCGVIWPCTFPLGWLYFQIGYMISLIALFTNFYIQTYNKKGASRRKDHLKDHQNGSMAAVNGHTNSFSPLENNVKPRKLRKD

SEQ ID NO: 44902 - protein, 88 aa, Homo sapiens
MEHFDASLSTYFKALLGPRGISSSVLRMGPPLHTVVGWLQQLQAAHSEEEEKMFHLCGFKHKEVVSQSSLPAVIPQNSLATIASHAPA

SEQ ID NO: 44903 - protein, 289 aa, Homo sapiens
MEHFDASLSTYFKALLGPRDTRVKGWFLLDNYIPTFICSVIYLLIVWLGPKYMRNKQPFSCRGILVVYKFCELVTGVWEGKYNFFCQGTRTAGESDMKIIRVLWWYYFSKLIEFMDTFFFILRKNNHQITVLHVYHHASMLNIWWFVMNWVPCGHSYFGATLNSFIHVLMYSYYGLSSVPSMRPYLWWKKYITQGQLLQFVLTIIQTSCGVIWPCTFPLGWLYFQIGYMISLIALFTNFYIQTYNKKGASRRKDHLKDHQNGSMAAVNGHTNSFSPLENNVKPRKLRKD

SEQ ID NO: 44904 - protein, 326 aa, Homo sapiens
MEHFDASLSTYFKALLGPRDTRVKGWFLLDNYIPTFICSVIYLLIVWLGPKYMRNKQPFSCRGILVVYNLGLTLLSLYMFCESKREQPRRSACASRTDPSTQQQLPENRLVTGVWEGKYNFFCQGTRTAGESDMKIIRVLWWYYFSKLIEFMDTFFFILRKNNHQITVLHVYHHASMLNIWWFVMNWVPCGHSYFGATLNSFIHVLMYSYYGLSSVPSMRPYLWWKKYITQGQLLQFVLTIIQTSCGVIWPCTFPLGWLYFQIGYMISLIALFTNFYIQTYNKKGASRRKDHLKDHQNGSMAAVNGHTNSFSPLENNVKPRKLRKD

SEQ ID NO: 44905 - protein, 299 aa, Homo sapiens; identical to SEQ ID NO: 44901

SEQ ID NO: 44906 - protein, 265 aa, Homo sapiens
MNMSVLTLQEYEFEKQFNENEAIQWMQENWKKSFLFSALYAAFIFGGRHLMNKRAKFELRKPLVLWSLTLAVFSIFGALRTGAYMVYILMTKGLKQSVCDQGFYNGPVSKFWAYAFVLSKAPELGDTIFIILRKQKLIFLHWYHHITVLLYSWYSYKDMVAGGGWFMTMNYGVHAVMYSYYALRAAGFRVSRKFAMFITLSQITQMLMGCVVNYLVFCWMQHDQCHSHFQNIFWSSLMYLSYLVLFCHFFFEAYIGKMRKTTKAE

SEQ ID NO: 44907 - protein, 265 aa, Homo sapiens; identical to SEQ ID NO: 44906

SEQ ID NO: 44908 - protein, 108 aa, Homo sapiens
MNMSVLTLQEYEFEKQFNENEAIQWMQENWKKSFLFSALYAAFIFGGRHLMNKRAKFELRKPLVLWSLTLAVFSIFGALRTGAYMVYILMTKGLKQSVCDQGFYNGPV

SEQ ID NO: 44909 - protein, 137 aa, Homo sapiens
MNMSVLTLQEYEFEKQFNENEAIQWMQENWKKSFLFSALYAAFIFGGRHLMNKRAKFELRKPLVLWSLTLAVFSIFGALRTGAYMVYILMTKGLKQSVCDQGFYNGPVSKFWAYAFVLSKAPELGDTIFIILRKQKL

SEQ ID NO: 44910 - protein, 281 aa, Homo sapiens
MAFSDLTSRTVHLYDNWIKDADPRVEDWLLMSSPLPQTILLGFYVYFVTSLGPKLMENRKPFELKKAMITYNFFIVLFSVYMCYEFVMSGWGIGYSFRCDIVDYSRSPTALRMARTCWLYYFSKFIELLDTIFFVLRKKNSQVTFLHVFHHTIMPWTWWFGVKFAAGGLGTFHALLNTAVHVVMYSYYGLSALGPAYQKYLWWKKYLTSLQLVQFVIVAIHISQFFFMEDCKYQFPVFACIIMSYSFMFLLLFLHFWYRAYTKGQRLPKTVKNGTCKNKDN

SEQ ID NO: 44911 - protein, 281 aa, Homo sapiens; identical to SEQ ID NO: 44910

SEQ ID NO: 44912 - protein, 165 aa, Homo sapiens
MAFSDLTSRTVHLYDNWIKDADPRVEDWLLMSSPLPQTILLGFYVYFVTSLGPKLMENRKPFELKKAMITYNFFIVLFSVYMCYEFVMSGWGIGYSFRCDIVDYSRSPTALRMARTCWLYYFSKFIELLDTIFFVLRKKNSQVTFLHVFHHTIMPWTWWFGVKFA

SEQ ID NO: 44913 - protein, 281 aa, Homo sapiens; identical to SEQ ID NO: 44910

SEQ ID NO: 44914 - protein, 165 aa, Homo sapiens; identical to SEQ ID NO: 44912

SEQ ID NO: 44915 - protein, 561 aa, Homo sapiens
MAIATSTQLARALYDNTAESPQELSFRRGDVLRVLQREGAGGLDGWCLCSLHGQQGIVPANRVKLLPAGPAPKPSLSPASPAQPGSPYPAPDHSNEDQEVYVVPPPARPCPTSGPPAGPCPPSPDLIYKIPRASGTQLAAPRDALEVYDVPPTALRVPSSGPYDCPASFSHPLTRVAPQPPGEDDAPYDVPLTPKPPAELEPDLEWEGGREPGPPIYAAPSNLKRASALLNLYEAPEELLADGEGGGTDEGIYDVPLLGPEAPPSPEPPGALASHDQDTLAQLLARSPPPPHRPRLPSAESLSRRPLPALPVPEAPSPSPVPSPAPGRKGSIQDRPLPPPPPRLPGYGGPKVEGDPEGREMEDDPAGHHNEYEGIPMAEEYDYVHLKGMDKAQGSRPPDQACTGDPELPERGMPAPQEALSPGEPLVVSTGDLQLLYFYAGQCQSHYSALQAAVAALMSSTQANQPPRLFVPHSKRVVVAAHRLVFVGDTLGRLAASAPLRAQVRAAGTALGQALRATVLAVKGAALGYPSSPAIQEMVQCVTELAGQALQFTTLLTSLAP

SEQ ID NO: 44916 - protein, 468 aa, Homo sapiens
MAIATSVYVVPPPARPCPTSGPPAGPCPPSPDLIYKIPRASGTQLAAPRDALEVYDVPPTALRVPSSGPYDCPASFSHPLTRVAPQPPGEDDAPYDVPLTPKPPAELEPDLEWEGGREPGPPIYAAPSNLKRASALLNLYEAPEELLADGEGGGTDEGIYDVPLLGPEAPPSPEPPGALASHDQDTLAQLLARSPPPPHRPRLPSAESLSRRPLPALPVPEAPSPSPVPSPAPGRKGSIQDRPLPPPPPRLPGYGGPKVEGDPEGREMEDDPAGHHNEYEGIPMAEEYDYVHLKGMDKAQGSRPPDQACTGDPELPERGMPAPQEALSPGEPLVVSTGDLQLLYFYAGQCQSHYSALQAAVAALMSSTQANQPPRLFVPHSKRVVVAAHRLVFVGDTLGRLAASAPLRAQVRAAGTALGQALRATVLAVKGAALGYPSSPAIQEMVQCVTELAGQALQFTTLLTSLAP

SEQ ID NO: 44917 - protein, 392 aa, Homo sapiens
MAIATSVYVVPPPARPCPTSGPPAGPCPPSPDLIYKIPRASGTQLAAPRDALEVYDVPPTALRVPSSGPYDCPASFSHPLTRVAPQPPGEDDAPPSPEPPGALASHDQDTLAQLLARSPPPPHRPRLPSAESLSRRPLPALPVPEAPSPSPVPSPAPGRKGSIQDRPLPPPPPRLPGYGGPKVEGDPEGREMEDDPAGHHNEYEGIPMAEEYDYVHLKGMDKAQGSRPPDQACTGDPELPERGMPAPQEALSPGEPLVVSTGDLQLLYFYAGQCQSHYSALQAAVAALMSSTQANQPPRLFVPHSKRVVVAAHRLVFVGDTLGRLAASAPLRAQVRAAGTALGQALRATVLAVKGAALGYPSSPAIQEMVQCVTELAGQALQFTTLLTSLAP

SEQ ID NO: 44918 - protein, 441 aa, Homo sapiens
MSEREVSTAPAGTDMPAAKKQKLSSDENSNPDLSGDENDDAVSIESGTNTERPDTPTNTPNAPGRKSWGKGKWKSKKCKYSFKCVNSLKEDHNQPLFGVQFNWHSKEGDPLVFATVGSNRVTLYECHSQGEIRLLQSYVDADADENFYTCAWTYDSNTSHPLLAVAGSRGIIRIINPITMQCIKHYVGHGNAINELKFHPRDPNLLLSVSKDHALRLWNIQTDTLVAIFGGVEGHRDEVLSADYDLLGEKIMSCGMDHSLKLWRINSKRMMNAIKESYDYNPNKTNRPFISQKIHFPDFSTRDIHRNYVDCVRWLGDLILSKSCENAIVCWKPGKMEDDIDKIKPSESNVTILGRFDYSQCDIWYMRFSMDFWQKMLALGNQVGKLYVWDLEVEDPHKAKCTTLTHHKCGAAIRQTSFSRDSSILIAVCDDASIWRWDRLR

SEQ ID NO: 44919 - protein, 400 aa, Homo sapiens
MSEREVSTAPAGTDMPAAKKQKLSSDENSNPDLSGDENDDAVSIESGTNTERPDTPTNTPNAPGRKSWGKGKWKSKKCKYSFKCVNSLKEDHNQPLFGVQFNWHSKEGDPLVFATVGSNRVTLYECHSQGEIRLLQSYVDADADENFYTCAWTYDSNTSHPLLAVAGSRGIIRIINPITMQCIKHYVGHGNAINELKFHPRDPNLLLSVSKDHALRLWNIQTDTLVAIFGGVEGHRDEVLSADYDLLGEKIMSCGMDHSLKLWRINSKRMMNAIKESYDYNPNKTNRPFISQKIHFPDFSTRDIHRNYVDCVRWLGDLILSKSCENAIVCWKPGKMEDDIDKIKPSESNVTILGRFDYSQCDIWYMRFSMDFWQKMLALGNQVGKLYVWDLEVEDPHKAK

SEQ ID NO: 44920 - protein, 466 aa, Homo sapiens
MSEREVSTAPAGTDMPAAKKQKLSSDENSNPDLSGDENDDAVSIESGTNTERPDTPTNTPNAPGRKSWGKGKWKSKKCKYSFKCVNSLKEDHNQPLFGVQFNWHSKEGDPLVFATVGSNRVTLYECHSQGEIRLLQSYVDADADENFYTCAWTYDSNTSHPLLAVAGSRGIIRIINPITMQCIKHYVGHGNAINELKFHPRDPNLLLSVSKDHALRLWNIQTDTLVAIFGGVEGHRDEVLSADYDLLGEKIMSCGMDHSLKLWRINSKRMMNAIKESYDYNPNKTNRPFISQKIHFPDFSTRDIHRNYVDCVRWLGDLILSKSGRAILHSHQQCMRDPVSPNLRQHLSCENAIVCWKPGKMEDDIDKIKPSESNVTILGRFDYSQCDIWYMRFSMDFWQKMLALGNQVGKLYVWDLEVEDPHKAKCTTLTHHKCGAAIRQTSFSRDSSILIAVCDDASIWRWDRLR

SEQ ID NO: 44921 - protein, 156 aa, Homo sapiens
MSEREVSTAPAGTDMPAAKKQKLSSDENSNPDLSGDENDDAVSIESGTNTERPDTPTNTPNAPGRKSWGKGKWKSKKCKYSFKCVNSLKEDHNQPLFGVQFNWHSKEGDPLVFATVGSNRVTLYECHSQGEIRLLQSYVDADADENFYTCAWKCYQ

SEQ ID NO: 44922 - protein, 219 aa, Homo sapiens
MDNYADLSDTELTTLLRRYNIPHGPVVDLNSTRGDADMYDLPKKEDALLYQSKGYNDDYYEESYFTTRTYGEPESAGPSRAVRQSVTSFPDADAFHHQVHDDDLLSSSEEECKDRERPMYGRDSAYQSITHYRPVSASRSSLDLSYYPTSSSTSFMSSSSSSSSWLTRRAIRPENRAPGAGLGQDRQVPLWGQLLLFLVFVIVLFFIYHFMQAEEGNPF

SEQ ID NO: 44923 - protein, 254 aa, Homo sapiens
MDNYADLSDTELTTLLRRYNIPHGPVVGSTRRLYEKKIFEYETQRRRLSPPSSSAASSYSFSDLNSTRGDADMYDLPKKEDALLYQSKGYNDDYYEESYFTTRTYGEPESAGPSRAVRQSVTSFPDADAFHHQVHDDDLLSSSEEECKDRERPMYGRDSAYQSITHYRPVSASRSSLDLSYYPTSSSTSFMSSSSSSSSWLTRRAIRPENRAPGAGLGQDRQVPLWGQLLLFLVFVIVLFFIYHFMQAEEGNPF

SEQ ID NO: 44924 - protein, 146 aa, Homo sapiens
MTTNAGPLHPYWPQHLRLDNFVPNDRPTWHILAGLFSVTGVLVVTTWLLSGRAAVVPLGTWRRLSLCWFAVCGFIHLVIEGWFVLYYEDLLGDQAFLSQLWKEYAKGDSRYILGDNFTVCMETITACLWGPLSLWVVIAFLRQHPL

SEQ ID NO: 44925 - protein, 160 aa, Homo sapiens
MTTNAGPLHPYWPQHLRLDNFVPNDRPTWHILAGLFSVTGVLVVTTWLLSGRAAVVPLGTWRRLSLCWFAVCGFIHLVIEGWFVLYYEDLLGDQAFLSQLWKEYAKGDSRYILGDNFTVCMETITACLWGPLSLWVVIAFLRQHPLRFILQLVVSVGQIY

SEQ ID NO: 44926 - protein, 230 aa, Homo sapiens [sequence omitted]

SEQ ID NO: 44927 - protein, 290 aa, Homo sapiens
MCLAGCTPRKAAAPGRGALPRARLPRTAPAAATMFQPAAKRGFTIESLVAKDGGTGGGTGGGGAGSHLLAAAASEEPLRPTALNYPHPSAAEAAFVSGFPAAAAAGAGRSLYGGPELVFPEAMNHPALTVHPAHQLGASPLQPPHSFFGAQHRDPLHFYPWVLRNRFFGHRFQASDVPQDGLLLHGPFARKPKRIRTAFSPSQLLRLERAFEKNHYVVGAERKQLAGSLSLSETQVKVWFQNRRTKYKRQKLEEEGPESEQKKKGSHHINRWRIATKQANGEDIDVTSND

SEQ ID NO: 44928 - protein, 252 aa, Homo sapiens
MFQPAPKRCFTIESLVAKDSPLPASRSEDPIRPAALSYANSSPINPFLNGFHSAAAAAAGRGVYSNPDLVFAEAVSHPPNPAVPVHPVPPPHALAAHPLPSSHSPHPLFASQQRDPSTFYPWLIHRYRYLGHRFQGNDTSPESFLLHNALARKPKRIRTAFSPSQLLRLEHAFEKNHYVVGAERKQLAHSLSLTETQVKVWFQNRRTKFKRQKLEEEGSDSQQKKKGTHHINRWRIATKQASPEEIDVTSDD

SEQ ID NO: 44929 - protein, 169 aa, Homo sapiens
MFQPAPKRCFTIESLVAKDSPLPASRSEDPIRPAALSYANSSPINPFLNGFHSAAAAAAGRGVYSNPDLVFAEAVSHPPNPAVPVHPVPPPHALAAHPLPSSHSPHPLFASQQRDPSTFYPWLIHRYRYLGHRFQGKSMVSEPKNKVQKAEAGGRRLRFATKEKRDAPY

SEQ ID NO: 44930 - protein, 318 aa, Homo sapiens
MAIKSIASRLRGSRRFLSGFVAGAVVGAAGAGLAALQFFRSQGAEGALTGKQPDGDADRKHCKFKPDPNIPPTFSAFNEDYVGSGWSRGHMAPAGNNKFSSKAMAETFYLSNIVPQDFDNNSGYWNRIEMYCRELTERFEDVWVVSGPLTLPQTRGDGKKIVSYQVIGEDNVAVPSHLYKVILARRSSVSTEPLALGAFVVPNEAIGFQPQLTEFQVSLQDLEKLSGLVFFPHLDRTSDIRNICSVDTCKLLDFQEFTLYLSTRKIEGARSVLRLEKIMENLKNAEIEPDDYFMSRYEKKLEELKAKEQSGTQIRKPS

SEQ ID NO: 44931 - protein, 368 aa, Homo sapiens
MAIKSIASRLRGSRRFLSGFVAGAVVGAAGAGLAALQFFRSQGAEGALTGKQPDGSAEKAVLEQFGFPLTGTEARCYTNHALSYDQAKRVPRWVLEHISKSKIMGDADRKHCKFKPDPNIPPTFSAFNEDYVGSGWSRGHMAPAGNNKFSSKAMAETFYLSNIVPQDFDNNSGYWNRIEMYCRELTERFEDVWVVSGPLTLPQTRGDGKKIVSYQVIGEDNVAVPSHLYKVILARRSSVSTEPLALGAFVVPNEAIGFQPQLTEFQVSLQDLEKLSGLVFFPHLDRTSDIRNICSVDTCKLLDFQEFTLYLSTRKIEGARSVLRLEKIMENLKNAEIEPDDYFMSRYEKKLEELKAKEQSGTQIRKPS

SEQ ID NO: 44932 - protein, 149 aa, Homo sapiens
MAPAGNNKFSSKAMAETFYLSNIVPQDFDNNSGYWNRIEMYCRELTERFEDVWVVSGPLTLPQTRGDGKKIVSYQVIGEDNVAVPSHLYKDHAGCCVESPLGTRTSEEATARIQERDDGGSDQRSGLVELGIYFEGRANRISGRIGCRV

SEQ ID NO: 44933 - protein, 272 aa, Homo sapiens
MGYFLKLYAYVNSHSLFVWVCDRSYKRSFRPMILNKIKELSRNQFSTMSHLRKDSQPSSPGDDAMDRSGLPDLQGRFELSGKNRQYPLDALEPQPSIGDIKDIKKAAKSMLDPAHKSHFHPVTPSLVFLCFIFDGLHQALLSVGVSKRSNTVVGNENEERGTPYASRFKDMPNFIALEKSSVLRHCCDLLIGIAAGSSDKICTSSLQVQRRFKAMMASIGRLSHGESADLLISCNAESAIGWISSRPWVGELMFTLLFGDFESPLHKLRKSS

SEQ ID NO: 44934 - protein, 297 aa, Homo sapiens
MRALRAGLTLASGAGLGAVVEGWRRRREDARAAPGLLGRLPVLPVAAAAELPPVPGGPRGPGELAKYGLPGLAQLKSRESYVLCYDPRTRGALWVVEQLRPERLRGDGDRRECDFREDDSVHAYHRATNADYRGSGFDRGHLAAAANHRWSQKAMDDTFYLSNVAPQVPHLNQNAWNNLEKYSRSLTRSYQNVYVCTGPLFLPRTEADGKSYVKYQVIGKNHVAVPTHFFKVLILEAAGGQIELRTYVMPNAPVDEAIPLERFLVPIESIERASGLLFVPNILARAGSLKAITAGSK

SEQ ID NO: 44935 - protein, 948 aa, Homo sapiens
MVFLPLKWSLATMSFLLSSLLALLTVSTPSWCQSTEASPKRSDGTPFPWNKIRLPEYVIPVHYDLLIHANLTTLTFWGTTKVEITASQPTSTIILHSHHLQISRATLRKGAGERLSEEPLQVLEHPRQEQIALLAPEPLLVGLPYTVVIHYAGNLSETFHGFYKSTYRTKEGELRILASTQFEPTAARMAFPCFDEPAFKASFSIKIRREPRHLAISNMPLVKSVTVAEGLIEDHFDVTVKMSTYLVAFIISDFESVSKITKSGVKVSVYAVPDKINQADYALDAAVTLLEFYEDYFSIPYPLPKQDLAAIPDFQSGAMENWGLTTYRESALLFDAEKSSASSKLGITMTVAHELAHQWFGNLVTMEWWNDLWLNEGFAKFMEFVSVSVTHPELKVGDYFFGKCFDAMEVDALNSSHPVSTPVENPAQIREMFDDVSYDKGACILNMLREYLSADAFKSGIVQYLQKHSYKNTKNEDLWDSMASICPTDGVKGMDGFCSRSQHSSSSSHWHQEGVDVKTMMNTWTLQKGFPLITITVRGRNVHMKQEHYMKGSDGAPDTGYLWHVPLTFITSKSDMVHRFLLKTKTDVLILPEEVEWIKFNVGMNGYYIVHYEDDGWDSLTGLLKGTHTAVSSNDRASLINNAFQLVSIGKLSIEKALDLSLYLKHETEIMPVFQGLNELIPMYKLMEKRDMNEVETQFKAFLIRLLRDLIDKQTWTDEGSVSERMLRSQLLLLACVHNYQPCVQRAEGYFRKWKESNGNLSLPVDVTLAVFAVGAQSTEGWDFLYSKYQFSLSSTEKSQIEFALCRTQNKEKLQWLLDESFKGDKIKTQEFPQILTLIGRNPVGYPLAWQFLRKNWNKLVQKFELGSSSIAHMVMGTTNQFSTRTRLEEVKGFFSSLKENGSQLRCVQQTIETIEENIGWMDKNFDKIRVWLQSEKLEHDPEADATG

SEQ ID NO: 44936 - protein, 941 aa, Homo sapiens
MVFLPLKWSLATMSFLLSSLLALLTVSTPSWCQSTEASPKRSDGTPFPWNKIRLPEYVIPVHYDLLIHANLTTLTFWGTTKVEITASQPTSTIILHSHHLQISRATLRKGAGERLSEEPLQVLEHPRQEQIALLAPEPLLVGLPYTVVIHYAGNLSETFHGFYKSTYRTKEGELRILASTQFEPTAARMAFPCFDEPAFKASFSIKIRREPRHLAISNMPLVKSVTVAEGLIEDHFDVTVKMSTYLVAFIISDFESVSKITKSGVKVSVYAVPDKINQADYALDAAVTLLEFYEDYFSIPYPLPKQDLAAIPDFQSGAMENWGLTTYRESALLFDAEKSSASSKLGITMTVAHELAHQWFGNLVTMEWWNDLWLNEGFAKFMEFVSVSVTHPELKVGDYFFGKCFDAMEVDALNSSHPVSTPVENPAQIREMFDDVSYDKGACILNMLREYLSADAFKSGIVQYLQKHSYKNTKNEDLWDSMASICPTDGVKGMDGFCSRSQHSSSSSHWHQEGVDVKTMMNTWTLQKGFPLITITVRGRNVHMKQEHYMKGSDGAPDTGYLWHVPLTFITSKSDMVHRFLLKTKTDVLILPEEVEWIKFNVGMNGYYIVHYEDDGWDSLTGLLKGTHTAVSSNDRASLINNAFQLVSIGKLSIEKALDLSLYLKHETEIMPVFQGLNELIPMYKLMEKRDMNEVETQFKAFLIRLLRDLIDKQTWTDEGSVSERMLRSQLLLLACVHNYQPCVQRAEGYFRKWKESNGNLSLPVDVTLAVFAVGAQSTEGWDFLYSKYQFSLSSTEKSQIEFALCRTQNKEKLQWLLDESFKGDKIKTQEFPQILTLIGRNPVGYPLAWQFLRKNWNKLVQKFELGSSSIAHMVMGTTNQFSTRTRLEEVKGFFSSLKENGSQLRCVQQTIETIEENIGWMDKNFDKIRVWLQSEKLERM

SEQ ID NO: 44937 - protein, 941 aa, Homo sapiens; identical to SEQ ID NO: 44936

SEQ ID NO: 44938 - protein, 129 aa, Homo sapiens
MVFLPLKWSLATMSFLLSSLLALLTVSTPSWCQSTEASPKRSDGTPFPWNKIRLPEYVIPVHYDLLIHANLTTLTFWGTTKVEITASQPTSTIILHSHHLQISRATLRKGAGERLSEEPLQVLEHPRQE

SEQ ID NO: 44939 - protein, 915 aa, Homo sapiens
MFHSSAMVNSHRKPMFNIHRGFYCLTAILPQICICSQFSVPSSYHFTEDPGAFPVATNGERFPWQELRLPSVVIPLHYDLFVHPNLTSLDFVASEKIEVLVSNATQFIILHSKDLEITNATLQSEEDSRYMKPGKELKVLSYPAHEQIALLVPEKLTPHLKYYVAMDFQAKLGDGFEGFYKSTYRTLGGETRILAVTDFEPTQARMAFPCFDEPLFKANFSIKIRRESRHIALSNMPKVSIYASPDKRNQTHYALQASLKLLDFYEKYFDIYYPLSKLDLIAIPDFAPGAMENWGLITYRETSLLFDPKTSSASDKLWVTRVIAHELAHQWFGNLVTMEWWNDIWLKEGFAKYMELIAVNATYPELQFDDYFLNVCFEVITKDSLNSSRPISKPAETPTQIQEMFDEVSYNKGACILNMLKDFLGEEKFQKGIIQYLKKFSYRNAKNDDLWSSLSNSCLESDFTSGGVCHSDPKMTSNMLAFLGENAEVKEMMTTWTLQKGIPLLVVKQDGCSLRLQQERFLQGVFQEDPEWRALQERYLWHIPLTYSTSSSNVIHRHILKSKTDTLDLPEKTSWVKFNVDSNGYYIVHYEGHGWDQLITQLNQNHTLLRPKDRVGLIHDVFQLVGAGRLTLDKALDMTYYLQHETSSPALLEGLSYLESFYHMMDRRNISDISENLKRYLLQYFKPVIDRQSWSDKGSVWDRMLRSALLKLACDLNHAPCIQKAAELFSQWMESSGKLNIPTDVLKIVYSVGAQTTAGWNYLLEQYELSMSSAEQNKILYALSTSKHQEKLLKLIELGMEGKVIKTQNLAALLHAIARRPKGQQLAWDFVRENWTHLLKKFDLGSYDIRMIISGTTAHFSSKDKLQEVKLFFESLEAQGSHLDIFQTVLETITKNIKWLEKNLPTLRTWLMVNT

SEQ ID NO: 44940 - protein, 960 aa, Homo sapiens
MFHSSAMVNSHRKPMFNIHRGFYCLTAILPQICICSQFSVPSSYHFTEDPGAFPVATNGERFPWQELRLPSVVIPLHYDLFVHPNLTSLDFVASEKIEVLVSNATQFIILHSKDLEITNATLQSEEDSRYMKPGKELKVLSYPAHEQIALLVPEKLTPHLKYYVAMDFQAKLGDGFEGFYKSTYRTLGGETRILAVTDFEPTQARMAFPCFDEPLFKANFSIKIRRESRHIALSNMPKVKTIELEGGLLEDHFETTVKMSTYLVAYIVCDFHSLSGFTSSGVKVSIYASPDKRNQTHYALQASLKLLDFYEKYFDIYYPLSKLDLIAIPDFAPGAMENWGLITYRETSLLFDPKTSSASDKLWVTRVIAHELAHQWFGNLVTMEWWNDIWLKEGFAKYMELIAVNATYPELQFDDYFLNVCFEVITKDSLNSSRPISKPAETPTQIQEMFDEVSYNKGACILNMLKDFLGEEKFQKGIIQYLKKFSYRNAKNDDLWSSLSNSCLESDFTSGGVCHSDPKMTSNMLAFLGENAEVKEMMTTWTLQKGIPLLVVKQDGCSLRLQQERFLQGVFQEDPEWRALQERYLWHIPLTYSTSSSNVIHRHILKSKTDTLDLPEKTSWVKFNVDSNGYYIVHYEGHGWDQLITQLNQNHTLLRPKDRVGLIHDVFQLVGAGRLTLDKALDMTYYLQHETSSPALLEGLSYLESFYHMMDRRNISDISENLKRYLLQYFKPVIDRQSWSDKGSVWDRMLRSALLKLACDLNHAPCIQKAAELFSQWMESSGKLNIPTDVLKIVYSVGAQTTAGWNYLLEQYELSMSSAEQNKILYALSTSKHQEKLLKLIELGMEGKVIKTQNLAALLHAIARRPKGQQLAWDFVRENWTHLLKKFDLGSYDIRMIISGTTAHFSSKDKLQEVKLFFESLEAQGSHLDIFQTVLETITKNIKWLEKNLPTLRTWLMVNT

SEQ ID NO: 44941 - protein, 350 aa, Homo sapiens
MFHSSAMVNSHRKPMFNIHRGFYCLTAILPQICICSQFSVPSSYHFTEDPGAFPVATNGERFPWQELRLPSVVIPLHYDLFVHPNLTSLDFVASEKIEVLVSNATQFIILHSKDLEITNATLQSEEDSRYMKPGKELKVLSYPAHEQIALLVPEKLTPHLKYYVAMDFQAKLGDGFEGFYKSTYRTLGGETRILAVTDFEPTQARMAFPCFDEPLFKANFSIKIRRESRHIALSNMPKVKTIELEGGLLEDHFETTVKMSTYLVAYIVCDFHSLSGFTSSGVKVSIYASPDKRNQTHYALQASLKLLDFYEKYFDIYYPLSKLGMFKFHIIVFIFAHKTCFDLFPLSLSM

SEQ ID NO: 44942 - protein, 694 aa, Homo sapiens
MFHSSAMVNSHRKPMFNIHRGFYCLTAILPQICICSQFSVPSSYHFTEDPGAFPVATNGERFPWQELRLPSVVIPLHYDLFVHPNLTSLDFVASEKIEVLVSNATQFIILHSKDLEITNATLQSEEDSRYMKPGKELKVLSYPAHEQIALLVPEKLTPHLKYYVAMDFQAKLGDGFEGFYKSTYRTLGGETRILAVTDFEPTQARMAFPCFDEPLFKANFSIKIRRESRHIALSNMPKVKTIELEGGLLEDHFETTVKMSTYLVAYIVCDFHSLSGFTSSGVKVSIYASPDKRNQTHYALQASLKLLDFYEKYFDIYYPLSKLDLIAIPDFAPGAMENWGLITYRETSLLFDPKTSSASDKLWVTRVIAHELAHQWFGNLVTMEWWNDIWLKEGFAKYMELIAVNATYPELQFDDYFLNVCFEVITKDSLNSSRPISKPAETPTQIQEMFDEVSYNKGACILNMLKDFLGEEKFQKGIIQYLKKFSYRNAKNDDLWSSLSNSCLESDFTSGGVCHSDPKMTSNMLAFLGENAEVKEMMTTWTLQKGIPLLVVKQDGCSLRLQQERFLQGVFQEDPEWRALQERYLWHIPLTYSTSSSNVIHRHILKSKTDTLDLPEKTSWVKFNVDSNGYYIVHYEGHGWDQLITQLNQNHTLLRPKDRVGLIHDVFQLVGAGRLTLDKALDMTYYLQHETSSP

SEQ ID NO: 44943 - protein, 483 aa, Homo sapiens
MEEGGGGVRSLVPGGPVLLVLCGLLEASGGGRALPQLSDDIPFRVNWPGTEFSLPTTGVLYKEDNYVIMTTAHKEKYKCILPLVTSGDEEEEKDYKGPNPRELLEPLFKQSSCSYRIESYWTYEVCHGKHIRQYHEEKETGQKINIHEYYLGNMLAKNLLFEKEREAEEKEKSNEIPTKNIEGQMTPYYPVGMGNGTPCSLKQNRPRSSTVMYICHPESKHEILSVAEVTTCEYEVVILTPLLCSHPKYRFRASPVNDIFCQSLPGSPFKPLTLRQLEQQEEILRVPFRRNKEEDLQSTKEERFPAIHKSIAIGSQPVLTVGTTHISKLTDDQLIKEFLSGSYCFRGGVGWWKYEFCYGKHVHQYHEDKDSGKTSVVVGTWNQEEHIEWAKKNTARAYHLQDDGTQTVRMVSHFYGNGDICDITDKPRQVTVKLKCKESDSPHAVTVYMLEPHSCQYILGVESPVICKILDTADENGLLSLPN

SEQ ID NO: 44944 - protein, 429 aa, Homo sapiens
MEEGGGGVRSLVPGGPVLLVLCGLLEASGGGRALPQLSDDIPFRVNWPGTEFSLPTTGVLYKEDNYVIMTTAHKEKYKCILPLVTSGDEEEEKDYKGPNPRELLEPLFKQSSCSYRIESYWTYEVCHGKHIRQYHEEKETGQKINIHEYYLGNMLAKNLLFEKEREAEEKEKSNEIPTKNIEGQMTPYYPVGMGNGTPCSLKQNRPRSSTVMYICHPESKHEILSVAEVTTCEYEVVILTPLLCSHPKYRFRASPVNDIFCQSLPGSPFKPLTLRQLEQQEEILRVPFRRNKEGVGWWKYEFCYGKHVHQYHEDKDSGKTSVVVGTWNQEEHIEWAKKNTARAYHLQDDGTQTVRMVSHFYGNGDICDITDKPRQVTVKLKCKESDSPHAVTVYMLEPHSCQYILGVESPVICKILDTADENGLLSLPN

SEQ ID NO: 44945 - protein, 457 aa, Homo sapiens
MEEGGGGVRSLVPGGPVLLVLCGLLEASGGGRALPQLSDDIPFRVNWPGTEFSLPTTGVLYKEDNYVIMTTAHKEKYKCILPLVTSGDEEEEKDYKGPNPRELLEPLFKQSSCSYRIESYWTYEVCHGKHIRQYHEEKETGQKINIHEYYLGNMLAKNLLFEKEREAEEKEKSNEIPTKNIEGQMTPYYPVGMGNGTPCSLKQNRPRSSTVMYICHPESKHEILSVAEVTTCEYEVVILTPLLCSHPKYRFRASPVNDIFCQSLPGSPFKPLTLRQLEQQEEILRVPFRRNKEEDLQSTKEERFPAIHKSIAIGSQPVLTVGTTHISKLTDDQLIKEFLSGSYCFRGGVGWWKYEFCYGKHVHQYHEDKDSGKTSVVVGTWNQEEHIEWAKKNTARAYHLQDDGTQTVRCKESDSPHAVTVYMLEPHSCQYILGVESPVICKILDTADENGLLSLPN

SEQ ID NO: 44946 - protein, 904 aa, Homo sapiens
MEWGSESAAVRRHRVGVERREGAAAAPPPEREARAQEPLVDGCSGGGRTRKRSPGGSGGASRGAGTGLSEVRAALGLALYLIALRTLVQLSLQQLVLRGAAGHRGEFDALQARDYLEHITSIGPRTTGSPENEILTVHYLLEQIKLIEVQSNSLHKISVDVQRPTGSFSIDFLGGFTSYYDNITNVVVKLEPRDGAQHAVLANCHFDSVANSPGASDDAVSCSVMLEVLRVLSTSSEALHHAVIFLFNGAEENVLQASHGFITQHPWASLIRAFINLEAAGVGGKELVFQTGPENPWLVQAYVSAAKHPFASVVAQEVFQSGIIPSDTDFRIYRDFGNIPGIDLAFIENGYIYHTKYDTADRILTDSIQRAGDNILAVLKHLATSDMLAAASKYRHGNMVFFDVLGLFVIAYPSRIGSIINYMVVMGVVLYLGKKFLQPKHKTGNYKKDFLCGLGITLISWFTSLVTVLIIAVFISLIGQSLSWYNHFYVSVCLYGTATVAKIILIHTLAKRFYYMNASAQYLGEVFFDISLFVHCCFLVTLTYQGLCSAFISAVWVAFPLLTKLCVHKDFKQHGAQGKFIAFYLLGMFIPYLYALYLIWAVFEMFTPILGRSGSEIPPDVVLASILAGCTMILSSYFINFIYLAKSTKKTMLTLTLVCAITFLLVCSGTFFPYSSNPANPKPKRVFLQHMTRTFHDLEGNAVKRDSGIWINGFDYTGISHITPHIPEINDSIRAHCEENAPLCGFPWYLPVHFLIRKNWYLPAPEVSPRNPPHFRLISKEQTPWDSIKLTFEATGPSHMSFYVRAHKGSTLSQWSLGNGTPVTSKGGDYFVFYSHGLQASAWQFWIEVQVSEEHPEGMVTVAIAAHYLSGEDKRSPQLDALKEKFPDWTFPSAWVCTYDLFVF

SEQ ID NO: 44947 - protein, 351 aa, Homo sapiens
MLEVLRVLSTSSEALHHAVIFLFNGAEENVLQASHGFITQHPWASLIRAFINLEAAGVGGKELVFQTGPENPWLVQAYVSAAKHPFASVVAQEVFQSGIIPSDTDFRIYRDFGNIPGIDLAFIENGYIYHTKYDTADRILTDSIQRAGDNILAVLKHLATSDMLAAASKYRHGNMVFFDVLGLFVIAYPSRIGSIINYMVVMGVVLYLGKKFLQPKHKTGNYKKDFLCGLGITLISWFTSLVTVLIIAVFISLIGQSLSWYNHFYVSVCLYGTATVAKIILIHTLAKRFYYMNASAQYLGEVFFDISLFVHCCFLVTLTYQGLCSAFISAVWVAFPLLTKLCVHKDFKQHD

SEQ ID NO: 44948 - protein, 904 aa, Homo sapiens; identical to SEQ ID NO: 44946

SEQ ID NO: 44949 - protein, 419 aa, Homo sapiens
MVVMGVVLYLGKKFLQPKHKTGNYKKDFLCGLGITLISWFTSLVTVLIIAVFISLIGQSLSWYNHFYVSVCLYGTATVAKIILIHTLAKRFYYMNASAQYLGEVFFDISLFVHCCFLVTLTYQGLCSAFISAVWVAFPLLTKLCVHKDFKQHGAQGKFIAFYLLGMFIPYLYALYLIWAVFEMFTPILGRSGSEIPPDVVLASILAGCTMILSSYFINFIYLAKSTKKTMLTLTLVCAITFLLVCSGTFFPYSSNPANPKPKRVFLQHMTRTFHDLEGNAVKRDSGIWINGFDYTGISHITPHIPEINDSIRAHCEENAPLCGFPWYLPVHFLIRKNWYLPAPEVSPRNPPHFRLISKEQTPWDSIKLTFEATACLPILQILDLPASTIMTKPYVLLCSSPQRVNTFSVVSWQWHPSHK

SEQ ID NO: 44950 - protein, 261 aa, Homo sapiens
MAAAVPRAAFLSPLLPLLLGFLLLSAPHGGSGLHTKGALPLDTVTFYKVIPKSKFVLVKFDTQYPYGEKQDEFKRLAENSASSDDLLVAEVGISDYGDKLNMELSEKYKLDKESYPVFYLFRDGDFENPVPYTGAVKVGAIQRWLKGQGVYLGMPGCLPVYDALAGEFIRASGVEARQALLKQGQDNLSSVKETQKKWAEQYLKIMGKILDQGEDFPASEMTRIARLIEKNKMSDGKKEELQKSLNILTAFQKKGAEKEEL

SEQ ID NO: 44951 - protein, 53 aa, Homo sapiens
MAAAVPRAAFLSPLLPLLLGFLLLSAPHGGSGLHTKGALPLDTVTFYKIMVTS

SEQ ID NO: 44952 - protein, 974 aa, Homo sapiens
MRRAGIGEDSRLGLQAQPGAEPSPGRAGTERSLGGTQGPGQPCSCPGAMASAVRGSRPWPRLGLQLQFAALLLGTLSPQVHTLRPENLLLVSTLDGSLHALSKQTGDLKWTLRDDPVIEGPMYVTEMAFLSDPADGSLYILGTQKQQGLMKLPFTIPELVHASPCRSSDGVFYTGRKQDAWFVVDPESGETQMTLTTEGPSTPRLYIGRTQYTVTMHDPRAPALRWNTTYRRYSAPPMDGSPGKYMSHLASCGMGLLLTVDPGSGTVLWTQDLGVPVMGVYTWHQDGLRQLPHLTLARDTLHFLALRWGHIRLPASGPRDTATLFSTLDTQLLMTLYVGKDETGFYVSKALVHTGVALVPRGLTLAPADGPTTDEVTLQVSGEREGSPSTAVRYPSGSVALPSQWLLIGHHELPPVLHTTMLRVHPTLGSGTAETRPPENTQAPAFFLELLSLSREKLWDSELHPEEKTPDSYLGLGPQDLLAASLTAVLLGGWILFVMRQQQPQVVEKQQETPLAPADFAHISQDAQSLHSGASRRSQKRLQSPSKQAQPLDDPEAEQLTVVGKISFNPKDVLGRGAGGTFVFRGQFEGRAVAVKRLLRECFGLVRREVQLLQESDRHPNVLRYFCTERGPQFHYIALELCRASLQEYVENPDLDRGGLEPEVVLQQLMSGLAHLHSLHIVHRDLKPGNILITGPDSQGLGRVVLSDFGLCKKLPAGRCSFSLHSGIPGTEGWMAPELLQLLPPDSPTSAVDIFSAGCVFYYVLSGGSHPFGDSLYRQANILTGAPCLAHLEEEVHDKVVARDLVGAMLSPLPQPRPSAPQVLAHPFFWSRAKQLQFFQDVSDWLEKESEQEPLVRALEAGGCAVVRDNWHEHISMPLQTDLRKFRSYKGTSVRDLLRAVRNKKHHYRELPVEVRQALGQVPDGFVQYFTNRFPRLLLHTHRAMRSCASESLFLPYYPPDSEARRPCPGATGR

SEQ ID NO: 44953 - protein, 874 aa, Homo sapiens
MASAVRGSRPWPRLGLQLQFAALLLGTLSPQVHTLRPENLLLVSTLDGSLHALSKQTGDLKWTLRDDPVIEGPMYVTEMAFLSDPADGSLYILGTQKQQGLMKLPFTIPELVHASPCRSSDGVFYTGRKQDAWFVVDPESGETQMTLTTEGPSTPRLYIGRTQYTVTMHDPRAPALRWNTTYRRYSAPPMDGSPGKYMSHLASCGMGLLLTVDPGSGTVLWTQDLGVPVMGVYTWHQDGLRQLPHLTLARDTLHFLALRWGHIRLPASGPRDTATLFSTLDTQLLMTLYVGKDETGFYVSKALVHTGVALVPRGLTLAPADGPTTDEVTLQVSGEREGSPSTAVRYPSGSVALPSQWLLIGHHELPPVLHTTMLRVHPTLGSGTAETRPPENTQAPAFFLEQQPQVVEKQQETPLAPADFAHISQDAQSLHSGASRRSQKRLQSPSKQAQPLDDPEAEQLTVVGKISFNPKDVLGRGAGGTFVFRGQFEGRAVAVKRLLRECFGLVRREVQLLQESDRHPNVLRYFCTERGPQFHYIALELCRASLQEYVENPDLDRGGLEPEVVLQQLMSGLAHLHSLHIVHRDLKPGNILITGPDSQGLGRVVLSDFGLCKKLPAGRCSFSLHSGIPGTEGWMAPELLQLLPPDSPTSAVDIFSAGCVFYYVLSGGSHPFGDSLYRQANILTGAPCLAHLEEEVHDKVVARDLVGAMLSPLPQPRPSAPQVLAHPFFWSRAKQLQFFQDVSDWLEKESEQEPLVRALEAGGCAVVRDNWHEHISMPLQTDLRKFRSYKGTSVRDLLRAVRNKKHHYRELPVEVRQALGQVPDGFVQYFTNRFPRLLLHTHRAMRSCASESLFLPYYPPDSEARRPCPGATGR

SEQ ID NO: 44954 - protein, 117 aa, Homo sapiens
MSQKQEEENPAEETGEEKQDTQEKEGILPERAEEAKLKAKYPSLGQKPGGSDFLMKRLQKGQKYFDSGDYNMAKAKMKNKQLPSAGPDKNLVTGDHIPTPQDLPQRKSSLVTSKLAG

SEQ ID NO: 44955 - protein, 137 aa, Homo sapiens
MSQKQEEENPAEETGEEKQDTQEKEGILPERAEEAKLKAKYPSLGQKPGGSDFLMKRLQKGDYKSLHWSVLLCADEMQKYFDSGDYNMAKAKMKNKQLPSAGPDKNLVTGDHIPTPQDLPQRKSSLVTSKLAGGQVE

SEQ ID NO: 44956 - protein, 140 aa, Homo sapiens
MSQKQEEENPAEETGEEKQDTQEKEGILPERAEEAKLKAKYPSLGQKPGGSDFLMKRLQKGVWGIVSYPLSLELKEVLRMKSVEQKYFDSGDYNMAKAKMKNKQLPSAGPDKNLVTGDHIPTPQDLPQRKSSLVTSKLAG

SEQ ID NO: 44957 - protein, 117 aa, Homo sapiens
MAGGLGCDVCYWFVEDTQEKEGILPERAEEAKLKAKYPSLGQKPGGSDFLMKRLQKGQKYFDSGDYNMAKAKMKNKQLPSAGPDKNLVTGDHIPTPQDLPQRKSSLVTSKLAGGQVE

SEQ ID NO: 44958 - protein, 133 aa, Homo sapiens
MAGGLGCDVCYWFVEDTQEKEGILPERAEEAKLKAKYPSLGQKPGGSDFLMKRLQKGDYKSLHWSVLLCADEMQKYFDSGDYNMAKAKMKNKQLPSAGPDKNLVTGDHIPTPQDLPQRKSSLVTSKLAGGQVE

SEQ ID NO: 44959 - protein, 105 aa, Homo sapiens
MSQKQEEENPAEETGEEKQDTQEKEGILPERAEEAKLKAKYPSLGQKPGGSDFLMKRLQKGVWGIVSYPLSLELKEVLRMKSVEVLLDPFLEVLLLNRSRGEFEI

SEQ ID NO: 44960 - protein, 144 aa, Homo sapiens
MSQKQEEENPAEETGEEKQDTQEKEGILPERAEEAKLKAKYPSLGQKPGGSDFLMKRLQKGVWGIVSYPLSLELKEVLRMKSVEQKYFDSGDYNMAKAKMKNKQLPSAGPDKNLVTGDHIPTPQDLPQRKSSLVTSKLAGGQVE

SEQ ID NO: 44961 - protein, 121 aa, Homo sapiens
MSQKQEEENPAEETGEEKQDTQEKEGILPERAEEAKLKAKYPSLGQKPGGSDFLMKRLQKGQKYFDSGDYNMAKAKMKNKQLPSAGPDKNLVTGDHIPTPQDLPQRKSSLVTSKLAGGQVE

SEQ ID NO: 44962 - protein, 133 aa, Homo sapiens
MSQKQEEENPAEETGEEKQDTQEKEGILPERAEEAKLKAKYPSLGQKPGGSDFLMKRLQKGDYKSLHWSVLLCADEMQKYFDSGDYNMAKAKMKNKQLPSAGPDKNLVTGDHIPTPQDLPQRKSSLVTSKLAG

SEQ ID NO: 44963 - protein, 105 aa, Homo sapiens; identical to SEQ ID NO: 44959

SEQ ID NO: 44964 - protein, 113 aa, Homo sapiens
MAGGLGCDVCYWFVEDTQEKEGILPERAEEAKLKAKYPSLGQKPGGSDFLMKRLQKGQKYFDSGDYNMAKAKMKNKQLPSAGPDKNLVTGDHIPTPQDLPQRKSSLVTSKLAG

SEQ ID NO: 44965 - protein, 390 aa, Homo sapiens
MISLPGPLVTNLLRFLFLGLSALAPPSRAQLQLHLPANRLQAVEGGEVVLPAWYTLHGEVSSSQPWEVPFVMWFFKQKEKEDQVLSYINGVTTSKPGVSLVYSMPSRNLSLRLEGLQEKDSGPYSCSVNVQDKQGKSRGHSIKTLELNVLVPPAPPSCRLQGVPHVGANVTLSCQSPRSKPAVQYQWDRQLPSFQTFFAPALDVIRGSLSLTNLSSSMAGVYVCKAHNEVGTAQCNVTLEVSTGPGAAVVAGAVVGTLVGLGLLAGLVLLYHRRGKALEEPANDIKEDAIAPRTLPWPKSSDTISKNGTLSSVTSARALRPPHGPPRPGALTPTPSLSSQALPSPRLPTTDGAHPQPISPIPGGVSSSGLSRMGAVPVMVPAQSQAGSLV

SEQ ID NO: 44966 - protein, 141 aa, Homo sapiens
MISLPGPLVTNLLRFLFLGLSALDVIRGSLSLTNLSSSMAGVYVCKAHNEVGTAQCNVTLEVSTGPGAAVVAGAVVGTLVGLGLLAGLVLLYHRRGKALEEPANDIKVRSPLGLSFSAPKMEWLWKWRDAHFYRDSYLSKW

SEQ ID NO: 44967 - protein, 870 aa, Homo sapiens
MTADKEKKRSSSERRKEKSRDAARCRRSKETEVFYELAHELPLPHSVSSHLDKASIMRLAISFLRTHKLLSSVCSENESEAEADQQMDNLYLKALEGFIAVVTQDGDMIFLSENISKFMGLTQVELTGHSIFDFTHPCDHEEIRENLSLKNGSGFGKKSKDMSTERDFFMRMKCTVTNRGRTVNLKSATWKVLHCTGQVKVYNNCPPHNSLCGYKEPLLSCLIIMCEPIQHPSHMDIPLDSKTFLSRHSMDMKFTYCDDRITELIGYHPEELLGRSAYEFYHALDSENMTKSHQNLCTKGQVVSGQYRMLAKHGGYVWLETQGTVIYNPRNLQPQCIMCVNYVLSEIEKNDVVFSMDQTESLFKPHLMAMNSIFDSSGKGAVSEKSNFLFTKLKEEPEELAQLAPTPGDAIISLDFGNQNFEESSAYGKAILPPSQPWATELRSHSTQSEAGSLPAFTVPQAAAPGSTTPSATSSSSSCSTPNSPEDYYTSLDNDLKIEVIEKLFAMDTEAKDQCSTQTDFNELDLETLAPYIPMDGEDFQLSPICPEERLLAENPQSTPQHCFSAMTNIFQPLAPVAPHSPFLLDKFQQQLESKKTEPEHRPMSSIFFDAGSKASLPPCCGQASTPLSSMGGRSNTQWPPDPPLHFGPTKWAVGDQRTEFLGAAPLGPPVSPPHVSTFKTRSAKGFGARGPDVLSPAMVALSNKLKLKRQLEYEEQAFQDLSGGDPPGGSTSHLMWKRMKNLRGGSCPLMPDKPLSANVPNDKFTQNPMRGLGHPLRHLPLPQPPSAISPGENSKSRFPPQCYATQYQDYSLSSAHKVSGMASRLLGPSFESYLLPELTRYDCEVNVPVLGSSTLLQGGDLLRALDQAT

SEQ ID NO: 44968 - protein, 259 aa, Homo sapiens
MTADKEKKRSSSERRKEKSRDAARCRRSKETEVFYELAHELPLPHSVSSHLDKASIMRLAISFLRTHKLLSSVCSENESEAEADQQMDNLYLKALEGFIAVVTQDGDMIFLSENISKFMGLTQVELTGHSIFDFTHPCDHEEIRENLSLKNGSGFGKKSKDMSTERDFFMRMKCTVTNRGRTVNLKSATWKVLHCTGQVKVYNNCPPHNSLCGYKEPLLSCLIIMCEPIQHPSHMDIPLDSKTFLSRHSMDMKFTYCDD

SEQ ID NO: 44969 - protein, 178 aa, Homo sapiens
MVSVPTTWCSVALALLVALHEGKGQAAATLEQPASSSHAQGTHLRLRRCSCSSWLDKECVYFCHLDIIWVNTPEQTAPYGLGNPPRRRRRSLPRRCQCSSARDPACATFCLRRPWTEAGAVPSRKSPADVFQTGKTGATTGELLQRLRDISTVKSLFAKRQQEAMREPRSTHSRWRKR

SEQ ID NO: 44970 - protein, 219 aa, Homo sapiens
MEPGLWLLFGLTVTSAAGFVPCSQSGDAGRRGVSQAPTAARSEGDCEETVAGPGEETVAGPGEGTVAPTALQGPSPGSPGQEQAAEGAPEHHRSRRCTCFTYKDKECVYYCHLDIIWINTPEQTVPYGLSNYRGSFRGKRSAGPLPGNLQLSHRPHLRCACVGRYDKACLHFCTQTLDVSSNSRTAEKTDKEEEGKVRGANRGLCQRRLKSRTNKASRL

SEQ ID NO: 44971 - protein, 238 aa, Homo sapiens
MEPGLWLLFGLTVTSAAGFVPCSQSGDAGRRGVSQAPTAARSEGDCEETVAGPGEETVAGPGEGTVAPTALQGPSPGSPGQEQAAEGAPEHHRSRRCTCFTYKDKECVYYCHLDIIWINTPEQTVPYGLSNYRGSFRGKRSAGPLPGNLQLSHRPHLRCACVGRYDKACLHFCTQTLDVSSNSRTAEKTDKEEEGKVEVKDQQSKQALDLHHPKLMPGSGLALAPSTCPRCLFQEGAP

SEQ ID NO: 44972 - protein, 192 aa, Homo sapiens
MEPGLWLLFGLTVTSAAGFVPCSQSGDAGRRGVSQAPTAARSEGDCEETVAGPGEETVAGPGEGTVAPTALQGPSPGSPGQEQAAEGAPEHHRSRRCTCFTYKDKECVYYCHLDIIWINTPEQTVPYGLSNYRGSFRGKRSAGPLPGNLQLSHRPHLRCACVGRYDKACLHFCTQTLDVSRLKSRTNKASRL

SEQ ID NO: 44973 - protein, 238 aa, Homo sapiens; identical to SEQ ID NO: 44971

SEQ ID NO: 44974 - protein, 224 aa, Homo sapiens
MEPGLWLLFGLTVTSAAGFVPCSQSGDAGRRGVSQAPTAARSEGDCEETVAGPGEETVAGPGEGTVAPTALQGPSPGSPGQEQAAEGAPEHHRSRRCTCFTYKDKECVYYCHLDIIWINTPEQTVPYGLSNYRGSFRGKRSAGPLPGNLQLSHRPHLRCACVGRYDKACLHFCTQTLDVSRQVEVKDQQSKQALDLHHPKLMPGSGLALAPSTCPRCLFQEGAP

SEQ ID NO: 44975 - protein, 767 aa, Homo sapiens
MEALRESVLHLALQMSTYKRATLDEEDLVDSLSEGDAYPNGLQVNFHSPRSGQRCWAARTQVEKRLVVLVVLLAAGLVACLAALGIQYQTRSPSVCLSEACVSVTSSILSSMDPTVDPCHDFFSYACGGWIKANPVPDGHSRWGTFSNLWEHNQAIIKHLLENSTASVSEAERKAQVYYRACMNETRIEELRAKPLMELIERLGGWNITGPWAKDNFQDTLQVVTAHYRTSPFFSVYVSADSKNSNSNVIQVDQSGLGLPSRDYYLNKTENEKVLTGYLNYMVQLGKLLGGGDEEAIRPQMQQILDFETALANITIPQEKRRDEELIYHKVTAAELQTLAPAINWLPFLNTIFYPVEINESEPIVVYDKEYLEQISTLINTTDRCLLNNYMIWNLVRKTSSFLDQRFQDADEKFMEVMYGTKKTCLPRWKFCVSDTENNLGFALGPMFVKATFAEDSKSIATEIILEIKKAFEESLSTLKWMDEETRKSAKEKADAIYNMIGYPNFIMDPKELDKVFNDYTAVPDLYFENAMRFFNFSWRVTADQLRKAPNRDQWSMTPPMVNAYYSPTKNEIVFPAGILQAPFYTRSSPKALNFGGIGVVVGHELTHAFDDQGREYDKDGNLRPWWKNSSVEAFKRQTECMVEQYSNYSVNGEPVNGRHTLGENIADNGGLKAAYRAYQNWVKKNGAEHSLPTLGLTNNQLFFLGFAQVWCSVRTPESSHEGLITDPHSPSRFRVIGSLSNSKEFSEHFRCPPGSPMNPPHKCEVW

SEQ ID NO: 44976 - protein, 758 aa, Homo sapiens
MPLQGLGLQRNPFLQGKRGPGLTSSPPLLPPSLQVNFHSPRSGQRCWAARTQVEKRLVVLVVLLAAGLVACLAALGIQYQTRSPSVCLSEACVSVTSSILSSMDPTVDPCHDFFSYACGGWIKANPVPDGHSRWGTFSNLWEHNQAIIKHLLENSTASVSEAERKAQVYYRACMNETRIEELRAKPLMELIERLGGWNITGPWAKDNFQDTLQVVTAHYRTSPFFSVYVSADSKNSNSNVIQVDQSGLGLPSRDYYLNKTENEKVLTGYLNYMVQLGKLLGGGDEEAIRPQMQQILDFETALANITIPQEKRRDEELIYHKVTAAELQTLAPAINWLPFLNTIFYPVEINESEPIVVYDKEYLEQISTLINTTDRCLLNNYMIWNLVRKTSSFLDQRFQDADEKFMEVMYGTKKTCLPRWKFCVSDTENNLGFALGPMFVKATFAEDSKSIATEIILEIKKAFEESLSTLKWMDEETRKSAKEKADAIYNMIGYPNFIMDPKELDKVFNDYTAVPDLYFENAMRFFNFSWRVTADQLRKAPNRDQWSMTPPMVNAYYSPTKNEIVFPAGILQAPFYTRSSPKALNFGGIGVVVGHELTHAFDDQGREYDKDGNLRPWWKNSSVEAFKRQTECMVEQYSNYSVNGEPVNGRHTLGENIADNGGLKAAYRAYQNWVKKNGAEHSLPTLGLTNNQLFFLGFAQVWCSVRTPESSHEGLITDPHSPSRFRVIGSLSNSKEFSEHFRCPPGSPMNPPHKCEVW

SEQ ID NO: 44977 - protein, 770 aa, Homo sapiens
MRGVWPPPVSALLSALGMSTYKRATLDEEDLVDSLSEGDAYPNGLQVNFHSPRSGQRCWAARTQVEKRLVVLVVLLAAGLVACLAALGIQYQTRSPSVCLSEACVSVTSSILSSMDPTVDPCHDFFSYACGGWIKANPVPDGHSRWGTFSNLWEHNQAIIKHLLENSTASVSEAERKAQVYYRACMNETRIEELRAKPLMELIERLGGWNITGPWAKDNFQDTLQVVTAHYRTSPFFSVYVSADSKNSNSNVIQVDQSGLGLPSRDYYLNKTENEKVLTGYLNYMVQLGKLLGGGDEEAIRPQMQQILDFETALANITIPQEKRRDEELIYHKVTAAELQTLAPAINWLPFLNTIFYPVEINESEPIVVYDKEYLEQISTLINTTDRCLLNNYMIWNLVRKTSSFLDQRFQDADEKFMEVMYGTKKTCLPRWKFCVSDTENNLGFALGPMFVKATFAEDSKSIATEIILEIKKAFEESLSTLKWMDEETRKSAKEKADAIYNMIGYPNFIMDPKELDKVFNDYTAVPDLYFENAMRFFNFSWRVTADQLRKAPNRDQWSMTPPMVNAYYSPTKNEIVFPAGILQAPFYTRSSPKALNFGGIGVVVGHELTHAFDDQGREYDKDGNLRPWWKNSSVEAFKRQTECMVEQYSNYSVNGEPVNGRHTLGENIADNGGLKAAYRAYQNWVKKNGAEHSLPTLGLTNNQLFFLGFAQVWCSVRTPESSHEGLITDPHSPSRFRVIGSLSNSKEFSEHFRCPPGSPMNPPHKCEVW

SEQ ID NO: 44978 - protein, 754 aa, Homo sapiens
MMSTYKRATLDEEDLVDSLSEGDAYPNGLQVNFHSPRSGQRCWAARTQVEKRLVVLVVLLAAGLVACLAALGIQYQTRSPSVCLSEACVSVTSSILSSMDPTVDPCHDFFSYACGGWIKANPVPDGHSRWGTFSNLWEHNQAIIKHLLENSTASVSEAERKAQVYYRACMNETRIEELRAKPLMELIERLGGWNITGPWAKDNFQDTLQVVTAHYRTSPFFSVYVSADSKNSNSNVIQVDQSGLGLPSRDYYLNKTENEKVLTGYLNYMVQLGKLLGGGDEEAIRPQMQQILDFETALANITIPQEKRRDEELIYHKVTAAELQTLAPAINWLPFLNTIFYPVEINESEPIVVYDKEYLEQISTLINTTDRCLLNNYMIWNLVRKTSSFLDQRFQDADEKFMEVMYGTKKTCLPRWKFCVSDTENNLGFALGPMFVKATFAEDSKSIATEIILEIKKAFEESLSTLKWMDEETRKSAKEKADAIYNMIGYPNFIMDPKELDKVFNDYTAVPDLYFENAMRFFNFSWRVTADQLRKAPNRDQWSMTPPMVNAYYSPTKNEIVFPAGILQAPFYTRSSPKALNFGGIGVVVGHELTHAFDDQGREYDKDGNLRPWWKNSSVEAFKRQTECMVEQYSNYSVNGEPVNGRHTLGENIADNGGLKAAYRAYQNWVKKNGAEHSLPTLGLTNNQLFFLGFAQVWCSVRTPESSHEGLITDPHSPSRFRVIGSLSNSKEFSEHFRCPPGSPMNPPHKCEVW

SEQ ID NO: 44979 - protein, 738 aa, Homo sapiens
MRGVWPPPVSALLSALGMSTYKRATLDEEDLVDSLSEGDAYPNGLQVNFHSPRSGQRCWAARTQVEKRLVVLVVLLAAGLVACLAALGIQYQTRSPSVCLSEACVSVTSSILSSMDPTVDPCHDFFSYACGGWIKANPVPDGHSRWGTFSNLWEHNQAIIKHLLENSTASVSEAERKAQVYYRACMNETRIEELRAKPLMELIERLGGWNITGPWAKDNFQDTLQVVTAHYRTSPFFSVYVSADSKNSNSNVIQVDQSGLGLPSRDYYLNKTENEKVLTGYLNYMVQLGKLLGGGDEEAIRPQMQQILDFETALANITIPQEKRRDEELIYHKVTAAELQTLAPAINWLPFLNTIFYPVEINESEPIVVYDKEYLEQISTLINTTDRCLLNNYMIWNLVRKTSSFLDQRFQDADEKFMEVMYGTKKTCLPRWKFCVSDTENNLGFALGPMFVKATFAEDSKSIATEIILEIKKAFEESLSTLKWMDEETRKSAKEKADAIYNMIGYPNFIMDPKELDKVFNDYTAVPDLYFENAMRFFNFSWRVTADQLRKAPNRDQWSMTPPMVNAYYSPTKNEIVFPAGILQAPFYTRSSPKALNFGGIGVVVGHELTHAFDDQGREYDKDGNLRPWWKNSSVEAFKRQTECMVEQYSNYSVNGEPVNGRHTLGENIADNGGLKAAYRVWCSVRTPESSHEGLITDPHSPSRFRVIGSLSNSKEFSEHFRCPPGSPMNPPHKCEVW

SEQ ID NO: 44980 - protein, 775 aa, Homo sapiens
MEPPYSLTAHYDEFQEVKYVSRCGAGGARGASLPPGFPLGAARSATGARSGLPRWNRREVCLLSGLVFAAGLCAILAAMLALKYLGPVAAGGGACPEGCPERKAFARAARFLAANLDASIDPCQDFYSFACGGWLRRHAIPDDKLTYGTIAAIGEQNEERLRRLLARPGGGPGGAAQRKVRAFFRSCLDMREIERLGPRPMLEVIEDCGGWDLGGAEERPGVAARWDLNRLLYKAQGVYSAAALFSLTVSLDDRNSSRYVIRIDQDGLTLPERTLYLAQDEDSEKILAAYRVFMERVLSLLGADAVEQKAQEILQVEQQLANITVSEHDDLRRDVSSMYNKVTLGQLQKITPHLRWKWLLDQIFQEDFSEEEEVVLLATDYMQQVSQLIRSTPHRVLHNYLVWRVVVVLSEHLSPPFREALHELAQEMEGSDKPQELARVCLGQANRHFGMALGALFVHEHFSAASKAKVQQLVEDIKYILGQRLEELDWMDAETRAAARAKLQYMMVMVGYPDFLLKPDAVDKEYEFEVHEKTYFKNILNSIRFSIQLSVKKIRQEVDKSTWLLPPQALNAYYLPNKNQMVFPAGILQPTLYDPDFPQSLNYGGIGTIIGHELTHGYDDWGGQYDRSGNLLHWWTEASYSRFLRKAECIVRLYDNFTVYNQRVNGKHTLGENIADMGGLKLAYHAYQKWVREHGPEHPLPRLKYTHDQLFFIAFAQNWCIKRRSQSIYLQVLTDKHAPEHYRVLGSVSQFEEFGRAFHCPKDSPMNPAHKCSVW

SEQ ID NO: 44981 - protein, 773 aa, Homo sapiens
MEPPYSLTAHYDEFQEVKYVSRCGAGGARGASLPPGFPLGAARSATGARSGLPRWNRREVCLLSGLVFAAGLCAILAAMLALKYLGPVAAGGGACPEGCPERKAFARAARFLAANLDASIDPCQDFYSFACGGWLRRHAIPDDKLTYGTIAAIGEQNEERLRRLLARPGGGPGGAAQRKVRAFFRSCLDMREIERLGPRPMLEVIEDCGGWDLGGAEERPGVAARWDLNRLLYKAQGVYSAAALFSLTVSLDDRNSSRYVIRIDQDGLTLPERTLYLAQDEDSEKILAAYRVFMERVLSLLGADAVEQKAQEILQVEQQLANITVSEHDDLRRDVSSMYNKVTLGQLQKITPHLRWKWLLDQIFQEDFSEEEEVVLLATDYMQQVSQLIRSTPHRVLHNYLVWRVVVVLSEHLSPPFREALHELAQEMEGSDKPQELARVCLGQANRHFGMALGALFVHEHFSAASKAKVQQLVEDIKYILGQRLEELDWMDAETRAAARAKLQYMMVMVGYPDFLLKPDAVDKEYEFEVHEKTYFKNILNSIRFSIQLSVKKIRQEVDKWLLPPQALNAYYLPNKNQMVFPAGILQPTLYDPDFPQSLNYGGIGTIIGHELTHGYDDWGGQYDRSGNLLHWWTEASYSRFLRKAECIVRLYDNFTVYNQRVNGKHTLGENIADMGGLKLAYHAYQKWVREHGPEHPLPRLKYTHDQLFFIAFAQNWCIKRRSQSIYLQVLTDKHAPEHYRVLGSVSQFEEFGRAFHCPKDSPMNPAHKCSVW

SEQ ID NO: 44982 - protein, 427 aa, Homo sapiens
METLCLRASFWLALVGCVISDNPERYSTNLSNHVDDFTTFRGTELSFLVTTHQPTNLVLPSNGSMHNYCPQQTKITSAFKYINTVISCTIFIVGMVGNATLLRIIYQNKCMRNGPNALIASLALGDLIYVVIDLPINVFKLLAGRWPFDHNDFGVFLCKLFPFLQKSSVGITVLNLCALSVDRYRAVASWSRVQGIGIPLVTAIEIVSIWILSFILAIPEAIGFVMVPFEYRGEQHKTCMLNATSKFMEFYQDVKDWWLFGFYFCMPLVCTAIFYTLMTCEMLNRRNGSLRIALSEHLKQRREVAKTVFCLVVIFALCWFPLHLSRILKKTVYNEMDKNRCELLSFLLLMDYIGINLATMNSCINPIALYFVSKKFKNCFQSCLCCCCYQSKSLMTSVPMNGTSIQWKNHDQNNHNTDRSSHKDSMN

SEQ ID NO: 44983 - protein, 161 aa, Homo sapiens
METLCLRASFWLALVGCVISDNPERYSTNLSNHVDDFTTFRGTELSFLVTTHQPTNLVLPSNGSMHNYCPQQTKITSAFKYINTVISCTIFIVGMVGNATLLRIIYQNKCMRNGPNALIASLALGDLIYVVIDLPINVFKVQSSCLLESCSGNWDSFGNCH

SEQ ID NO: 44984 - protein, 318 aa, Homo sapiens
METLCLRASFWLALVGCVISDNPERYSTNLSNHVDDFTTFRGTELSFLVTTHQPTNLVLPSNGSMHNYCPQQTKITSAFKYINTVISCTIFIVGMVGNATLLRIIYQNKCMRNGPNALIASLALGDLIYVVIDLPINVFKFYQDVKDWWLFGFYFCMPLVCTAIFYTLMTCEMLNRRNGSLRIALSEHLKQRREVAKTVFCLVVIFALCWFPLHLSRILKKTVYNEMDKNRCELLSFLLLMDYIGINLATMNSCINPIALYFVSKKFKNCFQSCLCCCCYQSKSLMTSVPMNGTSIQWKNHDQNNHNTDRSSHKDSMN

SEQ ID NO: 44985 - protein, 187 aa, Homo sapiens
METLCLRASFWLALVGCVISDNPERYSTNLSNHVDDFTTFRGTELSFLVTTHQPTNLVLPSNGSMHNYCPQQTKITSAFKYINTVISCTIFIVGMVGNATLLRIIYQNKCMRNGPNALIASLALGDLIYVVIDLPINVFKLLAGRWPFDHNDFGVFLCKLFPFLQKSSVGITVLNLCALSVDRKTEM

SEQ ID NO: 44986 - protein, 318 aa, Homo sapiens; identical to SEQ ID NO: 44984

SEQ ID NO: 44987 - protein, 392 aa, Homo sapiens
MEEQQPEPKSQRDSALGAAAAATPGGLSLSLSPGASGSSGSGSDGDSVPVSPQPAPPSPPAAPCLPPLAHHPHLPPHPPPPPPQHLAAPAHQPQPAAQLHRTTNFFIDNILRPDFGCKKEQPPPQLLVAAAARGGAGGGGRVERDRGQTAAGRDPVHPLGTRAPGAASLLCAPDANCGPPDGSQPAAAGAGASKAGNPAAAAAAAAAAVAAAAAAAAAKPSDTGGGGSGGGAGSPGAQGTKYPEHGNPAILLMGSANGGPVVKTDSQQPLVWPAWVYCTRYSDRPSSGPRTRKLKKKKNEKEDKRPRTAFTAEQLQRLKAEFQANRYITEQRRQTLAQELSLNESQIKIWFQNKRAKIKKATGIKNGLALHLMAQGLYNHSTTTVQDKDESE

SEQ ID NO: 44988 - protein, 333 aa, Homo sapiens
MEENDPKPGEAAAAVEGQRQPESSPGGGSGGGGGSSPGEADTGRRRALMLPAVLQAPGNHQHPHRITNFFIDNILRPEFGRRKDAGTCCAGAGGGRGGGAGGEGGASGAEGGGGAGGSEQLLGSGSREPRQNPPCAPGAGGPLPAAGSDSPGDGEGGSKTLSLHGGAKKGGDPGGPLDGSLKARGLGGGDLSVSSDSDSSQAGANLGAQPMLWPAWVYCTRYSDRPSSGPRSRKPKKKNPNKEDKRPRTAFTAEQLQRLKAEFQTNRYLTEQRRQSLAQELSLNESQIKIWFQNKRAKIKKATGNKNTLAVHLMAQGLYNHSTTAKEGKSDSE

SEQ ID NO: 44989 - protein, 727 aa, Homo sapiens
MPPPADIVKVAIEWPGAYPKLMEIDQKKPLSAIIKEVCDGWSLANHEYFALQHADSSNFYITEKNRNEIKNGTILRLTTSPAQNAQQLHERIQSSSMDAKLEALKDLASLSRDVTFAQEFINLDGISLLTQMVESGTERYQKLQKIMKPCFGDMLSFTLTAFVELMDHGIVSWDTFSVAFIKKIASFVNKSAIDISILQRSLAILESMVLNSHDLYQKVAQEITIGQLIPHLQGSDQEIQTYTIAVINALFLKAPDERRQEMANILAQKQLRSIILTHVIRAQRAINNEMAHQLYVLQVLTFNLLEDRMMTKMDPQDQAQRDIIFELRRIAFDAESEPNNSSGSMEKRKSMYTRDYKKLGFINHVNPAMDFTQTPPGMLALDNMLYFAKHHQDAYIRIVLENSSREDKHECPFGRSSIELTKMLCEILKVGELPSETCNDFHPMFFTHDRSFEEFFCICIQLLNKTWKEMRATSEDFNKVMQVVKEQVMRALTTKPSSLDQFKSKLQNLSYTEILKIRQSERMNQEDFQSRPILELKEKIQPEILELIKQQRLNRLVEGTCFRKLNARRRQDKFWYCRLSPNHKVLHYGDLEESPQGEVPHDSLQDKLPVADIKAVVTGKDCPHMKEKGALKQNKEVLELAFSILYDSNCQLNFIAPDKHEYCIWTDGLNALLGKDMMSDLTRNDLDTLLSMEIKLRLLDLENIQIPDAPPPIPKEPSNYDFVYDCN

SEQ ID NO: 44990 - protein, 429 aa, Homo sapiens
MSEHQKEQTLDTPSLRTVTLTVRVHGFILEVSKTKNPPIPDTFWPPRWDHRPSPGGETNAYCQMNHVNPAMDFTQTPPGMLALDNMLYFAKHHQDAYIRIVLENSSREDKHECPFGRSSIELTKMLCEILKVGELPSETCNDFHPMFFTHDRSFEEFFCICIQLLNKTWKEMRATSEDFNKVMQVVKEQVMRALTTKPSSLDQFKSKLQNLSYTEILKIRQSERMNQEDFQSRPILELKEKIQPEILELIKQQRLNRLVEGTCFRKLNARRRQDKFWYCRLSPNHKVLHYGDLEESPQGEVPHDSLQDKLPVADIKAVVTGKDCPHMKEKGALKQNKEVLELAFSILYDSNCQLNFIAPDKHEYCIWTDGLNALLGKDMMSDLTRNDLDTLLSMEIKLRLLDLENIQIPDAPPPIPKEPSNYDFVYDCN

SEQ ID NO: 44991 - protein, 631 aa, Homo sapiens
MDAKLEALKDLASLSRDVTFAQEFINLDGISLLTQMVESGTERYQKLQKIMKPCFGDMLSFTLTAFVELMDHGIVSWDTFSVAFIKKIASFVNKSAIDISILQRSLAILESMVLNSHDLYQKVAQEITIGQLIPHLQGSDQEIQTYTIAVINALFLKAPDERRQEMANILAQKQLRSIILTHVIRAQRAINNEMAHQLYVLQVLTFNLLEDRMMTKMDPQDQAQRDIIFELRRIAFDAESEPNNSSGSMEKRKSMYTRDYKKLGFINHVNPAMDFTQTPPGMLALDNMLYFAKHHQDAYIRIVLENSSREDKHECPFGRSSIELTKMLCEILKVGELPSETCNDFHPMFFTHDRSFEEFFCICIQLLNKTWKEMRATSEDFNKVMQVVKEQVMRALTTKPSSLDQFKSKLQNLSYTEILKIRQSERMNQEDFQSRPILELKEKIQPEILELIKQQRLNRLVEGTCFRKLNARRRQDKFWYCRLSPNHKVLHYGDLEESPQGEVPHDSLQDKLPVADIKAVVTGKDCPHMKEKGALKQNKEVLELAFSILYDSNCQLNFIAPDKHEYCIWTDGLNALLGKDMMSDLTRNDLDTLLSMEIKLRLLDLENIQIPDAPPPIPKEPSNYDFVYDCN

SEQ ID NO: 44992 - protein, 247 aa, Homo sapiens
MQVVKEQVMRALTTKPSSLDQFKSKLQNLSYTEILKIRQSERMNQEDFQSRPILELKEKIQPEILELIKQQRLNRLVEGTCFRKLNARRRQDKFWYCRLSPNHKVLHYGDLEESPQGEVPHDSLQDKLPVADIKAVVTGKDCPHMKEKGALKQNKEVLELAFSILYDSNCQLNFIAPDKHEYCIWTDGLNALLGKDMMSDLTRNDLDTLLSMEIKLRLLDLENIQIPDAPPPIPKEPSNYDFVYDCN

SEQ ID NO: 44993 - protein, 247 aa, Homo sapiens; identical to SEQ ID NO: 44992

SEQ ID NO: 44994 - protein, 727 aa, Homo sapiens; identical to SEQ ID NO: 44989

SEQ ID NO: 44995 - protein, 59 aa, Homo sapiens
MPPPADIVKVAIEWPGAYPKLMEIDQKKPLSAIIKEVCDGWSLANHEYFALQHADSSNF

SEQ ID NO: 44996 - protein, 727 aa, Homo sapiens; identical to SEQ ID NO: 44989

SEQ ID NO: 44997 - protein, 81 aa, Homo sapiens
MPPPADIVKVAIEWPGAYPKLMEIDQKKPLSAIIKEVCDGWSLANHEYFALQHADSSNFYITEKNRNEIKNGTILRLTTSP

SEQ ID NO: 44998 - protein, 149 aa, Homo sapiens
MPPPADIVKVAIEWPGAYPKLMEIDQKKPLSAIIKEVCDGWSLANHEYFALQHADSSNFYITEKNRNEIKNGTILRLTTSPAQNAQQLHERIQSSSMDAKLEALKDLASLSRDVTFAQEFINLDGISLLTQMVESGTERYQKLQKIMKP

SEQ ID NO: 44999 - protein, 720 aa, Homo sapiens
MPPPSDIVKVAIEWPGANAQLLEIDQKRPLASIIKEVCDGWSLPNPEYYTLRYADGPQLYITEQTRSDIKNGTILQLAISPSRAARQLMERTQSSNMETRLDAMKELAKLSADVTFATEFINMDGIIVLTRLVESGTKLLSHYSEMLAFTLTAFLELMDHGIVSWDMVSITFIKQIAGYVSQPMVDVSILQRSLAILESMVLNSQSLYQKIAEEITVGQLISHLQVSNQEIQTYAIALINALFLKAPEDKRQDMANAFAQKHLRSIILNHVIRGNRPIKTEMAHQLYVLQVLTFNLLEERMMTKMDPNDQAQRDIIFELRRIAFDAESDPSNAPGSGTEKRKAMYTKDYKMLGFTNHINPAMDFTQTPPGMLALDNMLYLAKVHQDTYIRIVLENSSREDKHECPFGRSAIELTKMLCEILQVGELPNEGRNDYHPMFFTHDRAFEELFGICIQLLNKTWKEMRATAEDFNKVMQVVREQITRALPSKPNSLDQFKSKLRSLSYSEILRLRQSERMSQDDFQSPPIVELREKIQPEILELIKQQRLNRLCEGSSFRKIGNRRRQERFWYCRLALNHKVLHYGDLDDNPQGEVTFESLQEKIPVADIKAIVTGKDCPHMKEKSALKQNKEVLELAFSILYDPDETLNFIAPNKYEYCIWIDGLSALLGKDMSSELTKSDLDTLLSMEMKLRLLDLENIQIPEAPPPIPKEPSSYDFVYHYG

SEQ ID NO: 45000 - protein, 718 aa, Homo sapiens
MPPPSDIVKVAIEWPGANAQLLEIDQKRPLASIIKEVCDGWSLPNPEYYTLRYADGPQLYITEQTRSDIKNGTILQLAISPSRAARQLMERTQSSNMETRLDAMKELAKLSADVTFATEFINMDGIIVLTRLVESGTKLLSHEMLAFTLTAFLELMDHGIVSWDMVSITFIKQIAGYVSQPMVDVSILQRSLAILESMVLNSQSLYQKIAEEITVGQLISHLQVSNQEIQTYAIALINALFLKAPEDKRQDMANAFAQKHLRSIILNHVIRGNRPIKTEMAHQLYVLQVLTFNLLEERMMTKMDPNDQAQRDIIFELRRIAFDAESDPSNAPGSGTEKRKAMYTKDYKMLGFTNHINPAMDFTQTPPGMLALDNMLYLAKVHQDTYIRIVLENSSREDKHECPFGRSAIELTKMLCEILQVGELPNEGRNDYHPMFFTHDRAFEELFGICIQLLNKTWKEMRATAEDFNKVMQVVREQITRALPSKPNSLDQFKSKLRSLSYSEILRLRQSERMSQDDFQSPPIVELREKIQPEILELIKQQRLNRLCEGSSFRKIGNRRRQERFWYCRLALNHKVLHYGDLDDNPQGEVTFESLQEKIPVADIKAIVTGKDCPHMKEKSALKQNKEVLELAFSILYDPDETLNFIAPNKYEYCIWIDGLSALLGKDMSSELTKSDLDTLLSMEMKLRLLDLENIQIPEAPPPIPKEPSSYDFVYHYG

SEQ ID NO: 45001 - protein, 632 aa, Homo sapiens
MERTQSSNMETRLDAMKELAKLSADVTFATEFINMDGIIVLTRLVESGTKLLSHYSEMLAFTLTAFLELMDHGIVSWDMVSITFIKQIAGYVSQPMVDVSILQRSLAILESMVLNSQSLYQKIAEEITVGQLISHLQVSNQEIQTYAIALINALFLKAPEDKRQDMANAFAQKHLRSIILNHVIRGNRPIKTEMAHQLYVLQVLTFNLLEERMMTKMDPNDQAQRDIIFELRRIAFDAESDPSNAPGSGTEKRKAMYTKDYKMLGFTNHINPAMDFTQTPPGMLALDNMLYLAKVHQDTYIRIVLENSSREDKHECPFGRSAIELTKMLCEILQVGELPNEGRNDYHPMFFTHDRAFEELFGICIQLLNKTWKEMRATAEDFNKVMQVVREQITRALPSKPNSLDQFKSKLRSLSYSEILRLRQSERMSQDDFQSPPIVELREKIQPEILELIKQQRLNRLCEGSSFRKIGNRRRQERFWYCRLALNHKVLHYGDLDDNPQGEVTFESLQEKIPVADIKAIVTGKDCPHMKEKSALKQNKEVLELAFSILYDPDETLNFIAPNKYEYCIWIDGLSALLGKDMSSELTKSDLDTLLSMEMKLRLLDLENIQIPEAPPPIPKEPSSYDFVYHYG

SEQ ID NO: 45002 - protein, 720 aa, Homo sapiens; identical to SEQ ID NO: 44999

SEQ ID NO: 45003 - protein, 267 aa, Homo sapiens
EEITVGQLISHLQVSNQEIQTYAIALINALFLKAPEDKRQDMANAFAQKHLRSIILNHVIRGNRPIKTEMAHQLYVLQVLTFNLLEERMMTKMDPNDQAQRDIIFELRRIAFDAESDPSNAPGSGTEKRKAMYTKDYKMLGFTNHINPAMDFTQTPPGMLALDNMLYLAKVHQDTYIRIVLENSSREDKHECPFGRSAIELTKMLCEILQVGELPNEGRNDYHPMFFTHDRAFEELFGICIQLLNKTWKEMRATAEDFNKVSVSGLL

SEQ ID NO: 45004 - protein, 732 aa, Homo sapiens
MPPPSDIVKVAIEWPGANAQLLEIDQKRPLASIIKEVCDGWSLPNPEYYTLRYADGPQLYITEQTRSDIKNGTILQLAISPSRAARQLMERTQSSNMETRLDAMKELAKLSADVTFATEFINMDGIIVLTRLVESGTKLLSHYSEMLAFTLTAFLELMDHGIVSWDMVSITFIKQIAGYVSQPMVDVSILQRSLAILESMVLNSQSLYQKIAEEITVGQLISHLQVSNQEIQTYAIALINALFLKAPEDKRQDKHLNPLDLPVTDMANAFAQKHLRSIILNHVIRGNRPIKTEMAHQLYVLQVLTFNLLEERMMTKMDPNDQAQRDIIFELRRIAFDAESDPSNAPGSGTEKRKAMYTKDYKMLGFTNHINPAMDFTQTPPGMLALDNMLYLAKVHQDTYIRIVLENSSREDKHECPFGRSAIELTKMLCEILQVGELPNEGRNDYHPMFFTHDRAFEELFGICIQLLNKTWKEMRATAEDFNKVMQVVREQITRALPSKPNSLDQFKSKLRSLSYSEILRLRQSERMSQDDFQSPPIVELREKIQPEILELIKQQRLNRLCEGSSFRKIGNRRRQERFWYCRLALNHKVLHYGDLDDNPQGEVTFESLQEKIPVADIKAIVTGKDCPHMKEKSALKQNKEVLELAFSILYDPDETLNFIAPNKYEYCIWIDGLSALLGKDMSSELTKSDLDTLLSMEMKLRLLDLENIQIPEAPPPIPKEPSSYDFVYHYG

SEQ ID NO: 45005 - protein, 537 aa, Homo sapiens
MVDVSILQRSLAILESMVLNSQSLYQKIAEEITVGQLISHLQVSNQEIQTYAIALINALFLKAPEDKRQDMANAFAQKHLRSIILNHVIRGNRPIKTEMAHQLYVLQVLTFNLLEERMMTKMDPNDQAQRDIIFELRRIAFDAESDPSNAPGSGTEKRKAMYTKDYKMLGFTNHINPAMDFTQTPPGMLALDNMLYLAKVHQDTYIRIVLENSSREDKHECPFGRSAIELTKMLCEILQVGELPNEGRNDYHPMFFTHDRAFEELFGICIQLLNKTWKEMRATAEDFNKVMQVVREQITRALPSKPNSLDQFKSKLRSLSYSEILRLRQSERMSQDDFQSPPIVELREKIQPEILELIKQQRLNRLCEGSSFRKIGNRRRQERFWYCRLALNHKVLHYGDLDDNPQGEVTFESLQEKIPVADIKAIVTGKDCPHMKEKSALKQNKEVLELAFSILYDPDETLNFIAPNKYEYCIWIDGLSALLGKDMSSELTKSDLDTLLSMEMKLRLLDLENIQIPEAPPPIPKEPSSYDFVYHYG

SEQ ID NO: 45006 - protein, 338 aa, Homo sapiens
MPPPSDIVKVAIEWPGANAQLLEIDQKRPLASIIKEVCDGWSLPNPEYYTLRYADGPQLYITEQTRSDIKNGTILQLAISPSRAARQLMERTQSSNMETRLDAMKELAKLSADVTFATEFINMDGIIVLTRLVESGTKLLSHYSEMLAFTLTAFLELMDHGIVSWDMVSITFIKQIAGYVSQPMVDVSILQRSLAILESMVLNSQSLYQKIAEEITVGQLISHLQVSNQEIQTYAIALINALFLKAPEDKRQDMANAFAQKHLRSIILNHVIRGNRPIKTEMAHQLYVLQVLTFNLLEERMMTKMDPNDQAQRDIIFELRRIAFDAESDPSNAPGSGT

SEQ ID NO: 45007 - protein, 283 aa, Homo sapiens
YHPMFFTHDRAFEELFGICIQLLNKTWKEMRATAEDFNKVMQVVREQITRALPSKPNSLDQFKSKLRSLSYSEILRLRQSERMSQDDFQSPPIVELREKIQPEILELIKQQRLNRLCEGSSFRKIGNRRRQERFWYCRLALNHKVLHYGDLDDNPQGEVTFESLQEKNIKAIVTGKDCPHMKEKSALKQNKEVLELAFSILYDPDETLNFIAPNKYEYCIWIDGLSALLGKDMSSELTKSDLDTLLSMEMKLRLLDLENIQIPEAPPPIPKEPSSYDFVYHYG

SEQ ID NO: 45008 - protein, 452 aa, Homo sapiens [sequence omitted]

SEQ ID NO: 45009 - protein, 773 aa, Homo sapiens
MARSSSLGRECGTPRSGLGKGGPPRPQGPQARCTLGRRCTVSGKCRRPRPSWTMAPPRNVVKIAIKMRDAIPQLIQLDQAKPLAAVLKEVCDAWSLTHSERYALQFADGHRRYITENNRAEIKNGSILCLSTAPDLEAEQLLGGLQSNSPEGRREALRRLVPLASDMIFAREVISRNGLQILGTIIEDGDDLGEVLALSLRAFSELMEHGVVSWETLSIPFVRKVVCYVNMNLMDASVPPLALGLLESVTLSSPALGQLVKSEVPLDRLLVHLQVMNQQLQTKAMALLTALLQGASPVERKHMLDYLWQRNLRQFIYKNIIHSAAPMGDEMAHHLYVLQALMLGLLEPRMRTPLDPYSQEQREQLQVLRQAAFEVEGESSGAGLSADRRRSLCAREFRKLGFSNSNPAQDLERVPPGLLALDNMLYFSRNAPSAYSRFVLENSSREDKHECPFARGSIQLTVLLCELLRVGEPCSETAQDFSPMFFGQDQSFHELFCVGIQLLNKTWKEMRATQEDFDKVMQVVREQLARTLALKPTSLELFRTKVNALTYGEVLRLRQTERLHQEGTLAPPILELREKLKPELMGLIRQQRLLRLCEGTLFRKISSRRRQDKLWFCCLSPNHKLLQYGDMEEGASPPTLESLPEQLPVADMRALLTGKDCPHVREKGSGKQNKDLYELAFSISYDRGEEEAYLNFIAPSKREFYLWTDGLSALLGSPMGSEQTRLDLEQLLTMETKLRLLELENVPIPERPPPVPPPPTNFNFCYDCSIAEP

SEQ ID NO: 45010 - protein, 836 aa, Homo sapiens
MSKLSFRARALDASKPLPVFRCEDLPDLHEYASINRAVPQMPTGMEKEEESEHHLQRAISAQQVYGEKRDNMVIPVPEAESNIAYYESIYPGEFKMPKQLIHIQPFSLDAEQPDYDLDSEDEVFVNKLKKKMDICPLQFEEMIDRLEKGSGQQPVSLQEAKLLLKEDDELIREVYEYWIKKRKNCRGPSLIPSVKQEKRDGSSTNDPYVAFRRRTEKMQTRKNRKNDEASYEKMLKLRRDLSRAVTILEMIKRREKSKRELLHLTLEIMEKRYNLGDYNGEIMSEVMAQRQPMKPTYAIPIIPITNSSQFKHQEAMDVKEFKVNKQDKADLIRPKRKYEKKPKVLPSSAAATPQQTSPAALPVFNAKDLNQYDFPSSDEEPLSQVLSGSSEAEEDNDPDGPFAFRRKAGCQYYAPHLDQTGNWPWTSPKDGGLGDVRYRYCLTTLTVPQRCIGFARRRVGRGGRVLLDRAHSDYDSVFHHLDLEMLSSPQHSPVNQFANTSETNTSDKSFSKDLSQILVNIKSCRWRHFRPRTPSLHDSDNDELSCRKLYRSINRTGTAQPGTQTCSTSTQSKSSSGSAHFAFTAEQYQQHQQQLALMQKQQLAQIQQQQANSNSSTNTSQNLASNQQKSGFRLNIQGLERTLQGFVSKTLDSASAQFAASALVTSEQLMGFKMKDDVVLGIGVNGVLPASGVYKGLHLSSTTPTALVHTSPSTAGSALLQPSNITQTSSSHSALSHQVTAANSATTQVLIGNNIRLTVPSSVATVNSIAPINARHIPRTLSAVPSSALKLAAAANCQVSKVPSSSSVDSVPRENHESEKPALNNIADNTVAMEVT

SEQ ID NO: 45011 - protein, 813 aa, Homo sapiens
MSKLSFRARALDASKPLPVFRCEDLPDLHEYASINRAVPQMPTGMEKEEESEHHLQRAISAQQVYGEKRDNMVIPVPEAESNIAYYESIYPGEFKMPKQLIHIQPFSLDAEQPDYDLDSEDEVFVNKLKKKMDICPLQFEEMIDRLEKGSGQQPVSLQEAKLLLKEDDELIREVYEYWIKKRKNCRGPSLIPSVKQEKRDGSSTNDPYVAFRRRTEKMQTRKNRKNDEASYEKMLKLRRDLSRAVTILEMIKRREKSKRELLHLTLEIMEKRYNLGDYNGEIMSEVMAQRQPMKPTYAIPIIPITNSSQFKHQEAMDVKEFKVNKQDKADLIRPKRKYEKKPKVLPSSAAATPQQTSPAALPVFNAKDLNQYDFPSSDEEPLSQVLSGSSEAEEDNDPDGPFAFRRKAGCQYYAPHLDQTGNWPWTSPKDGGLGDVRYRYCLTTLTVPQRCIGFARRRVGRGGRVLLDRAHSDYDSVFHHLDLEMLSSPQHSPVNQFANTSETNTSDKSFSKDLSQILVNIKSCRWRHFRPRTPSLHDSDNDELSCRKLYRSINRTGTAQPGTQTCSTSTQSKSSSGSAHFAFTAEQYQQHQQQLALMQKQQLAQIQQQQANSNSSTNTSQGFVSKTLDSASAQFAASALVTSEQLMGFKMKDDVVLGIGVNGVLPASGVYKGLHLSSTTPTALVHTSPSTAGSALLQPSNITQTSSSHSALSHQVTAANSATTQVLIGNNIRLTVPSSVATVNSIAPINARHIPRTLSAVPSSALKLAAAANCQVSKVPSSSSVDSVPRENHESEKPALNNIADNTVAMEVT

SEQ ID NO: 45012 - protein, 763 aa, Homo sapiens
MEHHLQRAISAQQVYGEKRDNMVIPVPEAESNIAYYESIYPGEFKMPKQLIHIQPFSLDAEQPDYDLDSEDEVFVNKLKKKMDICPLQFEEMIDRLEKGSGQQPVSLQEAKLLLKEDDELIREVYEYWIKKRKNCRGPSLIPSVKQEKRDGSSTNDPYVAFRRRTEKMQTRKNRKNDEASYEKMLKLRRDLSRAVTILEMIKRREKSKRELLHLTLEIMEKRYNLGDYNGEIMSEVMAQRQPMKPTYAIPIIPITNSSQFKHQEAMDVKEFKVNKQDKADLIRPKRKYEKKPKVLPSSAAATPQQTSPAALPVFNAKDLNQYDFPSSDEEPLSQVLSGSSEAEEDNDPDGPFAFRRKAGCQYYAPHLDQTGNWPWTSPKDGGLGDVRYRYCLTTLTVPQRCIGFARRRVGRGGRVLLDRAHSDYDSVFHHLDLEMLSSPQHSPVNQFANTSETNTSDKSFSKDLSQILVNIKSCRWRHFRPRTPSLHDSDNDELSCRKLYRSINRTGTAQPGTQTCSTSTQSKSSSGSAHFAFTAEQYQQHQQQLALMQKQQLAQIQQQQANSNSSTNTSQGFVSKTLDSASAQFAASALVTSEQLMGFKMKDDVVLGIGVNGVLPASGVYKGLHLSSTTPTALVHTSPSTAGSALLQPSNITQTSSSHSALSHQVTAANSATTQVLIGNNIRLTVPSSVATVNSIAPINARHIPRTLSAVPSSALKLAAAANCQVSKVPSSSSVDSVPRENHESEKPALNNIADNTVAMEVT

SEQ ID NO: 45013 - protein, 807 aa, Homo sapiens
MSKLSFRARALDAAKPLPIYRGKDMPDLNDCVSINRAVPQMPTGMEKEEESEHHLQRAISAQQVFREKKESMVIPVPEAESNVNYYNRLYKGEFKQPKQFIHIQPFNLDNEQPDYDMDSEDETLLNRLNRKMEIKPLQFEIMIDRLEKASSNQLVTLQEAKLLLNEDDYLIKAVYDYWVRKRKNCRGPSLIPQIKQEKRDGSTNNDPYVAFRRRTEKMQTRKNRKNDEASYEKMLKLRREFSRAITILEMIKRREKTKRELLHLTLEVVEKRYHLGDYGGEILNEVKISRSEKELYATPATLHNGNHHKVQECKTKHPHHLSLKEEASDVVRQKKKYPKKPKAEALITSQQPTPETLPVINKSDIKQYDFHSSDEDEFPQVLSPVSEPEEENDPDGPCAFRRRAGCQYYAPRLDQANHSCENSELADLDKLRYRHCLTTLTVPRRCIGFARRRIGRGGRVIMDRISTEHDPVLKQIDPEMLNSFSSSSQTIDFSSNFSRTNASSKHCENRLSLSEILSNIRSCRLQCFQPRLLNLQDSDSEECTSRKPGQTVNNKRVSAASVALLNTSKNGISVTGGITEEQFQTHQQQLVQMQRQQLAQLQQKQQSQHSSQQTHPKAQGSSTSDCMSKTLDSASAHFAASAVVSAPVPSRSEVAKEQNTGHNNINGVVQPSGTSKTLYSTNMALSSSPGISAVQLVRTVGHTTTNHLIPALCTSSPQTLPMNNSCLTNAVHLNNVSVVSPVNVHINTRTSAPSPTALKLATVAASMDRVPKVTPSSAISSIARENHEPERLGLNGIAETTVAMEVT

SEQ ID NO: 45014 - protein, 104 aa, Homo sapiens
MSHTILLVQPTKRPEGRTYADYESVNECMEGVCKMYEEHLKRMNPNSPSITYDISQLFDFIDDLADLSCLVYRADTQTYQPYNKDWIKEKIYVLLRRQAQQAGK

SEQ ID NO: 45015 - protein, 750 aa, Homo sapiens
YSKMEIPNPPTSKCITYWKRKVKSEYMRLRQLKRLQANMGAKALYVANFAKVQEKTQILNEEWKKLRVQPVQSMKPVSGHPFLKKCTIESIFPGFASQHMLMRSLNTVALVPIMYSWSPLQQNFMVEDETVLCNIPYMGDEVKEEDETFIEELINNYDGKVHGEEEMIPGSVLISDAVFLELVDALNQYSDEEEEGHNDTSDGKQDDSKEDLPVTRKRKRHAIEGNKKSSKKQFPNDMIFSAIASMFPENGVPDDMKERYRELTEMSDPNALPPQCTPNIDGPNAKSVQREQSLHSFHTLFCRRCFKYDCFLHPFHATPNVYKRKNKEIKIEPEPCGTDCFLLLEGAKEYAMLHNPRSKCSGRRRRRHHIVSASCSNASASAVAETKEGDSDRDTGNDWASSSSEANSRCQTPTKQKASPAPPQLCVVEAPSEPVEWTGAEESLFRVFHGTYFNNFCSIARLLGTKTCKQVFQFAVKESLILKLPTDELMNPSQKKKRKHRLWAAHCRKIQLKKDNSSTQVYNYQPCDHPDRPCDSTCPCIMTQNFCEKFCQCNPDCQNRFPGCRCKTQCNTKQCPCYLAVRECDPDLCLTCGASEHWDCKVVSCKNCSIQRGLKKHLLLAPSDVAGWGTFIKESVQKNEFISEYCGELISQDEADRRGKVYDKYMSSFLFNLNNDFVVDATRKGNKIRFANHSVNPNCYAKVVMVNGDHRIGIFAKRAIQAGEELFFDYRYSQADALKYVGIERETDVL

SEQ ID NO: 45016 - protein, 707 aa, Homo sapiens
MEIPNPPTSKCITYWKRKVKSEYMRLRQLKRLQANMGAKALYVANFAKVQEKTQILNEEWKKLRVQPVQSMKPVSGHPFLKKVEDETVLCNIPYMGDEVKEEDETFIEELINNYDGKVHGEEEMIPGSVLISDAVFLELVDALNQYSDEEEEGHNDTSDGKQDDSKEDLPVTRKRKRHAIEGNKKSSKKQFPNDMIFSAIASMFPENGVPDDMKERYRELTEMSDPNALPPQCTPNIDGPNAKSVQREQSLHSFHTLFCRRCFKYDCFLHPFHATPNVYKRKNKEIKIEPEPCGTDCFLLLEGAKEYAMLHNPRSKCSGRRRRRHHIVSASCSNASASAVAETKEGDSDRDTGNDWASSSSEANSRCQTPTKQKASPAPPQLCVVEAPSEPVEWTGAEESLFRVFHGTYFNNFCSIARLLGTKTCKQVFQFAVKESLILKLPTDELMNPSQKKKRKHRLWAAHCRKIQLKKDNSSTQVYNYQPCDHPDRPCDSTCPCIMTQNFCEKFCQCNPDCQNRFPGCRCKTQCNTKQCPCYLAVRECDPDLCLTCGASEHWDCKVVSCKNCSIQRGLKKHLLLAPSDVAGWGTFIKESVQKNEFISEYCGELISQDEADRRGKVYDKYMSSFLFNLNNDFVVDATRKGNKIRFANHSVNPNCYAKVVMVNGDHRIGIFAKRAIQAGEELFFDYRYSQADALKYVGIERETDVL

SEQ ID NO: 45017 - protein, 747 aa, Homo sapiens
MEIPNPPTSKCITYWKRKVKSEYMRLRQLKRLQANMGAKALYVANFAKVQEKTQILNEEWKKLRVQPVQSMKPVSGHPFLKKCTIESIFPGFASQHMLMRSLNTVALVPIMYSWSPLQQNFMVEDETVLCNIPYMGDEVKEEDETFIEELINNYDGKVHGEEEMIPGSVLISDAVFLELVDALNQYSDEEEEGHNDTSDGKQDDSKEDLPVTRKRKRHAIEGNKKSSKKQFPNDMIFSAIASMFPENGVPDDMKERYRELTEMSDPNALPPQCTPNIDGPNAKSVQREQSLHSFHTLFCRRCFKYDCFLHPFHATPNVYKRKNKEIKIEPEPCGTDCFLLLEGAKEYAMLHNPRSKCSGRRRRRHHIVSASCSNASASAVAETKEGDSDRDTGNDWASSSSEANSRCQTPTKQKASPAPPQLCVVEAPSEPVEWTGAEESLFRVFHGTYFNNFCSIARLLGTKTCKQVFQFAVKESLILKLPTDELMNPSQKKKRKHRLWAAHCRKIQLKKDNSSTQVYNYQPCDHPDRPCDSTCPCIMTQNFCEKFCQCNPDCQNRFPGCRCKTQCNTKQCPCYLAVRECDPDLCLTCGASEHWDCKVVSCKNCSIQRGLKKHLLLAPSDVAGWGTFIKESVQKNEFISEYCGELISQDEADRRGKVYDKYMSSFLFNLNNDFVVDATRKGNKIRFANHSVNPNCYAKVVMVNGDHRIGIFAKRAIQAGEELFFDYRYSQADALKYVGIERETDVL

SEQ ID NO: 45018 - protein, 608 aa, Homo sapiens
MEEASCPTCSVNEACEWTPFSQKEMIPGSVLISDAVFLELVDALNQYSDEEEEGHNDTSDGKQDDSKEDLPVTRKRKRHAIEGNKKSSKKQFPNDMIFSAIASMFPENGVPDDMKERYRELTEMSDPNALPPQCTPNIDGPNAKSVQREQSLHSFHTLFCRRCFKYDCFLHPFHATPNVYKRKNKEIKIEPEPCGTDCFLLLEGAKEYAMLHNPRSKCSGRRRRRHHIVSASCSNASASAVAETKEGDSDRDTGNDWASSSSEANSRCQTPTKQKASPAPPQLCVVEAPSEPVEWTGAEESLFRVFHGTYFNNFCSIARLLGTKTCKQVFQFAVKESLILKLPTDELMNPSQKKKRKHRLWAAHCRKIQLKKDNSSTQVYNYQPCDHPDRPCDSTCPCIMTQNFCEKFCQCNPDCQNRFPGCRCKTQCNTKQCPCYLAVRECDPDLCLTCGASEHWDCKVVSCKNCSIQRGLKKHLLLAPSDVAGWGTFIKESVQKNEFISEYCGELISQDEADRRGKVYDKYMSSFLFNLNNDFVVDATRKGNKIRFANHSVNPNCYAKVVMVNGDHRIGIFAKRAIQAGEELFFDYRYSQADALKYVGIERETDVL

SEQ ID NO: 45019 - protein, 751 aa, Homo sapiens
MGQTGKKSEKGPVCWRKRVKSEYMRLRQLKRFRRADEVKSMFSSNRQKILERTEILNQEWKQRRIQPVHILTSVSSLRGTRECSVTSDLDFPTQVIPLKTLNAVASVPIMYSWSPLQQNFMVEDETVLHNIPYMGDEVLDQDGTFIEELIKNYDGKVHGDRECGFINDEIFVELVNALGQYNDDDDDDDGDDPEEREEKQKDLEDHRDDKESRPPRKFPSDKIFEAISSMFPDKGTAEELKEKYKELTEQQLPGALPPECTPNIDGPNAKSVQREQSLHSFHTLFCRRCFKYDCFLHRKCNYSFHATPNTYKRKNTETALDNKPCGPQCYQHLEGAKEFAAALTAERIKTPPKRPGGRRRGRLPNNSSRPSTPTINVLESKDTDSDREAGTETGGENNDKEEEEKKDETSSSSEANSRCQTPIKMKPNIEPPENVEWSGAEASMFRVLIGTYYDNFCAIARLIGTKTCRQVYEFRVKESSIIAPAPAEDVDTPPRKKKRKHRLWAAHCRKIQLKKDGSSNHVYNYQPCDHPRQPCDSSCPCVIAQNFCEKFCQCSSECQNRFPGCRCKAQCNTKQCPCYLAVRECDPDLCLTCGAADHWDSKNVSCKNCSIQRGSKKHLLLAPSDVAGWGIFIKDPVQKNEFISEYCGEIISQDEADRRGKVYDKYMCSFLFNLNNDFVVDATRKGNKIRFANHSVNPNCYAKVMMVNGDHRIGIFAKRAIQTGEELFFDYRYSQADALKYVGIEREMEIP

SEQ ID NO: 45020 - protein, 707 aa, Homo sapiens
MGQTGKKSEKGPVCWRKRVKSEYMRLRQLKRFRRADEVKSMFSSNRQKILERTEILNQEWKQRRIQPVHILTSVSSLRGTREVEDETVLHNIPYMGDEVLDQDGTFIEELIKNYDGKVHGDRECGFINDEIFVELVNALGQYNDDDDDDDGDDPEEREEKQKDLEDHRDDKESRPPRKFPSDKIFEAISSMFPDKGTAEELKEKYKELTEQQLPGALPPECTPNIDGPNAKSVQREQSLHSFHTLFCRRCFKYDCFLHPFHATPNTYKRKNTETALDNKPCGPQCYQHLEGAKEFAAALTAERIKTPPKRPGGRRRGRLPNNSSRPSTPTINVLESKDTDSDREAGTETGGENNDKEEEEKKDETSSSSEANSRCQTPIKMKPNIEPPENVEWSGAEASMFRVLIGTYYDNFCAIARLIGTKTCRQVYEFRVKESSIIAPAPAEDVDTPPRKKKRKHRLWAAHCRKIQLKKDGSSNHVYNYQPCDHPRQPCDSSCPCVIAQNFCEKFCQCSSECQNRFPGCRCKAQCNTKQCPCYLAVRECDPDLCLTCGAADHWDSKNVSCKNCSIQRGSKKHLLLAPSDVAGWGIFIKDPVQKNEFISEYCGEIISQDEADRRGKVYDKYMCSFLFNLNNDFVVDATRKGNKIRFANHSVNPNCYAKVMMVNGDHRIGIFAKRAIQTGEELFFDYRYSQADALKYVGIEREMEIP

SEQ ID NO: 45021 - protein, 746 aa, Homo sapiens
MGQTGKKSEKGPVCWRKRVKSEYMRLRQLKRFRRADEVKSMFSSNRQKILERTEILNQEWKQRRIQPVHILTSVSSLRGTRECSVTSDLDFPTQVIPLKTLNAVASVPIMYSWSPLQQNFMVEDETVLHNIPYMGDEVLDQDGTFIEELIKNYDGKVHGDRECGFINDEIFVELVNALGQYNDDDDDDDGDDPEEREEKQKDLEDHRDDKESRPPRKFPSDKIFEAISSMFPDKGTAEELKEKYKELTEQQLPGALPPECTPNIDGPNAKSVQREQSLHSFHTLFCRRCFKYDCFLHPFHATPNTYKRKNTETALDNKPCGPQCYQHLEGAKEFAAALTAERIKTPPKRPGGRRRGRLPNNSSRPSTPTINVLESKDTDSDREAGTETGGENNDKEEEEKKDETSSSSEANSRCQTPIKMKPNIEPPENVEWSGAEASMFRVLIGTYYDNFCAIARLIGTKTCRQVYEFRVKESSIIAPAPAEDVDTPPRKKKRKHRLWAAHCRKIQLKKDGSSNHVYNYQPCDHPRQPCDSSCPCVIAQNFCEKFCQCSSECQNRFPGCRCKAQCNTKQCPCYLAVRECDPDLCLTCGAADHWDSKNVSCKNCSIQRGSKKHLLLAPSDVAGWGIFIKDPVQKNEFISEYCGEIISQDEADRRGKVYDKYMCSFLFNLNNDFVVDATRKGNKIRFANHSVNPNCYAKVMMVNGDHRIGIFAKRAIQTGEELFFDYRYSQADALKYVGIEREMEIP

SEQ ID NO: 45022 - protein, 225 aa, Homo sapiens
MYSWSPLQQNFMVEDETVLHNIPYMGDEVLDQDGTFIEELIKNYDGKVHGDRECGFINDEIFVELVNALGQYNDDDDDDDGDDPEEREEKQKDLEDHRDDKESRPPRKFPSDKIFEAISSMFPDKGTAEELKEKYKELTEQQLPGALPPECTPNIDGPNAKSVQREQSLHSFHTLFCRRCFKYDCFLHPFHATPNTYKRKNTETALDNKPCGPQCYQHLPLLPRN

SEQ ID NO: 45023 - protein, 695 aa, Homo sapiens
MGQTGKKSEKGPVCWRKRVKSEYMRLRQLKRFRRADEVKSMFSSNRQKILERTEILNQEWKQRRIQPVHILTSCSVTSDLDFPTQVIPLKTLNAVASVPIMYSWSPLQQNFMVEDETVLHNIPYMGDEVLDQDGTFIEELIKNYDGKVHGDRECGFINDEIFVELVNALGQYNDDDDDDDGDDPEEREEKQKDLEDHRDDKESRPPRKFPSDKIFEAISSMFPDKGTAEELKEKYKELTEQQLPGALPPECTPNIDGPNAKSVQREQSLHSFHTLFCRRCFKYDCFLHPFHATPNTYKRKNTETALDNKPCGPQCYQHLEGAKEFAAALTAERIKTPPKRPGGRRRGRLPNNSSRPSTPTINVLESKDTDSDREAGTETGGENNDKEEEEKKDETSSSSEANSRCQTPIKMKPNIEPPENVEWSGAEASMFRVLIGTYYDNFCAIARLIGTKTCRQVYEFRVKESSIIAPAPAEDVDTPPRKKKRKHRLWAAHCRKIQLKKGQNRFPGCRCKAQCNTKQCPCYLAVRECDPDLCLTCGAADHWDSKNVSCKNCSIQRGSKKHLLLAPSDVAGWGIFIKDPVQKNEFISEYCGEIISQDEADRRGKVYDKYMCSFLFNLNNDFVVDATRKGNKIRFANHSVNPNCYAKVMMVNGDHRIGIFAKRAIQTGEELFFDYRYSQADALKYVGIEREMEIP

SEQ ID NO: 45024 - protein, 695 aa, Homo sapiens; identical to SEQ ID NO: 45023

SEQ ID NO: 45025 - protein, 737 aa, Homo sapiens
MGQTGKKSEKGPVCWRKRVKSEYMRLRQLKRFRRADEVKSMFSSNRQKILERTEILNQEWKQRRIQPVHILTSCSVTSDLDFPTQVIPLKTLNAVASVPIMYSWSPLQQNFMVEDETVLHNIPYMGDEVLDQDGTFIEELIKNYDGKVHGDRECGFINDEIFVELVNALGQYNDDDDDDDGDDPEEREEKQKDLEDHRDDKESRPPRKFPSDKIFEAISSMFPDKGTAEELKEKYKELTEQQLPGALPPECTPNIDGPNAKSVQREQSLHSFHTLFCRRCFKYDCFLHPFHATPNTYKRKNTETALDNKPCGPQCYQHLEGAKEFAAALTAERIKTPPKRPGGRRRGRLPNNSSRPSTPTINVLESKDTDSDREAGTETGGENNDKEEEEKKDETSSSSEANSRCQTPIKMKPNIEPPENVEWSGAEASMFRVLIGTYYDNFCAIARLIGTKTCRQVYEFRVKESSIIAPAPAEDVDTPPRKKKRKHRLWAAHCRKIQLKKDGSSNHVYNYQPCDHPRQPCDSSCPCVIAQNFCEKFCQCSSECQNRFPGCRCKAQCNTKQCPCYLAVRECDPDLCLTCGAADHWDSKNVSCKNCSIQRGSKKHLLLAPSDVAGWGIFIKDPVQKNEFISEYCGEIISQDEADRRGKVYDKYMCSFLFNLNNDFVVDATRKGNKIRFANHSVNPNCYAKVMMVNGDHRIGIFAKRAIQTGEELFFDYRYSQADALKYVGIEREMEIP

SEQ ID NO: 45026 - protein, 434 aa, Homo sapiens
MSILKIHAREIFDSRGNPTVEVDLFTSKGLFRAAVPSGASTGIYEALELRDNDKTRYMGKGVSKAVEHINKTIAPALVSKKLNVTEQEKIDKLMIEMDGTENKSKFGANAILGVSLAVCKAGAVEKGVPLYRHIADLAGNSEVILPVPAFNVINGGSHAGNKLAMQEFMILPVGAANFREAMRIGAEVYHNLKNVIKEKYGKDATNVGDEGGFAPNILENKEGLELLKTAIGKAGYTDKVVIGMDVAASEFFRSGKYDLDFKSPDDPSRYISPDQLADLYKSFIKDYPVVSIEDPFDQDDWGAWQKFTASAGIQVVGDDLTVTNPKRIAKAVNEKSCNCLLLKVNQIGSVTESLQACKLAQANGWGVMVSHRSGETEDTFIADLVVGLCTGQIKTGAPCRSERLAKYNQLLRIEEELGSKAKFAGRNFRNPLAK

SEQ ID NO: 45027 - protein, 434 aa, Homo sapiens
MSIEKIWAREILDSRGNPTVEVDLYTAKGLFRAAVPSGASTGIYEALELRDGDKQRYLGKGVLKAVDHINSTIAPALISSGLSVVEQEKLDNLMLELDGTENKSKFGANAILGVSLAVCKAGAAERELPLYRHIAQLAGNSDLILPVPAFNVINGGSHAGNKLAMQEFMILPVGAESFRDAMRLGAEVYHTLKGVIKDKYGKDATNVGDEGGFAPNILENSEALELVKEAIDKAGYTEKIVIGMDVAASEFYRDGKYDLDFKSPTDPSRYITGDQLGALYQDFVRDYPVVSIEDPFDQDDWAAWSKFTANVGIQIVGDDLTVTNPKRIERAVEEKACNCLLLKVNQIGSVTEAIQACKLAQENGWGVMVSHRSGETEDTFIADLVVGLCTGQIKTGAPCRSERLAKYNQLMRIEEELGDEARFAGHNFRNPSVL

SEQ ID NO: 45028 - protein, 434 aa, Homo sapiens; identical to SEQ ID NO: 45027

SEQ ID NO: 45029 - protein, 391 aa, Homo sapiens
MSIEKIWAREILDSRGNPTVEVDLYTAKGLFRAAVPSGASTGIYEALELRDGDKQRYLGKAKFGANAILGVSLAVCKAGAAERELPLYRHIAQLAGNSDLILPVPAFNVINGGSHAGNKLAMQEFMILPVGAESFRDAMRLGAEVYHTLKGVIKDKYGKDATNVGDEGGFAPNILENSEALELVKEAIDKAGYTEKIVIGMDVAASEFYRDGKYDLDFKSPTDPSRYITGDQLGALYQDFVRDYPVVSIEDPFDQDDWAAWSKFTANVGIQIVGDDLTVTNPKRIERAVEEKACNCLLLKVNQIGSVTEAIQACKLAQENGWGVMVSHRSGETEDTFIADLVVGLCTGQIKTGAPCRSERLAKYNQLMRIEEELGDEARFAGHNFRNPSVL

SEQ ID NO: 45030 - protein, 434 aa, Homo sapiens; identical to SEQ ID NO: 45027

SEQ ID NO: 45031 - protein, 391 aa, Homo sapiens; identical to SEQ ID NO: 45029

SEQ ID NO: 45032 - protein, 391 aa, Homo sapiens
MAMQKIFAREILDSRGNPTVEVDLHTAKGRFRAAVPSGASTGIYEALELRDGDKGRYLGKAKFGANAILGVSLAVCKAGAAEKGVPLYRHIADLAGNPDLILPVPAFNVINGGSHAGNKLAMQEFMILPVGASSFKEAMRIGAEVYHHLKGVIKAKYGKDATNVGDEGGFAPNILENNEALELLKTAIQAAGYPDKVVIGMDVAASEFYRNGKYDLDFKSPDDPARHITGEKLGELYKSFIKNYPVVSIEDPFDQDDWATWTSFLSGVNIQIVGDDLTVTNPKRIAQAVEKKACNCLLLKVNQIGSVTESIQACKLAQSNGWGVMVSHRSGETEDTFIADLVVGLCTGQIKTGAPCRSERLAKYNQLMRIEEALGDKAIFAGRKFRNPKAK

SEQ ID NO: 45033 - protein, 434 aa, Homo sapiens
MAMQKIFAREILDSRGNPTVEVDLHTAKGRFRAAVPSGASTGIYEALELRDGDKGRYLGKGVLKAVENINNTLGPALLQKKLSVVDQEKVDKFMIELDGTENKSKFGANAILGVSLAVCKAGAAEKGVPLYRHIADLAGNPDLILPVPAFNVINGGSHAGNKLAMQEFMILPVGASSFKEAMRIGAEVYHHLKGVIKAKYGKDATNVGDEGGFAPNILENNEALELLKTAIQAAGYPDKVVIGMDVAASEFYRNGKYDLDFKSPDDPARHITGEKLGELYKSFIKNYPVVSIEDPFDQDDWATWTSFLSGVNIQIVGDDLTVTNPKRIAQAVEKKACNCLLLKVNQIGSVTESIQACKLAQSNGWGVMVSHRSGETEDTFIADLVVGLCTGQIKTGAPCRSERLAKYNQLMRIEEALGDKAIFAGRKFRNPKAK

SEQ ID NO: 45034 - protein, 434 aa, Homo sapiens; identical to SEQ ID NO: 45033

SEQ ID NO: 45035 - protein, 283 aa, Homo sapiens
MAMQKIFAREILDSRGNPTVEVDLHTAKGRFRAAVPSGASTGIYEALELRDGDKGRYLGKGVLKAVENINNTLGPALLQKKLSVVDQEKVDKFMIELDGTENKSKFGANAILGVSLAVCKAGAAEKGVPLYRHIADLAGNPDLILPVPAFNVINGGSHAGNKLAMQEFMILPVGASSFKEAMRIGAEVYHHLKGVIKAKYGKDATNVGDEGGFAPNILENNEALELLKTAIQAAGYPDKVVIGMDVAASEFYRNGKYDLDFKSPDDPARHITGEKLGELYKSF

SEQ ID NO: 45036 - protein, 154 aa, Homo sapiens
MAMQKIFAREILDSRGNPTVEVDLHTAKGRFRAAVPSGASTGIYEALELRDGDKGRYLGKGVLKAVENINNTLGPALLQKKLSVVDQEKVDKFMIELDGTENKSKFGANAILGVSLAVCKAGAAEKGVPLYRHIADLAGNPDLILPVPAFNVIN

SEQ ID NO: 45037 - protein, 148 aa, Homo sapiens
MAMQKIFAREILDSRGNPTVEVDLHTAKGRFRAAVPSGASTGIYEALELRDGDKGRYLGKGVLKAVENINNTLGPALLQKKLSVVDQEKVDKFMIELDGTENKSKFGANAILGVSLAVCKAGAAEKGVPLYRHIADLAGNPDLILPVP

SEQ ID NO: 45038 - protein, 443 aa, Homo sapiens
MVRGRISRLSVRDVRFPTSLGGHGADAMHTDPDYSAAYVVIETDAEDGIKGCGITFTLGKGTEVVVCAVNALAHHVLNKDLKDIVGDFRGFYRQLTSDGQLRWIGPEKGVVHLATAAVLNAVWDLWAKQEGKPVWKLLVDMDPRMLVSCIDFRYITDVLTEEDALEILQKGQIGKKEREKQMLAQGYPAYTTSCAWLGYSDDTLKQLCAQALKDGWTRFKVKVGADLQDDMRRCQIIRDMIGPEKTLMMDANQRWDVPEAVEWMSKLAKFKPLWIEEPTSPDDILGHATISKALVPLGIGIATGEQCHNRVIFKQLLQAKALQFLQIDSCRLGSVNENLSVLLMAKKFEIPVCPHAGGVGLCELVQHLIIFDYISVSASLENRVCEYVDHLHEHFKYPVMIQRASYMPPKDPGYSTEMKEESVKKHQYPDGEVWKKLLPAQEN

SEQ ID NO: 45039 - protein, 213 aa, Homo sapiens
MRRCQIIRDMIGPEKTLMMDANQRWDVPEAVEWMSKLAKFKPLWIEEPTSPDDILGHATISKALVPLGIGIATGEQCHNRVIFKQLLQAKALQFLQIDSCRLGSVNENLSVLLMAKKFEIPVCPHAGGVGLCELVQHLIIFDYISVSASLENRVCEYVDHLHEHFKYPVMIQRASYMPPKDPGYSTEMKEESVKKHQYPDGEVWKKLLPAQEN

SEQ ID NO: 45040 - protein, 450 aa, Homo sapiens
MVSADAMVSADAMVSADAMVSADAMVSADAMVSADAMVSADAMVSADAMHTDPDYSAAYVVIETDAEDGIKGCGITFTLGKGTEVVVCAVNALAHHVLNKDLKDIVGDFRGFYRQLTSDGQLRWIGPEKGVVHLATAAVLNAVWDLWAKQEGKPVWKLLVDMDPRMLVSCIDFRYITDVLTEEDALEILQKGQIGKKEREKQMLAQGYPAYTTSCAWLGYSDDTLKQLCAQALKDGWTRFKVKVGADLQDDMRRCQIIRDMIGPEKTLMMDANQRWDVPEAVEWMSKLAKFKPLWIEEPTSPDDILGHATISKCHNRVIFKQLLQAKALQFLQIDSCRLGSVNENLSVLLMAKKFEIPVCPHAGGVGLCELVQHLIIFDYISVSASLENRVCEYVDHLHEHFKYPVMIQRASYMPPKDPGYSTEMKEESVKKHQYPDGEVWKKLLPAQEN

SEQ ID NO: 45041 - protein, 361 aa, Homo sapiens
MQKMESRGVELPSLWEKALKLIGPEKGVVHLATAAVLNAVWDLWAKQEGKPVWKLLVDMDPRMLVSCIDFRYITDVLTEEDALEILQKGQIGKKEREKQMLAQGYPAYTTSCAWLGYSDDTLKQLCAQALKDGWTRFKVKVGADLQDDMRRCQIIRDMIGPEKTLMMDANQRWDVPEAVEWMSKLAKFKPLWIEEPTSPDDILGHATISKALVPLGIGIATGEQCHNRVIFKQLLQAKALQFLQIDSCRLGSVNENLSVLLMAKKFEIPVCPHAGGVGLCELVQHLIIFDYISVSASLENRVCEYVDHLHEHFKYPVMIQRASYMPPKDPGYSTEMKEESVKKHQYPDGEVWKKLLPAQEN

SEQ ID NO: 45042 - protein, 142 aa, Homo sapiens
MVRGRISRLSVRDVRFPTSLGGHGADAMHTDPDYSAAYVVIETDAEDGIKGCGITFTLGKGTEVVVCAVNALAHHVLNKDLKDIVGDFRGFYRQLTSDGQLRWIGPEKGVVHLATAAVLNAVWDLWAKQEGKPVWKLLVDMG

SEQ ID NO: 45043 - protein, 328 aa, Homo sapiens
MAAGIVASRRLRDLLTRRLTGSNYPGLSISLRLTGSSAQEEASGVALGEAPDHSYESLRVTSAQKHVLHVQLNRPNKRNAMNKVFWREMVECFNKISRDADCRAVVISGAGKMFTAGIDLMDMASDILQPKGDDVARISWYLRDIITRYQETFNVIERCPKPVIAAVHGGCIGGGVDLVTACDIRYCAQDAFFQVKEVDVGLAADVGTLQRLPKVIGNQSLVNELAFTARKMMADEALGSGLVSRVFPDKEVMLDAALALAAEISSKSPVAVQSTKVNLLYSRDHSVAESLNYVASWNMSMLQTQDLVKSVQATTENKELKTVTFSKL

SEQ ID NO: 45044 - protein, 284 aa, Homo sapiens
MAKSLLKTASLSGRTKLLHQTGLSLYSTSHGFYEEEVKKTLQQFPGGSIDLQKEDNGIGILTLNNPSRMNAFSGVMMLQLLEKVIELENWTEGKGLIVRGAKNTFSSGSDLNAVKSLGLQRRLPLISVALVQGWALGGGAEFTTACDFRLMTPESKIRFVHKEMGIIPSWGGTTRLVEIIGSRQALKVLSGALKLDSKNALNIGMVEEVLQSSDETKSLEEAQEWLKQFIQGPPEVIRALKKSVCSGRELYLEEALQNERDLLGTVWGGPANLEAIAKKGKFNK

SEQ ID NO: 45045 - protein, 145 aa, Homo sapiens
MAKSLLKTASLSGRTKLLHQTGLSLYSTSHGFYEEEVKKTLQQFPGGSIDLQKEDNGIGILTLNNPSRMNAFSGVMMLQLLEKVIELENWTEGKGLIVRGAKNTFSSGSDLNAVKSLGTPETSFNKCCAGSRLGIGWRSRIYYSM

SEQ ID NO: 45046 - protein, 146 aa, Homo sapiens
MAKSLLKTASLSGRTKLLHQTGLSLYSTSHGFYEEEVKKTLQQFPGGSIDLQKEDNGIGILTLNNPSRMNAFSGVMMLQLLEKVIELENWTEGKGLIVRGAKNTFSSGSDLNAVKSLGTPEETSFNKCCAGSRLGIGWRSRIYYSM

SEQ ID NO: 45047 - protein, 145 aa, Homo sapiens; identical to SEQ ID NO: 45045

SEQ ID NO: 45048 - protein, 213 aa, Homo sapiens
MNAFSGVMMLQLLEKVIELENWTEGKGLIVRGAKNTFSSGSDLNAVKSLGTPEESCRWNTEFLYTLHPVSPFINILYSYGWNGRMHVHAKHLNKIYEVKKQRGKILLGLSRLPLISVALVQGWALGGGAEFTTACDFRLMTPESKIRFVHKEMGIIPSWGGTTRLVEIIGSRQALKVLSGALKLDSKNALNIGMVEEVLQSSDETKSLEEAQE

SEQ ID NO: 45049 - protein, 301 aa, Homo sapiens
MAKSLLKTASLSGRTKLLHQTGLSLYSTSHGFYEEEVKKTLQQFPGGSIDLQKEDNGIGILTLNNPSRMNAFSGVMMLQLLEKVIELENWTEGKGLIVRGAKNTFSSGSDLNAVKSLGTPEDGMAVCMFMQNTLTRFMRLPLISVALVQGWALGGGAEFTTACDFRLMTPESKIRFVHKEMGIIPSWGGTTRLVEIIGSRQALKVLSGALKLDSKNALNIGMVEEVLQSSDETKSLEEAQEWLKQFIQGPPEVIRALKKSVCSGRELYLEEALQNERDLLGTVWGGPANLEAIAKKGKFNK

SEQ ID NO: 45050 - protein, 226 aa, Homo sapiens
MMLQLLEKVIELENWTEGKGLIVRGAKNTFSSGSDLNAVKSLGTPEDGMAVCMFMQNTLTRFMRLPLISVALVQGWALGGGAEFTTACDFRLMTPESKIRFVHKEMGIIPSWGGTTRLVEIIGSRQALKVLSGALKLDSKNALNIGMVEEVLQSSDETKSLEEAQEWLKQFIQGPPEVIRALKKSVCSGRELYLEEALQNERDLLGTVWGGPANLEAIAKKGKFNK

SEQ ID NO: 45051 - protein, 301 aa, Homo sapiens; identical to SEQ ID NO: 45049

SEQ ID NO: 45052 - protein, 301 aa, Homo sapiens; identical to SEQ ID NO: 45049

SEQ ID NO: 45053 - protein, 135 aa, Homo sapiens
MAKSLLKTASLSGRTKLLHQTGLSLYSTSHGFYEEEVKKTLQQFPGGSIDLQKEDNGIGILTLNNPSRMNAFSGVMMLQLLEKVIELENWTEGKGLIVRGAKNTFSSGSDLNAVKSLGTPEDGMAVCMFMQNTLT

SEQ ID NO: 45054 - protein, 307 aa, Homo sapiens
MALKQEMAKSLLKTASLSGRTKLLHQTGLSLYSTSHGFYEEEVKKTLQQFPGGSIDLQKEDNGIGILTLNNPSRMNAFSGVMMLQLLEKVIELENWTEGKGLIVRGAKNTFSSGSDLNAVKSLGTPEDGMAVCMFMQNTLTRFMRLPLISVALVQGWALGGGAEFTTACDFRLMTPESKIRFVHKEMGIIPSWGGTTRLVEIIGSRQALKVLSGALKLDSKNALNIGMVEEVLQSSDETKSLEEAQEWLKQFIQGPPEVIRALKKSVCSGRELYLEEALQNERDLLGTVWGGPANLEAIAKKGKFNK

SEQ ID NO: 45055 - protein, 151 aa, Homo sapiens
MAKSLLKTASLSGRTKLLHQTGLSLYSTSHGFYEEEVKKTLQQFPGGSIDLQKEDNGIGILTLNNPSRMNAFSGVMMLQLLEKVIELENWTEGKGLIVRGAKNTFSSGSDLNAVKSLGTPEDGMAVCMFMQNTLTRFMRLPLISVALVQGW

SEQ ID NO: 45056 - protein, 125 aa, Homo sapiens
MAKSLLKTASLSGRTKLLHQTGLSLYSTSHGFYEEEVKKTLQQFPGGSIDLQKEDNGIGILTLNNPSRMNAFSGVMMLQLLEKVIELENWTEGKGLIVRGAKNTFSSGSDLNAVKSLGTPEANFL

SEQ ID NO: 45057 - protein, 70 aa, Homo sapiens
MMLQLLEKVIELENWTEGKGLIVRGAKNTFSSGSDLNAVKSLGTPETSFNKCCAGSRLGIGWRSRIYYSM

SEQ ID NO: 45058 - protein, 290 aa, Homo sapiens
MAALRVLLSCVRGPLRPPVRCPAWRPFASGANFEYIIAEKRGKNNTVGLIQLNRPKALNALCDGLIDELNQALKTFEEDPAVGAIVLTGGDKAFAAGADIKEMQNLSFQDCYSSKFLKHWDHLTQVKKPVIAAVNGYAFGGGCELAMMCDIIYAGEKAQFAQPEILIGTIPGAGGTQRLTRAVGKSLAMEMVLTGDRISAQDAKQAGLVSKICPVETLVEEAIQCAEKIASNSKIVVAMAKESVNAAFEMTLTEGSKLEKKLFYSTFATDDRKEGMTAFVEKRKANFKDQ

SEQ ID NO: 45059 - protein, 723 aa, Homo sapiens
MAEYTRLHNALALIRLRNPPVNAISTTLLRDIKEGLQKAVIDHTIKAIVICGAEGKFSAGADIRGFSAPRTFGLTLGHVVDEIQRNEKPVVAAIQGMAFGGGLELALGCHYRIAHAEAQVGLPEVTLGLLPGARGTQLLPRLTGVPAALDLITSGRRILADEALKLGILDKVVNSDPVEEAIRFAQRVSDQPLESRRLCNKPIQSLPNMDSIFSEALLKMRRQHPGCLAQEACVRAVQAAVQYPYEVGIKKEEELFLYLLQSGQARALQYAFFAERKANKWSTPSGASWKTASARPVSSVGVVGLGTMGRGIVISFARARIPVIAVDSDKNQLATANKMITSVLEKEASKMQQSGHPWSGPKPRLTSSVKELGGVDLVIEAVFEEMSLKKQVFAELSAVCKPEAFLCTNTSALDVDEIASSTDRPHLVIGTHFFSPAHVMKLLEVIPSQYSSPTTIATVMNLSKKIKKIGVVVGNCFGFVGNRMLNPYYNQAYFLLEEGSKPEEVDQVLEEFGFKMGPFRVSDLAGLDVGWKSRKGQGLTGPTLLPGTPARKRGNRRYCPIPDVLCELGRFGQKTGKGWYQYDKPLGRIHKPDPWLSKFLSRYRKTHHIEPRTISQDEILERCLYSLINEAFRILGEGIAASPEHIDVVYLHGYGWPRHKGGPMFYASTVGLPTVLEKLQKYYRQNPDIPQLEPSDYLKKLASQGNPPLKEWQSLAGSPSSKL

SEQ ID NO: 45060 - protein, 627 aa, Homo sapiens
MAFGGGLELALGCHYRIAHAEAQVGLPEVTLGLLPGARGTQLLPRLTGVPAALDLITSGRRILADEALKLGILDKVVNSDPVEEAIRFAQRVSDQPLESRRLCNKPIQSLPNMDSIFSEALLKMRRQHPGCLAQEACVRAVQAAVQYPYEVGIKKEEELFLYLLQSGQARALQYAFFAERKANKWSTPSGASWKTASARPVSSVGVVGLGTMGRGIVISFARARIPVIAVDSDKNQLATANKMITSVLEKEASKMQQSGHPWSGPKPRLTSSVKELGGVDLVIEAVFEEMSLKKQVFAELSAVCKPEAFLCTNTSALDVDEIASSTDRPHLVIGTHFFSPAHVMKLLEVIPSQYSSPTTIATVMNLSKKIKKIGVVVGNCFGFVGNRMLNPYYNQAYFLLEEGSKPEEVDQVLEEFGFKMGPFRVSDLAGLDVGWKSRKGQGLTGPTLLPGTPARKRGNRRYCPIPDVLCELGRFGQKTGKGWYQYDKPLGRIHKPDPWLSKFLSRYRKTHHIEPRTISQDEILERCLYSLINEAFRILGEGIAASPEHIDVVYLHGYGWPRHKGGPMFYASTVGLPTVLEKLQKYYRQNPDIPQLEPSDYLKKLASQGNPPLKEWQSLAGSPSSKL

SEQ ID NO: 45061 - protein, 487 aa, Homo sapiens
MAEYTRLHNALALIRLRNPPVNAISTTLLRDIKEGLQKAVIDHTIKAIVICGAEGKFSAGADIRGFSAPRTFGLTLGHVVDEIQRNEKPVVAAIQGMAFGGGLELALGCHYRIAHAEAQVGLPEVTLGLLPGARGTQLLPRLTGVPAALDLITSGRRILADEALKLGILDKVVNSDPVEEAIRFAQRVSDQPLESRRLCNKPIQSLPNMDSIFSEALLKMRRQHPGCLAQEACVRAVQAAVQYPYEVGIKKEEELFLYLLQSGQARALQYAFFAERKANKWSTPSGASWKTASARPVSSVGVVGLGTMGRGIVISFARARIPVIAVDSDKNQLATANKMITSVLEKEASKMQQSGHPWSGPKPRLTSSVKELGGVDLVIEAVFEEMSLKKQVFAELSAVCKPEAFLCTNTSALDVDEIASSTDRPHLVIGTHFFSPAHVMKLLEVIPSQYSSPTTIATVMNLSKKIKKIGVVVGNYSVSKKKKKKKK

SEQ ID NO: 45062 - protein, 2033 aa, Homo sapiens
MFKGLSKGSQGKGSPKGSPAKGSPKGSPSRHSRAATQELALLISRMQANADQVERDILETQKRLQQDRLNSEQSQALQHQQETGRSLKEAEVLLKDLFLDVDKARRLKHPQAEEIEKDIKQLHERVTQECAEYRALYEKMVLPPDVGPRVDWARVLEQKQKQVCAGQYGPGMAELEQQIAEHNILQKEIDAYGQQLRSLVGPDAATIRSQYRDLLKAASWRGQSLGSLYTHLQGCTRQLSALAEQQRRILQQDWSDLMADPAGVRREYEHFKQHELLSQEQSVNQLEDDGERMVELRHPAVGPIQAHQEALKMEWQNFLNLCICQETQLQHVEDYRRFQEEADSVSQTLAKLNSNLDAKYSPAPGGPPGAPTELLQQLEAEEKRLAVTERATGDLQRRSRDVAPLPQRRNPPQQPLHVDSICDWDSGEVQLLQGERYKLVDNTDPHAWVVQGPGGETKRAPAACFCIPAPDPDAVARASRLASELQALKQKLATVQSRLKASAVESLRPSQQAPSGSDLANPQAQKLLTQMTRLDGDLGQIERQVLAWARAPLSRPTPLEDLEGRIHSHEGTAQRLQSLGTEKETAQKECEAFLSTRPVGPAALQLPVALNSVKNKFSDVQVLCSLYGEKAKAALDLERQIQDADRVIRGFEATLVQEAPIPAEPGALQERVSELQRQRRELLEQQTCVLRLHRALKASEHACAALQNNFQEFCQDLPRQQRQVRALTDRYHAVGDQLDLREKVVQDAALTYQQFKNCKDNLSSWLEHLPRSQVRPSDGPSQIAYKLQAQKRLTQEIQSRERDRATASHLSQALQAALQDYELQADTYRCSLEPTLAVSAPKRPRVAPLQESIQAQEKNLAKAYTEVAAAQQQLLQQLEFARKMLEKKELSEDIRRTHDAKQGSESPAQAGRESEALKAQLEEERKRVARVQHELEAQRSQLLQLRTQRPLERLEEKEVVEFYRDPQLEGSLSRVKAQVEEEGKRRAGLQADLEVAAQKVVQLESKRKTMQPHLLTKEVTQVERDPGLDSQAAQLRIQIQQLRGEDAVISARLEGLKKELLALEKREVDVKEKVVVKEVVKVEKNLEMVKAAQALRLQMEEDAARRKQAEEAVAKLQARIEDLERAISSVEPKVIVKEVKKVEQDPGLLQESSRLRSLLEEERTKNATLARELSDLHSKYSVVEKQRPKVQLQERVHEIFQVDPETEQEITRLKAKLQEMAGKRSGVEKEVEKLLPDLEVLRAQKPTVEYKEVTQEVVRHERSPEVLREIDRLKAQLNELVNSHGRSQEQLIRLQGERDEWRRERAKVETKTVSKEVVRHEKDPVLEKEAERLRQEVREAAQKRRAAEDAVYELQSKRLLLERRKPEEKVVVQEVVVTQKDPKLREEHSRLSGSLDEEVGRRRQLELEVQQLRAGVEEQEGLLSFQEDRSKKLAVERELRQLTLRIQELEKRPPTVQEKIIMEEVVKLEKDPDLEKSTEALRWDLDQEKTQVTELNRECKNLQVQIDVLQKAKSQEKTIYKEVIRVQKDRVLEDERARVWEMLNRERTARQAREEEARRLRERIDRAETLGRTWSREESELQRARDQADQECGRLQQELRALERQKQQQTLQLQEESKLLSQKTESERQKAAQRGQELSRLEAAILREKDQIYEKERTLRDLHAKVSREELSQETQTRETNLSTKISILEPETGKDMSPYEAYKRGIIDRGQYLQLQELECDWEEVTTSGPCGEESVLLDRKSGKQYSIEAALRCRRISKEEYHLYKDGHLPISEFALLVAGETKPSSSLSIGSIISKSPLASPAPQSTSFFSPSFSLGLGDDSFPIAGIYDTTTDNKCSIKTAVAKNMLDPITGQKLLEAQAATGGIVDLLSRERYSVHKAMERGLIENTSTQRLLNAQKAFTGIEDPVTKKRLSVGEAVQKGWMPRESVLPHLQVQHLTGGLIDPKRTGRIPIQQALLSGMISEELAQLLQDESSYEKDLTDPISKERLSYKEAMGRCRKDPLSGLLLLPAALEGYRCYRSASPTVPRSLR

SEQ ID NO: 45063 - protein, 686 aa, Homo sapiens
MQLGEQLLVSSVNLPGAHFYPLESARGGSGGSAGHLPSAAPSPQKLDLDKASKKFSGSLSCEAVSGEPAAASAGAPAAMLSDTDAGDAFASAAAVAKPGPPDGRKGSPCGEEELPSAAAAAAAAAAAAAATARYSMDSLSSERYYLQSPGPQGSELAAPCSLFPYQAAAGAPHGPVYPAPNGARYPYGSMLPPGGFPAAVCPPGRAQFGPGAGAGSGAGGSSGGGGGPGTYQYSQGAPLYGPYPGAAAAGSCGGLGGLGVPGSGFRAHVYLCNRPLWLKFHRHQTEMIITKQGRRMFPFLSFNINGLNPTAHYNVFVEVVLADPNHWRFQGGKWVTCGKADNNMQGNKMYVHPESPNTGSHWMRQEISFGKLKLTNNKGANNNNTQMIVLQSLHKYQPRLHIVEVTEDGVEDLNEPSKTQTFTFSETQFIAVTAYQNTDITQLKIDHNPFAKGFRDNYDSSHQIVPGGRYGVQSFFPEPFVNTLPQARYYNGERTVPQTNGLLSPQQSEEVANPPQRWLVTPVQQPGTNKLDISSYESEYTSSTLLPYGIKSLPLQTSHALGYYPDPTFPAMAGWGGRGSYQRKMAAGLPWTSRTSPTVFSEDQLSKEKVKEEIGSSWIETPPSIKSLDSNDSGVYTSACKRRRLSPSNSSNENSPSIKCEDINAEEYSKDTSKGMGGYYAFYTTP

SEQ ID NO: 45064 - protein, 705 aa, Homo sapiens
MQLGEQLLVSSVNLPGAHFYPLESARGGSGGSAGHLPSAAPSPQKLDLDKASKKFSGSLSCEAVSGEPAAASAGAPAAMLSDTDAGDAFASAAAVAKPGPPDGRKGSPCGEEELPSAAAAAAAAAAAAAATARYSMDSLSSERYYLQSPGPQGSELAAPCSLFPYQAAAGAPHGPVYPAPNGARYPYGSMLPPGGFPAAVCPPGRAQFGPGAGAGSGAGGSSGGGGGPGTYQYSQGAPLYGPYPGAAAAGSCGGLGGLGVPGSGFRAHVYLCNRPLWLKFHRHQTEMIITKQGRRMFPFLSFNINGLNPTAHYNVFVEVVLADPNHWRFQGGKWVTCGKADNNMQGNKMYVHPESPNTGSHWMRQEISFGKLKLTNNKGANNNNTQMIVLQSLHKYQPRLHIVEVTEDGVEDLNEPSKTQTFTFSETQFIAVTAYQNTDITQLKIDHNPFAKGFRDNYDSMYTASENDRLTPSPTDSPRSHQIVPGGRYGVQSFFPEPFVNTLPQARYYNGERTVPQTNGLLSPQQSEEVANPPQRWLVTPVQQPGTNKLDISSYESEYTSSTLLPYGIKSLPLQTSHALGYYPDPTFPAMAGWGGRGSYQRKMAAGLPWTSRTSPTVFSEDQLSKEKVKEEIGSSWIETPPSIKSLDSNDSGVYTSACKRRRLSPSNSSNENSPSIKCEDINAEEYSKDTSKGMGGYYAFYTTP

SEQ ID NO: 45065 - protein, 570 aa, Homo sapiens [sequence omitted]

SEQ ID NO: 45066 - protein, 410 aa, Homo sapiens
MFPFLSFNINGLNPTAHYNVFVEVVLADPNHWRFQGGKWVTCGKADNNMQGNKMYVHPESPNTGSHWMRQEISFGKLKLTNNKGANNNNTQMIVLQSLHKYQPRLHIVEVTEDGVEDLNEPSKTQTFTFSETQFIAVTAYQNTDITQLKIDHNPFAKGFRDNYDSMYTASENDRLTPSPTDSPRSHQIVPGGRYGVQSFFPEPFVNTLPQARYYNGERTVPQTNGLLSPQQSEEVANPPQRWLVTPVQQPGTNKLDISSYESEYTSSTLLPYGIKSLPLQTSHALGYYPDPTFPAMAGWGGRGSYQRKMAAGLPWTSRTSPTVFSEDQLSKEKVKEEIGSSWIETPPSIKSLDSNDSGVYTSACKRRRLSPSNSSNENSPSIKCEDINAEEYSKDTSKGMGGYYAFYTTP

SEQ ID NO: 45067 - protein, 715 aa, Homo sapiens
MHLLPALAGVLATLVLAQPCEGTDPASPGAVETSVLRDCIAEAKLLVDAAYNWTQKSIKQRLRSGSASPMDLLSYFKQPVAATRTVVRAADYMHVALGLLEEKLQPQRSGPFNVTDVLTEPQLRLLSQASGCALRDQAERCSDKYRTITGRCNNKRRPLLGASNQALARWLPAEYEDGLSLPFGWTPSRRRNGFLLPLVRAVSNQIVRFPNERLTSDRGRALMFMQWGQFIDHDLDFSPESPARVAFTAGVDCERTCAQLPPCFPIKIPPNDPRIKNQRDCIPFFRSAPSCPQNKNRVRNQINALTSFVDASMVYGSEVSLSLRLRNRTNYLGLLAINQRFQDNGRALLPFDNLHDDPCLLTNRSARIPCFLAGDTRSTETPKLAAMHTLFMREHNRLATELRRLNPRWNGDKLYNEARKIMGAMVQIITYRDFLPLVLGKARARRTLGHYRGYCSNVDPRVANVFTLAFRFGHTMLQPFMFRLDSQYRASAPNSHVPLSSAFFASWRIVYEGGIDPILRGLMATPAKLNRQDAMLVDELRDRLFRQVRRIGLDLAALNMQRSRDHGLPGYNAWRRFCGLSQPRNLAQLSRVLKNQDLARKFLNLYGTPDNIDIWIGAIAEPLLPGARVGPLLACLFENQFRRARDGDRFWWQKRGVFTKRQRKALSRISLSRIICDNTGITTVSRDIFRANIYPRGFVNCSRIPRLNLSAWRGT

SEQ ID NO: 45068 - protein, 187 aa, Homo sapiens
MSEMAELSELYEESSDLQMDVMPGEGDLPQMEVGSGSRELSLRPSRSGAQQLEEEGPMEEEEAQPMAAPEGKRSLANGPNAGEQPGQVAGADFESEDEGEEFDDWEDDYDYPEEEQLSGAGYRVSAALEEADKMFLRTREPALDGGFQMHYEKTPFDQLAFIEELFSLMVVNRLTEELGCDEIIDRE

SEQ ID NO: 45069 - protein, 236 aa, Homo sapiens
MSKLPADSSVPQTGAANGDRDVPQAEVGRGRREPAPAQPEEAGEGAMAAARGGPVPAAREGRMAAARAAPAAAARGAPVAAAALARAAAAGRESPAAAAAREARMAEVARLLGEPVDEEGPEGRPRSRHGNGGLAALPYLRLRHPLSVLGINYQQFLRHYLENYPIAPGRIQELEERRRRFVEACRAREAAFDAEYQRNPHRVDLDILTFTIALTASEVINPLIEELGCDKFINRE

SEQ ID NO: 45070 - protein, 187 aa, Homo sapiens
MSKLPADSSVPQTGAANGDRDVPQAEVGRGRREPAPAQPEEAGESPAAAAAREARMAEVARLLGEPVDEEGPEGRPRSRHGNGGLAALPYLRLRHPLSVLGINYQQFLRHYLENYPIAPGRIQELEERRRRFVEACRAREAAFDAEYQRNPHRVDLDILTFTIALTASEVINPLIEELGCDKFINRE

SEQ ID NO: 45071 - protein, 333 aa, Homo sapiens
MKMDVSVRAAGCSDDLSSGEADVDPKLLELTADEEKCRSIRRQYRQLMYCVRQNREDIVSSANNSLTEALEEANVLFDGVSRTREAALDARFLVMASDLGKEKAKQLNSDMNFFNQLAFCDFLFLFVGLNWMEGDPDKLSDCDDSIALSFWKAIEKEATSWMVKAETFHFVFGSFKLERSAPKPRLEHQKKVRKMEENGNMPTKLQKLDLSSYPEATEKNVERILGLLQTYFRKYPDTPVSYFEFVIDPNSFSRTVENIFYVSFIVRDGFARIRLDEDRLPILEPMNVNQMGEGNDSSCHGRKQGVISLTLQEWKNIVAAFEISEAMITYSSY

SEQ ID NO: 45072 - protein, 976 aa, Homo sapiens
MERRWPLGLGLVLLLCAPLPPGARAKEVTLMDTSKAQGELGWLLDPPKDGWSEQQQILNGTPLYMYQDCPMQGRRDTDHWLRSNWIYRGEEASRVHVELQFTVRDCKSFPGGAGPLGCKETFNLLYMESDQDVGIQLRRPLFQKVTTVAADQSFTIRDLVSGSVKLNVERCSLGRLTRRGLYLAFHNPGACVALVSVRVFYQRCPETLNGLAQFPDTLPGPAGLVEVAGTCLPHARASPRPSGAPRMHCSPDGEWLVPVGRCHCEPGYEEGGSGEACVACPSGSYRMDMDTPHCLTCPQQSTAESEGATICTCESGHYRAPGEGPQVACTGPPSAPRNLSFSASGTQLSLRWEPPADTGGRQDVRYSVRCSQCQGTAQDGGPCQPCGVGVHFSPGARGLTTPAVHVNGLEPYANYTFNVEAQNGVSGLGSSGHASTSVSISMGHAESLSGLSLRLVKKEPRQLELTWAGSRPRSPGANLTYELHVLNQDEERYQMVLEPRVLLTELQPDTTYIVRVRMLTPLGPGPFSPDHEFRTSPPVSRGLTGGEIVAVIFGLLLGAALLLGILVFRSRRAQRQRQQRQRDRATDVDREDKLWLKPYVDLQAYEDPAQGALDFTRELDPAWLMVDTVIGEGEFGEVYRGTLRLPSQDCKTVAIKTLKDTSPGGQWWNFLREATIMGQFSHPHILHLEGVVTKRKPIMIITEFMENGALDAFLREREDQLVPGQLVAMLQGIASGMNYLSNHNYVHRDLAARNILVNQNLCCKVSDFGLTRLLDDFDGTYETQGGKIPIRWTAPEAIAHRIFTTASDVWSFGIVMWEVLSFGDKPYGEMSNQEVMKSIEDGYRLPPPVDCPAPLYELMKNCWAYDRARRPHFQKLQAHLEQLLANPHSLRTIANFDPRMTLRLPSLSGSDGIPYRTVSEWLESIRMKRYILHFHSAGLDTMECVLELTAEDLTQMGITLPGHQKRILCSIQGFKD

SEQ ID NO: 45073 - protein, 295 aa, Homo sapiens
METCAGPHPLRLFLCRMQLCLALLLGPWRPGTAEEVILLDSKASQAELGWTALPSNGWEEISGVDEHDRPIRTYQVCNVLEPNQDNWLQTGWISRGRGQRIFVELQFTLRDCSSIPGAAGTCKETFNVYYLETEADLGRGRPRLGGSRPRKIDTIAADESFTQGDLGERKMKLNTEVREIGPLSRRGFHLAFQDVGACVALVSVRVYYKQCRATVRGLATFPATAAESAFSTLVEVAGTCVAHSEGEPGSPPRMHCGADGEWLVPVGRCSCSAGFQERGDFCEGIQLAGGRGVGV

SEQ ID NO: 45074 - protein, 543 aa, Homo sapiens
MVKTGAPTVTVTNLKPATRYVFQIRAASPGPSWEAQSFNPSIEVQTLGEAASGSRDQSPAIVVTVVTISALLVLGSVMSVLAIWRRPCSYGKGGGDAHDEEELYFHFKVPTRRTFLDPQSCGDLLQAVHLFAKELDAKSVTLERSLGGGRFGELCCGCLQLPGRQELLVAVHMLRDSASDSQRLGFLAEALTLGQFDHSHIVRLEGVVTRGSTLMIVTEYMSHGALDGFLRRHEGQLVAGQLMGLLPGLASAMKYLSEMGYVHRGLAARHVLVSSDLVCKISGFGRGPRDRSEAVYTTMSGRSPALWAAPETLQFGHFSSASDVWSFGIIMWEVMAFGERPYWDMSGQDVIKAVEDGFRLPPPRNCPNLLHRLMLDCWQKDPGERPRFSQIHSILSKMVQDPEPPKCALTTCPRPPTPLADRAFSTFPSFGSVGAWLEALDLCRYKDSFAAAGYGSLEAVAEMTAQDLVSLGISLAEHREALLSGISALQARVLQLQGQGVQDNKNLSVIWCLFEWQLLDHCIAGVEGLLPPSSRTGVSRICV

SEQ ID NO: 45075 - protein, 1008 aa, Homo sapiens
METCAGPHPLRLFLCRMQLCLALLLGPWRPGTAEEVILLDSKASQAELGWTALPSNGWEEISGVDEHDRPIRTYQVCNVLEPNQDNWLQTGWISRGRGQRIFVELQFTLRDCSSIPGAAGTCKETFNVYYLETEADLGRGRPRLGGSRPRKIDTIAADESFTQGDLGERKMKLNTEVREIGPLSRRGFHLAFQDVGACVALVSVRVYYKQCRATVRGLATFPATAAESAFSTLVEVAGTCVAHSEGEPGSPPRMHCGADGEWLVPVGRCSCSAGFQERGDFCEACPPGFYKVSPRRPLCSPCPEHSRALENASTFCVCQDSYARSPTDPPSASCTRPPSAPRDLQYSLSRSPLVLRLRWLPPADSGGRSDVTYSLLCLRCGREGPAGACEPCGPRVAFLPRQAGLRERAATLLHLRPGARYTVRVAALNGVSGPAAAAGTTYAQVTVSTGPGAPWEEDEIRRDRVEPQSVSLSWREPIPAGAPGANDTEYEIRYYEKGQSEQTYSMVKTGAPTVTVTNLKPATRYVFQIRAASPGPSWEAQSFNPSIEVQTLGEAASGSRDQSPAIVVTVVTISALLVLGSVMSVLAIWRRPCSYGKGGGDAHDEEELYFHFKVPTRRTFLDPQSCGDLLQAVHLFAKELDAKSVTLERSLGGGRFGELCCGCLQLPGRQELLVAVHMLRDSASDSQRLGFLAEALTLGQFDHSHIVRLEGVVTRGSTLMIVTEYMSHGALDGFLRRHEGQLVAGQLMGLLPGLASAMKYLSEMGYVHRGLAARHVLVSSDLVCKISGFGRGPRDRSEAVYTTMSGRSPALWAAPETLQFGHFSSASDVWSFGIIMWEVMAFGERPYWDMSGQDVIKAVEDGFRLPPPRNCPNLLHRLMLDCWQKDPGERPRFSQIHSILSKMVQDPEPPKCALTTCPRPPTPLADRAFSTFPSFGSVGAWLEALDLCRYKDSFAAAGYGSLEAVAEMTAQDLVSLGISLAEHREALLSGISALQARVLQLQGQGVQV

SEQ ID NO: 45076 - protein, 1014 aa, Homo sapiens
METCAGPHPLRLFLCRMQLCLALLLGPWRPGTAEEVILLDSKASQAELGWTALPSNGWEEISGVDEHDRPIRTYQVCNVLEPNQDNWLQTGWISRGRGQRIFVELQFTLRDCSSIPGAAGTCKETFNVYYLETEADLGRGRPRLGGSRPRKIDTIAADESFTQGDLGERKMKLNTEVREIGPLSRRGFHLAFQDVGACVALVSVRVYYKQCRATVRGLATFPATAAESAFSTLVEVAGTCVAHSEGEPGSPPRMHCGADGEWLVPVGRCSCSAGFQERGDFCEACPPGFYKVSPRRPLCSPCPEHSRALENASTFCVCQDSYARSPTDPPSASCTRPPSAPRDLQYSLSRSPLVLRLRWLPPADSGGRSDVTYSLLCLRCGREGPAGACEPCGPRVAFLPRQAGLRERAATLLHLRPGARYTVRVAALNGVSGPAAAAGTTYAQVTVSTGPGAPWEEDEIRRDRVEPQSVSLSWREPIPAGAPGANDTEYEIRYYEKGQSEQTYSMVKTGAPTVTVTNLKPATRYVFQIRAASPGPSWEAQSFNPSIEVQTLGEAASGSRDQSPAIVVTVVTISALLVLGSVMSVLAIWRRPCSYGKGGGDAHDEEELYFHFKVPTRRTFLDPQSCGDLLQAVHLFAKELDAKSVTLERSLGGGRFGELCCGCLQLPGRQELLVAVHMLRDSASDSQRLGFLAEALTLGQFDHSHIVRLEGVVTRGSTLMIVTEYMSHGALDGFLRRHEGQLVAGQLMGLLPGLASAMKYLSEMGYVHRGLAARHVLVSSDLVCKISGFGRGPRDRSEAVYTTMSGRSPALWAAPETLQFGHFSSASDVWSFGIIMWEVMAFGERPYWDMSGQDVIKAVEDGFRLPPPRNCPNLLHRLMLDCWQKDPGERPRFSQIHSILSKMVQDPEPPKCALTTCPRPPTPLADRAFSTFPSFGSVGAWLEALDLCRYKDSFAAAGYGSLEAVAEMTAQDLVSLGISLAEHREALLSGISALQARVLQLQGQGVQVIIKTCL

SEQ ID NO: 45077 - protein, 155 aa, Homo sapiens
MVKTGAPTVTVTNLKPATRYVFQIRAASPGPSWEAQSFNPSIEVQTLGEAASGSRDQSPAIVVTVVTISALLVLGSVMSVLAIWRRPCSYGKGGGDAHDEEELYFHFKVPTRRTFLDPQSCGDLLQAVHLFAKELDAKSVTLERSLGGGLETSPH

SEQ ID NO: 45078 - protein, 976 aa, Homo sapiens
MELQAARACFALLWGCALAAAAAAQGKEVVLLDFAAAGGELGWLTHPYGKGWDLMQNIMNDMPIYMYSVCNVMSGDQDNWLRTNWVYRGEAERIFIELKFTVRDCNSFPGGASSCKETFNLYYAESDLDYGTNFQKRLFTKIDTIAPDEITVSSDFEARHVKLNVEERSVGPLTRKGFYLAFQDIGACVALLSVRVYYKKCPELLQGLAHFPETIAGSDAPSLATVAGTCVDHAVVPPGGEEPRMHCAVDGEWLVPIGQCLCQAGYEKVEDACQACSPGFFKFEASESPCLECPEHTLPSPEGATSCECEEGFFRAPQDPASMPCTRPPSAPHYLTAVGMGAKVELRWTPPQDSGGREDIVYSVTCEQCWPESGECGPCEASVRYSEPPHGLTRTSVTVSDLEPHMNYTFTVEARNGVSGLVTSRSFRTASVSINQTEPPKVRLEGRSTTSLSVSWSIPPPQQSRVWKYEVTYRKKGDSNSYNVRRTEGFSVTLDDLAPDTTYLVQVQALTQEGQGAGSKVHEFQTLSPEGSGNLAVIGGVAVGVVLLLVLAGVGFFIHRRRKNQRARQSPEDVYFSKSEQLKPLKTYVDPHTYEDPNQAVLKFTTEIHPSCVTRQKVIGAGEFGEVYKGMLKTSSGKKEVPVAIKTLKAGYTEKQRVDFLGEAGIMGQFSHHNIIRLEGVISKYKPMMIITEYMENGALDKFLREKDGEFSVLQLVGMLRGIAAGMKYLANMNYVHRDLAARNILVNSNLVCKVSDFGLSRVLEDDPEATYTTSGGKIPIRWTAPEAISYRKFTSASDVWSFGIVMWEVMTYGERPYWELSNHEVMKAINDGFRLPTPMDCPSAIYQLMMQCWQQERARRPKFADIVSILDKLIRAPDSLKTLADFDPRVSIRLPSTSGSEGVPFRTVSEWLESIKMQQYTEHFMAAGYTAIEKVVQMTNDDIKRIGVRLPGHQKRIAYSLLGLKDQVNTVGIPI

SEQ ID NO: 45079 - protein, 983 aa, Homo sapiens
MDCQLSILLLLSCSVLDSFGELIPQPSNEVNLLDSKTIQGELGWISYPSHGWEEISGVDEHYTPIRTYQVCNVMDHSQNNWLRTNWVPRNSAQKIYVELKFTLRDCNSIPLVLGTCKETFNLYYMESDDDHGVKFREHQFTKIDTIAADESFTQMDLGDRILKLNTEIREVGPVNKKGFYLAFQDVGACVALVSVRVYFKKCPFTVKNLAMFPDTVPMDSQSLVEVRGSCVNNSKEEDPPRMYCSTEGEWLVPIGKCSCNAGYEERGFMCQACRPGFYKALDGNMKCAKCPPHSSTQEDGSMNCRCENNYFRADKDPPSMACTRPPSSPRNVISNINETSVILDWSWPLDTGGRKDVTFNIICKKCGWNIKQCEPCSPNVRFLPRQFGLTNTTVTVTDLLAHTNYTFEIDAVNGVSELSSPPRQFAAVSITTNQAAPSPVLTIKKDRTSRNSISLSWQEPEHPNGIILDYEVKYYEKQEQETSYTILRARGTNVTISSLKPDTIYVFQIRARTAAGYGTNSRKFEFETSPDSFSISGESSQVVMIAISAAVAIILLTVVIYVLIGRFCGYKSKHGADEKRLHFGNGHLKLPGLRTYVDPHTYEDPTQAVHEFAKELDATNISIDKVVGAGEFGEVCSGRLKLPSKKEISVAIKTLKVGYTEKQRRDFLGEASIMGQFDHPNIIRLEGVVTKSKPVMIVTEYMENGSLDSFLRKHDAQFTVIQLVGMLRGIASGMKYLSDMGYVHRDLAARNILINSNLVCKVSDFGLSRVLEDDPEAAYTTRGGKIPIRWTSPEAIAYRKFTSASDVWSYGIVLWEVMSYGERPYWEMSNQDVIKAVDEGYRLPPPMDCPAALYQLMLDCWQKDRNNRPKFEQIVSILDKLIRNPGSLKIITSAAARPSNLLLDQSNVDITTFRTTGDWLNGVWTAHCKEIFTGVEYSSCDTIAKISTDDMKKVGVTVVGPQKKIISSIKALETQSKNGPVPV

SEQ ID NO: 45080 - protein, 539 aa, Homo sapiens
MDCQLSILLLLSCSVLDSFGELIPQPSNEVNLLDSKTIQGELGWISYPSHGWEEISGVDEHYTPIRTYQVCNVMDHSQNNWLRTNWVPRNSAQKIYVELKFTLRDCNSIPLVLGTCKETFNLYYMESDDDHGVKFREHQFTKIDTIAADESFTQMDLGDRILKLNTEIREVGPVNKKGFYLAFQDVGACVALVSVRVYFKKCPFTVKNLAMFPDTVPMDSQSLVEVRGSCVNNSKEEDPPRMYCSTEGEWLVPIGKCSCNAGYEERGFMCQACRPGFYKALDGNMKCAKCPPHSSTQEDGSMNCRCENNYFRADKDPPSMACTRPPSSPRNVISNINETSVILDWSWPLDTGGRKDVTFNIICKKCGWNIKQCEPCSPNVRFLPRQFGLTNTTVTVTDLLAHTNYTFEIDAVNGVSELSSPPRQFAAVSITTNQAAPSPVLTIKKDRTSRNSISLSWQEPEHPNGIILDYEVKYYEKQEQETSYTILRARGTNVTISSLKPDTIYVFQIRARTAAGYGTNSRKFEFETSPDCMYYFNAV

SEQ ID NO: 45081 - protein, 1037 aa, Homo sapiens
MRGSGPRGAGRRRPPSGGGDTPITPASLAGCYSAPRRAPLWTCLLLCAALRTLLASPSNEVNLLDSRTVMGDLGWIAFPKNGWEEIGEVDENYAPIHTYQVCKVMEQNQNNWLLTSWISNEGASRIFIELKFTLRDCNSLPGGLGTCKETFNMYYFESDDQNGRNIKENQYIKIDTIAADESFTELDLGDRVMKLNTEVRDVGPLSKKGFYLAFQDVGACIALVSVRVYYKKCPSVVRHLAVFPDTITGADSSQLLEVSGSCVNHSVTDEPPKMHCSAEGEWLVPIGKCMCKAGYEEKNGTCQVCRPGFFKASPHIQSCGKCPPHSYTHEEASTSCVCEKDYFRRESDPPTMACTRPPSAPRNAISNVNETSVFLEWIPPADTGGRKDVSYYIACKKCNSHAGVCEECGGHVRYLPRQSGLKNTSVMMVDLLAHTNYTFEIEAVNGVSDLSPGARQYVSVNVTTNQAAPSPVTNVKKGKIAKNSISLSWQEPDRPNGIILEYEIKYFEKDQETSYTIIKSKETTITAEGLKPASVYVFQIRARTAAGYGVFSRRFEFETTPVFAASSDQSQIPVIAVSVTVGVILLAVVIGVLLSGSCCECGCGRASSLCAVAHPSLIWRCGYSKAKQDPEEEKMHFHNGHIKLPGVRTYIDPHTYEDPNQAVHEFAKEIEASCITIERVIGAGEFGEVCSGRLKLPGKRELPVAIKTLKVGYTEKQRRDFLGEASIMGQFDHPNIIHLEGVVTKSKPVMIVTEYMENGSLDTFLKKNDGQFTVIQLVGMLRGISAGMKYLSDMGYVHRDLAARNILINSNLVCKVSDFGLSRVLEDDPEAAYTTRGGKIPIRWTAPEAIAFRKFTSASDVWSYGIVMWEVVSYGERPYWEMTNQDVIKAVEEGYRLPSPMDCPAALYQLMLDCWQKERNSRPKFDEIVNMLDKLIRNPSSLKTLVNASCRVSNLLAEHSPLGSGAYRSVGEWLEAIKMGRYTEIFMENGYSSMDAVAQVTLEDLRRLGVTLVGHQKKIMNSLQEMKVQLVNGMVPL

SEQ ID NO: 45082 - protein, 1015 aa, Homo sapiens
MRGSGPRGAGRRRPPSGGGDTPITPASLAGCYSAPRRAPLWTCLLLCAALRTLLASPSNEVNLLDSRTVMGDLGWIAFPKNGWEEIGEVDENYAPIHTYQVCKVMEQNQNNWLLTSWISNEGASRIFIELKFTLRDCNSLPGGLGTCKETFNMYYFESDDQNGRNIKENQYIKIDTIAADESFTELDLGDRVMKLNTEVRDVGPLSKKGFYLAFQDVGACIALVSVRVYYKKCPSVVRHLAVFPDTITGADSSQLLEVSGSCVNHSVTDEPPKMHCSAEGEWLVPIGKCMCKAGYEEKNGTCQVCRPGFFKASPHIQSCGKCPPHSYTHEEASTSCVCEKDYFRRESDPPTMACTRPPSAPRNAISNVNETSVFLEWIPPADTGGRKDVSYYIACKKCNSHAGVCEECGGHVRYLPRQSGLKNTSVMMVDLLAHTNYTFEIEAVNGVSDLSPGARQYVSVNVTTNQAAPSPVTNVKKGKIAKNSISLSWQEPDRPNGIILEYEIKYFEKDQETSYTIIKSKETTITAEGLKPASVYVFQIRARTAAGYGVFSRRFEFETTPVFAASSDQSQIPVIAVSVTVGVILLAVVIGVLLSGRRCGYSKAKQDPEEEKMHFHNGHIKLPGVRTYIDPHTYEDPNQAVHEFAKEIEASCITIERVIGAGEFGEVCSGRLKLPGKRELPVAIKTLKVGYTEKQRRDFLGEASIMGQFDHPNIIHLEGVVTKSKPVMIVTEYMENGSLDTFLKKNDGQFTVIQLVGMLRGISAGMKYLSDMGYVHRDLAARNILINSNLVCKVSDFGLSRVLEDDPEAAYTTRGGKIPIRWTAPEAIAFRKFTSASDVWSYGIVMWEVVSYGERPYWEMTNQDVIKAVEEGYRLPSPMDCPAALYQLMLDCWQKERNSRPKFDEIVNMLDKLIRNPSSLKTLVNASCRVSNLLAEHSPLGSGAYRSVGEWLEAIKMGRYTEIFMENGYSSMDAVAQVTLEDLRRLGVTLVGHQKKIMNSLQEMKVQLVNGMVPL

SEQ ID NO: 45083 - protein, 1004 aa, Homo sapiens
MRGSGPRGAGRRRPPSGGGDTPITPASLAGCYSAPRRAPLWTCLLLCAALRTLLASPSNEVNLLDSRTVMGDLGWIAFPKNGWEEIGEVDENYAPIHTYQVCKVMEQNQNNWLLTSWISNEGASRIFIELKFTLRDCNSLPGGLGTCKETFNMYYFESDDQNGRNIKENQYIKIDTIAADESFTELDLGDRVMKLNTEVRDVGPLSKKGFYLAFQDVGACIALVSVRVYYKKCPSVVRHLAVFPDTITGADSSQLLEVSGSCVNHSVTDEPPKMHCSAEGEWLVPIGKCMCKAGYEEKNGTCQVCRPGFFKASPHIQSCGKCPPHSYTHEEASTSCVCEKDYFRRESDPPTMACTRPPSAPRNAISNVNETSVFLEWIPPADTGGRKDVSYYIACKKCNSHAGVCEECGGHVRYLPRQSGLKNTSVMMVDLLAHTNYTFEIEAVNGVSDLSPGARQYVSVNVTTNQAAPSPVTNVKKGKIAKNSISLSWQEPDRPNGIILEYEIKYFEKDQETSYTIIKSKETTITAEGLKPASVYVFQIRARTAAGYGVFSRRFEFETTPVSVAASSDQSQIPVIAVSVTVGVILLAVVIGVLLSGSCCECGCGRASSLCAVAHPSLIWRCGYSKAKQDPEEEKMHFHNGHIKLPGVRTYIDPHTYEDPNQAVHEFAKEIEASCITIERVIGAGEFGEVCSGRLKLPGKRELPVAIKTLKVGYTEKQRRDFLGEASIMGQFDHPNIIHLEGVVTKSKPVMIVTEYMENGSLDTFLKKNDGQFTVIQLVGMLRGISAGMKYLSDMGYVHRDLAARNILINSNLVCKVSDFGLSRVLEDDPEAAYTTRGGKIPIRWTAPEAIAFRKFTSASDVWSYGIVMWEVVSYGERPYWEMTNQDVIKAVEEGYRLPSPMDCPAALYQLMLDCWQKERNSRPKFDEIVNMLDKLIRNPSSLKTLVNASCRVSNLLAEHSPLGSGAYRSVGEWLEAIKMGRYTEIFMENGYSSMDAVAQVTLE

SEQ ID NO: 45084 - protein, 1005 aa, Homo sapiens
MAPARGRLPPALWVVTAAAAAATCVSAARGEVNLLDTSTIHGDWGWLTYPAHGWDSINEVDESFQPIHTYQVCNVMSPNQNNWLRTSWVPRDGARRVYAEIKFTLRDCNSMPGVLGTCKETFNLYYLESDRDLGASTQESQFLKIDTIAADESFTGADLGVRRLKLNTEVRSVGPLSKRGFYLAFQDIGACLAILSLRIYYKKCPAMVRNLAAFSEAVTGADSSSLVEVRGQCVRHSEERDTPKMYCSAEGEWLVPIGKCVCSAGYEERRDACVACELGFYKSAPGDQLCARCPPHSHSAAPAAQACHCDLSYYRAALDPPSSACTRPPSAPVNLISSVNGTSVTLEWAPPLDPGGRSDITYNAVCRRCPWALSRCEACGSGTRFVPQQTSLVQASLLVANLLAHMNYSFWIEAVNGVSDLSPEPRRAAVVNITTNQAAPSQVVVIRQERAGQTSVSLLWQEPEQPNGIILEYEIKYYEKDKEMQSYSTLKAVTTRATVSGLKPGTRYVFQVRARTSAGCGRFSQAMEVETGKPRPRYDTRTIVWICLTLITGLVVLLLLLICKKRHCGYSKAFQDSDEEKMHYQNGQAPPPVFLPLHHPPGKLPEPQFYAEPHTYEEPGRAGRSFTREIEASRIHIEKIIGSGDSGEVCYGRLRVPGQRDVPVAIKALKAGYTERQRRDFLSEASIMGQFDHPNIIRLEGVVTRGRLAMIVTEYMENGSLDTFLRTHDGQFTIMQLVGMLRGVGAGMRYLSDLGYVHRDLAARNVLVDSNLVCKVSDFGLSRVLEDDPDAAYTTTGGKIPIRWTAPEAIAFRTFSSASDVWSFGVVMWEVLAYGERPYWNMTNRDVISSVEEGYRLPAPMGCPHALHQLMLDCWHKDRAQRPRFSQIVSVLDALIRSPESLRATATVSRCPPPAFVRSCFDLRGGSGGGGGLTVGDWLDSIRMGRYRDHFAAGGYSSLGMVLRMNAQDVRALGITLMGHQKKILGSIQTMRAQLTSTQGPRRHL

SEQ ID NO: 45085 - protein, 495 aa, Homo sapiens
MAPARGRLPPALWVVTAAAAAATCVSAARGEVNLLDTSTIHGDWGWLTYPAHGWDSINEVDESFQPIHTYQVCNVMSPNQNNWLRTSWVPRDGARRVYAEIKFTLRDCNSMPGVLGTCKETFNLYYLESDRDLGASTQESQFLKIDTIAADESFTGADLGVRRLKLNTEVRSVGPLSKRGFYLAFQDIGACLAILSLRIYYKKCPAMVRNLAAFSEAVTGADSSSLVEVRGQCVRHSEERDTPKMYCSAEGEWLVPIGKCVCSAGYEERRDACVACELGFYKSAPGDQLCARCPPHSHSAAPAAQACHCDLSYYRAALDPPSSACTRPPSAPVNLISSVNGTSVTLEWAPPLDPGGRSDITYNAVCRRCPWALSRCEACGSGTRFVPQQTSLVQASLLVANLLAHMNYSFWIEAVNGVSDLSPEPRRAAVVNITTNQAGRRRNSVPQRPGPPASPASDPSRDQSSAGDVLWAFRQVPLWPCAPHQDPELEALHCL

SEQ ID NO: 45086 - protein, 495 aa, Homo sapiens; identical to SEQ ID NO: 45085

SEQ ID NO: 45087 - protein, 984 aa, Homo sapiens
MALDYLLLLLLASAVAAMEETLMDTRTATAELGWTANPASGWEEVSGYDENLNTIRTYQVCNVFEPNQNNWLLTTFINRRGAHRIYTEMRFTVRDCSSLPNVPGSCKETFNLYYYETDSVIATKKSAFWSEAPYLKVDTIAADESFSQVDFGGRLMKVNTEVRSFGPLTRNGFYLAFQDYGACMSLLSVRVFFKKCPSIVQNFAVFPETMTGAESTSLVIARGTCIPNAEEVDVPIKLYCNGDGEWMVPIGRCTCKPGYEPENSVACKACPAGTFKASQEAEGCSHCPSNSRSPAEASPICTCRTGYYRADFDPPEVACTSVPSGPRNVISIVNETSIILEWHPPRETGGRDDVTYNIICKKCRADRRSCSRCDDNVEFVPRQLGLTECRVSISSLWAHTPYTFDIQAINGVSSKSPFPPQHVSVNITTNQAAPSTVPIMHQVSATMRSITLSWPQPEQPNGIILDYEIRYYEKEHNEFNSSMARSQTNTARIDGLRPGMVYVVQVRARTVAGYGKFSGKMCFQTLTDDDYKSELREQLPLIAGSAAAGVVFVVSLVAISIVCSRKRAYSKEAVYSDKLQHYSTGRGSPGMKIYIDPFTYEDPNEAVREFAKEIDVSFVKIEEVIGAGEFGEVYKGRLKLPGKREIYVAIKTLKAGYSEKQRRDFLSEASIMGQFDHPNIIRLEGVVTKSRPVMIITEFMENGALDSFLRQNDGQFTVIQLVGMLRGIAAGMKYLAEMNYVHRDLAARNILVNSNLVCKVSDFGLSRYLQDDTSDPTYTSSLGGKIPVRWTAPEAIAYRKFTSASDVWSYGIVMWEVMSFGERPYWDMSNQDVINAIEQDYRLPPPMDCPAALHQLMLDCWQKDRNSRPRFAEIVNTLDKMIRNPASLKTVATITAVPSQPLLDRSIPDFTAFTTVDDWLSAIKMVQYRDSFLTAGFTSLQLVTQMTSEDLLRIGITLAGHQKKILNSIHSMRVQISQSPTAMA

SEQ ID NO: 45088 - protein, 545 aa, Homo sapiens
MHQVSATMRSITLSWPQPEQPNGIILDYEIRYYEKEHNEFNSSMARSQTNTARIDGLRPGMVYVVQVRARTVAGYGKFSGKMCFQTLTDDDYKSELREQLPLIAGSAAAGVVFVVSLVAISIVCSRKRAYSKEAVYSDKLQHYSTGRGSPGMKIYIDPFTYEDPNEAVREFAKEIDVSFVKIEEVIGAGEFGEVYKGRLKLPGKREIYVAIKTLKAGYSEKQRRDFLSEASIMGQFDHPNIIRLEGVVTKSRPVMIITEFMENGALDSFLRQNDGQFTVIQLVGMLRGIAAGMKYLAEMNYVHRDLAARNILVNSNLVCKVSDFGLSRYLQDDTSDPTYTSSLGGKIPVRWTAPEAIAYRKFTSASDVWSYGIVMWEVMSFGERPYWDMSNQDVINAIEQDYRLPPPMDCPAALHQLMLDCWQKDRNSRPRFAEIVNTLDKMIRNPASLKTVATITAVPSQPLLDRSIPDFTAFTTVDDWLSAIKMVQYRDSFLTAGFTSLQLVTQMTSEDLLRIGITLAGHQKKILNSIHSMRVQISQSPTAMA

SEQ ID NO: 45089 - protein, 998 aa, Homo sapiens
MARARPPPPPSPPPGLLPLLPPLLLLPLLLLPAGCRALEETLMDTKWVTSELAWTSHPESGWEEVSGYDEAMNPIRTYQVCNVRESSQNNWLRTGFIWRRDVQRVYVELKFTVRDCNSIPNIPGSCKETFNLFYYEADSDVASASSPFWMENPYVKVDTIAPDESFSRLDAGRVNTKVRSFGPLSKAGFYLAFQDQGACMSLISVRAFYKKCASTTAGFALFPETLTGAEPTSLVIAPGTCIPNAVEVSVPLKLYCNGDGEWMVPVGACTCATGHEPAAKESQCRPCPPGSYKAKQGEGPCLPCPPNSRTTSPAASICTCHNNFYRADSDSADSACTTVPSPPRGVISNVNETSLILEWSEPRDLGGRDDLLYNVICKKCHGAGGASACSRCDDNVEFVPRQLGLTERRVHISHLLAHTRYTFEVQAVNGVSGKSPLPPRYAAVNITTNQAAPSEVPTLRLHSSSGSSLTLSWAPPERPNGVILDYEMKYFEKSEGIASTVTSQMNSVQLDGLRPDARYVVQVRARTVAGYGQYSRPAEFETTSERGSGAQQLQEQLPLIVGSATAGLVFVVAVVVIAIVCLRKQRHGSDSEYTEKLQQYIAPGMKVYIDPFTYEDPNEAVREFAKEIDVSCVKIEEVIGAGEFGEVCRGRLKQPGRREVFVAIKTLKVGYTERQRRDFLSEASIMGQFDHPNIIRLEGVVTKSRPVMILTEFMENCALDSFLRLNDGQFTVIQLVGMLRGIAAGMKYLSEMNYVHRDLAARNILVNSNLVCKVSDFGLSRFLEDDPSDPTYTSSLGGKIPIRWTAPEAIAYRKFTSASDVWSYGIVMWEVMSYGERPYWDMSNQDVINAVEQDYRLPPPMDCPTALHQLMLDCWVRDRNLRPKFSQIVNTLDKLIRNAASLKVIASAQSGMSQPLLDRTVPDYTTFTTVGDWLDAIKMGRYKESFVSAGFASFDLVAQMTAEDLLRIGVTLAGHQKKILSSIQDMRLQMNQTLPVQV

SEQ ID NO: 45090 - protein, 1021 aa, Homo sapiens
MATEGAAQLGNRVAGMVCSLWVLLLVSSVLALEEVLLDTTGETSEIGWLTYPPGGWDEVSVLDDQRRLTRTFEACHVAGAPPGTGQDNWLQTHFVERRGAQRAHIRLHFSVRACSSLGVSGGTCRETFTLYYRQAEEPDSPDSVSSWHLKRWTKVDTIAADESFPSSSSSSSSSSSAAWAVGPHGAGQRAGLQLNVKERSFGPLTQRGFYVAFQDTGACLALVAVRLFSYTCPAVLRSFASFPETQASGAGGASLVAAVGTCVAHAEPEEDGVGGQAGGSPPRLHCNGEGKWMVAVGGCRCQPGYQPARGDKACQACPRGLYKSSAGNAPCSPCPARSHAPNPAAPVCPCLEGFYRASSDPPEAPCTGPPSAPQELWFEVQGSALMLHWRLPRELGGRGDLLFNVVCKECEGRQEPASGGGGTCHRCRDEVHFDPRQRGLTESRVLVGGLRAHVPYILEVQAVNGVSELSPDPPQAAAINVSTSHEVPSAVPVVHQVSRASNSITVSWPQPDQTNGNILDYQLRYYDQAEDESHSFTLTSETNTATVTQLSPGHIYGFQVRARTAAGHGPYGGKVYFQTLPQGELSSQLPERLSLVIGSILGALAFLLLAAITVLAVVFQRKRRGTGYTEQLQQYSSPGLGVKYYIDPSTYEDPCQAIRELAREVDPAYIKIEEVIGTGSFGEVRQGRLQPRGRREQTVAIQALWAGGAESLQMTFLGRAAVLGQFQHPNILRLEGVVTKSRPLMVLTEFMELGPLDSFLRQREGQFSSLQLVAMQRGVAAAMQYLSSFAFVHRSLSAHSVLVNSHLVCKVARLGHSPQGPSCLLRWAAPEVIAHGKHTTSSDVWSFGILMWEVMSYGERPYWDMSEQEVLNAIEQEFRLPPPPGCPPGLHLLMLDTWQKDRARRPHFDQLVAAFDKMIRKPDTLQAGGDPGERPSQALLTPVALDFPCLDSPQAWLSAIGLECYQDNFSKFGLCTFSDVAQLSLEDLPALGITLAGHQKKLLHHIQLLQQHLRQQGSVEV

SEQ ID NO: 45091 - protein, 744 aa, Homo sapiens
MATEGAAQLGNRVAGMVSVGGCRCQPGYQPARGDKACQACPRGLYKSSAGNAPCSPCPARSHAPNPAAPVCPCLEGFYRASSDPPEAPCTGPPSAPQELWFEVQGSALMLHWRLPRELGGRGDLLFNVVCKECEGRQEPASGGGGTCHRCRDEVHFDPRQRGLTESRVLVGGLRAHVPYILEVQAVNGVSELSPDPPQAAAINVSTSHEVPSAVPVVHQVSRASNSITVSWPQPDQTNGNILDYQLRYYDQAEDESHSFTLTSETNTATVTQLSPGHIYGFQVRARTAAGHGPYGGKVYFQTLPQGELSSQLPERLSLVIGSILGALAFLLLAAITVLAVVFQRKRRGTGYTEQLQQYSSPGLGVKYYIDPSTYEDPCQAIRELAREVDPAYIKIEEVIGTGSFGEVRQGRLQPRGRREQTVAIQALWAGGAESLQMTFLGRAAVLGQFQHPNILRLEGVVTKSRPLMVLTEFMELGPLDSFLRQREGQFSSLQLVAMQRGVAAAMQYLSSFAFVHRSLSAHSVLVNSHLVCKVARLGHSPQGPSCLLRWAAPEVIAHGKHTTSSDVWSFGILMWEVMSYGERPYWDMSEQEVLNAIEQEFRLPPPPGCPPGLHLLMLDTWQKDRARRPHFDQLVAAFDKMIRKPDTLQAGGDPGERPSQALLTPVALDFPCLDSPQAWLSAIGLECYQDNFSKFGLCTFSDVAQLSLEDLPALGITLAGHQKKLLHHIQLLQQHLRQQGSVEV

SEQ ID NO: 45092 - protein, 1021 aa, Homo sapiens; identical to SEQ ID NO: 45090

SEQ ID NO: 45093 - protein, 213 aa, Homo sapiens
MAPAQRPLLPLLLLLLPLPPPPFARAEDAARANSDRYAVYWNRSNPRFHAGAGDDGGGYTVEVSINDYLDIYCPHYGAPLPPAERMEHYVLYMVNGEGHASCDHRQRGFKRWECNRPAAPGGPLKFSEKFQLFTPFSLGFEFRPGHEYYYISATPPNAVDRPCLRLKVYVRPTNETLYEAPEPIFTSNNSCSSPGGCRLFLSTIPVLWTLLGS

SEQ ID NO: 45094 - protein, 238 aa, Homo sapiens
MAAAPLLLLLLLVPVPLLPLLAQGPGGALGNRHAVYWNSSNQHLRREGYTVQVNVNDYLDIYCPHYNSSGVGPGAGPGPGGGAEQYVLYMVSRNGYRTCNASQGFKRWECNRPHAPHSPIKFSEKFQRYSAFSLGYEFHAGHEYYYISTPTHNLHWKCLRMKVFVCCASTSHSGEKPVPTLPQFTMGPNVKINVLEDFEGENPQVPKLEKSISGTSPKREHLPLAVGIAFFLMTFLAS

SEQ ID NO: 45095 - protein, 212 aa, Homo sapiens
MAAAPLLLLLLLVPVPLLPLLAQGPGGALGNRHAVYWNSSNQHLRREGYTVQVNVNDYLDIYCPHYNSSGVGPGAGPGPGGGAEQYVLYMVSRNGYRTCNASQGFKRWECNRPHAPHSPIKFSEKFQRYSAFSLGYEFHAGHEYYYISTPTHNLHWKCLRMKVFVCCASKDFEGENPQVPKLEKSISGTSPKREHLPLAVGIAFFLMTFLAS

SEQ ID NO: 45096 - protein, 233 aa, Homo sapiens
MRLLPLLRTVLWAAFLGSPLRGGSSLRHVVYWNSSNPSLRREGYTVQVNVNDYLDIYCPHYNSSGVGPGAGPGPGGGAEQYVLYMVSRNGYRTCNASQGFKRWECNRPHAPHSPIKFSEKFQRYSAFSLGYEFHAGHEYYYISTPTHNLHWKCLRMKVFVCCASTSHSGEKPVPTLPQFTMGPNVKINVLEDFEGENPQVPKLEKSISGTSPKREHLPLAVGIAFFLMTFLAS

SEQ ID NO: 45097 - protein, 193 aa, Homo sapiens
MRLLPLLRTVLWAAFLGSPLRGGSSLRHVVYWNSSNPRLLRGDAVVELGLNDYLDIVCPHYEGPGPPEGPETFALYMVDWPGYESCQAEGPRAYKRWVCSLPFGHVQFSEKIQRFTPFSLGFEFLPGETYYYISVPTPESSGQCLRLQVSVCCKERNLPSHPKEPESSQDPLEEEGSLLPALGVPIQTDKMEH

SEQ ID NO: 45098 - protein, 201 aa, Homo sapiens
MRLLPLLRTVLWAAFLGSPLRGGSSLRHVVYWNSSNPRLLRGDAVVELGLNDYLDIVCPHYEGPGPPEGPETFALYMVDWPGYESCQAEGPRAYKRWVCSLPFGHVQFSEKIQRFTPFSLGFEFLPGETYYYISVPTPESSGQCLRLQVSVCCKERKSESAHPVGSPGESGTSGWRGGDTPSPLCLLLLLLLLILRLLRIL

SEQ ID NO: 45099 - protein, 207 aa, Homo sapiens
MRLLPLLRTVLWAAFLGSPLRGGSSLRHVVYWNSSNPRLLRGDAVVELGLNDYLDIVCPHYEGPGPPEGPETFALYMVDWPGYESCQAEGPRAYKRWVCSLPFGHVQFSEKIQRFTPFSLGFEFLPGETYYYISVPTPESSGQCLRLQVSVCCKERRARVLPRSPGGGGIPAACTGGANSDRQDGALMGEIRGSEVTLAGACPLITG

SEQ ID NO: 45100 - protein, 346 aa, Homo sapiens
MARPGQRWLGKWLVAMVVWALCRLATPLAKNLEPVSWSSLNPKFLSGKGLVIYPKIGDKLDIICPRAEAGRPYEYYKLYLVRPEQAAACSTVLDPNVLVTCNRPEQEIRFTIKFQEFSPNYMGLEFKKHHDYYITSTSNGSLEGLENREGGVCRTRTMKIIMKVGQDPNAVTPEQLTTSRPSKEADNTVKMATQAPGSRGSLGDSDGKHETVNQEEKSGPGASGGSSGDPDGFFNSKVALFAAVGAGCVIFLLIIIFLTVLLLKLRKRHRKHTQQRAAALSLSTLASPKGGSGTAGTEPSDIIIPLRTTENNYCPHYEKVSGDYGHPVYIVQEMPPQSPANIYYKV

SEQ ID NO: 45101 - protein, 340 aa, Homo sapiens
MGPPHSGPGGVRVGALLLLGVLGLVSGLSLEPVYWNSANKRFQAEGGYVLYPQIGDRLDLLCPRARPPGPHSSPNYEFYKLYLVGGAQGRRCEAPPAPNLLLTCDRPDLDLRFTIKFQEYSPNLWGHEFRSHHDYYIIATSDGTREGLESLQGGVCLTRGMKVLLRVGQSPRGGAVPRKPVSEMPMERDRGAAHSLEPGKENLPGDPTSNATSRGAEGPLPPPSMPAVAGAAGGLALLLLGVAGAGGAMCWRRRRAKPSESRHPGPGSFGRGGSLGLGGGGGMGPREAEPGELGIALRGGGAADPPFCPHYEKVSGDYGHPVYIVQDGPPQSPPNIYYKV

SEQ ID NO: 45102 - protein, 259 aa, Homo sapiens
MAAAAQLSLTQLSSGNPVYEKYYRQVDTGNTGRVLASDAAAFLKKSGLPDLILGKIWDLADTDGKGILNKQEFFVALRLVACAQNGLEVSLSSLNLAVPPPRFHDTSSPLLISGTSAAELPWAVKPEDKAKYDAIFDSLSPVNGFLSGDKVKPVLLNSKLPVDILGRVWELSDIDHDGMLDRDEFAVTESHSVTQAGVQWRDLSSLQPRPPGFKLFFHLSLLRSWDYRHAPPPPANFYIFSRDSVSPCLPDWSRAPDNR

SEQ ID NO: 45103 - protein, 762 aa, Homo sapiens
MAAAAQLSLTQLSSGNPVYEKYYRQVDTGNTGRVLASDAAAFLKKSGLPDLILGKIWDLADTDGKGILNKQEFFVALRLVACAQNGLEVSLSSLNLAVPPPRFHDTSSPLLISGTSAAELPWAVKPEDKAKYDAIFDSLSPVNGFLSGDKVKPVLLNSKLPVDILGRVWELSDIDHDGMLDRDEFAVAMFLVYCALEKEPVPMSLPPALVPPSKRKTWVVSPAEKAKYDEIFLKTDKDMDGFVSGLEVREIFLKTGLPSTLLAHIWSLCDTKDCGKLSKDQFALAFHLISQKLIKGIDPPHVLTPEMIPPSDRASLQKNIIGSSPVADFSAIKELDTLNNEIVDLQREKNNVEQDLKEKEDTIKQRTSEVQDLQDEVQRENTNLQKLQAQKQQVQELLDELDEQKAQLEEQLKEVRKKCAEEAQLARSSPELLPSGVTDENEVTTAVTEKVCSELDNNRHSKEEDPFNVDSSSLTGPVADTNLDFFQSDPFVGSDPFKDDPFGKIDPFGGDPFKGSDPFASDCFFRQSTDPFATSSTDPFSAANNSSITSVETLKHNDPFAPGGTVVAASDSATDPFASVFGNESFGGGFADFSTLSKVNNEDPFRSATSSSVSNVVITKNVFEETSVKSEDEPPALPPKIGTPTRPCPLPPGKRSINKLDSPDPFKLNDPFQPFPGNDSPKEKDPEIFCDPFTSATTTTNKEADPSNFANFSAYPSEEDMIEWAKRESEREEEQRLARLNQQEQEDLELAIALSKSEISEA

SEQ ID NO: 45104 - protein, 896 aa, Homo sapiens
MAAAAQLSLTQLSSGNPVYEKYYRQVDTGNTGRVLASDAAAFLKKSGLPDLILGKIWDLADTDGKGILNKQEFFVALRLVACAQNGLEVSLSSLNLAVPPPRFHDTSSPLLISGTSAAELPWAVKPEDKAKYDAIFDSLSPVNGFLSGDKVKPVLLNSKLPVDILGRVWELSDIDHDGMLDRDEFAVAMFLVYCALEKEPVPMSLPPALVPPSKRKTWVVSPAEKAKYDEIFLKTDKDMDGFVSGLEVREIFLKTGLPSTLLAHIWSLCDTKDCGKLSKDQFALAFHLISQKLIKGIDPPHVLTPEMIPPSDRASLQKNIIGSSPVADFSAIKELDTLNNEIVDLQREKNNVEQDLKEKEDTIKQRTSEVQDLQDEVQRENTNLQKLQAQKQQVQELLDELDEQKAQLEEQLKEVRKKCAEEAQLISSLKAELTSQESQISTYEEELAKAREELSRLQQETAELEESVESGKAQLEPLQQHLQDSQQEISSMQMKLMEMKDLENHNSQLNWCSSPHSILVNGATDYCSLSTSSSETANLNEHVEGQSNLESEPIHQESPARSSPELLPSGVTDENEVTTAVTEKVCSELDNNRHSKEEDPFNVDSSSLTGPVADTNLDFFQSDPFVGSDPFKDDPFGKIDPFGGDPFKGSDPFASDCFFRQSTDPFATSSTDPFSAANNSSITSVETLKHNDPFAPGGTVVAASDSATDPFASVFGNESFGGGFADFSTLSKVNNEDPFRSATSSSVSNVVITKNVFEETSVKSEDEPPALPPKIGTPTRPCPLPPGKRSINKLDSPDPFKLNDPFQPFPGNDSPKEKDPEIFCDPFTSATTTTNKEADPSNFANFSAYPSEEDMIEWAKRESEREEEQRLARLNQQEQEDLELAIALSKSEISEA

SEQ ID NO: 45105 - protein, 573 aa, Homo sapiens
MILMVRDCLKSQHRDPHCDPSDKREKNNVEQDLKEKEDTIKQRTSEVQDLQDEVQRENTNLQKLQAQKQQVQELLDELDEQKAQLEEQLKEVRKKCAEEAQLISSLKAELTSQESQISTYEEELAKAREELSRLQQETAELEESVESGKAQLEPLQQHLQDSQQEISSMQMKLMEMKDLENHNSQLNWCSSPHSILVNGATDYCSLSTSSSETANLNEHVEGQSNLESEPIHQESPARSSPELLPSGVTDENEVTTAVTEKVCSELDNNRHSKEEDPFNVDSSSLTGPVADTNLDFFQSDPFVGSDPFKDDPFGKIDPFGGDPFKGSDPFASDCFFRQSTDPFATSSTDPFSAANNSSITSVETLKHNDPFAPGGTVVAASDSATDPFASVFGNESFGGGFADFSTLSKVNNEDPFRSATSSSVSNVVITKNVFEETSVKSEDEPPALPPKIGTPTRPCPLPPGKRSINKLDSPDPFKLNDPFQPFPGNDSPKEKDPEIFCDPFTSATTTTNKEADPSNFANFSAYPSEEDMIEWAKRESEREEEQRLARLNQQEQEDLELAIALSKSEISEA

SEQ ID NO: 45106 - protein, 822 aa, Homo sapiens
MNGHISNHPSSFGMYPSQMNGYGSSPTFSQTDREHGSKTSAKALYEQRKNYARDSVSSVSDISQYRVEHLTTFVLDRKDAMITVDDGIRKLKLLDAKGKVWTQDMILQVDDRAVSLIDLESKNELENFPLNTIQHCQAVMHSCSYDSVLALVCKEPTQNKPDLHLFQCDEVKANLISEDIESAISDSKGGKQKRRPDALRMISNADPSIPPPPRAPAPAPPGTVTQVDVRSRVAAWSAWAADQGDFEKPRQYHEQEETPEMMAARIDRDVQILNHILDDIEFFITKLQKAAEAFSELSKRKKNKKGKRKGPGEGVLTLRAKPPPPDEFLDCFQKFKHGFNLLAKLKSHIQNPSAADLVHFLFTPLNMVVQATGGPELASSVLSPLLNKDTIDFLNYTVNGDERQLWMSLGGTWMKARAEWPKEQFIPPYVPRFRNGWEPPMLNFMGATMEQDLYQLAESVANVAEHQRKQEIKRLSTEHSSVSEYHPADGYAFSSNIYTRGSHLDQGEAAVAFKPTSNRHIDRNYEPLKTQPKKYAKSKYDFVARNNSELSVLKDDILEILDDRKQWWKVRNASGDSGFVPNNILDIVRPPESGLGRADPPYTHTIQKQRMEYGPRPADTPPAPSPPPTPAPVPVPLPPSTPAPVPVSKVPANITRQNSSSSDSGGSIVRDSQRHKQLPVDRRKSQMEEVQDELIHRLTIGRSAAQKKFHVPRQNVPVINITYDSTPEDVKTWLQSKGFNPVTVNSLGVLNGAQLFSLNKDELRTVCPEGARVYSQITVQKAALEDSSGSSELQEIMRRRQEKISAAASDSGVESFDEGSSH

SEQ ID NO: 45107 - protein, 121 aa, Homo sapiens
MNGHISNHPSSFGMYPSQMNGYGSSPTFSQTDREHGSKTSAKALYEQRKNYARDSVSSVSDISQYRVEHLTTFVLDRKDAMITVDDGIRKLKLLDAKGKVWTQDMILQVDDRAVSLIDLES

SEQ ID NO: 45108 - protein, 68 aa, Homo sapiens
MNGHISNHPSSFGMYPSQMNGYGSSPTFSQTDREHGSKTSAKALYEQRKNYARDSVSSVSDISQYRVE

SEQ ID NO: 45109 - protein, 562 aa, Homo sapiens
MMAARIDRDVQILNHILDDIEFFITKLQKAAEAFSELSKRKKNKKGKRKGPGEGVLTLRAKPPPPDEFLDCFQKFKHGFNLLAKLKSHIQNPSAADLVHFLFTPLNMVVQATGGPELASSVLSPLLNKDTIDFLNYTVNGDERQLWMSLGGTWMKARAEWPKEQFIPPYVPRFRNGWEPPMLNFMGATMEQDLYQLAESVANVAEHQRKQEIKRLSTEHSSVSEYHPADGYAFSSNIYTRGSHLDQGEAAVAFKPTSNRHIDRNYEPLKTQPKKYAKSKYDFVARNNSELSVLKDDILEILDDRKQWWKVRNASGDSGFVPNNILDIVRPPESGLGRADPPYTHTIQKQRMEYGPRPADTPPAPSPPPTPAPVPVPLPPSTPAPVPVSKVPANITRQNSSSSDSGGSIVRDSQRHKQLPVDRRKSQMEEVQDELIHRLTIGRSAAQKKFHVPRQNVPVINITYDSTPEDVKTWLQSKGFNPVTVNSLGVLNGAQLFSLNKDELRTVCPEGARVYSQITVQKAALEDSSGSSELQEIMRRRQEKISAAASDSGVESFDEGSSH

SEQ ID NO: 45110 - protein, 562 aa, Homo sapiens; identical to SEQ ID NO: 45109

SEQ ID NO: 45111 - protein, 691 aa, Homo sapiens
MNGHISNHPSSFGMYPSQMNGYGSSPTFSQTDREHGSKTSAKALYEQRKNYARDSVSSVSDISQYRVEHLTTFVLDRKDAMITVDDGIRKLKLLDAKGKVWTQDMILQVDDRAVSLIDLESKNELENFPLNTIQHCQAVMHSCSYDSVLALVCKEPTQNKPDLHLFQCDEVKANLISEDIESAISDSKGGKQKRRPDALRMISNADPSIPPPPRAPAPAPPGTVTQVDVRSRVAAWSAWAADQGDFEKPRQYHEQEETPEMMAARIDRDVQILNHILDDIEFFITKLQKAAEAFSELSKRKKNKKGKRKGPGEGVLTLRAKPPPPDEFLDCFQKFKHGFNLLAKLKSHIQNPSAADLVHFLFTPLNMVVQATGGPELASSVLSPLLNKDTIDFLNYTVNGDERQLWMSLGGTWMKARAEWPKEQFIPPYVPRFRNGWEPPMLNFMGATMEQDLYQLAESVANVAEHQRKQEIKRLSTEHSSVSEYHPADGYAFSSNIYTRGSHLDQGEAAVAFKPTSNRHIDRNYEPLKTQPKKYAKSKYDFVARNNSELSVLKDDILEILDDRKQWWKVRNASGDSGFVPNNILDIVRPPESGLGRADPPYTHTIQKQRMEYGPRPADTPPAPSPPPTPAPVPVPLPPSTPAPVPVSKVPANITRQNSSSSDSGGSIVRDSQRHKTSGGPKEISDGGSAR

SEQ ID NO: 45112 - protein, 68 aa, Homo sapiens; identical to SEQ ID NO: 45108

SEQ ID NO: 45113 - protein, 822 aa, Homo sapiens; identical to SEQ ID NO: 45106

SEQ ID NO: 45114 - protein, 822 aa, Homo sapiens; identical to SEQ ID NO: 45106

SEQ ID NO: 45115 - protein, 67 aa, Homo sapiens
MNGHISNHPSSFGMYPSQMNGYGSSPTFSQTDREHGSKTSAKALYEQRKNYARDSVSSVSDISQYRV

SEQ ID NO: 45116 - protein, 128 aa, Homo sapiens
MNGHISNHPSSFGMYPSQMNGYGSSPTFSQTDREHGSKTSAKALYEQRKNYARDSVSSVSDISQYRVEHLTTFVLDRKDAMITVDDGIRKLKLLDAKGKVWTQDMILQVDDRAVSLIDLESKNELENF

SEQ ID NO: 45117 - protein, 331 aa, Homo sapiens
MRFRFGVVVPPAVAGARPELLVVGSRPELGRWEPRGAVRLRPAGTAAGDGALALQEPGLWLGEVELAAEEAAQDGAEIGATPKLPSTIFPWFVLRQGLILGNGPHHDRCCTYNENNLVDGVYCLPIGHWIEATGHTNEMKHTTDFYFNIAGHQAMHYSRILPNIWLGSCPRQVEHVTIKLKHELGITAVMNFQTEWDIVQNSSGCNRYPEPMTPDTMIKLYREEGLAYIWMPTPDMSTEGRVQMLPQAVCLLHALLEKGHIVYVHCNAGVGRSTAAVCGWLQYVMGWNLRKVQYFLMAKRPAVYIDEEALARAQEDFFQKFGKVRSSVCSL

SEQ ID NO: 45118 - protein, 331 aa, Homo sapiens
MRFRFGVVVPPAVAGARPELLVVGSRPELGRWEPRGAVRLRPAGTAAGDGALALQEPGLWLGEVELAAEEAAQDGAEPGRVDTFWYKFLKREPGGELSWEGNGPHHDRCCTYNENNLVDGVYCLPIGHWIEATGHTNEMKHTTDFYFNIAGHQAMHYSRILPNIWLGSCPRQVEHVTIKLKHELGITAVMNFQTEWDIVQNSSGCNRYPEPMTPDTMIKLYREEGLAYIWMPTPDMSTEGRVQMLPQAVCLLHALLEKGHIVYVHCNAGVGRSTAAVCGWLQYVMGWNLRKVQYFLMAKRPAVYIDEEALARAQEDFFQKFGKVRSSVCSL

SEQ ID NO: 45119 - protein, 317 aa, Homo sapiens
MRFRFGVVVPPAVAGARPELLVVGSRPELGRWEPRGAVRLRPAGTAAGDGALALQEPGLWLGEVELAAEEAAQDGAEPGRVDTFWYKFLKREPGGELSWEGNGPHHDRCCTYNENNLVDGVYCLPIGHWIEATGHTNEMKHTTDFYFNIAGHQAMHYSRILPNIWLGSCPRQVEHVTIKLKHELGITAVMNFQTEWDIVQNSSGCNRYPEPMTPDTMIKLYREEGLAYIWMPTPDMSTEGRVQMLPQAVCLLHALLEKGHIVYVHCNAGVGRSTAAVCGWLQYVMGWNLRKVQYFLMAKRPAVYIDEEAASQDTFPL

SEQ ID NO: 45120 - protein, 237 aa, Homo sapiens
  VARIANT 1: note = MOD_RES - Any amino acid
XDTFWYKFLKREPGGELSWEGNGPHHDRCCTYNENNLVDGVYCLPIGHWIEATGHTNEMKHTTDFYFNIAGHQAMHYSRILPNIWLGSCPRQVEHVTIKLKHELGITAVMNFQTEWDIVQNSSGCNRYPEPMTPDTMIKLYREEGLAYIWMPTPDMSTEGRVQMLPQAVCLLHALLEKGHIVYVHCNAGVGRSTAAVCGWLQYVMGWNLRKVQYFLMAKRPAVYIDEEAASQDTFPL

SEQ ID NO: 45121 - protein, 170 aa, Homo sapiens
  VARIANT 1: note = MOD_RES - Any amino acid
XNGPHHDRCCTYNENNLVDGVYCLPIGHWIEATGHTNEMKHTTDFYFNIAGHQAMHYSRILPNIWLGSCPRQVEHVTIKLKHELGITAVMNFQTEWDIVQNSSGCNRYPEPMTPDTMIKLYREEGLAYIWMPTPDMSTEDEKRTADMCCSGMWEETADFGLGILDYLKQK

SEQ ID NO: 45122 - protein, 270 aa, Homo sapiens
MRFRFGVVVPPAVAGARPELLVVGSRPELGRWEPRGAVRLRPAGTAAGDGALALQEPGLWLGEVELAAEEAAQDGAEPGRVDTFWYKFLKREPGGELSWEGNGPHHDRCCTYNENNLVDGVYCLPIGHWIEATGHTNEMKHTTDFYFNIAGHQAMHYSRILPNIWLGSCPRQVEHVTIKLKHELGITAVMNFQTEWDIVQNSSGCNRYPEPMTPDTMIKLYREEGLAYIWMPTPDMSTEDEKRTADMCCSGMWEETADFGLGILDYLKQK

SEQ ID NO: 45123 - protein, 314 aa, Homo sapiens
MAPPQVLAFGLLLAAATATFAAAQEECVCENYKLAVNCFVNNNRQCQCTSVGAQNTVICSKLAAKCLVMKAEMNGSKLGRRAKPEGALQNNDGLYDPDCDESGLFKAKQCNGTSMCWCVNTAGVRRTDKDTEITCSERVRTYWIIIELKHKAREKPYDSKSLRTALQKEITTRYQLDPKFITSILYENNVITIDLVQNSSQKTQNDVDIADVAYYFEKDVKGESLFHSKKMDLTVNGEQLDLDPGQTLIYYVDEKAPEFSMQGLKAGVIAVIVVVVIAVVAGIVVLVISRKKRMAKYEKAEIKEMGEMHRELNA

SEQ ID NO: 45124 - protein, 157 aa, Homo sapiens
MLVLLAGIFVVHIATVIMLFVSTIANVWLVSNTVDASVGLWKNCTNISCSDSLSYASEDALKTVQAFMILSIIFCVIALLVFVFQLFTMEKGNRFFLSGATTLVCWLCILVGVSIYTSHYANRDGTQYHHGYSYILGWICFCFSFIIGVLYLVLRKK

SEQ ID NO: 45125 - protein, 141 aa, Homo sapiens
MLVLLAGIFVVHIATVIMLFVSTIANVWLVSNTVDASVGLWKNCTNISCSDSLSYASEDALKTVQAFMILSIIFCVIALLVFVFQLFTMEKGNRFFLSGATTLVCFIMRIVMERSITTAIPTSWAGSASASASSSAFSIWS

SEQ ID NO: 45126 - skipped

SEQ ID NO: 45127 - protein, 167 aa, Homo sapiens
MLVLLAFIIAFHITSAALLFIATVDNAWWVGDEFFADVWRICTNNTNCTVINDSFQEYSTLQAVQATMILSTILCCIAFFIFVLQLFRLKQGERFVLTSIIQLMSCLCVMIAASIYTDRREDIHDKNAKFYPVTREGSYGYSYILAWVAFACTFISGMMYLILRKRK

SEQ ID NO: 45128 - protein, 167 aa, Homo sapiens; identical to SEQ ID NO: 45127

SEQ ID NO: 45129 - protein, 163 aa, Homo sapiens
MSLLLLVVSALHILILILLFVATLDKSWWTLPGKESLNLWYDCTWNNDTKTWACSNVSENGWLKAVQVLMVLSLILCCLSFILFMFQLYTMRRGGLFYATGLCQLCTSVAVFTGALIYAIHAEEILEKHPRGGSFGYCFALAWVAFPLALVSGIIYIHLRKRE

SEQ ID NO: 45130 - protein, 677 aa, Homo sapiens
MTASPDYLVVLFGITAGATGAKLGSDEKELILLFWKVVDLANKKVGQLHEVLVRPDQLELTEDCKEETKIDVESLSSASQLDQALRQFNQSVSNELNIGVGTSFCLCTDGQLHVRQILHPEASKKNVLLPECFYSFFDLRKEFKKCCPGSPDIDKLDVATMTEYLNFEKSSSVSRYGASQVEDMGNIILAMISEPYNHRFSDPERVNYKFESGTCSKMELIDDNTVVRARGLPWQSSDQDIARFFKGLNIAKGGAALCLNAQGRRNGEALVRFVSEEHRDLALQRHKHHMGTRYIEVYKATGEDFLKIAGGTSNEVAQFLSKENQVIVRMRGLPFTATAEEVVAFFGQHCPITGGKEGILFVTYPDGRPTGDAFVLFACEEYAQNALRKHKDLLGKRYIELFRSTAAEVQQVLNRFSSAPLIPLPTPPIIPVLPQQFVPPTNVRDCIRLRGLPYAATIEDILDFLGEFATDIRTHGVHMVLNHQGRPSGDAFIQMKSADRAFMAAQKCHKKNMKDRYVEVFQCSAEEMNFVLMGGTLNRNGLSPPPCLSPPSYTFPAPAAVIPTEAAIYQPSVILNPRALQPSTAYYPAGTQLFMNYTAYYPSPPGSPNSLGYFPTAANLSGVPPQPGTVVRMQGLAYNTGVKEILNFFQGYQYATEDGLIHTNDQARTLPKEWVCI

SEQ ID NO: 45131 - protein, 659 aa, Homo sapiens
MTASPDYLVVLFGITAGATGAKLGSDEKELILLFWKVVDLANKKVGQLHEVLVRPDQLELTEDCKEETKIDVESLSSASQLDQALRQFNQSVSNELNIGVGTSFCLCTDGQLHVRQILHPEASKKNVLLPECFYSFFDLRKEFKKCCPGSPDIDKLDVATMTEYLNFEKSSSVSRYGASQVEDMGNIILAMISEPYNHRFSDPERVNYKFESGTCSKMELIDDNTVVRARGLPWQSSDQDIARFFKGLNIAKGGAALCLNAQGRRNGEALVRFVSEEHRDLALQRHKHHMGTRYIEVYKATGEDFLKIAGGTSNEVAQFLSKENQVIVRMRGLPFTATAEEVVAFFGQHCPITGGKEGILFVTYPDGRPTGDAFVLFACEEYAQNALRKHKDLLGKRYIELFRSTAAEVQQVLNRFSSAPLIPLPTPPIIPVLPQQFVPPTNVRDCIRLRGLPYAATIEDILDFLGEFATDIRTHGVHMVLNHQGRPSGDAFIQMKSADRAFMAAQKCHKKNMKDRYVEVFQCSAEEMNFVLMGGTLNRNGLSPPPCLSPPSYTFPAPAAVIPTEAAIYQPSVILNPRALQPSTAYYPAGTQLFMNYTAYYPSPPGSPNSLGYFPTAANLSGVPPQPGTVVRMQGLAYNTGVKEILNFFQGYQCLKDVW

SEQ ID NO: 45132 - protein, 681 aa, Homo sapiens
MTASPDYLVVLFGITAGATGAKLGSDEKELILLFWKVVDLANKKVGQLHEVLVRPDQLELTEDCKEETKIDVESLSSASQLDQALRQFNQSVSNELNIGVGTSFCLCTDGQLHVRQILHPEASKKNVLLPECFYSFFDLRKEFKKCCPGSPDIDKLDVATMTEYLNFEKSSSVSRYGASQVEDMGNIILAMISEPYNHRFSDPERVNYKFESGTCSKMELIDDNTVVRARGLPWQSSDQDIARFFKGLNIAKGGAALCLNAQGRRNGEALVRFVSEEHRDLALQRHKHHMGTRYIEVYKATGEDFLKIAGGTSNEVAQFLSKENQVIVRMRGLPFTATAEEVVAFFGQHCPITGGKEGILFVTYPDGRPTGDAFVLFACEEYAQNALRKHKDLLGKRYIELFRSTAAEVQQVLNRFSSAPLIPLPTPPIIPVLPQQFVPPTNVRDCIRLRGLPYAATIEDILDFLGEFATDIRTHGVHMVLNHQGRPSGDAFIQMKSADRAFMAAQKCHKKNMKDRYVEVFQCSAEEMNFVLMGGTLNRNGLSPPPCKLPCLSPPSYTFPAPAAVIPTEAAIYQPSVILNPRALQPSTAYYPAGTQLFMNYTAYYPSPPGSPNSLGYFPTAANLSGVPPQPGTVVRMQGLAYNTGVKEILNFFQGYQYATEDGLIHTNDQARTLPKEWVCI

SEQ ID NO: 45133 - protein, 608 aa, Homo sapiens
MTASPDYLVVLFGITAGATGAKLGSDEKELILLFWKVVDLANKKVGQLHEVLVRPDQLELTEDCKEETKIDVESLSSASQLDQALRQFNQSVSNELNIGVGTSFCLCTDGQLHVRQILHPEASKKNVLLPECFYSFFDLRKEFKKCCPGSPDIDKLDVATMTEYLNFEKSSSVSRYGASQVEDMGNIILAMISEPYNHRFSDPERVNYKFESGTCSKMELIDDNTVVRARGLPWQSSDQDIARFFKGLNIAKGGAALCLNAQGRRNGEALVRFVSEEHRDLALQRHKHHMGTRYIEVYKATGEDFLKIAGGTSNEVAQFLSKENQVIVRMRGLPFTATAEEVVAFFGQHCPITGGKEGILFVTYPDGRPTGDAFVLFACEEYAQNALRKHKDLLGKRYIELFRSTAAEVQQVLNRFSSAPLIPLPTPPIIPVLPQQFVPPTNVRDCIRLRGLPYAATIEDILDFLGEFATDIRTHGVHMVLNHQGRPSGDAFIQMKSADRAFMAAQKCHKKNMKDRYVEVFQCSAEEMNFVLMGGTLNRNGLSPPPCKLPCLSPPSYTFPAPAAVIPTEAAIYQPSVILNPRALQPSTAYYPAGTQLFMNYTAYYPSV

SEQ ID NO: 45134 - protein, 717 aa, Homo sapiens
MTPPPPPPPPPGPDPAADPAADPCPWPGSLVVLFGATAGALGRDLGSDETDLILLVWQVVEPRSRQVGTLHKSLVRAEAAALSTQCREASGLSADSLARAEPLDKVLQQFSQLVNGDVALLGGGPYMLCTDGQQLLRQVLHPEASRKNLVLPDMFFSFYDLRREFHMQHPSTCPARDLTVATMAQGLGLETDATEDDFGVWEVKTMVAVILHLLKEPSSQLFSKPEVIKQKYETGPCSKADVVDSETVVRARGLPWQSSDQDVARFFKGLNVARGGVALCLNAQGRRNGEALIRFVDSEQRDLALQRHKHHMGVRYIEVYKATGEEFVKIAGGTSLEVARFLSREDQVILRLRGLPFSAGPTDVLGFLGPECPVTGGTEGLLFVRHPDGRPTGDAFALFACEELAQAALRRHKGMLGKRYIELFRSTAAEVQQVLNRYASGPLLPTLTAPLLPIPFPLAPGTGRDCVRLRGLPYTATIEDILSFLGEAAADIRPHGVHMVLNQQGRPSGDAFIQMTSAERALAAAQRCHKKVMKERYVEVVPCSTEEMSRVLMGGTLGRSGMSPPPCKLPCLSPPTYTTFQATPTLIPTETAALYPSSALLPAARVPAAPTPVAYYPGPATQLYLNYTAYYPSPPVSPTTVGYLTTPTAALASAPTSVLSQSGALVRMQGVPYTAGMKDLLSVFQAYQLPADDYTSLMPVGDPPRTVLQAPKEWVCL

SEQ ID NO: 45135 - protein, 307 aa, Homo sapiens
MNTRNRVVNSGLGASPASRPTRDPQDPSGRQGELSPVEDQREGLEAAPKGPSRESVVHAGQRRTSAYTLIAPNINRRNEIQRIAEQELANLEKWKEQNRAKPVHLVPRRLGGSQSETEVRQKQQLQLMQSKYKQKLKREESVRIKKEAEEAELQKMKAIQREKSNKLEEKKRLQENLRREAFREHQQYKTAEFLSKLNTESPDRSACQSAVCGPQSSTWARSWAYRDSLKAEENRKLQKMKDEQHQKSELLELKRQQQEQERAKIHQTEHRRVNNAFLDRLQGKSQPGGLEQSGGCWNMNSGNSWGI

SEQ ID NO: 45136 - protein, 410 aa, Homo sapiens
MNTRNRVVNSGLGASPASRPTRDPQDPSGRQGELSPVEDQREGLEAAPKGPSRESVVHAGQRRTSAYTLIAPNINRRNEIQRIAEQELANLEKWKEQNRAKPVHLVPRRLGGSQSETEVRQKQQLQLMQSKYKQKLKREESVRIKKEAEEAELQKMKAIQREKSNKLEEKKRLQENLRREAFREHQQYKTAEFLSKLNTESPDRSACQSAVCGPQSSTWKLPILPRDHSWARSWAYRDSLKAEENRKLQKMKDEQHQKSELLELKRQQQEQERAKIHQTEHRRVNNAFLDRLQGKSQPGGLEQSGGCWNMNSGNSWGSLLVFSRHLRVYEKILTPIWPSSTDLEKPHEMLFLNVILFSLTVFTLISTAHTLDRAVRSDWLLLVLIYACLEELIPELIFNLYCQGNATLFF

SEQ ID NO: 45137 - protein, 455 aa, Homo sapiens
MWLEILLTSVLGFAIYWFISRDKEETLPLEDGWWGPGTRSAAREDDSIRPFKVETSDEEIHDLHQRIDKFRFTPPLEDSCFHYGFNSNYLKKVISYWRNEFDWKKQVEILNRYPHFKTKIEGLDIHFIHVKPPQLPAGHTPKPLLMVHGWPGSFYEFYKIIPLLTDPKNHGLSDEHVFEVICPSIPGYGFSEASSKKGFNSVATARIFYKLMLRLGFQEFYIQGGDWGSLICTNMAQLVPSHVKGLHLNMALVLSNFSTLTLLLGQRFGRFLGLTERDVELLYPVKEKVFYSLMRESGYMHIQCTKPDTVGSALNDSPVGLAAYILEKFSTWTNTEFRYLEDGGLERKFSLDDLLTNVMLYWTTGTIISSQRFYKENLGQGWMTQKHERMKVYVPTGFSAFPFELLHTPEKWVRFKYPKLISYSYMVRGGHFAAFEEPELLAQDIRKFLSVLERQ

SEQ ID NO: 45138 - protein, 455 aa, Homo sapiens; identical to SEQ ID NO: 45137

SEQ ID NO: 45139 - protein, 161 aa, Homo sapiens
MWLEILLTSVLGFAIYWFISRDKEETLPLEDGWWGPGTRSAAREDDSIRPFKVETSDEEIHDLHQRIDKFRFTPPLEDSCFHYGFNSNYLKKVISYWRNEFDWKKQVEILNRYPHFKTKIEGLDIHFIHVKPPQLPAGHTPKPLLMVHGWPGSFYEFYKII

SEQ ID NO: 45140 - protein, 136 aa, Homo sapiens
MWLEILLTSVLGFAIYWFISRDKEETLPLEDGWWGPGTRSAAREDDSIRPFKVETSDEEIHDLHQRIDKFRFTPPLEDSCFHYGFNSNYLKKVISYWRNEFDWKKQVEILNRYPHFKTKIEGLDIHFIHVKPPQLP

SEQ ID NO: 45141 - protein, 502 aa, Homo sapiens
MKGEITLSQWIPLMEENCRKCSETAKVCLPKNFSIKEIFDKAISARKINRPMLQAALMLRKKGFTTAILTNTWLDDRAERDGLAQLMCELKMHFDFLIESCQVGMVKPEPQIYKFLLDTLKASPSEVVFLDDIGANLKPARDLGMVTILVQDTDTALKELEKVTGIQLLNTPAPLPTSCNPSDMSHGYVTVKPRVRLHFVELGSGPAVCLCHGFPESWYSWRYQIPALAQAGYRVLAMDMKGYGESSAPPEIEEYCMEVLCKEMVTFLDKLGLSQAVFIGHDWGGMLVWYMALFYPERVRAVASLNTPFIPANPNMSPLESIKANPVFDYQLYFQEPGVAEAELEQNLSRTFKSLFRASDESVLSMHKVCEAGGLFVNSPEEPSLSRMVTEEEIQFYVQQFKKSGFRGPLNWYRNMERNWKWACKSLGRKILIPALMVTAEKDFVLVPQMSQHMEDWIPHLKRGHIEDCGHWTQMDKPTEVNQILIKWLDSDARNPPVVSKM

SEQ ID NO: 45142 - protein, 489 aa, Homo sapiens
MEENCRKCSETAKVCLPKNFSIKEIFDKAISARKINRPMLQAALMLRKKGFTTAILTNTWLDDRAERDGLAQLMCELKMHFDFLIESCQVGMVKPEPQIYKFLLDTLKASPSEVVFLDDIGANLKPARDLGMVTILVQDTDTALKELEKVTGIQLLNTPAPLPTSCNPSDMSHGYVTVKPRVRLHFVELGSGPAVCLCHGFPESWYSWRYQIPALAQAGYRVLAMDMKGYGESSAPPEIEEYCMEVLCKEMVTFLDKLGLSQAVFIGHDWGGMLVWYMALFYPERVRAVASLNTPFIPANPNMSPLESIKANPVFDYQLYFQEPGVAEAELEQNLSRTFKSLFRASDESVLSMHKVCEAGGLFVNSPEEPSLSRMVTEEEIQFYVQQFKKSGFRGPLNWYRNMERNWKWACKSLGRKILIPALMVTAEKDFVLVPQMSQHMEDWIPHLKRGHIEDCGHWTQMDKPTEVNQILIKWLDSDARNPPVVSKM

SEQ ID NO: 45143 - protein, 502 aa, Homo sapiens [sequence omitted]

SEQ ID NO: 45144 - protein, 555 aa, Homo sapiens
MTLRAAVFDLDGVLALPAVFGVLGRTEEALALPRGLLNDAFQKGGPEGATTRLMKGEITLSQWIPLMEENCRKCSETAKVCLPKNFSIKEIFDKAISARKINRPMLQAALMLRKKGFTTAILTNTWLDDRAERDGLAQLMCELKMHFDFLIESCQVGMVKPEPQIYKFLLDTLKASPSEVVFLDDIGANLKPARDLGMVTILVQDTDTALKELEKVTGIQLLNTPAPLPTSCNPSDMSHGYVTVKPRVRLHFVELGSGPAVCLCHGFPESWYSWRYQIPALAQAGYRVLAMDMKGYGESSAPPEIEEYCMEVLCKEMVTFLDKLGLSQAVFIGHDWGGMLVWYMALFYPERVRAVASLNTPFIPANPNMSPLESIKANPVFDYQLYFQEPGVAEAELEQNLSRTFKSLFRASDESVLSMHKVCEAGGLFVNSPEEPSLSRMVTEEEIQFYVQQFKKSGFRGPLNWYRNMERNWKWACKSLGRKILIPALMVTAEKDFVLVPQMSQHMEDWIPHLKRGHIEDCGHWTQMDKPTEVNQILIKWLDSDARNPPVVSKM

SEQ ID NO: 45145 - protein, 550 aa, Homo sapiens
MSTSSLRRQMKNIVHNYSEAEIKVREATSNDPWGPSSSLMSEIADLTYNVVAFSEIMSMIWKRLNDHGKNWRHVYKAMTLMEYLIKTGSERVSQQCKENMYAVQTLKDFQYVDRDGKDQGVNVREKAKQLVALLRDEDRLREERAHALKTKEKLAQTATASSAAVGSGPPPEAEQAWPQSSGEEELQLQLALAMSKEEADQEERIRRGDDLRLQMAIEESKRETGGKEESSLMDLADVFTAPAPAPTTDPWGGPAPMAAAVPTAAPTSDPWGGPPVPPAADPWGGPAPTPASGDPWRPAAPAGPSVDPWGGTPAPAAGEGPTPDPWGSSDGGVPVSGPSASDPWTPAPAFSDPWGGSPAKPSTNGTTAGGFDTEPDEFSDFDRLRTALPTSGSSAGELELLAGEVPARSPGAFDMSGVRGSLAEAVGSPPPAATPTPTPPTRKTPESFLGPNAALVDLDSLVSRPGPTPPGAKASNPFLPGGGPATGPSVTNPFQPAPPATLTLNQLRLSPVPPVPGAPPTYISPLGGGPGLPPMMPPGPPAPNTNPFLL

SEQ ID NO: 45146 - protein, 576 aa, Homo sapiens
MSTSSLRRQMKNIVHNYSEAEIKVREATSNDPWGPSSSLMSEIADLTYNVVAFSEIMSMIWKRLNDHGKNWRHVYKAMTLMEYLIKTGSERVSQQCKENMYAVQTLKDFQYVDRDGKDQGVNVREKAKQLVALLRDEDRLREERAHALKTKEKLAQTATASSAAVGSGPPPEAEQAWPQSSGEEELQLQLALAMSKEEADQPPSCGPEDDAQLQLALSLSREEHDKEERIRRGDDLRLQMAIEESKRETGGKEESSLMDLADVFTAPAPAPTTDPWGGPAPMAAAVPTAAPTSDPWGGPPVPPAADPWGGPAPTPASGDPWRPAAPAGPSVDPWGGTPAPAAGEGPTPDPWGSSDGGVPVSGPSASDPWTPAPAFSDPWGGSPAKPSTNGTTAAGGFDTEPDEFSDFDRLRTALPTSGSSAGELELLAGEVPARSPGAFDMSGVRGSLAEAVGSPPPAATPTPTPPTRKTPESFLGPNAALVDLDSLVSRPGPTPPGAKASNPFLPGGGPATGPSVTNPFQPAPPATLTLNQLRLSPVPPVPGAPPTYISPLGGGPGLPPMMPPGPPAPNTNPFLL

SEQ ID NO: 45147 - protein, 662 aa, Homo sapiens
MGDQSWLWNQAAPGVRSPVFACSVEKGNVPLVLSEHLAHSRDPGSGAVRFLISPEPWASAILGTSGLLASPVLPAALDAVTCQHLPQPSSGSRPISPRIGALCPLLLQPGTMSTSSLRRQMKNIVHNYSEAEIKVREATSNDPWGPSSSLMSEIADLTYNVVAFSEIMSMIWKRLNDHGKNWRHVYKAMTLMEYLIKTGSERVSQQCKENMYAVQTLKDFQYVDRDGKDQGVNVREKAKQLVALLRDEDRLREERAHALKTKEKLAQTATASSAAVGSGPPPEAEQAWPQSSGEEELQLQLALAMSKEEADQEERIRRGDDLRLQMAIEESKRETGGKEESSLMDLADVFTAPAPAPTTDPWGGPAPMAAAVPTAAPTSDPWGGPPVPPAADPWGGPAPTPASGDPWRPAAPAGPSVDPWGGTPAPAAGEGPTPDPWGSSDGGVPVSGPSASDPWTPAPAFSDPWGGSPAKPSTNGTTAAGGFDTEPDEFSDFDRLRTALPTSGSSAGELELLAGEVPARSPGAFDMSGVRGSLAEAVGSPPPAATPTPTPPTRKTPESFLGPNAALVDLDSLVSRPGPTPPGAKASNPFLPGGGPATGPSVTNPFQPAPPATLTLNQLRLSPVPPVPGAPPTYISPLGGGPGLPPMMPPGPPAPNTNPFLL

SEQ ID NO: 45148 - protein, 536 aa, Homo sapiens
MSEIADLTYNVVAFSEIMSMIWKRLNDHGKNWRHVYKAMTLMEYLIKTGSERVSQQCKENMYAVQTLKDFQYVDRDGKDQGVNVREKAKQLVALLRDEDRLREERAHALKTKEKLAQTATASSAAVGSGPPPEAEQAWPQSSGEEELQLQLALAMSKEEADQPPSCGPEDDAQLQLALSLSREEHDKEERIRRGDDLRLQMAIEESKRETGGKEESSLMDLADVFTAPAPAPTTDPWGGPAPMAAAVPTAAPTSDPWGGPPVPPAADPWGGPAPTPASGDPWRPAAPAGPSVDPWGGTPAPAAGEGPTPDPWGSSDGGVPVSGPSASDPWTPAPAFSDPWGGSPAKPSTNGTTAGGFDTEPDEFSDFDRLRTALPTSGSSAGELELLAGEVPARSPGAFDMSGVRGSLAEAVGSPPPAATPTPTPPTRKTPESFLGPNAALVDLDSLVSRPGPTPPGAKASNPFLPGGGPATGPSVTNPFQPAPPATLTLNQLRLSPVPPVPGAPPTYISPLGGGPGLPPMMPPGPPAPNTNPFLL

SEQ ID NO: 45149 - protein, 641 aa, Homo sapiens
MTTSSIRRQMKNIVNNYSEAEIKVREATSNDPWGPSSSLMTEIADLTYNVVAFSEIMSMVWKRLNDHGKNWRHVYKALTLLDYLIKTGSERVAQQCRENIFAIQTLKDFQYIDRDGKDQGINVREKSKQLVALLKDEERLKAERAQALKTKERMAQVATGMGSNQITFGRGSSQPNLSTSHSEQEYGKAGGSPASYHGSPEASLCPQHRTGAPLGQSEELQPLSQRHPFLPHLGLASRPNGDWSQPCLTCDRAARATSPRVSSELEQARPQTSGEEELQLQLALAMSREVAEQEERLRRGDDLRLQMALEESRRDTVKIPKKKEHGSLPQQTTLLDLMDALPSSGPAAQKAEPWGPSASTNQTNPWGGPAAPASTSDPWPSFGTKPAASIDPWGVPTGATVQSVPKNSDPWAASQQPASSAGKRASDAWGAVSTTKPVSVSGSFELFSNLNGTIKDDFSEFDNLRTSKKTAESVTSLPSQNNGTTSPDPFESQPLTVASSKPSSARKTPESFLGPNAALVNLDSLVTRPAPPAQSLNPFLAPGAPATSAPVNPFQVNQPQPLTLNQLRGSPVLGTSTSFGPGPGVESMAVASMTSAAPQPALGATGSSLTPLGPAMMNMVGSVGIPPSAAQATGTTNPFLL

SEQ ID NO: 45150 - protein, 584 aa, Homo sapiens
MTTSSIRRQMKNIVNNYSEAEIKVREATSNDPWGPSSSLMTEIADLTYNVVAFSEIMSMVWKRLNDHGKNWRHVYKALTLLDYLIKTGSERVAQQCRENIFAIQTLKDFQYIDRDGKDQGINVREKSKQLVALLKDEERLKAERAQALKTKERMAQVATGMGSNQITFGRGSSQPNLSTSHSEQEYGKAGGSPASYHGSTSPRVSSELEQARPQTSGEEELQLQLALAMSREVAEQEERLRRGDDLRLQMALEESRRDTVKIPKKKEHGSLPQQTTLLDLMDALPSSGPAAQKAEPWGPSASTNQTNPWGGPAAPASTSDPWPSFGTKPAASIDPWGVPTGATVQSVPKNSDPWAASQQPASSAGKRASDAWGAVSTTKPVSVSGSFELFSNLNGTIKDDFSEFDNLRTSKKTAESVTSLPSQNNGTTSPDPFESQPLTVASSKPSSARKTPESFLGPNAALVNLDSLVTRPAPPAQSLNPFLAPGAPATSAPVNPFQVNQPQPLTLNQLRGSPVLGTSTSFGPGPGVESMAVASMTSAAPQPALGATGSSLTPLGPAMMNMVGSVGIPPSAAQATGTTNPFLL

SEQ ID NO: 45151 - protein, 356 aa, Homo sapiens
MSREVAEQEERLRRGDDLRLQMALEESRRDTVKIPKKKEHGSLPQQTTLLDLMDALPSSGPAAQKAEPWGPSASTNQTNPWGGPAAPASTSDPWPSFGTKPAASIDPWGVPTGATVQSVPKNSDPWAASQQPASSAGKRASDAWGAVSTTKPVSVSGSFELFSNLNGTIKDDFSEFDNLRTSKKTAESVTSLPSQNNGTTSPDPFESQPLTVASSKPSSARKTPESFLGPNAALVNLDSLVTRPAPPAQSLNPFLAPGAPATSAPVNPFQVNQPQPLTLNQLRGSPVLGTSTSFGPGPGVESMAVASMTSAAPQPALGATGSSLTPLGPAMMNMVGSVGIPPSAAQATGTTNPFLL

SEQ ID NO: 45152 - protein, 584 aa, Homo sapiens; identical to SEQ ID NO: 45150

SEQ ID NO: 45153 - protein, 484 aa, Homo sapiens
MTTSSIRRQMKNIVNNYSEAEIKVREATSNDPWGPSSSLMTEIADLTYNVVAFSEIMSMVWKRLNDHGKNWRHVYKALTLLDYLIKTGSERVAQQCRENIFAIQTLKDFQYIDRDGKDQGINVREKSKQLVALLKDEERLKAERAQALKTKERMAQVATGMGSNQITFGRGSSQPNLSTSHSEQEYGKAGGSPASYHGSPEASLCPQHRTGAPLGQSEELQPLSQRHPFLPHLGLASRPNGDWSQPCLTCDRAARATSPRVSSELEQARPQTSGEEELQLQLALAMSREVAEQEERLRRGDDLRLQMALEESRRDTVKIPKKKEHGSLPQQTTLLDLMDALPSSGPAAQKAEPWGPSASTNQTNPWGGPAAPASTSDPWPSFGTKPAASIDPWGVPTGATVQSVPKNSDPWAASQQPASSAGKRASDAWGAVSTTKPVSVSGSFELFSNLNGTIKDDFSEFDNLRTSKKTGMQGLTGLLFTMEI

SEQ ID NO: 45154 - protein, 499 aa, Homo sapiens
MTTSSIRRQMKNIVNNYSEAEIKVREATSNDPWGPSSSLMTEIADLTYNVVAFSEIMSMVWKRLNDHGKNWRHVYKALTLLDYLIKTGSERVAQQCRENIFAIQTLKDFQYIDRDGKDQGINVREKSKQLVALLKDEERLKAERAQALKTKERMAQVATGMGSNQITFGRGSSQPNLSTSHSEQEYGKAGGSPASYHGSTSPRVSSELEQARPQTSGEEELQLQLALAMSREVAEQEERLRRGDDLRLQMALEESRRDTVKIPKKKEHGSLPQQTTLLDLMDALPSSGPAAQKAEPWGPSASTNQTNPWGGPAAPASTSDPWPSFGTKPAASIDPWGVPTGATVQSVPKNSDPWAASQQPASSAGKRASDAWGAVSTTKPVSVSGSFELFSNLNGTIKDDFSEFDNLRTSKKTAESVTSLPSQNNGTTSPDPFESQPLTVASSKPSSARKTPESFLGPNAALVNLDSLVTRPAPPAQSLNPFLAPGMQGLTGLLFTMEI

SEQ ID NO: 45155 - protein, 632 aa, Homo sapiens
MTTSALRRQVKNIVHNYSEAEIKVREATSNDPWGPPSSLMSEIADLTFNTVAFTEVMGMLWRRLNDSGKNWRHVYKALTLLDYLLKTGSERVAHQCRENLYTIQTLKDFQYIDRDGKDQGVNVREKVKQVMALLKDEERLRQERTHALKTKERMALEGIGIGSGQLGFSRRYGEDYSRSRGSPSSYNSSSSSPRYTSDLEQARPQTSGEEELQLQLALAMSREEAEKPVPPASHRDEDLQLQLALRLSRQEHEKEVRSWQGDGSPMANGAGAVVHHQRDREPEREERKEEEKLKTSQSSILDLADIFVPALAPPSTHCSADPWDIPGFRPNTEASGSSWGPSADPWSPIPSGTVLSRSQPWDLTPMLSSSEPWGRTPVLPAGPPTTDPWALNSPHHKLPSTGADPWGASLETSDTPGGASTFDPFAKPPESTETKEGLEQALPSGKPSSPVELDLFGDPSPSSKQNGTKEPDALDLGILGEALTQPSKEARACRTPESFLGPSASSLVNLDSLVKAPQVAKTRNPFLTGLSAPSPTNPFGAGEPGRPTLNQMRTGSPALGLAGGPVGAPLGSMTYSASLPLPLSSVPAGLTLPASVSVFPQAGAFAPQPLLPTPSSAGPRPPPPQTGTNPFL

SEQ ID NO: 45156 - protein, 318 aa, Homo sapiens
MTTSALRRQVKNIVHNYSEAEIKVREATSNDPWGPPSSLMSEIADLTFNTVAFTEVMGMLWRRLNDSGKNWRHVYKALTLLDYLLKTGSERVAHQCRENLYTIQTLKDFQYIDRDGKDQGVNVREKVKQVMALLKDEERLRQERTHALKTKERMALEGIGIGSGQLGFSRRYGEDYSRSRGSPSSYNSSSSSPRYTSDLEQARPQTSGEEELQLQLALAMSREEAEKPVPPASHRDEDLQLQLALRLSRQEHEKEVRSWQGDGSPMANGAGAVVHHQRDREPEREERKEEEKLKTSQAPPTSEPRLPLPSTVLHPGLG

SEQ ID NO: 45157 - protein, 574 aa, Homo sapiens
MALETLPRLCRPAAAQVGGSPQRLLGLGLGPREPALEPHVEPKDAAALLTRQPILQDCDLATVALSPPPPAGARATHLQVSSHDDLRTPAPGEEHRAQLLRGRNQVAFTEVMGMLWRRLNDSGKNWRHVYKALTLLDYLLKTGSERVAHQCRENLYTIQTLKDFQYIDRDGKDQGVNVREKVKQVMALLKDEERLRQERTHALKTKERMALEGIGIGSGQLGFSRRYGEDYSRSRGSPSSYNSSSSSPRYTSDLEQARPQTSGEEELQLQLALAMSREEAEKEVRSWQGDGSPMANGAGAVVHHQRDREPEREERKEEEKLKTSQSSILDLADIFVPALAPPSTHCSADPWDIPGFRPNTEASGSSWGPSADPWSPIPSGTVLSRSQPWDLTPMLSSSEPWGRTPVLPAGPPTTDPWALNSPHHKLPSTGADPWGASLETSDTPGGASTFDPFAKPPESTETKEGLEQALPSGKPSSPVELDLFGDPSPSSKQNGTKEPDALDLGILGEALTQPSKEARACRTPESFLGPSASSLVNLDSLVKAPQVAKTRNPFLTGLSAPPRLRTRGWAGRRC

SEQ ID NO: 45158 - protein, 168 aa, Homo sapiens
MTTSALRRQVKNIVHNYSEAEIKVREATSNDPWGPPSSLMSEIADLTFNTVAFTEVMGMLWRRLNDSGKNWRHVYKALTLLDYLLKTGSERVAHQCRENLYTIQTLKDFQYIDRDGKDQGVNVREKVKQVMALLKDEERLRQERTHALKTKERMALEGIGIGSGQLGF

SEQ ID NO: 45159 - protein, 11 aa, Homo sapiens
MTTSALRRQVK

SEQ ID NO: 45160 - protein, 136 aa, Homo sapiens
MTTSALRRQVKNIVHNYSEAEIKVREATSNDPWGPPSSLMSEIADLTFNTVAFTEVMGMLWRRLNDSGKNWRHVYKALTLLDYLLKTGSERVAHQCRENLYTIQTLKDFQYIDRDGKDQGVNVREKVKQVMALLKD

SEQ ID NO: 45161 - protein, 51 aa, Homo sapiens
MTTSALRRQVKNIVHNYSEAEIKVREATSNDPWGPPSSLMSEIADLTFNTV

SEQ ID NO: 45162 - protein, 108 aa, Homo sapiens
MTTSALRRQVKNIVHNYSEAEIKVREATSNDPWGPPSSLMSEIADLTFNTVAFTEVMGMLWRRLNDSGKNWRHVYKALTLLDYLLKTGSERVAHQCRENLYTIQTLKD

SEQ ID NO: 45163 - protein, 660 aa, Homo sapiens [sequence omitted]

SEQ ID NO: 45164 - protein, 250 aa, Homo sapiens
MGMLWRRLNDSGKNWRHVYKALTLLDYLLKTGSERVAHQCRENLYTIQTLKDFQYIDRDGKDQGVNVREKVKQVMALLKDEERLRQERTHALKTKERMALEGIGIGSGQLGFSRRYGEDYSRSRGSPSSYNSSSSSPRYTSDLEQARPQTSGEEELQLQLALAMSREEAEKEVRSWQGDGSPMANGAGAVVHHQRDREPEREERKEEEKLKTSQVLGRTQRPVDPPGGLLQTPGLRSPQEPSCPEASPGI

SEQ ID NO: 45165 - protein, 229 aa, Homo sapiens
MTPQLLLALVLWASCPPCSGRKGPPAALTLPRVQCRASRYPIAVDCSWTLPPAPNSTSPVSFIATYRLGMAARGHSWPCLQQTPTSTSCTITDVQLFSMAPYVLNVTAVHPWGSSSSFVPFITEHIIKPDPPEGVRLSPLAERQLQVQWEPPGSWPFPEIFSLKYWIRYKRQGAARFHRVGPIEATSFILRAVRPRARYYVQVAAQDLTDYGELSDWSLPATATMSLGK

SEQ ID NO: 45166 - protein, 275 aa, Homo sapiens
MNMTQARVLVAAVVGLVAVLLYASIHKIEEGHLAVYYRGGALLTSPSGPGYHIMLPFITTFRSVQTTLQTDEVKNVPCGTSGGVMIYIDRIEVVNMLAPYAVFDIVRNYTADYDKTLIFNKIHHELNQFCSAHTLQEVYIELFDQIDENLKQALQKDLNLMAPGLTIQAVRVTKPKIPEAIRRNFELMEAEKTKLLIAAQKQKVVEKEAETERKKAVIEAEKIAQVAKIRFQQKVMEKETEKRISEIEDAAFLAREKAKADAEYYAAHKYATSNK

SEQ ID NO: 45167 - protein, 232 aa, Homo sapiens
MIYIDRIEVVNMLAPYAVFDIVRNYTADYDKTLIFNKIHHELNQFCSAHTLQEVYIELFDQIDENLKQALQKDLNLMAPGLTIQAVRVTKPKIPEAIRRNFELMEAEKTKLLIAAQKQKVVEKEAETERKKAVIEAEKIAQVAKIRFQQKVMEKETEKRISEIEDAAFLAREKAKADAEYYAAHKYATSNKHKLTPEYLELKKYQAIASNSKIYFGSNIPNMFSISRCGPRG

SEQ ID NO: 45168 - protein, 348 aa, Homo sapiens
MNMTQARVLVAAVVGLVAVLLYASIHKIEEGHLAVYYRGGALLTSPSGPGYHIMLPFITTFRSVQTTLQTDEVKNVPCGTSGGVMIYIDRIEVVNMLAPYAVFDIVRNYTADYDKTLIFNKIHHELNQFCSAHTLQEVYIELFDQIDENLKQALQKDLNLMAPGLTIQAVRVTKPKIPEAIRRNFELMEAEKTKLLIAAQKQKVVEKEAETERKKAVIEAEKIAQVAKIRFQQKVMEKETEKRISEIEDAAFLAREKAKADAEYYAAHKYATSNKHKLTPEYLELKKYQAIASNSKIYFGSNIPNMFVDSSCALKYSDIRTGRESSLPSKEALEPSGENVIQNKESTG

SEQ ID NO: 45169 - protein, 348 aa, Homo sapiens; identical to SEQ ID NO: 45168

SEQ ID NO: 45170 - protein, 339 aa, Homo sapiens
MAQLGAVVAVASSFFCASLFSAVHKIEEGHIGVYYRGGALLTSTSGPGFHLMLPFITSYKSVQTTLQTDEVKNVPCGTSGGVMIYFDRIEVVNFLVPNAVYDIVKNYTADYDKALIFNKIHHELNQFCSVHTLQEVYIELFDQIDENLKLALQQDLTSMAPGLVIQAVRVTKPNIPEAIRRNYELMESEKTKLLIAAQKQKVVEKEAETERKKALIEAEKVAQVAEITYGQKVMEKETEKKISEIEDAAFLAREKAKADAECYTAMKIAEANKLKLTPEYLQLMKYKAIASNSKIYFGKDIPNMFMDSAGSVSKQFEGLADKLSFGLEDEPLETATKEN

SEQ ID NO: 45171 - protein, 152 aa, Homo sapiens
MAQLGAVVAVASSFFCASLFSAVHKIEEGHIGVYYRGGALLTSTSGPGFHLMLPFITSYKSVQTTLQTDEVKNVPCGTSGGVMIYFDRIEVVNFLVPNAVYDIVKNYTADYDKALIFNKIHHELNQFCSVHTLQEVYIELFGLENDFSQESS

SEQ ID NO: 45172 - protein, 339 aa, Homo sapiens; identical to SEQ ID NO: 45170

SEQ ID NO: 45173 - protein, 206 aa, Homo sapiens
MAQLGAVVAVASSFFCASLFSAVHKIEEGHIGVYYRGGALLTSTSGPGFHLMLPFITSYKSVQTTLQTDEVKNVPCGTSGGVMIYFDRIEVVNFLVPNAVYDIVKNYTADYDKALIFNKIHHELNQFCSVHTLQEVYIELFGKKVSPEHAVLKQGSWNPASLHCLKPGCLQGVMVTYGQEMLKNLVLRSWSQRSSWRMLIAMQQDP

SEQ ID NO: 45174 - protein, 152 aa, Homo sapiens; identical to SEQ ID NO: 45171

SEQ ID NO: 45175 - protein, 1412 aa, Homo sapiens
MTTKRSLFVRLVPCRCLRGEEETVTTLDYSHCSLEQVPKEIFTFEKTLEELYLDANQIEELPKQLFNCQSLHKLSLPDNDLTTLPASIANLINLRELDVSKNGIQEFPENIKNCKVLTIVEASVNPISKLPDGFSQLLNLTQLYLNDAFLEFLPANFGRLTKLQILELRENQLKMLPKTMNRLTQLERLDLGSNEFTEVPEVLEQLSGLKEFWMDANRLTFIPGFIGSLKQLTYLDVSKNNIEMVEEGISTCENLQDLLLSSNSLQQLPETIGSLKNITTLKIDENQLMYLPDSIGGLISVEELDCSFNEVEALPSSIGQLTNLRTFAADHNYLQQLPPEIGSWKNITVLFLHSNKLETLPEEMGDMQKLKVINLSDNRLKNLPFSFTKLQQLTAMWLSDNQSKPLIPLQKETDSETQKMVLTNYMFPQQPRTEDVMFISDNESFNPSLWEEQRKQRAQVAFECDEDKDEREAPPREGNLKRYPTPYPDELKNMVKTVQTIVHRLKDEETNEDSGRDLKPHEDQQDINKDVGVKTSESTTTVKSKVDEREKYMIGNSVQKISEPEAEISPGSLPVTANMKASENLKHIVNHDDVFEESEELSSDEEMKMAEMRPPLIETSINQPKVVALSNNKKDDTKETDSLSDEVTHNSNQNNSNCSSPSRMSDSVSLNTDSSQDTSLCSPVKQTHIDINSKIRQEDENFNSLLQNGDILNSSTEEKFKAHDKKDFNLPEYDLNVEERLVLIEKSVDSTATADDTHKLDHINMNLNKLITNDTFQPEIMERSKTQDIVLGTSFLSINSKEETEHLENGNKYPNLESVNKVNGHSEETSQSPNRTEPHDSDCSVDLGISKSTEDLSPQKSGPVGSVVKSHSITNMEIGGLKIYDILSDNGPQQPSTTVKITSAVDGKNIVRSKSATLLYDQPLQVFTGSSSSSDLISGTKAIFKFDSNHNPEEPNIIRGPTSGPQSAPQIYGPPQYNIQYSSSAAVKDTLWHSKQNPQIDHASFPPQLLPRSESTENQSYAKHSANMNFSNHNNVRANTAYHLHQRLGPARHGEMWAISPNDRLIPAVTRSTIQRQSSVSSTASVNLGDPGSTRRAQIPEGDYLSYREFHSAGRTPPMMPGSQRPLSARTYSIDGPNASRPQSARPSINEIPERTMSVSDFNYSRTSPSKRPNARVGSEHSLLDPPGKSKVPRDWREQVLRHIEAKKLEKKHPQTSSSGDPCQDGIFISGQQNYSSATLSHKDVPPDSLMKMPLSNGQMGQPLRPQANYSQIHHPPQASVARHPSREQLIDYLMLKVAHQPPYTQPHCSPRQGHELAKQEIRVRVEKDPELGFSISGGVGGRGNPFRPDDDGIFVTRVQPEGPASKLLQPGDKIIQANGYSFINIEHGQAVSLLKTFQNTVELIIVREVSS

SEQ ID NO: 45176 - protein, 1302 aa, Homo sapiens
MTTKRSLFVRLVPCRCLRGEEETVTTLDYSHCSLEQVPKEIFTFEKTLEELYLDANQIEELPKQLFNCQSLHKLSLPDNDLTTLPASIANLINLRELDVSKNGIQEFPENIKNCKVLTIVEASVNPISKLPDGFSQLLNLTQLYLNDAFLEFLPANFGRLTKLQILELRENQLKMLPKTMNRLTQLERLDLGSNEFTEVPEVLEQLSGLKEFWMDANRLTFIPGFIGSLKQLTYLDVSKNNIEMVEEGISTCENLQDLLLSSNSLQQLPETIGSLKNITTLKIDENQLMYLPDSIGGLISVEELDCSFNEVEALPSSIGQLTNLRTFAADHNYLQQLPPEIGSWKNITVLFLHSNKLETLPEEMGDMQKLKVINLSDNRLKNLPFSFTKLQQLTAMWLSDNQSKPLIPLQKETDSETQKMVLTNYMFPQQPRTEDVMFISDNESFNPSLWEEQRKQRAQVAFECDEDKDEREAPPREGNLKRYPTPYPDELKNMVKTVQTIVHRLKDEETNEDSGRDLKPHEDQQDINKDVGVKTSESTTTVKSKVDEREKYMIGNSVQKISEPEAEISPGSLPVTANMKASENLKHIVNHDDVFEESEELSSDEEMKMAEMRPPLIETSINQPKVVALSNNKKDDTKETDSLSDEVTHNSNQNNSNCSSPSRMSDSVSLNTDSSQDTSLCSPVKQTHIDINSKIRQEDENFNSLLQNGDILNSSTEEKFKAHDKKDFNLPEYDLNVEERLVLIEKSVDSTATADDTHKLDHINMNLNKLITNDTFQPEIMERSKTQDIVLGTSFLSINSKEETEHLENGNKYPNLESVNKVNGHSEETSQSPNRTEPHDSDCSVDLGISKSTEDLSPQKSGPVGSVVKSHSITNMEIGGLKIYDILSDNGPQQPSTTVKITSAVDGKNIVRSKSATLLYDQPLQVFTGSSSSSDLISGTKAIFKFDSNHNPEEPNIIRGPTSGPQSAPQIYGPPQYNIQYSSSAAVKDTLWHSKQNPQIDHASFPPQLLPRSESTENQSYAKHSANMNFSNHNNVRANTAYHLHQRLGPARHGEMWAISPNDRLIPAVTRSTIQRQSSVSSTASVNLGDPGSTRRAQIPEGDYLSYREFHSAGRTPPMMPGSQRPLSARTYSIDGPNASRPQSARPSINEIPERTMSVSDFNYSRTSPSKRPNARVGSEHSLLDPPGKSKVPRDWREQVLRHIEAKKLEKIRVRVEKDPELGFSISGGVGGRGNPFRPDDDGIFVTRVQPEGPASKLLQPGDKIIQANGYSFINIEHGQAVSLLKTFQNTVELIIVREVSS

SEQ ID NO: 45177 - protein, 1340 aa, Homo sapiens
MTTKRSLFVRLVPCRCLRGEEETVTTLDYSHCSLEQVPKEIFTFEKTLEELYLDANQIEELPKQLFNCQSLHKLSLPDNDLTTLPASIANLINLRELDVSKNGIQEFPENIKNCKVLTIVEASVNPISKLPDGFSQLLNLTQLYLNDAFLEFLPANFGRLTKLQILELRENQLKMLPKTMNRLTQLERLDLGSNEFTEVPEVLEQLSGLKEFWMDANRLTFIPGFIGSLKQLTYLDVSKNNIEMVEEGISTCENLQDLLLSSNSLQQLPETIGSLKNITTLKIDENQLMYLPDSIGGLISVEELDCSFNEVEALPSSIGQLTNLRTFAADHNYLQQLPPEIGSWKNITVLFLHSNKLETLPEEMGDMQKLKVINLSDNRLKNLPFSFTKLQQLTAMWLSDNQSKPLIPLQKETDSETQKMVLTNYMFPQQPRTEDVMFISDNESFNPSLWEEQRKQRAQVAFECDEDKDEREAPPREGNLKRYPTPYPDELKNMVKTVQTIVHRLKDEETNEDSGRDLKPHEDQQDINKDVGVKTSESTTTVKSKVDEREKYMIGNSVQKISEPEAEISPGSLPVTANMKASENLKHIVNHDDVFEESEELSSDEEMKMAEMRPPLIETSINQPKVVALSNNKKDDTKETDSLSDEVTHNSNQNNSNCSSPSRMSDSVSLNTDSSQDTSLCSPVKQTHIDINSKIRQEDENFNSLLQNGDILNSSTEEKFKAHDKKDFNLPEYDLNVEERLVLIEKSVDSTATADDTHKLDHINMNLNKLITNDTFQPEIMERSKTQDIVLGTSFLSINSKEETEHLENGNKYPNLESVNKVNGHSEETSQSPNRTEPHDSDCSVDLGISKSTEDLSPQKSGPVGSVVKSHSITNMEIGGLKIYDILSDNGPQQPSTTVKITSAVDGKNIVRSKSATLLYDQPLQVFTGSSSSSDLISGTKAIFKFDSNHNPEEPNIIRGPTSGPQSAPQIYGPPQYNIQYSSSAAVKDTLWHSKQNPQIDHASFPPQLLPRSESTENQSYAKHSANMNFSNHNNVRANTAYHLHQRLGPARHGEMWAISPNDRLIPAVTRSTIQRQSSVSSTASVNLGDPGSTRRAQIPEGDYLSYREFHSAGRTPPMMPGSQRPLSARTYSIDGPNASRPQSARPSINEIPERTMSVSDFNYSRTSPSKRPNARVGSEHSLLDPPGKSKVPRDWREQVLRHIEAKKLEKMPLSNGQMGQPLRPQANYSQIHHPPQASVARHPSREQLIDYLMLKVAHQPPYTQPHCSPRQGHELAKQEGIFVTRVQPEGPASKLLQPGDKIIQANGYSFINIEHGQAVSLLKTFQNTVELIIVREVSS

SEQ ID NO: 45178 - protein, 1346 aa, Homo sapiens
MTTKRSLFVRLVPCRCLRGEEETVTTLDYSHCSLEQVPKEIFTFEKTLEELYLDANQIEELPKQLFNCQSLHKLSLPDNDLTTLPASIANLINLRELDVSKNGIQEFPENIKNCKVLTIVEASVNPISKLPDGFSQLLNLTQLYLNDAFLEFLPANFGRLTKLQILELRENQLKMLPKTMNRLTQLERLDLGSNEFTEVPEVLEQLSGLKEFWMDANRLTFIPGFIGSLKQLTYLDVSKNNIEMVEEGISTCENLQDLLLSSNSLQQLPETIGSLKNITTLKIDENQLMYLPDSIGGLISVEELDCSFNEVEALPSSIGQLTNLRTFAADHNYLQQLPPEIGSWKNITVLFLHSNKLETLPEEMGDMQKLKVINLSDNRLKNLPFSFTKLQQLTAMWLSDNQSKPLIPLQKETDSETQKMVLTNYMFPQQPRTEDVMFISDNESFNPSLWEEQRKQRAQVAFECDEDKDEREAPPREGNLKRYPTPYPDELKNMVKTVQTIVHRLKDEETNEDSGRDLKPHEDQQDINKDVGVKTSESTTTVKSKVDEREKYMIGNSVQKISEPEAEISPGSLPVTANMKASENLKHIVNHDDVFEESEELSSDEEMKMAEMRPPLIETSINQPKVVALSNNKKDDTKETDSLSDEVTHNSNQNNSNCSSPSRMSDSVSLNTDSSQDTSLCSPVKQTHIDINSKIRQEDENFNSLLQNGDILNSSTEEKFKAHDKKDFNLPEYDLNVEERLVLIEKSVDSTATADDTHKLDHINMNLNKLITNDTFQPEIMERSKTQDIVLGTSFLSINSKEETEHLENGNKYPNLESVNKVNGHSEETSQSPNRTEPHDSDCSVDLGISKSTEDLSPQKSGPVGSVVKSHSITNMEIGGLKIYDILSDNGPQQPSTTVKITSAVDGKNIVRSKSATLLYDQPLQVFTGSSSSSDLISGTKAIFKFDSNHNPEEPNIIRGPTSGPQSAPQIYGPPQYNIQYSSSAAVKDTLWHSKQNPQIDHASFPPQLLPRSESTENQSYAKHSANMNFSNHNNVRANTAYHLHQRLGPARHGEMWAISPNDRLIPAVTRSTIQRQSSVSSTASVNLGDPGSTRRAQIPEGDYLSYREFHSAGRTPPMMPGSQRPLSARTYSIDGPNASRPQSARPSINEIPERTMSVSDFNYSRTSPSKRPNARVGSEHSLLDPPGKSKVPRDWREQVLRHIEAKKLEKMPLSNGQMGQPLRPQANYSQIHHPPQASVARHPSREQLIDYLMLKVAHQPPYTQPHCSPRQGHELAKQEIRVRVEKDPELGFSISGGVGGRGNPFRPDDDANGYSFINIEHGQAVSLLKTFQNTVELIIVREVSS

SEQ ID NO: 45179 - protein, 1360 aa, Homo sapiens
MTTKRSLFVRLVPCRCLRGEEETVTTLDYSHCSLEQVPKEIFTFEKTLEELYLDANQIEELPKQLFNCQSLHKLSLPDNDLTTLPASIANLINLRELDVSKNGIQEFPENIKNCKVLTIVEASVNPISKLPDGFSQLLNLTQLYLNDAFLEFLPANFGRLTKLQILELRENQLKMLPKTMNRLTQLERLDLGSNEFTEVPEVLEQLSGLKEFWMDANRLTFIPGFIGSLKQLTYLDVSKNNIEMVEEGISTCENLQDLLLSSNSLQQLPETIGSLKNITTLKIDENQLMYLPDSIGGLISVEELDCSFNEVEALPSSIGQLTNLRTFAADHNYLQQLPPEIGSWKNITVLFLHSNKLETLPEEMGDMQKLKVINLSDNRLKNLPFSFTKLQQLTAMWLSDNQSKPLIPLQKETDSETQKMVLTNYMFPQQPRTEDVMFISDNESFNPSLWEEQRKQRAQVAFECDEDKDEREAPPREGNLKRYPTPYPDELKNMVKTVQTIVHRLKDEETNEDSGRDLKPHEDQQDINKDVGVKTSESTTTVKSKVDEREKYMIGNSVQKISEPEAEISPGSLPVTANMKASENLKHIVNHDDVFEESEELSSDEEMKMAEMRPPLIETSINQPKVVALSNNKKDDTKETDSLSDEVTHNSNQNNSNCSSPSRMSDSVSLNTDSSQDTSLCSPVKQTHIDINSKIRQEDENFNSLLQNGDILNSSTEEKFKAHDKKDFNLPEYDLNVEERLVLIEKSVDSTATADDTHKLDHINMNLNKLITNDTFQPEIMERSKTQDIVLGTSFLSINSKEETEHLENGNKYPNLESVNKVNGHSEETSQSPNRTEPHDSDCSVDLGISKSTEDLSPQKSGPVGSVVKSHSITNMEIGGLKIYDILSDNGPQQPSTTVKITSAVDGKNIVRSKSATLLYDQPLQVFTGSSSSSDLISGTKAIFKFDSNHNPEEPNIIRGPTSGPQSAPQIYGPPQYNIQYSSSAAVKDTLWHSKQNPQIDHASFPPQLLPRSESTENQSYAKHSANMNFSNHNNVRANTAYHLHQRLGPARHGEMWAISPNDRLIPAVTRSTIQRQSSVSSTASVNLGDPGSTRRAQIPEGDYLSYREFHSAGRTPPMMPGSQRPLSARTYSIDGPNASRPQSARPSINEIPERTMSVSDFNYSRTSPSKRPNARVGSEHSLLDPPGKSKVPRDWREQVLRHIEAKKLEKMPLSNGQMGQPLRPQASVARHPSREQLIDYLMLKVAHQPPYTQPHCSPRQGHELAKQEIRVRVEKDPELGFSISGGVGGRGNPFRPDDDGIFVTRVQPEGPASKLLQPGDKIIQANGYSFINIEHGQAVSLLKTFQNTVELIIVREVSS

SEQ ID NO: 45180 - protein, 1371 aa, Homo sapiens
MTTKRSLFVRLVPCRCLRGEEETVTTLDYSHCSLEQVPKEIFTFEKTLEELYLDANQIEELPKQLFNCQSLHKLSLPDNDLTTLPASIANLINLRELDVSKNGIQEFPENIKNCKVLTIVEASVNPISKLPDGFSQLLNLTQLYLNDAFLEFLPANFGRLTKLQILELRENQLKMLPKTMNRLTQLERLDLGSNEFTEVPEVLEQLSGLKEFWMDANRLTFIPGFIGSLKQLTYLDVSKNNIEMVEEGISTCENLQDLLLSSNSLQQLPETIGSLKNITTLKIDENQLMYLPDSIGGLISVEELDCSFNEVEALPSSIGQLTNLRTFAADHNYLQQLPPEIGSWKNITVLFLHSNKLETLPEEMGDMQKLKVINLSDNRLKNLPFSFTKLQQLTAMWLSDNQSKPLIPLQKETDSETQKMVLTNYMFPQQPRTEDVMFISDNESFNPSLWEEQRKQRAQVAFECDEDKDEREAPPREGNLKRYPTPYPDELKNMVKTVQTIVHRLKDEETNEDSGRDLKPHEDQQDINKDVGVKTSESTTTVKSKVDEREKYMIGNSVQKISEPEAEISPGSLPVTANMKASENLKHIVNHDDVFEESEELSSDEEMKMAEMRPPLIETSINQPKVVALSNNKKDDTKETDSLSDEVTHNSNQNNSNCSSPSRMSDSVSLNTDSSQDTSLCSPVKQTHIDINSKIRQEDENFNSLLQNGDILNSSTEEKFKAHDKKDFNLPEYDLNVEERLVLIEKSVDSTATADDTHKLDHINMNLNKLITNDTFQPEIMERSKTQDIVLGTSFLSINSKEETEHLENGNKYPNLESVNKVNGHSEETSQSPNRTEPHDSDCSVDLGISKSTEDLSPQKSGPVGSVVKSHSITNMEIGGLKIYDILSDNGPQQPSTTVKITSAVDGKNIVRSKSATLLYDQPLQVFTGSSSSSDLISGTKAIFKFDSNHNPEEPNIIRGPTSGPQSAPQIYGPPQYNIQYSSSAAVKDTLWHSKQNPQIDHASFPPQLLPRSESTENQSYAKHSANMNFSNHNNVRANTAYHLHQRLGPARHGEMWAISPNDRLIPAVTRSTIQRQSSVSSTASVNLGDPGSTRRAQIPEGDYLSYREFHSAGRTPPMMPGSQRPLSARTYSIDGPNASRPQSARPSINEIPERTMSVSDFNYSRTSPSKRPNARVGSEHSLLDPPGKSKVPRDWREQVLRHIEAKKLEKMPLSNGQMGQPLRPQANYSQIHHPPQASVARHPSREQLIDYLMLKVAHQPPYTQPHCSPRQGHELAKQEIRVRVEKDPELGFSISGGVGGRGNPFRPDDDGIFVTRVQPEGPASKLLQPGDKIIQANGYSFINIEHGQAVSLLKTFQNTVELIIVREVSS

SEQ ID NO: 45181 - protein, 1302 aa, Homo sapiens; identical to SEQ ID NO: 45176

SEQ ID NO: 45182 - protein, 1419 aa, Homo sapiens
MTTKRSLFVRLVPCRCLRGEEETVTTLDYSHCSLEQVPKEIFTFEKTLEELYLDANQIEELPKQLFNCQSLHKLSLPDNDLTTLPASIANLINLRELDVSKNGIQEFPENIKNCKVLTIVEASVNPISKLPDGFSQLLNLTQLYLNDAFLEFLPANFGRLTKLQILELRENQLKMLPKTMNRLTQLERLDLGSNEFTEVPEVLEQLSGLKEFWMDANRLTFIPGFIGSLKQLTYLDVSKNNIEMVEEGISTCENLQDLLLSSNSLQQLPETIGSLKNITTLKIDENQLMYLPDSIGGLISVEELDCSFNEVEALPSSIGQLTNLRTFAADHNYLQQLPPEIGSWKNITVLFLHSNKLETLPEEMGDMQKLKVINLSDNRLKNLPFSFTKLQQLTAMWLSDNQSKPLIPLQKETDSETQKMVLTNYMFPQQPRTEDVMFISDNESFNPSLWEEQRKQRAQVAFECDEDKDEREAPPREGNLKRYPTPYPDELKNMVKTVQTIVHRLKDEETNEDSGRDLKPHEDQQDINKDVGVKTSESTTTVKSKVDEREKYMIGNSVQKISEPEAEISPGSLPVTANMKASENLKHIVNHDDVFEESEELSSDEEMKMAEMRPPLIETSINQPKVVALSNNKKDDTKETDSLSDEVTHNSNQNNSNCSSPSRMSDSVSLNTDSSQDTSLCSPVKQTHIDINSKIRQEDENFNSLLQNGDILNSSTEEKFKAHDKKDFNLPEYDLNVEERLVLIEKSVDSTATADDTHKLDHINMNLNKLITNDTFQPEIMERSKTQDIVLGTSFLSINSKEETEHLENGNKYPNLESVNKVNGHSEETSQSPNRTEPHDSDCSVDLGISKSTEDLSPQKSGPVGSVVKSHSITNMEIGGLKIYDILSDNGPQQPSTTVKITSAVDGKNIVRSKSATLLYDQPLQVFTGSSSSSDLISGTKAIFKFDSNHNPEEPNIIRGPTSGPQSAPQIYGPPQYNIQYSSSAAVKDTLWHSKQNPQIDHASFPPQLLPRSESTENQSYAKHSANMNFSNHNNVRANTAYHLHQRLGPARHGEMWAISPNDRLIPAVTRSTIQRQSSVSSTASVNLGDPGSTRRAQIPEGDYLSYREFHSAGRTPPMMPGSQRPLSARTYSIDGPNASRPQSARPSINEIPERTMSVSDFNYSRTSPSKRPNARVGSEHSLLDPPGKSKVPRDWREQVLRHIEAKKLEKSMLSRSFNSNFTTVSSFHCGSSRDLHGSQGSLALSVADRRGSGGHIFRMPLSNGQMGQPLRPQANYSQIHHPPQASVARHPSREQLIDYLMLKVAHQPPYTQPHCSPRQGHELAKQEIRVRVEKDPELGFSISGGVGGRGNPFRPDDDGIFVTRVQPEGPASKLLQPGDKIIQANGYSFINIEHGQAVSLLKTFQNTVELIIVREVSS

SEQ ID NO: 45183 - protein, 385 aa, Homo sapiens
MKEEEGFPEDEATESETLSLVKELDAFPKVPESYVETSASGGTVSLIAFTTMALLTIMEFSVYQDTWMKYEYEVDKDFSSKLRINIDITVAMKCQYVGADVLDLAETMVASADGLVYEPTVFDLSPQQKEWQRMLQLIQSRLQEEHSLQDVIFKSAFKSTSTALPPREDDSSQSPNACRIHGHLYVNKVAGNFHITVGKAIPHPRGHAHLAALVNHESYNFSHRIDHLSFGELVPAIINPLDGTEKIAIDHNQMFQYFITVVPTKLHTYKISADTHQFSVTERERIINHAAGSHGVSGIFMKYDLSSLMVTVTEEHMPFWQFFVRLCGIVGGIFSTTGMLHGIGKFIVEIICCRFRLGSYKPVNSVPFEDGHTDNHLPLLENNTH

SEQ ID NO: 45184 - protein, 377 aa, Homo sapiens
MRRLNRKKTLSLVKELDAFPKVPESYVETSASGGTVSLIAFTTMALLTIMEFSVYQDTWMKYEYEVDKDFSSKLRINIDITVAMKCQYVGADVLDLAETMVASADGLVYEPTVFDLSPQQKEWQRMLQLIQSRLQEEHSLQDVIFKSAFKSTSTALPPREDDSSQSPNACRIHGHLYVNKVAGNFHITVGKAIPHPRGHAHLAALVNHESYNFSHRIDHLSFGELVPAIINPLDGTEKIAIDHNQMFQYFITVVPTKLHTYKISADTHQFSVTERERIINHAAGSHGVSGIFMKYDLSSLMVTVTEEHMPFWQFFVRLCGIVGGIFSTTGMLHGIGKFIVEIICCRFRLGSYKPVNSVPFEDGHTDNHLPLLENNTH

SEQ ID NO: 45185 - protein, 220 aa, Homo sapiens
MRRLNRKKTLSLVKELDAFPKVPESYVETSASGGTVSLIAFTTMALLTIMEFSVYQDTWMKYEYEVDKDFSSKLRINIDITVAMKCQYVGADVLDLAETMVASADGLVYEPTVFDLSPQQKEWQRMLQLIQSRLQEEHSLQDVIFKSAFKSTSTALPPREDDSSQSPNACRIHGHLYVNKVAGNFHITVGKAIPHPRGHAHLAALVNHESYNFSHRIDHL

SEQ ID NO: 45186 - protein, 71 aa, Homo sapiens
MRRLNRKKTLSLVKELDAFPKVPESYVETSASGGTVSLIAFTTMALLTIMEFSVYQDTWMKYEYEVDKDFS

SEQ ID NO: 45187 - protein, 175 aa, Homo sapiens
MRRLNRKKTLSLVKELDAFPKVPESYVETSASGGTVSLIAFTTMALLTIMEFSVYQDTWMKYEYEVDKDFSSKLRINIDITVAMKCQYVGADVLDLAETMVASADGLVYEPTVFDLSPQQKEWQRMLQLIQSRLQEEHSLQDVIFKSAFKSTSTALPPREDDSSQSPNACRIHGH

SEQ ID NO: 45188 - protein, 385 aa, Homo sapiens
MPEYKGRTVLVRDAQEGSVTLQILDVRLEDQGSYRCLIQVGNLSKEDTVILQVAAPSVGSLSPSAVALAVILPVLVLLIMVCLCLIWKQRRAKEKLLYEHVTEVDNLLSDHAKEKGKLHKAVKKLRSELKLKRAAANSGWRRARLHFVAVTLDPDTAHPKLILSEDQRCVRLGDRRQPVPDNPQRFDFVVSILGSEYFTTGCHYWEVYVGDKTKWILGVCSESVSRKGKVTASPANGHWLLRQSRGNEYEALTSPQTSFRLKEPPRCVGIFLDYEAGVISFYNVTNKSHIFTFTHNFSGPLRPFFEPCLHDGGKNTAPLVICSELHKSEESIVPRPEGKGHANGDVSLKVNSSLLPPKAPELKDIILSLPPDLGPALQELKAPSF

SEQ ID NO: 45189 - protein, 475 aa, Homo sapiens
MEMASSAGSWLSGCLIPLVFLRLSVHVSGHAGDAGKFHVALLGGTAELLCPLSLWPGTVPKEVRWLRSPFPQRSQAVHIFRDGKDQDEDLMPEYKGRTVLVRDAQEGSVTLQILDVRLEDQGSYRCLIQVGNLSKEDTVILQVAAPSVGSLSPSAVALAVILPVLVLLIMVCLCLIWKQRRAKEKLLYEHVTEVDNLLSDHAKEKGKLHKAVKKLRSELKLKRAAANSGWRRARLHFVAVTLDPDTAHPKLILSEDQRCVRLGDRRQPVPDNPQRFDFVVSILGSEYFTTGCHYWEVYVGDKTKWILGVCSESVSRKGKVTASPANGHWLLRQSRGNEYEALTSPQTSFRLKEPPRCVGIFLDYEAGVISFYNVTNKSHIFTFTHNFSGPLRPFFEPCLHDGGKNTAPLVICSELHKSEESIVPRPEGKGHANGDVSLKVNSSLLPPKAPELKDIILSLPPDLGPALQELKAPSF

SEQ ID NO: 45190 - protein, 475 aa, Homo sapiens; identical to SEQ ID NO: 45189

SEQ ID NO: 45191 - protein, 864 aa, Homo sapiens
MTTEKSLVTEAENSQHQQKEEGEEAINSGQQEPQQEESCQTAAEGDNWCEQKLKASNGDTPTHEDLTKNKERTSESRGLSRLFSSFLKRPKSQVSEEEGKEVESDKEKGEGGQKEIEFGTSLDEEIILKAPIAAPEPELKTDPSLDLHSLSSAETQPAQEELREDPDFEIKEGEGLEECSKIEVKEESPQSKAETELKASQKPIRKHRNMHCKVSLLDDTVYECVVEKHAKGQDLLKRVCEHLNLLEEDYFGLAIWDNATSKTWLDSAKEIKKQVRGVPWNFTFNVKFYPPDPAQLTEDITRYYLCLQLRQDIVAGRLPCSFATLALLGSYTIQSELGDYDPELHGVDYVSDFKLAPNQTKELEEKVMELHKSYRSMTPAQADLEFLENAKKLSMYGVDLHKAKDLEGVDIILGVCSSGLLVYKDKLRINRFPWPKVLKISYKRSSFFIKIRPGEQEQYESTIGFKLPSYRAAKKLWKVCVEHHTFFRLTSTDTIPKSKFLALGSKFRYSGRTQAQTRQASALIDRPAPHFERTASKRASRSLDGAAAVDSADRSPRPTSAPAITQGQVAEGGVLDASAKKTVVPKAQKETVKAEVKKEDEPPEQAEPEPTEAWKVEKTHIEVTVPTSNGDQTQKLAEKTEDLIRMRKKKRERLDGENIYIRHSNLMLEDLDKSQEEIKKHHASISELKKNFMESVPEPRPSEWDKRLSTHSPFRTLNINGQIPTGEGPPLVKTQTVTISDNANAVKSEIPTKDVPIVHTETKTITYEAAQTDDNSGDLDPGVLLTAQTITSETPSSTTTTQITKTVKGGISETRIEKRIVITGDADIDHDQVLVQAIKEAKEQHPDMSVTKVVVHQETEIADE

SEQ ID NO: 45192 - protein, 775 aa, Homo sapiens
MTTEKSLVTEAENSQHQQKEEGEEAINSGQQEPQQEESCQTAAEGDNWCEQKLKASNGDTPTHEDLTKNKERTSESRGLSRLFSSFLKRPKSQVSEEEGKEVESDKEKGEGGQKEIEFGTSLDEEIILKAPIAAPEPELKTDPSLDLHSLSSAETQPAQEELREDPDFEIKEGEGLEECSKIEVKEESPQSKAETELKASQKPIRKHRNMHCKVSLLDDTVYECVVETWLDSAKEIKKQVRGVPWNFTFNVKFYPPDPAQLTEDITRYYLCLQLRQDIVAGRLPCSFATLALLGSYTIQSELGDYDPELHGVDYVSDFKLAPNQTKELEEKVMELHKSYRSMTPAQADLEFLENAKKLSMYGVDLHKAKDLEGVDIILGVCSSGLLVYKDKLRINRFPWPKVLKISYKRSSFFIKIRPGEQEQYESTIGFKLPSYRAAKKLWKVCVEHHTFFRLTSTDTIPKSKFLALGSKFRYSGRTQAQTRQASALIDRPAPHFERTASKRASRSLDGAAAVDSADRSPRPTSAPAITQGQVAEGGVLDASAKKTVVPKAQKETVKAEVKKEDEPPEQAEPEPTEAWKDLDKSQEEIKKHHASISELKKNFMESVPEPRPSEWDKRLSTHSPFRTLNINGQIPTGEGPPLVKTQTVTISDNANAVKSEIPTKDVPIVHTETKTITYEAAQTDDNSGDLDPGVLLTAQTITSETPSSTTTTQITKTVKGGISETRIEKRIVITGDADIDHDQVLVQAIKEAKEQHPDMSVTKVVVHQETEIADE

SEQ ID NO: 45193 - protein, 641 aa, Homo sapiens
MHCKVSLLDDTVYECVVEKHAKGQDLLKRVCEHLNLLEEDYFGLAIWDNATSKTWLDSAKEIKKQVRGVPWNFTFNVKFYPPDPAQLTEDITRYYLCLQLRQDIVAGRLPCSFATLALLGSYTIQSELGDYDPELHGVDYVSDFKLAPNQTKELEEKVMELHKSYRSMTPAQADLEFLENAKKLSMYGVDLHKAKDLEGVDIILGVCSSGLLVYKDKLRINRFPWPKVLKISYKRSSFFIKIRPGEQEQYESTIGFKLPSYRAAKKLWKVCVEHHTFFRLTSTDTIPKSKFLALGSKFRYSGRTQAQTRQASALIDRPAPHFERTASKRASRSLDGAAAVDSADRSPRPTSAPAITQGQVAEGGVLDASAKKTVVPKAQKETVKAEVKKEDEPPEQAEPEPTEAWKVEKTHIEVTVPTSNGDQTQKKRERLDGENIYIRHSNLMLEDLDKSQEEIKKHHASISELKKNFMESVPEPRPSEWDKRLSTHSPFRTLNINGQIPTGEGPPLVKTQTVTISDNANAVKSEIPTKDVPIVHTETKTITYEAAQTDDNSGDLDPGVLLTAQTITSETPSSTTTTQITKTVKGGISETRIEKRIVITGDADIDHDQVLVQAIKEAKEQHPDMSVTKVVVHQETEIADE

SEQ ID NO: 45194 - protein, 831 aa, Homo sapiens
MTTEKSLVTEAENSQHQQKEEGEEAINSGQQEPQQEESCQTAAEGDNWCEQKLKASNGDTPTHEDLTKNKERTSESRGLSRLFSSFLKRPKSQVSEEEGKEVESDKEKGEGGQKEIEFGTSLDEEIILKAPIAAPEPELKTDPSLDLHSLSSAETQPAQEELREDPDFEIKEGEGLEECSKIEVKEESPQSKAETELKASQKPIRKHRNMHCKVSLLDDTVYECVVEKHAKGQDLLKRVCEHLNLLEEDYFGLAIWDNATSKTWLDSAKEIKKQVRGVPWNFTFNVKFYPPDPAQLTEDITRYYLCLQLRQDIVAGRLPCSFATLALLGSYTIQSELGDYDPELHGVDYVSDFKLAPNQTKELEEKVMELHKSYRSMTPAQADLEFLENAKKLSMYGVDLHKAKDLEGVDIILGVCSSGLLVYKDKLRINRFPWPKVLKISYKRSSFFIKIRPGEQEQYESTIGFKLPSYRAAKKLWKVCVEHHTFFRLTSTDTIPKSKFLALGSKFRYSGRTQAQTRQASALIDRPAPHFERTASKRASRSLDGAAAVDSADRSPRPTSAPAITQGQVAEGGVLDASAKKTVVPKAQKETVKAEVKKEDEPPEQAEPEPTEAWKKKRERLDGENIYIRHSNLMLEDLDKSQEEIKKHHASISELKKNFMESVPEPRPSEWDKRLSTHSPFRTLNINGQIPTGEGPPLVKTQTVTISDNANAVKSEIPTKDVPIVHTETKTITYEAAQTDDNSGDLDPGVLLTAQTITSETPSSTTTTQITKTVKGGISETRIEKRIVITGDADIDHDQVLVQAIKEAKEQHPDMSVTKVVVHQETEIADE

SEQ ID NO: 45195 - protein, 827 aa, Homo sapiens
RARAARSQNAVGPVPAAPSPEKSLVTEAENSQHQQKEEGEEAINSGQQEPQQEESCQTAAEGDNWCEQKLKASNGDTPTHEDLTKNKERTSESRGLSRLFSSFLKRPKSQVSEEEGKEVESDKEKGEGGQKEIEFGTSLDEEIILKAPIAAPEPELKTDPSLDLHSLSSAETQPAQEELREDPDFEIKEGEGLEECSKIEVKEESPQSKAETELKASQKPIRKHRNMHCKVSLLDDTVYECVVEKHAKGQDLLKRVCEHLNLLEEDYFGLAIWDNATSKTWLDSAKEIKKQVRGVPWNFTFNVKFYPPDPAQLTEDITRYYLCLQLRQDIVAGRLPCSFATLALLGSYTIQSELGDYDPELHGVDYVSDFKLAPNQTKELEEKVMELHKSYRSMTPAQADLEFLENAKKLSMYGVDLHKAKDLEGVDIILGVCSSGLLVYKDKLRINRFPWPKVLKISYKRSSFFIKIRPGEQEQYESTIGFKLPSYRAAKKLWKVCVEHHTFFRLTSTDTIPKSKFLALGSKFRYSGRTQAQTRQASALIDRPAPHFERTASKRASRSLDGAAAVDSADRSPRPTSAPAITQGQVAEGGVLDASAKKTVVPKAQKETVKAEVKKEDEPPEQAEPEPTEAWKDLDKSQEEIKKHHASISELKKNFMESVPEPRPSEWDKRLSTHSPFRTLNINGQIPTGEGPPLVKTQTVTISDNANAVKSEIPTKDVPIVHTETKTITYEAAQTDDNSGDLDPGVLLTAQTITSETPSSTTTTQITKTVKGGISETRIEKRIVITGDADIDHDQVLVQAIKEAKEQHPDMSVTKVVVHQETEIADE

SEQ ID NO: 45196 - protein, 720 aa, Homo sapiens
MTTEKSLVTEAENSQHQQKEEGEEAINSGQQEPQQEESCQTAAEGDNWCEQKLKASNGDTPTHEDLTKNKERTSESRGLSRLFSSFLKRPKSQVSEEEGKEVESDKEKGEGGQKEIEFGTSLDEEIILKAPIAAPEPELKTDPSLDLHSLSSAETQPAQEELREDPDFEIKEGEGLEECSKIEVKEESPQSKAETELKASQKPIRKHRNMHCKVSLLDDTVYECVVEKHAKGQDLLKRVCEHLNLLEEDYFGLAIWDNATSKTWLDSAKEIKKQVRGVPWNFTFNVKFYPPDPAQLTEDITRYYLCLQLRQDIVAGRLPCSFATLALLGSYTIQSELGDYDPELHGVDYVSDFKLAPNQTKELEEKVMELHKSYRSMTPAQADLEFLENAKKLSMYGVDLHKAKDLEGVDIILGVCSSGLLVYKDKLRINRFPWPKVLKISYKRSSFFIKIRPGEQEQYESTIGFKLPSYRAAKKLWKVCVEHHTFFRLTSTDTIPKSKFLALGSKFRYSGRTQAQTRQASALIDRPAPHFERTASKRASRSLDGAAAVDSADRSPRPTSAPAITQGQVAEGGVLDASAKKTVVPKAQKETVKAEVKKEDEPPEQAEPEPTEAWKVEKTHIEVTVPTSNGDQTQKKRERLDGENIYIRHSNLMLEDLDKSQEEIKKHHASISELKKNFMESVPEPRPSEWDKRLSTHSPFRTLNINGQIPTGEGVSTLST

SEQ ID NO: 45197 - protein, 864 aa, Homo sapiens; identical to SEQ ID NO: 45191

SEQ ID NO: 45198 - protein, 588 aa, Homo sapiens
MHCKVSLLDDTVYECVVEKHAKGQDLLKRVCEHLNLLEEDYFGLAIWDNATSKTWLDSAKEIKKQVRGVPWNFTFNVKFYPPDPAQLTEDITRYYLCLQLRQDIVAGRLPCSFATLALLGSYTIQSELGDYDPELHGVDYVSDFKLAPNQTKELEEKVMELHKSYRSMTPAQADLEFLENAKKLSMYGVDLHKAKDLEGVDIILGVCSSGLLVYKDKLRINRFPWPKVLKISYKRSSFFIKIRPGEQEQYESTIGFKLPSYRAAKKLWKVCVEHHTFFRLTSTDTIPKSKFLALGSKFRYSGRTQAQTRQASALIDRPAPHFERTASKRASRSLDGAAAVDSADRSPRPTSAPAITQGQVAEGGVLDASAKKTVVPKAQKETVKAEVKKEDEPPEQAEPEPTEAWKKKRERLDGENIYIRHSNLMLEDLDKSQEEIKKHHASISELKKNFMESVPEPRPSEWDKRLSTHSPFRTLNINGQIPTGEGPPLVKTQTVTISDNANAVKSEIPTKDVPIVHTETKTITYEAAQTVKGGISETRIEKRIVITGDADIDHDQVLVQAIKEAKEQHPDMSVTKVVVHQETEIADE

SEQ ID NO: 45199 - protein, 704 aa, Homo sapiens
MTTEKSLVTEAENSQHQQKEEGEEAINSGQQEPQQEESCQTAAEGDNWCEQKLKASNGDTPTHEDLTKNKERTSESRGLSRLFSSFLKRPKSQVSEEEGKEVESDKEKGEGGQKEIEFGTSLDEEIILKAPIAAPEPELKTDPSLDLHSLSSAETQTWLDSAKEIKKQVRGVPWNFTFNVKFYPPDPAQLTEDITRYYLCLQLRQDIVAGRLPCSFATLALLGSYTIQSELGDYDPELHGVDYVSDFKLAPNQTKELEEKVMELHKSYRSMTPAQADLEFLENAKKLSMYGVDLHKAKDLEGVDIILGVCSSGLLVYKDKLRINRFPWPKVLKISYKRSSFFIKIRPGEQEQYESTIGFKLPSYRAAKKLWKVCVEHHTFFRLTSTDTIPKSKFLALGSKFRYSGRTQAQTRQASALIDRPAPHFERTASKRASRSLDGAAAVDSADRSPRPTSAPAITQGQVAEGGVLDASAKKTVVPKAQKETVKAEVKKEDEPPEQAEPEPTEAWKDLDKSQEEIKKHHASISELKKNFMESVPEPRPSEWDKRLSTHSPFRTLNINGQIPTGEGPPLVKTQTVTISDNANAVKSEIPTKDVPIVHTETKTITYEAAQTDDNSGDLDPGVLLTAQTITSETPSSTTTTQITKTVKGGISETRIEKRIVITGDADIDHDQVLVQAIKEAKEQHPDMSVTKVVVHQETEIADE

SEQ ID NO: 45200 - protein, 767 aa, Homo sapiens
MTTEKSLVTEAENSQHQQKEEGEEAINSGQQEPQQEESCQTAAEGDNWCEQKLKASNGDTPTHEDLTKNKERTSESRGLSRLFSSFLKRPKSQVSEEEGKEVESDKEKGEGGQKEIEFGTSLDEEIILKAPIAAPEPELKTDPSLDLHSLSSAETQPAQEELREDPDFEIKEGEGLEECSKIEVKEESPQSKAETELKASQKPIRKHRNMHCKVSLLDDTVYECVVEKHAKGQDLLKRVCEHLNLLEEDYFGLAIWDNATSKTWLDSAKEIKKQVRGVPWNFTFNVKFYPPDPAQLTEDITRYYLCLQLRQDIVAGRLPCSFATLALLGSYTIQSELGDYDPELHGVDYVSDFKLAPNQTKELEEKVMELHKSYRSMTPAQADLEFLENAKKLSMYGVDLHKAKDLEGVDIILGVCSSGLLVYKDKLRINRFPWPKVLKISYKRSSFFIKIRPGEQEQYESTIGFKLPSYRAAKKLWKVCVEHHTFFRLTSTDTIPKSKFLALGSKFRYSGRTQAQTRQASALIDRPAPHFERTASKRASRSLDGAAAVDSADRSPRPTSAPAITQGQVAEGGVLDASAKKTVVPKAQKETVKAEVKKEDEPPEQAEPEPTEAWKDLDKSQEEIKKHHASISELKKNFMESVPEPRPSEWDKRLSTHSPFRTLNINGQIPTGEGTDDNSGDLDPGVLLTAQTITSETPSSTTTTQITKTVKGGISETRIEKRIVITGDADIDHDQVLVQAIKEAKEQHPDMSVTKVVVHQETEIADE

SEQ ID NO: 45201 - protein, 714 aa, Homo sapiens
MTTEKSLVTEAENSQHQQKEEGEEAINSGQQEPQQEESCQTAAEGDNWCEQKLKASNGDTPTHEDLTKNKERTSESRGLSRLFSSFLKRPKSQVSEEEGKEVESDKEKGEGGQKEIEFGTSLDEEIILKAPIAAPEPELKTDPSLDLHSLSSAETQPAQEELREDPDFEIKEGEGLEECSKIEVKEESPQSKAETELKASQKPIRKHRNMHCKVSLLDDTVYECVVEKHAKGQDLLKRVCEHLNLLEEDYFGLAIWDNATSKTWLDSAKEIKKQVRGVPWNFTFNVKFYPPDPAQLTEDITRYYLCLQLRQDIVAGRLPCSFATLALLGSYTIQSELGDYDPELHGVDYVSDFKLAPNQTKELEEKVMELHKSYRSMTPAQADLEFLENAKKLSMYGVDLHKAKDLEGVDIILGVCSSGLLVYKDKLRINRFPWPKVLKISYKRSSFFIKIRPGEQEQYESTIGFKLPSYRAAKKLWKVCVEHHTFFRLTSTDTIPKSKFLALGSKFRYSGRTQAQTRQASALIDRPAPHFERTASKRASRSLDGAAAVDSADRSPRPTSAPAITQGQVAEGGVLDASAKKTVVPKAQKETVKAEVKKEDEPPEQAEPEPTEAWKVEKTHIEVTVPTSNGDQTQKKRERLDGENIYIRHSNLMLEDLDKSQEEIKKHHASISELKKNFMESVPEPRPSEWDKRLSTHSPFRTLNINGQIPTGEG

SEQ ID NO: 45202 - protein, 686 aa, Homo sapiens
MGCFCAVPEEFYCEVLLLDESKLTLTTQQQGIKKSTKGSVVLDHVFHHVNLVEIDYFGLRYCDRSHQTYWLDPAKTLAEHKELINTGPPYTLYFGIKFYAEDPCKLKEEITRYQFFLQVKQDVLQGRLPCPVNTAAQLGAYAIQSELGDYDPYKHTAGYVSEYRFVPDQKEELEEAIERIHKTLMGQIPSEAELNYLRTAKSLEMYGVDLHPVYGENKSEYFLGLTPVGVVVYKNKKQVGKYFWPRITKVHFKETQFELRVLGKDCNETSFFFEARSKTACKHLWKCSVEHHTFFRMPENESNSLSRKLSKFGSIRYKHRYSGRTALQMSRDLSIQLPRPDQNVTRSRSKTYPKRIAQTQPAESNSISRITANMENGENEGTIKIIAPSPVKSFKKAKNENSPDTQRSKSHAPWEENGPQSGLYNSPSDRTKSPKFPYTRRRNPSCGSDNDSVQPVRRRKAHNSGEDSDLKQRRRSRSRCNTSSGSESENSNREYRKKRNRIRQENDMVDSAPQWEAVLRRQKEKNQADPNNRRSRHRSRSRSPDIQAKEELWKHIQKELVDPSGLSEEQLKEIPYTKIETQGDPIRIRHSHSPRSYRQYRRSQCSDGERSVLSEVNSKTDLVPPLPVTRSSDAQGSGDATVHQRRNGSKDSLMEEKPQTSTNNLAGKHTAKTIKTIQASRLKTET

SEQ ID NO: 45203 - protein, 611 aa, Homo sapiens
MDFKKSKLTLVVVEDDDQGREQEHTFVFRLDSARTCKHLWKCAVEHHAFFRLRTPGNSKSNRSDFIRLGSRFRFSGRTEYQATHGSRLRRTSTFERKPSKRYPSRRHSTFKASNPVIAAQLCSKTNPEVHNYQPQYHPNIHPSQPRWHPHSPNVSYPLPSPVLSSSDRLPFGIEENGGTPFLTAASGRHHHQHQHQHQHQHHSNYSLSLTLENKEGPLRSPNSSSKSLTKLSPGTPALFSEAAAHLKKLELETVKAAGPWPPLHININKAEEKKVSEKTLQTPLLPSPVADHVKCNILKAQLENASRVNIQGGKEESPFVNINKKSSLQDASVRSPIPIRVETAQPAVEKPEIKPPRVRKLTRQYSFDEDDLPPDLAEAVGVTTSTTTNTTTAATQVSVPLPSPKVQNVSSPHKSEGKGLLSPGAKSPSDRGGAFTLEPGDLLMDFTEATPLAEPASNPHCAHSRCSPPLSLPMKEETTGVCMYPPIKTRLIKTFPVDTMNPFPDTFTTGPQFTADFRDSKLQCCPGPTSPLIPAATLRPLTETVHSADHLHHPETCFSGSQCRDTPAGTGEREDDEKTVDDRTVKFSPCHLEDGMVPSVRLLSSGFVCSL

SEQ ID NO: 45204 - protein, 440 aa, Homo sapiens
MKFLLIKDAPGKKKRKNLMLSFKRKHAKGQDLFDQIVYHLDLVETDYFGLQFLDSAQVAHWLDHAKPIKKQMKIGPAYALHFRVKYYSSEPNNLREEFTRYLFVLQLRHDILSGKLKCPYETAVELAALCLQAELGECELPEHTPELVSEFRFIPNQTEAMEFDIFQRWKECRGKSPAQAELSYLNKAKWLEMYGVDMHVVRGRDGCEYSLGLTPTGILIFEGANKIGLFFWPKITKMDFKKSKLTLVVVEDDDQGREQEHTFVFRLDSARTCKHLWKCAVEHHAFFRLRTPGNSKSNRSDFIRLGSRFRFSGRTEYQATHGSRLRRTSTFERKPSKRYPSRRHSTFKASNPVIAAQLCSKTNPEVHNYQPQYHPNIHPSQPRWHPHSPNVRPSFQDDRSHWKASASGDDSHFDYVHDQNQKNLGGMQSMMYRDKLMTAL

SEQ ID NO: 45205 - protein, 518 aa, Homo sapiens
MLRFLRRTFGRRSMQRYARGAAGRGAAGLGDERDGGPRGGPAAAASSSALPAAPGGSVFPAGGGPLLTGGAAVHISAAGAAKATLYCRVFLLDGTEVSVDLPKHAKGQDLFDQIVYHLDLVETDYFGLQFLDSAQVAHWLDHAKPIKKQMKIGPAYALHFRVKYYSSEPNNLREEFTRYLFVLQLRHDILSGKLKCPYETAVELAALCLQAELGECELPEHTPELVSEFRFIPNQTEAMEFDIFQRWKECRGKSPAQAELSYLNKAKWLEMYGVDMHVVRGRDGCEYSLGLTPTGILIFEGANKIGLFFWPKITKMDFKKSKLTLVVVEDDDQGREQEHTFVFRLDSARTCKHLWKCAVEHHAFFRLRTPGNSKSNRSDFIRLGSRFRFSGRTEYQATHGSRLRRTSTFERKPSKRYPSRRHSTFKASNPVIAAQLCSKTNPEVHNYQPQYHPNIHPSQPRWHPHSPNVRPSFQDDRSHWKASASGDDSHFDYVHDQNQKNLGGMQSMMYRDKLMTAL

SEQ ID NO: 45206 - protein, 900 aa, Homo sapiens
MLRFLRRTFGRRSMQRYARGAAGRGAAGLGDERDGGPRGGPAAAASSSALPAAPGGSVFPAGGGPLLTGGAAVHISAAGAAKATLYCRVFLLDGTEVSVDLPKHAKGQDLFDQIVYHLDLVETDYFGLQFLDSAQVAHWLDHAKPIKKQMKIGPAYALHFRVKYYSSEPNNLREEFTRYLFVLQLRHDILSGKLKCPYETAVELAALCLQAELGECELPEHTPELVSEFRFIPNQTEAMEFDIFQRWKECRGKSPAQAELSYLNKAKWLEMYGVDMHVVRGRDGCEYSLGLTPTGILIFEGANKIGLFFWPKITKMDFKKSKLTLVVVEDDDQGREQEHTFVFRLDSARTCKHLWKCAVEHHAFFRLRTPGNSKSNRSDFIRLGSRFRFSGRTEYQATHGSRLRRTSTFERKPSKRYPSRRHSTFKASNPVIAAQLCSKTNPEVHNYQPQYHPNIHPSQPRWHPHSPNVSYPLPSPVLSSSDRLPFGIEENGGTPFLTAASGRHHHQHQHQHQHQHHSNYSLSLTLENKEGPLRSPNSSSKSLTKLSPGTPALFSEAAAHLKKLELETVKAAGPWPPLHININKAEEKKVSEKTLQTPLLPSPVADHVKCNILKAQLENASRVNIQGGKEESPFVNINKKSSLQDASVRSPIPIRVETAQPAVEKPEIKPPRVRKLTRQYSFDEDDLPPDLAEAVGVTTSTTTNTTTAATQVSVPLPSPKVQNVSSPHKSEGKGLLSPGAKSPSDRGGAFTLEPGDLLMDFTEATPLAEPASNPHCAHSRCSPPLSLPMKEETTGVCMYPPIKTRLIKTFPVDTMNPFPDTFTTGPQFTADFRDSKLQCCPGPTSPLIPAATLRPLTETVSTVQTIYTTRKPVSLAASAETLRQELEREKMMKRLLMTEL

SEQ ID NO: 45207 - protein, 733 aa, Homo sapiens
MLSFFRRTLGRRSMRKHAEKERLREAQRAATHIPAAGDSKSIITCRVSLLDGTDVSVDLPKKAKGQELFDQIMYHLDLIESDYFGLRFMDSAQVAHWLDGTKSIKKQVKIGSPYCLHLRVKFYSSEPNNLREELTRYLFVLQLKQDILSGKLDCPFDTAVQLAAYNLQAELGDYDLAEHSPELVSEFRFVPIQTEEMELAIFEKWKEYRGQTPAQAETNYLNKAKWLEMYGVDMHVVKARDGNDYSLGLTPTGVLVFEGDTKIGLFFWPKITRLDFKKNKLTLVVVEDDDQGKEQEHTFVFRLDHPKACKHLWKCAVEHHAFFRLRGPVQKSSHRSGFIRLGSRFRYSGKTEYQTTKTNKARRSTSFERRPSKRYSRRTLQMKACATKPEELSVHNNVSTQSNGSQQAWGMRSALPVSPSISSAPVPVEIENLPQSPGTDQHDRKCIPLNIDLLNSPDLLEATIGDVIGASDTMETSQALNDVNVATRLPGLGEPEVEYETLKDTSEKLKQLEMENSPLLSPRSNIDVNINSQEEVVKLTEKCLNNVIESPGLNVMRVPPDFKSNILKAQVEAVHKVTKEDSLLSHKNANVQDAATNSAVLNENNVPLPKESLETLMLITPADSGSVLKEATDELDALLASLTENLIDHTVAPQVSSTSMITPRWIVPQSGAMSNGLAGCEMLLTGKEGHGNKDGISLISPPAPFLVDAVTSSGPILAEEAVLKQKCLLTTEL

SEQ ID NO: 45208 - protein, 505 aa, Homo sapiens
MLSFFRRTLGRRSMRKHAEKERLREAQRAATHIPAAGDSKSIITCRVSLLDGTDVSVDLPKKAKGQELFDQIMYHLDLIESDYFGLRFMDSAQVAHWLDGTKSIKKQVKIGSPYCLHLRVKFYSSEPNNLREELTRYLFVLQLKQDILSGKLDCPFDTAVQLAAYNLQAELGDYDLAEHSPELVSEFRFVPIQTEEMELAIFEKWKEYRGQTPAQAETNYLNKAKWLEMYGVDMHVVKARDGNDYSLGLTPTGVLVFEGDTKIGLFFWPKITRLDFKKNKLTLVVVEDDDQGKEQEHTFVFRLDHPKACKHLWKCAVEHHAFFRLRGPVQKSSHRSGFIRLGSRFRYSGKTEYQTTKTNKARRSTSFERRPSKRYSRRTLQMKACATKPEELSVHNNVSTQSNGSQQAWGMRSALPVSPSISSAPVPVEIENLPQSPGTDQHDRKWLSAASDCCQRGGNQWNTRALPPPQTAHRNYTDFVHEHNVKNAGIRHDVHFPGHTAMTEI

SEQ ID NO: 45209 - protein, 505 aa, Homo sapiens; identical to SEQ ID NO: 45208

SEQ ID NO: 45210 - protein, 687 aa, Homo sapiens
MLSFFRRTLGRRSMRKHAEKERLREAQRAATHIPAAGDSKSIITCRVSLLDGTDVSVDLPKKAKGQELFDQIMYHLDLIESDYFGLRFMDSAQVAHWLDGTKSIKKQVKIGSPYCLHLRVKFYSSEPNNLREELTRYLFVLQLKQDILSGKLDCPFDTAVQLAAYNLQAELGDYDLAEHSPELVSEFRFVPIQTEEMELAIFEKWKEYRGQTPAQAETNYLNKAKWLEMYGVDMHVVKARDGNDYSLGLTPTGVLVFEGDTKIGLFFWPKITRLDFKKNKLTLVVVEDDDQGKEQEHTFVFRLDHPKACKHLWKCAVEHHAFFRLRGPVQKSSHRSGFIRLGSRFRYSGKTEYQTTKTNKARRSTSFERRPSKRYSRRTLQMKACATKPEELSVHNNVSTQSNGSQQAWGMRSALPVSPSISSAPVPVEIENLPQSPGTDQHDRKCIPLNIDLLNSPDLLEATIGDVIGASDTMETSQALNDVNVATRLPGLGEPEVEYETLKDTSEKLKQLEMENSPLLSPRSNIDVNINSQEEVVKLTEKCLNNVIESPGLNVMRVPPDFKSNILKAQVEAVHKVTKEDSLLSHKNANVQDAATNSAVLNENNVPLPKESLETLMLITPADSGSVLKEATDELDALLASLTENLIDHTVAPQVSSTSMITPRWIVPLWSHFGRRSCPEAEVFTDH

SEQ ID NO: 45211 - protein, 732 aa, Homo sapiens
MLSFFRRTLGRRSMRKHAEKERLREAQRAATHIPAAGDSKSIITCRVSLLDGTDVSVDLPKKAKGQELFDQIMYHLDLIESDYFGLRFMDSAQVAHWLDGTKSIKKQVKIGSPYCLHLRVKFYSSEPNNLREELTRYLFVLQLKQDILSGKLDCPFDTAVQLAAYNLQAELGDYDLAEHSPELVSEFRFVPIQTEEMELAIFEKWKEYRGQTPAQAETNYLNKAKWLEMYGVDMHVVKARDGNDYSLGLTPTGVLVFEGDTKIGLFFWPKITRLDFKKNKLTLVVVEDDDQGKEQEHTFVFRLDHPKACKHLWKCAVEHHAFFRLRGPVQKSSHRSGFIRLGSRFRYSGKTEYQTTKTNKARRSTSFERRPSKRYSRRTLQMKACATKPEELSVHNNVSTQSNGSQQAWGMRSALPVSPSISSAPVPVEIENLPQSPGTDQHDRKCIPLNIDLLNSPDLLEATIGDVIGASDTMETSQALNDVNVATRLPGLGEPEVEYETLKDTSEKLKQLEMENSPLLSPRSNIDVNINSQEEVVKLTEKCLNNVIESPGLNVMRVPPDFKSNILKAQVEAVHKVTKEDSLLSHKNANVQDAATNSAVLNENNVPLPKESLETLMLITPADSGSVLKEATDELDALLASLTENLIDHTVAPQVSSTSMITPRWIVPSGAMSNGLAGCEMLLTGKEGHGNKDGISLISPPAPFLVDAVTSSGPILAEEAVLKQKCLLTTEL

SEQ ID NO: 45212 - protein, 779 aa, Homo sapiens
MEEKDYSEADGLSERTTPSKAQKSPQKIAKKYKSAICRVTLLDASEYECEVEKHGRGQVLFDLVCEHLNLLEKDYFGLTFCDADSQKNWLDPSKEIKKQIRSSPWNFAFTVKFYPPDPAQLTEDITRYYLCLQLRADIITGRLPCSFVTHALLGSYAVQAELGDYDAEEHVGNYVSELRFAPNQTRELEERIMELHKTYRGMTPGEAEIHFLENAKKLSMYGVDLHHAKDSEGIDIMLGVCANGLLIYRDRLRINRFAWPKILKISYKRSNFYIKIRPGEYEQFESTIGFKLPNHRSAKRLWKVCIEHHTFFRLVSPEPPPKGFLVMGSKFRYSGRTQAQTRQASALIDRPAPFFERSSSKRYTMSRSLDGAEFSRPASVSENHDAGPDGDKRDEDGESGGQRSEAEEGEVRTPTKIKELKFLDKPEDVLLKHQASINELKRTLKEPNSKLIHRDRDWERERRLPSSPASPSPKGTPEKANERAGLREGSEEKVKPPRPRAPESDTGDEDQDQERDTVFLKDNHLAIERKCSSITVSSTSSLEAEVDFTVIGDYHGSAFEDFSRSLPELDRDKSDSDTEGLLFSRDLNKGAPSQDDESGGIEDSPDRGACSTPDMPQFEPVKTETMTVSSLAIRKKIEPEAVLQTRVSAMDNTQENSLKSGKGAAAMIPGPQTVATEIRSLSPIIGKDVLTSTYGATAETLSTSTTTHVTKTVKGGFSETRIEKRIIITGDEDVDQDQALALAIKEAKLQHPDMLVTKAVVYRETDPSPEERDKKPQES

SEQ ID NO: 45213 - protein, 881 aa, Homo sapiens
MTTETGPDSEVKKAQEEAPQQPEAAAAVTTPVTPAGHGHPEANSNEKHPSQQDTRPAEQSLDMEEKDYSEADGLSERTTPSKAQKSPQKIAKKYKSAICRVTLLDASEYECEVEKHGRGQVLFDLVCEHLNLLEKDYFGLTFCDADSQKNWLDPSKEIKKQIRSSPWNFAFTVKFYPPDPAQLTEDITRYYLCLQLRADIITGRLPCSFVTHALLGSYAVQAELGDYDAEEHVGNYVSELRFAPNQTRELEERIMELHKTYRGMTPGEAEIHFLENAKKLSMYGVDLHHAKDSEGIDIMLGVCANGLLIYRDRLRINRFAWPKILKISYKRSNFYIKIRPGEYEQFESTIGFKLPNHRSAKRLWKVCIEHHTFFRLVSPEPPPKGFLVMGSKFRYSGRTQAQTRQASALIDRPAPFFERSSSKRYTMSRSLDGAEFSRPASVSENHDAGPDGDKRDEDGESGGQRSEAEEGEVRTPTKIKELKPEQETTPRHKQEFLDKPEDVLLKHQASINELKRTLKEPNSKLIHRDRDWERERRLPSSPASPSPKGTPEKANERAGLREGSEEKVKPPRPRAPESDTGDEDQDQERDTVFLKDNHLAIERKCSSITVSSTSSLEAEVDFTVIGDYHGSAFEDFSRSLPELDRDKSDSDTEGLLFSRDLNKGAPSQDDESGGIEDSPDRGACSTPDMPQFEPVKTETMTVSSLAIRKKIEPEAVLQTRVSAMDNTQQVDGSASVGREFIATTPSITTETISTTMENSLKSGKGAAAMIPGPQTVATEIRSLSPIIGKDVLTSTYGATAETLSTSTTTHVTKTVKGGFSETRIEKRIIITGDEDVDQDQALALAIKEAKLQHPDMLVTKAVVYRETDPSPEERDKKPQES

SEQ ID NO: 45214 - protein, 958 aa, Homo sapiens
MSRSLDGAEFSRPASVSENHDAGPDGDKRDEDGESGGQRSEAEEGEVRTPTKIKELKPEQETTPRHKQEFLDKPEDVLLKHQASINELKRTLKEPNSKLIHRDRDWERERRLPSSPASPSPKGTPEKANESQRTQDISQRDLVPEPGAAAGLEVFTQKSLAASPEGSEHWVFIEREYTRPEELGLLKVTTMQQEERQAGLAGILANGRLSKVDVLVDKFKVEVATEEMVGNRRANTQQQGKMIASPEDFESVGEEGPWIRESPGGAALASGRTLAEKLLEGSELRADTREATIRNRCMSDGQPEGQTELRKGLEEPHTCGRPTAPGTRPAEVDVLSPASDKGGLQSFLLDPAHAEARAELSNETDTSFAERSFYLNYEEKDSEDQVLPPPLEERKGRLDAPPGGEPRPTLNSLDLRVSAAASSRSKDEAHMTSPKEGAGTPKNHGGPGDLKGSPAGQTFAEGWEDAQWGVEGEFPHLTASAAREEGTPVSGDLLGKAEESPTEELKKHPPHRGQGVHPDPQACALPRAIPLNVRKPVKPDRGNFPPKERGVVPTQKGGAELKDREASAFLHMEVIIPLPASPGHSEDLAALEEASPSPTSHGSGEPSELREPFLRHVHLSKASPEPKDQVGFVVSPATGGERRPPPITSRKPRVVPEEAEGRIPLGFGFPSGKRREMTSFQAGDQEGSLEDISKTSVANKIRIFETHGAETRRMSEGEARSLPNDVSSEAPVGQAEQQRSTLSDLGFAQLQPPGDFASPKATHSTVIPLATRHFREDTSASYQEAHTELEPVSPNSGCETTLAEATGTGNKSGDAVREEKRSTNLAANTPGKGGRLRFASPSGPQRAGLREGSEEKVKPPRPRAPESDTGDEDQDQERDTVFLKDNHLAIERKCSSITVSSTSSLEAEVDFTVIGDYHGSAFEDFSRSLPELDRDKSDSDTEGLLFSRDLNKGAPSQD

SEQ ID NO: 45215 - protein, 880 aa, Homo sapiens
MTTETGPDSEVKKAQEEAPQQPEAAAAVTTPVTPAGHGHPEANSNEKHPSQQDTRPAEQSLDMEEKDYSEADGLSERTTPSKAQKSPQKIAKKYKSAICRVTLLDASEYECEVEKHGRGQVLFDLVCEHLNLLEKDYFGLTFCDADSQKNWLDPSKEIKKQIRSSPWNFAFTVKFYPPDPAQLTEDITRYYLCLQLRADIITGRLPCSFVTHALLGSYAVQAELGDYDAEEHVGNYVSELRFAPNQTRELEERIMELHKTYRGMTPGEAEIHFLENAKKLSMYGVDLHHAKDSEGIDIMLGVCANGLLIYRDRLRINRFAWPKILKISYKRSNFYIKIRPGEYEQFESTIGFKLPNHRSAKRLWKVCIEHHTFFRLVSPEPPPKGFLVMGSKFRYSGRTQAQTRQASALIDRPAPFFERSSSKRYTMSRSLDGAEFSRPASVSENHDAGPDGDKRDEDGESGGQRSEAEEGEVRTPTKIKELKPEQETTPRHKQEFLDKPEDVLLKHQASINELKRTLKEPNSKLIHRDRDWERERRLPSSPASPSPKGTPEKANERAGLREGSEEKVKPPRPRAPESDTGDEDQDQERDTVFLKDNHLAIERKCSSITVSSTSSLEAEVDFTVIGDYHGSAFEDFSRSLPELDRDKSDSDTEGLLFSRDLNKGAPSQDDESGGIEDSPDRGACSTPDMPQFEPVKTETMTVSSLAIRKKIEPEAVLQTRVSAMDNTQVDGSASVGREFIATTPSITTETISTTMENSLKSGKGAAAMIPGPQTVATEIRSLSPIIGKDVLTSTYGATAETLSTSTTTHVTKTVKGGFSETRIEKRIIITGDEDVDQDQALALAIKEAKLQHPDMLVTKAVVYRETDPSPEERDKKPQES

SEQ ID NO: 45216 - protein, 199 aa, Homo sapiens
MEEKDYSEADGLSERTTPSKAQKSPQKIAKKYKSAICRVTLLDASEYECEVEKHGRGQVLFDLVCEHLNLLEKDYFGLTFCDADSQKNWLDPSKEIKKQIRSSPWNFAFTVKFYPPDPAQLTEDITRYYLCLQLRADIITGRLPCSFVTHALLGSYAVQAELGDYDAEEHVGNYVSELRFAPNQTRELEERIMELHKTY

SEQ ID NO: 45217 - protein, 701 aa, Homo sapiens
MVFLGRINEVEPAKGLAESLAPTERSVKSLDMEEKDYSEADGLSERTTPSKAQKSPQKIAKKYKSAICRVTLLDASEYECEVEKHGRGQVLFDLVCEHLNLLEKDYFGLTFCDADSQKNWLDPSKEIKKQIRSSPWNFAFTVKFYPPDPAQLTEDITRYYLCLQLRADIITGRLPCSFVTHALLGSYAVQAELGDYDAEEHVGNYVSELRFAPNQTRELEERIMELHKTYRGMTPGEAEIHFLENAKKLSMYGVDLHHAKDSEGIDIMLGVCANGLLIYRDRLRINRFAWPKILKISYKRSNFYIKIRPGEYEQFESTIGFKLPNHRSAKRLWKVCIEHHTFFRLVSPEPPPKGFLVMGSKFRYSGRTQAQTRQASALIDRPAPFFERSSSKRYTMSRSLDGAEFSRPASVSENHDAGPDGDKRDEDGESGGQRSEAEEGEVRTPTKIKELKFLDKPEDVLLKHQASINELKRTLKEPNSKLIHRDRDWERERRLPSSPASPSPKGTPEKANEPVKTETMTVSSLAIRKKIEPEAVLQTRVSAMDNTQQVDGSASVGREFIATTPSITTETISTTMENSLKSGKGAAAMIPGPQTVATEIRSLSPIIGKDVLTSTYGATAETLSTSTTTHVTKTVKGGFSETRIEKRIIITGDEDVDQDQALALAIKEAKLQHPDMLVTKAVVYRETDPSPEERDKKPQES

SEQ ID NO: 45218 - protein, 772 aa, Homo sapiens
MEEKDYSEADGLSERTTPSKAQKSPQKIAKKYKSAICRVTLLDASEYECEVENWLDPSKEIKKQIRSSPWNFAFTVKFYPPDPAQLTEDITRYYLCLQLRADIITGRLPCSFVTHALLGSYAVQAELGDYDAEEHVGNYVSELRFAPNQTRELEERIMELHKTYRGMTPGEAEIHFLENAKKLSMYGVDLHHAKDSEGIDIMLGVCANGLLIYRDRLRINRFAWPKILKISYKRSNFYIKIRPGEYEQFESTIGFKLPNHRSAKRLWKVCIEHHTFFRLVSPEPPPKGFLVMGSKFRYSGRTQAQTRQASALIDRPAPFFERSSSKRYTMSRSLDGAEFSRPASVSENHDAGPDGDKRDEDGESGGQRSEAEEGEVRTPTKIKELKFLDKPEDVLLKHQASINELKRTLKEPNSKLIHRDRDWERERRLPSSPASPSPKGTPEKANERAGLREGSEEKVKPPRPRAPESDTGDEDQDQERDTVFLKDNHLAIERKCSSITVSSTSSLEAEVDFTVIGDYHGSAFEDFSRSLPELDRDKSDSDTEGLLFSRDLNKGAPSQDDESGGIEDSPDRGACSTPDMPQFEPVKTETMTVSSLAIRKKIEPEAVLQTRVSAMDNTQQVDGSASVGREFIATTPSITTETISTTMENSLKSGKGAAAMIPGPQTVATEIRSLSPIIGKDVLTSTYGATAETLSTSTTTHVTKTVKGGFSETRIEKRIIITGDEDVDQDQALALAIKEAKLQHPDMLVTKAVVYRETDPSPEERDKKPQES

SEQ ID NO: 45219 - protein, 772 aa, Homo sapiens; identical to SEQ ID NO: 45218

SEQ ID NO: 45220 - protein, 199 aa, Homo sapiens; identical to SEQ ID NO: 45216

SEQ ID NO: 45221 - protein, 794 aa, Homo sapiens [sequence omitted]

SEQ ID NO: 45222 - protein, 168 aa, Homo sapiens
MTTETGPDSEVKKAQEEAPQQPEAAAAVTTPVTPAGHGHPEANSNEKHPSQQDTRPAEQSLDMEEKDYSEADGLSERTTPSKAQKSPQKIAKKYKSAICRVTLLDASEYECEVEKHGRGQVLFDLVCEHLNLLEKDYFGLTFCDADSQKNWLDPSKEIKKQIRSSPWN

SEQ ID NO: 45223 - protein, 59 aa, Homo sapiens
MTTETGPDSEVKKAQEEAPQQPEAAAAVTTPVTPAGHGHPEANSNEKHPSQQDTRPAEQ

SEQ ID NO: 45224 - protein, 257 aa, Homo sapiens
MEEKDYSEADGLSERTTPSKAQKSPQKIAKKYKSAICRVTLLDASEYECEVEKHGRGQVLFDLVCEHLNLLEKDYFGLTFCDADSQKNWLDPSKEIKKQIRSSPWNFAFTVKFYPPDPAQLTEDITRYYLCLQLRADIITGRLPCSFVTHALLGSYAVQAELGDYDAEEHVGNYVSELRFAPNQTRELEERIMELHKTYRGMTPGEAEIHFLENAKKLSMYGVDLHHAKDSEGIDIMLGVCANGLLIYRDRLRINRF

SEQ ID NO: 45225 - protein, 37 aa, Homo sapiens
MEEKDYSEADGLSERTTPSKAQKSPQKIAKKYKSAIC

SEQ ID NO: 45226 - protein, 119 aa, Homo sapiens
  VARIANT 1: note = MOD_RES - Any amino acid
XSVGREFIATTPSITTETISTTMIIGKDVLTSTYGATAETLSTSTTTHVTKTVKGGFSETRIEKRIIITGDEDVDQDQALALAIKEAKLQHPDMLVTKAVVYRETDPSPEERDKKPQES

SEQ ID NO: 45227 - protein, 779 aa, Homo sapiens; identical to SEQ ID NO: 45212

SEQ ID NO: 45228 - protein, 114 aa, Homo sapiens
MTTETGPDSEVKKAQEEAPQQPEAAAAVTTPVTPAGHGHPEANSNEKHPSQQDTRPAEQSLDMEEKDYSEADGLSERTTPSKAQKSPQKIAKKYKSAICRVTLLDASEYECEVE

SEQ ID NO: 45229 - protein, 188 aa, Homo sapiens
MTTETGPDSEVKKAQEEAPQQPEAAAAVTTPVTPAGHGHPEANSNEKHPSQQDTRPAEQSLDMEEKDYSEADGLSERTTPSKAQKSPQKIAKKYKSAICRVTLLDASEYECEVEKHGRGQVLFDLVCEHLNLLEKDYFGLTFCDADSQKNWLDPSKEIKKQIRSSPWNFAFTVKFYPPDPAQLTEDIT

SEQ ID NO: 45230 - protein, 234 aa, Homo sapiens
MESTPEPRPNEWEKRRITPLSLQTQGRKGDHLFKDILSVKEKYLMPTIWTVEEKAQETDKTRAPESEGPCTGARDAVKSSHETLNIVEEKKRAEVGKDERVITEEMNGKEISPGSGPGEIRKVEPVTQKDSTSLSSESSSSSSESEEEDVGEYRPHHRVTEGTIREEQEYEEEVEEEPRPAAKVVEREEAVPEASPVTQAGASVITVETVIQENVGAQKIPGEKSVHEGALKQD

SEQ ID NO: 45231 - protein, 1005 aa, Homo sapiens
MTTEVGSVSEVKKDSSQLGTDATKEKPKEVAENQQNQSSDPEEEKGSQPPPAAESQSSLRRQKREKETSESRGISRFIPPWLKKQKSYTLVVAKDGGDKKEPTQAVVEEQVLDKEEPLPEEQRQAKGDAEEMAQKKQEIKVEVKEEKPSVSKEEKPSVSKVEMQPTELVSKEREEKVKETQEDKLEGGAAKRETKEVQTNELKAEKASQKVTKKTKTVQCKVTLLDGTEYSCDLEKHAKGQVLFDKVCEHLNLLEKDYFGLLFQESPEQKNWLDPAKEIKRQLRNLPWLFTFNVKFYPPDPSQLTEDITRYFLCLQLRQDIASGRLPCSFVTHALLGSYTLQAELGDYDPEEHGSIDLSEFQFAPTQTKELEEKVAELHKTHRGLSPAQADSQFLENAKRLSMYGVDLHHAKDSEGVDIKLGVCANGLLIYKDRLRINRFAWPKILKISYKRSNFYIKVRPAELEQFESTIGFKLPNHRAAKRLWKVCVEHHTFYRLVSPEQPPKAKFLTLGSKFRYSGRTQAQTRQASTLIDRPAPHFERTSSKRVSRSLDGAPIGVMDQSLMKDFPGAAGEISAYGPGLVSIAVVQDGDGRREVRSPTKAPHLQLIEGKKNSLRVEGDNIYVRHSNLMLEELDKAQEDILKHQASISELKRNFMESTPEPRPNEWEKRRITPLSLQTQGSSHETLNIVEEKKRAEVGKDERVITEEMNGKEISPGSGPGEIRKVEPVTQKDSTSLSSESSSSSSESEEEDVGEYRPHHRVTEGTIREEQEYEEEVEEEPRPAAKVVEREEAVPEASPVTQAGASVITVETVIQENVGAQKIPGEKSVHEGALKQDMGEEAEEEPQKVNGEVSHVDIDVLPQIICCSEPPVVKTEMVTISDASQRTEISTKEVPIVQTETKTITYESPQIDGGAGGDSGTLLTAQTITSESVSTTTTTHITKTVKGGISETRIEKRIVITGDGDIDHDQALAQAIREAREQHPDMSVTRVVVHKETELAEEGED

SEQ ID NO: 45232 - protein, 1005 aa, Homo sapiens; identical to SEQ ID NO: 45231

SEQ ID NO: 45233 - protein, 673 aa, Homo sapiens
MTTEVGSVSEVKKDSSQLGTDATKEKPKEVAENQQNQSSDPEEEKGSQPPPAAESQSSLRRQKREKETSESRGISRFIPPWLKKQKSYTLVVAKDGGDKKEPTQAVVEEQVLDKEEPLPEEQRQAKGDAEEMAQKKQEIKVEVKEEKPSVSKEEKPSVSKVEMQPTELVSKEREEKVKETQEDKLEGGAAKRETKEVQTNELKAEKASQKVTKKTKTVQCKVTLLDGTEYSCDLEKHAKGQVLFDKVCEHLNLLEKDYFGLLFQESPEQKNWLDPAKEIKRQLRNLPWLFTFNVKFYPPDPSQLTEDITRYFLCLQLRQDIASGRLPCSFVTHALLGSYTLQAELGDYDPEEHGSIDLSEFQFAPTQTKELEEKVAELHKTHRGLSPAQADSQFLENAKRLSMYGVDLHHAKDSEGVDIKLGVCANGLLIYKDRLRINRFAWPKILKISYKRSNFYIKVRPAELEQFESTIGFKLPNHRAAKRLWKVCVEHHTFYRLVSPEQPPKAKFLTLGSKFRYSGRTQAQTRQASTLIDRPAPHFERTSSKRVSRSLDGAPIGVMDQSLMKDFPGAAGEISAYGPGLVSIAVVQDGDGRREVRSPTKAPHLQLIEGKTVKGGISETRIEKRIVITGDGDIDHDQALAQAIREAREQHPDMSVTRVVVHKETELAEEGED

SEQ ID NO: 45234 - protein, 633 aa, Homo sapiens
MTTEVGSVSEVKKDSSQLGTDATKEKPKEVAENQQNQSSDPEEEKGSQPPPAAESQSSLRRQKREKETSESRGISRFIPPWLKKQKSYTLVVAKDGGDKKEPTQAVVEEQVLDKEEPLPEEQRQAKGDAEEMAQKKQEIKVEVKEEKPSVSKEEKPSVSKVEMQPTELVSKEREEKVKETQEDKLEGGAAKRETKEVQTNELKAEKASQKVTKKTKTVQCKVTLLDGTEYSCDLEKHAKGQVLFDKVCEHLNLLEKDYFGLLFQESPEQKNWLDPAKEIKRQLRNLPWLFTFNVKFYPPDPSQLTEDITRYFLCLQLRQDIASGRLPCSFVTHALLGSYTLQAELGDYDPEEHGSIDLSEFQFAPTQTKELEEKVAELHKTHRGLSPAQADSQFLENAKRLSMYGVDLHHAKDSEGVDIKLGVCANGLLIYKDRLRINRFAWPKILKISYKRSNFYIKVRPAELEQFESTIGFKLPNHRAAKRLWKVCVEHHTFYRLVSPEQPPKAKFLTLGSKFRYSGRTQAQTRQASTLIDRPAPHFERTSSKRVSRSLDGAPIGVMDQSLMKDFPGAAGEISAYGPGLVSIAVVQDGDGRREVRSPTKAPHLQLIEGKSSHETLNIVEEKSGQRLGKTKE

SEQ ID NO: 45235 - protein, 747 aa, Homo sapiens
MTTEVGSVSEVKKDSSQLGTDATKEKPKEVAENQQNQSSDPEEEKGSQPPPAAESQSSLRRQKREKETSESRGISRFIPPWLKKQKSYTLVVAKDGGDKKEPTQAVVEEQVLDKEEPLPEEQRQAKGDAEEMAQKKQEIKVEVKEEKPSVSKEEKPSVSKVEMQPTELVSKEREEKVKETQEDKLEGGAAKRETKEVQTNELKAEKASQKVTKKTKTVQCKVTLLDGTEYSCDLEKHAKGQVLFDKVCEHLNLLEKDYFGLLFQESPEQKNWLDPAKEIKRQLRNLPWLFTFNVKFYPPDPSQLTEDITRYFLCLQLRQDIASGRLPCSFVTHALLGSYTLQAELGDYDPEEHGSIDLSEFQFAPTQTKELEEKVAELHKTHRGLSPAQADSQFLENAKRLSMYGVDLHHAKDSEGVDIKLGVCANGLLIYKDRLRINRFAWPKILKISYKRSNFYIKVRPAELEQFESTIGFKLPNHRAAKRLWKVCVEHHTFYRLVSPEQPPKAKFLTLGSKFRYSGRTQAQTRQASTLIDRPAPHFERTSSKRVSRSLDGAPIGVMDQSLMKDFPGAAGEISAYGPGLVSIAVVQDGDGRREVRSPTKAPHLQLIEGKPPVVKTEMVTISDASQRTEISTKEVPIVQTETKTITYESPQIDGGAGGDSGTLLTAQTITSESVSTTTTTHITKTVKGGISETRIEKRIVITGDGDIDHDQALAQAIREAREQHPDMSVTRVVVHKETELAEEGED

SEQ ID NO: 45236 - protein, 380 aa, Homo sapiens
  VARIANT 1: note = MOD_RES - Any amino acid
XLGSKFRYSGRTQAQTRQASTLIDRPAPHFERTSSKRVSRSLDGAPIGVMDQSLMKDFPGAAGEISAYGPGLVSIAVVQDGDGRREVRSPTKAPHLQLIEGKKNSLRVEGDNIYVRHSNLMLEELDKAQEDILKHQASISELKRNFMESTPEPRPNEWEKRRITPLSLQTQGRKGDHLFKDILSVKEKYLMPTIWTVEEKAQETDKTRAPESEGPCTGARDAVKSSHETLNIVEEKKRAEVGKDERVITEEMNGKEISPGSGPGEIRKVEPVTQKDSTSLSSESSSSSSESEEEDVGEYRPHHRVTEGTIREEQEYEEEVEEEPRPAAKVVEREEAVPEASPVTQAGASVITVETVIQENVGAQKIPGEKSVHEGALKQD

SEQ ID NO: 45237 - protein, 383 aa, Homo sapiens
MEEEETQLEEELDKAQEDILKHQASISELKRNFMESTPEPRPNEWEKRRITPLSLQTQGSSHETLNIVEEKKRAEVGKDERVITEEMNGKEISPGSGPGEIRKVEPVTQKDSTSLSSESSSSSSESEEEDVGEYRPHHRVTEGTIREEQEYEEEVEEEPRPAAKVVEREEAVPEASPVTQAGASVITVETVIQENVGAQKIPGEKSVHEGALKQDMGEEAEEEPQKVNGEVSHVDIDVLPQIICCSEPPVVKTEMVTISDASQRTEISTKEVPIVQTETKTITYESPQIDGGAGGDSGTLLTAQTITSESVSTTTTTHITKTVKGGISETRIEKRIVITGDGDIDHDQALAQAIREAREQHPDMSVTRVVVHKETELAEEGED

SEQ ID NO: 45238 - protein, 673 aa, Homo sapiens; identical to SEQ ID NO: 45233

SEQ ID NO: 45239 - protein, 153 aa, Homo sapiens
MTTEVGSVSEVKKDSSQLGTDATKEKPKEVAENQQNQSSDPEEEKGSQPPPAAESQSSLRRQKREKETSESRGISRFIPPWLKKQKSYTLVVAKDGGDKKEPTQAVVEEQVLDKEEPLPEEQRQAKGDAEEMAQKKQEIKVEVKEEKPSVSKE

SEQ ID NO: 45240 - protein, 747 aa, Homo sapiens; identical to SEQ ID NO: 45235

SEQ ID NO: 45241 - protein, 179 aa, Homo sapiens
MTTEVGSVSEVKKDSSQLGTDATKEKPKEVAENQQNQSSDPEEEKGSQPPPAAESQSSLRRQKREKETSESRGISRFIPPWLKKQKSYTLVVAKDGGDKKEPTQAVVEEQVLDKEEPLPEEQRQAKGDAEEMAQKKQEIKVEVKEEKPSVSKEEKPSVSKVEMQPTELVSKEREEKVKE

SEQ ID NO: 45242 - protein, 852 aa, Homo sapiens
MTTEVGSVSEVKKDSSQLGTDATKEKPKEVAENQQNQSSDPEEEKGSQPPPAAESQSSLRRQKREKETSESRGISRFIPPWLKKQKSYTLVVAKDGGDKKEPTQAVVEEQVLDKEEPLPEEQRQAKGDAEEMAQKKQEIKVEVKEEKPSVSKEEKPSVSKVEMQPTELVSKEREEKVKETQEDKLEGGAAKRETKEVQTNELKAEKASQKVTKKTKTVQCKVTLLDGTEYSCDLEKHAKGQVLFDKVCEHLNLLEKDYFGLLFQESPEQKNWLDPAKEIKRQLRNLPWLFTFNVKFYPPDPSQLTEDITRYFLCLQLRQDIASGRLPCSFVTHALLGSYTLQAELGDYDPEEHGSIDLSEFQFAPTQTKELEEKVAELHKTHRGLSPAQADSQFLENAKRLSMYGVDLHHAKDSEGVDIKLGVCANGLLIYKDRLRINRFAWPKILKISYKRSNFYIKVRPAELEQFESTIGFKLPNHRAAKRLWKVCVEHHTFYRLVSPEQPPKAKFLTLGSKFRYSGRTQAQTRQASTLIDRPAPHFERTSSKRVSRSLDGAPIGVMDQSLMKDFPGAAGEISAYGPGLVSIAVVQDGDGRREVRSPTKAPHLQLIEGKSSHETLNIVEEKKRAEVGKDERVITEEMNGKEISPGSGPGEIRKVEPVTQKDSTSLSSESSSSSSESEEEDVGEYRPHHRVTEGTIREEQEYEEEVEEEPRPAAKPPVVKTEMVTISDASQRTEISTKEVPIVQTETKTITYESPQIDGGAGGDSGTLLTAQTITSESVSTTTTTHITKTVKGGISETRIEKRIVITGDGDIDHDQALAQAIREAREQHPDMSVTRVVVHKETELAEEGED

SEQ ID NO: 45243 - protein, 118 aa, Homo sapiens
MTTEVGSVSEVKKDSSQLGTDATKEKPKEVAENQQNQSSDPEEEKGSQPPPAAESQSSLRRQKREKETSESRGISRFIPPWLKKQKSYTLVVAKDGGDKKEPTQAVVEEQVLDKEEPL

SEQ ID NO: 45244 - protein, 201 aa, Homo sapiens
MEEEETQLEEKNSLRVEGDNIYVRHSNLMLEELDKAQEDILKHQASISELKRNFMESTPEPRPNEWEKRRITPLSLQTQGTRAPESEGPCTGARDAVKPPVVKTEMVTISDASQRTEISTKEVPIVQTETKTITYESPQTVKGGISETRIEKRIVITGDGDIDHDQALAQAIREAREQHPDMSVTRVVVHKETELAEEGED

SEQ ID NO: 45245 - protein, 127 aa, Homo sapiens
MTTEVGSVSEVKKDSSQLGTDATKEKPKEVAENQQNQSSDPEEEKGSQPPPAAESQSSLRRQKREKETSESRGISRFIPPWLKKQKSYTLVVAKDGGDKKEPTQAVVEEQVLDKEEPLPEEQRQAKG

SEQ ID NO: 45246 - protein, 162 aa, Homo sapiens
MTTEVGSVSEVKKDSSQLGTDATKEKPKEVAENQQNQSSDPEEEKGSQPPPAAESQSSLRRQKREKETSESRGISRFIPPWLKKQKSYTLVVAKDGGDKKEPTQAVVEEQVLDKEEPLPEEQRQAKGDAEEMAQKKQEIKVEVKEEKPSVSKEEKPSVSKVE

SEQ ID NO: 45247 - protein, 1087 aa, Homo sapiens
MTTESGSDSESKPDQEAEPQEAAGAQGRAGAPVPEPPKEEQQQALEQFAAAAAHSTPVRREVTDKEQEFAARAAKQLEYQQLEDDKLSQKSSSSKLSRSPLKIVKKPKSMQCKVILLDGSEYTCDVEKRSRGQVLFDKVCEHLNLLEKDYFGLTYRDAENQKNWLDPAKEIKKQVRSGAWHFSFNVKFYPPDPAQLSEDITRYYLCLQLRDDIVSGRLPCSFVTLALLGSYTVQSELGDYDPDECGSDYISEFRFAPNHTKELEDKVIELHKSHRGMTPAEAEMHFLENAKKLSMYGVDLHHAKDSEGVEIMLGVCASGLLIYRDRLRINRFAWPKVLKISYKRNNFYIKIRPGEFEQFESTIGFKLPNHRAAKRLWKVCVEHHTFFRLLLPEAPPKKFLTLGSKFRYSGRTQAQTRRASALIDRPAPYFERSSSKRYTMSRSLDGEVGTGQYATTKGISQTNLITTVTPEKKAEEERDEEEDKRRKGEEVTPISAIRHEGKSPGLGTDSCPLSPPSTHCAPTSPTELRRRCKENDCKLPGYEPSRAEHLPGEPALDSDGPGRPYLGDQDVAFSYRQQTGKGTTLFSFSLQLPESFPSLLDDDGYLSFPNLSETNLLPQSLQHYLPIRSPSLVPCFLFIFFFLLSASFSVPYALTLSFPLALCLCYLEPKAASLSASLDNDPSDSSEEETDSERTDTAADGETTATESDQEEDAELKAQELEKTQDDLMKHQTNISELKRTFLETSTDTAVTNEWEKRLSTSPVRLAARQEDAPMIEPLVPEETKQSSGEKLMDGSEIFSLLESARKPTEFIGGVTSTSQSWVQKMETKTESSGIETEPTVHHLPLSTEKVVQETVLVEERRVVHASGDASYSAGDSGDAAAQPAFTGIKGKEGSALTEGAKEEGGEEVAKAVLEQEETAAASRERQEEQSAAIHISETLEQKPHFESSTVKTETISFGSVSPGGVKLEISTKEVPVVHTETKTITYESSQVDPGTDLEPGVLMSAQTITSETTSTTTTTHITKTVKGGISETRIEKRIVITGDADIDHDQALAQAIKEAKEQHPDMSVTKVVVHKETEITPEDGED

SEQ ID NO: 45248 - protein, 1087 aa, Homo sapiens; identical to SEQ ID NO: 45247

SEQ ID NO: 45249 - protein, 865 aa, Homo sapiens
MTTESGSDSESKPDQEAEPQEAAGAQGRAGAPVPEPPKEEQQQALEQFAAAAAHSTPVRREVTDKEQEFAARAAKQLEYQQLEDDKLSQKSSSSKLSRSPLKIVKKPKSMQCKVILLDGSEYTCDVEKRSRGQVLFDKVCEHLNLLEKDYFGLTYRDAENQKNWLDPAKEIKKQVRSGAWHFSFNVKFYPPDPAQLSEDITRYYLCLQLRDDIVSGRLPCSFVTLALLGSYTVQSELGDYDPDECGSDYISEFRFAPNHTKELEDKVIELHKSHRGMTPAEAEMHFLENAKKLSMYGVDLHHAKDSEGVEIMLGVCASGLLIYRDRLRINRFAWPKVLKISYKRNNFYIKIRPGEFEQFESTIGFKLPNHRAAKRLWKVCVEHHTFFRLLLPEAPPKKFLTLGSKFRYSGRTQAQTRRASALIDRPAPYFERSSSKRYTMSRSLDGASVNENHEIYMKDSMSAAEVGTGQYATTKGISQTNLITTVTPEKKAEEERDEEEDKRRKGEEVTPISAIRHEGKTDSERTDTAADGETTATEELEKTQDDLMKHQTNISELKRTFLETSTDTAVTNEWEKRLSTSPVRLAARQEDAPMIEPLVPEEKMETKTESSGIETEPTVHHLPLSTEKVVQETVLVEERRVVHASGDASYSAGDSGDAAAQPAFTGIKGKEGSALTEGAKEEGGEEVAKAVLEQEETAAASRERQEEQSAAIHISETLEQKPHFESSTVKTETISFGSVSPGGVKLEISTKEVPVVHTETKTITYESSQVDPGTDLEPGVLMSAQTITSETTSTTTTTHITKTVKGGISETRIEKRIVITGDADIDHDQALAQAIKEAKEQHPDMSVTKVVVHKETEITPEDGED

SEQ ID NO: 45250 - protein, 384 aa, Homo sapiens
MKHQTNISELKRTFLETSTDTAVTNEWEKRLSTSPVRLAARQEDAPMIEPLVPEETKEETEISEKVIFLQQGSAPFLESQTKQSSGEKLMDGSEIFSLLESARKPTEFIGGVTSTSQSWVQKMETKTESSGIETEPTVHHLPLSTEKVVQETVLVEERRVVHASGDASYSAGDSGDAAAQPAFTGIKGKEGSALTEGAKEEGGEEVAKAVLEQEETAAASRERQEEQSAAIHISETLEQKPHFESSTVKTETISFGSVSPGGVKLEISTKEVPVVHTETKTITYESSQVDPGTDLEPGVLMSAQTITSETTSTTTTTHITKTVKGGISETRIEKRIVITGDADIDHDQALAQAIKEAKEQHPDMSVTKVVVHKETEITPEDGED

SEQ ID NO: 45251 - protein, 756 aa, Homo sapiens
MQCKVILLDGSEYTCDVEKRSRGQVLFDKVCEHLNLLEKDYFGLTYRDAENQKNWLDPAKEIKKQVRSGAWHFSFNVKFYPPDPAQLSEDITRYYLCLQLRDDIVSGRLPCSFVTLALLGSYTVQSELGDYDPDECGSDYISEFRFAPNHTKELEDKVIELHKSHRGMTPAEAEMHFLENAKKLSMYGVDLHHAKDSEGVEIMLGVCASGLLIYRDRLRINRFAWPKVLKISYKRNNFYIKIRPGEFEQFESTIGFKLPNHRAAKRLWKVCVEHHTFFRLLLPEAPPKKFLTLGSKFRYSGRTQAQTRRASALIDRPAPYFERSSSKRYTMSRSLDGASVNENHEIYMKDSMSAAEVGTGQYATTKGISQTNLITTVTPEKKAEEERDEEEDKRRKGEEVTPISAIRHEGKTDSERTDTAADGETTATEELEKTQDDLMKHQTNISELKRTFLETSTDTAVTNEWEKRLSTSPVRLAARQEDAPMIEPLVPEEKMETKTESSGIETEPTVHHLPLSTEKVVQETVLVEERRVVHASGDASYSAGDSGDAAAQPAFTGIKGKEGSALTEGAKEEGGEEVAKAVLEQEETAAASRERQEEQSAAIHISETLEQKPHFESSTVKTETISFGSVSPGGVKLEISTKEVPVVHTETKTITYESSQVDPGTDLEPGVLMSAQTITSETTSTTTTTHITKTVKGGISETRIEKRIVITGDADIDHDQALAQAIKEAKEQHPDMSVTKVVVHKETEITPEDGED

SEQ ID NO: 45252 - protein, 392 aa, Homo sapiens
MKHQTNISELKRTFLETSTDTAVTNEWEKRLSTSPVRLAARQEDAPMIEPLVPEEPSVIKKMQEGDSADSVVTSRQIIFQKTVPSTLETKQSSGEKLMDGSEIFSLLESARKPTEFIGGVTSTSQSWVQKMETKTESSGIETEPTVHHLPLSTEKVVQETVLVEERRVVHASGDASYSAGDSGDAAAQPAFTGIKGKEGSALTEGAKEEGGEEVAKAVLEQEETAAASRERQEEQSAAIHISETLEQKPHFESSTVKTETISFGSVSPGGVKLEISTKEVPVVHTETKTITYESSQVDPGTDLEPGVLMSAQTITSETTSTTTTTHITKTVKGGISETRIEKRIVITGDADIDHDQALAQAIKEAKEQHPDMSVTKVVVHKETEITPEDGED

SEQ ID NO: 45253 - protein, 311 aa, Homo sapiens
RWQLGGAATAAAGGARVWRPLPASRSSFPPPSPRLDPGEFEGKSPCGGTCEQPYLSLPLRYFFSPRKVVPAGCEQAPGGAPKEGFGDSDSESKPDQEAEPQEAAGAQGRAGAPVPEPPKEEQQQALEQFAAAAAHSTPVRREVTDKEQEFAARAAKQLEYQQLEDDKLSQKSSSSKLSRSPLKIVKKPKSMQCKVILLDGSEYTCDVEKRSRGQVLFDKVCEHLNLLEKDYFGLTYRDAENQKNWLDPAKEIKKQVRSGAWHFSFNVKFYPPDPAQLSEDITRYYLCLQLRDDIVSGRLPCSFVTLALLGS

SEQ ID NO: 45254 - protein, 883 aa, Homo sapiens
MTTESGSDSESKPDQEAEPQEAAGAQGRAGAPVPEPPKEEQQQALEQFAAAAAHSTPVRREVTDKEQEFAARAAKQLEYQQLEDDKLSQKSSSSKLSRSPLKIVKKPKSMQCKVILLDGSEYTCDVEKRSRGQVLFDKVCEHLNLLEKDYFGLTYRDAENQKNWLDPAKEIKKQVRSGAWHFSFNVKFYPPDPAQLSEDITRYYLCLQLRDDIVSGRLPCSFVTLALLGSYTVQSELGDYDPDECGSDYISEFRFAPNHTKELEDKVIELHKSHRGMTPAEAEMHFLENAKKLSMYGVDLHHAKDSEGVEIMLGVCASGLLIYRDRLRINRFAWPKVLKISYKRNNFYIKIRPGEFEQFESTIGFKLPNHRAAKRLWKVCVEHHTFFRLLLPEAPPKKFLTLGSKFRYSGRTQAQTRRASALIDRPAPYFERSSSKRYTMSRSLDGASVNENHEIYMKDSMSAAEVGTGQYATTKGISQTNLITTVTPEKKAEEERDEEEDKRRKGEEVTPISAIRHEGKTDSERTDTAADGETTATESDQEEDAELKAQELEKTQDDLMKHQTNISELKRTFLETSTDTAVTNEWEKRLSTSPVRLAARQEDAPMIEPLVPEETKQSSGEKLMDGSEIFSLLESARKPTEFIGGVTSTSQSWVQKMETKTESSGIETEPTVHHLPLSTEKVVQETVLVEERRVVHASGDASYSAGDSGDAAAQPAFTGIKGKEGSALTEGAKEEGGEEVAKAVLEQEETAAASRERQEEQSAAIHISETLEQKPHFESSTVKTETISFGSVSPGGVKLEISTKEVPVVHTETKTITYESSQVDPGTDLEPGVLMSAQTITSETTSTTTTTHITKTVKGGISETRIEKRIVITGDADIDHDQE

SEQ ID NO: 45255 - protein, 756 aa, Homo sapiens; identical to SEQ ID NO: 45251

SEQ ID NO: 45256 - protein, 721 aa, Homo sapiens
MGQGEPSQRSTGLAGLYAAPAASPVFIKGSGMDALGIKSCDFQAARNNEEHHTKALSSRRLFVRRGQPFTIILYFRAPVRAFLPALKKVALTAQTGEQPSKINRTQATFPISSLGDRKWWSAVVEERDAQSWTISVTTPADAVIGHYSLLLQVSGRKQLLLGQFTLLFNPWNREDAVFLKNEAQRMEYLLNQNGLIYLGTADCIQAESWDFGQFEGDVIDLSLRLLSKDKQVEKWSQPVHVARVLGALLHFLKEQRVLPTPQTQATQEGALLNKRRGSVPILRQWLTGRGRPVYDGQAWVLAAVACTVLRCLGIPARVVTTFASAQGTGGRLLIDEYYNEEGLQNGEGQRGRIWIFQTSTECWMTRPALPQGYDGWQILHPSAPNGGGVLGSCDLVPVRAVKEGTLGLTPAVSDLFAAINASCVVWKCCEDGTLELTDSNTKYVGNNISTKGVGSDRCEDITQNYKYPEGSLQEKEVLERVEKEKMEREKDNGIRPPSLETASPLYLLLKAPSSLPLRGDAQISVTLVNHSEQEKAVQLAIGVQAVHYNGVLAAKLWRKKLHLTLSANLEKIITIGLFFSNFERNPPENTFLRLTAMATHSESNLSCFAQEDIAICRPHLAIKMPEKAEQYQPLTASVSLQNSLDAPMEDCVISILGRGLIHRERSYRFRSVWPENTMCAKFQFTPTHVGLQRLTVEVDCNMFQNLTNYKSVTVVAPELSA

SEQ ID NO: 45257 - protein, 619 aa, Homo sapiens
MGQALGIKSCDFQAARNNEEHHTKALSSRRLFVRRGQPFTIILYFRAPVRAFLPALKKVALTAQTGEQPSKINRTQATFPISSLGDRKWWSAVVEERDAQSWTISVTTPADAVIGHYSLLLQVSGRKQLLLGQFTLLFNPWNREDAVFLKNEAQRMEYLLNQNGLIYLGTADCIQAESWDFGQFEGDVIDLSLRLLSKDKQVEKWSQPVHVARVLGALLHFLKEQRVLPTPQTQATQEGALLNKRRGSVPILRQWLTGRGRPVYDGQAWVLAAVACTVLRCLGIPARVVTTFASAQGTGGRLLIDEYYNEEGLQNGEGQRGRIWKCCEDGTLELTDSNTKYVGNNISTKGVGSDRCEDITQNYKYPEGSLQEKEVLERVEKEKMEREKDNGIRPPSLETASPLYLLLKAPSSLPLRGDAQISVTLVNHSEQEKAVQLAIGVQAVHYNGVLAAKLWRKKLHLTLSANLEKIITIGLFFSNFERNPPENTFLRLTAMATHSESNLSCFAQEDIAICRPHLAIKMPEKAEQYQPLTASVSLQNSLDAPMEDCVISILGRGLIHRERSYRFRSVWPENTMCAKFQFTPTHVGLQRLTVEVDCNMFQNLTNYKSVTVVAPELSA

SEQ ID NO: 45258 - protein, 691 aa, Homo sapiens
MGQALGIKSCDFQAARNNEEHHTKALSSRRLFVRRGQPFTIILYFRAPVRAFLPALKKVALTAQTGEQPSKINRTQATFPISSLGDRKWWSAVVEERDAQSWTISVTTPADAVIGHYSLLLQVSGRKQLLLGQFTLLFNPWNREDAVFLKNEAQRMEYLLNQNGLIYLGTADCIQAESWDFGQFEGDVIDLSLRLLSKDKQVEKWSQPVHVARVLGALLHFLKEQRVLPTPQTQATQEGALLNKRRGSVPILRQWLTGRGRPVYDGQAWVLAAVACTVLRCLGIPARVVTTFASAQGTGGRLLIDEYYNEEGLQNGEGQRGRIWIFQTSTECWMTRPALPQGYDGWQILHPSAPNGGGVLGSCDLVPVRAVKEGTLGLTPAVSDLFAAINASCVVWKCCEDGTLELTDSNTKYVGNNISTKGVGSDRCEDITQNYKYPEGSLQEKEVLERVEKEKMEREKDNGIRPPSLETASPLYLLLKAPSSLPLRGDAQISVTLVNHSEQEKAVQLAIGVQAVHYNGVLAAKLWRKKLHLTLSANLEKIITIGLFFSNFERNPPENTFLRLTAMATHSESNLSCFAQEDIAICRPHLAIKMPEKAEQYQPLTASVSLQNSLDAPMEDCVISILGRGLIHRERSYRFRSVWPENTMCAKFQFTPTHVGLQRLTVEVDCNMFQNLTNYKSVTVVAPELSA

SEQ ID NO: 45259 - protein, 613 aa, Homo sapiens
MGQALGIKSCDFQAARNNEEHHTKALSSRRLFVRRGQPFTIILYFRAPVRAFLPALKKVALTAQTEDAVFLKNEAQRMEYLLNQNGLIYLGTADCIQAESWDFGQFEGDVIDLSLRLLSKDKQVEKWSQPVHVARVLGALLHFLKEQRVLPTPQTQATQEGALLNKRRGSVPILRQWLTGRGRPVYDGQAWVLAAVACTVLRCLGIPARVVTTFASAQGTGGRLLIDEYYNEEGLQNGEGQRGRIWIFQTSTECWMTRPALPQGYDGWQILHPSAPNGGGVLGSCDLVPVRAVKEGTLGLTPAVSDLFAAINASCVVWKCCEDGTLELTDSNTKYVGNNISTKGVGSDRCEDITQNYKYPEGSLQEKEVLERVEKEKMEREKDNGIRPPSLETASPLYLLLKAPSSLPLRGDAQISVTLVNHSEQEKAVQLAIGVQAVHYNGVLAAKLWRKKLHLTLSANLEKIITIGLFFSNFERNPPENTFLRLTAMATHSESNLSCFAQEDIAICRPHLAIKMPEKAEQYQPLTASVSLQNSLDAPMEDCVISILGRGLIHRERSYRFRSVWPENTMCAKFQFTPTHVGLQRLTVEVDCNMFQNLTNYKSVTVVAPELSA

SEQ ID NO: 45260 - protein, 405 aa, Homo sapiens
MERLQKQPLTSPGSVSPSRDSSVPGSPSSIVAKMDNQVLGYKDLAAIPKDKAILDIERPDLMIYEPHFTYSLLEHVELPRSRERSLSPKSTSPPPSPEVWADSRSPGIISQASAPRTTGTPRTSLPHFHHPETSRPDSNIYKKPPIYKQRESVGGSPQTKHLIEDLIIESSKFPAAQPPDPNQPAKIETDYWPCPPSLAVVETEWRKRKASRRGAEEEEEEEDDDSGEEMKALRERQREELSKVTSNLGKMILKEEMEKSLPIRRKTRSLPDRTPFHTSLHQGTSKSSSLPAYGRTTLSRLQSTEFSPSGSETGSPGLQNGEGQRGRMDRGNSLPCVLEQKIYPYEMLVVTNKGRTKLPPGVDRMRLERHLSAEDFSRVFAMSPEEFGKLALWKRNELKKKASLF

SEQ ID NO: 45261 - protein, 405 aa, Homo sapiens; identical to SEQ ID NO: 45260

SEQ ID NO: 45262 - protein, 541 aa, Homo sapiens
MIYEPHFTYSLLEHVELPRSRERSLSPKSTSPPPSPEVWADSRSPGIISQASAPRTTGTPRTSLPHFHHPETSRPDSNIYKKPPIYKQRESVGGSPQTKHLIEDLIIESSKFPAAQPPDPNQPAKIETDYWPCPPSLAVVETEWRKRKASRRGAEEEEEEEDDDSGEEMKALRERQREELSKVTSNLGKMILKEEMEKSLPIRRKTRSLPDRTPFHTSLHQGTSKSSSLPAYGRTTLSRLQSTEFSPSGSETGSPGLQNGEGQRGRMDRGNSLPCVLEQKIYPYEMLVVTNKGRTKLPPGVDRMRLERHLSAEDFSRVFAMSPEEFGKLALWKRNELKKKASLFGALVVRPVGCLEQLEGRCRGGKRPGRKSSRLLCRPPSPPILTPDSFPALQPPAPLTLVGTGPSSASGREVTPPLQLALTSARKPRASKPFAPALRLPQKPGLRVEMPPTHDPGPPPASRPRNGNSSTKPGTGQKLGLPPPLDGVKRPGLAHFGVSWLPALTYTHAPPHTLCSLKNVIYWGPPSCFPHLPLPYLTPPA

SEQ ID NO: 45263 - protein, 383 aa, Homo sapiens
MERLQKQPLTSPGSVSPSRDSSVPGSPSSIVAKMDNQVLGYKDLAAIPKDKAILDIERPDLMIYEPHFTYSLLEHVELPRSRERSLSPKSTSPPPSPEVWADSRSPGIISQASAPRTTGTPRTSLPHFHHPETSRPDSNIYKKPPIYKQRESVGGSPQTKHLIEDLIIESSKFPAAQPPDPNQPAKIETDYWPCPPSLAVVETEWRKRKASRRGAEEEEEEEDDDSGEEMKALRERQREELSKVTSNLGKMILKEEMEKSLPIRRKTRSLPDRTPFHTSLHQGTSKSSSLPAYGRTTLSRLQSTEFSPSGSETGSPGLQIYPYEMLVVTNKGRTKLPPGVDRMRLERHLSAEDFSRVFAMSPEEFGKLALWKRNELKKKASLF

SEQ ID NO: 45264 - protein, 383 aa, Homo sapiens; identical to SEQ ID NO: 45263

SEQ ID NO: 45265 - protein, 405 aa, Homo sapiens; identical to SEQ ID NO: 45260

SEQ ID NO: 45266 - protein, 358 aa, Homo sapiens
MERLQKAKMDNQVLGYKDLAAIPKDKAILDIERPDLMIYEPHFTYSLLEHVELPRSRERSLSPKSTSPPPSPEVWADSRSPGIISQASAPRTTGTPRTSLPHFHHPETSRPDSNIYKKPPIYKQRESVGGSPQTKHLIEDLIIESSKFPAAQPPDPNQPAKIETDYWPCPPSLAVVETEWRKRKASRRGAEEEEEEEDDDSGEEMKALRERQREELSKVTSNLGKMILKEEMEKSLPIRRKTRSLPDRTPFHTSLHQGTSKSSSLPAYGRTTLSRLQSTEFSPSGSETGSPGLQIYPYEMLVVTNKGRTKLPPGVDRMRLERHLSAEDFSRVFAMSPEEFGKLALWKRNELKKKASLF

SEQ ID NO: 45267 - protein, 383 aa, Homo sapiens; identical to SEQ ID NO: 45263

SEQ ID NO: 45268 - protein, 405 aa, Homo sapiens; identical to SEQ ID NO: 45260

SEQ ID NO: 45269 - protein, 365 aa, Homo sapiens
MERLQKAKMDNQVLGYKDLAAIPKDKAILDIERPDLMIYEPHFTYSLLEHVELPRSREVWADSRSPGIISQASAPRTTGTPRTSLPHFHHPETSRPDSNIYKKPPIYKQRESVGGSPQTKHLIEDLIIESSKFPAAQPPDPNQPAKIETDYWPCPPSLAVVETEWRKRKASRRGAEEEEEEEDDDSGEEMKALRERQREELSKVTSNLGKMILKEEMEKSLPIRRKTRSLPDRTPFHTSLHQGTSKSSSLPAYGRTTLSRLQSTEFSPSGSETGSPGLQNGEGQRGRMDRGNSLPCVLEQKIYPYEMLVVTNKGRTKLPPGVDRMRLERHLSAEDFSRVFAMSPEEFGKLALWKRNELKKKASLF

SEQ ID NO: 45270 - protein, 508 aa, Homo sapiens
MDHLGASLWPQVGSLCLLLAGAAWAPPPNLPDPKFESKAALLAARGPEELLCFTERLEDLVCFWEEAASAGVGPGNYSFSYQLEDEPWKLCRLHQAPTARGAVRFWCSLPTADTSSFVPLELRVTAASGAPRYHRVIHINEVVLLDAPVGLVARLADESGHVVLRWLPPPETPMTSHIRYEVDVSAGNGAGSVQRVEILEGRTECVLSNLRGRTRYTFAVRARMAEPSFGGFWSAWSEPVSLLTPSDLDPLILTLSLILVVILVLLTVLALLSHRRALKQKIWPGIPSPESEFEGLFTTHKGNFQLWLYQNDGCLWWSPCTPFTEDPPASLEVLSERCWGTMQAVEPGTDDEGPLLEPVGSEHAQDTYLVLDKWLLPRNPPSEDLPGPGGSVDIVAMDEGSEASSCSSALASKPSPEGASAASFEYTILDPSSQLLRPWTLCPELPPTPPHLKYLYLVVSDSGISTDYSSGDSQGAQGGLSDGPYSNPYENSLIPAAEPLPPSYVACS

SEQ ID NO: 45271 - protein, 854 aa, Homo sapiens
MALEQALQAARQGELDVLRSLHAAGLLGPSLRDPLDALPVHHAARAGKLHCLRFLVEEAALPAAARARNGATPAHDASATGHLACLQWLLSQGGCRVQDKDNSGATVLHLAARFGHPEVVNWLLHHGGGDPTAATDMGALPIHYAAAKGDFPSLRLLVEHYPEGVNAQTKNGATPLYLACQEGHLEVTQYLVQECGADPHARAHDGMTPLHAAAQMGHSPVIVWLVSCTDVSLSEQDKDGATAMHFAASRGHTKVLSWLLLHGGEISADLWGGTPLHDAAENGELECCQILVVNGAELDVRDRDGYTAADLSDFNGHSHCTRYLRTVENLSVEHRVLSRDPSAELEAKQPDSGMSSPNTTVSVQPLNFDLSSPTSTLSNYDSCSSSHSSIKGQHPPCGLSSARAADIQSYMDMLNPELGLPRGTIGKPTPPPPPPSFPPPPPPPGTQLPPPPPGYPAPKPPVGPQAADIYMQTKNKLRHVETEALKKELSSCDGHDGLRRQDSSRKPRAFSKQPSTGDYYRQLGRCPGETLAARPGMAHSEEVRARQPARAGCPRLGPAARGSLEGPSAPPQAALLPGNHVPNGCAADPKASRELPPPPPPPPPPLPEAASSPPPAPPLPLESAGPGCGQRRSSSSTGSTKSFNMMSPTGDNSELLAEIKAGKSLKPTPQSKGLTTVFSGIGQPAFQPDSPLPSVSPALSPVRSPTPPAAGFQPLLNGSLVPVPPTTPAPGVQLDVEALIPTHDEQGRPIPEWKRQVMVRKMQLKMQEEEEQRRKEEEEEARLASMPAWRRDLLRKKLEEEREQKRKEEERQKQEELRREKEQSEKLRTLGYDESKLAPWQRQVILKKGDIAKY

SEQ ID NO: 45272 - protein, 288 aa, Homo sapiens
MAHSEEAALLPGNHVPNGCAADPKASRELPPPPPPPPPPLPEAASSPPPAPPLPLESAGPGCGQRRSSSSTGSTKSFNMMSPTGDNSELLAEIKAGKSLKPTPQSKGLTTVFSGIGQPAFQPDSPLPSVSPALSPVRSPTPPAAGFQPLLNGSLVPVPPTTPAPGVQLDVEALIPTHDEQGRPIPEWKRQVMVRKMQLKMQEEEEQRRKEEEEEARLASMPAWRRDLLRKKLEEEREQKRKEEERQKQEELRREKEQSEKLRTLGYDESKLAPWQRQVILKKGDIAKY

SEQ ID NO: 45273 - protein, 214 aa, Homo sapiens [sequence omitted]

SEQ ID NO: 45274 - protein, 188 aa, Homo sapiens
  VARIANT 1: note = MOD_RES - Any amino acid
XEIKAGKSLKPTPQSKGLTTVFSGIGQPAFQPDSPLPSVSPALSPVRSPTPPAAGFQPLLNGSLVPVPPTTPAPGVQLDVEALIPTHDEQGRPIPEWKRQVMVRKMQLKMQEEEEQRRKEEEEEARLASMPAWRRDLLRKKLEEEREQKRKEEERQKQEELRREKEQSEKLRTLGYDESKLAPWQRQI

SEQ ID NO: 45275 - protein, 444 aa, Homo sapiens
MARVGPGRAGVSCQGRGRGRGGSGQRRPPTWEISDSDAEDSAGSEAAARARDPAGERRAAAEALRLLRPEQVLKRLAVCVDTAILEDAGADVLMEALEALGCECRIEPQRPARSLRWTRASPDPCPRSLPPEVWAAGEQELLLLLEPEEFLQGVATLTQISGPTHWVPWISPETTARPHLAVIGLDAYLWYRSLSCPQQGWLGRGFRGGGLWQRPSSGRAGPMGSGEEWSPLLRSRQHVSRGTQQPESPKVAGAEVAVSWPEVEEVRACLSWALVLLQLWANLDVLLVASWQELSRHVCAVTKALAQYPLKCVMPRLKGGRITSRQYRESQAFSFCTAGRWAAGEPVARDGAGLQAAWRRQIRQFSRVSPAVADAVVTAFPSPRLLQQALEACSTERERMGLLADLPVPPSEGGRPRRVGPDLSRRICLFLTTANPDLLLDLGS

SEQ ID NO: 45276 - protein, 386 aa, Homo sapiens
MARVGPGRAGVSCQGRGRGRGGSGQRRPPTWEISDSDAEDSAGSEAAARARDPAGERRAAAEALRLLRPEQVLKRLAVCVDTAILEDAGADVLMEALEALGCECRIEPQRPARSLRWTRASPDPCPRSLPPEVWAAGEQELLLLLEPEEFLQGVATLTQISGPTHWVPWISPETTARPHLAVIGLDAYLWSRQHVSRGTQQPESPKVAGAEVAVSWPEVEEVRACLSWALVLLQLWANLDVLLVASWQELSRHVCAVTKALAQYPLKCVMPRLKGGRITSRQYRESQAFSFCTAGRWAAGEPVARDGAGLQAAWRRQIRQFSRVSPAVADAVVTAFPSPRLLQQALEACSTERERMGLLAVGPDLSRRICLFLTTANPDLLLDLGS

SEQ ID NO: 45277 - protein, 840 aa, Homo sapiens
MMSIQEKSKENSSKVTKKSDDKNSETEIQDSQKNLAKKSGPKETIKSQAKSSSESKINQPELETRMSTRSSKAASNDKATKSINKNTVTVRGYSQESTKKKLSQKKLVHENPKANEQLNRRSQRLQQLTEVSRRSLRSREIQGQVQAVKQSLPPTKKEQCSSTQSKSNKTSQKHVKRKVLEVKSDSKEDENLVINEVINSPKGKKRKVEHQTACACSSQCTQGSEKCPQKTTRRDETKPVPVTSEVKRSKMATSVVPKKNEMKKSVHTQVNTNTTLPKSPQPSVPEQSDNELEQAGKSKRGSILQLCEEIAGEIESDNVEVKKESSQMESVKEEKPTEIKLEETSVERQILHQKETNQDVQCNRFFPSRKTKPVKCILNGINSSAKKNSNWTKIKLSKFNSVQHNKLDSQVSPKLGLLRTSFSPPALEMHHPVTQSTFLGTKLHDRNITCQQEKMKEINSEEVKINDITVEINKTTERAPENCHLANEIKPSDPPLDNQMKHSFDSASNKNFSQCLESKLENSPVENVTAASTLLSQAKIDTGENKFPGSAPQQHSILSNQTSKSSDNRETPRNHSLPKCNSHLEITIPKDLKLKEAEKTDEKQLIIDAGQKRFGAVSCNVCGMLYTASNPEDETQHLLFHNQFISAVKYVGWKKERILAEYPDGRIIMVLPEDPKYALKKVDEIREMVDNDLGFQQAPLMCYSRTKTLLFISNDKKVVGCLIAEHIQWGYRVIEEKLPVIRSEEEKVRFERQKAWCCSTLPEPAICGISRIWVFSMMRRKKIASRMIECLRSNFIYGSYLSKEEIAFSDPTPDGKLFATQYCGTGQFLVYNFINGQNST

SEQ ID NO: 45278 - protein, 701 aa, Homo sapiens
MMSIQEKSKENSSKVTKKSDDKNSETEIQDSQKNLAKKSGPKETIKSQAKSSSESKINQPELETRMSTRSSKAASNDKATKSINKNTVTVRGYSQESTKKKLSQKKLVHENPKANEQLNRRSQRLQQLTEVSRRSLRSREIQGQVQAVKQSLPPTKKEQCSSTQSKSNKTSQKHVKRKVLEVKSDSKEDENLVINEVINSPKGKKRKVEHQTACACSSQCTQGSEKCPQKTTRRDETKPVPVTSEVKRSKMATSVVPKKNEMKKSVHTQVNTNTTLPKSPQPSVPEQSDNELEQAGKSKRGSILQLCEEIAGEIESDNVEVKKESSQMESVKEEKPTEIKLEETSVERQILHQKETNQDVQCNRFFPSRKTKPVKCILNGINSSAKKNSNWTKIKLSKFNSVQHNKLDSQVSPKLGLLRTSFSPPALEMHHPVTQSTFLGTKLHDRNITCQQEKMKEINSEEVKINDITVEINKTTERAPENCHLANEIKPSDPPLDNQMKHSFDSASNKNFSQCLESKLENSPVENVTAASTLLSQAKIDTGENKFPGSAPQQHSILSNQTSKSSDNRETPRNHSLPKCNSHLEITIPKDLKLKEAEKTDEKQLIIDAGQKRFGAVSCNVCGMLYTASNPEDETQHLLFHNQFISAVKYVVLLINHHECGSEEEFITSLFLSMFNFRYTQRSFSFPIRFLEGLEERKNSG

SEQ ID NO: 45279 - protein, 601 aa, Homo sapiens
MAALTPRKRKQDSLKCDSLLHFTENLFPSPNKKHCFYQNSDKNEENLHCSQQEHFVLSALKTTEINRLPSANQGSPFKSALSTVSFYNQNKWYLNPLERKLIKESRSTCLKTNDEDKSFPIVTEKMQGKPVCSKKNNKKPQKSLTAKYQPKYRHIKPVSRNSRNSKQNRVIYKPIVEKENNCHSAENNSNAPRVLSQKIKPQVTLQGGAAFFVRKKSSLRKSSLENEPSLGRTQKSKSEVIEDSDVETVSEKKTFATRQVPKCLVLEEKLKIGLLSASSKNKEKLIKDSSDDRVSSKEHKVDKNEAFSSEDSLGENKTISPKSTVYPIFSASSVNSKRSLGEEQFSVGSVNFMKQTNIQKNTNTRDTSKKTKDQLIIDAGQKHFGATVCKSCGMIYTASNPEDEMQHVQHHHRFLEGIKYVGWKKERVVAEFWDGKIVLVLPHDPSFAIKKVEDVQELVDNELGFQQVVPKCPNKIKTFLFISDEKRVVGCLIAEPIKQAFRVLSEPIGPESPSSTECPRAWQCSDVPEPAVCGISRIWVFRLKRRKRIARRLVDTLRNCFMFGCFLSTDEIAFSDPTPDGKLFATKYCNTPNFLVYNFNS

SEQ ID NO: 45280 - protein, 239 aa, Homo sapiens
MKQTNIQKNTNTRDTSKKTKDQLIIDAGQKHFGATVCKSCGMIYTASNPEDEMQHVQHHHRFLEGIKYVGWKKERVVAEFWDGKIVLVLPHDPSFAIKKVEDVQELVDNELGFQQVVPKCPNKIKTFLFISDEKRVVGCLIAEPIKQAFRVLSEPIGPESPSSTECPRAWQCSDVPEPAVCGISRIWVFRLKRRKRIARRLVDTLRNCFMFGCFLSTDEIAFSDPTPDDCRRLNRYQET

SEQ ID NO: 45281 - protein, 282 aa, Homo sapiens
MALKQISSNKCFGGLQKVFEHDSVELNCKMKFAVYLPPKAETGKCPALYWLSGLTCTEQNFISKSGYHQSASEHGLVVIAPDTSPRGCNIKGEDESWDFGTGAGFYVDATEDPWKTNYRMYSYVTEELPQLINANFPVDPQRMSIFGHSMGGHGALICALKNPGKYKSVSAFAPICNPVLCPWGKKAFSGYLGTDQSKWKAYDATHLVKSYPGSQLDILIDQGKDDQFLLDGQLLPDNFIAACTEKKIPVVFRLQEGYDHSYYFIATFITDHIRHHAKYLNA

SEQ ID NO: 45282 - protein, 213 aa, Homo sapiens
MAITQFRLFKFCTCLATVFSFLKRLICRSGRGRKLSGDQITLPTTVDYSSVPKQTDVEEWTSWDEDAPTSVKIEGGNGNVATQQNSLEQLEPDYFKDMTPTIRKTQKIVIKKREPLNFGIPDGSTGFSSRLAATQDLPFIHQSSELGDLDTWQENTNAWEEEEDAAWQAEEVLRQQKLADREKRAAEQQRKKMEKEAQRLMKKEQNKIGVKLS

SEQ ID NO: 45283 - protein, 213 aa, Homo sapiens; identical to SEQ ID NO: 45282

SEQ ID NO: 45284 - protein, 197 aa, Homo sapiens
MAITQFRLFKFCTCLATVFSFLKRLICRSGRGRKLSGDQITLPTTVDYSSVPKQTDVEEWTSWDEDAPTSVKIEGGNGNVATQQNSLEQLEPDYFKDMTPTIRKTQKIVIKKREPLNFGIPDGSTGFSSRLAATQDLPFIHQSSELGDLDTWQENTNAWEEEEDAAWQAEEVLRQQKLADREKRAAEQQRKKMEKEA

SEQ ID NO: 45285 - protein, 258 aa, Homo sapiens
MAITQFRLFKFCTCLATVFSFLKRLICRSGRGRKLSGDQITLPTTVDYSSVPKQTDVEEWTSWDEDAPTSVKIEGGNGNVATQQNSLEQLEPDYFKDMTPTIRKTQKIVIKKREPLNFGIPDGSTGFSSRLAATQDLPFIHQSSELGDLDTWQENTNAWEEEEDAAWQAEEVLRSRTNVCLLCSLLFHHPTPTSTPYINQSVKIERVSLGQWSYGKSKEQQKLADREKRAAEQQRKKMEKEAQRLMKKEQNKIGVKLS

SEQ ID NO: 45286 - protein, 78 aa, Homo sapiens
MAITQFRLFKFCTCLATVFSFLKRLICRSGRGRKLSGDQITLPTTVDYSSVPKQTDVEEWTSWDEDAPTSVKIEGGNG

SEQ ID NO: 45287 - protein, 423 aa, Homo sapiens
MSSQVVGIEPLYIKAEPASPDSPKGSSETETEPPVALAPGPAPTRCLPGHKEEEDGEGAGPGEQGGGKLVLSSLPKRLCLVCGDVASGYHYGVASCEACKAFFKRTIQGSIEYSCPASNECEITKRRRKACQACRFTKCLRVGMLKEGVRLDRVRGGRQKYKRRPEVDPLPFPGPFPAGPLAVAGGPRKTAAPVNALVSHLLVVEPEKLYAMPDPAGPDGHLPAVATLCDLFDREIVVTISWAKSIPGFSSLSLSDQMSVLQSVWMEVLVLGVAQRSLPLQDELAFAEDLVLDEEGARAAGLGELGAALLQLVRRLQALRLEREEYVLLKALALANSDSVHIEDAEAVEQLREALHEALLEYEAGRAGPGGGAERRRAGRLLLTLPLLRQTAGKVLAHFYGVKLEGKVPMHKLFLEMLEAMMD

SEQ ID NO: 45288 - protein, 423 aa, Homo sapiens; identical to SEQ ID NO: 45287

SEQ ID NO: 45289 - protein, 422 aa, Homo sapiens
MSSQVVGIEPLYIKAEPASPDSPKGSSETETEPPVALAPGPAPTRCLPGHKEEEDGEGAGPGEQGGGKLVLSSLPKRLCLVCGDVASGYHYGVASCEACKAFFKRTIQGSIEYSCPASNECEITKRRRKACQACRFTKCLRVGMLKEGVRLDRVRGGRQKYKRRPEVDPLPFPGPFPAGPLAVAGGPRKTAPVNALVSHLLVVEPEKLYAMPDPAGPDGHLPAVATLCDLFDREIVVTISWAKSIPGFSSLSLSDQMSVLQSVWMEVLVLGVAQRSLPLQDELAFAEDLVLDEEGARAAGLGELGAALLQLVRRLQALRLEREEYVLLKALALANSDSVHIEDAEAVEQLREALHEALLEYEAGRAGPGGGAERRRAGRLLLTLPLLRQTAGKVLAHFYGVKLEGKVPMHKLFLEMLEAMMD

SEQ ID NO: 45290 - protein, 109 aa, Homo sapiens
MSSQVVGIEPLYIKAEPASPDSPKGSSETETEPPVALAPGPAPTRCLPGHKEEEDGEGAGPGEQGGGKLVLSSLPKRLCLVCGDVASGYHYGVASCEACKAFFKRTIQG

SEQ ID NO: 45291 - protein, 500 aa, Homo sapiens
MSSDDRHLGSSCGSFIKTEPSSPSSGIDALSHHSPSGSSDASGGFGLALGTHANGLDSPPMFAGAGLGGTPCRKSYEDCASGIMEDSAIKCEYMLNAIPKRLCLVCGDIASGYHYGVASCEACKAFFKRTIQGNIEYSCPATNECEITKRRRKSCQACRFMKCLKVGMLKEGVRLDRVRGGRQKYKRRLDSESSPYLSLQISPPAKKPLTKIVSYLLVAEPDKLYAMPPPGMPEGDIKALTTLCDLADRELVVIIGWAKHIPGFSSLSLGDQMSLLQSAWMEILILGIVYRSLPYDDKLVYAEDYIMDEEHSRLAGLLELYRAILQLVRRYKKLKVEKEEFVTLKALALANSDSMYIEDLEAVQKLQDLLHEALQDYELSQRHEEPWRTGKLLLTLPLLRQTAAKAVQHFYSVKLQGKVPMHKLFLEMLEAKAWARADSLQEWRPLEQVPSPLHRATKRQHVHFLTPLPPPPSVAWVGTAQAGYHLEVFLPQRAGWPRAA

SEQ ID NO: 45292 - protein, 508 aa, Homo sapiens
MSSDDRHLGSSCGSFIKTEPSSPSSGIDALSHHSPSGSSDASGGFGLALGTHANGLDSPPMFAGAGLGGTPCRKSYEDCASGIMEDSAIKCEYMLNAIPKRLCLVCGDIASGYHYGVASCEACKAFFKRTIQGNIEYSCPATNECEITKRRRKSCQACRFMKCLKVGMLKEGVRLDRVRGGRQKYKRRLDSESSPYLSLQISPPAKKPLTKIVSYLLVAEPDKLYAMPPPGMPEGDIKALTTLCDLADRELVVIIGWAKHIPGFSSLSLGDQMSLLQSAWMEILILGIVYRSLPYDDKLVYAEDYIMDEEHSRLAGLLELYRAILQLVRRYKKLKVEKEEFVTLKALALANSDSMYIEDLEAVQKLQDLLHEALQDYELSQRHEEPWRTGKLLLTLPLLRQTAAKAVQHFYSVKLQGKVPMHKLFLEMLEAKVGQEQLRGSPKDERMSSHDGKCPFQSAAFTSRDQSNSPGIPNPRPSSPTPLNERGRQISPSTRTPGGQGKHLWLTM

SEQ ID NO: 45293 - protein, 500 aa, Homo sapiens; identical to SEQ ID NO: 45291

SEQ ID NO: 45294 - protein, 508 aa, Homo sapiens; identical to SEQ ID NO: 45292

SEQ ID NO: 45295 - protein, 508 aa, Homo sapiens
MLLNRMSSDDRHLGSSCGSFIKTEPSSPSSGIDALSHHSPSGSSDASGGFGLALGTHANGLDSPPMFAGAGLGGTPCRKSYEDCASGIMEDSAIKCEYMLNAIPKRLCLVCGDIASGYHYGVASCEACKAFFKRTIQGNIEYSCPATNECEITKRRRKSCQACRFMKCLKVGMLKEGVRLDRVRGGRQKYKRRLDSESSPYLSLQISPPAKKPLTKIVSYLLVAEPDKLYAMPPPGMPEGDIKALTTLCDLADRELVVIIGWAKHIPGFSSLSLGDQMSLLQSAWMEILILGIVYRSLPYDDKLVYAEDYIMDEEHSRLAGLLELYRAILQLVRRYKKLKVEKEEFVTLKALALANSDSMYIEDLEAVQKLQDLLHEALQDYELSQRHEEPWRTGKLLLTLPLLRQTAAKAVQHFYSVKLQGKVPMHKLFLEMLEAKVGQEQLRGSPKDERMSSHDGKCPFQSAAFTSRDQSNSPGIPNPRPSSPTPLNERGRQISPSTRTPGGQGKH

SEQ ID NO: 45296 - protein, 433 aa, Homo sapiens
MSSDDRHLGSSCGSFIKTEPSSPSSGIDALSHHSPSGSSDASGGFGLALGTHANGLDSPPMFAGAGLGGTPCRKSYEDCASGIMEDSAIKCEYMLNAIPKRLCLVCGDIASGYHYGVASCEACKAFFKRTIQGNIEYSCPATNECEITKRRRKSCQACRFMKCLKVGMLKEGVRLDRVRGGRQKYKRRLDSESSPYLSLQISPPAKKPLTKIVSYLLVAEPDKLYAMPPPGMPEGDIKALTTLCDLADRELVVIIGWAKHIPGFSSLSLGDQMSLLQSAWMEILILGIVYRSLPYDDKLVYAEDYIMDEEHSRLAGLLELYRAILQLVRRYKKLKVEKEEFVTLKALALANSDSMYIEDLEAVQKLQDLLHEALQDYELSQRHEEPWRTGKLLLTLPLLRQTAAKAVQHFYSVKLQGKVPMHKLFLEMLEAKV

SEQ ID NO: 45297 - protein, 436 aa, Homo sapiens
MSNKDRHIDSSCSSFIKTEPSSPASLTDSVNHHSPGGSSDASGSYSSTMNGHQNGLDSPPLYPSAPILGGSGPVRKLYDDCSSTIVEDPQTKCEYMLNSMPKRLCLVCGDIASGYHYGVASCEACKAFFKRTIQGNIEYSCPATNECEITKRRRKSCQACRFMKCLKVGMLKEGVRLDRVRGGRQKYKRRIDAENSPYLNPQLVQPAKKPYNKIVSHLLVAEPEKIYAMPDPTVPDSDIKALTTLCDLADRELVVIIGWAKHIPGFSTLSLADQMSLLQSAWMEILILGVVYRSLSFEDELVYADDYIMDEDQSKLAGLLDLNNAILQLVKKYKSMKLEKEEFVTLKAIALANSDSMHIEDVEAVQKLQDVLHEALQDYEAGQHMEDPRRAGKMLMTLPLLRQTSTKAVQHFYNIKLEGKVPMHKLFLEMLEAKVC

SEQ ID NO: 45298 - protein, 435 aa, Homo sapiens
MSNKDRHIDSSCSSFIKTEPSSPASLTDSVNHHSPGGSSDASGSYSSTMNGHQNGLDSPPLYPSAPILGGSGPVRKLYDDCSSTIVEDPQTKCEYMLNSMPKRLCLVCGDIASGYHYGVASCEACKAFFKRTIQGNIEYSCPATNECEITKRRRKSCQACRFMKCLKVGMLKEGVRLDRVRGGRQKYKRRIDAENSPYLNPQLVQPAKKPYNKIVSHLLVAEPEKIYAMPDPTVPDSDIKALTTLCDLADRELVVIIGWAKHIPGFSTLSLADQMSLLQSAWMEILILGVVYRSLSFEDELVYADDYIMDEDQSKLAGLLDLNNAILQLVKKYKSMKLEKEEFVTLKAIALANSDSMHIEDVEAVQKLQDVLHEALQDYEAGQHMEDPRRAGKMLMTLPLLRQTSTKAVQHFYNIKLEGKVPMHKLFLEMLEAKV

SEQ ID NO: 45299 - protein, 435 aa, Homo sapiens; identical to SEQ ID NO: 45298

SEQ ID NO: 45300 - protein, 435 aa, Homo sapiens; identical to SEQ ID NO: 45298

SEQ ID NO: 45301 - protein, 435 aa, Homo sapiens; identical to SEQ ID NO: 45298

SEQ ID NO: 45302 - protein, 435 aa, Homo sapiens; identical to SEQ ID NO: 45298

SEQ ID NO: 45303 - protein, 435 aa, Homo sapiens; identical to SEQ ID NO: 45298

SEQ ID NO: 45304 - protein, 442 aa, Homo sapiens
MSNKDRHIDSSCSSFIKTEPSSPASLTDSVNHHSPGGSSDASGSYSSTMNGHQNGLDSPPLYPSAPILGGSGPVRKLYDDCSSTIVEDPQTKCEYMLNSMPKRLCLVCGDIASGYHYGVASCEACKAFFKRTIQGNIEYSCPATNECEITKRRRKSCQACRFMKCLKVGMLKEGVRLDRVRGGRQKYKRRIDAENSPYLNPQLVQPAKKPLLWSDPADNKIVSHLLVAEPEKIYAMPDPTVPDSDIKALTTLCDLADRELVVIIGWAKHIPGFSTLSLADQMSLLQSAWMEILILGVVYRSLSFEDELVYADDYIMDEDQSKLAGLLDLNNAILQLVKKYKSMKLEKEEFVTLKAIALANSDSMHIEDVEAVQKLQDVLHEALQDYEAGQHMEDPRRAGKMLMTLPLLRQTSTKAVQHFYNIKLEGKVPMHKLFLEMLEAKV

SEQ ID NO: 45305 - protein, 458 aa, Homo sapiens
MDSVELCLPESFSLHYEEELLCRMSNKDRHIDSSCSSFIKTEPSSPASLTDSVNHHSPGGSSDASGSYSSTMNGHQNGLDSPPLYPSAPILGGSGPVRKLYDDCSSTIVEDPQTKCEYMLNSMPKRLCLVCGDIASGYHYGVASCEACKAFFKRTIQGNIEYSCPATNECEITKRRRKSCQACRFMKCLKVGMLKEGVRLDRVRGGRQKYKRRIDAENSPYLNPQLVQPAKKPYNKIVSHLLVAEPEKIYAMPDPTVPDSDIKALTTLCDLADRELVVIIGWAKHIPGFSTLSLADQMSLLQSAWMEILILGVVYRSLSFEDELVYADDYIMDEDQSKLAGLLDLNNAILQLVKKYKSMKLEKEEFVTLKAIALANSDSMHIEDVEAVQKLQDVLHEALQDYEAGQHMEDPRRAGKMLMTLPLLRQTSTKAVQHFYNIKLEGKVPMHKLFLEMLEAKV

SEQ ID NO: 45306 - protein, 56 aa, Homo sapiens
MSNKDRHIDSSCSSFIKTEPSSPASLTDSVNHHSPGGSSDASGSYSSTMNGHQNGL

SEQ ID NO: 45307 - protein, 92 aa, Homo sapiens
MSNKDRHIDSSCSSFIKTEPSSPASLTDSVNHHSPGGSSDASGSYSSTMNGHQNGLDSPPLYPSAPILGGSGPVRKLYDDCSSTIVEDPQTK

SEQ ID NO: 45308 - protein, 354 aa, Homo sapiens
MSNKDRHIDSSCSSFIKTEPSSPASLTDSVNHHSPGGSSDASGSYSSTMNGHQNGLDSPPLYPSAPILGGSGPVRKLYDDCSSTIVEDPQTKCEYMLNSMPKRLCLVCGDIASGYHYGVASCEACKAFFKRTIQGNIEYSCPATNECEITKRRRKSCQACRFMKCLKVGMLKEGVRLDRVRGGRQKYKRRIDAENSPYLNPQLVQPAKKPYNKIVSHLLVAEPEKIYAMPDPTVPDSDIKALTTLCDLADRELVVIIGWAKHIPGFSTLSLADQMSLLQSAWMEILILGVVYRSLSFEDELVYADDYIMDEDQSKLAGLLDLNNAILQLVKKYKSMKLEKEEFVTLKAIALANS

SEQ ID NO: 45309 - protein, 50 aa, Homo sapiens
MSNKDRHIDSSCSSFIKTEPSSPASLTDSVNHHSPGGSSDASGSYSSTMN

SEQ ID NO: 45310 - protein, 435 aa, Homo sapiens; identical to SEQ ID NO: 45298

SEQ ID NO: 45311 - protein, 435 aa, Homo sapiens; identical to SEQ ID NO: 45298

SEQ ID NO: 45312 - protein, 435 aa, Homo sapiens; identical to SEQ ID NO: 45298

SEQ ID NO: 45313 - protein, 470 aa, Homo sapiens
MWRECDWGLGAVKSDLACVPSAKRLLCRMSNKDRHIDSSCSSFIKTEPSSPASLTDSVNHHSPGGSSDASGSYSSTMNGHQNGLDSPPLYPSAPILGGSGPVRKLYDDCSSTIVEDPQTKCEYMLNSMPKRLCLVCGDIASGYHYGVASCEACKAFFKRTIQGNIEYSCPATNECEITKRRRKSCQACRFMKCLKVGMLKEGVRLDRVRGGRQKYKRRIDAENSPYLNPQLVQPAKKPLLWSDPADNKIVSHLLVAEPEKIYAMPDPTVPDSDIKALTTLCDLADRELVVIIGWAKHIPGFSTLSLADQMSLLQSAWMEILILGVVYRSLSFEDELVYADDYIMDEDQSKLAGLLDLNNAILQLVKKYKSMKLEKEEFVTLKAIALANSDSMHIEDVEAVQKLQDVLHEALQDYEAGQHMEDPRRAGKMLMTLPLLRQTSTKAVQHFYNIKLEGKVPMHKLFLEMLEAKV

SEQ ID NO: 45314 - protein, 452 aa, Homo sapiens
MLCGRPRSSSDNRNFLRERAGLSSAAVQTRIGNSAASRRSPAARPPVPAPPALPRGRPGTEGSTSLSAPAVLVVAVAVVVVVVSAVAWAMANYIHVPPGSPEVPKLNVTVQDQEEHRCREGALSLLQHLRPHWDPQEVTLQLFTDGITNKLIGCYVGNTMEDVVLVRIYGNKTELLVDRDEEVKSFRVLQAHGCAPQLYCTFNNGLCYEFIQGEALDPKHVCNPAIFRLIARQLAKIHAIHAHNGWIPKSNLWLKMGKYFSLIPTGFADEDINKRFLSDIPSSQILQEEMTWMKEILSNLGSPVVLCHNDLLCKNIIYNEKQGDVQFIDYEYSGYNYLAYDIGNHFNEFAGVSDVDYSLYPDRELQSQWLRAYLEAYKEFKGFGTEVTEKEVEILFIQVNQFALASHFFWGLWALIQAKYSTIEFDFLGYAIVRFNQYFKMKPEVTALKVPE

SEQ ID NO: 45315 - protein, 258 aa, Homo sapiens
MLCGRPRSSSDNRNFLRERAGLSSAAVQTRIGNSAASRRSPAARPPVPAPPALPRGRPGTEGSTSLSAPAVLVVAVAVVVVVVSAVAWAMANYIHVPPGSPEVPKLNVTVQDQEEHRCREGALSLLQHLRPHWDPQEVTLQLFTDGITNKLIGCYVGNTMEDVVLVRIYGNKTELLVDRDEEVKSFRVLQAHGCAPQLYCTFNNGLCYEFIQGEALDPKHVCNPAIFSLSSLTLCKGKTTRCFGLTGCRGSRLLLSFF

SEQ ID NO: 45316 - protein, 434 aa, Homo sapiens
MLCGRPRSSSDNRNFLRERAGLSSAAVQTRIGNSAASRRSPAARPPVPAPPALPRGRPGTEGSTSLSAPAVLVVAVAVVVVVVSAVAWAMANYIHVPPGSPEVPKLNVTVQDQEEHRCREGALSLLQHLRPHWDPQEVTLQLFTDGITNKLIGCYVGNTMEDVVLVRIYGNKTELLVDRDEEVKSFRVLQAHGCAPQLYCTFNNGLCYEFIQGEALDPKHVCNPAIFRLIARQLAKIHAIHAHNGWIPKSNLWLKMGKYFSLIPTGFADEDINKRFLSDIPSSQILQEEMTWMKEILSNLGSPVVLCHNDLLCKNIIYNEKQGDVQFIDYEYSGYNYLAYDIGNHFNEFAGVSDVDYSLYPDRELQSQWLRAYLEAYKEFKGFGTEVTEKEVEILFIQVNQFALGENLNFIIGNKYCQLFSLKWLLISFGDCGL

SEQ ID NO: 45317 - protein, 208 aa, Homo sapiens
MAKIHTIHANGSLPKPILWHKMHNYFTLVKNEINPSLSADVPKVEVLERELAWLKEHLSQLESPVVFCHNDLLCKNIIYDSIKGHVRFIDYEYAGYNYQAFDIGNHFNEFAGVNEVDYCLYPARETQLQWLHYYLQAQKGMAVTPREVQRLYVQVNKFALASHFFWALWALIQNQYSTIDFDFLRYAVIRFNQYFKVKPQASALEMPK

SEQ ID NO: 45318 - protein, 317 aa, Homo sapiens
MEEKAAASASCREPPGPPRAAAVAYFGISVDPDDILPGALRLIQELRPHWKPEQVRTKRFTDGITNKLVACYVEEDMQDCVLVRVYGERTELLVDRENEVRNFQLLRAHSCAPKLYCTFQNGLCYEYMQGVALEPEHIREPRLFSLSADVPKVEVLERELAWLKEHLSQLESPVVFCHNDLLCKNIIYDSIKGHVRFIDYEYAGYNYQAFDIGNHFNEFAGVNEVDYCLYPARETQLQWLHYYLQAQKGMAVTPREVQRLYVQVNKFALASHFFWALWALIQNQYSTIDFDFLRYAVIRFNQYFKVKPQASALEMPK

SEQ ID NO: 45319 - protein, 394 aa, Homo sapiens
MAVPPSAPQPRASFHLRRHTPCPQCSWGMEEKAAASASCREPPGPPRAAAVAYFGISVDPDDILPGALRLIQELRPHWKPEQVRTKRFTDGITNKLVACYVEEDMQDCVLVRVYGERTELLVDRENEVRNFQLLRAHSCAPKLYCTFQNGLCYEYMQGVALEPEHIREPRLFRLIALEMAKIHTIHANGSLPKPILWHKMHNYFTLVKNEINPSLSADVPKVEVLERELAWLKEHLSQLESPVVFCHNDLLCKNIIYDSIKGHVRFIDYEYAGYNYQAFDIGNHFNEFAGVNEVDYCLYPARETQLQWLHYYLQAQKGMAVTPREVQRLYVQVNKFALGPSCVSSTMTASLQCCRVGNRHGEIARLTLSGLFPGVSLLLGSLGPHPEPVLHHRL

SEQ ID NO: 45320 - protein, 386 aa, Homo sapiens
MAVPPSAPQPRASFHLRRHTPCPQCSWGMEEKAAASASCREPPGPPRAAAVAYFGISVDPDDILPGALRLIQELRPHWKPEQVRTKRFTDGITNKLVACYVEEDMQDCVLVRVYGERTELLVDRENEVRNFQLLRAHSCAPKLYCTFQNGLCYEYMQGVALEPEHIREPRLFRLIALEMAKIHTIHANGSLPKPILWHKMHNYFTLVKNEINPSLSADVPKVEVLERELAWLKEHLSQLESPVVFCHNDLLCKNIIYDSIKGHVRFIDYEYAGYNYQAFDIGNHFNEFAGVNEVDYCLYPARETQLQWLHYYLQAQKGMAVTPREVQRLYVQVNKFALASHFFWALWALIQNQYSTIDFDFLRYAVIRFNQYFKVKPQASALEMPK

SEQ ID NO: 45321 - protein, 252 aa, Homo sapiens
RRLGGGTAEGKTGRGLGGPSWDTGPRAMGSLSRPSFSDRLIALEMAKIHTIHANGSLPKPILWHKMHNYFTLVKNEINPSLSADVPKVEVLERELAWLKEHLSQLESPVVFCHNDLLCKNIIYDSIKGHVRFIDYEYAGYNYQAFDIGNHFNEFAGVNEVDYCLYPARETQLQWLHYYLQAQKGMAVTPREVQRLYVQVNKFALASHFFWALWALIQNQYSTIDFDFLRYAVIRFNQYFKVKPQASALEMPK

SEQ ID NO: 45322 - protein, 254 aa, Homo sapiens
MAEAVLRVARRQLSQRGGSGAPILLRQMFEPVSCTFTYLLGDRESREAVLIDPVLETAPRDAQLIKELGLRLLYAVNTHCHADHITGSGLLRSLLPGCQSVISRLSGAQADLHIEDGDSIRFGRFALETRASPGHTPGCVTFVLNDHSMAFTGDALLIRGCGRTDFQQGCAKTLYHSVHEKIFTLPGDCLIYPAHDYHGFTVSTVEEERTLNPRLTLSCEEFVKIMGNLNLPKPQQIDFAVPANMRCGVQTPTA

SEQ ID NO: 45323 - protein, 339 aa, Homo sapiens
MADSVKTFLQDLARGIKDSIWGICTISKLDARIQQKREEQRRRRASSVLAQRRAQSIERKQESEPRIVSRIFQCCAWNGGVFWFSLLLFYRVFIPVLQSVTARIIGDPSLHGDVWSWLEFFLTSIFSALWVLPLFVLSKVVNAIWFQDIADLAFEVSGRKPHPFPSVSKIIADMLFNLLLQALFLIQGMFVSLFPIHLVGQLVSLLHMSLLYSLYCFEYRWFNKGIEMHQRLSNIERNWPYYFGFGLPLAFLTAMQSSYIISGCLFSILFPLFIISANEAKPGKAYLFQLRLFSLVVFLSNRLFHKTVYLQSALSSSTSAEKFPSPHPSPAKLKATAGH

SEQ ID NO: 45324 - protein, 261 aa, Homo sapiens
MADSVKTFLQDLARGIKDSIWGICTISKLDARIQQKREEQRRRRASSVLAQRRAQSIERKQESEPRIVSRIFQCCAWNGGVFWFSLLLFYRVFIPVLQSVTARIIGDPSLHGDVWSWLEFFLTSIFSALWVLPLFVLSKVVNAIWFQDIADLAFEVSGRKPHPFPSVSKIIADMLFNLLLQALFLIQGMFVSLFPIHLVGQLVSLLHMSLLYSLYCFEYRWFNKVAAFSLSSFLYSLSAPMKQRPAKHISSSCASSPWWSS

SEQ ID NO: 45325 - protein, 300 aa, Homo sapiens
MILEGGGVMNLNPGNNLLHQPPAWTDSYSTCNVSSGFFGGQWHEIHPQYWTKYQVWEWLQHLLDTNQLDANCIPFQEFDINGEHLCSMSLQEFTRAAGTAGQLLYSNLQHLKWNGQCSSDLFQSTHNVIVKTEQTEPSIMNTWKDENYLYDTNYGSTVDLLDSKTFCRAQISMTTTSHLPVAESPDMKKEQDPPAKCHTKKHNPRGTHLWEFIRDILLNPDKNPGLIKWEDRSEGVFRFLKSEAVAQLWGKKKNNSSMTYEKLSRAMRYYYKREILERVDGRRLVYKFGKNARGWRENEN

SEQ ID NO: 45326 - protein, 300 aa, Homo sapiens; identical to SEQ ID NO: 45325

SEQ ID NO: 45327 - protein, 322 aa, Homo sapiens
MGLPERRGLVLLLSLAEILFKIMILEGGGVMNLNPGNNLLHQPPAWTDSYSTCNVSSGFFGGQWHEIHPQYWTKYQVWEWLQHLLDTNQLDANCIPFQEFDINGEHLCSMSLQEFTRAAGTAGQLLYSNLQHLKWNGQCSSDLFQSTHNVIVKTEQTEPSIMNTWKDENYLYDTNYGSTVDLLDSKTFCRAQISMTTTSHLPVAESPDMKKEQDPPAKCHTKKHNPRGTHLWEFIRDILLNPDKNPGLIKWEDRSEGVFRFLKSEAVAQLWGKKKNNSSMTYEKLSRAMRYYYKREILERVDGRRLVYKFGKNARGWRENEN

SEQ ID NO: 45328 - protein, 300 aa, Homo sapiens; identical to SEQ ID NO: 45325

SEQ ID NO: 45329 - protein, 277 aa, Homo sapiens
MILEGGGVMNLNPGNNLLHQPPAWTDSYSTCNVSSGFFGGQWHEIHPQYWTKYQVWEWLQHLLDTNQLDANCIPFQEFDINGEHLCSMSLQEFTRAAGTAGQLLYSNLQHLKWNGQCSSDLFQSTHNVIVKTEQTEPSIMNTWKDENYLYDTNYGSTVAESPDMKKEQDPPAKCHTKKHNPRGTHLWEFIRDILLNPDKNPGLIKWEDRSEGVFRFLKSEAVAQLWGKKKNNSSMTYEKLSRAMRYYYKREILERVDGRRLVYKFGKNARGWRENEN

SEQ ID NO: 45330 - protein, 184 aa, Homo sapiens [sequence omitted]

SEQ ID NO: 45331 - protein, 155 aa, Homo sapiens
MDLWNWDEASPQEVPPGNKLAGLEGAKLGFCFPDLALQGDTPTATAETCWKGPIQLWQFLLELLHDGARSSCIRWTGNSREFQLCDPKEVARLWGERKRKPGMNYEKLSRGLRYYYRRDIVRKSGGRKYTYRFGGRVPSLAYPDCAGGGRGAETQ

SEQ ID NO: 45332 - protein, 342 aa, Homo sapiens
MDLWNWDEASPQEVPPGNKLAGLEGAKLGFCFPDLALQGDTPTATAETCWKGTSSSLASFPQLDWGSALLHPEVPWGAEPDSQALPWSGDWTDMACTAWDSWSGASQTLGPAPLGPGPIPAAGSEGAAGQNCVPVAGEATSWSRAQAAGSNTSWDCSVGPDGDTYWGSGLGGEPRTDCTISWGGPAGPDCTTSWNPGLHAGGTTSLKRYQSSALTVCSEPSPQSDRASLARCPKTNHRGPIQLWQFLLELLHDGARSSCIRWTGNSREFQLCDPKEVARLWGERKRKPGMNYEKLSRGLRYYYRRDIVRKSGGRKYTYRFGGRVPSLAYPDCAGGGRGAETQ

SEQ ID NO: 45333 - protein, 342 aa, Homo sapiens; identical to SEQ ID NO: 45332

SEQ ID NO: 45334 - protein, 143 aa, Homo sapiens
MKAGCSIVEKPEGGGGYQFPDWAYKTESSPGSRQIQLWHFILELLQKEEFRHVIAWQQGEYGEFVIKDPDEVARLWGRRKCKPQMNYDKLSRALRYYYNKRILHKTKGKRFTYKFNFNKLVMPNYPFINIRSSGKIQTLLVGN

SEQ ID NO: 45335 - protein, 512 aa, Homo sapiens
MKAGCSIVEKPEGGGGYQFPDWAYKTESSPGSRQIQLWHFILELLQKEEFRHVIAWQQGEYGEFVIKDPDEVARLWGRRKCKPQMNYDKLSRALRYYYNKRILHKTKGKRFTYKFNFNKLVMPNYPFINIRSSGVVPQSAPPVPTASSRFHFPPLDTHSPTNDVQPGRFSASSLTASGQESSNGTDRKTELSELEDGSAADWRRGVDPVSSRNAIGGGGIGHQKRKPDIMLPLFARPGMYPDPHSPFAVSPIPGRGGVLNVPISPALSLTPTIFSYSPSPGLSPFTSSSCFSFNPEEMKHYLHSQACSVFNYHLSPRTFPRYPGLMVPPLQCQMHPEESTQFSIKLQPPPVGRKNRERVESSEESAPVTTPTMASIPPRIKVEPASEKDPESLRQSAREKEEHTQEEGTVPSRTIEEEKGTIFARPAAPPIWPSVPISTPSGEPLEVTEDSEDRPGKEPSAPEKKEDALMPPKLRLKRRWNDDPEARELSKSGKFLWNGSGPQGLATAAADA

SEQ ID NO: 45336 - protein, 510 aa, Homo sapiens
MDGFYDQQVPFMVPGKSRSEECRGRPVIDRKRKFLDTDLAHDSEELFQDLSQLQEAWLAEAQVPDDEQFVPDFQSDNLVLHAPPPTKIKRELHSPSSELSSCSHEQALGANYGEKCLYNYCAYDRKPPSGFKPLTPPTTPLSPTHQNPLFPPPQATLPTSGHAPAAGPVQGVGPAPAPHSLPEPGPQQQTFAVPRPPHQPLQMPKMMPENQYPSEQRFQRQLSEPCHPFPPQPGVPGDNRPSYHRQMSEPIVPAAPPPPQGFKQEYHDPLYEHGVPGMPGPPAHGFQSPMGIKQEPRDYCVDSEVPNCQSSYMRGGYFSSSHEGFSYEKDPRLYFDDTCVVPERLEGKVKQEPTMYREGPPYQRRGSLQLWQFLVTLLDDPANAHFIAWTGRGMEFKLIEPEEVARRWGIQKNRPAMNYDKLSRSLRYYYEKGIMQKVAGERYVYKFVCDPDALFSMAFPDNQRPFLKAESECHLSEEDTLPLTHFEDSPAYLLDMDRCSSLPYAEGFAY

SEQ ID NO: 45337 - protein, 132 aa, Homo sapiens
MDGFYDQQVPFMVPGKSRSEECRGRPVIDRKRKFLDTDLAHDSEELFQDLSQLQEAWLAEAQVPDDEQFVPDFQSDNLVLHAPPPTKIKRELHSPSSELSSCSHEQALGANYGEKCLYNYCAYDRKPPSGFK

SEQ ID NO: 45338 - protein, 140 aa, Homo sapiens
MDGFYDQQVPFMVPGKSRSEECRGRPVIDRKRKFLDTDLAHDSEELFQDLSQLQEAWLAEAQVPDDEQFVPDFQSDNLVLHAPPPTKIKRELHSPSSELSSCSHEQALGANYGEKCLYNYCAYDRKPPSGFKPLTPPTTP

SEQ ID NO: 45339 - protein, 510 aa, Homo sapiens; identical to SEQ ID NO: 45336

SEQ ID NO: 45340 - protein, 150 aa, Homo sapiens
MDGFYDQQVPFMVPGKSRSEECRGRPVIDRKRKFLDTDLAHDSEELFQDLSQLQEAWLAEAQVPDDEQFVPDFQSDNLVLHAPPPTKIKRELHSPSSELSSCSHEQALGANYGEKCLYNYCAYDRKPPSGFKPLTPPTTPLSPTHQNPLF

SEQ ID NO: 45341 - protein, 552 aa, Homo sapiens
MSERRCPPEHREGVNDTGGSLFPQKLLNAETSQSGIRDAESTMDGFYDQQVPFMVPGKSRSEECRGRPVIDRKRKFLDTDLAHDSEELFQDLSQLQEAWLAEAQVPDDEQFVPDFQSDNLVLHAPPPTKIKRELHSPSSELSSCSHEQALGANYGEKCLYNYCAYDRKPPSGFKPLTPPTTPLSPTHQNPLFPPPQATLPTSGHAPAAGPVQGVGPAPAPHSLPEPGPQQQTFAVPRPPHQPLQMPKMMPENQYPSEQRFQRQLSEPCHPFPPQPGVPGDNRPSYHRQMSEPIVPAAPPPPQGFKQEYHDPLYEHGVPGMPGPPAHGFQSPMGIKQEPRDYCVDSEVPNCQSSYMRGGYFSSSHEGFSYEKDPRLYFDDTCVVPERLEGKVKQEPTMYREGPPYQRRGSLQLWQFLVTLLDDPANAHFIAWTGRGMEFKLIEPEEVARRWGIQKNRPAMNYDKLSRSLRYYYEKGIMQKVAGERYVYKFVCDPDALFSMAFPDNQRPFLKAESECHLSEEDTLPLTHFEDSPAYLLDMDRCSSLPYAEGFAY

SEQ ID NO: 45342 - protein, 452 aa, Homo sapiens
MSETPAQCSIKQERISYTPPESPVPSYASSTPLHVPVPRALRMEEDSIRLPAHLRLQPIYWSRDDVAQWLKWAENEFSLRPIDSNTFEMNGKALLLLTKEDFRYRSPHSGDVLYELLQHILKQRKPRILFSPFFHPGNSIHTQPEVILHQNHEEDNCVQRTPRPSVDNVHHNPPTIELLHRSRSPITTNHRPSPDPEQRPLRSPLDNMIRRLSPAERAQGPRPHQENNHQESYPLSVSPMENNHCPASSESHPKPSSPRQESTRVIQLMPSPIMHPLILNPRHSVDFKQSRLSEDGLHREGKPINLSHREDLAYMNHIMVSVSPPEEHAMPIGRIADCRLLWDYVYQLLSDSRYENFIRWEDKESKIFRIVDPNGLARLWGNHKNRTNMTYEKMSRALRHYYKLNIIRKEPGQRLLFRFMKTPDEIMSGRTDRLEHLESQELDEQIYQEDEC

SEQ ID NO: 45343 - protein, 317 aa, Homo sapiens
MQEGELAISPISPVAAMPPLGTHVQARCEAQINLLGEGGICKLPGRLRIQPALWSREDVLHWLRWAEQEYSLPCTAEHGFEMNGRALCILTKDDFRHRAPSSGDVLYELLQYIKTQRRALVCGPFFGGIFRLKTPTQHSPVPPEEVTGPSQMDTRRGHLLQPPDPGLTSNFGHLDDPGLARWTPGKEESLNLCHCAELGCRTQGVCSFPAMPQAPIDGRIADCRLLWDYVYQLLLDTRYEPYIKWEDKDAKIFRVVDPNGLARLWGNHKNRVNMTYEKMSRALRHYYKLNIIKKEPGQKLLFRNGLQLIFIFIWSFQ

SEQ ID NO: 45344 - protein, 341 aa, Homo sapiens
MQEGELAISPISPVAAMPPLGTHVQARCEAQINLLGEGGICKLPGRLRIQPALWSREDVLHWLRWAEQEYSLPCTAEHGFEMNGRALCILTKDDFRHRAPSSGDVLYELLQYIKTQRRALVCGPFFGGIFRLKTPTQHSPVPPEEVTGPSQMDTRRGHLLQPPDPGLTSNFGHLDDPGLARWTPGKEESLNLCHCAELGCRTQGVCSFPAMPQAPIDGRIADCRLLWDYVYQLLLDTRYEPYIKWEDKDAKIFRVVDPNGLARLWGNHKNRVNMTYEKMSRALRHYYKLNIIKKEPGQKLLFRFLKTPGKMVQDKHSHLEPLESQEQDRIEFKDKRPEISP

SEQ ID NO: 45345 - protein, 264 aa, Homo sapiens
MQEGELAISPISPVAAMPPLGTHVQARCEAQINLLGEGGICKLPGRLRIQPALWSREDVLHWLRWAEQEYSLPCTAEHGFEMNGRALCILTKDDFRHRAPSSGDVLYELLQYIKTQRRALVCGPFFGGIFRLKTPTQHSPVPPEDCRLLWDYVYQLLLDTRYEPYIKWEDKDAKIFRVVDPNGLARLWGNHKNRVNMTYEKMSRALRHYYKLNIIKKEPGQKLLFRFLKTPGKMVQDKHSHLEPLESQEQDRIEFKDKRPEISP

SEQ ID NO: 45346 - protein, 286 aa, Homo sapiens
MQEGELAISPISPVAAMPPLGTHVQARCEAQINLLGEGGICKLPGRLRDVLYELLQYIKTQRRALVCGPFFGGIFRLKTPTQHSPVPPEEVTGPSQMDTRRGHLLQPPDPGLTSNFGHLDDPGLARWTPGKEESLNLCHCAELGCRTQGVCSFPAMPQAPIDGRIADCRLLWDYVYQLLLDTRYEPYIKWEDKDAKIFRVVDPNGLARLWGNHKNRVNMTYEKMSRALRHYYKLNIIKKEPGQKLLFRFLKTPGKMVQDKHSHLEPLESQEQDRIEFKDKRPEISP

SEQ ID NO: 45347 - protein, 190 aa, Homo sapiens
MDTRRGHLLQPPDPGLTSNFGHLDDPGLARWTPGKEESLNLCHCAELGCRTQGVCSFPAMPQAPIDGRIADCRLLWDYVYQLLLDTRYEPYIKWEDKDAKIFRVVDPNGLARLWGNHKNRVNMTYEKMSRALRHYYKLNIIKKEPGQKLLFRFLKTPGKMVQDKHSHLEPLESQEQDRIEFKDKRPEISP

SEQ ID NO: 45348 - protein, 548 aa, Homo sapiens
MKTPADTGFAFPDWAYKPESSPGSRQIQLWHFILELLRKEEYQGVIAWQGDYGEFVIKDPDEVARLWGVRKCKPQMNYDKLSRALRYYYNKRILHKTKGKRFTYKFNFNKLVLVNYPFIDVGLAGGAVPQSAPPVPSGGSHFRFPPSTPSEVLSPTEDPRSPPACSSSSSSLFSAVVARRLGRGSVSDCSDGTSELEEPLGEDPRARPPGPPDLGAFRGPPLARLPHDPGVFRVYPRPRGGPEPLSPFPVSPLAGPGSLLPPQLSPALPMTPTHLAYTPSPTLSPMYPSGGGGPSGSGGGSHFSFSPEDMKRYLQAHTQSVYNYHLSPRAFLHYPGLVVPQPQRPDKCPLPPMAPETPPVPSSASSSSSSSSSPFKFKLQPPPLGRRQRAAGEKAVAGADKSGGSAGGLAEGAGALAPPPPPPQIKVEPISEGESEEVEVTDISDEDEEDGEVFKTPRAPPAPPKPEPGEAPGASQCMPLKLRFKRRWSEDCRLEGGGGPAGGFEDEGEDKKVRGEGPGEAGGPLTPRRVSSDLQHATAQLSLEHRDS

SEQ ID NO: 45349 - protein, 473 aa, Homo sapiens
MNYDKLSRALRYYYNKRILHKTKGKRFTYKFNFNKLVLVNYPFIDVGLAGGAVPQSAPPVPSGGSHFRFPPSTPSEVLSPTEDPRSPPACSSSSSSLFSAVVARRLGRGSVSDCSDGTSELEEPLGEDPRARPPGPPDLGAFRGPPLARLPHDPGVFRVYPRPRGGPEPLSPFPVSPLAGPGSLLPPQLSPALPMTPTHLAYTPSPTLSPMYPSGGGGPSGSGGGSHFSFSPEDMKRYLQAHTQSVYNYHLSPRAFLHYPGLVVPQPQRPDKCPLPPMAPETPPVPSSASSSSSSSSSPFKFKLQPPPLGRRQRAAGEKAVAGADKSGGSAGGLAEGAGALAPPPPPPQIKVEPISEGESEEVEVTDISDEDEEDGEVFKTPRAPPAPPKPEPGEAPGASQCMPLKLRFKRRWSEDCRLEGGGGPAGGFEDEGEDKKVRGEGPGEAGGPLTPRRVSSDLQHATAQLSLEHRDS

SEQ ID NO: 45350 - protein, 825 aa, Homo sapiens
MAADEGSAEKQAGEAHMAADGETNGSCENSDASSHANAAKHTQDSARVNPQDGTNTLTRIAENGVSERDSEAAKQNHVTADDFVQTSVIGSNGYILNKPALQAQPLRTTSTLASSLPGHAAKTLPGGAGKGRTPSAFPQTPAAPPATLGEGSADTEDRKLPAPGADVKVHRARKTMPKSVVGLHAASKDPREVREARDHKEPKEEINKNISDFGRQQLLPPFPSLHQSLPQNQCYMATTKSQTACLPFVLAAAVSRKKKRRMGTYSLVPKKKTKVLKQRTVIEMFKSITHSTVGSKGEKDLGASSLHVNGESLEMDSDEDDSEELEEDDGHGAEQAAAFPTEDSRTSKESMSEADRAQKMDGESEEEQESVDTGEEEEGGDESDLSSESSIKKKFLKRKGKTDSPWIKPARKRRRRSRKKPSGALGSESYKSSAGSAEQTAPGDSTGYMEVSLDSLDLRVKGILSSQAEGLANGPDVLETDGLQEVPLCSCRMETPKSREITTLANNQCMATESVDHELGRCTNSVVKYELMRPSNKAPLLVLCEDHRGRMVKHQCCPGCGYFCTAGNFMECQPESSISHRFHKDCASRVNNASYCPHCGEESSKAKEVTIAKADTTSTVTPVPGQEKGSALEGRADTTTGSAAGPPLSEDDKLQGAASHVPEGFDPTGPAGLGRPTPGLSQGPGKETLESALIALDSEKPKKLRFHPKQLYFSARQGELQKVLLMLVDGIDPNFKMEHQNKRSPLHAAAEAGHVDICHMLVQAGANIDTCSEDQRTPLMEAAENNHLEAVKYLIKAGALVDPKIQKTSKVYTESQETQRSQTIL

SEQ ID NO: 45351 - protein, 1153 aa, Homo sapiens
MAADEGSAEKQAGEAHMAADGETNGSCENSDASSHANAAKHTQDSARVNPQDGTNTLTRIAENGVSERDSEAAKQNHVTADDFVQTSVIGSNGYILNKPALQAQPLRTTSTLASSLPGHAAKTLPGGAGKGRTPSAFPQTPAAPPATLGEGSADTEDRKLPAPGADVKVHRARKTMPKSVVGLHAASKDPREVREARDHKEPKEEINKNISDFGRQQLLPPFPSLHQSLPQNQCYMATTKSQTACLPFVLAAAVSRKKKRRMGTYSLVPKKKTKVLKQRTVIEMFKSITHSTVGSKGEKDLGASSLHVNGESLEMDSDEDDSEELEEDDGHGAEQAAAFPTEDSRTSKESMSEADRAQKMDGESEEEQESVDTGEEEEGGDESDLSSESSIKKKFLKRKGKTDSPWIKPARKRRRRSRKKPSGALGSESYKSSAGSAEQTAPGDSTGYMEVSLDSLDLRVKGILSSQAEGLANGPDVLETDGLQEVPLCSCRMETPKSREITTLANNQCMATESVDHELGRCTNSVVKYELMRPSNKAPLLVLCEDHRGRMVKHQCCPGCGYFCTAGNFMECQPESSISHRFHKDCASRVNNASYCPHCGEESSKAKEVTIAKADTTSTVTPVPGQEKGSALEGRADTTTGSAAGPPLSEDDKLQGAASHVPEGFDPTGPAGLGRPTPGLSQGPGKETLESALIALDSEKPKKLRFHPKQLYFSARQGELQKVLLMLVDGIDPNFKMEHQNKRSPLHAAAEAGHVDICHMLVQAGANIDTCSEDQRTPLMEAAENNHLEAVKYLIKAGALVDPKDAEGSTCLHLAAKKGHYEVVQYLLSNGQMDVNCQDDGGWTPMIWATEYKHVDLVKLLLSKGSDINIRDNEENICLHWAAFSGCVDIAEILLAAKCDLHAVNIHGDSPLHIAARENRYDCVVLFLSRDSDVTLKNKEGETPLQCASLNSQVWSALQMSKALQDSAPDRPSPVERIVSRDIARGYERIPIPCVNAVDSEPCPSNYKYVSQNCVTSPMNIDRNITHLQYCVCIDDCSSSNCMCGQLSMRCWYDKDGRLLPEFNMAEPPLIFECNHACSCWRNCRNRVVQNGLRARLQLYRTRDMGWGVRSLQDIPPGTFVCEYVGELISDSEADVREEDSYLFDLDNKVISA

SEQ ID NO: 45352 - protein, 1298 aa, Homo sapiens
MAAADAEAVPARGEPQQDCCVKTELLGEETPMAADEGSAEKQAGEAHMAADGETNGSCENSDASSHANAAKHTQDSARVNPQDGTNTLTRIAENGVSERDSEAAKQNHVTADDFVQTSVIGSNGYILNKPALQAQPLRTTSTLASSLPGHAAKTLPGGAGKGRTPSAFPQTPAAPPATLGEGSADTEDRKLPAPGADVKVHRARKTMPKSVVGLHAASKDPREVREARDHKEPKEEINKNISDFGRQQLLPPFPSLHQSLPQNQCYMATTKSQTACLPFVLAAAVSRKKKRRMGTYSLVPKKKTKVLKQRTVIEMFKSITHSTVGSKGEKDLGASSLHVNGESLEMDSDEDDSEELEEDDGHGAEQAAAFPTEDSRTSKESMSEADRAQKMDGESEEEQESVDTGEEEEGGDESDLSSESSIKKKFLKRKGKTDSPWIKPARKRRRRSRKKPSGALGSESYKSSAGSAEQTAPGDSTGYMEVSLDSLDLRVKGILSSQAEGLANGPDVLETDGLQEVPLCSCRMETPKSREITTLANNQCMATESVDHELGRCTNSVVKYELMRPSNKAPLLVLCEDHRGRMVKHQCCPGCGYFCTAGNFMECQPESSISHRFHKDCASRVNNASYCPHCGEESSKAKEVTIAKADTTSTVTPVPGQEKGSALEGRADTTTGSAAGPPLSEDDKLQGAASHVPEGFDPTGPAGLGRPTPGLSQGPGKETLESALIALDSEKPKKLRFHPKQLYFSARQGELQKVLLMLVDGIDPNFKMEHQNKRSPLHAAAEAGHVDICHMLVQAGANIDTCSEDQRTPLMEAAENNHLEAVKYLIKAGALVDPKDAEGSTCLHLAAKKGHYEVVQYLLSNGQMDVNCQDDGGWTPMIWATEYKHVDLVKLLLSKGSDINIRDNEENICLHWAAFSGCVDIAEILLAAKCDLHAVNIHGDSPLHIAARENRYDCVVLFLSRDSDVTLKNKEGETPLQCASLNSQVWSALQMSKALQDSAPDRPSPVERIVSRDIARGYERIPIPCVNAVDSEPCPSNYKYVSQNCVTSPMNIDRNITHLQYCVCIDDCSSSNCMCGQLSMRCWYDKDGRLLPEFNMAEPPLIFECNHACSCWRNCRNRVVQNGLRARLQLYRTRDMGWGVRSLQDIPPGTFVCEYVGELISDSEADVREEDSYLFDLDNKDGEVYCIDARFYGNVSRFINHHCEPNLVPVRVFMAHQDLRFPRIAFFSTRLIEAGEQLGFDYGERFWDIKGKLFSCRCGSPKCRHSSAALAQRQASAAQEAQEDGLPDTSSAAAADPL

SEQ ID NO: 45353 - protein, 808 aa, Homo sapiens
MAAADAEAVPARGEPQQDCCVKTELLGEETPMAADEGSAEKQAGEAHMAADGETNGSCENSDASSHANAAKHTQDSARVNPQDGTNTLTRIAENGVSERDSEAAKQNHVTADDFVQTSVIGSNGYILNKPALQAQPLRTTSTLASSLPGHAAKTLPGGAGKGRTPSAFPQTPAAPPATLGEGSADTEDRKLPAPGADVKVHRARKTMPKSVVGLHAASKDPREVREARDHKEPKEEINKNISDFGRQQLLPPFPSLHQSLPQNQCYMATTKSQTACLPFVLAAAVSRKKKRRMGTYSLVPKKKTKVLKQRTVIEMFKSITHSTVGSKGEKDLGASSLHVNGESLEMDSDEDDSEELEEDDGHGAEQAAAFPTEDSRTSKESMSEADRAQKMDGESEEEQESVDTGEEEEGGDESDLSSESSIKKKFLKRKGKTDSPWIKPARKRRRRSRKKPSGALGSESYKSSAGSAEQTAPGDSTGYMEVSLDSLDLRVKGILSSQAEGLANGPDVLETDGLQEVPLCSCRMETPKSREITTLANNQCMATESVDHELGRCTNSVVKYELMRPSNKAPLLVLCEDHRGRMVKHQCCPGCGYFCTAGNFMECQPESSISHRFHKDCASRVNNASYCPHCGEESSKAKEVTIAKADTTSTVTPVPGQEKGSALEGRADTTTGSAAGPPLSEDDKLQGAASHVPEGFDPTGPAGLGRPTPGLSQGPGKETLESALIALDSEKPKKLRFHPKQLYFSARQGELQKVLLMLVDGIDPNFKMEHQNKRSPLHAAAEAGHVDICHMLVQFCRLGSPRSRGCLW

SEQ ID NO: 45354 - protein, 1233 aa, Homo sapiens
MRGLPRGRGLMRARGRGRAAPPGSRGRGRGGPHRGRGRPRSLLSLPRAQASWTPQLSTGLTSPPVPCLPSQGEAPAEMGALLLEKETRGATERVHGSLGDTPRSEETLPKATPDSLEPAGPSSPASVTVTVGDEGADTPVGATPLIGDESENLEGDGDLRGGRILLGHATKSFPSSPSKGGSCPSRAKMSMTGAGKSPPSVQSLAMRLLSMPGAQGAAAAGSEPPPATTSPEGQPKVHRARKTMSKPGNGQPPVPEKRPPEIQHFRMSDDVHSLGKVTSDLAKRRKLNSGGGLSEELGSARRSGEVTLTKGDPGSLEEWETVVGDDFSLYYDSYSVDERVDSDSKSEVEALTEQLSEEEEEEEEEEEEEEEEEEEEEEEEDEESGNQSDRSGSSGRRKAKKKWRKDSPWVKPSRKRRKREPPRAKEPRGVSNDTSSLETERGFEELPLCSCRMEAPKIDRISERAGHKCMATESVDGELSGCNAAILKRETMRPSSRVALMVLCETHRARMVKHHCCPGCGYFCTAGTFLECHPDFRVAHRFHKACVSQLNGMVFCPHCGEDASEAQEVTIPRGDGVTPPAGTAAPAPPPLSQDVPGRADTSQPSARMRGHGEPRRPPCDPLADTIDSSGPSLTLPNGGCLSAVGLPLGPGREALEKALVIQESERRKKLRFHPRQLYLSVKQGELQKVILMLLDNLDPNFQSDQQSKRTPLHAAAQKGSVEICHVLLQAGANINAVDKQQRTPLMEAVVNNHLEVARYMVQRGGCVYSKEEDGSTCLHHAAKIGNLEMVSLLLSTGQVDVNAQDSGGWTPIIWAAEHKHIEVIRMLLTRGADVTLTDNEENICLHWASFTGSAAIAEVLLNARCDLHAVNYHGDTPLHIAARESYHDCVLLFLSRGANPELRNKEGDTAWDLTPERSDVWFALQLNRKLRLGVGNRAIRTEKIICRDVARGYENVPIPCVNGVDGEPCPEDYKYISENCETSTMNIDRNITHLQHCTCVDDCSSSNCLCGQLSIRCWYDKDGRLLQEFNKIEPPLIFECNQACSCWRNCKNRVVQSGIKVRLQLYRTAKMGWGVRALQTIPQGTFICEYVGELISDAEADVREDDSYLFDLDNKDGEVYCIDARYYGNISRFINHLCDPNIIPVRVFMLHQDLRFPRIAFFSSRDIRTGEELGFDYGDRFWDIKSKYFTCQCGSEKCKHSAEAIALEQSRLARLDPHPELLPELGSLPPVNT

SEQ ID NO: 45355 - protein, 1176 aa, Homo sapiens
MAAAAGAAAAAAAEGEAPAEMGALLLEKETRGATERVHGSLGDTPRSEETLPKATPDSLEPAGPSSPASVTVTVGDEGADTPVGATPLIGDESENLEGDGDLRGGRILLGHATKSFPSSPSKGGSCPSRAKMSMTGAGKSPPSVQSLAMRLLSMPGAQGAAAAGSEPPPATTSPEGQPKVHRARKTMSKPGNGQPPVPEKRPPEIQHFRMSDDVHSLGKVTSDLAKRRKLNSGGGLSEELGSARRSGEVTLTKGDPGSLEEWETVVGDDFSLYYDSYSVDERVDSDSKSEVEALTEQLSEEEEEEEEEEEEEEEEEEEEEEEEDEESGNQSDRSGSSGRRKAKKKWRKDSPWVKPSRKRRKREPPRAKEPRGVSNDTSSLETERGFEELPLCSCRMEAPKIDRISERAGHKCMATESVDGELSGCNAAILKRETMRPSSRVALMVLCETHRARMVKHHCCPGCGYFCTAGTFLECHPDFRVAHRFHKACVSQLNGMVFCPHCGEDASEAQEVTIPRGDGVTPPAGTAAPAPPPLSQDVPGRADTSQPSARMRGHGEPRRPPCDPLADTIDSSGPSLTLPNGGCLSAVGLPLGPGREALEKALVIQESERRKKLRFHPRQLYLSVKQGELQKVILMLLDNLDPNFQSDQQSKRTPLHAAAQKGSVEICHVLLQAGANINAVDKQQRTPLMEAVVNNHLEVARYMVQRGGCVYSKEEDGSTCLHHAAKIGNLEMVSLLLSTGQVDVNAQDSGGWTPIIWAAEHKHIEVIRMLLTRGADVTLTDNEENICLHWASFTGSAAIAEVLLNARCDLHAVNYHGDTPLHIAARESYHDCVLLFLSRGANPELRNKEGDTAWDLTPERSDVWFALQLNRKLRLGVGNRAIRTEKIICRDVARGYENVPIPCVNGVDGEPCPEDYKYISENCETSTMNIDRNITHLQHCTCVDDCSSSNCLCGQLSIRCWYDKDGRLLQEFNKIEPPLIFECNQACSCWRNCKNRVVQSGIKVRLQLYRTAKMGWGVRALQTIPQGTFICEYVGELISDAEADVREDDSYLFDLDNKDGEVYCIDARYYGNISRFINHLCDPNIIPVRVFMLHQDLRFPRIAFFSSRDIRTGEELGFDYGDRFWDIKSKYFTCQCGSEKCKHSAEAIALEQSRLARLDPHPELLPELGSLPPVNT

SEQ ID NO: 45356 - protein, 1210 aa, Homo sapiens
MAAAAGAAAAAAAEGEAPAEMGALLLEKETRGATERVHGSLGDTPRSEETLPKATPDSLEPAGPSSPASVTVTVGDEGADTPVGATPLIGDESENLEGDGDLRGGRILLGHATKSFPSSPSKGGSCPSRAKMSMTGAGKSPPSVQSLAMRLLSMPGAQGAAAAGSEPPPATTSPEGQPKVHRARKTMSKPGNGQPPVPEKRPPEIQHFRMSDDVHSLGKVTSDLAKRRKLNSGGGLSEELGSARRSGEVTLTKGDPGSLEEWETVVGDDFSLYYDSYSVDERVDSDSKSEVEALTEQLSEEEEEEEEEEEEEEEEEEEEEEEEDEESGNQSDRSGSSGRRKAKKKWRKDSPWVKPSRKRRKREPPRAKEPRGVNGVGSSGPSEYMEVPLGSLELPSEGTLSPNHAGVSNDTSSLETERGFEELPLCSCRMEAPKIDRISERAGHKCMATESVDGELSGCNAAILKRETMRPSSRVALMVLCETHRARMVKHHCCPGCGYFCTAGTFLECHPDFRVAHRFHKACVSQLNGMVFCPHCGEDASEAQEVTIPRGDGVTPPAGTAAPAPPPLSQDVPGRADTSQPSARMRGHGEPRRPPCDPLADTIDSSGPSLTLPNGGCLSAVGLPLGPGREALEKALVIQESERRKKLRFHPRQLYLSVKQGELQKVILMLLDNLDPNFQSDQQSKRTPLHAAAQKGSVEICHVLLQAGANINAVDKQQRTPLMEAVVNNHLEVARYMVQRGGCVYSKEEDGSTCLHHAAKIGNLEMVSLLLSTGQVDVNAQDSGGWTPIIWAAEHKHIEVIRMLLTRGADVTLTDNEENICLHWASFTGSAAIAEVLLNARCDLHAVNYHGDTPLHIAARESYHDCVLLFLSRGANPELRNKEGDTAWDLTPERSDVWFALQLNRKLRLGVGNRAIRTEKIICRDVARGYENVPIPCVNGVDGEPCPEDYKYISENCETSTMNIDRNITHLQHCTCVDDCSSSNCLCGQLSIRCWYDKDGRLLQEFNKIEPPLIFECNQACSCWRNCKNRVVQSGIKVRLQLYRTAKMGWGVRALQTIPQGTFICEYVGELISDAEADVREDDSYLFDLDNKDGEVYCIDARYYGNISRFINHLCDPNIIPVRVFMLHQDLRFPRIAFFSSRDIRTGEELGFDYGDRFWDIKSKYFTCQCGSEKCKHSAEAIALEQSRLARLDPHPELLPELGSLPPVNT

SEQ ID NO: 45357 - protein, 1176 aa, Homo sapiens; identical to SEQ ID NO: 45355

SEQ ID NO: 45358 - protein, 1210 aa, Homo sapiens; identical to SEQ ID NO: 45356

SEQ ID NO: 45359 - protein, 1267 aa, Homo sapiens
MRGLPRGRGLMRARGRGRAAPPGSRGRGRGGPHRGRGRPRSLLSLPRAQASWTPQLSTGLTSPPVPCLPSQGEAPAEMGALLLEKETRGATERVHGSLGDTPRSEETLPKATPDSLEPAGPSSPASVTVTVGDEGADTPVGATPLIGDESENLEGDGDLRGGRILLGHATKSFPSSPSKGGSCPSRAKMSMTGAGKSPPSVQSLAMRLLSMPGAQGAAAAGSEPPPATTSPEGQPKVHRARKTMSKPGNGQPPVPEKRPPEIQHFRMSDDVHSLGKVTSDLAKRRKLNSGGGLSEELGSARRSGEVTLTKGDPGSLEEWETVVGDDFSLYYDSYSVDERVDSDSKSEVEALTEQLSEEEEEEEEEEEEEEEEEEEEEEEEDEESGNQSDRSGSSGRRKAKKKWRKDSPWVKPSRKRRKREPPRAKEPRGVNGVGSSGPSEYMEVPLGSLELPSEGTLSPNHAGVSNDTSSLETERGFEELPLCSCRMEAPKIDRISERAGHKCMATESVDGELSGCNAAILKRETMRPSSRVALMVLCETHRARMVKHHCCPGCGYFCTAGTFLECHPDFRVAHRFHKACVSQLNGMVFCPHCGEDASEAQEVTIPRGDGVTPPAGTAAPAPPPLSQDVPGRADTSQPSARMRGHGEPRRPPCDPLADTIDSSGPSLTLPNGGCLSAVGLPLGPGREALEKALVIQESERRKKLRFHPRQLYLSVKQGELQKVILMLLDNLDPNFQSDQQSKRTPLHAAAQKGSVEICHVLLQAGANINAVDKQQRTPLMEAVVNNHLEVARYMVQRGGCVYSKEEDGSTCLHHAAKIGNLEMVSLLLSTGQVDVNAQDSGGWTPIIWAAEHKHIEVIRMLLTRGADVTLTDNEENICLHWASFTGSAAIAEVLLNARCDLHAVNYHGDTPLHIAARESYHDCVLLFLSRGANPELRNKEGDTAWDLTPERSDVWFALQLNRKLRLGVGNRAIRTEKIICRDVARGYENVPIPCVNGVDGEPCPEDYKYISENCETSTMNIDRNITHLQHCTCVDDCSSSNCLCGQLSIRCWYDKDGRLLQEFNKIEPPLIFECNQACSCWRNCKNRVVQSGIKVRLQLYRTAKMGWGVRALQTIPQGTFICEYVGELISDAEADVREDDSYLFDLDNKDGEVYCIDARYYGNISRFINHLCDPNIIPVRVFMLHQDLRFPRIAFFSSRDIRTGEELGFDYGDRFWDIKSKYFTCQCGSEKCKHSAEAIALEQSRLARLDPHPELLPELGSLPPVNT

SEQ ID NO: 45360 - protein, 1267 aa, Homo sapiens; identical to SEQ ID NO: 45359

SEQ ID NO: 45361 - protein, 1233 aa, Homo sapiens; identical to SEQ ID NO: 45354

SEQ ID NO: 45362 - protein, 1267 aa, Homo sapiens
MRGLPRGRGLMRARGRGRAAPPGSRGRGRGGPHRGRGRPRSLLSLPRAQASWTPQLSTGLTSPPVPCLPSQGEAPAEMGALLLEKETRGATERVHGSLGDTPRSEETLPKANPDSLEPAGPSSPASVTVTVGDEGADTPVGATPLIGDESENLEGDGDLRGGRILLGHATKSFPSSPSKGGSCPSRAKMSMTGAGKSPPSVQSLAMRLLSMPGAQGAAAAGSEPPPATTSPEGQPKVHRARKTMSKPGNGQPPVPEKRPPEIQHFRMSDDVHSLGKVTSDLAKRRKLNSGGGLSEELGSARRSGEVTLTKGDPGSLEEWETVVGDDFSLYYDSYSVDERVDSDSKSEVEALTEQLSEEEEEEEEEEEEEEEEEEEEEEEEDEESGNQSDRSGSSGRRKAKKKWRKDSPWVKPSRKRRKREPPRAKEPRGVNGVGSSGPSEYMEVPLGSLELPSEGTLSPNHAGVSNDTSSLETERGFEELPLCSCRMEAPKIDRISERAGHKCMATESVDGELSGCNAAILKRETMRPSSRVALMVLCETHRARMVKHHCCPGCGYFCTAGTFLECHPDFRVAHRFHKACVSQLNGMVFCPHCGEDASEAQEVTIPRGDGVTPPAGTAAPAPPPLSQDVPGRADTSQPSARMRGHGEPRRPPCDPLADTIDSSGPSLTLPNGGCLSAVGLPLGPGREALEKALVIQESERRKKLRFHPRQLYLSVKQGELQKVILMLLDNLDPNFQSDQQSKRTPLHAAAQKGSVEICHVLLQAGANINAVDKQQRTPLMEAVVNNHLEVARYMVQRGGCVYSKEEDGSTCLHHAAKIGNLEMVSLLLSTGQVDVNAQDSGGWTPIIWAAEHKHIEVIRMLLTRGADVTLTDNEENICLHWASFTGSAAIAEVLLNARCDLHAVNYHGDTPLHIAARESYHDCVLLFLSRGANPELRNKEGDTAWDLTPERSDVWFALQLNRKLRLGVGNRAIRTEKIICRDVARGYENVPIPCVNGVDGEPCPEDYKYISENCETSTMNIDRNITHLQHCTCVDDCSSSNCLCGQLSIRCWYDKDGRLLQEFNKIEPPLIFECNQACSCWRNCKNRVVQSGIKVRLQLYRTAKMGWGVRALQTIPQGTFICEYVGELISDAEADVREDDSYLFDLDNKDGEVYCIDARYYGNISRFINHLCDPNIIPVRVFMLHQDLRFPRIAFFSSRDIRTGEELGFDYGDRFWDIKSKYFTCQCGSEKCKHSAEAIALEQSRLARLDPHPELLPELGSLPPVNT

SEQ ID NO: 45363 - protein, 298 aa, Homo sapiens
  VARIANT 1: note = MOD_RES - Any amino acid
XSKRTPLHAAAQKGSVEICHVLLQAGANINAVDKQQRTPLMEAVVNNHLEVARYMVQRGGCVYSKEEDGSTCLHHAAKIGNLEMVSLLLSTGQVDVNAQGQLPPPSLPSHPQDSGGWTPIIWAAEHKHIEVIRMLLTRGADVTLTDNEENICLHWASFTGSAAIAEVLLNARCDLHAVNYHGDTPLHIAARESYHDCVLLFLSRGANPELRNKEGDTAWDLTPERSDVWFALQLNRKLRLGVGNRAIRTEKIICRDVARGYENVPIPCVNGVDGEPCPEDYKYISENCETSTMNIDRN

SEQ ID NO: 45364 - protein, 1210 aa, Homo sapiens
MAAAAGAAAAAAAEGEAPAEMGALLLEKETRGATERVHGSLGDTPRSEETLPKANPDSLEPAGPSSPASVTVTVGDEGADTPVGATPLIGDESENLEGDGDLRGGRILLGHATKSFPSSPSKGGSCPSRAKMSMTGAGKSPPSVQSLAMRLLSMPGAQGAAAAGSEPPPATTSPEGQPKVHRARKTMSKPGNGQPPVPEKRPPEIQHFRMSDDVHSLGKVTSDLAKRRKLNSGGGLSEELGSARRSGEVTLTKGDPGSLEEWETVVGDDFSLYYDSYSVDERVDSDSKSEVEALTEQLSEEEEEEEEEEEEEEEEEEEEEEEEDEESGNQSDRSGSSGRRKAKKKWRKDSPWVKPSRKRRKREPPRAKEPRGVNGVGSSGPSEYMEVPLGSLELPSEGTLSPNHAGVSNDTSSLETERGFEELPLCSCRMEAPKIDRISERAGHKCMATESVDGELSGCNAAILKRETMRPSSRVALMVLCETHRARMVKHHCCPGCGYFCTAGTFLECHPDFRVAHRFHKACVSQLNGMVFCPHCGEDASEAQEVTIPRGDGVTPPAGTAAPAPPPLSQDVPGRADTSQPSARMRGHGEPRRPPCDPLADTIDSSGPSLTLPNGGCLSAVGLPLGPGREALEKALVIQESERRKKLRFHPRQLYLSVKQGELQKVILMLLDNLDPNFQSDQQSKRTPLHAAAQKGSVEICHVLLQAGANINAVDKQQRTPLMEAVVNNHLEVARYMVQRGGCVYSKEEDGSTCLHHAAKIGNLEMVSLLLSTGQVDVNAQDSGGWTPIIWAAEHKHIEVIRMLLTRGADVTLTDNEENICLHWASFTGSAAIAEVLLNARCDLHAVNYHGDTPLHIAARESYHDCVLLFLSRGANPELRNKEGDTAWDLTPERSDVWFALQLNRKLRLGVGNRAIRTEKIICRDVARGYENVPIPCVNGVDGEPCPEDYKYISENCETSTMNIDRNITHLQHCTCVDDCSSSNCLCGQLSIRCWYDKDGRLLQEFNKIEPPLIFECNQACSCWRNCKNRVVQSGIKVRLQLYRTAKMGWGVRALQTIPQGTFICEYVGELISDAEADVREDDSYLFDLDNKDGEVYCIDARYYGNISRFINHLCDPNIIPVRVFMLHQDLRFPRIAFFSSRDIRTGEELGFDYGDRFWDIKSKYFTCQCGSEKCKHSAEAIALEQSRLARLDPHPELLPELGSLPPVNT

SEQ ID NO: 45365 - protein, 298 aa, Homo sapiens; identical to SEQ ID NO: 45363
  VARIANT 1: note = MOD_RES - Any amino acid

SEQ ID NO: 45366 - protein, 1176 aa, Homo sapiens; identical to SEQ ID NO: 45355

SEQ ID NO: 45367 - protein, 1267 aa, Homo sapiens; identical to SEQ ID NO: 45359

SEQ ID NO: 45368 - protein, 1210 aa, Homo sapiens; identical to SEQ ID NO: 45364

SEQ ID NO: 45369 - protein, 298 aa, Homo sapiens; identical to SEQ ID NO: 45363
  VARIANT 1: note = MOD_RES - Any amino acid

SEQ ID NO: 45370 - protein, 922 aa, Homo sapiens
SEVEALTEQLSEEEEEEEEEEEEEEEEEEEEEEEEDEESGNQSDRSGSSGRRKAKKKWRKDSPWVKPSRKRRKREPPRAKEPRGVNGVGSSGPSEYMEVPLGSLELPSEGTLSPNHAGVSNDTSSLETERGFEELPLCSCRMEAPKIDRISERAGHKCMATESVDGELSGCNAAILKRETMRPSSRVALMVLCETHRARMVKHHCCPGCGYFCTAGTFLECHPDFRVAHRFHKACVSQLNGMVFCPHCGEDASEAQEVTIPRGDGVTPPAGTAAPAPPPLSQDVPGRADTSQPSARMRGHGEPRRPPCDPLADTIDSSGPSLTLPNGGCLSAVGLPLGPGREALEKALVIQESERRKKLRFHPRQLYLSVKQGELQKVILMLLDNLDPNFQSDQQSKRTPLHAAAQKGSVEICHVLLQAGANINAVDKQQRTPLMEAVVNNHLEVARYMVQRGGCVYSKEEDGSTCLHHAAKIGNLEMVSLLLSTGQVDVNAQDSGGWTPIIWAAEHKHIEVIRMLLTRGADVTLTDNEENICLHWASFTGSAAIAEVLLNARCDLHAVNYHGDTPLHIAARESYHDCVLLFLSRGANPELRNKEGDTAWDLTPERSDVWFALQLNRKLRLGVGNRAIRTEKIICRDVARGYENVPIPCVNGVDGEPCPEDYKYISENCETSTMNIDRNITHLQHCTCVDDCSSSNCLCGQLSIRCWYDKDGRLLQEFNKIEPPLIFECNQACSCWRNCKNRVVQSGIKVRLQLYRTAKMGWGVRALQTIPQGTFICEYVGELISDAEADVREDDSYLFDLDNKDGEVYCIDARYYGNISRFINHLCDPNIIPVRVFMLHQDLRFPRIAFFSSRDIRTGEELGFDYGDRFWDIKSKYFTCQCGSEKCKHSAEAIALEQSRLARLDPHPELLPELGSLPPVNT

SEQ ID NO: 45371 - protein, 1233 aa, Homo sapiens
MRGLPRGRGLMRARGRGRAAPPGSRGRGRGGPHRGRGRPRSLLSLPRAQASWTPQLSTGLTSPPVPCLPSQGEAPAEMGALLLEKETRGATERVHGSLGDTPRSEETLPKANPDSLEPAGPSSPASVTVTVGDEGADTPVGATPLIGDESENLEGDGDLRGGRILLGHATKSFPSSPSKGGSCPSRAKMSMTGAGKSPPSVQSLAMRLLSMPGAQGAAAAGSEPPPATTSPEGQPKVHRARKTMSKPGNGQPPVPEKRPPEIQHFRMSDDVHSLGKVTSDLAKRRKLNSGGGLSEELGSARRSGEVTLTKGDPGSLEEWETVVGDDFSLYYDSYSVDERVDSDSKSEVEALTEQLSEEEEEEEEEEEEEEEEEEEEEEEEDEESGNQSDRSGSSGRRKAKKKWRKDSPWVKPSRKRRKREPPRAKEPRGVSNDTSSLETERGFEELPLCSCRMEAPKIDRISERAGHKCMATESVDGELSGCNAAILKRETMRPSSRVALMVLCETHRARMVKHHCCPGCGYFCTAGTFLECHPDFRVAHRFHKACVSQLNGMVFCPHCGEDASEAQEVTIPRGDGVTPPAGTAAPAPPPLSQDVPGRADTSQPSARMRGHGEPRRPPCDPLADTIDSSGPSLTLPNGGCLSAVGLPLGPGREALEKALVIQESERRKKLRFHPRQLYLSVKQGELQKVILMLLDNLDPNFQSDQQSKRTPLHAAAQKGSVEICHVLLQAGANINAVDKQQRTPLMEAVVNNHLEVARYMVQRGGCVYSKEEDGSTCLHHAAKIGNLEMVSLLLSTGQVDVNAQDSGGWTPIIWAAEHKHIEVIRMLLTRGADVTLTDNEENICLHWASFTGSAAIAEVLLNARCDLHAVNYHGDTPLHIAARESYHDCVLLFLSRGANPELRNKEGDTAWDLTPERSDVWFALQLNRKLRLGVGNRAIRTEKIICRDVARGYENVPIPCVNGVDGEPCPEDYKYISENCETSTMNIDRNITHLQHCTCVDDCSSSNCLCGQLSIRCWYDKDGRLLQEFNKIEPPLIFECNQACSCWRNCKNRVVQSGIKVRLQLYRTAKMGWGVRALQTIPQGTFICEYVGELISDAEADVREDDSYLFDLDNKDGEVYCIDARYYGNISRFINHLCDPNIIPVRVFMLHQDLRFPRIAFFSSRDIRTGEELGFDYGDRFWDIKSKYFTCQCGSEKCKHSAEAIALEQSRLARLDPHPELLPELGSLPPVNT

SEQ ID NO: 45372 - protein, 1233 aa, Homo sapiens; identical to SEQ ID NO: 45354

SEQ ID NO: 45373 - protein, 1210 aa, Homo sapiens; identical to SEQ ID NO: 45356

SEQ ID NO: 45374 - protein, 298 aa, Homo sapiens; identical to SEQ ID NO: 45363
  VARIANT 1: note = MOD_RES - Any amino acid

SEQ ID NO: 45375 - protein, 1267 aa, Homo sapiens; identical to SEQ ID NO: 45359

SEQ ID NO: 45376 - protein, 888 aa, Homo sapiens
SEVEALTEQLSEEEEEEEEEEEEEEEEEEEEEEEEDEESGNQSDRSGSSGRRKAKKKWRKDSPWVKPSRKRRKREPPRAKEPRGVSNDTSSLETERGFEELPLCSCRMEAPKIDRISERAGHKCMATESVDGELSGCNAAILKRETMRPSSRVALMVLCETHRARMVKHHCCPGCGYFCTAGTFLECHPDFRVAHRFHKACVSQLNGMVFCPHCGEDASEAQEVTIPRGDGVTPPAGTAAPAPPPLSQDVPGRADTSQPSARMRGHGEPRRPPCDPLADTIDSSGPSLTLPNGGCLSAVGLPLGPGREALEKALVIQESERRKKLRFHPRQLYLSVKQGELQKVILMLLDNLDPNFQSDQQSKRTPLHAAAQKGSVEICHVLLQAGANINAVDKQQRTPLMEAVVNNHLEVARYMVQRGGCVYSKEEDGSTCLHHAAKIGNLEMVSLLLSTGQVDVNAQDSGGWTPIIWAAEHKHIEVIRMLLTRGADVTLTDNEENICLHWASFTGSAAIAEVLLNARCDLHAVNYHGDTPLHIAARESYHDCVLLFLSRGANPELRNKEGDTAWDLTPERSDVWFALQLNRKLRLGVGNRAIRTEKIICRDVARGYENVPIPCVNGVDGEPCPEDYKYISENCETSTMNIDRNITHLQHCTCVDDCSSSNCLCGQLSIRCWYDKDGRLLQEFNKIEPPLIFECNQACSCWRNCKNRVVQSGIKVRLQLYRTAKMGWGVRALQTIPQGTFICEYVGELISDAEADVREDDSYLFDLDNKDGEVYCIDARYYGNISRFINHLCDPNIIPVRVFMLHQDLRFPRIAFFSSRDIRTGEELGFDYGDRFWDIKSKYFTCQCGSEKCKHSAEAIALEQSRLARLDPHPELLPELGSLPPVNT

SEQ ID NO: 45377 - protein, 1176 aa, Homo sapiens
MAAAAGAAAAAAAEGEAPAEMGALLLEKETRGATERVHGSLGDTPRSEETLPKANPDSLEPAGPSSPASVTVTVGDEGADTPVGATPLIGDESENLEGDGDLRGGRILLGHATKSFPSSPSKGGSCPSRAKMSMTGAGKSPPSVQSLAMRLLSMPGAQGAAAAGSEPPPATTSPEGQPKVHRARKTMSKPGNGQPPVPEKRPPEIQHFRMSDDVHSLGKVTSDLAKRRKLNSGGGLSEELGSARRSGEVTLTKGDPGSLEEWETVVGDDFSLYYDSYSVDERVDSDSKSEVEALTEQLSEEEEEEEEEEEEEEEEEEEEEEEEDEESGNQSDRSGSSGRRKAKKKWRKDSPWVKPSRKRRKREPPRAKEPRGVSNDTSSLETERGFEELPLCSCRMEAPKIDRISERAGHKCMATESVDGELSGCNAAILKRETMRPSSRVALMVLCETHRARMVKHHCCPGCGYFCTAGTFLECHPDFRVAHRFHKACVSQLNGMVFCPHCGEDASEAQEVTIPRGDGVTPPAGTAAPAPPPLSQDVPGRADTSQPSARMRGHGEPRRPPCDPLADTIDSSGPSLTLPNGGCLSAVGLPLGPGREALEKALVIQESERRKKLRFHPRQLYLSVKQGELQKVILMLLDNLDPNFQSDQQSKRTPLHAAAQKGSVEICHVLLQAGANINAVDKQQRTPLMEAVVNNHLEVARYMVQRGGCVYSKEEDGSTCLHHAAKIGNLEMVSLLLSTGQVDVNAQDSGGWTPIIWAAEHKHIEVIRMLLTRGADVTLTDNEENICLHWASFTGSAAIAEVLLNARCDLHAVNYHGDTPLHIAARESYHDCVLLFLSRGANPELRNKEGDTAWDLTPERSDVWFALQLNRKLRLGVGNRAIRTEKIICRDVARGYENVPIPCVNGVDGEPCPEDYKYISENCETSTMNIDRNITHLQHCTCVDDCSSSNCLCGQLSIRCWYDKDGRLLQEFNKIEPPLIFECNQACSCWRNCKNRVVQSGIKVRLQLYRTAKMGWGVRALQTIPQGTFICEYVGELISDAEADVREDDSYLFDLDNKDGEVYCIDARYYGNISRFINHLCDPNIIPVRVFMLHQDLRFPRIAFFSSRDIRTGEELGFDYGDRFWDIKSKYFTCQCGSEKCKHSAEAIALEQSRLARLDPHPELLPELGSLPPVNT

SEQ ID NO: 45378 - protein, 1031 aa, Homo sapiens
SCHCTPSWPPVPEKRPPEIQHFRMSDDVHSLGKVTSDLAKRRKLNSGGGLSEELGSARRSGEVTLTKGDPGSLEEWETVVGDDFSLYYDSYSVDERVDSDSKSEVEALTEQLSEEEEEEEEEEEEEEEEEEEEEEEEDEESGNQSDRSGSSGRRKAKKKWRKDSPWVKPSRKRRKREPPRAKEPRGVNGVGSSGPSEYMEVPLGSLELPSEGTLSPNHAGVSNDTSSLETERGFEELPLCSCRMEAPKIDRISERAGHKCMATESVDGELSGCNAAILKRETMRPSSRVALMVLCETHRARMVKHHCCPGCGYFCTAGTFLECHPDFRVAHRFHKACVSQLNGMVFCPHCGEDASEAQEVTIPRGDGVTPPAGTAAPAPPPLSQDVPGRADTSQPSARMRGHGEPRRPPCDPLADTIDSSGPSLTLPNGGCLSAVGLPLGPGREALEKALVIQESERRKKLRFHPRQLYLSVKQGELQKVILMLLDNLDPNFQSDQQSKRTPLHAAAQKGSVEICHVLLQAGANINAVDKQQRTPLMEAVVNNHLEVARYMVQRGGCVYSKEEDGSTCLHHAAKIGNLEMVSLLLSTGQVDVNAQDSGGWTPIIWAAEHKHIEVIRMLLTRGADVTLTDNVSERLVEEENICLHWASFTGSAAIAEVLLNARCDLHAVNYHGDTPLHIAARESYHDCVLLFLSRGANPELRNKEGDTAWDLTPERSDVWFALQLNRKLRLGVGNRAIRTEKIICRDVARGYENVPIPCVNGVDGEPCPEDYKYISENCETSTMNIDRNITHLQHCTCVDDCSSSNCLCGQLSIRCWYDKDGRLLQEFNKIEPPLIFECNQACSCWRNCKNRVVQSGIKVRLQLYRTAKMGWGVRALQTIPQGTFICEYVGELISDAEADVREDDSYLFDLDNKDGEVYCIDARYYGNISRFINHLCDPNIIPVRVFMLHQDLRFPRIAFFSSRDIRTGEELGFDYGDRFWDIKSKYFTCQCGSEKCKHSAEAIALEQSRLARLDPHPELLPELGSLPPVNT

SEQ ID NO: 45379 - protein, 1233 aa, Homo sapiens; identical to SEQ ID NO: 45354

SEQ ID NO: 45380 - protein, 1267 aa, Homo sapiens; identical to SEQ ID NO: 45362

SEQ ID NO: 45381 - protein, 298 aa, Homo sapiens; identical to SEQ ID NO: 45363
  VARIANT 1: note = MOD_RES - Any amino acid

SEQ ID NO: 45382 - protein, 298 aa, Homo sapiens; identical to SEQ ID NO: 45363
  VARIANT 1: note = MOD_RES - Any amino acid

SEQ ID NO: 45383 - protein, 1210 aa, Homo sapiens; identical to SEQ ID NO: 45356

SEQ ID NO: 45384 - protein, 1176 aa, Homo sapiens; identical to SEQ ID NO: 45355

SEQ ID NO: 45385 - protein, 1233 aa, Homo sapiens; identical to SEQ ID NO: 45371

SEQ ID NO: 45386 - protein, 298 aa, Homo sapiens; identical to SEQ ID NO: 45363
  VARIANT 1: note = MOD_RES - Any amino acid

SEQ ID NO: 45387 - protein, 1176 aa, Homo sapiens; identical to SEQ ID NO: 45377

SEQ ID NO: 45388 - protein, 888 aa, Homo sapiens; identical to SEQ ID NO: 45376

SEQ ID NO: 45389 - protein, 922 aa, Homo sapiens; identical to SEQ ID NO: 45370

SEQ ID NO: 45390 - protein, 1031 aa, Homo sapiens
SCHCTPSRPPVPEKRPPEIQHFRMSDDVHSLGKVTSDLAKRRKLNSGGGLSEELGSARRSGEVTLTKGDPGSLEEWETVVGDDFSLYYDSYSVDERVDSDSKSEVEALTEQLSEEEEEEEEEEEEEEEEEEEEEEEEDEESGNQSDRSGSSGRRKAKKKWRKDSPWVKPSRKRRKREPPRAKEPRGVNGVGSSGPSEYMEVPLGSLELPSEGTLSPNHAGVSNDTSSLETERGFEELPLCSCRMEAPKIDRISERAGHKCMATESVDGELSGCNAAILKRETMRPSSRVALMVLCETHRARMVKHHCCPGCGYFCTAGTFLECHPDFRVAHRFHKACVSQLNGMVFCPHCGEDASEAQEVTIPRGDGVTPPAGTAAPAPPPLSQDVPGRADTSQPSARMRGHGEPRRPPCDPLADTIDSSGPSLTLPNGGCLSAVGLPLGPGREALEKALVIQESERRKKLRFHPRQLYLSVKQGELQKVILMLLDNLDPNFQSDQQSKRTPLHAAAQKGSVEICHVLLQAGANINAVDKQQRTPLMEAVVNNHLEVARYMVQRGGCVYSKEEDGSTCLHHAAKIGNLEMVSLLLSTGQVDVNAQDSGGWTPIIWAAEHKHIEVIRMLLTRGADVTLTDNVSERLVEEENICLHWASFTGSAAIAEVLLNARCDLHAVNYHGDTPLHIAARESYHDCVLLFLSRGANPELRNKEGDTAWDLTPERSDVWFALQLNRKLRLGVGNRAIRTEKIICRDVARGYENVPIPCVNGVDGEPCPEDYKYISENCETSTMNIDRNITHLQHCTCVDDCSSSNCLCGQLSIRCWYDKDGRLLQEFNKIEPPLIFECNQACSCWRNCKNRVVQSGIKVRLQLYRTAKMGWGVRALQTIPQGTFICEYVGELISDAEADVREDDSYLFDLDNKDGEVYCIDARYYGNISRFINHLCDPNIIPVRVFMLHQDLRFPRIAFFSSRDIRTGEELGFDYGDRFWDIKSKYFTCQCGSEKCKHSAEAIALEQSRLARLDPHPELLPELGSLPPVNT

SEQ ID NO: 45391 - protein, 1031 aa, Homo sapiens; identical to SEQ ID NO: 45378

SEQ ID NO: 45392 - protein, 1031 aa, Homo sapiens; identical to SEQ ID NO: 45378

SEQ ID NO: 45393 - protein, 1031 aa, Homo sapiens; identical to SEQ ID NO: 45390

SEQ ID NO: 45394 - protein, 1031 aa, Homo sapiens; identical to SEQ ID NO: 45378

SEQ ID NO: 45395 - protein, 725 aa, Homo sapiens
MADEDLIFRLEGVDGGQSPRAGHDGDSDGDSDDEEGYFICPITDDPSSNQNVNSKVNKYYSNLTKSERYSSSGSPANSFHFKEAWKHAIQKAKHMPDPWAEFHLEDIATERATRHRYNAVTGEWLDDEVLIKMASQPFGRGAMRECFRTKKLSNFLHAQQWKGASNYVAKRYIEPVDRDVYFEDVRLQMEAKLWGEEYNRHKPPKQVDIMQMCIIELKDRPGKPLFHLEHYIEGKYIKYNSNSGFVRDDNIRLTPQAFSHFTFERSGHQLIVVDIQGVGDLYTDPQIHTETGTDFGDGNLGVRGMALFFYSHACNRICESMGLAPFDLSPRERDAVNQNTKLLQSAKTILRGTEEKCGSPQVRTLSGSRPPLLRPLSENSGDENMSDVTFDSLPSSPSSATPHSQKLDHLHWPVFSDLDNMASRDHDHLDNHRESENSGDSGYPSEKRGELDDPEPREHGHSYSNRKYESDEDSLGSSGRVCVEKWNLLNSSRLHLPRASAVALEVQRLNALDLEKKIGKSILGKVHLAMVRYHEGGRFCEKGEEWDQESAVFHLEHAANLGELEAIVGLGLMYSQLPHHILADVSLKETEENKTKGFDYLLKAAEAGDRQSMILVARAFDSGQNLSPDRCQDWLEALHWYNTALEMTDCDEGGEYDGMQDEPRYMMLAREAEMLFTGGYGLEKDPQRSGDLYTQAAEAAMEAMKGRLANQYYQKAEEAWAQMEE

SEQ ID NO: 45396 - protein, 462 aa, Homo sapiens
MGKEKTHINIVVIGHVDSGKSTTTGHLIYKCGGIDKRTIEKFEKEAAEMGKGSFKYAWVLDKLKAERERGITIDISLWKFETSKYYVTIIDAPGHRDFIKNMITGTSQADCAVLIVAAGVGEFEAGISKNGQTREHALLAYTLGVKQLIVGVNKMDSTEPPYSQKRYEEIVKEVSTYIKKIGYNPDTVAFVPISGWNGDNMLEPSANMPWFKGWKVTRKDGNASGTTLLEALDCILPPTRPTDKPLRLPLQDVYKIGGIGTVPVGRVETGVLKPGMVVTFAPVNVTTEVKSVEMHHEALSEALPGDNVGFNVKNVSVKDVRRGNVAGDSKNDPPMEAAGFTAQVIILNHPGQISAGYAPVLDCHTAHIACKFAELKEKIDRRSGKKLEDGPKFLKSGDAAIVDMVPGKPMCVESFSDYPPLGRFAVRDMRQTVAVGVIKAVDKKAAGAGKVTKSAQKAQKAK

SEQ ID NO: 45397 - protein, 462 aa, Homo sapiens; identical to SEQ ID NO: 45396

SEQ ID NO: 45398 - protein, 462 aa, Homo sapiens; identical to SEQ ID NO: 45396

SEQ ID NO: 45399 - protein, 145 aa, Homo sapiens
MGKEKTHINIVVIGHVDSGKSTTTGHLIYKCGGIDKRTIEKFEKEAAEMGKGSFKYAWVLDKLKAERERGITIDISLWKFETSKYYVTIIDAPGHRDFIKNMITGTSQADCAVLIVAAGVGEFEAGISKNGQTREHALLAYTLGV

SEQ ID NO: 45400 - protein, 426 aa, Homo sapiens
MGKEKTHINIVVIGHVDSGKSTTTGHLIYKCGGIDKRTIEKFEKEAAEMGKGSFKYAWVLDKLKAERERGITIDISLWKFETSKYYVTIIDAPGHRDFIKNMITGTSQADCAVLIVAAGVGEFEAGISKNGQTREHALLAYTLGVKQLIVGVNKMDSTEPPYSQKRYEEIVKEVSTYIKKIGYNPDTVAFVPISGWNGDNMLEPSANMPWFKGWKVTRKDGNASGTTLLEALDCILPPTRPTDKPLRLPLQDVYKIGGIGTVPVPSGDWCSPGMVVTFAPVNVTTEVKSVEMHHEALSEALPGDNVGFNVKNVSVKDVRRGNVAGDSKNDPPMEAAGFTAQVIILNHPGQISAGYAPVLDCHTAHIACKFAELKEKIDRRSGKKLEDGPKFLKSGDAAIVDMVPGKPMCVESFSDYPPLGKSLCCS

SEQ ID NO: 45401 - protein, 441 aa, Homo sapiens
MGKEKTHINIVVIGHVDSGKSTTTGHLIYKCGGIDKRTIEKFEKEAAEMGKGSFKYAWVLDKLKAERERGITIDISLWKFETSKYYVTIIDAPGHRDFIKNMITGTSQADCAVLIVAAGVGEFEAGISKNGQTREHALLAYSQKRYEEIVKEVSTYIKKIGYNPDTVAFVPISGWNGDNMLEPSANMPWFKGWKVTRKDGNASGTTLLEALDCILPPTRPTDKPLRLPLQDVYKIGGIGTVPVGRVETGVLKPGMVVTFAPVNVTTEVKSVEMHHEALSEALPGDNVGFNVKNVSVKDVRRGNVAGDSKNDPPMEAAGFTAQVIILNHPGQISAGYAPVLDCHTAHIACKFAELKEKIDRRSGKKLEDGPKFLKSGDAAIVDMVPGKPMCVESFSDYPPLGRFAVRDMRQTVAVGVIKAVDKKAAGAGKVTKSAQKAQKAK

SEQ ID NO: 45402 - protein, 107 aa, Homo sapiens
MGKEKTHINIVVIGHVDSGKSTTTGHLIYKCGGIDKRTIEKFEKEAAEMGKGSFKYAWVLDKLKAERERGITIDISLWKFETSKYYVTIIDAPGHRDFIKNMITGTS

SEQ ID NO: 45403 - protein, 111 aa, Homo sapiens
MGKEKTHINIVVIGHVDSGKSTTTGHLIYKCGGIDKRTIEKFEKEAAEMGKGSFKYAWVLDKLKAERERGITIDISLWKFETTKQWTRRLLELARSPSLPRKLRRLNEYYP

SEQ ID NO: 45404 - protein, 463 aa, Homo sapiens
MGKEKTHINIVVIGHVDSGKSTTTGHLIYKCGGIDKRTIEKFEKEAAEMGKGSFKYAWVLDKLKAERERGITIDISLWKFETTKYYITIIDAPGHRDFIKNMITGTSQADCAVLIVAAGVGEFEAGISKNGQTREHALLAYTLGVKQLIVGVNKMDSTEPAYSEKRYDEIVKEVSAYIKKIGYNPATVPFVPISGWHGDNMLEPSPNMPWFKGWKVERKEGNASGVSLLEALDTILPPTRPTDKPLRLPLQDVYKIGGIGTVPVGRVETGILRPGMVVTFAPVNITTEVKSVEMHHEALSEALPGDNVGFNVKNVSVKDIRRGNVCGDSKSDPPQEAAQFTSQVIILNHPGQISAGYSPVIDCHTAHIACKFAELKEKIDRRSGKKLEDNPKSLKSGDAAIVEMVPGKPMCVESFSQYPPLGRFAVRDMRQTVAVGVIKNVEKKSGGAGKVTKSAQKAQKAGK

SEQ ID NO: 45405 - protein, 463 aa, Homo sapiens; identical to SEQ ID NO: 45404

SEQ ID NO: 45406 - protein, 225 aa, Homo sapiens
MGFGDLKSPAGLQVLNDYLADKSYIEGYVPSQADVAVFEAVSSPPPADLCHALRWYNHIKSYEKEKASLPGVKKALGKYGPADVEDTTGSGATDSKDDDDIDLFGSDDEEESEEAKRLREERLAQYESKKAKKPALVAKSSILLDVKPWDDETDMAKLEECVRSIQADGLVWGSSKLVPVGYGIKKLQIQCVVEDDKVGTDMLEEQITAFEDYVQSMDVAAFNKI

SEQ ID NO: 45407 - protein, 225 aa, Homo sapiens; identical to SEQ ID NO: 45406

SEQ ID NO: 45408 - protein, 225 aa, Homo sapiens; identical to SEQ ID NO: 45406

SEQ ID NO: 45409 - protein, 123 aa, Homo sapiens
MGFGDLKSPAGLQVLNDYLADKSYIEGYVPSQADVAVFEAVSSPPPADLCHALRWYNHIKSYEKEKASLPGVKKALGKYGPADVEDTTGSGATDSKDDDDIDLFGSDDEEESEEAKRLREERL

SEQ ID NO: 45410 - protein, 281 aa, Homo sapiens
MATNFLAHEKIWFDKFKYDDAERRFYEQMNGPVAGASRQENGASVILRDIARARENIQKSLAGSSGPGASSGTSGDHGELVVRIASLEVENQSLRGVVQELQQAISKLEARLNVLEKSSPGHRATAPQTQHVSPMRQVEPPAKKPATPAEDDEDDDIDLFGSDNEEEDKEAAQLREERLRQYAEKKAKKPALVAKSSILLDVKPWDDETDMAQLEACVRSIQLDGLVWGASKLVPVGYGIRKLQIQCVVEDDKVGTDLLEEEITKFEEHVQSVDIAAFNKI

SEQ ID NO: 45411 - protein, 631 aa, Homo sapiens
MRSGKASCTLETVWEDKHKYEEAERRFYEHEATQAAASAQQLPAEGPAMNGPGQDDPEDADEAEAPDGGSRRDPRKSQDSRKPLQKKRKRSPKSGLGPADLALLGLSAERVWLDKSLFDQAESSYRQKLADVAAQAAWPPALAPWGLCTHGNQVACHHVTWGIWVNKSSFDQAERAFVEWSQALLLAPDGSRRQGTPNTGQQVAVPDLAHQPSPPVNGQPPLGSLQALVREVWLEKPRYDAAERGFYEALFDGHPPGKVRLQERAGLAEGARRGRRDRRGRNILGNKRAGLRRADGEAPSALPYCYFLQKDAEAPWLSKPAYDSAECRHHAAEALRVAWCLEAASLSHRPGPRSGLSVSSLRPNRKMATNFLAHEKIWFDKFKYDDAERRFYEQMNGPVAGASRQENGASVILRDIARARENIQKSLAGSSGPGASSGTSGDHGELVVRIASLEVENQSLRGVVQELQQAISKLEARLNVLEKSSPGHRATAPQTQHVSPMRQVEPPAKKPATPAEDDEDDDIDLFGSDNEEEDKEAAQLREERLRQYAEKKAKKPALVAKSSILLDVKPWDDETDMAQLEACVRSIQLDGLVWGASKLVPVGYGIRKLQIQCVGGRQGGDRLAGGGDHQV

SEQ ID NO: 45412 - protein, 575 aa, Homo sapiens
MNGPGQDDPEDADEAEAPDGGSRRDPRKSQDSRKPLQKKRKRSPKSGLGPADLALLGLSAERVWLDKSLFDQAESSYRQKLADVAAQAAWPPALAPWGLCTHGNQVACHHVTWGIWVNKSSFDQAERAFVEWSQALLLAPDGSRRQGTPNTGQQVAVPDLAHQPSPPVNGQPPLGSLQALVREVWLEKPRYDAAERGFYEALFDGHPPGKVRLQERAGLAEGARRGRRDRRGRNILGNKRAGLRRADGEAPSALPYCYFLQKDAEAPWLSKPAYDSAECRHHAAEALRVAWCLEAASLSHRPGPRSGLSVSSLRPNRKMATNFLAHEKIWFDKFKYDDAERRFYEQMNGPVAGASRQSSGPGASSGTSGDHGELVVRIASLEVENQSLRGVVQELQQAISKLEARLNVLEKSSPGHRATAPQTQHVSPMRQVEPPAKKPATPAEDDEDDDIDLFGSDNEEEDKEAAQLREERLRQYAEKKAKKPALVAKSSILLDVKPWDDETDMAQLEACVRSIQLDGLVWGASKLVPVGYGIRKLQIQCVVEDDKVGTDLLEEEITKFEEHVQSVDIAAFNKI

SEQ ID NO: 45413 - protein, 281 aa, Homo sapiens; identical to SEQ ID NO: 45410

SEQ ID NO: 45414 - protein, 281 aa, Homo sapiens; identical to SEQ ID NO: 45410

SEQ ID NO: 45415 - protein, 647 aa, Homo sapiens
MRSGKASCTLETVWEDKHKYEEAERRFYEHEATQAAASAQQLPAEGPAMNGPGQDDPEDADEAEAPDGGSRRDPRKSQDSRKPLQKKRKRSPKSGLGPADLALLGLSAERVWLDKSLFDQAESSYRQKLADVAAQAAWPPALAPWGLCTHGNQVACHHVTWGIWVNKSSFDQAERAFVEWSQALLLAPDGSRRQGTPNTGQQVAVPDLAHQPSPPVNGQPPLGSLQALVREVWLEKPRYDAAERGFYEALFDGHPPGKVRLQERAGLAEGARRGRRDRRGRNILGNKRAGLRRADGEAPSALPYCYFLQKDAEAPWLSKPAYDSAECRHHAAEALRVAWCLEAASLSHRPGPRSGLSVSSLRPNRKMATNFLAHEKIWFDKFKYDDAERRFYEQMNGPVAGASRQENGASVILRDIARARENIQKSLAGSSGPGASSGTSGDHGELVVRIASLEVENQSLRGVVQELQQAISKLEARLNVLEKSSPGHRATAPQTQHVSPMRQVEPPAKKPATPAEDDEDDDIDLFGSDNEEEDKEAAQLREERLRQYAEKKAKKPALVAKSSILLDVKPWDDETDMAQLEACVRSIQLDGLVWGASKLVPVGYGIRKLQIQCVVEDDKVGTDLLEEEITKFEEHVQSVDIAAFNKI

SEQ ID NO: 45416 - protein, 647 aa, Homo sapiens; identical to SEQ ID NO: 45415

SEQ ID NO: 45417 - protein, 257 aa, Homo sapiens
MATNFLAHEKIWFDKFKYDDAERRFYEQMNGPVAGASRQSSGPGASSGTSGDHGELVVRIASLEVENQSLRGVVQELQQAISKLEARLNVLEKSSPGHRATAPQTQHVSPMRQVEPPAKKPATPAEDDEDDDIDLFGSDNEEEDKEAAQLREERLRQYAEKKAKKPALVAKSSILLDVKPWDDETDMAQLEACVRSIQLDGLVWGASKLVPVGYGIRKLQIQCVVEDDKVGTDLLEEEITKFEEHVQSVDIAAFNKI

SEQ ID NO: 45418 - protein, 181 aa, Homo sapiens
MRSGKASCTLETVWEDKHKYEEAERRFYEHEATQAAASAQQLPAEGPAMNGPGQDDPEDADEAEAPDGGSRRDPRKSQDSRKPLQKKRKRSPKSGLGPADLALLGLSAERVWLDKSLFDQAESSYRQKLADVAAQAAWPPALAPWGLCTHGNQVACHHVTWGIWVNKSSFDQAERAFVEWS

SEQ ID NO: 45419 - protein, 63 aa, Homo sapiens
MRSGKASCTLETVWEDKHKYEEAERRFYEHEATQAAASAQQLPAEGPAMNGPGQDDPEDADEA

SEQ ID NO: 45420 - protein, 39 aa, Homo sapiens
MATNFLAHEKIWFDKFKYDDAERRFYEQMNGPVAGASRQ

SEQ ID NO: 45421 - protein, 81 aa, Homo sapiens
MRSGKASCTLETVWEDKHKYEEAERRFYEHEATQAAASAQQLPAEGPAMNGPGQDDPEDADEAEAPDGGSRRDPRKSQDSR

SEQ ID NO: 45422 - protein, 37 aa, Homo sapiens
MRSGKASCTLETVWEDKHKYEEAERRFYEHEATQAAA

SEQ ID NO: 45423 - protein, 53 aa, Homo sapiens
MRSGKASCTLETVWEDKHKYEEAERRFYEHEATQAAASAQQLPAEGPAMNGPG

SEQ ID NO: 45424 - protein, 63 aa, Homo sapiens
MATNFLAHEKIWFDKFKYDDAERRFYEQMNGPVAGASRQENGASVILRDIARARENIQKSLAG

SEQ ID NO: 45425 - protein, 300 aa, Homo sapiens
MRSGKASCTLETVWEDKHKYEEAERRFYEHEATQAAASAQQLPAEGPAMNGPGQDDPEDADEAEAPDGGSRRDPRKSQDSRKPLQKKRKRSPKSGLGPADLALLGLSAERVWLDKSLFDQAESSYRQKLADVAAQAAWPPALAPWGLCTHGNQVACHHVTWGIWVNKSSFDQAERAFVEWSQALLLAPDGSRRQGTPNTGQQVAVPDLAHQPSPPVNGQPPLGSLQALVREVWLEKPRYDAAERGFYEALFDGHPPGKVRLQERAGLAEGARRGRRDRRGRNILGNKRAGLRRADGEAPS

SEQ ID NO: 45426 - protein, 21 aa, Homo sapiens
MRSGKASCTLETVWEDKHKYE

SEQ ID NO: 45427 - protein, 157 aa, Homo sapiens
MRSGKASCTLETVWEDKHKYEEAERRFYEHEATQAAASAQQLPAEGPAMNGPGQDDPEDADEAEAPDGGSRRDPRKSQDSRKPLQKKRKRSPKSGLGPADLALLGLSAERVWLDKSLFDQAESSYRQKLADVAAQAAWPPALAPWGLCTHGNQVACH

SEQ ID NO: 45428 - protein, 257 aa, Homo sapiens; identical to SEQ ID NO: 45417

SEQ ID NO: 45429 - protein, 281 aa, Homo sapiens; identical to SEQ ID NO: 45410

SEQ ID NO: 45430 - protein, 146 aa, Homo sapiens
MRSGKASCTLETVWEDKHKYEEAERRFYEHEATQAAASAQQLPAEGPAMNGPGQDDPEDADEAEAPDGGSRRDPRKSQDSRKPLQKKRKRSPKSGLGPADLALLGLSAERVWLDKSLFDQAESSYRQKLADVAAQAAWPPALAPWG

SEQ ID NO: 45431 - protein, 204 aa, Homo sapiens
MATNFLAHEKIWFDKFKYDDAERRFYEQMNGPVAGASRQENGASVILRDIARARENIQKSLAGSSGPGASSGTSGDHGELVVRIASLEVENQSLRGVVQELQQAISKLEARLNVLEKSSPGHRATAPQTQHVSPMRQVEPPAKKPATPAEDDEDDDIDLFGSDNEEEDKEAAQLREERLRQYAEKKAKKPALVAKSSILLDVKP

SEQ ID NO: 45432 - protein, 129 aa, Homo sapiens
MRSGKASCTLETVWEDKHKYEEAERRFYEHEATQAAASAQQLPAEGPAMNGPGQDDPEDADEAEAPDGGSRRDPRKSQDSRKPLQKKRKRSPKSGLGPADLALLGLSAERVWLDKSLFDQAESSYRQKL

SEQ ID NO: 45433 - protein, 166 aa, Homo sapiens
MATNFLAHEKIWFDKFKYDDAERRFYEQMNGPVAGASRQENGASVILRDIARARENIQKSLAGSSGPGASSGTSGDHGELVVRIASLEVENQSLRGVVQELQQAISKLEARLNVLEKSSPGHRATAPQTQHVSPMRQVEPPAKKPATPAEDDEDDDIDLFGSDNEE

SEQ ID NO: 45434 - protein, 84 aa, Homo sapiens
MRSGKASCTLETVWEDKHKYEEAERRFYEHEATQAAASAQQLPAEGPAMNGPGQDDPEDADEAEAPDGGSRRDPRKSQDSRKPL

SEQ ID NO: 45435 - protein, 199 aa, Homo sapiens
MATNFLAHEKIWFDKFKYDDAERRFYEQMNGPVAGASRQENGASVILRDIARARENIQKSLAGSSGPGASSGTSGDHGELVVRIASLEVENQSLRGVVQELQQAISKLEARLNVLEKSSPGHRATAPQTQHVSPMRQVEPPAKKPATPAEDDEDDDIDLFGSDNEEEDKEAAQLREERLRQYAEKKAKKPALVAKSSIL

SEQ ID NO: 45436 - protein, 257 aa, Homo sapiens
MRSGKASCTLETVWEDKHKYEEAERRFYEHEATQAAASAQQLPAEGPAMNGPGQDDPEDADEAEAPDGGSRRDPRKSQDSRKPLQKKRKRSPKSGLGPADLALLGLSAERVWLDKSLFDQAESSYRQKLADVAAQAAWPPALAPWGLCTHGNQVACHHVTWGIWVNKSSFDQAERAFVEWSQALLLAPDGSRRQGTPNTGQQVAVPDLAHQPSPPVNGQPPLGSLQALVREVWLEKPRYDAAERGFYEALFDGHPPG

SEQ ID NO: 45437 - protein, 179 aa, Homo sapiens
MRSGKASCTLETVWEDKHKYEEAERRFYEHEATQAAASAQQLPAEGPAMNGPGQDDPEDADEAEAPDGGSRRDPRKSQDSRKPLQKKRKRSPKSGLGPADLALLGLSAERVWLDKSLFDQAESSYRQKLADVAAQAAWPPALAPWGLCTHGNQVACHHVTWGIWVNKSSFDQAERAFVE

SEQ ID NO: 45438 - protein, 35 aa, Homo sapiens
MATNFLAHEKIWFDKFKYDDAERRFYEQMNGPVAG

SEQ ID NO: 45439 - protein, 49 aa, Homo sapiens
MRSGKASCTLETVWEDKHKYEEAERRFYEHEATQAAASAQQLPAEGPAM

SEQ ID NO: 45440 - protein, 39 aa, Homo sapiens; identical to SEQ ID NO: 45420

SEQ ID NO: 45441 - protein, 190 aa, Homo sapiens
MRSGKASCTLETVWEDKHKYEEAERRFYEHEATQAAASAQQLPAEGPAMNGPGQDDPEDADEAEAPDGGSRRDPRKSQDSRKPLQKKRKRSPKSGLGPADLALLGLSAERVWLDKSLFDQAESSYRQKLADVAAQAAWPPALAPWGLCTHGNQVACHHVTWGIWVNKSSFDQAERAFVEWSQALLLAPDG

SEQ ID NO: 45442 - protein, 697 aa, Homo sapiens
MEAPLGSILSPCPGRAATGRAGTGRVGTGLRPPAVLQLCPLLAFYRCVRKMRSGKASCTLETVWEDKHKYEEAERRFYEHEATQAAASAQQLPAEGPAMNGPGQDDPEDADEAEAPDGGSRRDPRKSQDSRKPLQKKRKRSPKSGLGPADLALLGLSAERVWLDKSLFDQAESSYRQKLADVAAQAAWPPALAPWGLCTHGNQVACHHVTWGIWVNKSSFDQAERAFVEWSQALLLAPDGSRRQGTPNTGQQVAVPDLAHQPSPPVNGQPPLGSLQALVREVWLEKPRYDAAERGFYEALFDGHPPGKVRLQERAGLAEGARRGRRDRRGRNILGNKRAGLRRADGEAPSALPYCYFLQKDAEAPWLSKPAYDSAECRHHAAEALRVAWCLEAASLSHRPGPRSGLSVSSLRPNRKMATNFLAHEKIWFDKFKYDDAERRFYEQMNGPVAGASRQENGASVILRDIARARENIQKSLAGSSGPGASSGTSGDHGELVVRIASLEVENQSLRGVVQELQQAISKLEARLNVLEKSSPGHRATAPQTQHVSPMRQVEPPAKKPATPAEDDEDDDIDLFGSDNEEEDKEAAQLREERLRQYAEKKAKKPALVAKSSILLDVKPWDDETDMAQLEACVRSIQLDGLVWGASKLVPVGYGIRKLQIQCVVEDDKVGTDLLEEEITKFEEHVQSVDIAAFNKI

SEQ ID NO: 45443 - protein, 204 aa, Homo sapiens; identical to SEQ ID NO: 45431

SEQ ID NO: 45444 - protein, 168 aa, Homo sapiens
MATNFLAHEKIWFDKFKYDDAERRFYEQMNGPVAGASRQENGASVILRDIARARENIQKSLAGSSGPGASSGTSGDHGELVVRIASLEVENQSLRGVVQELQQAISKLEARLNVLEKSSPGHRATAPQTQHVSPMRQVEPPAKKPATPAEDDEDDDIDLFGSDNEEED

SEQ ID NO: 45445 - protein, 261 aa, Homo sapiens
MATNFLAHEKIWFDKFKYDDAERRFYEQMNGPVAGASRQENGASVILRDIARARENIQKSLAGSSGPGASSGTSGDHGELVVRIASLEVENQSLRGVVQELQQAISKLEARLNVLEKSSPGHRATAPQTQHVSPMRQVEPPAKKPATPAEDDEDDDIDLFGSDNEEEDKEAAQLREERLRQYAEKKAKKPALVAKSSILLDVKPWDDETDMAQLEACVRSIQLDGLVWGASKLVPVGYGIRKLQIQCVVEDDKVGTDLLEE

SEQ ID NO: 45446 - protein, 31 aa, Homo sapiens
MRSGKASCTLETVWEDKHKYEEAERRFYEHE

SEQ ID NO: 45447 - protein, 68 aa, Homo sapiens
MRSGKASCTLETVWEDKHKYEEAERRFYEHEATQAAASAQQLPAEGPAMNGPGQDDPEDADEAEAPDG

SEQ ID NO: 45448 - protein, 262 aa, Homo sapiens
MATNFLAHEKIWFDKFKYDDAERRFYEQMNGPVAGASRQENGASVILRDIARARENIQKSLAGSSGPGASSGTSGDHVVQELQQAISKLEARLNVLEKSSPGHRATAPQTQHVSPMRQVEPPAKKPATPAEDDEDDDIDLFGSDNEEEDKEAAQLREERLRQYAEKKAKKPALVAKSSILLDVKPWDDETDMAQLEACVRSIQLDGLVWGASKLVPVGYGIRKLQIQCVVEDDKVGTDLLEEEITKFEEHVQSVDIAAFNKI

SEQ ID NO: 45449 - protein, 174 aa, Homo sapiens
MAAAAELSLLEKSLGLSKGNKYSAQGERQIPVLQTNNGPSLTGLTTIAAHLVKQANKEYLLGSTAEEKAIVQQWLEYRVTQVDGHSSKNDIHTLLKDLNSYLEDKVYLTGYNFTLADILLYYGLHRFIVDLTVQEKEKYLNVSRWFCHIQHYPGIRQHLSSVVFIKNRLYTNSH

SEQ ID NO: 45450 - protein, 139 aa, Homo sapiens
MAAAAELSLLEKSLGLSKGNKYSAQGERQIPVLQTNNGPSLTGLTTIAAHLVKQANKEYLLGSTAEEKAIVQQWLEYRVTQVDGHSSKNDIHTLLKDLNSYLEDKVYLTGYNFTLADILLYYGLHRFIIRKLRHTEVGN

SEQ ID NO: 45451 - protein, 437 aa, Homo sapiens
MAAGTLYTYPENWRAFKALIAAQYSGAQVRVLSAPPHFHFGQTNRTPEFLRKFPAGKVPAFEGDDGFCVFESNAIAYYVSNEELRGSTPEAAAQVVQWVSFADSDIVPPASTWVFPTLGIMHHNKQATENAKEEVRRILGLLDAYLKTRTFLVGERVTLADITVVCTLLWLYKQVLEPSFRQAFPNTNRWFLTCINQPQFRAVLGEVKLCEKMAQFDAKKFAETQPKKDTPRKEKGSREEKQKPQAERKEEKKAAAPAPEEEMDECEQALAAEPKAKDPFAHLPKSTFVLDEFKRKYSNEDTLSVALPYFWEHFDKDGWSLWYSEYRFPEELTQTFMSCNLITGMFQRLDKLRKNAFASVILFGTNNSSSISGVWVFRGQELAFPLSPDWQVDYESYTWRKLDPGSEETQTLVREYFSWEGAFQHVGKAFNQGKIFK

SEQ ID NO: 45452 - protein, 487 aa, Homo sapiens
MAERWVAPAVLRRARFASTFFLSPQIYAHKDGDLRSAFFILSFKRGEFIPFLNWTLYTYPENWRAFKALIAAQYSGAQVRVLSAPPHFHFGQTNRTPEFLRKFPAGKVPAFEGDDGFCVFESNAIAYYVSNEELRGSTPEAAAQVVQWVSFADSDIVPPASTWVFPTLGIMHHNKQATENAKEEVRRILGLLDAYLKTRTFLVGERVTLADITVVCTLLWLYKQVLEPSFRQAFPNTNRWFLTCINQPQFRAVLGEVKLCEKMAQFDAKKFAETQPKKDTPRKEKGSREEKQKPQAERKEEKKAAAPAPEEEMDECEQALAAEPKAKDPFAHLPKSTFVLDEFKRKYSNEDTLSVALPYFWEHFDKDGWSLWYSEYRFPEELTQTFMSCNLITGMFQRLDKLRKNAFASVILFGTNNSSSISGVWVFRGQELAFPLSPDWQVDYESYTWRKLDPGSEETQTLVREYFSWEGAFQHVGKAFNQGKIFK

SEQ ID NO: 45453 - protein, 206 aa, Homo sapiens
MHHNKQATENAKEEVRRILGLLDAYLKTRTFLVGERVTLAAEPKAKDPFAHLPKSTFVLDEFKRKYSNEDTLSVALPYFWEHFDKDGWSLWYSEYRFPEELTQTFMSCNLITGMFQRLDKLRKNAFASVILFGTNNSSSISGVWVFRGQELAFPLSPDWQVDYESYTWRKLDPGSEETQTLVREYFSWEGAFQHVGKAFNQGKIFK

SEQ ID NO: 45454 - protein, 858 aa, Homo sapiens
MVNFTVDQIRAIMDKKANIRNMSVIAHVDHGKSTLTDSLVCKAGIIASARAGETRFTDTRKDEQERCITIKSTAISLFYELSENDLNFIKQSKDGAGFLINLIDSPGHVDFSSEVTAALRVTDGALVVVDCVSGVCVQTETVLRQAIAERIKPVLMMNKMDRALLELQLEPEELYQTFQRIVENVNVIISTYGEGESGPMGNIMIDPVLGTVGFGSGLHGWAFTLKQFAEMYVAKFAAKGEGQLGPAERAKKVEDMMKKLWGDRYFDPANGKFSKSATSPEGKKLPRTFCQLILDPIFKVFDAIMNFKKEETAKLIEKLDIKLDSEDKDKEGKPLLKAVMRRWLPAGDALLQMITIHLPSPVTAQKYRCELLYEGPPDDEAAMGIKSCDPKGPLMMYISKMVPTSDKGRFYAFGRVFSGLVSTGLKVRIMGPNYTPGKKEDLYLKPIQRTILMMGRYVEPIEDVPCGNIVGLVGVDQFLVKTGTITTFEHAHNMRVMKFSVSPVVRVAVEAKNPADLPKLVEGLKRLAKSDPMVQCIIEESGEHIIAGAGELHLEICLKDLEEDHACIPIKKSDPVVSYRETVSEESNVLCLSKSPNKHNRLYMKARPFPDGLAEDIDKGEVSARQELKQRARYLAEKYEWDVAEARKIWCFGPDGTGPNILTDITKGVQYLNEIKDSVVAGFQWATKEGALCEENMRGVRFDVHDVTLHADAIHRGGGQIIPTARRCLYASVLTAQPRLMEPIYLVEIQCPEQVVGGIYGVLNRKRGHVFEESQVAGTPMFVVKAYLPVNESFGFTADLRSNTGGQAFPQCVFDHWQILPGDPFDNSSRPSQVVAETRKRKGLKEGIPALDNFLDKL

SEQ ID NO: 45455 - protein, 583 aa, Homo sapiens
MVNFTVDQIRAIMDKKANIRNMSVIAHVDHGKSTLTDSLVCKAGIIASARAGETRFTDTRKDEQERCITIKSTAISLFYELSENDLNFIKQSKDGAGFLINLIDSPGHVDFSSEVTAALRVTDGALVVVDCVSGVCVQTETVLRQAIAERIKPVLMMNKMDRALLELQLEPEELYQTFQRIVENVNVIISTYGEGESGPMGNIMIDPVLGTVGFGSGLHGWAFTLKQFAEMYVAKFAAKGEGQLGPAERAKKVEDMMKKLWGDRYFDPANGKFSKSATSPEGKKLPRTFCQLILDPIFKVFDAIMNFKKEETAKLIEKLDIKLDSEDKDKEGKPLLKAVMRRWLPAGDALLQMITIHLPSPVTAQKYRCELLYEGPPDDEAAMGIKSCDPKGPLMMYISKMVPTSDKGRFYAFGRVFSGLVSTGLKVRIMGPNYTPGKKEDLYLKPIQRTILMMGRYVEPIEDVPCGNIVGLVGVDQFLVKTGTITTFEHAHNMRVMKFSVSPVVRVAVEAKNPADLPKLVEGLKRLAKSDPMVQCIIEESGEHIIAGAGELHLEICLKDLEEDHACIPIKKETVSKKKKKKK

SEQ ID NO: 45456 - protein, 116 aa, Homo sapiens
MPKNKEYAQVIKMLGNGRLEAMCFDGVKRLCHIRGKLRKKVWINTSDIILVGLRDYQDNKADVILKYNADEARSLKAYGELPEHAKINETDTFGPGDDDEIQFDDIGDDDEDIDDI

SEQ ID NO: 45457 - protein, 144 aa, Homo sapiens
MPKNKGKGGKNRRRGKNENESEKRELVFKEDGQEYAQVIKMLGNGRLEAMCFDGVKRLCHIRGKLRKKVWINTSDIILVGLRDYQDNKADVILKYNADEARSLKAYGELPEHAKINETDTFGPGDDDEIQFDDIGDDDEDIDDI

SEQ ID NO: 45458 - protein, 144 aa, Homo sapiens
MPKNKGKGGKNRRRGKNENESEKRELVFKEDGQEYAQVIKMLGNGRLEALCFDGVKRLCHIRGKLRKKVWINTSDIILVGLRDYQDNKADVILKYNADEARSLKAYGELPEHAKINETDTFGPGDDDEIQFDDIGDDDEDIDDI

SEQ ID NO: 45459 - protein, 127 aa, Homo sapiens
MPKNKGKGGKNRRRGKNENESEKRELVFKEDGQEYAQVIKMLGNGRLEALCFDGVKRLCHIRGKLRKKDNKADVILKYNADEARSLKAYGELPEHAKINETDTFGPGDDDEIQFDDIGDDDEDIDDI

SEQ ID NO: 45460 - protein, 472 aa, Homo sapiens
MAGGEAGVTLGQPHLSRQDLTTLDVTKLTPLSHEVISRQATINIGTIGHVAHGKSTVVKAISGVHTVRFKNELERNITIKLGYANAKIYKLDDPSCPRPECYRSCGSSTPDEFPTDIPGTKGNFKLVRHVSFVDCPGHDILMATMLNGAAVMDAALLLIAGNESCPQPQTSEHLAAIEIMKLKHILILQNKIDLVKESQAKEQYEQILAFVQGTVAEGAPIIPISAQLKYNIEVVCEYIVKKIPVPPRDFTSEPRLIVIRSFDVNKPGCEVDDLKGGVAGGSILKGVLKVGQEIEVRPGIVSKDSEGKLMCKPIFSKIVSLFAEHNDLQYAAPGGLIGVGTKIDPTLCRADRMVGQVLGAVGALPEIFTELEISYFLLRRLLGVRTEGDKKAAKVQKLSKNEVLMVNIGSLSTGGRVSAVKADLGKIVLTNPVCTEVGEKIALSRRVEKHWRLIGWGQIRRGVTIKPTVDDD

SEQ ID NO: 45461 - protein, 183 aa, Homo sapiens
  VARIANT 1: note = MOD_RES - Any amino acid
XAGGEAGVTLGQPHLSRQDLTTLDVTKLTPLSHEVISRQATINIGTIGHVAHGKSTVVKAISGVHTVRFKNELERNITIKLGYANAKIYKLDDPSCPRPECYRSCGSSTPDEFPTDIPGTKGNFKLVRHVSFVDCPGHDILMATMLNGAAVMDAALLLIGKYLTIGLDKSMWNKSKMKYLKGN

SEQ ID NO: 45462 - protein, 371 aa, Homo sapiens
MFQEVKADKVTMLWNKKATAVLVIASTDVDKTGASYYGEQTLHYIATNGESAVVQLPKNGPIYDVVWNSSSTEFCAVYGFMPAKATIFNLKCDPVFDFGTGPRNAAYYSPHGHILVLAGFGNLRGQMEVWDVKNYKLISKPVASDSTYFAWCPDGEHILTATCAPRLRVNNGYKIWHYTGSILHKYDVPSNAELWQVSWQPFLDGIFPAKTITYQAVPSEVPNEEPKVATAYRPPALRNKPITNSKLHEEEPPQNMKPQSGNDKPLSKTALKNQRKHEAKKAAKQEARSDKSPDLAPTPAPQSTPRNTVSQSISGDPEIDKKIKNLKKKLKAIEQLKEQAATGKQLEKNQLEKIQKETALLQELEDLELGI

SEQ ID NO: 45463 - protein, 585 aa, Homo sapiens
MAPSTPLLTVRGSEGLYMVNGPPHFTESTVFPRESGKNCKVCIFSKDGTLFAWGNGEKVNIISVTNKGLLHSFDLLKAVCLEFSPKNTVLATWQPYTTSKDGTAGIPNLQLYDVKTGTCLKSFIQKKMQNWCPSWSEDETLCARNVNNEVHFFENNNFNTIANKLHLQKINDFVLSPGPQPYKVAVYVPGSKGAPSFVRLYQYPNFAGPHAALANKSFFKADKVTMLWNKKATAVLVIASTDVDKTGASYYGEQTLHYIATNGESAVVQLPKNGPIYDVVWNSSSTEFCAVYGFMPAKATIFNLKCDPVFDFGTGPRNAAYYSPHGHILVLAGFGNLRGQMEVWDVKNYKLISKPVASDSTYFAWCPDGEHILTATCAPRLRVNNGYKIWHYTGSILHKYDVPSNAELWQVSWQPFLDGIFPAKTITYQAVPSEVPNEEPKVATAYRPPALRNKPITNSKLHEEEPPQNMKPQSGNDKPLSKTALKNQRKHEAKKAAKQEARSDKSPDLAPTPAPQSTPRNTVSQSISGDPEIDKKIKNLKKKLKAIEQLKEQAATGKQLEKNQLEKIQKETALLQELEDLELGI

SEQ ID NO: 45464 - protein, 630 aa, Homo sapiens
MQGGNSGVRKREEEGDGAGAVAAPPAIDFPAEGPDPEYDESDVPAEIQVLKEPLQQPTFPFAVANQLLLVSLLEHLSHVHEPNPLRSRQVFKLLCQTFIKMGLLSSFTCSDEFSSLRLHHNRAITHLMRSAKERVRQDPCEDISRIQKIRSREVALEAQTSRYLNEFEELAILGKGGYGRVYKVRNKLDGQYYAIKKILIKGATKTVCMKVLREVKVLAGLQHPNIVGYHTAWIEHVHVIQPRADRAAIELPSLEVLSDQEEDREQCGVKNDESSSSSIIFAEPTPEKEKRFGESDTENQNNKSVKYTTNLVIRESGELESTLELQENGLAGLSASSIVEQQLPLRRNSHLEESFTSTEESSEENVNFLGQTEAQYHLMLHIQMQLCELSLWDWIVERNKRGREYVDESACPYVMANVATKIFQELVEGVFYIHNMGIVHRDLKPRNIFLHGPDQQVKIGDFGLACTDILQKNTDWTNRNGKRTPTHTSRVGTCLYASPEQLEGSEYDAKSDMYSLGVVLLELFQPFGTEMERAEVLTGLRTGQLPESLRKRCPVQAKYIQHLTRRNSSQRPSAIQLLQSELFQNSGNVNLTLQMKIIEQEKEIAELKKQLNLLSQDKGVRDDGKDGGVG

SEQ ID NO: 45465 - protein, 577 aa, Homo sapiens
MNQTHFVQDRCLSDPCEDISRIQKIRSREVALEAQTSRYLNEFEELAILGKGGYGRVYKVRNKLDGQYYAIKKILIKGATKTVCMKVLREVKVLAGLQHPNIVGYHTAWIEHVHVIQPRADRAAIELPSLEVLSDQEEDREQCGVKNDESSSSSIIFAEPTPEKEKRFGESDTENQNNKSVKYTTNLVIRESGELESTLELQENGLAGLSASSIVEQQLPLRRNSHLEESFTSTEESSEENVNFLGQTEAQYHLMLHIQMQLCELSLWDWIVERNKRGREYVDESACPYVMANVATKIFQELVEGVFYIHNMGIVHRDLKPRNIFLHGPDQQVKIGDFGLACTDILQKNTDWTNRNGKRTPTHTSRVGTCLYASPEQLEGSEYDAKSDMYSLGVVLLELFQPFGTEMERAEVLTGLRTGQLPESLRKRCPVQAKYIQHLTRRNSSQRPSAIQLLQSELFQNSGNVNLTLQMKIIEQEKEIAELKKQLNLLSQDKGFSVIPKPHPCKALYSAPQMISRQLRSLSCLCPALFPGTSSFIVALSSPANLYIPQRQRSDELVFESQKGSAMELAVITVDGV

SEQ ID NO: 45466 - protein, 1116 aa, Homo sapiens
MERAISPGLLVRALLLLLLLLGLAARTVAAGRARGLPAPTAEAAFGLGAAAAPTSATRVPAAGAVAAAEVTVEDAEALPAAAGEQEPRGPEPDDETELRPRGRSLVIISTLDGRIAALDPENHGKKQWDLDVGSGSLVSSSLSKPEVFGNKMIIPSLDGALFQWDQDRESMETVPFTVESLLESSYKFGDDVVLVGGKSLTTYGLSAYSGKVRYICSALGCRQWDSDEMEQEEDILLLQRTQKTVRAVGPRSGNEKWNFSVGHFELRYIPDMETRAGFIESTFKPNENTEESKIISDVEEQEAAIMDIVIKVSVADWKVMAFSKKGGHLEWEYQFCTPIASAWLLKDGKVIPISLFDDTSYTSNDDVLEDEEDIVEAARGATENSVYLGMYRGQLYLQSSVRISEKFPSSPKALESVTNENAIIPLPTIKWKPLIHSPSRTPVLVGSDEFDKCLSNDKFSHEEYSNGALSILQYPYDNGYYLPYYKRERNKRSTQITVRFLDNPHYNKNIRKKDPVLLLHWWKEIVATILFCIIATTFIVRRLFHPHPHRQRKESETQCQTENKYDSVSGEANDSSWNDIKNSGYISRYLTDFEPIQCLGRGGFGVVFEAKNKVDDCNYAIKRIRLPNRELAREKVMREVKALAKLEHPGIVRYFNAWLEAPPEKWQEKMDEIWLKDESTDWPLSSPSPMDAPSVKIRRMDPFATKEHIEIIAPSPQRSRSFSVGISCDQTSSSESQFSPLEFSGMDHEDISESVDAAYNLQDSCLTDCDVEDGTMDGNDEGHSFELCPSEASPYVRSRERTSSSIVFEDSGCDNASSKEEPKTNRLHIGNHCANKLTAFKPTSSKSSSEATLSISPPRPTTLSLDLTKNTTEKLQPSSPKVYLYIQMQLCRKENLKDWMNGRCTIEERERSVCLHIFLQIAEAVEFLHSKGLMHRDLKPSNIFFTMDDVVKVGDFGLVTAMDQDEEEQTVLTPMPAYARHTGQVGTKLYMSPEQIHGNSYSHKVDIFSLGLILFELLYPFSTQMERVRTLTDVRNLKFPPLFTQKYPCEYVMVQDMLSPSPMERPEAINIIENAVFEDLDFPGKTVLRQRSRSLSSSGTKHSRQSNNSHSPLPSN

SEQ ID NO: 45467 - protein, 965 aa, Homo sapiens
MIIPSLDGALFQWDQDRESMETVPFTVESLLESSYKFGDDVVLVGGKSLTTYGLSAYSGKVRYICSALGCRQWDSDEMEQEEDILLLQRTQKTVRAVGPRSGNEKWNFSVGHFELRYIPDMETRAGFIESTFKPNENTEESKIISDVEEQEAAIMDIVIKVSVADWKVMAFSKKGGHLEWEYQFCTPIASAWLLKDGKVIPISLFDDTSYTSNDDVLEDEEDIVEAARGATENSVYLGMYRGQLYLQSSVRISEKFPSSPKALESVTNENAIIPLPTIKWKPLIHSPSRTPVLVGSDEFDKCLSNDKFSHEEYSNGALSILQYPYDNGYYLPYYKRERNKRSTQITVRFLDNPHYNKNIRKKDPVLLLHWWKEIVATILFCIIATTFIVRRLFHPHPHRQRKESETQCQTENKYDSVSGEANDSSWNDIKNSGYISRYLTDFEPIQCLGRGGFGVVFEAKNKVDDCNYAIKRIRLPNRELAREKVMREVKALAKLEHPGIVRYFNAWLEAPPEKWQEKMDEIWLKDESTDWPLSSPSPMDAPSVKIRRMDPFATKEHIEIIAPSPQRSRSFSVGISCDQTSSSESQFSPLEFSGMDHEDISESVDAAYNLQDSCLTDCDVEDGTMDGNDEGHSFELCPSEASPYVRSRERTSSSIVFEDSGCDNASSKEEPKTNRLHIGNHCANKLTAFKPTSSKSSSEATLSISPPRPTTLSLDLTKNTTEKLQPSSPKVYLYIQMQLCRKENLKDWMNGRCTIEERERSVCLHIFLQIAEAVEFLHSKGLMHRDLKPSNIFFTMDDVVKVGDFGLVTAMDQDEEEQTVLTPMPAYARHTGQVGTKLYMSPEQIHGNSYSHKVDIFSLGLILFELLYPFSTQMERVRTLTDVRNLKFPPLFTQKYPCEYVMVQDMLSPSPMERPEAINIIENAVFEDLDFPGKTVLRQRSRSLSSSGTKHSRQSNNSHSPLPSN

SEQ ID NO: 45468 - protein, 522 aa, Homo sapiens
MAAVAVAVREDSGSGMKAELPPGPGAVGREMTKEEKLQLRKEKKQQKKKRKEEKGAEPETGSAVSAAQCQGPTRELPESGIQLGTPREKVPAGRSKAELRAERRAKQEAERALKQARKGEQGGPPPKASPSTAGETPSGVKRLPEYPQVDDLLLRRLVKKPERQQVPTRKDYGSKVSLFSHLPQYSRQNSLTQFMSIPSSVIHPAMVRLGLQYSQGLVSGSNARCIALLRALQQVIQDYTTPPNEELSRDLVNKLKPYMSFLTQCRPLSASMHNAIKFLNKEITSVGSSKREEEAKSELRAAIDRYVQEKIVLAAQAISRFAYQKISNGDVILVYGCSSLVSRILQEAWTEGRRFRVVVVDSRPWLEGRHTLRSLVHAGVPASYLLIPAASYVLPEVSKVLLGAHALLANGSVMSRVGTAQLALVARAHNVPVLVCCETYKFCERVQTDAFVSNELDDPDDLQCKRGEHVALANWQNHASLRLLNLVYDVTPPELVDLVITELGMIPCSSVPVVLRVKSSDQ

SEQ ID NO: 45469 - protein, 543 aa, Homo sapiens
MPTQQPAAPSTRAPKPSRSLSGSLCALFSDADSGSGMKAELPPGPGAVGREMTKEEKLQLRKEKKQQKKKRKEEKGAEPETGSAVSAAQCQGPTRELPESGIQLGTPREKVPAGRSKAELRAERRAKQEAERALKQARKGEQGGPPPKASPSTAGETPSGVKRLPEYPQVDDLLLRRLVKKPERQQVPTRKDYGSKVSLFSHLPQYSRQNSLTQFMSIPSSVIHPAMVRLGLQYSQGLVSGSNARCIALLRALQQVIQDYTTPPNEELSRDLVNKLKPYMSFLTQCRPLSASMHNAIKFLNKEITSVGSSKREEEAKSELRAAIDRYVQEKIVLAAQAISRFAYQKISNGDVILVYGCSSLVSRILQEAWTEGRRFRVVVVDSRPWLEGRHTLRSLVHAGVPASYLLIPAASYVLPEVSKVLLGAHALLANGSVMSRVGTAQLALVARAHNVPVLVCCETYKFCERVQTDAFVSNELDDPDDLQCKRGEHVALANWQNHASLRLLNLVYDVTPPELVDLVITELGMIPCSSVPVVLRVKSSDQ

SEQ ID NO: 45470 - protein, 305 aa, Homo sapiens
MDDKELIEYFKSQMKEDPDMASAVAAIRTLLEFLKRDKGETIQGLRANLTSAIETLCGVDSSVAVSSGGELFLRFISLASLEYSDYSKCKKIMIERGELFLRRISLSRNKIADLCHTFIKDGATILTHAYSRVVLRVLEAAVAAKKRFSVYVTESQPDLSGKKMAKALCHLNVPVTVVLDAAVGYIMEKADLVIVGAEGVVENGGIINKIGTNQMAVCAKAQNKPFYVVAESFKFVRLFPLNQQDVPDKFKYKADTLKVAQTGQDLKEEHPWVDYTAPSLITLLFTDLGVLTPSAVSDELIKLYL

SEQ ID NO: 45471 - protein, 351 aa, Homo sapiens
MPGSAAKGSELSERIESFVETLKRGGGPRSSEEMARETLGLLRQIITDHRWSNAGELMELIRREGRRMTAAQPSETTVGNMVRRVLKIIREEYGRLHGRSDESDQQESLHKLLTSGGLNEDFSFHYAQLQSNIIEAINELLVELEGTMENIAAQALEHIHSNEVIMTIGFSRTVEAFLKEAARKRKFHVIVAECAPFCQGHEMAVNLSKAGIETTVMTDAAIFAVMSRVNKVIIGTKTILANGALRAVTGTHTLALAAKHHSTPLIVCAPMFKLSPQFPNEEDSFHKFVAPEEVLPFTEGDILEKVSVHCPVFDYVPPELITLFISNIGGNAPSYIYRLMSELYHPDDHVL

SEQ ID NO: 45472 - protein, 452 aa, Homo sapiens
MEFQAVVMAVGGGSRMTDLTSSIPKPLLPVGNKPLIWYPLNLLERVGFEEVIVVTTRDVQKALCAEFKMKMKPDIVCIPDDADMGTADSLRYIYPKLKTDVLVLSCDLITDVALHEVVDLFRAYDASLAMLMRKGQDSIEPVPGQKGKKKAVEQRDFIGVDSTGKRLLFMANEADLDEELVIKGSILQKHPRIRFHTGLVDAHLYCLKKYIVDFLMENGSITSIRSELIPYLVRKQFSSASSQQGQEEKEEDLKKKELKSLDIYSFIKEANTLNLAPYDACWNACRGDRWEDLSRSQVRCYVHIMKEGLCSRVSTLGLYMEANRQVPKLLSALCPEEPPVHSSAQIVSKHLVGVDSLIGPETQIGEKSSIKRSVIGSSCLIKDRVTITNCLLMNSVTVEEGSNIQGSVICNNAVIEKGADIKDCLIGSGQRIEAKAKRVNEVIVGNDQLMEI

SEQ ID NO: 45473 - protein, 197 aa, Homo sapiens
MEFQAVVMAVGGGSRMTDLTSSIPKPLLPVGNKPLIWYPLNLLERVGFEEVIVVTTRDVQKALCAEFKMKMKPDIVCIPDDADMGTADSLRYIYPKLKTDVLVLSCDLITDVALHEVVDLFRAYDASLAMLMRKGQDSIEPVPGQKGKKKADGDSLCCQAGVQWHHLGSLQSPPPGFKHFTCLSLPSSWDYMHMPPH

SEQ ID NO: 45474 - protein, 412 aa, Homo sapiens
MEFQAVVMAVGGGSRMTDLTSSIPKPLLPVGNKPLIWYPLNLLERVGFEEVIVVTTRDVQKALCAEFKMKMKPDIVCIPDDADMGTADSLRYIYPKLKTDVLVLSCDLITDVALHEVVDLFRAYDASLAMLMRKGQDSIEPVPGQKGKKKAVEQRDFIGVDSTGKRLLFMANEADLDEELVIKGSILQKHPRIRFHTGLVDAHLYCLKKYIVDFLMENGSITSIRSELIPYLVRKQFSSASSQQGQEEKEEDLKKKELKSLDIYSFIKEANTLNLAPYDACWNACRGDRWEDLSRSQVRCYVHIMKEGLCSRVSTLGLYMEANRQVPKLLSALCPEEPPVHSSAQIVSKHLVGVDSLIGPETQIGEKSSIKRSVIGSSCLIKDRVTITNCLLMNSVTVEEGYVSPCTHLRQR

SEQ ID NO: 45475 - protein, 222 aa, Homo sapiens
  VARIANT 1: note = MOD_RES - Any amino acid
XVIKGSILQKHPRIRFHTGLVDAHLYCLKKYIVDFLMENGSITSIRSELIPYLVRKQFSSASSQQGQEEKEEDLKKKELKSLDIYSFIKEANTLNLAPYDACWNACRGDRWEDLSRSQVRCYVHIMKEGLCSRVSTLGLYMEANRQVPKLLSALCPEEPPVHSSAQIVSKHLVGVDSLIGPETQIGEKSSIKRSVIGSSCLIKDRVTITNCLLMNSVTVEEG

SEQ ID NO: 45476 - protein, 523 aa, Homo sapiens
MAAVAVAVREDSGSGMKAELPPGPGAVGREMTKEEKLQLRKEKKQQKKKRKEEKGAEPETGSAVSAAQCQVGPTRELPESGIQLGTPREKVPAGRSKAELRAERRAKQEAERALKQARKGEQGGPPPKASPSTAGETPSGVKRLPEYPQVDDLLLRRLVKKPERQQVPTRKDYGSKVSLFSHLPQYSRQNSLTQFMSIPSSVIHPAMVRLGLQYSQGLVSGSNARCIALLRALQQVIQDYTTPPNEELSRDLVNKLKPYMSFLTQCRPLSASMHNAIKFLNKEITSVGSSKREEEAKSELRAAIDRYVQEKIVLAAQAISRFAYQKISNGDVILVYGCSSLVSRILQEAWTEGRRFRVVVVDSRPWLEGRHTLRSLVHAGVPASYLLIPAASYVLPEVSKVLLGAHALLANGSVMSRVGTAQLALVARAHNVPVLVCCETYKFCERVQTDAFVSNELDDPDDLQCKRGEHVALANWQNHASLRLLNLVYDVTPPELVDLVITELGMIPCSSVPVVLRVKSSDQ

SEQ ID NO: 45477 - protein, 520 aa, Homo sapiens
MAAVAVAVREDSGSGMKAESPWAWVGREMTKEEKLQLRKEKKQQKKKRKEEKGAEPETGSAVSAAQCQGPTRELPESGIQLGTPREKVPAGRSKAELRAERRAKQEAERALKQARKGEQGGPPPKASPSTAGETPSGVKRLPEYPQVDDLLLRRLVKKPERQQVPTRKDYGSKVSLFSHLPQYSRQNSLTQFMSIPSSVIHPAMVRLGLQYSQGLVSGSNARCIALLRALQQVIQDYTTPPNEELSRDLVNKLKPYMSFLTQCRPLSASMHNAIKFLNKEITSVGSSKREEEAKSELRAAIDRYVQEKIVLAAQAISRFAYQKISNGDVILVYGCSSLVSRILQEAWTEGRRFRVVVVDSRPWLEGRHTLRSLVHAGVPASYLLIPAASYVLPEVSKVLLGAHALLANGSVMSRVGTAQLALVARAHNVPVLVCCETYKFCERVQTDAFVSNELDDPDDLQCKRGEHVALANWQNHASLRLLNLVYDVTPPELVDLVITELGMIPCSSVPVVLRVKSSDQ

SEQ ID NO: 45478 - protein, 721 aa, Homo sapiens
MAAPVVAPPGVVVSRANKRSGAGPGGSGGGGARGAEEEPPPPLQAVLVADSFDRRFFPISKDQPRVLLPLANVALIDYTLEFLTATGVQETFVFCCWKAAQIKEHLLKSKWCRPTSLNVVRIITSELYRSLGDVLRDVDAKALVRSDFLLVYGDVISNINITRALEEHRLRRKLEKNVSVMTMIFKESSPSHPTRCHEDNVVVAVDSTTNRVLHFQKTQGLRRFAFPLSLFQGSSDGVEVRYDLLDCHISICSPQVAQLFTDNFDYQTRDDFVRGLLVNEEILGNQIHMHVTAKEYGARVSNLHMYSAVCADVIRRWVYPLTPEANFTDSTTQSCTHSRHNIYRGPEVSLGHGSILEENVLLGSGTVIGSNCFITNSVIGPGCHIGDNVVLDQTYLWQGVRVAAGAQIHQSLLCDNAEVKERVTLKPRSVLTSQVVVGPNITLPEGSVISLHPPDAEEDEDDGEFSDDSGADQEKDKVKMKGYNPAEVGAAGKGYLWKAAGMNMEEEEELQQNLWGLKINMEEESESESEQSMDSEEPDSRGGSPQMDDIKVFQNEVLGTLQRGKEENISCDNLVLEINSLKYAYNISLKEVMQVLSHVVLEFPLQQMDSPLDSSRYCALLLPLLKAWSPVFRNYIKRAADHLEALAAIEDFFLEHEALGISMAKVLMAFYQLEILAEETILSWFSQRDTTDKGQQLRKNQQLQRFIQWLKEAEEESSEDD

SEQ ID NO: 45479 - protein, 337 aa, Homo sapiens
PPQPSKMLGLQVAQLFTDNFDYQTRDDFVRGLLVNEEILGNQIHMHVTAKEYGARVSNLHMYSAVCADVIRRWVYPLTPEANFTDSTTQSCTHSRHNIYRGPEVSLGHGSILEENVLLGSGTVIGSNCFITNSVIGPGCHIGDNVVLDQTYLWQGVRVAAGAQIHQSLLCDNAEVKERVTLKPRSVLTSQVVVGPNITLPEGSVISLHPPDAEEDEDDGEFSDDSGADQEKDKVKMKGYNPAEVGAAGKGYLWKAAGMNMEEEEELQQNLWGLKINMEEESESESEQSMDSEEPDSRGGSPQMDDIKVFQNEVLGTLQRGKEENISCDNLVLEINSL

SEQ ID NO: 45480 - protein, 857 aa, Homo sapiens
MEAGPSGAAAGAYLPPLQQVFQAPRRPGIGTVGKPIKLLANYFEVDIPKIDVYHYEVDIKPDKCPRRVNREVVEYMVQHFKPQIFGDRKPVYDGKKNIYTVTALPIGNERVDFEVTIPGEGKDRIFKVSIKWLAIVSWRMLHEALVSGQIPVPLESVQALDVAMRHLASMRYTPVGRSFFSPPEGYYHPLGGGREVWFGFHQSVRPAMWKMMLNIDVSATAFYKAQPVIEFMCEVLDIRNIDEQPKPLTDSQRVRFTKEIKGLKVEVTHCGQMKRKYRVCNVTRRPASHQTFPLQLESGQTVECTVAQYFKQKYNLQLKYPHLPCLQVGQEQKHTYLPLEVCNIVAGQRCIKKLTDNQTSTMIKATARSAPDRQEEISRLMKNASYNLDPYIQEFGIKVKDDMTEVTGRVLPAPILQYGGRNRAIATPNQGVWDMRGKQFYNGIEIKVWAIACFAPQKQCREEVLKNFTDQLRKISKDAGMPIQGQPCFCKYAQGADSVEPMFRHLKNTYSGLQLIIVILPGKTPVYAEVKRVGDTLLGMATQCVQVKNVVKTSPQTLSNLCLKINVKLGGINNILVPHQRSAVFQQPVIFLGADVTHPPAGDGKKPSITAVVGSMDAHPSRYCATVRVQRPRQEIIEDLSYMVRELLIQFYKSTRFKPTRIIFYRDGVPEGQLPQILHYELLAIRDACIKLEKDYQPGITYIVVQKRHHTRLFCADKNERIGKSGNIPAGTTVDTNITHPFEFDFYLCSHAGIQGTSRPSHYYVLWDDNRFTADELQILTYQLCHTYVRCTRSVSIPAPAYYARLVAFRARYHLVDKEHDSGEGSHISGQSNGRDPQALAKAVQVHQDTLRTMYFA

SEQ ID NO: 45481 - protein, 782 aa, Homo sapiens
MVQHFKPQIFGDRKPVYDGKKNIYTVTALPIGNERVDFEVTIPGEGKDRIFKVSIKWLAIVSWRMLHEALVSGQIPVPLESVQALDVAMRHLASMRYTPVGRSFFSPPEGYYHPLGGGREVWFGFHQSVRPAMWKMMLNIDVSATAFYKAQPVIEFMCEVLDIRNIDEQPKPLTDSQRVRFTKEIKGLKVEVTHCGQMKRKYRVCNVTRRPASHQTFPLQLESGQTVECTVAQYFKQKYNLQLKYPHLPCLQVGQEQKHTYLPLEVCNIVAGQRCIKKLTDNQTSTMIKATARSAPDRQEEISRLMKNASYNLDPYIQEFGIKVKDDMTEVTGRVLPAPILQYGGRNRAIATPNQGVWDMRGKQFYNGIEIKVWAIACFAPQKQCREEVLKNFTDQLRKISKDAGMPIQGQPCFCKYAQGADSVEPMFRHLKNTYSGLQLIIVILPGKTPVYAEVKRVGDTLLGMATQCVQVKNVVKTSPQTLSNLCLKINVKLGGINNILVPHQRSAVFQQPVIFLGADVTHPPAGDGKKPSITAVVGSMDAHPSRYCATVRVQRPRQEIIEDLSYMVRELLIQFYKSTRFKPTRIIFYRDGVPEGQLPQILHYELLAIRDACIKLEKDYQPGITYIVVQKRHHTRLFCADKNERIGKSGNIPAGTTVDTNITHPFEFDFYLCSHAGIQGTSRPSHYYVLWDDNRFTADELQILTYQLCHTYVRCTRSVSIPAPAYYARLVAFRARYHLVDKEHDSGEGSHISGQSNGRDPQALAKAVQVHQDTLRTMYFA

SEQ ID NO: 45482 - protein, 859 aa, Homo sapiens
MYSGAGPALAPPAPPPPIQGYAFKPPPRPDFGTSGRTIKLQANFFEMDIPKIDIYHYELDIKPEKCPRRVNREIVEHMVQHFKTQIFGDRKPVFDGRKNLYTAMPLPIGRDKVELEVTLPGEGKDRIFKVSIKWVSCVSLQALHDALSGRLPSVPFETIQALDVVMRHLPSMRYTPVGRSFFTASEGCSNPLGGGREVWFGFHQSVRPSLWKMMLNIDVSATAFYKAQPVIEFVCEVLDFKSIEEQQKPLTDSQRVKFTKEIKGLKVEITHCGQMKRKYRVCNVTRRPASHQTFPLQQESGQTVECTVAQYFKDRHKLVLRYPHLPCLQVGQEQKHTYLPLEVCNIVAGQRCIKKLTDNQTSTMIRATARSAPDRQEEISKLMRSASFNTDPYVREFGIMVKDEMTDVTGRVLQPPSILYGGRNKAIATPVQGVWDMRNKQFHTGIEIKVWAIACFAPQRQCTEVHLKSFTEQLRKISRDAGMPIQGQPCFCKYAQGADSVEPMFRHLKNTYAGLQLVVVILPGKTPVYAEVKRVGDTVLGMATQCVQMKNVQRTTPQTLSNLCLKINVKLGGVNNILLPQGRPPVFQQPVIFLGADVTHPPAGDGKKPSIAAVVGSMDAHPNRYCATVRVQQHRQEIIQDLAAMVRELLIQFYKSTRFKPTRIIFYRDGVSEGQFQQVLHHELLAIREACIKLEKDYQPGITFIVVQKRHHTRLFCTDKNERVGKSGNIPAGTTVDTKITHPTEFDFYLCSHAGIQGTSRPSHYHVLWDDNRFSSDELQILTYQLCHTYVRCTRSVSIPAPAYYAHLVAFRARYHLVDKEHDSAEGSHTSGQSNGRDHQALAKAVQVHQDTLRTMYFA

SEQ ID NO: 45483 - protein, 825 aa, Homo sapiens
MYSGAGPALAPPAPPPPIQGYAFKPPPRPDFGTSGRTIKLQANFFEMDIPKIDIYHYELDIKPEKCPRRVNREIVEHMVQHFKTQIFGDRKPVFDGRKNLYTAMPLPIGRDKVELEVTLPGEGKDRIFKVSIKWVSCVSLQALHDALSGRLPSVPFETIQALDVVMRHLPSMRYTPVGRSFFTASEGCSNPLGGGREVWFGFHQSVRPSLWKMMLNIDVSATAFYKAQPVIEFVCEVLDFKSIEEQQKPLTDSQRVKFTKEIKGLKVEITHCGQMKRKYRVCNVTRRPASHQTFPLQQESGQTVECTVAQYFKDRHKLVLRYPHLPCLQVGQEQKHTYLPLEVCNIVAGQRCIKKLTDNQTSTMIRATARSAPDRQEEISKLMRSASFNTDPYVREFGIMVKDEMTDVTGRVLQPPSILYGGRNKAIATPVQGVWDMRNKQFHTGIEIKVWAIACFAPQRQCTEVHLKSFTEQLRKISRDAGMPIQGQPCFCKYAQGADSVEPMFRHLKNTYAGLQLVVVILPGKTPVYAEVKRVGDTVLGMATQCVQMKNVQRTTPQTLSNLCLKINVKLGGVNNILLPQGRPPVFQQPVIFLGADVTHPPAGDGKKPSIAAVVGSMDAHPNRYCATVRVQQHRQEIIQDLAAMVRELLIQFYKSTRFKPTRIIFYRDGVSEGQFQQVLHHELLAIREACIKLEKDYQPGITFIVVQKRHHTRLFCTDKNERGTSRPSHYHVLWDDNRFSSDELQILTYQLCHTYVRCTRSVSIPAPAYYAHLVAFRARYHLVDKEHDSAEGSHTSGQSNGRDHQALAKAVQVHQDTLRTMYFA

SEQ ID NO: 45484 - protein, 626 aa, Homo sapiens
MCEVLDIHNIDEQPRPLTDSHRVKFTKEIKGLKVEVTHCGTMRRKYRVCNVTRRPASHQTFPLQLENGQTVERTVAQYFREKYTLQLKYPHLPCLQVGQEQKHTYLPLEVCNIVAGQRCIKKLTDNQTSTMIKATARSAPDRQEEISRLVRSANYETDPFVQEFQFKVRDEMAHVTGRVLPAPMLQYGGRNRTVATPSHGVWDMRGKQFHTGVEIKMWAIACFATQRQCREEILKGFTDQLRKISKDAGMPIQGQPCFCKYAQGADSVEPMFRHLKNTYSGLQLIIVILPGKTPVYAEVKRVGDTLLGMATQCVQVKNVIKTSPQTLSNLCLKINVKLGGINNILVPHQRPSVFQQPVIFLGADVTHPPAGDGKKPSIAAVVGSMDAHPSRYCATVRVQRPRQEIIQDLASMVRELLIQFYKSTRFKPTRIIFYRDGVSEGQFRQVLYYELLAIREACISLEKDYQPGITYIVVQKRHHTRLFCADRTERVGRSGNIPAGTTVDTDITHPYEFDFYLCSHAGIQGTSRPSHYHVLWDDNCFTADELQLLTYQLCHTYVRCTRSVSIPAPAYYAHLVAFRARYHLVDKEHDSAEGSHVSGQSNGRDPQALAKAVQIHQDTLRTMYFA

SEQ ID NO: 45485 - protein, 229 aa, Homo sapiens
MEIGSAGPAGAQPLLMVPRRPGYGTMGKPIKLLANCFQVEIPKIDVYLYEVDIKPDKCPRRVNREVVDSMVQHFKVTIFGDRRPVYDGKRSLYTANPLPVATTGVDLDVTLPGEGGKDRPFKVSIKFVSRVSWHLLHEVLTGRTLPEPLELDKPISTNPVHAVDVVLRHLPSMKYTPVGRSFFSAPEGYDHPLGGGREVWFGFHQSVRPAMWKMMLNIDERDLWQQCGE

SEQ ID NO: 45486 - protein, 860 aa, Homo sapiens
MEIGSAGPAGAQPLLMVPRRPGYGTMGKPIKLLANCFQVEIPKIDVYLYEVDIKPDKCPRRVNREVVDSMVQHFKVTIFGDRRPVYDGKRSLYTANPLPVATTGVDLDVTLPGEGGKDRPFKVSIKFVSRVSWHLLHEVLTGRTLPEPLELDKPISTNPVHAVDVVLRHLPSMKYTPVGRSFFSAPEGYDHPLGGGREVWFGFHQSVRPAMWKMMLNIDVSATAFYKAQPVIQFMCEVLDIHNIDEQPRPLTDSHRVKFTKEIKGLKVEVTHCGTMRRKYRVCNVTRRPASHQTFPLQLENGQTVERTVAQYFREKYTLQLKYPHLPCLQVGQEQKHTYLPLEVCNIVAGQRCIKKLTDNQTSTMIKATARSAPDRQEEISRLVRSANYETDPFVQEFQFKVRDEMAHVTGRVLPAPMLQYGGRNRTVATPSHGVWDMRGKQFHTGVEIKMWAIACFATQRQCREEILKGFTDQLRKISKDAGMPIQGQPCFCKYAQGADSVEPMFRHLKNTYSGLQLIIVILPGKTPVYAEVKRVGDTLLGMATQCVQVKNVIKTSPQTLSNLCLKINVKLGGINNILVPHQRPSVFQQPVIFLGADVTHPPAGDGKKPSIAAVVGSMDAHPSRYCATVRVQRPRQEIIQDLASMVRELLIQFYKSTRFKPTRIIFYRDGVSEGQFRQVLYYELLAIREACISLEKDYQPGITYIVVQKRHHTRLFCADRTERVGRSGNIPAGTTVDTDITHPYEFDFYLCSHAGIQGTSRPSHYHVLWDDNCFTADELQLLTYQLCHTYVRCTRSVSIPAPAYYAHLVAFRARYHLVDKEHDSAEGSHVSGQSNGRDPQALAKAVQIHQDTLRTMYFA

SEQ ID NO: 45487 - protein, 229 aa, Homo sapiens; identical to SEQ ID NO: 45485

SEQ ID NO: 45488 - protein, 861 aa, Homo sapiens
MEALGPGPPASLFQPPRRPGLGTVGKPIRLLANHFQVQIPKIDVYHYDVDIKPEKRPRRVNREVVDTMVRHFKMQIFGDRQPGYDGKRNMYTAHPLPIGRDRVDMEVTLPGEGKDQTFKVSVQWVSVVSLQLLLEALAGHLNEVPDDSVQALDVITRHLPSMRYTPVGRSFFSPPEGYYHPLGGGREVWFGFHQSVRPAMWNMMLNIDVSATAFYRAQPIIEFMCEVLDIQNINEQTKPLTDSQRVKFTKEIRGLKVEVTHCGQMKRKYRVCNVTRRPASHQTFPLQLENGQAMECTVAQYFKQKYSLQLKYPHLPCLQVGQEQKHTYLPLEVCNIVAGQRCIKKLTDNQTSTMIKATARSAPDRQEEISRLVKSNSMVGGPDPYLKEFGIVVHNEMTELTGRVLPAPMLQYGGRNKTVATPNQGVWDMRGKQFYAGIEIKVWAVACFAPQKQCREDLLKSFTDQLRKISKDAGMPIQGQPCFCKYAQGADSVEPMFKHLKMTYVGLQLIVVILPGKTPVYAEVKRVGDTLLGMATQCVQVKNVVKTSPQTLSNLCLKINAKLGGINNVLVPHQRPSVFQQPVIFLGADVTHPPAGDGKKPSIAAVVGSMDGHPSRYCATVRVQTSRQEISQELLYSQEVIQDLTNMVRELLIQFYKSTRFKPTRIIYYRGGVSEGQMKQVAWPELIAIRKACISLEEDYRPGITYIVVQKRHHTRLFCADKTERVGKSGNVPAGTTVDSTITHPSEFDFYLCSHAGIQGTSRPSHYQVLWDDNCFTADELQLLTYQLCHTYVRCTRSVSIPAPAYYARLVAFRARYHLVDKDHDSAEGSHVSGQSNGRDPQALAKAVQIHHDTQHTMYFA

SEQ ID NO: 45489 - protein, 584 aa, Homo sapiens
MFAKAFRVKSNTAIKGSDRRKLRADVTTAFPTLGTDQVSELVPGKEELNIVKLYAHKGDAVTVYVSGGNPILFELEKNLYPTVYTLWSYPDLLPTFTTWPLVLEKLVGGADLMLPGLVMPPAGLPQVQKGDLCAISLVGNRAPVAIGVAAMSTAEMLTSGLKGRGFSVLHTYQDHLWRSGNKSSPPSIAPLALDSADLSEEKGSVQMDSTLQGDMRHMTLEGEEENGEVHQAREDKSLSEAPEDTSTRGLNQDSTDSKTLQEQMDELLQQCFLHALKCRVKKADLPLLTSTFLGSHMFSCCPEGRQLDIKKSSYKKLSKFLQQMQQEQIIQVKELSKGVESIVAVDWKHPRITSFVIPEPSPTSQTIQEGSREQPYHPPDIKPLYCVPASMTLLFQESGHKKGSFLEGSEVRTIVINYAKKNDLVDADNKNLVRLDPILCDCILEKNEQHTVMKLPWDSLLTRCLEKLQPAYQVTLPGQEPIVKKGRICPIDITLAQRASNKKVTVVRNLEAYGLDPYSVAAILQQRCQASTTVNPAPGAKDSLQVQIQGNQVHHLGWLLLEEYQLPRKHIQGLEKALKPGKKK

SEQ ID NO: 45490 - protein, 271 aa, Homo sapiens [sequence omitted]

SEQ ID NO: 45491 - protein, 460 aa, Homo sapiens
MFAKAFRVKSNTAIKGSDRRKLRADVTTAFPTLGTDQVSELVPGKEELNIVKLYAHKGDAVTVYVSGGNPILFELEKNLYPTVYTLWSYPDLLPTFTTWPLVLEKLVGGADLMLPGLVMPPAGLPQVQKGDLCAISLVGNRAPVAIGVAAMSTAEMLTSGLKGRGFSVLHTYQDHLCPEGRQLDIKKSSYKKLSKFLQQMQQEQIIQVKELSKGVESIVAVDWKHPRITSFVIPEPSPTSQTIQEGSREQPYHPPDIKPLYCVPASMTLLFQESGHKKGSFLEGSEVRTIVINYAKKNDLVDADNKNLVRLDPILCDCILEKNEQHTVMKLPWDSLLTRCLEKLQPAYQVTLPGQEPIVKKGRICPIDITLAQRASNKKVTVVRNLEAYGLDPYSVAAILQQRCQASTTVNPAPGAKDSLQVQIQGNQVHHLGWLLLEEYQLPRKHIQGLEKALKPGKKK

SEQ ID NO: 45492 - protein, 271 aa, Homo sapiens [sequence omitted]

SEQ ID NO: 45493 - protein, 913 aa, Homo sapiens
MSRFFTTGSDSESESSLSGEELVTKPVGGNYGKQPLLLSEDEEDTKRVVRSAKDKRFEELTNLIRTIRNAMKIRDVTKCLEEFELLGKAYGKAKSIVDKEGVPRFYIRILADLEDYLNELWEDKEGKKKMNKNNAKALSTLRQKIRKYNRDFESHITSYKQNPEQSADEDAEKNEEDSEGSSDEDEDEDGVSAATFLKKKSEAPSGESRKFLKKMDDEDEDSEDSEDDEDWDTGSTSSDSDSEEEEGKQTALASRFLKKAPTTDEDKKAAEKKREDKAKKKHDRKSKRLDEEEEDNEGGEWERVRGGVPLVKEKPKMFAKGTEITHAVVIKKLNEILQARGKKGTDRAAQIELLQLLVQIAAENNLGEGVIVKIKFNIIASLYDYNPNLATYMKPEMWGKCLDCINELMDILFANPNIFVGENILEESENLHNADQPLRVRGCILTLVERMDEEFTKIMQNTDPHSQEYVEHLKDEAQVCAIIERVQRYLEEKGTTEEVCRIYLLRILHTYYKFDYKAHQRQLTPPEGSSKSEQDQAENEGEDSAVLMERLCKYIYAKDRTDRIRTCAILCHIYHHALHSRWYQARDLMLMSHLQDNIQHADPPVQILYNRTMVQLGICAFRQGLTKDAHNALLDIQSSGRAKELLGQGLLLRSLQERNQEQEKVERRRQVPFHLHINLELLECVYLVSAMLLEIPYMAAHESDARRRMISKQFHHQLRVGERQPLLGPPESMREHVVAASKAMKMGDWKTCHSFIINEKMNGKVWDLFPEADKVRTMLVRKIQEESLRTYLFTYSSVYDSISMETLSDMFELDLPTVHSIISKMIINEELMASLDQPTQTVVMHRTEPTAQQNLALQLAEKLGSLVENNERVFDHKQGTYGGYFRDQKDGYRKNEGYMRRGGYRQQQSQTAY

SEQ ID NO: 45494 - protein, 1382 aa, Homo sapiens
MPAYFQRPENALKRANEFLEVGKKQPALDVLYDVMKSKKHRTWQKIHEPIMLKYLELCVDLRKSHLAKEGLYQYKNICQQVNIKSLEDVVRAYLKMAEEKTEAAKEESQQMVLDIEDLDNIQTPESVLLSAVSGEDTQDRTDRLLLTPWVKFLWESYRQCLDLLRNNSRVERLYHDIAQQAFKFCLQYTRKAEFRKLCDNLRMHLSQIQRHHNQSTAINLNNPESQSMHLETRLVQLDSAISMELWQEAFKAVEDIHGLFSLSKKPPKPQLMANYYNKVSTVFWKSGNALFHASTLHRLYHLSREMRKNLTQDEMQRMSTRVLLATLSIPITPERTDIARLLDMDGIIVEKQRRLATLLGLQAPPTRIGLINDMVRFNVLQYVVPEVKDLYNWLEVEFNPLKLCERVTKVLNWVREQPEKEPELQQYVPQLQNNTILRLLQQVSQIYQSIEFSRLTSLVPFVDAFQLERAIVDAARHCDLQVRIDHTSRTLSFGSDLNYATREDAPIGPHLQSMPSEQIRNQLTAMSSVLAKALEVIKPAHILQEKEEQHQLAVTAYLKNSRKEHQRILARRQTIEERKERLESLNIQREKEELEQREAELQKVRKAEEERLRQEAKEREKERILQEHEQIKKKTVRERLEQIKKTELGAKAFKDIDIEDLEELDPDFIMAKQVEQLEKEKKELQERLKNQEKKIDYFERAKRLEEIPLIKSAYEEQRIKDMDLWEQQEEERITTMQLEREKALEHKNRMSRMLEDRDLFVMRLKAARQSVYEEKLKQFEERLAEERHNRLEERKRQRKEERRITYYREKEEEEQRRAEEQMLKEREERERAERAKREEELREYQERVKKLEEVERKKRQRELEIEERERRREEERRLGDSSLSRKDSRWGDRDSEGTWRKGPEADSEWRRGPPEKEWRRGEGRDEDRSHRRDEERPRRLGDDEDREPSLRPDDDRVPRRGMDDDRGPRRGPEEDRFSRRGADDDRPSWRNTDDDRPPRRIADEDRGNWRHADDDRPPRRGLDEDRGSWRTADEDRGPRRGMDDDRGPRRGGADDERSSWRNADDDRGPRRGLDDDRGPRRGMDDDRGPRRGMDDDRGPRRGMDDDRGPRRGLDDDRGPWRNADDDRIPRRGAEDDRGPWRNMDDDRLSRRADDDRFPRRGDDSRPGPWRPLVKPGGWREKEKAREESWGPPRESRPSEEREWDREKERDRDNQDREENDKDPERERDRERDVDREDRFRRPRDEGGWRRGPAEESSSWRDSSRRDDRDRDDRRRERDDRRDLRERRDLRDDRDRRGPPLRSEREEVSSWRRADDRKDDRVEERDPPRRVPPPALSRDRERDRDREREGEKEKASWRAEKDRESLRRTKNETDEDGWTTVRR

SEQ ID NO: 45495 - protein, 1348 aa, Homo sapiens
MKSKKHRTWQKIHEPIMLKYLELCVDLRKSHLAKEGLYQYKNICQQVNIKSLEDVVRAYLKMAEEKTEAAKEESQQMVLDIEDLDNIQTPESVLLSAVSGEDTQDRTDRLLLTPWVKFLWESYRQCLDLLRNNSRVERLYHDIAQQAFKFCLQYTRKAEFRKLCDNLRMHLSQIQRHHNQSTAINLNNPESQSMHLETRLVQLDSAISMELWQEAFKAVEDIHGLFSLSKKPPKPQLMANYYNKVSTVFWKSGNALFHASTLHRLYHLSREMRKNLTQDEMQRMSTRVLLATLSIPITPERTDIARLLDMDGIIVEKQRRLATLLGLQAPPTRIGLINDMVRFNVLQYVVPEVKDLYNWLEVEFNPLKLCERVTKVLNWVREQPEKEPELQQYVPQLQNNTILRLLQQVSQIYQSIEFSRLTSLVPFVDAFQLERAIVDAARHCDLQVRIDHTSRTLSFGSDLNYATREDAPIGPHLQSMPSEQIRNQLTAMSSVLAKALEVIKPAHILQEKEEQHQLAVTAYLKNSRKEHQRILARRQTIEERKERLESLNIQREKEELEQREAELQKVRKAEEERLRQEAKEREKERILQEHEQIKKKTVRERLEQIKKTELGAKAFKDIDIEDLEELDPDFIMAKQVEQLEKEKKELQERLKNQEKKIDYFERAKRLEEIPLIKSAYEEQRIKDMDLWEQQEEERITTMQLEREKALEHKNRMSRMLEDRDLFVMRLKAARQSVYEEKLKQFEERLAEERHNRLEERKRQRKEERRITYYREKEEEEQRRAEEQMLKEREERERAERAKREEELREYQERVKKLEEVERKKRQRELEIEERERRREEERRLGDSSLSRKDSRWGDRDSEGTWRKGPEADSEWRRGPPEKEWRRGEGRDEDRSHRRDEERPRRLGDDEDREPSLRPDDDRVPRRGMDDDRGPRRGPEEDRFSRRGADDDRPSWRNTDDDRPPRRIADEDRGNWRHADDDRPPRRGLDEDRGSWRTADEDRGPRRGMDDDRGPRRGGADDERSSWRNADDDRGPRRGLDDDRGPRRGMDDDRGPRRGMDDDRGPRRGMDDDRGPRRGLDDDRGPWRNADDDRIPRRGAEDDRGPWRNMDDDRLSRRADDDRFPRRGDDSRPGPWRPLVKPGGWREKEKAREESWGPPRESRPSEEREWDREKERDRDNQDREENDKDPERERDRERDVDREDRFRRPRDEGGWRRGPAEESSSWRDSSRRDDRDRDDRRRERDDRRDLRERRDLRDDRDRRGPPLRSEREEVSSWRRADDRKDDRVEERDPPRRVPPPALSRDRERDRDREREGEKEKASWRAEKDRESLRRTKNETDEDGWTTVRR

SEQ ID NO: 45496 - protein, 872 aa, Homo sapiens
MQDAENVAVPEAAEERAEPGQQQPAAEPPPAEGLLRPAGPGAPEAAGTEASSEEVGIAEAGPESEVRTEPAAEAEAASGPSESPSPPAAEELPGSHAEPPVPAQGEAPGEQARDERSDSRAQAVSEDAGGNEGRAAEAEPRALENGDADEPSFSDPEDFVDDVSEEELLGDVLKDRPQEADGIDSVIVVDNVPQVGPDRLEKLKNVIHKIFSKFGKITNDFYPEEDGKTKGYIFLEYASPAHAVDAVKNADGYKLDKQHTFRVNLFTDFDKYMTISDEWDIPEKQPFKDLGNLRYWLEEAECRDQYSVIFESGDRTSIFWNDVKDPVSIEERARWTETYVRWSPKGTYLATFHQRGIALWGGEKFKQIQRFSHQGVQLIDFSPCERYLVTFSPLMDTQDDPQAIIIWDILTGHKKRGFHCESSAHWPIFKWSHDGKFFARMTLDTLSIYETPSMGLLDKKSLKISGIKDFSWSPGGNIIAFWVPEDKDIPARVTLMQLPTRQEIRVRNLFNVVDCKLHWQKNGDYLCVKVDRTPKGTQGVVTNFEIFRMREKQVPVDVVEMKETIIAFAWEPNGSKFAVLHGEAPRISVSFYHVKNNGKIELIKMFDKQQANTIFWSPQGQFVVLAGLRSMNGALAFVDTSDCTVMNIAEHYMASDVEWDPTGRYVVTSVSWWSHKVDNAYWLWTFQGRLLQKNNKDRFCQLLWRPRPPTLLSQEQIKQIKKDLKKYSKIFEQKDRLSQSKASKELVERRRTMMEDFRKYRKMAQELYMEQKNERLELRGGVDTDELDSNVDDWEEETIEFFVTEEIIPGIRSDLEHCAQPCVLWSRGRPAGSRVTPASSLCSLALDCDCAWILPLRHIFVPFSPWCLQWGI

SEQ ID NO: 45497 - protein, 814 aa, Homo sapiens
MQDAENVAVPEAAEERAEPGQQQPAAEPPPAEGLLRPAGPGAPEAAGTEASSEEVGIAEAGPESEVRTEPAAEAEAASGPSESPSPPAAEELPGSHAEPPVPAQGEAPGEQARDERSDSRAQAVSEDAGGNEGRAAEAEPRALENGDADEPSFSDPEDFVDDVSEEELLGDVLKDRPQEADGIDSVIVVDNVPQVGPDRLEKLKNVIHKIFSKFGKITNDFYPEEDGKTKGYIFLEYASPAHAVDAVKNADGYKLDKQHTFRVNLFTDFDKYMTISDEWDIPEKQPFKDLGNLRYWLEEAECRDQYSVIFESGDRTSIFWNDVKDPVSIEERARWTETYVRWSPKGTYLATFHQRGIALWGGEKFKQIQRFSHQGVQLIDFSPCERYLVTFSPLMDTQDDPQAIIIWDILTGHKKRGFHCESSAHWPIFKWSHDGKFFARMTLDTLSIYETPSMGLLDKKSLKISGIKDFSWSPGGNIIAFWVPEDKDIPARVTLMQLPTRQEIRVRNLFNVVDCKLHWQKNGDYLCVKVDRTPKGTQGVVTNFEIFRMREKQVPVDVVEMKETIIAFAWEPNGSKFAVLHGEAPRISVSFYHVKNNGKIELIKMFDKQQANTIFWSPQGQFVVLAGLRSMNGALAFVDTSDCTVMNIAEHYMASDVEWDPTGRYVVTSVSWWSHKVDNAYWLWTFQGRLLQKNNKDRFCQLLWRPRPPTLLSQEQIKQIKKDLKKYSKIFEQKDRLSQSKASKELVERRRTMMEDFRKYRKMAQELYMEQKNERLELRGGVDTDELDSNVDDWEEETIEFFVTEEIIPLGNQE

SEQ ID NO: 45498 - protein, 814 aa, Homo sapiens; identical to SEQ ID NO: 45497

SEQ ID NO: 45499 - protein, 738 aa, Homo sapiens
MQDAENVAVPEAAEERAGSHAEPPVPAQGEAPGEQARDERSDSRAQAVSEDAGGNEGRAAEAEPRALENGDADEPSFSDPEDFVDDVSEEELLGDVLKDRPQEADGIDSVIVVDNVPQVGPDRLEKLKNVIHKIFSKFGKITNDFYPEEDGKTKGYIFLEYASPAHAVDAVKNADGYKLDKQHTFRVNLFTDFDKYMTISDEWDIPEKQPFKDLGNLRYWLEEAECRDQYSVIFESGDRTSIFWNDVKDPVSIEERARWTETYVRWSPKGTYLATFHQRGIALWGGEKFKQIQRFSHQGVQLIDFSPCERYLVTFSPLMDTQDDPQAIIIWDILTGHKKRGFHCESSAHWPIFKWSHDGKFFARMTLDTLSIYETPSMGLLDKKSLKISGIKDFSWSPGGNIIAFWVPEDKDIPARVTLMQLPTRQEIRVRNLFNVVDCKLHWQKNGDYLCVKVDRTPKGTQGVVTNFEIFRMREKQVPVDVVEMKETIIAFAWEPNGSKFAVLHGEAPRISVSFYHVKNNGKIELIKMFDKQQANTIFWSPQGQFVVLAGLRSMNGALAFVDTSDCTVMNIAEHYMASDVEWDPTGRYVVTSVSWWSHKVDNAYWLWTFQGRLLQKNNKDRFCQLLWRPRPPTLLSQEQIKQIKKDLKKYSKIFEQKDRLSQSKASKELVERRRTMMEDFRKYRKMAQELYMEQKNERLELRGGVDTDELDSNVDDWEEETIEFFVTEEIIPLGNQE

SEQ ID NO: 45500 - protein, 913 aa, Homo sapiens; identical to SEQ ID NO: 45493

SEQ ID NO: 45501 - protein, 761 aa, Homo sapiens
MSRFFTTGSDSESESSLSGEELVTKPVGGNYGKQPLLLSEDEEDTKRVVRSAKDKRFEELTNLIRTIRNAMKIRDVTKCLEEFELLGKAYGKAKSIVDKEGVPRFYIRILADLEDYLNELWEDKEGKKKHDRKSKRLDEEEEDNEGGEWERVRGGVPLVKEKPKMFAKGTEITHAVVIKKLNEILQARGKKGTDRAAQIELLQLLVQIAAENNLGEGVIVKIKFNIIASLYDYNPNLATYMKPEMWGKCLDCINELMDILFANPNIFVGENILEESENLHNADQPLRVRGCILTLVERMDEEFTKIMQNTDPHSQEYVEHLKDEAQVCAIIERVQRYLEEKGTTEEVCRIYLLRILHTYYKFDYKAHQRQLTPPEGSSKSEQDQAENEGEDSAVLMERLCKYIYAKDRTDRIRTCAILCHIYHHALHSRWYQARDLMLMSHLQDNIQHADPPVQILYNRTMVQLGICAFRQGLTKDAHNALLDIQSSGRAKELLGQGLLLRSLQERNQEQEKVERRRQVPFHLHINLELLECVYLVSAMLLEIPYMAAHESDARRRMISKQFHHQLRVGERQPLLGPPESMREHVVAASKAMKMGDWKTCHSFIINEKMNGKVWDLFPEADKVRTMLVRKIQEESLRTYLFTYSSVYDSISMETLSDMFELDLPTVHSIISKMIINEELMASLDQPTQTVVMHRTEPTAQQNLALQLAEKLGSLVENNERVFDHKQGTYGGYFRDQKDGYRKNEGYMRRGGYRQQQSQTAY

SEQ ID NO: 45502 - protein, 913 aa, Homo sapiens; identical to SEQ ID NO: 45493

SEQ ID NO: 45503 - protein, 735 aa, Homo sapiens
MSRFFTTGSDSESESSLSGEELVTKPVGGNYGKQPLLLSEDEEDTKRVVRSAKDKRFEELTNLIRTIRNAMKIRDVTKCLEEFELLGKAYGKAKSIVDKAKKKHDRKSKRLDEEEEDNEGGEWERVRGGVPLVKEKPKMFAKGTEITHAVVIKKLNEILQARGKKGTDRAAQIELLQLLVQIAAENNLGEGVIVKIKFNIIASLYDYNPNLATYMKPEMWGKCLDCINELMDILFANPNIFVGENILEESENLHNADQPLRVRGCILTLVERMDEEFTKIMQNTDPHSQEYVEHLKDEAQVCAIIERVQRYLEEKGTTEEVCRIYLLRILHTYYKFDYKAHQRQLTPPEGSSKSEQDQAENEGEDSAVLMERLCKYIYAKDRTDRIRTCAILCHIYHHALHSRWYQARDLMLMSHLQDNIQHADPPVQILYNRTMVQLGICAFRQGLTKDAHNALLDIQSSGRAKELLGQGLLLRSLQERNQEQEKVERRRQVPFHLHINLELLECVYLVSAMLLEIPYMAAHESDARRRMISKQFHHQLRVGERQPLLGPPESMREHVVAASKAMKMGDWKTCHSFIINEKMNGKVWDLFPEADKVRTMLVRKIQEESLRTYLFTYSSVYDSISMETLSDMFELDLPTVHSIISKMIINEELMASLDQPTQTVVMHRTEPTAQQNLALQLAEKLGSLVENNERVFDHKQGTYGGYFRDQKDGYRKNEGYMRRGGYRQQQSQTAY

SEQ ID NO: 45504 - protein, 898 aa, Homo sapiens
MSRFFTTGSDSESESSLSGEELVTKPVGGNYGKQPLLLSEDEEDTKRVVRSAKDKRFEELTNLIRTIRNAMKIRDVTKCLEEFELLGKAYGKAKSIVDKEGVPRFYIRILADLEDYLNELWEDKEGKKKIRKYNRDFESHITSYKQNPEQSADEDAEKNEEDSEGSSDEDEDEDGVSAATFLKKKSEAPSGESRKFLKKMDDEDEDSEDSEDDEDWDTGSTSSDSDSEEEEGKQTALASRFLKKAPTTDEDKKAAEKKREDKAKKKHDRKSKRLDEEEEDNEGGEWERVRGGVPLVKEKPKMFAKGTEITHAVVIKKLNEILQARGKKGTDRAAQIELLQLLVQIAAENNLGEGVIVKIKFNIIASLYDYNPNLATYMKPEMWGKCLDCINELMDILFANPNIFVGENILEESENLHNADQPLRVRGCILTLVERMDEEFTKIMQNTDPHSQEYVEHLKDEAQVCAIIERVQRYLEEKGTTEEVCRIYLLRILHTYYKFDYKAHQRQLTPPEGSSKSEQDQAENEGEDSAVLMERLCKYIYAKDRTDRIRTCAILCHIYHHALHSRWYQARDLMLMSHLQDNIQHADPPVQILYNRTMVQLGICAFRQGLTKDAHNALLDIQSSGRAKELLGQGLLLRSLQERNQEQEKVERRRQVPFHLHINLELLECVYLVSAMLLEIPYMAAHESDARRRMISKQFHHQLRVGERQPLLGPPESMREHVVAASKAMKMGDWKTCHSFIINEKMNGKVWDLFPEADKVRTMLVRKIQEESLRTYLFTYSSVYDSISMETLSDMFELDLPTVHSIISKMIINEELMASLDQPTQTVVMHRTEPTAQQNLALQLAEKLGSLVENNERVFDHKQGTYGGYFRDQKDGYRKNEGYMRRGGYRQQQSQTAY

SEQ ID NO: 45505 - protein, 548 aa, Homo sapiens
MAKFMTPVIQDNPSGWGPCAVPEQFRDMPYQPFSKGDRLGKVADWTGATYQDKRYTNKYSSQFGGGSQYAYFHEEDESSFQLVDTARTQKTAYQRNRMRFAQRNLRRDKDRRNMLQFNLQILPKSAKQKERERIRLQKKFQKQFGVRQKWDQKSQKPRDSSVEVRSDWEVKEEMDFPQLMKMRYLEVSEPQDIECCGALEYYDKAFDRITTRSEKPLRSIKRIFHTVTTTDDPVIRKLAKTQGNVFATDAILATLMSCTRSVYSWDIVVQRVGSKLFFDKRDNSDFDLLTVSETANEPPQDEGNSFNSPRNLAMEATYINHNFSQQCLRMGKERYNFPNPNPFVEDDMDKNEIASVAYRYRRWKLGDDIDLIVRCEHDGVMTGANGEVSFINIKTLNEWDSRHCNGVDWRQKLDSQRGAVIATELKNNSYKLARWTCCALLAGSEYLKLGYVSRYHVKDSSRHVILGTQQFKPNEFASQINLSVENAWGILRCVIDICMKLEEGKYLILKDPNKQVIRVYSLPDGTFSSDEDEEEEEEEEEEEEEEET

SEQ ID NO: 45506 - protein, 533 aa, Homo sapiens
MAKFMTPVIQDNPSGWGPCAVPEQFRDMPYQPFSKGDRLGKVADWTGATYQDKRYTNKYSSQFGGGSQYAYFHEEDESSFQLVDTARTQKTAYQRNRMRFAQRNLRRDKDRRNMLQFNLQILPKSAKQKERERIRLQKSQKPRDSSVEVRSDWEVKEEMDFPQLMKMRYLEVSEPQDIECCGALEYYDKAFDRITTRSEKPLRSIKRIFHTVTTTDDPVIRKLAKTQGNVFATDAILATLMSCTRSVYSWDIVVQRVGSKLFFDKRDNSDFDLLTVSETANEPPQDEGNSFNSPRNLAMEATYINHNFSQQCLRMGKERYNFPNPNPFVEDDMDKNEIASVAYRYRRWKLGDDIDLIVRCEHDGVMTGANGEVSFINIKTLNEWDSRHCNGVDWRQKLDSQRGAVIATELKNNSYKLARWTCCALLAGSEYLKLGYVSRYHVKDSSRHVILGTQQFKPNEFASQINLSVENAWGILRCVIDICMKLEEGKYLILKDPNKQVIRVYSLPDGTFSSDEDEEEEEEEEEEEEEEET

SEQ ID NO: 45507 - protein, 123 aa, Homo sapiens
MAKFMTPVIQDNPSGWGPCAVPEQFRDMPYQPFSKGDRLGKVADWTGATYQDKRYTNKYSSQFGGGSQYAYFHEEDESSFQLVDTARTQKTAYQRNRMRFAQRNLRRDKDRRNMLQFNLQILP

SEQ ID NO: 45508 - protein, 548 aa, Homo sapiens; identical to SEQ ID NO: 45505

SEQ ID NO: 45509 - protein, 172 aa, Homo sapiens
MDKNEIASVAYRYRRWKLGDDIDLIVRCEHDGVMTGANGEVSFINIKTLNEWDSRHCNGVDWRQKLDSQRGAVIATELKNNSYKLARWTCCALLAGSEYLKLGYVSRYHVKDSSRHVILGTQQFKPNEFASQINLSVENAWGILRCVIDICMKLEEGKYLILKDPNKQVIRV

SEQ ID NO: 45510 - protein, 186 aa, Homo sapiens
MAKFMTPVIQDNPSGWGPCAVPEQFRDMPYQPFSKGDRLGKVADWTGATYQDKRYTNKYSSQFGGGSQYAYFHEEDESSFQLVDTARTQKTAYQRNRMRFAQRNLRRDKDRRNMLQFNLQILPKSAKQKERERIRLQKKFQKQFGVRQKWDQKSQVMYLYQNSALEFGSVYLVVFINSLDEIYFTY

SEQ ID NO: 45511 - protein, 269 aa, Homo sapiens
MAKFMTPVIQDNPSGWGPCAVPEQFRDMPYQPFSKGDRLGKVADWTGATYQDKRYTNKYSSQFGGGSQYAYFHEEDESSFQLVDTARTQKTAYQRNRMRFAQRNLRRDKDRRNMLQFNLQILPKSAKQKERERIRLQKKFQKQFGVRQKWDQKSQKPRDSSVEVRSDWEVKEEMDFPQLMKMRYLEVSEPQDIECCGALEYYDKAFDRITTRSEKPLRSIKRIFHTVTTTDDPVIRKLAKTQGNVFATDAILATLMSCTRSVYSWDIVV

SEQ ID NO: 45512 - protein, 173 aa, Homo sapiens
MAKFMTPVIQDNPSGWGPCAVPEQFRDMPYQPFSKGDRLGKVADWTGATYQDKRYTNKYSSQFGGGSQYAYFHEEDESSFQLVDTARTQKTAYQRNRMRFAQRNLRRDKDRRNMLQFNLQILPKSAKQKERERIRLQKKFQKQFGVRQKWDQKSQKPRDSSVEVRSDWEVKEE

SEQ ID NO: 45513 - protein, 165 aa, Homo sapiens
MEATYINHNFSQQCLRMGKERYNFPNPNPFVEDDMDKNEIASVAYRYRRWKLGDDIDLIVRCEHDGVMTGANGEVSFINIKTLNEWDSRHCNGVDWRQKLDSQRGAVIATELKNNSYKLARWTCCALLAGSEYLKLGYVSRYHVKDSSRHVILGTQQFKPNEFAS

SEQ ID NO: 45514 - protein, 499 aa, Homo sapiens
MAKFMTPVIQDNPSGWGPCAVPEQFRDMPYQPFSKGDRLGKVADWTGATYQDKRNLRRDKDRRNMLQFNLQILPKSAKQKERERIRLQKKFQKQFGVRQKWDQKSQKPRDSSVEVRSDWEVKEEMDFPQLMKMRYLEVSEPQDIECCGALEYYDKAFDRITTRSEKPLRSIKRIFHTVTTTDDPVIRKLAKTQGNVFATDAILATLMSCTRSVYSWDIVVQRVGSKLFFDKRDNSDFDLLTVSETANEPPQDEGNSFNSPRNLAMEATYINHNFSQQCLRMGKERYNFPNPNPFVEDDMDKNEIASVAYRYRRWKLGDDIDLIVRCEHDGVMTGANGEVSFINIKTLNEWDSRHCNGVDWRQKLDSQRGAVIATELKNNSYKLARWTCCALLAGSEYLKLGYVSRYHVKDSSRHVILGTQQFKPNEFASQINLSVENAWGILRCVIDICMKLEEGKYLILKDPNKQVIRVYSLPDGTFSSDEDEEEEEEEEEEEEEEET

SEQ ID NO: 45515 - protein, 445 aa, Homo sapiens
MAEYDLTTRIAHFLDRHLVFPLLEFLSVKEIYNEKELLQGKLDLLSDTNMVDFAMDVYKNLYSDDIPHALREKRTTVVAQLKQLQAETEPIVKMFEDPETTRQMQSTRDGRMLFDYLADKHGFRQEYLDTLYRYAKFQYECGNYSGAAEYLYFFRVLVPATDRNALSSLWGKLASEILMQNWDAAMEDLTRLKETIDNNSVSSPLQSLQQRTWLIHWSLFVFFNHPKGRDNIIDLFLYQPQYLNAIQTMCPHILRYLTTAVITNKDVRKRRQVLKDLVKVIQQESYTYKDPITEFVECLYVNFDFDGAQKKLRECESVLVNDFFLVACLEDFIENARLFIFETFCRIHQCISINMLADKLNMTPEEAERWIVNLIRNARLDAKIDSKLGHVVMGNNAVSPYQQVIEKTKSLSFRSQMLAMNIEKKLNQNSRSEAPNWATQDSGFY

SEQ ID NO: 45516 - protein, 357 aa, Homo sapiens
MATPAVPVSAPPATPTPVPAAAPASVPAPTPAPAAAPVPAAAPASSSDPAAAAAATAAPGQTPASAQAPAQTPAPALPGPALPGPFPGGRVVRLHPVILASIVDSYERRNEGAARVIGTLLGTVDKHSVEVTNCFSVPHNESEDEVAVDMEFAKNMYELHKKVSPNELILGWYATGHDITEHSVLIHEYYSREAPNPIHLTVDTSLQNGRMSIKAYVSTLMGVPGRTMGVMFTPLTVKYAYYDTERIGVDLIMKTCFSPNRVIGLSSDLQQVGGASARIQDALSTVLQYAEDVLSGKVSADNTVGRFLMSLVNQVPKIVPDDFETMLNSNINDLLMVTYLANLTQSQIALNEKLVNL

SEQ ID NO: 45517 - protein, 208 aa, Homo sapiens
MEFAKNMYELHKKVSPNELILGWYATGHDITEHSVLIHEYYSREAPNPIHLTVDTSLQNGRMSIKAYVSTLMGVPGRTMGVMFTPLTVKYAYYDTERIGVDLIMKTCFSPNRVIGLSSDLQQVGGASARIQDALSTVLQYAEDVLSGKVSADNTVGRFLMSLVNQVPKIVPDDFETMLNSNINDLLMVTYLANLTQSQIALNEKLVNL

SEQ ID NO: 45518 - protein, 357 aa, Homo sapiens; identical to SEQ ID NO: 45516

SEQ ID NO: 45519 - protein, 372 aa, Homo sapiens
MNAVISASASFFLDKMATPAVPVSAPPATPTPVPAAAPASVPAPTPAPAAAPVPAAAPASSSDPAAAAAATAAPGQTPASAQAPAQTPAPALPGPALPGPFPGGRVVRLHPVILASIVDSYERRNEGAARVIGTLLGTVDKHSVEVTNCFSVPHNESEDEVAVDMEFAKNMYELHKKVSPNELILGWYATGHDITEHSVLIHEYYSREAPNPIHLTVDTSLQNGRMSIKAYVSTLMGVPGRTMGVMFTPLTVKYAYYDTERIGVDLIMKTCFSPNRVIGLSSDLQQVGGASARIQDALSTVLQYAEDVLSGKVSADNTVGRFLMSLVNQVPKIVPDDFETMLNSNINDLLMVTYLANLTQSQIALNEKLVNL

SEQ ID NO: 45520 - protein, 307 aa, Homo sapiens
MATPAVPVSAPPATPTPVPAAAPAPALPGPALPGPFPGGRVVRLHPVILASIVDSYERRNEGAARVIGTLLGTVDKHSVEVTNCFSVPHNESEDEVAVDMEFAKNMYELHKKVSPNELILGWYATGHDITEHSVLIHEYYSREAPNPIHLTVDTSLQNGRMSIKAYVSTLMGVPGRTMGVMFTPLTVKYAYYDTERIGVDLIMKTCFSPNRVIGLSSDLQQVGGASARIQDALSTVLQYAEDVLSGKVSADNTVGRFLMSLVNQVPKIVPDDFETMLNSNINDLLMVTYLANLTQSQIALNEKLVNL

SEQ ID NO: 45521 - protein, 320 aa, Homo sapiens
MPTGDFDSKPSWADQVEEEGEDDKCVTSELLKGIPLATGDTSPEPELLPGAPLPPPKEVINGNIKTVTEYKIDEDGKKFKIVRTFRIETRKASKAVARRKNWKKFGNSEFDPPGPNVATTTVSDDVSMTFITSKEDLNCQEEEDPMNKLKGQKIVSCRICKGDHWTTRCPYKDTLGPMQKELAEQLGLSTGEKEKLPGELEPVQATQNKTGKYVPPSLRDGASRRGESMQPNRRADDNATIRVTNLSEDTRETDLQELFRPFGSISRIYLAKDKTTGQSKGFAFISFHRREDAARAIAGVSGFGYDHLILNVEWAKPSTN

SEQ ID NO: 45522 - protein, 366 aa, Homo sapiens
MYSRHAQRIPPGKKMASRKEGTGSTATSSSSTAGAAGKGKGKGGSGDSAVKQVQIDGLVVLKIIKHYQEEGQGTEVVQGVLLGLVVEDRLEITNCFPFPQHTEDDADFDEVQYQMEMMRSLRHVNIDHLHVGWYQSTYYGSFVTRALLDSQFSYQHAIEESVVLIYDPIKTAQGSLSLKAYRLTPKLMEVCKEKDFSPEALKKANITFEYMFEEVPIVIKNSHLINVLMWELEKKSAVADKHELLSLASSNHLGKNLQLLMDRVDEMSQDIVKYNTYMRNTSKQQQQKHQYQQRRQQENMQRQSRGEPPLPEEDLSKLFKPPQPPARMDSLLIAGQINTYCQNIKEFTAQNLGKLFMAQALQEYNN

SEQ ID NO: 45523 - protein, 352 aa, Homo sapiens
MASRKEGTGSTATSSSSTAGAAGKGKGKGGSGDSAVKQVQIDGLVVLKIIKHYQEEGQGTEVVQGVLLGLVVEDRLEITNCFPFPQHTEDDADFDEVQYQMEMMRSLRHVNIDHLHVGWYQSTYYGSFVTRALLDSQFSYQHAIEESVVLIYDPIKTAQGSLSLKAYRLTPKLMEVCKEKDFSPEALKKANITFEYMFEEVPIVIKNSHLINVLMWELEKKSAVADKHELLSLASSNHLGKNLQLLMDRVDEMSQDIVKYNTYMRNTSKQQQQKHQYQQRRQQENMQRQSRGEPPLPEEDLSKLFKPPQPPARMDSLLIAGQINTYCQNIKEFTAQNLGKLFMAQALQEYNN

SEQ ID NO: 45524 - protein, 125 aa, Homo sapiens
MKPILLQGHERSITQIKYNREGDLLFTVAKDPIVNVWYSVNGERLGTYMGHTGAVWCVDADWDTKHVLTGSADNSCRLWDCETGKQLALLKTNSAVRTCGFDFGGNIIMFSTDKQMGYQCFVSFF

SEQ ID NO: 45525 - protein, 325 aa, Homo sapiens
MKPILLQGHERSITQIKYNREGDLLFTVAKDPIVNVWYSVNGERLGTYMGHTGAVWCVDADWDTKHVLTGSADNSCRLWDCETGKQLALLKTNSAVRTCGFDFGGNIIMFSTDKQMGYQCFVSFFDLRDPSQIDNNEPYMKIPCNDSKITSAVWGPLGECIIAGHESGELNQYSAKSGEVLVNVKEHSRQINDIQLSRDMTMFVTASKDNTAKLFDSTTLEHQKTFRTERPVNSAALSPNYDHVVLGGGQEAMDVTTTSTRIGKFEARFFHLAFEEEFGRVKGHFGPINSVAFHPDGKSYSSGGEDGYVRIHYFDPQYFEFEFEA

SEQ ID NO: 45526 - protein, 258 aa, Homo sapiens
MAAAAAAAGDSDSWDADAFSVEDPVRKVGGGGTAGGDRWEGEDEDEDVKDNWDDDDDEKKEEAEVKPEVKISEKKKIAEKIKEKERQQKKRQEEIKKRLEEPEEPKVLTPEEQLADKLRLKKLQEESDLELAKETFGVNNAVYGIDAMNPSSRDDFTEFGKLLKDKITQYEKSLYYASFLEVLVRDVCISLEIDDLKKITNSLTVLCSEKQKQEKQSKAKKKKKGVVPGGGLKATMKDDLADYGGYDGGYVQDYEDFM

SEQ ID NO: 45527 - protein, 218 aa, Homo sapiens
MAMFEQMRANVGKLLKGIDRYNPENLATLERYVETQAKENAYDLEANLAVLKLYQFNPAFFQTTVTAQILLKALTNLPHTDFTLCKCMIDQAHQEERPIRQILYLGDLLETCHFQAFWQALDENMDLLEGITGFEDSVRKFICHVVGITYQHIDRWLLAEMLGDLSDSQLKVWMSKYGWSADESGQIFICSQEESIKPKNIVEKIDFDSVSSIMASSQ

SEQ ID NO: 45528 - protein, 124 aa, Homo sapiens
MIDQAHQEERPIRQILYLGDLLETCHFQAFWQALDENMDLLEGITGFEDSVRKFICHVVGITYQHIDRWLLAEMLGDLSDSQLKVWMSKYGWSADESGQIFICSQEESIKPKNIVEKIDFDSEW

SEQ ID NO: 45529 - protein, 211 aa, Homo sapiens
MAMFEQMRANVGKLLKGIDRYNPENLATLERYVETQAKENAYDLEANLAVLKLYQFNPAFFQTTVTAQILLKALTNLPHTDFTLCKCMIDQAHQEERPIRQILYLGDLLETCHFQAFWQALDENMDLLEGITGFEDSVRKFICHVVGITYQHIDRWLLAEMLGDLSDSQLKVWMSKYGWSADESGQIFICSQEESIKPKNIVEKIDFDSEW

SEQ ID NO: 45530 - protein, 374 aa, Homo sapiens
MSVPAFIDISEEDQAAELRAYLKSKGAEISEENSEGGLHVDLAQIIEACDVCLKEDDKDVESVMNSVVSLLLILEPDKQEALIESLCEKLVKFREGERPSLRLQLLSNLFHGMDKNTPVRYTVYCSLIKVAASCGAIQYIPTELDQVRKWISDWNLTTEKKHTLLRLLYEALVDCKKSDAASKVMVELLGSYTEDNASQARVDAHRCIVRALKDPNAFLFDHLLTLKPVKFLEGELIHDLLTIFVSAKLASYVKFYQNNKDFIDSLGLLHEQNMAKMRLLTFMGMAVENKEISFDTMQQELQIGADDVEAFVIDAVRTKMVYCKIDQTQRKVVVSHSTHRTFGKQQWQQLYDTLNAWKQNLNKVKNSLLSLSDT

SEQ ID NO: 45531 - protein, 907 aa, Homo sapiens
VESAIAEGGASRFSASSGGGGSRGAPQHYPKTAGNSEFLGKTPGQNAQKWIPARSTRRDDNSAANNSANEKERHDAIFRKVRGILNKLTPEKFDKLCLELLNVGVESKLILKGVILLIVDKALEEPKYSSLYAQLCLRLAEDAPNFDGPAAEGQPGQKQSTTFRRLLISKLQDEFENRTRNVDVYDKRENPLLPEEEEQRAIAKIKMLGNIKFIGELGKLDLIHESILHKCIKTLLEKKKRVQLKDMGEDLECLCQIMRTVGPRLDHERAKSLMDQYFARMCSLMLSKELPARIRFLLQDTVELREHHWVPRKAFLDNGPKTINQIRQDAVKDLGVFIPAPMAQGMRSDFFLEGPFMPPRMKMDRDPLGGLADMFGQMPGSGIGTGPGVIQDRFSPTMGRHRSNQLFNGHGGHIMPPTQSQFGEMGGKFMKSQGLSQLYHNQSQGLLSQLQGQSKDMPPRFSKKGQLNADEISLRPAQSFLMNKNQVPKLQPQITMIPPSAQPPRTQTPPLGQTPQLGLKTNPPLIQEKPAKTSKKPPPSKEELLKLTETVVTEYLNSGNANEAVNGVREMRAPKHFLPEMLSKVIILSLDRSDEDKEKASSLISLLKQEGIATSDNFMQAFLNVLDQCPKLEVDIPLVKSYLAQFAARAIISELVSISELAQPLESGTHFPLFLLCLQQLAKLQDREWLTELFQQSKVNMQKMLPEIDQNKDRMLEILEGKGLSFLFPLLKLEKELLKQIKLDPSPQTIYKWIKDNISPKLHVDKGFVNILMTSFLQYISSEVNPPSDETDSSSAPSKEQLEQEKQLLLSFKPVMQKFLHDHVDLQVSALYALQVHCYNSNFPKGMLLRFFVHFYDMEIIEEEAFLAWKEDITQEFPGKGKALFQVNQWLTWLETAEEEESEEEAD

SEQ ID NO: 45532 - protein, 253 aa, Homo sapiens
MQAFLNVLDQCPKLEVDIPLVKSYLAQFAARAIISELVSISELAQPLESGTHFPLFLLCLQQLAKLQDREWLTELFQQSKVNMQKMLPEIDQNKDRMLEILEGKGLSFLFPLLKLEKELLKQIKLDPSPQTIYKWIKDNISPKLHVDKGFVNILMTSFLQYISSEVNPPSDETDSSSAPSKEQLEQEKQLLLSFKPVMQKFLHDHVDLQVSALYALQVHCYNSNFPKGMLLFLCTSMTWKLLKKKLSWLGKKI

SEQ ID NO: 45533 - protein, 869 aa, Homo sapiens
VESAIAEGGASRFSASSGGGGSRGAPQHYPKTAGNSEFLGKTPGQNAQKWIPARSTRRDDNSAANNSANEKERHDAIFRKVRGILNKLTPEKFDKLCLELLNVGVESKLILKGVILLIVDKALEEPKYSSLYAQLCLRLAEDAPNFDGPAAEGQPGQKQSTTFRRLLISKLQDEFENRTRNVDVYDKRENPLLPEEEEQRAIAKIKMLGNIKFIGELGKLDLIHESILHKCIKTLLEKKKRVQLKDMGEDLECLCQIMRTVGPRLDHERAKSLMDQYFARMCSLMLSKELPARIRFLLQDTVELREHHWVPRKAFLDNGPKTINQIRQDAVKDLGVFIPAPMAQGMRSDFFLEGPFMPPRMKMDRDPLGGLADMFGQMPGSGIGTGPGVIQDRFSPTMGRHRSNQLFNGHGGHIMPPTQSQFGEMGGKFMKSQISLRPAQSFLMNKNQVPKLQPQITMIPPSAQPPRTQTPPLGQTPQLGLKTNPPLIQEKPAKTSKKPPPSKEELLKLTETVVTEYLNSGNANEAVNGVREMRAPKHFLPEMLSKVIILSLDRSDEDKEKASSLISLLKQEGIATSDNFMQAFLNVLDQCPKLEVDIPLVKSYLAQFAARAIISELVSISELAQPLESGTHFPLFLLCLQQLAKLQDREWLTELFQQSKVNMQKMLPEIDQNKDRMLEILEGKGLSFLFPLLKLEKELLKQIKLDPSPQTIYKWIKDNISPKLHVDKGFVNILMTSFLQYISSEVNPPSDETDSSSAPSKEQLEQEKQLLLSFKPVMQKFLHDHVDLQVSALYALQVHCYNSNFPKGMLLRFFVHFYDMEIIEEEAFLAWKEDITQEFPGKGKALFQVNQWLTWLETAEEEESEEEAD

SEQ ID NO: 45534 - protein, 980 aa, Homo sapiens
MAGWPTPAGTRPWRTEARLCSDGEGAWLGPLAPWREARLASRRGGISFLLSPPLPTPSINIILLKILRCQAAKVESAIAEGGASRFSASSGGGGSRGAPQHYPKTAGNSEFLGKTPGQNAQKWIPARSTRRDDNSAANNSANEKERHDAIFRKVRGILNKLTPEKFDKLCLELLNVGVESKLILKGVILLIVDKALEEPKYSSLYAQLCLRLAEDAPNFDGPAAEGQPGQKQSTTFRRLLISKLQDEFENRTRNVDVYDKRENPLLPEEEEQRAIAKIKMLGNIKFIGELGKLDLIHESILHKCIKTLLEKKKRVQLKDMGEDLECLCQIMRTVGPRLDHERAKSLMDQYFARMCSLMLSKELPARIRFLLQDTVELREHHWVPRKAFLDNGPKTINQIRQDAVKDLGVFIPAPMAQGMRSDFFLEGPFMPPRMKMDRDPLGGLADMFGQMPGSGIGTGPGVIQDRFSPTMGRHRSNQLFNGHGGHIMPPTQSQFGEMGGKFMKSQGLSQLYHNQSQGLLSQLQGQSKDMPPRFSKKGQLNADEISLRPAQSFLMNKNQVPKLQPQITMIPPSAQPPRTQTPPLGQTPQLGLKTNPPLIQEKPAKTSKKPPPSKEELLKLTETVVTEYLNSGNANEAVNGVREMRAPKHFLPEMLSKVIILSLDRSDEDKEKASSLISLLKQEGIATSDNFMQAFLNVLDQCPKLEVDIPLVKSYLAQFAARAIISELVSISELAQPLESGTHFPLFLLCLQQLAKLQDREWLTELFQQSKVNMQKMLPEIDQNKDRMLEILEGKGLSFLFPLLKLEKELLKQIKLDPSPQTIYKWIKDNISPKLHVDKGFVNILMTSFLQYISSEVNPPSDETDSSSAPSKEQLEQEKQLLLSFKPVMQKFLHDHVDLQVSALYALQVHCYNSNFPKGMLLRFFVHFYDMEIIEEEAFLAWKEDITQEFPGKGKALFQVNQWLTWLETAEEEESEEEAD

SEQ ID NO: 45535 - protein, 244 aa, Homo sapiens
VESAIAEGGASRFSASSGGGGSRGAPQHYPKTAGNSEFLGKTPGQNAQKWIPARSTRRDDNSAANNSANEKERHDAIFRKVRGILNKLTPEKFDKLCLELLNVGVESKLILKGVILLIVDKALEEPKYSSLYAQLCLRLAEDAPNFDGPAAEGQPGQKQSTTFRRLLISKLQDEFENRTRNVDVYDKRENPLLPEEEEQRAIAKIKMLGNIKFIGELGKLDLIHESILHKCIKTLLEKKKRVQL

SEQ ID NO: 45536 - protein, 907 aa, Homo sapiens; identical to SEQ ID NO: 45531

SEQ ID NO: 45537 - protein, 907 aa, Homo sapiens; identical to SEQ ID NO: 45531

SEQ ID NO: 45538 - protein, 124 aa, Homo sapiens
VESAIAEGGASRFSASSGGGGSRGAPQHYPKTAGNSEFLGKTPGQNAQKWIPARSTRRDDNSAANNSANEKERHDAIFRKVRGILNKLTPEKFDKLCLELLNVGVESKLILKGVILLIVDKALE

SEQ ID NO: 45539 - protein, 112 aa, Homo sapiens
VESAIAEGGASRFSASSGGGGSRGAPQHYPKTAGNSEFLGKTPGQNAQKWIPARSTRRDDNSAANNSANEKERHDAIFRKVRGILNKLTPEKFDKLCLELLNVGVESKLILK

SEQ ID NO: 45540 - protein, 116 aa, Homo sapiens
VESAIAEGGASRFSASSGGGGSRGAPQHYPKTAGNSEFLGKTPGQNAQKWIPARSTRRDDNSAANNSANEKERHDAIFRKVRGILNKLTPEKFDKLCLELLNVGVESKLILKGVIL

SEQ ID NO: 45541 - protein, 444 aa, Homo sapiens
VESAIAEGGASRFSASSGGGGSRGAPQHYPKTAGNSEFLGKTPGQNAQKWIPARSTRRDDNSAANNSANEKERHDAIFRKVRGILNKLTPEKFDKLCLELLNVGVESKLILKGVILLIVDKALEEPKYSSLYAQLCLRLAEDAPNFDGPAAEGQPGQKQSTTFRRLLISKLQDEFENRTRNVDVYDKRENPLLPEEEEQRAIAKIKMLGNIKFIGELGKLDLIHESILHKCIKTLLEKKKRVQLKDMGEDLECLCQIMRTVGPRLDHERAKSLMDQYFARMCSLMLSKELPARIRFLLQDTVELREHHWVPRKAFLDNGPKTINQIRQDAVKDLGVFIPAPMAQGMRSDFFLEGPFMPPRMKMDRDPLGGLADMFGQMPGSGIGTGPGVIQDRFSPTMGRHRSNQLFNGHGGHIMPPTQSQFGEMGGKFMKSQISLRPAQSFLM

SEQ ID NO: 45542 - protein, 282 aa, Homo sapiens
VESAIAEGGASRFSASSGGGGSRGAPQHYPKTAGNSEFLGKTPGQNAQKWIPARSTRRDDNSAANNSANEKERHDAIFRKVRGILNKLTPEKFDKLCLELLNVGVESKLILKGVILLIVDKALEEPKYSSLYAQLCLRLAEDAPNFDGPAAEGQPGQKQSTTFRRLLISKLQDEFENRTRNVDVYDKRENPLLPEEEEQRAIAKIKMLGNIKFIGELGKLDLIHESILHKCIKTLLEKKKRVQLKDMGEDLECLCQIMRTVGPRLDHERAKSLMDQYFARMC

SEQ ID NO: 45543 - protein, 130 aa, Homo sapiens
VESAIAEGGASRFSASSGGGGSRGAPQHYPKTAGNSEFLGKTPGQNAQKWIPARSTRRDDNSAANNSANEKERHDAIFRKVRGILNKLTPEKFDKLCLELLNVGVESKLILKGVILLIVDKALEEPKYSS

SEQ ID NO: 45544 - protein, 406 aa, Homo sapiens
MSASQDSRSRDNGPDGMEPEGVIESNWNEIVDSFDDMNLSESLLRGIYAYGFEKPSAIQQRAILPCIKGYDVIAQAQSGTGKTATFAISILQQIELDLKATQALVLAPTRELAQQIQKVVMALGDYMGASCHACIGGTNVRAEVQKLQMEAPHIIVGTPGRVFDMLNRRYLSPKYIKMFVLDEADEMLSRGFKDQIYDIFQKLNSNTQVVLLSATMPSDVLEVTKKFMRDPIRILVKKEELTLEGIRQFYINVEREEWKLDTLCDLYETLTITQAVIFINTRRKVDWLTEKMHARDFTVSAMHGDMDQKERDVIMREFRSGSSRVLITTDLLARGIDVQQVSLVINYDLPTNRENYIHRIGRGGRFGRKGVAINMVTEEDKRTLRDIETFYNTSIEEMPLNVADLI

SEQ ID NO: 45545 - protein, 146 aa, Homo sapiens
MEPEGVIESNWNEIVDSFDDMNLSESLLRGIYAYGFEKPSAIQQRAILPCIKGYDVIAQAQSGTGKTATFAISILQQIELDLKATQALVLAPTRELAQQVRVASIPSFRADLGMMSIIQGPEKSSLITTLGGRHGCPNTLETCWVN

SEQ ID NO: 45546 - protein, 200 aa, Homo sapiens
MFVLDEADEMLSRGFKDQIYDIFQKLNSNTQVVLLSATMPSDVLEVTKKFMRDPIRILVKKEELTLEGIRQFYINVEREEWKLDTLCDLYETLTITQAVIFINTRRKVDWLTEKMHARDFTVSAMVCLPAASLLWVCPSEVSYLKPGFLEPRCLPGLLHICFLFQHGDMDQKERDVIMREFRSGSSRVLITTDLLVSRGN

SEQ ID NO: 45547 - protein, 341 aa, Homo sapiens
MSASQDSRSRDNGPDGMEPEGVIESNWNEIVDSFDDMNLSESLLRGIYAYGFEKPSAIQQRAILPCIKGYDVIAQAQSGTGKTATFAISILQQIELDLKATQALVLAPTRELAQQIQKVVMALGDYMGASCHACIGGTNVRAEVQKLQMEAPHIIVGTPGRVFDMLNRRYLSPKYIKMFVLDEADEMLSRGFKDQIYDIFQKLNSNTQVVLLSATMPSDVLEVTKKFMRDPIRILVKKEELTLEGIRQFYINVEREEWKLDTLCDLYETLTITQAVIFINTRRKVDWLTEKMHARDFTVSAMHGDMDQKERDVIMREFRSGSSRVLITTDLLNRSRWTVWP

SEQ ID NO: 45548 - protein, 407 aa, Homo sapiens
MSGGSADYNREHGGPEGMDPDGVIESNWNEIVDNFDDMNLKESLLRGIYAYGFEKPSAIQQRAIIPCIKGYDVIAQAQSGTGKTATFAISILQQLEIEFKETQALVLAPTRELAQQIQKVILALGDYMGATCHACIGGTNVRNEMQKLQAEAPHIVVGTPGRVFDMLNRRYLSPKWIKMFVLDEADEMLSRGFKDQIYEIFQKLNTSIQVVLLSATMPTDVLEVTKKFMRDPIRILVKKEELTLEGIKQFYINVEREEWKLDTLCDLYETLTITQAVIFLNTRRKVDWLTEKMHARDFTVSALHGDMDQKERDVIMREFRSGSSRVLITTDLLARGIDVQQVSLVINYDLPTNRENYIHRIGRGGRFGRKGVAINFVTEEDKRILRDIETFYNTTVEEMPMNVADLI

SEQ ID NO: 45549 - protein, 312 aa, Homo sapiens
MLTVLRSLPLFSRELLFPVLKIQKVILALGDYMGATCHACIGGTNVRNEMQKLQAEAPHIVVGTPGRVFDMLNRRYLSPKWIKMFVLDEADEMLSRGFKDQIYEIFQKLNTSIQVVLLSATMPTDVLEVTKKFMRDPIRILVKKEELTLEGIKQFYINVEREEWKLDTLCDLYETLTITQAVIFLNTRRKVDWLTEKMHARDFTVSALHGDMDQKERDVIMREFRSGSSRVLITTDLLARGIDVQQVSLVINYDLPTNRENYIHRIGRGGRFGRKGVAINFVTEEDKRILRDIETFYNTTVEEMPMNVADLI

SEQ ID NO: 45550 - protein, 408 aa, Homo sapiens
MSGGSADYNSREHGGPEGMDPDGVIESNWNEIVDNFDDMNLKESLLRGIYAYGFEKPSAIQQRAIIPCIKGYDVIAQAQSGTGKTATFAISILQQLEIEFKETQALVLAPTRELAQQIQKVILALGDYMGATCHACIGGTNVRNEMQKLQAEAPHIVVGTPGRVFDMLNRRYLSPKWIKMFVLDEADEMLSRGFKDQIYEIFQKLNTSIQVVLLSATMPTDVLEVTKKFMRDPIRILVKKEELTLEGIKQFYINVEREEWKLDTLCDLYETLTITQAVIFLNTRRKVDWLTEKMHARDFTVSALHGDMDQKERDVIMREFRSGSSRVLITTDLLARGIDVQQVSLVINYDLPTNRENYIHRIGRGGRFGRKGVAINFVTEEDKRILRDIETFYNTTVEEMPMNVADLI

SEQ ID NO: 45551 - protein, 57 aa, Homo sapiens
MSGGSADYNREHGGPEGMDPDGVIESNWNEIVDNFDDMNLKESLLRGIYAYGFEKPS

SEQ ID NO: 45552 - protein, 98 aa, Homo sapiens
MSGGSADYNREHGGPEGMDPDGVIESNWNEIVDNFDDMNLKESLLRGIYAYGFEKPSAIQQRAIIPCIKGYDVIAQAQSGTGKTATFAISILQQLEIE

SEQ ID NO: 45553 - protein, 120 aa, Homo sapiens
MSSSAGSGHQPSQSRAIPTRTVAISDAAQLPHDYCTTPGGTLFSTTPGGTRIIYDRKFLLDRRNSPMAQTPPCHLPNIPGVTSPGTLIEDSKVEVNNLNNLNNHDRKHAVGDDAQFEMDI

SEQ ID NO: 45554 - protein, 245 aa, Homo sapiens
MNNKFDALKDDDSGDHDQNEENSTQKDGEKEKTERDKNQSSSKRKAVVPGPAEHPLQYNYTFWYSRRTPGRPTSSQSYEQNIKQIGTFASVEQFWRFYSHMVRPGDLTGHSDFHLFKEGIKPMWEDDANKNGGKWIIRLRKGLASRCWENLILAMLGEQFMVGEEICGAVVSVRFQEDIISIWNKTASDQATTARIRDTLRRVLNLPPNTIMEYKTHTDSIKMPGRLGPQRLLFQNLWKPRLNVP

SEQ ID NO: 45555 - protein, 234 aa, Homo sapiens
MNNKFDALKDDDSGDHDQNEENSTQKDGEKEKTERDKNQSSSKRKAVVPGPAEHPLQYNYTFWYSRRTPGRPTSSQSYEQNIKQIGTFASVEQFWRFYSHMVRPGDLTGHSDFHLFKEGIKPMWEDDANKNGGKWIIRLRKGLASRCWENLILAMLGEQFMVGEEICGAVVSVRFQEDIISIWNKTASDQATTARIRDTLRRVLNLPPNTIMEYKTHTDSIKDNSSFRNTKITL

SEQ ID NO: 45556 - protein, 188 aa, Homo sapiens
MNNKFDALKDDDSGDHDQNEENSTQKDGEKEKTERDKNQSSSKRKVEQFWRFYSHMVRPGDLTGHSDFHLFKEGIKPMWEDDANKNGGKWIIRLRKGLASRCWENLILAMLGEQFMVGEEICGAVVSVRFQEDIISIWNKTASDQATTARIRDTLRRVLNLPPNTIMEYKTHTDSIKYVLGGYGRTCP

SEQ ID NO: 45557 - protein, 118 aa, Homo sapiens
MRGERRPLWEEESNAKGGVWKMKVPKDSTSTVWKELLLATIGEQFTDCAAADDEVIGVSVSVRDREDVVQVWNVNASLVGEATVLEKIYELLPHITFKAVFYKPHEEHHAFEGGRGKH

SEQ ID NO: 45558 - protein, 118 aa, Homo sapiens; identical to SEQ ID NO: 45557

SEQ ID NO: 45559 - protein, 118 aa, Homo sapiens; identical to SEQ ID NO: 45557

SEQ ID NO: 45560 - protein, 224 aa, Homo sapiens
MALPPAAAPPAGAREPPGSRAAAAAAAPEPPLGLQQLSALQPEPGGVPLHSSWTFWLDRSLPGATAAECASNLKKIYTVQTVQIFWSVYNNIPPVTSLPLRCSYHLMRGERRPLWEEESNAKGGVWKMKVPKDSTSTVWKELLLATIGEQFTDCAAADDEVIGVSVSVRDREDVVQVWNVNASLVGEATVLEKIYELLPHITFKAVFYKPHEEHHAFEGGRGKH

SEQ ID NO: 45561 - protein, 118 aa, Homo sapiens; identical to SEQ ID NO: 45557

SEQ ID NO: 45562 - protein, 44 aa, Homo sapiens
MRGERRPLWEEESNAKGGVWKMKVPKDSTSTVWKELLLATIGEQ

SEQ ID NO: 45563 - protein, 51 aa, Homo sapiens
MRGERRPLWEEESNAKGGVWKMKVPKDSTSTVWKELLLATIGEQFTDCAAA

SEQ ID NO: 45564 - protein, 93 aa, Homo sapiens
MRGERRPLWEEESNAKGGVWKMKVPKDSTSTVWKELLLATIGEQFTDCAAADDEVIGVSVSVRDREDVVQVWNVNASLVGEATVLEKIYELLP

SEQ ID NO: 45565 - protein, 985 aa, Homo sapiens
MDRRSMGETESGDAFLDLKKPPASKCPHRYTKEELLDIKELPHSKQRPSCLSEKYDSDGVWDPEKWHASLYPASGRSSPVESLKKELDTDRPSLVRRIVDPRERVKEDDLDVVLSPQRRSFGGGCHVTAAVSSRRSGSPLEKDSDGLRLLGGRRIGSGRIISARTFEKDHRLSDKDLRDLRDRDRERDFKDKRFRREFGDSKRVFGERRRNDSYTEEEPEWFSAGPTSQSETIELTGFDDKILEEDHKGRKRTRRRTASVKEGIVECNGGVAEEDEVEVILAQEPAADQEVPRDAVLPEQSPGDFDFNEFFNLDKVPCLASMIEDVLGEGSVSASRFSRWFSNPSRSGSRSSSLGSTPHEELERLAGLEQAILSPGQNSGNYFAPIPLEDHAENKVDILEMLQKAKVDLKPLLSSLSANKEKLKESSHSGVVLSVEEVEAGLKGLKVDQQVKNSTPFMAEHLEETLSAVTNNRQLKKDGDMTAFNKLVSTMKASGTLPSQPKVSRNLESHLMSPAEIPGQPVPKNILQELLGQPVQRPASSNLLSGLMGSLEPTTSLLGQRAPSPPLSQVFQTRAASADYLRPRIPSPIGFTPGPQQLLGDPFQGMRKPMSPITAQMSQLELQQAALEGLALPHDLAVQAANFYQPGFGKPQVDRTRDGFRNRQQRVTKSPAPVHRGNSSSPAPAASITSMLSPSFTPTSVIRKMYESKEKSKEEPASGKAALGDSKEDTQKASEENLLSSSSVPSADRDSSPTTNSKLSALQRSSCSTPLSQANRYTKEQDYRPKATGRKTPTLASPVPTTPFLRPVHQVPLVPHVPMVRPAHQLHPGLVQRMLAQGVHPQHLPSLLQTGVLPPGMDLSHLQGISGPILGQPFYPLPAASHPLLNPRPGTPLHLAMVQQQLQRSVLHPPGSGSHAAAVSVQTTPQNVPSRSGLPHMHSQLEHRPSQRSSSPVGLAKWFGSDVLQQPLPSMPAKVISVDELEYRQ

SEQ ID NO: 45566 - protein, 811 aa, Homo sapiens
MDRRSMGETESGDAFLDLKKPPASKCPHRYTKEELLDIKELPHSKQRPSCLSEKYDSDGVWDPEKWHASLYPASGRSSPVESLKKELDTDRPSLVRRIVGIVECNGGVAEEDEVEVILAQEPAADQEVPRDAVLPEQSPGDFDFNEFFNLDKVPCLASMIEDVLGEGSVSASRFSRWFSNPSRSGSRSSSLGSTPHEELERLAGLEQAILSPGQNSGNYFAPIPLEDHAENKVDILEMLQKAKVDLKPLLSSLSANKEKLKESSHSGVVLSVEEVEAGLKGLKVDQQVKNSTPFMAEHLEETLSAVTNNRQLKKDGDMTAFNKLVSTMKRNLESHLMSPAEIPGQPVPKNILQELLGQPVQRPASSNLLSGLMGSLEPTTSLLGQRAPSPPLSQVFQTRAASADYLRPRIPSPIGFTPGPQQLLGDPFQGMRKPMSPITAQQMSQLELQQAALEGLALPHDLAVQAANFYQPGFGKPQVDRTRDGFRNRQQRVTKSPAPVHRGNSSSPAPAASITSMLSPSFTPTSVIRKMYESKEKSKEEPASGKAALGDSKEDTQKASEENLLSSSSVPSADRDSSPTTNSKLSALQRSSCSTPLSQANRYTKEQDYRPKATGRKTPTLASPVPTTPFLRPVHQVPLVPHVPMVRPAHQLHPGLVQRMLAQGVHPQHLPSLLQTGVLPPGMDLSHLQGISGPILGQPFYPLPAASHPLLNPRPGTPLHLAMVQQQLQRSVLHPPGSGSHAAAVSVQTTPQNVPSRSGLPHMHSQLEHRPSQRSSSPVGLAKWFGSDVLQQPLPSMPAKVISVDELEYRQ

SEQ ID NO: 45567 - protein, 640 aa, Homo sapiens
MIEDVLGEGSVSASRFSRWFSNPSRSGSRSSSLGSTPHEELERLAGLEQAILSPGQNSGNYFAPIPLEDHAENKVDILEMLQKAKVDLKPLLSSLSANKEKLKESSHSGVVLSVEEVEAGLKGLKVDQQVKNSTPFMAEHLEETLSAVTNNRQLKKDGDMTAFNKLVSTMKASGTLPSQPKVSELLGQPVQRPASSNLLSGLMGSLEPTTSLLGQRAPSPPLSQVFQTRAASADYLRPRIPSPIGFTPGPQQLLGDPFQGMRKPMSPITAQMSQLELQQAALEGLALPHDLAVQAANFYQPGFGKPQVDRTRDGFRNRQQRVTKSPAPVHRGNSSSPAPAASITSMLSPSFTPTSVIRKMYESKEKSKEEPASGKAALGDSKEDTQKASEENLLSSSSVPSADRDSSPTTNSKLSALQRSSCSTPLSQANRYTKEQDYRPKATGRKTPTLASPVPTTPFLRPVHQVPLVPHVPMVRPAHQLHPGLVQRMLAQGVHPQHLPSLLQTGVLPPGMDLSHLQGISGPILGQPFYPLPAASHPLLNPRPGTPLHLAMVQQQLQRSVLHPPGSGSHAAAVSVQTTPQNVPSRSGLPHMHSQLEHRPSQRSSSPVGLAKWFGSDVLQQPLPSMPAKVISVDELEYRQ

SEQ ID NO: 45568 - protein, 63 aa, Homo sapiens
MDRRSMGETESGDAFLDLKKPPASKCPHRYTKEELLDIKELPHSKQRPSCLSEKYDSDGVWDP

SEQ ID NO: 45569 - protein, 63 aa, Homo sapiens; identical to SEQ ID NO: 45568

SEQ ID NO: 45570 - protein, 961 aa, Homo sapiens
MDRRSMGETESGDAFLDLKKPPASKCPHRYTKEELLDIKELPHSKQRPSCLSEKYDSDGVWDPEKWHASLYPASGRSSPVESLKKELDTDRPSLVRRIVDPRERVKEDDLDVVLSPQRRSFGGGCHVTAAVSSRRSGSPLEKDSDGLRLLGGRRIGSGRIISARTFEKDHRLSDKDLRDLRDRDRERDFKDKRFRREFGDSKRVFGERRRNDSYTEEEPEWFSAGPTSQSETIELTGFDDKILEEDHKGRKRTRRRTASVKEGIVECNGGVAEEDEVEVILAQEPAADQEVPRDAVLPEQSPGDFDFNEFFNLDKVPCLASMIEDVLGEGSVSASRFSRWFSNPSRSGSRSSSLGSTPHEELERLAGLEQAILSPGQNSGNYFAPIPLEDHAENKVDILEMLQKAKVDLKPLLSSLSANKEKLKESSHSGVVLSVEEVEAGLKGLKVDQQVKNSTPFMAEHLEETLSAVTNNRQLKKDGDMTAFNKLVSTMKASGTLPSQPKVSELLGQPVQRPASSNLLSGLMGSLEPTTSLLGQRAPSPPLSQVFQTRAASADYLRPRIPSPIGFTPGPQQLLGDPFQGMRKPMSPITAQMSQLELQQAALEGLALPHDLAVQAANFYQPGFGKPQVDRTRDGFRNRQQRVTKSPAPVHRGNSSSPAPAASITSMLSPSFTPTSVIRKMYESKEKSKEEPASGKAALGDSKEDTQKASEENLLSSSSVPSADRDSSPTTNSKLSALQRSSCSTPLSQANRYTKEQDYRPKATGRKTPTLASPVPTTPFLRPVHQVPLVPHVPMVRPAHQLHPGLVQRMLAQGVHPQHLPSLLQTGVLPPGMDLSHLQGISGPILGQPFYPLPAASHPLLNPRPGTPLHLAMVQQQLQRSVLHPPGSGSHAAAVSVQTTPQNVPSRSGLPHMHSQLEHRPSQRSSSPVGLAKWFGSDVLQQPLPSMPAKVISVDELEYRQ

SEQ ID NO: 45571 - protein, 985 aa, Homo sapiens; identical to SEQ ID NO: 45565

SEQ ID NO: 45572 - protein, 436 aa, Homo sapiens
MDRRSMGETESGDAFLDLKKPPASKCPHRYTKEELLDIKELPHSKQRPSCLSEKYDSDGVWDPEKWHASLYPASGRSSPVESLKKELDTDRPSLVRRIVDPRERVKEDDLDVVLSPQRRSFGGGCHVTAAVSSRRSGSPLEKDSDGLRLLGGRRIGSGRIISARTFEKDHRLSDKDLRDLRDRDRERDFKDKRFRREFGDSKRVFGERRRNDSYTEEEPEWFSAGPTSQSETIELTGFDDKILEEDHKGRKRTRRRTASVKEGIVECNGGVAEEDEVEVILAQEPAADQEVPRDAVLPEQSPGDFDFNEFFNLDKVPCLASMIEDVLGEGSVSASRFSRWFSNPSRSGSRSSSLGSTPHEELERLAGLEQAILSPGQNSGNYFAPIPLEDHAENKVDILEMLQKAKVDLKPLLSSLSANKEKLKESLRLSPKKKKK

SEQ ID NO: 45573 - protein, 188 aa, Homo sapiens
MDRRSMGETESGDAFLDLKKPPASKCPHRYTKEELLDIKELPHSKQRPSCLSEKYDSDGVWDPEKWHASLYPASGRSSPVESLKKELDTDRPSLVRRIVDPRERVKEDDLDVVLSPQRRSFGGGCHVTAAVSSRRSGSPLEKDSDGLRLLGGRRIGSGRIISARTFEKDHRLSDKDLRDLRDRDRERD

SEQ ID NO: 45574 - protein, 248 aa, Homo sapiens
MADFDTYDDRAYSSFGGGRGSRGSAGGHGSRSQKELPTEPPYTAYVGNLPFNTVQGDIDAIFKDLSIRSVRLVRDKDTDKFKGFCYVEFDEVDSLKEALTYDGALLGDRSLRVDIAEGRKQDKGGFGFRKGGPDDRGMGSSRESRGGWDSRDDFNSGFRDDFLGGRGGSRPGDRRTGPPMGSRFRDGPPLRGSNMDFREPTEEERAQRPRLQLKPRTVATPLNQVANPNSAIFGGARPREEVVQKEQE

SEQ ID NO: 45575 - protein, 228 aa, Homo sapiens
MADFDTYDDRAYSSFGGGRGSRGSAGGHGSRSQKELPTEPPYTAYVGNLPFNTVQGDIDAIFKDLSIRSVRLVRDKDTDKFKGFCYVEFDEVDSLKEALTYDGALLGDRSLRVDIAEGRKQDKGGFGFRKGGPDDRGFRDDFLGGRGGSRPGDRRTGPPMGSRFRDGPPLRGSNMDFREPTEEERAQRPRLQLKPRTVATPLNQVANPNSAIFGGARPREEVVQKEQE

SEQ ID NO: 45576 - protein, 431 aa, Homo sapiens
MSVNVNRSVSDQFYRYKMPRLIAKVEGKGNGIKTVIVNMVDVAKALNRPPTYPTKYFGCELGAQTQFDVKNDRYIVNGSHEANKLQDMLDGFIKKFVLCPECENPETDLHVNPKKQTIGNSCKACGYRGMLDTHHKLCTFILKNPPENSDSGTGKKEKEKKNRKGKDKENGSVSSSETPPPPPPPNEINPPPHTMEEEEDDDWGEDTTEEAQRRRMDEISDHAKVLTLSDDLERTIEERVNILFDFVKKKKEEGVIDSSDKEIVAEAERLDVKAMGPLVLTEVLFNEKIREQIKKYRRHFLRFCHNNKKAQRYLLHGLECVVAMHQAQLISKIPHILKEMYDADLLEEEVIISWSEKASKKYVSKELAKEIRVKAEPFIKWLKEAEEESSGGEEEDEDENIEVVYSKAASVPKVETVKSDNKDDDIDIDAI

SEQ ID NO: 45577 - protein, 431 aa, Homo sapiens; identical to SEQ ID NO: 45576

SEQ ID NO: 45578 - protein, 200 aa, Homo sapiens
MSVNVNRSVSDQFYRYKMPRLIAKVEGKGNGIKTVIVNMVDVAKALNRPPTYPTKYFGCELGAQTQFDVKNDRYIVNGSHEANKLQDMLDGFIKKFVLCPECENPETDLHVNPKKQTIGNSCKACGYRGMLDTHHKLCTFILKNPPENSDSGTGKKEKEKKNRKGKDKENGSVSSSETPPPPPPPNEINPPPHTMEEEED

SEQ ID NO: 45579 - protein, 146 aa, Homo sapiens
MSVNVNRSVSDQFYRYKMPRLIAKVEGKGNGIKTVIVNMVDVAKALNRPPTYPTKYFGCELGAQTQFDVKNDRYIVNGSHEANKLQDMLDGFIKKFVLCPECENPETDLHVNPKKQTIGNSCKACGYRGMLDTHHKLCTFILKNPP

SEQ ID NO: 45580 - protein, 431 aa, Homo sapiens; identical to SEQ ID NO: 45576

SEQ ID NO: 45581 - protein, 69 aa, Homo sapiens
MSVNVNRSVSDQFYRYKMPRLIAKVEGKGNGIKTVIVNMVDVAKALNRPPTYPTKYFGCELGAQTQFDV

SEQ ID NO: 45582 - protein, 109 aa, Homo sapiens
MSVNVNRSVSDQFYRYKMPRLIAKVEGKGNGIKTVIVNMVDVAKALNRPPTYPTKYFGCELGAQTQFDVKNDRYIVNGSHEANKLQDMLDGFIKKFVLCPECENPETDL

SEQ ID NO: 45583 - protein, 101 aa, Homo sapiens
MSVNVNRSVSDQFYRYKMPRLIAKVEGKGNGIKTVIVNMVDVAKALNRPPTYPTKYFGCELGAQTQFDVKNDRYIVNGSHEANKLQDMLDGFIKKFVLCPE

SEQ ID NO: 45584 - protein, 51 aa, Homo sapiens
MSVNVNRSVSDQFYRYKMPRLIAKVEGKGNGIKTVIVNMVDVAKALNRPPT

SEQ ID NO: 45585 - protein, 109 aa, Homo sapiens; identical to SEQ ID NO: 45582

SEQ ID NO: 45586 - protein, 184 aa, Homo sapiens
MCGTGGTDSKTRRPPHRASFLKRLESKPLKMADDLDFETGDAGASATFPMQCSALRKNGFVVLKGRPCKIVEMSTSKTGKHGHAKVHLVGIDIFTGKKYEDICPSTHNMDVPNIKRNDFQLIGIQDGYLSLLQDSGEVREDLRLPEGDLGKEIEQKYDCGEEILITVLSAMTEEAAVAIKAMAK

SEQ ID NO: 45587 - protein, 154 aa, Homo sapiens
MADDLDFETGDAGASATFPMQCSALRKNGFVVLKGRPCKIVEMSTSKTGKHGHAKVHLVGIDIFTGKKYEDICPSTHNMDVPNIKRNDFQLIGIQDGYLSLLQDSGEVREDLRLPEGDLGKEIEQKYDCGEEILITVLSAMTEEAAVAIKAMAK

SEQ ID NO: 45588 - protein, 214 aa, Homo sapiens
MTWTSRQEMQGPQPPSQCSAQHYVRMALWCSKAGHVRSSRCLLRRLASTATPRLEFHLRILPSPCLQYLWRSQQQAANSADFPLTLLLLSDCFCLALSLHTHSDNYTCSPVFSLFCGYPSVPASFSGSPSVSPALCQSLQFIGLYALAIQLLLPYSWFSLFLSSLEPLLSGCFHHVAQGFSNSTPSPGGTPASILSFQVTLLLRSPVLAFPLEL

SEQ ID NO: 45589 - protein, 154 aa, Homo sapiens; identical to SEQ ID NO: 45587

SEQ ID NO: 45590 - protein, 154 aa, Homo sapiens; identical to SEQ ID NO: 45587

SEQ ID NO: 45591 - protein, 153 aa, Homo sapiens
MADEIDFTTGDAGASSTYPMQCSALRKNGFVVLKGRPCKIVEMSTSKTGKHGHAKVHLVGIDIFTGKKYEDICPSTHNMDVPNIKRNDYQLICIQDGYLSLLTETGEVREDLKLPEGELGKEIEGKYNAGEDVQVSVMCAMSEEYAVAIKPCK

SEQ ID NO: 45592 - protein, 245 aa, Homo sapiens
MAVRASFENNCEIGCFAKLTNTYCLVAIGGSENFYSVFEGELSDTIPVVHASIAGCRIIGRMCVGNRHGLLVPNNTTDQELQHIRNSLPDTVQIRRVEERLSALGNVTTCNDYVALVHPDLDRETEEILADVLKVEVFRQTVADQVLVGSYCVFSNQGGLVHPKTSIEDQDELSSLLQVPLVAGTVNRGSEVIAAGMVVNDWCAFCGLDTTSTELSVVESVFKLNEAQPSTIATSMRDSLIDSLT

SEQ ID NO: 45593 - protein, 226 aa, Homo sapiens
MAVRASFENNCEIGCFAKLTNTYCLVAIGGSENFYRCGGSPGAYGGGEACAGVKSSGSGRVPAPLPRHHRVHVPTVCSRASSPIPSPWCTRLSPAAASSGACVWETEEILADVLKVEVFRQTVADQVLVGSYCVFSNQGGLVHPKTSIEDQDELSSLLQVPLVAGTVNRGSEVIAAGMVVNDWCAFCGLDTTSTELSVVESVFKLNEAQPSTIATSMRDSLIDSLT

SEQ ID NO: 45594 - protein, 245 aa, Homo sapiens; identical to SEQ ID NO: 45592

SEQ ID NO: 45595 - protein, 108 aa, Homo sapiens
MAVRASFENNCEIGCFAKLTNTYCLVAIGGSENFYSVFEGELSDTIPVVHASIAGCRIIGRMCVGNRHGLLVPNNTTDQELQHIRNSLPDTVQIRRVEERLSALGNVT

SEQ ID NO: 45596 - protein, 437 aa, Homo sapiens
MADDPSAADRNVEIWKIKKLIKSLEAARGNGTSMISLIIPPKDQISRVAKMLADEFGTASNIKSRVNRLSVLGAITSVQQRLKLYNKVPPNGLVVYCGTIVTEEGKEKKVNIDFEPFKPINTSLYLCDNKFHTEALTALLSDDSKFGFIVIDGSGALFGTLQGNTREVLHKFTVDLPKKHGRGGQSALRFARLRMEKRHNYVRKVAETAVQLFISGDKVNVAGLVLAGSADFKTELSQSDMFDQRLQSKVLKLVDISYGGENGFNQAIELSTEVLSNVKFIQEKKLIGRYFDEISQDTGKYCFGVEDTLKALEMGAVEILIVYENLDIMRYVLHCQGTEEEKILYLTPEQEKDKSHFTDKETGQEHELIESMPLLEWFANNYKKFGATLEIVTDKSQEGSQFVKGFGGIGGILRYRVDFQGMEYQGGDDEFFDLDDY

SEQ ID NO: 45597 - protein, 404 aa, Homo sapiens
MISLIIPPKDQISRVAKMLADEFGTASNIKSRVNRLSVLGAITSVQQRLKLYNKVPPNGLVVYCGTIVTEEGKEKKVNIDFEPFKPINTSLYLCDNKFHTEALTALLSDDSKFGFIVIDGSGALFGTLQGNTREVLHKFTVDLPKKHGRGGQSALRFARLRMEKRHNYVRKVAETAVQLFISGDKVNVAGLVLAGSADFKTELSQSDMFDQRLQSKVLKLVDISYGGENGFNQAIELSTEVLSNVKFIQEKKLIGRYFDEISQDTGKYCFGVEDTLKALEMGAVEILIVYENLDIMRYVLHCQGTEEEKILYLTPEQEKDKSHFTDKETGQEHELIESMPLLEWFANNYKKFGATLEIVTDKSQEGSQFVKGFGGIGGILRYRVDFQGMEYQGGDDEFFDLDDY

SEQ ID NO: 45598 - protein, 423 aa, Homo sapiens
MKQDVLNCTEGPIHSNGTSMISLIIPPKDQISRVAKMLADEFGTASNIKSRVNRLSVLGAITSVQQRLKLYNKVPPNGLVVYCGTIVTEEGKEKKVNIDFEPFKPINTSLYLCDNKFHTEALTALLSDDSKFGFIVIDGSGALFGTLQGNTREVLHKFTVDLPKKHGRGGQSALRFARLRMEKRHNYVRKVAETAVQLFISGDKVNVAGLVLAGSADFKTELSQSDMFDQRLQSKVLKLVDISYGGENGFNQAIELSTEVLSNVKFIQEKKLIGRYFDEISQDTGKYCFGVEDTLKALEMGAVEILIVYENLDIMRYVLHCQGTEEEKILYLTPEQEKDKSHFTDKETGQEHELIESMPLLEWFANNYKKFGATLEIVTDKSQEGSQFVKGFGGIGGILRYRVDFQGMEYQGGDDEFFDLDDY

SEQ ID NO: 45599 - protein, 407 aa, Homo sapiens
MESRKDMVVFLDGGQLGTLVGKRVSNLSEAVGSPLPEPPEKMVPRGCLSPRAVPPATRERGGGGPEEEPVDGLAGSAAGPGAEPQVAGAAMLGPGPPAPSVDSLSGQGQPSSSDTESDFYEEIEVSCTPDCATGNAEYQHSKGSGSEALVGSPNGGSETPKSNGGSGGGGSQGTLACSASDQMRRYRTAFTREQIARLEKEFYRENYVSRPRRCELAAALNLPETTIKVWFQNRRMKDKRQRLAMTWPHPADPAFYTYMMSHAAAAGGLPYPFPSHLPLPYYSPVGLGAASAASAAASPFSGSLRPLDTFRVLSQPYPRPELLCAFRHPPLYPGPAHGLGASAGGPCSCLACHSGPANGLAPRAAAASDFTCASTSRSDSFLTFAPSVLSKASSVALDQREEVPLTR

SEQ ID NO: 45600 - protein, 225 aa, Homo sapiens
MRRYRTAFTREQIARLEKEFYRENYVSRPRRCELAAALNLPETTIKVWFQNRRMKDKRQRLAMTWPHPADPAFYTYMMSHAAAAGGLPYPFPSHLPLPYYSPVGLGAASAASAAASPFSGSLRPLDTFRVLSQPYPRPELLCAFRHPPLYPGPAHGLGASAGGPCSCLACHSGPANGLAPRAAAASDFTCASTSRSDSFLTFAPSVLSKASSVALDQREEVPLTR

SEQ ID NO: 45601 - protein, 476 aa, Homo sapiens
MMERIRKEMILMERGLHSPTAGKRFSNLSNSAGNAVLEALENSQHPARLSPRLPSAPLHSALGELPAKGKFEIDTLFNLQHTGSESTVSSEISSAAESRKKPGHYSEAAAEADMSSDVEVGCSALRSPGGLGAAQLKENNGKGYAESGSAAGTTTSASGSGLGSLHGGSGGSGGSAALGGSGSGADQVRRYRTAFTREQIARLEKEFYRENYVSRPRRCELAAALNLPETTIKVWFQNRRMKDKRQRLAMSWPHPADPSFYTYMMTHAAATGSLPYPFHSHVPLHYYPHVGVTAAAAAAAASGAAAAASSPFATSIRPLDTFRALSHPYSRPELLCSFRHPGLYQAPAAAAGLNSAASAAAAAAAAAAAASSAAAAGAPPSGGSAPCSCLSCHSSQSAAAAAAAAAAALGSRGGGGGGGGGGGGGGGGAGAGGGSDFGCSAAAPRSESGFLPYSAAVLSKTAVSPPDQRDEAPLTR

SEQ ID NO: 45602 - protein, 926 aa, Homo sapiens
MSRRRKHDDSPSPKKTPHKTVAAEECGSVVEPGRRRLRSARGSWPCGAREGPPGPVRQREQPPTAALCSKSNPEERYETPKRALKMDSLSSSFSSPNDPDGQNDIFWDQNSPLTKQLGKGRKKQIYTTDSDEISHIVNRIAPQDEKPTTNSMLDMWIGETAIPCTPSVAKGKSRAKISCTKLKTQSQEEELMKLAKQFDKNMEELDVIQEQNKRNYDFTQMISETEILSNYKDNIQMWSLHNIVPEIDNATKKPIKGNTKISVANNQNSSQKPFDQIAEAAFNAIFDGSTQKCSGQLSQELPEAFWSTSNTTFVKTNALKEEKIITNETLVIEKLSNKTPRSLSSQVDTPIMTKSCVTSCTKEPETSNKYIDAFTTSDFEDDWENLLGSEPFAMQNIDMPELFPSKTAHVTDQKEICTFNSKTVKNTSRANTSPDARLGDSKVLQDLSSKTYDRELIDAEYRFSPNSNKSNKLSTGNKMKFENSSNKIVIQDEIQNCIVTSNLTKIKEDILTNSTEASERKSALNTRYSNEQKNKCILNQSIKAPVNTDLFGSANLGSKTSVSNPNQTSASKVGSFFDDWNDPSFANEIIKACHQLDNTWEADDVDDDLLYQACDDIERLTQQQDIRKDSKTSESICEINNNSEHGAKLTQQQDIRKDSKTSESICEINNNSEHGAKNMFAISKQGSNLVQSKHLNPGSISVQTSLTNSSQIDKPMKMEKGEMYGNSPRFLGATNLTMYSKISNCQINNLHVSYTNTDVPIQVNSSKLVLPGSSSLNVTSDHMNTEITTYKKKLSTNQPCHKTVTDEAQSNLNTTVGFSKFTFTRMKNSQILSQFNQNCITGSMSDTKITQGVEKKKGVNPLLEEAVGQQSLVKLSESLKQSSKEEEEKNRKCSPEEIQRKRQEALVRRMAKARASSVNAAPTSFL

SEQ ID NO: 45603 - protein, 782 aa, Homo sapiens
MGKRDRADRDKKKSRKRHYEDEEDDEEDAPGNDPQEAVPSAAGKQVDESGTKVDEYGAKDYRLQMPLKDDHTSRPLWVAPDGHIFLEAFSPVYKYAQDFLVAIAEPVCRPTHVHEYKLTAYSLYAAVSVGLQTSDITEYLRKLSKTGVPDGIMQFIKLCTVSYGKVKLVLKHNRYFVESCHPDVIQHLLQDPVIRECRLRNSEGEATELITETFTSKSAISKTAESSGGPSTSRVTDPQGKSDIPMDLFDFYEQMDKDEEEEEETQTVSFEVKQEMIEELQKRCIHLEYPLLAEYDFRNDSVNPDINIDLKPTAVLRPYQEKSLRKMFGNGRARSGVIVLPCGAGKSLVGVTAACTVRKRCLVLGNSAVSVEQWKAQFKMWSTIDDSQICRFTSDAKDKPIGCSVAISTYSMLGHTTKRSWEAERVMEWLKTQEWGLMILDEVHTIPAKMFRRVLTIVQAHCKLGLTATLVREDDKIVDLNFLIGPKLYEANWMELQNNGYIAKVQCAEVWCPMSPEFYREYVAIKTKKRILLYTMNPNKFRACQFLIKFHERRNDKIIVFADNVFALKEYAIRLNKPYIYGPTSQGERMQILQNFKHNPKINTIFISKVGDTSFDLPEANVLIQISSHGGSRRQEAQRLGRVLRAKKGMVAEEYNAFFYSLVSQDTQEMAYSTKRQRFLVDQGYSFKVITKLAGMEEEDLAFSTKEEQQQLLQKVLAATDLDAEEEVVAGEFGSRSSQASRRFGTMSSMSGADDTVYMEYHSSRSKAPSKHVHPLFKRFRK

SEQ ID NO: 45604 - protein, 718 aa, Homo sapiens
MPLKDDHTSRPLWVAPDGHIFLEAFSPVYKYAQDFLVAIAEPVCRPTHVHEYKLTAYSLYAAVSVGLQTSDITEYLRKLSKTGVPDGIMQFIKLCTVSYGKVKLVLKHNRYFVESCHPDVIQHLLQDPVIRECRLRNSEGEATELITETFTSKSAISKTAESSGGPSTSRVTDPQGKSDIPMDLFDFYEQMDKDEEEEEETQTVSFEVKQEMIEELQKRCIHLEYPLLAEYDFRNDSVNPDINIDLKPTAVLRPYQEKSLRKMFGNGRARSGVIVLPCGAGKSLVGVTAACTVRKRCLVLGNSAVSVEQWKAQFKMWSTIDDSQICRFTSDAKDKPIGCSVAISTYSMLGHTTKRSWEAERVMEWLKTQEWGLMILDEVHTIPAKMFRRVLTIVQAHCKLGLTATLVREDDKIVDLNFLIGPKLYEANWMELQNNGYIAKVQCAEVWCPMSPEFYREYVAIKTKKRILLYTMNPNKFRACQFLIKFHERRNDKIIVFADNVFALKEYAIRLNKPYIYGPTSQGERMQILQNFKHNPKINTIFISKVGDTSFDLPEANVLIQISSHGGSRRQEAQRLGRVLRAKKGMVAEEYNAFFYSLVSQDTQEMAYSTKRQRFLVDQGYSFKVITKLAGMEEEDLAFSTKEEQQQLLQKVLAATDLDAEEEVVAGEFGSRSSQASRRFGTMSSMSGADDTVYMEYHSSRSKAPSKHVHPLFKRFRK

SEQ ID NO: 45605 - protein, 1250 aa, Homo sapiens
MEASRRFPEAEALSPEQAAHYLRYVKEAKEATKNGDLEEAFKLFNLAKDIFPNEKVLSRIQKIQEALEELAEQGDDEFTDVCNSGLLLYRELHNQLFEHQKEGIAFLYSLYRDGRKGGILADDMGLGKTVQIIAFLSGMFDASLVNHVLLIMPTNLINTWVKEFIKWTPGMRVKTFHGPSKDERTRNLNRIQQRNGVIITTYQMLINNWQQLSSFRGQEFVWDYVILDEAHKIKTSSTKSAICARAIPASNRLLLTGTPIQNNLQELWSLFDFACQGSLLGTLKTFKMEYENPITRAREKDATPGEKALGFKISENLMAIIKPYFLRRTKEDVQKKKSSNPEARLNEKNPDVDAICEMPSLSRKNDLIIWIRLVPLQEEIYRKFVSLDHIKELLMETRSPLAELGVLKKLCDHPRLLSARACCLLNLGTFSAQDGNEGEDSPDVDHIDQVTDDTLMEESGKMIFLMDLLKRLRDEGHQTLVFSQSRQILNIIERLLKNRHFKTLRIDGTVTHLLEREKRINLFQQNKDYSVFLLTTQVGGVGLTLTAATRVVIFDPSWNPATDAQAVDRVYRIGQKENVVVYRLITCGTVEEKIYRRQVFKDSLIRQTTGEKKNPFRYFSKQELRELFTIEDLQNSVTQLQLQSLHAAQRKSDIKLDEHIAYLQSLGIAGISDHDLMYTCDLSVKEELDVVEESHYIQQRVQKAQFLVEFESQNKEFLMEQQRTRNEGAWLREPVFPSSTKKKCPKLNKPQPQPSPLLSTHHTQEEDISSKMASVVIDDLPKEGEKQDLSSIKVNVTTLQDGKGTGSADSIATLPKGFGSVEELCTNSSLGMEKSFATKNEAVQKETLQEGPKQEALQEDPLESFNYVLSKSTKADIGPNLDQLKDDEILRHCNPWPIISITNESQNAESNVSIIEIADDLSASHSALQDAQASEAKLEEEPSASSPQYACDFNLFLEDSADNRQNFSSQSLEHVEKENSLCGSAPNSRAGFVHSKTCLSWEFSEKDDEPEEVVVKAKIRSKARRIVSDGEDEDDSFKDTSSINPFNTSLFQFSSVKQFDASTPKNDISPPGRFFSSQIPSSVNKSMNSRRSLASRRSLINMVLDHVEDMEERLDDSSEAKGPEDYPEEGVEESSGEASKYTEEDPSGETLSSENKSSWLMTSKPSALAQETSLGAPEPLSGEQLVGSPQDKAAEATNDYETLVKRGKELKECGKIQEALNCLVKALDIKSADPEVMLLTLSLYKQLNNN

SEQ ID NO: 45606 - protein, 894 aa, Homo sapiens
MTAIKHALQRDIFTPNDERLLSIVNVCKAGKKKKNCFLCATVTTERPVQVKVVKVKKSDKGDFYKRQIAWALRDLAVVDAKDAIKENPEFDLHFEKIYKWVASSTAEKNAFISCIWKLNQRYLRKKIDFVNVSSQLLEESVPSGENQSVTGGDEEVVDEYQELNAREEQDIEIMMEGCEYAISNAEAFAEKLSRELQVLDGANIQSIMASEKQVNILMKLLDEALKEVDQIELKLSSYEEMLQSVKEQMDQISESNHLIHLSNTNNVKLLSEIEFLVNHMDLAKGHIKALQEGDLASSRGIEACTNAADALLQCMNVALRPGHDLLLAVKQQQQRFSDLRELFARRLASHLNNVFVQQGHDQSSTLAQHSVELTLPNHHPFHRDLLRYAKLMEWLKSTDYGKYEGLTKNYMDYLSRLYEREIKDFFEVAKIKMTGTTKESKKFATLPRKESAVKQETESLHGSSGKLTGSTSSLNKLSVQSSGNRRSQSSSLLDMGNMSASDLDVADRTKFDKIFEQVLSELEPLCLAEQDFISKFFKLQQHQSMPGTMAEAEDLDGGTLSRQHNCGTPLPVSSEKDMIRQMMIKIFRCIEPELNNLIALGDKIDSFNSLYMLVKMSHHVWTAQNVDPASFLSTTLGNVLVTVKRNFDKCISNQIRQMEEVKISKKSKVGILPFVAEFEEFAGLAESIFKNAERRGDLDKAYTKLIRGVFVNVEKVANESQKTPRDVVMMENFHHIFATLSRLKISCLEAEKKEAKQKYTDHLQSYVIYSLGQPLEKLNHFFEGVEARVAQGIREEEVSYQLAFNKQELRKVIKEYPGKEVKKGLDNLYKKVDKHLCEEENLLQVVWHSMQDEFIRQYKHFEGLIARCYPGSGVTMEFTIQDILDYCSSIAQSH

SEQ ID NO: 45607 - protein, 879 aa, Homo sapiens
MTAIKHALQRDIFTPNDERLLSIVNVCKAGKKKKNCFLCATVTTERPVQVKVVKVKKSDKGDFYKRQIAWALRDLAVVDAKDAIKENPEFDLHFEKIYKWVASSTAEKNAFISCIWKLNQRYLRKKIDFVNVSSQLLEESVPSGENQSVTGGDEEVVDEYQELNAREEQDIEIMMEGCEYAISNAEAFAEKLSRELQVLDGANIQSIMASEKQVNILMKLLDEALKEVDQIELKLSSYEEMLQSVKEQMDQISESNHLIHLSNTNNVKLLSEIEFLVNHMDLAKGHIKALQEGDLASSRGIEACTNAADALLQCMNVALRPGHDLLLAVKQQQQRFSDLRELFARRLASHLNNVFVQQGHDQSSTLAQHSVELTLPNHHPFHRDLLRYAKLMEWLKSTDYGKYEGLTKNYMDYLSRLYEREIKDFFEVAKIKMTGTTKESKKFGLHGSSGKLTGSTSSLNKLSVQSSGNRRSQSSSLLDMGNMSASDLDVADRTKFDKIFEQVLSELEPLCLAEQDFISKFFKLQQHQSMPGTMAEAEDLDGGTLSRQHNCGTPLPVSSEKDMIRQMMIKIFRCIEPELNNLIALGDKIDSFNSLYMLVKMSHHVWTAQNVDPASFLSTTLGNVLVTVKRNFDKCISNQIRQMEEVKISKKSKVGILPFVAEFEEFAGLAESIFKNAERRGDLDKAYTKLIRGVFVNVEKVANESQKTPRDVVMMENFHHIFATLSRLKISCLEAEKKEAKQKYTDHLQSYVIYSLGQPLEKLNHFFEGVEARVAQGIREEEVSYQLAFNKQELRKVIKEYPGKEVKKGLDNLYKKVDKHLCEEENLLQVVWHSMQDEFIRQYKHFEGLIARCYPGSGVTMEFTIQDILDYCSSIAQSH

SEQ ID NO: 45608 - protein, 894 aa, Homo sapiens; identical to SEQ ID NO: 45606

SEQ ID NO: 45609 - protein, 745 aa, Homo sapiens
MKETDREAVATAVQRVAGMLQRPDQLDKVEQYRRREARKKASVEARLKAAIQSQLDGVRTGLSQLHNALNDVKDIQQSLADVSKDWRQSINTIESLKDVKDAVVQHSQLAAAVENLKNIFSVPEIVRETQDLIEQGALLQAHRKLMDLECSRDGLMYEQYRMDSGNTRDMTLIHGYFGSTQGLSDELAKQLWMVLQRSLVTVRRDPTLLVSVVRIIEREEKIDRRILDRKKQTGFVPPGRPKNWKEKMFTILERTVTTRIEGTQADTRESDKMWLVRHLEIIRKYVLDDLIVAKNLMVQCFPPHYEIFKNLLNMYHQALSTRMQDLASEDLEANEIVSLLTWVLNTYTSTEMMRNVELAPEVDVGTLEPLLSPHVVSELLDTYMSTLTSNIIAWLRKALETDKKDWVKETEPEADQDGYYQTTLPAIVFQMFEQNLQVAAQISEDLKTKVLVLCLQQMNSFLSRYKDEAQLYKEEHLRNRQHPHCYVQYMIAIINNCQTFKESIVSLKRKYLKNEVEEGVSPSQPSMDGILDAIAKEGCSGLLEEVFLDLEQHLNELMTKKWLLGSNAVDIICVTVEDYFNDFAKIKKPYKKRMTAEAHRRVVVEYLRAVMQKRISFRSPEERKEGAEKMVREAEQLRFLFRKLASGFGEDVDGYCDTIVAVAEVIKLTDPSLLYLEVSTLVSKYPDIRDDHIGALLAVRGDASRDMKQTIMETLEQGPAQASPSYVPLFKDIVVPSLNVAKLLK

SEQ ID NO: 45610 - protein, 640 aa, Homo sapiens
QCEDSTSFFTMKETDREAVATAVQRVAGMLQRPDQLDKVEQYRRREARKKASVEARLKAAIQSQLDGVRTGLSQLHNALNDVKDIQQSLADVSKDWRQSINTIESLKDVKDAVVQHSQLAAAVENLKNIFSVPEIVRETQDLIEQGALLQAHRKLMDLECSRDGLMYEQYRMDSGNTRDMTLIHGYFGSTQGLSDELAKQLWMVLQRSLVTVRRDPTLLVSVVRIIEREEKIDRRILDRKKQTGFVPPGRPKNWKEKMFTILERTVTTRIEGTQADTRESDKMWLVRHLEIIRKYVLDDLIVAKNLMVQCFPPHYEIFKNLLNMYHQALSTRMQDLASEDLEANEIVSLLTWVLNTYTRYKDEAQLYKEEHLRNRQHPHCYVQYMIAIINNCQTFKESIVSLKRKYLKNEVEEGVSPSQPSMDGILDAIAKEGCSGLLEEVFLDLEQHLNELMTKKWLLGSNAVDIICVTVEDYFNDFAKIKKPYKKRMTAEAHRRVVVEYLRAVMQKRISFRSPEERKEGAEKMVREAEQLRFLFRKLASGFGEDVDGYCDTIVAVAEVIKLTDPSLLYLEVSTLVSKYPDIRDDHIGALLAVRGDASRDMKQTIMETLEQGPAQASPSYVPLFKDIVVPSLNVAKLLK

SEQ ID NO: 45611 - protein, 69 aa, Homo sapiens
MKETDREAVATAVQRVAGMLQRPDQLDKVEQYRRREARKKASVEARLKAAIQSQLDGVRTGLSQLHNAL

SEQ ID NO: 45612 - protein, 745 aa, Homo sapiens; identical to SEQ ID NO: 45609

SEQ ID NO: 45613 - protein, 677 aa, Homo sapiens
MDSAAKDEMQPALSPGSSFPGPEWPEQERAEQLARGAALKWASGIFYRPEQLARLGQYRSREVQRTCSLESRLKSVMQSYLEGVQTVPAAVSHTQTLIDGQQFLEAYVSLRELEQLREDTWAPLGGLELPVFQGLDLLFEALGQAVEAAAGAAGKLAREDPALLVAAVRVAEVETGRTTPLGQVPRDWRQRCLRALQEGLEQAHFGSPLLPAPGALPGWLEALRVALPVELATAEALVAPCCPPQYNVVQLWAHTLHSGLRRSLQNLLAGPELEAADAFALLHWALHVYLGQEMMGSLELGPEADVSQLEPLLTLENIEQLEATFVANIQILEENIRVASLVSESLQQRVHGMALSELGTFLRSFSDALIRFSRDHFRGKSMAPHYVPYLLAALNHKSALSSSVSVLQLDGAPSGALAPVEAALDELQRRIYRLVLEALQAELQPLFADLPSRQWLSSPELLQSVCERTGRFCRDFWRVRNPTVQLLLAEAERAVVLQYLSALMQGRLVCRGADERTQAAERLRHDAAQLQQLFLSLVRASWAGRRARVSVAGWERGLARDPTPTCSGPGGERALRAGAARPEGAAKPPRPRAAGPGGGWPAATISRRERGPRLRPLGPARGLVPGAAPGRAQLPAGCAAAVAPREPPRPLQPSARARAPASCLPSGSCARALLLAE

SEQ ID NO: 45614 - protein, 746 aa, Homo sapiens
MDSAAKDEMQPALSPGPEWPEQERAEQLARGAALKWASGIFYRPEQLARLGQYRSREVQRTCSLESRLKSVMQSYLEGVQTGVWQLAQAIEVVQGTREALSQARGLLQGMSQALQTLEPLRERVAQHKQLQALSHLLPRLRAVPAAVSHTQTLIDGQQFLEAYVSLRELEQLREDTWAPLGGLELPVFQGLDLLFEALGQAVEAAAGAAGKLAREDPALLVAAVRVAEVETGRTTPLGQVPRDWRQRCLRALQEGLEQAHFGSPLLPAPGALPGWLEALRVALPVELATAEALVAPCCPPQYNVVQLWAHTLHSGLRRSLQNLLAGPELEAADAFALLHWALHVYLGQEMMGSLELGPEADVSQLEPLLTLENIEQLEATFVANIQASVSQWLQNALDGEVAEWGREHGPNTDPSGSYYSPMPAIVLQILEENIRVASLVSESLQQRVHGMALSELGTFLRSFSDALIRFSRDHFRGKSMAPHYVPYLLAALNHKSALSSSVSVLQLDGAPSGALAPVEAALDELQRRIYRLVLEALQAELQPLFADLPSRQWLSSPELLQSVCERTGRFCRDFWRVRNPTVQLLLAEAERAVVLQYLSALMQGRLVCRGADERTQAAERLRHDAAQLQQLFLSLGLEENAHCAPVLLALRELLNLRDPALLGLEVAGLRQQFPDVSEDHVSALLGLRGDLSREQHLAALSSLQAALPPSPRASRRVLFSLVPAPALAPASCLPSGSCARALLLAE

SEQ ID NO: 45615 - protein, 679 aa, Homo sapiens
MDSAAKDEMQPALSPGPEWPEQERAEQLARGAALKWASGIFYRPEQLARLGQYRSREVQRTCSLESRLKSVMQSYLEGVQTVPAAVSHTQTLIDGQQFLEAYVSLRELEQLREDTWAPLGGLELPVFQGLDLLFEALGQAVEAAAGAAGKLAREDPALLVAAVRVAEVETGRTTPLGQVPRDWRQRCLRALQEGLEQAHFGSPLLPAPGALPGWLEALRVALPVELATAEALVAPCCPPQYNVVQLWAHTLHSGLRRSLQNLLAGPELEAADAFALLHWALHVYLGQEMMGSLELGPEADVSQLEPLLTLENIEQLEATFVANIQILEENIRVASLVSESLQQRVHGMALSELGTFLRSFSDALIRFSRDHFRGKSMAPHYVPYLLAALNHKSALSSSVSVLQLDGAPSGALAPVEAALDELQRRIYRLVLEALQAELQPLFADLPSRQWLSSPELLQSVCERTGRFCRDFWRVRNPTVQLLLAEAERAVVLQYLSALMQGRLVCRGADERTQAAERLRHDAAQLQQLFLSLVRASWAGRRARVSVAGWERGLARDPTPTCSGPGGERALRAGAARPEGAAKPPRPRAAGPGGGWPAATISRRERGPRLRPLGPARGLVPGAAPGRAQLPAGCAAAVAPREPPRPLQPSARARARAGLLPALGVLRPSPAARRINHGCR

SEQ ID NO: 45616 - protein, 974 aa, Homo sapiens [sequence omitted]

SEQ ID NO: 45617 - protein, 473 aa, Homo sapiens
MAAEAAGGKYRSTVSKSKDPSGLLISVIRTLSTSDDVEDRENEKGRLEEAYEKCDRDLDELIVQHYTELTTAIRTYQSITERITNSRNKIKQVKENLLSCKMLLHCKRDELRKLWIEGIEHKHVLNLLDEIENIKQVPQKLEQCMASKHYLSATDMLVSAVESLEGPLLQVEGLSDLRLELHSKKMNLHLVLIDELHRHLYIKSTSRVVQRNKEKGKISSLVKDASVPLIDVTNLPTPRKFLDTSHYSTAGSSSVREINLQDIKEDLELDPEENSTLFMGILIKGLAKLKKIPETVKAIIERLEQELKQIVKRSTTQVADSGYQRGENVTVENQPRLLLELLELLFDKFNAVAAAHSVVLGYLQDTVVTPLTQQEDIKLYDMADVWVKIQDVLQMLLTEYLDMKNTRTASEPSAQLSYASTGREFAAFFAKKKPQRPKNSLFKFESSSHAISMSAYLREQRRELYSRSGELQG

SEQ ID NO: 45618 - protein, 873 aa, Homo sapiens
MLLHCKRDELRKLWIEGIEHKHVLNLLDEIENIKQVPQKLEQCMASKHYLSATDMLVSAVESLEGPLLQVEGLSDLRLELHSKKMNLHLVLIDELHRHLYIKSTSRVVQRNKEKGKISSLVKDASVPLIDVTNLPTPRKFLDTSHYSTAGSSSVREINLQDIKEDLELDPEENSTLFMGILIKGLAKLKKIPETVKAIIERLEQELKQIVKRSTTQVADSGYQRGENVTVENQPRLLLELLELLFDKFNAVAAAHSVVLGYLQDTVVTPLTQQEDIKLYDMADVWVKIQDVLQMLLTEYLDMKNTRTASEPSAQLSYASTGREFAAFFAKKKPQRPKNSLFKFESSSHAISMSAYLREQRRELYSRSGELQGGPDDNLIEGGGTKFVCKPGARNITVIFHPLLRFIQEIEHALGLGPAKQCPLREFLTVYIKNIFLNQVLAEINKEIEGVTKTSDPLKILANADTMKVLGVQRPLLQSTIIVEKTVQDLLNLMHDLSAYSDQFLNMVCVKLQEYKDTCTAAYRGIVQSEEKLVISASWAKDDDISRLLKSLPNWMNMAQPKQLRPKREEEEDFIRAAFGKESEVLIGNLGDKLIPPQDILRDVSDLKALANMHESLEWLASRTKSAFSNLSTSQMLSPAQDSHTNTDLPPVSEQIMQTLSELAKSFQDMADRCLLVLHLEVRVHCFHYLIPLAKEGNYAIVANVESMDYDPLVVKLNKDISAIEEAMSASLQQHKFQYIFEGLGHLISCILINGAQYFRRISESGIKKMCRNIFVLQQNLTNITMSREADLDFARQYYEMLYNTADELLNLVVDQGVKYTELEYIHALTLLHRSQTGVGELTTQNTRLQRLKEIICEQAAIKQATKDKKITTV

SEQ ID NO: 45619 - protein, 262 aa, Homo sapiens
MHESLEWLASRTKSAFSNLSTSQMLSPAQDSHTNTDLPPVSEQIMQTLSELAKSFQDMADRCLLVLHLEVRVHCFHYLIPLAKEGNYAIVANVESMDYDPLVVKLNKDISAIEEAMSASLQQHKFQYIFEGLGHLISCILINGAQYFRRISESGIKKMCRNIFVLQQNLTNITMSREADLDFARQYYEMLYNTADELLNLVVDQGVKYTELEYIHALTLLHRSQTGVGELTTQNTRLQRLKEIICEQAAIKQATKDKKITTV

SEQ ID NO: 45620 - protein, 584 aa, Homo sapiens
MANLVTASKTKMSKGEDPNNPRSIKRISQGGRDNHLAIAKCDLTQLKKKQSEVSNGSRETISMKTCCQHGDRGYWSTGYYWRGGPDDNLIEGGGTKFVCKPGARNITVIFHPLLRFIQEIEHALGLGPAKQCPLREFLTVYIKNIFLNQVLAEINKEIEGVTKTSDPLKILANADTMKVLGVQRPLLQSTIIVEKTVQDLLNLMHDLSAYSDQFLNMVCVKLQEYKDTCTAAYRGIVQSEEKLVISASWAKDDDISRLLKSLPNWMNMAQPKQLRPKREEEEDFIRAAFGKESEVLIGNLGDKLIPPQDILRDVSDLKALANMHESLEWLASRTKSAFSNLSTSQMLSPAQDSHTNTDLPPVSEQIMQTLSELAKSFQDMADRCLLVLHLEVRVHCFHYLIPLAKEGNYAIVANVESMDYDPLVVKLNKDISAIEEAMSASLQQHKFQYIFEGLGHLISCILINGAQYFRRISESGIKKMCRNIFVLQQNLTNITMSREADLDFARQYYEMLYNTADELLNLVVDQGVKYTELEYIHALTLLHRSQTGVGELTTQNTRLQRLKEIICEQAAIKQATKDKKITTV

SEQ ID NO: 45621 - protein, 593 aa, Homo sapiens
MADVWVKIQDVLQMLLTEYLDMKNTRTASEPSAQLSYASTGREFAAFFAKKKPQRPKNSLFKFESSSHAISMSAYLREQRRELYSRSGELQGGPDDNLIEGGGTKFVCKPGARNITVIFHPLLRFIQEIEHALGLGPAKQCPLREFLTVYIKNIFLNQVLAEINKEIEGVTKTSDPLKILANADTMKVLGVQRPLLQSTIIVEKTVQDLLNLMHDLSAYSDQFLNMVCVKLQEYKDTCTAAYRGIVQSEEKLVISASWAKDDDISRLLKSLPNWMNMAQPKQLRPKREEEEDFIRAAFGKESEVLIGNLGDKLIPPQDILRDVSDLKALANMHESLEWLASRTKSAFSNLSTSQMLSPAQDSHTNTDLPPVSEQIMQTLSELAKSFQDMADRCLLVLHLEVRVHCFHYLIPLAKEGNYAIVANVESMDYDPLVVKLNKDISAIEEAMSASLQQHKFQYIFEGLGHLISCILINGAQYFRRISESGIKKMCRNIFVLQQNLTNITMSREADLDFARQYYEMLYNTADELLNLVVDQGVKYTELEYIHALTLLHRSQTGVGELTTQNTRLQRLKEIICEQAAIKQATKDKKITTV

SEQ ID NO: 45622 - protein, 643 aa, Homo sapiens
MATTAELFEEPFVADEYIERLVWRTPGGGSRGGPEAFDPKRLLEEFVNHIQELQIMDERIQRKVEKLEQQCQKEAKEFAKKVQELQKSNQIKEAADIIQKLHLIAQELPFDRFSEVKSKIASKYHDLECQLIQEFTSAQRRGEISRMREVAAVLLHFKGYSHCVDVYIKQCQEGAYLRNDIFEDAGILCQRVNKQVGDIFSNPETVLAKLIQNVFEIKLQSFVKEQLEECRKSDAEQYLKNLYDLYTRTTNLSSKLMEFNLGTDKQTFLSKLIKSIFISYLENYIEVETGYLKSRSAMILQRYYDSKNHQKRSIGTGGIQDLKERIRQRTNLPLGPSIDTHGETFLSQEVVVNLLQETKQAFERCHRLSDPSDLPRNAFRIFTILVEFLCIEHIDYALETGLAGIPSSDSRNANLYFLDVVQQANTIFHLFDKQFNDHLMPLISSSPKLSECLQKKKEIIEQMEMKLDTGIDRTLNCMIGQMKHILAAEQKKTDFKPEDENNVLIQYTNACVKVCAYVRKQVEKIKNSMDGKNVDTVLMELGVRFHRLIYEHLQQYSYSCMGGMLAICDVAEYRKCAKDFKIPMVLHLFDTLHALCNLLVVAPDNLKQVCSGEQLANLDKNILHSFVQLRADYRSARLARHFS

SEQ ID NO: 45623 - protein, 708 aa, Homo sapiens
MATTAELFEEPFVADEYIERLVWRTPGGGSRGGPEAFDPKRLLEEFVNHIQELQIMDERIQRKVEKLEQQCQKEAKEFAKKVQELQKSNQVAFQHFQELDEHISYVATKVCHLGDQLEGVNTPRQRAVEAQKLMKYFNEFLDGELKSDVFTNSEKIKEAADIIQKLHLIAQELPFDRFSEVKSKIASKYHDLECQLIQEFTSAQRRGEISRMREVAAVLLHFKGYSHCVDVYIKQCQEGAYLRNDIFEDAGILCQRVNKQVGDIFSNPETVLAKLIQNVFEIKLQSFVKEQLEECRKSDAEQYLKNLYDLYTRTTNLSSKLMEFNLGTDKQTFLSKLIKSIFISYLENYIEVETGYLKSRSAMILQRYYDSKNHQKRSIGTGGIQDLKERIRQRTNLPLGPSIDTHGETFLSQEVVVNLLQETKQAFERCHRLSDPSDLPRNAFRIFTILVEFLCIEHIDYALETGLAGIPSSDSRNANLYFLDVVQQANTIFHLFDKQFNDHLMPLISSSPKLSECLQKKKEIIEQMEMKLDTGIDRTLNCMIGQMKHILAAEQKKTDFKPEDENNVLIQYTNACVKVCAYVRKQVEKIKNSMDGKNVDTVLMELGVRFHRLIYEHLQQYSYSCMGGMLAICDVAEYRKCAKDFKIPMVLHLFDTLHALCNLLVVAPDNLKQVCSGEQLANLDKNILHSFVQLRADYRSARLARHFS

SEQ ID NO: 45624 - protein, 804 aa, Homo sapiens
MAENSESLGTVPEHERILQEIESTDTACVGPTLRSVYDDQPNAHKKFMEKLDACIRNHDKEIEKMCNFHHQGFVDAITELLKVRTDAEKLKVQVTDTNRRFQDAGKEVIVHTEDIIRCRIQQRNITTVVEKLQLCLPVLEMYSKLKEQMSAKRYYSALKTMEQLENVYFPWVSQYRFCQLMIENLPKLREDIKEISMSDLKDFLESIRKHSDKIGETAMKQAQHQKTFSVSLQKQNKMKFGKNMYINRDRIPEERNETVLKHSLEEEDENEEEILTVQDLVDFSPVYRCLHIYSVLGDEETFENYYRKQRKKQARLVLQPQSNMHETVDGYRRYFTQIVGFFVVEDHILHVTQGLVTRAYTDELWNMALSKIIAVLRAHSSYCTDPDLVLELKNLTVIFADTLQGYGFPVNRLFDLLFEIRDQYNETLLKKWAGVFRDIFEEDNYSPIPVVNEEEYKIVISKFPFQDPDLEKQSFPKKFPMSQSVPHIYIQVKEFIYASLKFSESLHRSSTEIDDMLRKSTNLLLTRTLSSCLLNLIRKPHIGLTELVQIIINTTHLEQACKYLEDFITNITNISQETVHTTRLYGLSTFKDARHAAEGEIYTKLNQKIDEFVQLADYDWTMSEPDGRASGYLMDLINFLRSIFQVFTHLPGKVAQTACMSACQHLSTSLMQMLLDSELKQISMGAVQQFNLDVIQCELFASSEPVPGFQGDTLQLAFIDLRQLLDLFMVWDWSTYLADYGQPASKYLRVNPNTALTLLEKMKDTSKKNNIFAQFRKNDRDKQKLIETVVKQLRSLVNGMSQHM

SEQ ID NO: 45625 - protein, 153 aa, Homo sapiens
MAENSESLGTVPEHERILQEIESTDTACVGPTLRSVYDDQPNAHKKFMEKLDACIRNHDKEIEKMCNFHHQGFVDAITELLKVRTDAEKLKVQVTDTNRRFQDAGKEVIVHTEDIIRCRIQQRNITTVVEKLQLCLPVLEMYSKLKEQMSAKR

SEQ ID NO: 45626 - protein, 820 aa, Homo sapiens
MCCVGGAGSCSDTGKLGACRAMLEEETDQTYENVLAEIQSFELPVEATLRSVYDDQPNAHKKFMEKLDACIRNHDKEIEKMCNFHHQGFVDAITELLKVRTDAEKLKVQVTDTNRRFQDAGKEVIVHTEDIIRCRIQQRNITTVVEKLQLCLPVLEMYSKLKEQMSAKRYYSALKTMEQLENVYFPWVSQYRFCQLMIENLPKLREDIKEISMSDLKDFLESIRKHSDKIGETAMKQAQHQKTFSVSLQKQNKMKFGKNMYINRDRIPEERNETVLKHSLEEEDENEEEILTVQDLVDFSPVYRCLHIYSVLGDEETFENYYRKQRKKQARLVLQPQSNMHETVDGYRRYFTQIVGFFVVEDHILHVTQGLVTRAYTDELWNMALSKIIAVLRAHSSYCTDPDLVLELKNLTVIFADTLQGYGFPVNRLFDLLFEIRDQYNETLLKKWAGVFRDIFEEDNYSPIPVVNEEEYKIVISKFPFQDPDLEKQSFPKKFPMSQSVPHIYIQVKEFIYASLKFSESLHRSSTEIDDMLRKSTNLLLTRTLSSCLLNLIRKPHIGLTELVQIIINTTHLEQACKYLEDFITNITNISQETVHTTRLYGLSTFKDARHAAEGEIYTKLNQKIDEFVQLADYDWTMSEPDGRASGYLMDLINFLRSIFQVFTHLPGKVAQTACMSACQHLSTSLMQMLLDSELKQISMGAVQQFNLDVIQCELFASSEPVPGFQGDTLQLAFIDLRQLLDLFMVWDWSTYLADYGQPASKYLRVNPNTALTLLEKMKDTSKKNNIFAQFRKNDRDKQKLIETVVKQLRSLVNGMSQHM

SEQ ID NO: 45627 - protein, 799 aa, Homo sapiens
MLEEETDQTYENVLAEIQSFELPVEATLRSVYDDQPNAHKKFMEKLDACIRNHDKEIEKMCNFHHQGFVDAITELLKVRTDAEKLKVQVTDTNRRFQDAGKEVIVHTEDIIRCRIQQRNITTVVEKLQLCLPVLEMYSKLKEQMSAKRYYSALKTMEQLENVYFPWVSQYRFCQLMIENLPKLREDIKEISMSDLKDFLESIRKHSDKIGETAMKQAQHQKTFSVSLQKQNKMKFGKNMYINRDRIPEERNETVLKHSLEEEDENEEEILTVQDLVDFSPVYRCLHIYSVLGDEETFENYYRKQRKKQARLVLQPQSNMHETVDGYRRYFTQIVGFFVVEDHILHVTQGLVTRAYTDELWNMALSKIIAVLRAHSSYCTDPDLVLELKNLTVIFADTLQGYGFPVNRLFDLLFEIRDQYNETLLKKWAGVFRDIFEEDNYSPIPVVNEEEYKIVISKFPFQDPDLEKQSFPKKFPMSQSVPHIYIQVKEFIYASLKFSESLHRSSTEIDDMLRKSTNLLLTRTLSSCLLNLIRKPHIGLTELVQIIINTTHLEQACKYLEDFITNITNISQETVHTTRLYGLSTFKDARHAAEGEIYTKLNQKIDEFVQLADYDWTMSEPDGRASGYLMDLINFLRSIFQVFTHLPGKVAQTACMSACQHLSTSLMQMLLDSELKQISMGAVQQFNLDVIQCELFASSEPVPGFQGDTLQLAFIDLRQLLDLFMVWDWSTYLADYGQPASKYLRVNPNTALTLLEKMKDTSKKNNIFAQFRKNDRDKQKLIETVVKQLRSLVNGMSQHM

SEQ ID NO: 45628 - protein, 701 aa, Homo sapiens
MAENSESLGTVPEHERILQEIESTDTACVGPTLRSVYDDQPNAHKKFMEKLDACIRNHDKEIEKMCNFHHQGFVDAITELLKVRTDAEKLKVQVTDTNRRFQDAGKEVIVHTEDIIRCRIQQRNITTVVEKLQLCLPVLEMYSKLKEQMSAKRYYSALKTMEQLENVYFPWVSQYRFCQLMIENLPKLREDIKEISMSDLKDFLESIRKHSDKIGETAMKQAQHQKTFSVSLQKQNKMKFGKNMYINRDRIPEERNETVLKHSLEEEDENEEEGDEETFENYYRKQRKKQARLVLQPQSNMGYGFPVNRLFDLLFEIRDQYNETLLKKWAGVFRDIFEEDNYSPIPVVNEEEYKIVISKFPFQDPDLEKQSFPKKFPMSQSVPHIYIQVKEFIYASLKFSESLHRSSTEIDDMLRKSTNLLLTRTLSSCLLNLIRKPHIGLTELVQIIINTTHLEQACKYLEDFITNITNISQETVHTTRLYGLSTFKDARHAAEGEIYTKLNQKIDEFVQLADYDWTMSEPDGRASGYLMDLINFLRSIFQVFTHLPGKVAQTACMSACQHLSTSLMQMLLDSELKQISMGAVQQFNLDVIQCELFASSEPVPGFQGDTLQLAFIDLRQLLDLFMVWDWSTYLADYGQPASKYLRVNPNTALTLLEKMKDTSKKNNIFAQFRKNDRDKQKLIETVVKQLRSLVNGMSQHM

SEQ ID NO: 45629 - protein, 72 aa, Homo sapiens
GKVAQTACMSACQHLSTSLMQMLLDSELKQISMGAVQQFNLDVIQCELFASSEPVPGFQGDTLQLAFIDLRQ

SEQ ID NO: 45630 - protein, 811 aa, Homo sapiens
MERGKMAEAESLETAAEHERILREIESTDTACIGPTLRSVYDGEEHGRFMEKLETRIRNHDREIEKMCNFHYQGFVDSITELLKVRGEAQKLKNQVTDTNRKLQHEGKELVIAMEELKQCRLQQRNISATVDKLMLCLPVLEMYSKLRDQMKTKRHYPALKTLEHLEHTYLPQVSHYRFCKVMVDNIPKLREEIKDVSMSDLKDFLESIRKHSDKIGETAMKQAQQQRNLDNIVLQQPRIGSKRKSKKDAYIIFDTEIESTSPKSEQDSGILDVEDEEDDEEVPGAQDLVDFSPVYRCLHIYSVLGARETFENYYRKQRRKQARLVLQPPSNMHETLDGYRKYFNQIVGFFVVEDHILHTTQGLVNRAYIDELWEMALSKTIAALRTHSSYCSDPNLVLDLKNLIVLFADTLQVYGFPVNQLFDMLLEIRDQYSETLLKKWAGIFRNILDSDNYSPIPVTSEEMYKKVVGQFPFQDIELEKQPFPKKFPFSEFVPKVYNQIKEFIYACLKFSEDLHLSSTEVDDMIRKSTNLLLTRTLSNSLQNVIKRKNIGLTELVQIIINTTHLEKSCKYLEEFITNITNVLPETVHTTKLYGTTTFKDARHAAEEEIYTNLNQKIDQFLQLADYDWMTGDLGNKASDYLVDLIAFLRSTFAVFTHLPGKVAQTACMSACKHLATSLMQLLLEAEVRQLTLGALQQFNLDVRECEQFARSGPVPGFQEDTLQLAFIDLRQLLDLFIQWDWSTYLADYGQPNCKYLRVNPVTALTLLEKMKDTSRKNNMFAQFRKNERDKQKLIDTVAKQLRGLISSHHS

SEQ ID NO: 45631 - protein, 671 aa, Homo sapiens
MERGKMAEAESLETAAEHERILREIESTDTACIGPTLRSVYDGEEHGRFMEKLETRIRNHDREIEKMCNFHYQGFVDSITELLKVRGEAQKLKNQVTDTNRKLQHEGKELVIAMEELKQCRLQQRNISATVDKLMLCLPVLEMYSKLRDQMKTKRHYPALKTLEHLEHTYLPQVSHYRFCKVMVDNIPKLREEIKDVSMSDLKDFLESIRKHSDKIGETAMKQAQQQRNLDNIVLQQPRIGSKRKSKKDAYIIFDTEIESTSPKSEQDSGILDVEDEEDDEEVPGAQDLVDFSPVYRCLHIYSVLGARETFENYYRKQRRKQARLVLQPPSNMHETLDGYRKYFNQIVGFFVVEDHILHTTQGLVNRAYIDELWEMALSKTIAALRTHSSYCSDPNLVLDLKNLIVLFADTLQVYGFPVNQLFDMLLEIRDQYSETLLKKWAGIFRNILDSDNYSPIPVTSEEMYKKVVGQFPFQDIELEKQPFPKKFPFSEFVPKVYNQIKEFIYACLKFSEDLHLSSTEVDDMIRKSTNLLLTRTLSNSLQNVIKRKNIGLTELVQIIINTTHLEKSCKYLEEFITNITNVLPETVHTTKLYGTTTFKDARHAAEEEIYTNLNQKIDQFLQLADYDWMTGDLGNKASDYLVDLIAFLRSTFAVFTHLPVSGSCYFVLYI

SEQ ID NO: 45632 - protein, 1989 aa, Homo sapiens
MTKVPPAFDFSFLNDEEARKILQVLERNEELQRAEKDRISKLQKTKRDIRWLQGVTGEWFEEIQRKKFCNETDVSQMLKQPLTYRLSKEMAKNDPIELPTSRSKNVTNQKKPTPFSSRMSFRSSFASLFSFRKSGKETSKLPSLGQKGCDGHAGPPMPVRGAAVQAKIYNSPLENHLVDSTFVPKPAVMREESGMPPPWDASLLENEFFQVLDDLDSKLAQEQSASSVNTRTPLNYGSRTQFGHFYSSGNRHGNITERHKKHYNETSNMSIYDILRPGTPREGFKTFSPRTSTIYDMYRTREPRVFKEDYVQKNTFGSTSLCFDSRQRSALPATGHFTARSLHFPATTQSKSGFIPPRHQQSPKRTPLSSIIWNRSDSSRDRENQEEFLRAPSPMEIDPADKYVYPRGFQENKRYESYHSQNVYQRVSLNAPMENAMSPDTFENSENMPFYHQSNTFTRSFFSNTFGRSGEQRRFGQGPFWGQEKGHSFWSDFHRSRKSFSSSDRDFEMISMEANSVSAIHGHNVSSEHWESFSSGYGTDVSRGQEEPHPWQFDFQRSTLDSMVVSHGNETQLTPHFGTPNVCSMTGSSYHVKSSELVSQQDSSPVEVHINKEASSFGIAQTLASSFKTSFSQISDDRRNPQSPNLQNPTVTLQKIFPNKPASHPMRSHTEVTVTSSNSVDSLPLAKSQPNILVTEVNNEKDLNESISEEDKQLSKMDQTNKAGEIPQPVSQTGISNSLPDFQNPLSQDSAKSNGFGFNASTIISSKKSPRVFSRKDTSKMYIPHTDKSNDIKQDKRFTENRKLGSTASLPFIQEHRTPPSFPRTDQGCHQELTVNNEDISRIITNNHWSSALTDTQNAQYSKCKLTPGHKTSCDSLDLSSAALPDSSPSKNSSLDAPVVPSTTVFSRRSPSDKDPSLGEREEKDNAGKNQKNQFIVSHSENQERNDSPVPTHDEVVDVKCHSHSPFRNERGKGKIRHHISCIEKLSKTESISVPTSDHRSLIEANQSNSKVSELDTIYCTLPRKSSSFLIHGRQSGSKIMAASLRNGPPPFQIKNNVEDAMGNYMLNKFSPSSPESANECSKVLSDSALEAPEATERMTNVKSSGSTSVRKGPLPFLINRAMSCPSGEPHASTGREGRKKPLTSGMDASELTPRAWERIISPVESDSSVRDCSLTKRQHQKENFQEYTEKEGKMAASRRSVFALSNEDPLPFCSDLSGKERGKTLHKVKTTSTFSVSGDEDNVKCLEVVSIYYTLPRKPSKKFCNLLQQYTQNTNLLIESPQVETETFPNALEKDKQNYSTREQSGTPSCENLKMSVNSDQTLTTENMTAFRLSNRGPLAPTLQEMASVEAAVSLPEEESKAREIFSDNLAKTPLGDSENKKERGKKLQSETLHTSLMLQRKNVSEEKSENCQQSINSSNSGPSSLPALSEVNIGNSQTRRSSWECTGSGRAIPFTGSGKCPQKDHTSTAVGDGSSGSQPREGRGDIGTNCQKMTNKTLSHSESQVFALTPALHKLQLGEETQSDEPNLESLQSEPRELPQRSQEANMTESRKAEDEMQKSAWDQPSLPEGNKNKTNLDDLVKGENRSSVKHRLAAMSKASRKFPAKDVSPRRHVATIFPQSGSRSGFDHLSLGTVECNPLFPEPTPKSAESIGESRLSENGKHVKKSENLLPITVLPNREPSTHVSNQKSNSISQRHQNEFKNVSESPSKHENSKDVTAAQNLVRESGAPSPITFTSLREAEFSDNQRRLSPPFPLEPAQKSRVSSPLASFLQQQRSASSLEWEPEPHLYRSKSLKSINVHGDLLRKSHPPKVRERHFSESTSIDNALSRLTLGNEFSVNNGYSRRFRSFSELPSCDGNESWAYRSGTKTGPRSAISIYRPIDYGIFGKEQQLAFLENVKRSLTQGRLWKPSFLKNPGFLKDDLRNPPNPSESLSSNSPSSQVPEDGLSPSEPLNIYEDDPVDSNCDTDTTTDDEYYLDENDKESEL

SEQ ID NO: 45633 - protein, 1913 aa, Homo sapiens
MLKQPLTYRLSKEMAKNDPIELPTSRSKNVTNQKKPTPFSSRMSFRSSFASLFSFRKSGKETSKLPSLGQKGCDGHAGPPMPVRGAAVQAKIYNSPLENHLVDSTFVPKPAVMREESGMPPPWDASLLENEFFQVLDDLDSKLAQEQSASSVNTRTPLNYGSRTQFGHFYSSGNRHGNITERHKKHYNETSNMSIYDILRPGTPREGFKTFSPRTSTIYDMYRTREPRVFKEDYVQKNTFGSTSLCFDSRQRSALPATGHFTARSLHFPATTQSKSGFIPPRHQQSPKRTPLSSIIWNRSDSSRDRENQEEFLRAPSPMEIDPADKYVYPRGFQENKRYESYHSQNVYQRVSLNAPMENAMSPDTFENSENMPFYHQSNTFTRSFFSNTFGRSGEQRRFGQGPFWGQEKGHSFWSDFHRSRKSFSSSDRDFEMISMEANSVSAIHGHNVSSEHWESFSSGYGTDVSRGQEEPHPWQFDFQRSTLDSMVVSHGNETQLTPHFGTPNVCSMTGSSYHVKSSELVSQQDSSPVEVHINKEASSFGIAQTLASSFKTSFSQISDDRRNPQSPNLQNPTVTLQKIFPNKPASHPMRSHTEVTVTSSNSVDSLPLAKSQPNILVTEVNNEKDLNESISEEDKQLSKMDQTNKAGEIPQPVSQTGISNSLPDFQNPLSQDSAKSNGFGFNASTIISSKKSPRVFSRKDTSKMYIPHTDKSNDIKQDKRFTENRKLGSTASLPFIQEHRTPPSFPRTDQGCHQELTVNNEDISRIITNNHWSSALTDTQNAQYSKCKLTPGHKTSCDSLDLSSAALPDSSPSKNSSLDAPVVPSTTVFSRRSPSDKDPSLGEREEKDNAGKNQKNQFIVSHSENQERNDSPVPTHDEVVDVKCHSHSPFRNERGKGKIRHHISCIEKLSKTESISVPTSDHRSLIEANQSNSKVSELDTIYCTLPRKSSSFLIHGRQSGSKIMAASLRNGPPPFQIKNNVEDAMGNYMLNKFSPSSPESANECSKVLSDSALEAPEATERMTNVKSSGSTSVRKGPLPFLINRAMSCPSGEPHASTGREGRKKPLTSGMDASELTPRAWERIISPVESDSSVRDCSLTKRQHQKENFQEYTEKEGKMAASRRSVFALSNEDPLPFCSDLSGKERGKTLHKVKTTSTFSVSGDEDNVKCLEVVSIYYTLPRKPSKKFCNLLQQYTQNTNLLIESPQVETETFPNALEKDKQNYSTREQSGTPSCENLKMSVNSDQTLTTENMTAFRLSNRGPLAPTLQEMASVEAAVSLPEEESKAREIFSDNLAKTPLGDSENKKERGKKLQSETLHTSLMLQRKNVSEEKSENCQQSINSSNSGPSSLPALSEVNIGNSQTRRSSWECTGSGRAIPFTGSGKCPQKDHTSTAVGDGSSGSQPREGRGDIGTNCQKMTNKTLSHSESQVFALTPALHKLQLGEETQSDEPNLESLQSEPRELPQRSQEANMTESRKAEDEMQKSAWDQPSLPEGNKNKTNLDDLVKGENRSSVKHRLAAMSKASRKFPAKDVSPRRHVATIFPQSGSRSGFDHLSLGTVECNPLFPEPTPKSAESIGESRLSENGKHVKKSENLLPITVLPNREPSTHVSNQKSNSISQRHQNEFKNVSESPSKHENSKDVTAAQNLVRESGAPSPITFTSLREAEFSDNQRRLSPPFPLEPAQKSRVSSPLASFLQQQRSASSLEWEPEPHLYRSKSLKSINVHGDLLRKSHPPKVRERHFSESTSIDNALSRLTLGNEFSVNNGYSRRFRSFSELPSCDGNESWAYRSGTKTGPRSAISIYRPIDYGIFGKEQQLAFLENVKRSLTQGRLWKPSFLKNPGFLKDDLRNPPNPSESLSSNSPSSQVPEDGLSPSEPLNIYEDDPVDSNCDTDTTTDDEYYLDENDKESEL

SEQ ID NO: 45634 - protein, 819 aa, Homo sapiens
MPVRGAAVQAKIYNSPLENHLVDSTFVPKPAVMREESGMPPPWDASLLENEFFQVLDDLDSKLAQEQSASSVNTRTPLNYGSRTQFGHFYSSGNRHGNITERHKKHYNETSNMSIYDILRPGTPREGFKTFSPRTSTIYDMYRTREPRVFKEDYVQKNTFGSTSLCFDSRQRSALPATGHFTARSLHFPATTQSKSGFIPPRHQQSPKRTPLSSIIWNRSDSSRDRENQEEFLRAPSPMEIDPADKYVYPRGFQENKRYESYHSQNVYQRVSLNAPMENAMSPDTFENSENMPFYHQSNTFTRSFFSNTFGRSGEQRRFGQGPFWGQEKGHSFWSDFHRSRKSFSSSDRDFEMISMEANSVSAIHGHNVSSEHWESFSSGYGTDVSRGQEEPHPWQFDFQRSTLDSMVVSHGNETQLTPHFGTPNVCSMTGSSYHVKSSELVSQQDSSPVEVHINKEASSFGIAQTLASSFKTSFSQISDDRRNPQSPNLQNPTVTLQKIFPNKPASHPMRSHTEVTVTSSNSVDSLPLAKSQPNILVTEVNNENSKDVTAAQNLVRESGAPSPITFTSLREAEFSDNQRRLSPPFPLEPAQKSRVSSPLASFLQQQRSASSLEWEPEPHLYRSKSLKSINVHGDLLRKSHPPKVRERHFSESTSIDNALSRLTLGNEFSVNNGYSRRFRSFSELPSCDGNESWAYRSGTKTGPRSAISIYRPIDYGIFGKEQQLAFLENVKRSLTQGRLWKPSFLKNPGFLKDDLRNPPNPSESLSSNSPSSQVPEDGLSPSEPLNIYEDDPVDSNCDTDTTTDDEYYLDENDKESEL

SEQ ID NO: 45635 - protein, 1801 aa, Homo sapiens
MREESGMPPPWDASLLENEFFQVLDDLDSKLAQEQSASSVNTRTPLNYGSRTQFGHFYSSGNRHGNITERHKKHYNETSNMSIYDILRPGTPREGFKTFSPRTSTIYDMYRTREPRVFKEDYVQKNTFGSTSLCFDSRQRSALPATGHFTARSLHFPATTQSKSGFIPPRHQQSPKRTPLSSIIWNRSDSSRDRENQEEFLRAPSPMEIDPADKYVYPRGFQENKRYESYHSQNVYQRVSLNAPMENAMSPDTFENSENMPFYHQSNTFTRSFFSNTFGRSGEQRRFGQGPFWGQEKGHSFWSDFHRSRKSFSSSDRDFEMISMEANSVSAIHGHNVSSEHWESFSSGYGTDVSRGQEEPHPWQFDFQRSTLDSMVVSHGNETQLTPHFGTPNVCSMTGSSYHVKSSELVSQQDSSPVEVHINKEASSFGIAQTLASSFKTSFSQISDDRRNPQSPNLQNPTVTLQKIFPNKPASHPMRSHTEVTVTSSNSVDSLPLAKSQPNILVTEVNNEKDLNESISEEDKQLSKMDQTNKAGEIPQPVSQTGISNSLPDFQNPLSQDSAKSNGFGFNASTIISSKKSPRVFSRKDTSKMYIPHTDKSNDIKQDKRFTENRKLGSTASLPFIQEHRTPPSFPRTDQGCHQELTVNNEDISRIITNNHWSSALTDTQNAQYSKCKLTPGHKTSCDSLDLSSAALPDSSPSKNSSLDAPVVPSTTVFSRRSPSDKDPSLGEREEKDNAGKNQKNQFIVSHSENQERNDSPVPTHDEVVDVKCHSHSPFRNERGKGKIRHHISCIEKLSKTESISVPTSDHRSLIEANQSNSKVSELDTIYCTLPRKSSSFLIHGRQSGSKIMAASLRNGPPPFQIKNNVEDAMGNYMLNKFSPSSPESANECSKVLSDSALEAPEATERMTNVKSSGSTSVRKGPLPFLINRAMSCPSGEPHASTGREGRKKPLTSGMDASELTPRAWERIISPVESDSSVRDCSLTKRQHQKENFQEYTEKEGKMAASRRSVFALSNEDPLPFCSDLSGKERGKTLHKVKTTSTFSVSGDEDNVKCLEVVSIYYTLPRKPSKKFCNLLQQYTQNTNLLIESPQVETETFPNALEKDKQNYSTREQSGTPSCENLKMSVNSDQTLTTENMTAFRLSNRGPLAPTLQEMASVEAAVSLPEEESKAREIFSDNLAKTPLGDSENKKERGKKLQSETLHTSLMLQRKNVSEEKSENCQQSINSSNSGPSSLPALSEVNIGNSQTRRSSWECTGSGRAIPFTGSGKCPQKDHTSTAVGDGSSGSQPREGRGDIGTNCQKMTNKTLSHSESQVFALTPALHKLQLGEETQSDEPNLESLQSEPRELPQRSQEANMTESRKAEDEMQKSAWDQPSLPEGNKNKTNLDDLVKGENRSSVKHRLAAMSKASRKFPAKDVSPRRHVATIFPQSGSRSGFDHLSLGTVECNPLFPEPTPKSAESIGESRLSENGKHVKKSENLLPITVLPNREPSTHVSNQKSNSISQRHQNEFKNVSESPSKHENSKDVTAAQNLVRESGAPSPITFTSLREAEFSDNQRRLSPPFPLEPAQKSRVSSPLASFLQQQRSASSLEWEPEPHLYRSKSLKSINVHGDLLRKSHPPKVRERHFSESTSIDNALSRLTLGNEFSVNNGYSRRFRSFSELPSCDGNESWAYRSGTKTGPRSAISIYRPIDYGIFGKEQQLAFLENVKRSLTQGRLWKPSFLKNPGFLKDDLRNPPNPSESLSSNSPSSQVPEDGLSPSEPLNIYEDDPVDSNCDTDTTTDDEYYLDENDKESEL

SEQ ID NO: 45636 - protein, 1982 aa, Homo sapiens
MSLSFLNDEEARKILQVLERNEELQRAEKDRISKLQKTKRDIRWLQGVTGEWFEEIQRKKFCNETDVSQMLKQPLTYRLSKEMAKNDPIELPTSRSKNVTNQKKPTPFSSRMSFRSSFASLFSFRKSGKETSKLPSLGQKGCDGHAGPPMPVRGAAVQAKIYNSPLENHLVDSTFVPKPAVMREESGMPPPWDASLLENEFFQVLDDLDSKLAQEQSASSVNTRTPLNYGSRTQFGHFYSSGNRHGNITERHKKHYNETSNMSIYDILRPGTPREGFKTFSPRTSTIYDMYRTREPRVFKEDYVQKNTFGSTSLCFDSRQRSALPATGHFTARSLHFPATTQSKSGFIPPRHQQSPKRTPLSSIIWNRSDSSRDRENQEEFLRAPSPMEIDPADKYVYPRGFQENKRYESYHSQNVYQRVSLNAPMENAMSPDTFENSENMPFYHQSNTFTRSFFSNTFGRSGEQRRFGQGPFWGQEKGHSFWSDFHRSRKSFSSSDRDFEMISMEANSVSAIHGHNVSSEHWESFSSGYGTDVSRGQEEPHPWQFDFQRSTLDSMVVSHGNETQLTPHFGTPNVCSMTGSSYHVKSSELVSQQDSSPVEVHINKEASSFGIAQTLASSFKTSFSQISDDRRNPQSPNLQNPTVTLQKIFPNKPASHPMRSHTEVTVTSSNSVDSLPLAKSQPNILVTEVNNEKDLNESISEEDKQLSKMDQTNKAGEIPQPVSQTGISNSLPDFQNPLSQDSAKSNGFGFNASTIISSKKSPRVFSRKDTSKMYIPHTDKSNDIKQDKRFTENRKLGSTASLPFIQEHRTPPSFPRTDQGCHQELTVNNEDISRIITNNHWSSALTDTQNAQYSKCKLTPGHKTSCDSLDLSSAALPDSSPSKNSSLDAPVVPSTTVFSRRSPSDKDPSLGEREEKDNAGKNQKNQFIVSHSENQERNDSPVPTHDEVVDVKCHSHSPFRNERGKGKIRHHISCIEKLSKTESISVPTSDHRSLIEANQSNSKVSELDTIYCTLPRKSSSFLIHGRQSGSKIMAASLRNGPPPFQIKNNVEDAMGNYMLNKFSPSSPESANECSKVLSDSALEAPEATERMTNVKSSGSTSVRKGPLPFLINRAMSCPSGEPHASTGREGRKKPLTSGMDASELTPRAWERIISPVESDSSVRDCSLTKRQHQKENFQEYTEKEGKMAASRRSVFALSNEDPLPFCSDLSGKERGKTLHKVKTTSTFSVSGDEDNVKCLEVVSIYYTLPRKPSKKFCNLLQQYTQNTNLLIESPQVETETFPNALEKDKQNYSTREQSGTPSCENLKMSVNSDQTLTTENMTAFRLSNRGPLAPTLQEMASVEAAVSLPEEESKAREIFSDNLAKTPLGDSENKKERGKKLQSETLHTSLMLQRKNVSEEKSENCQQSINSSNSGPSSLPALSEVNIGNSQTRRSSWECTGSGRAIPFTGSGKCPQKDHTSTAVGDGSSGSQPREGRGDIGTNCQKMTNKTLSHSESQVFALTPALHKLQLGEETQSDEPNLESLQSEPRELPQRSQEANMTESRKAEDEMQKSAWDQPSLPEGNKNKTNLDDLVKGENRSSVKHRLAAMSKASRKFPAKDVSPRRHVATIFPQSGSRSGFDHLSLGTVECNPLFPEPTPKSAESIGESRLSENGKHVKKSENLLPITVLPNREPSTHVSNQKSNSISQRHQNEFKNVSESPSKHENSKDVTAAQNLVRESGAPSPITFTSLREAEFSDNQRRLSPPFPLEPAQKSRVSSPLASFLQQQRSASSLEWEPEPHLYRSKSLKSINVHGDLLRKSHPPKVRERHFSESTSIDNALSRLTLGNEFSVNNGYSRRFRSFSELPSCDGNESWAYRSGTKTGPRSAISIYRPIDYGIFGKEQQLAFLENVKRSLTQGRLWKPSFLKNPGFLKDDLRNPPNPSESLSSNSPSSQVPEDGLSPSEPLNIYEDDPVDSNCDTDTTTDDEYYLDENDKESEL

SEQ ID NO: 45637 - protein, 860 aa, Homo sapiens
MAPPSTREPRVLSATSATKSDGEMVLPGFPDADSFVKFALGSVVAVTKASGGLPQFGDEYDFYRSFPGFQAFCETQGDRLLQCMSRVMQYHGCRSNIKDRSKVTELEDKFDLLVDANDVILERVGILLDEASGVNKNQQPVLPAGLQVPKTVVSSWNRKAAEYGKKAKSETFRLLHAKNIIRPQLKFREKIDNSNTPFLPKIFIKPNAQKPLPQALSKERRERPQDRPEDLDVPPALADFIHQQRTQQVEQDMFAHPYQYELNHFTPADAVLQKPQPQLYRPIEETPCHFISSLDELVELNEKLLNCQEFAVDLEHHSYRSFLGLTCLMQISTRTEDFIIDTLELRSDMYILNESLTDPAIVKVFHGADSDIEWLQKDFGLYVVNMFDTHQAARLLNLGRHSLDHLLKLYCNVDSNKQYQLADWRIRPLPEEMLSYARDDTHYLLYIYDKMRLEMWERGNGQPVQLQVVWQRSRDICLKKFIKPIFTDESYLELYRKQKKHLNTQQLTAFQLLFAWRDKTARREDESYGYVLPNHMMLKIAEELPKEPQGIIACCNPVPPLVRQQINEMHLLIQQAREMPLLKSEVAAGVKKSGPLPSAERLENVLFGPHDCSHAPPDGYPIIPTSGSVPVQKQASLFPDEKEDNLLGTTCLIATAVITLFNEPSAEDSKKGPLTVAQKKAQNIMESFENPFRMISNRWKLAQVQVQKDSKEAVKKKAAEQTAAREQAKEACKAAAEQAISVRQQVVLENAAKKRERATSDPRTTEQKQEKKRLKISKKPKDPEPPEKEFTPYDYSQSDFKAFAGNSKSKVSSQFDPNKQTPSGKKCIAAKKIKQSVGNKSMSFPTGKSDRGFRYNWPQR

SEQ ID NO: 45638 - protein, 885 aa, Homo sapiens
MAPPSTREPRVLSATSATKSDGEMVLPGFPDADSFVKFALGSVVAVTKASGGLPQFGDEYDFYRSFPGFQAFCETQGDRLLQCMSRVMQYHGCRSNIKDRSKVTELEDKFDLLVDANDVILERVGILLDEASGVNKNQQPVLPAGLQVPKTVVSSWNRKAAEYGKKAKSETFRLLHAKNIIRPQLKFREKIDNSNTPFLPKIFIKPNAQKPLPQALSKERRERPQDRPEDLDVPPALADFIHQQRTQQVEQDMFAHPYQYELNHFTPADAVLQKPQPQLYRPIEETPCHFISSLDELVELNEKLLNCQEFAVDLEHHSYRSFLGLTCLMQISTRTEDFIIDTLELRSDMYILNESLTDPAIVKVFHGADSDIEWLQKDFGLYVVNMFDTHQAARLLNLGRHSLDHLLKLYCNVDSNKQYQLADWRIRPLPEEMLSYARDDTHYLLYIYDKMRLEMWERGNGQPVQLQVVWQRSRDICLKKFIKPIFTDESYLELYRKQKKHLNTQQLTAFQLLFAWRDKTARREDESYGYVLPNHMMLKIAEELPKEPQGIIACCNPVPPLVRQQINEMHLLIQQAREMPLLKSEVAAGVKKSGPLPSAERLENVLFGPHDCSHAPPDGYPIIPTSGSVPVQKQASLFPDEKEDNLLGTTCLIATAVITLFNEPSAEDSKKGPLTVAQKKAQNIMESFENPFRMFLPSLGHRAPVSQAAKFDPSTKIYEISNRWKLAQVQVQKDSKEAVKKKAAEQTAAREQAKEACKAAAEQAISVRQQVVLENAAKKRERATSDPRTTEQKQEKKRLKISKKPKDPEPPEKEFTPYDYSQSDFKAFAGNSKSKVSSQFDPNKQTPSGKKCIAAKKIKQSVGNKSMSFPTGKSDRGFRYNWPQR

SEQ ID NO: 45639 - protein, 679 aa, Homo sapiens
MAPPSTREPRVLSATSATKSDGEMVLPGFPDADSFVKFALGSVVAVTKASGGLPQFGDEYDFYRSFPGFQAFCETQGDRLLQCMSRVMQYHGCRSNIKDRSKVTELEDKFDLLVDANDVILERVGILLDEASGVNKNQQPVLPAGLQVPKTVVSSWNRKAAEYGKKAKSETFRLLHAKNIIRPQLKFREKIDNSNTPFLPKIFIKPNAQKPLPQALSKERRERPQDRPEDLDVPPALADFIHQQRTQQVEQDMFAHPYQYELNHFTPADAVLQKPQPQLYRPIEETPCHFISSLDELVELNEKLLNCQEFAVDLEHHSYRSFLGLTCLMQISTRTEDFIIDTLELRSDMYILNESLTDPAIVKVFHGADSDIEWLQKDFGLYVVNMFDTHQAARLLNLGRHSLDHLLKLYCNVDSNKQYQLADWRIRPLPEEMLSYARDDTHYLLYIYDKMRLEMWERGNGQPVQLQVVWQRSRDICLKKFIKPIFTDESYLELYRKQKKHLNTQQLTAFQLLFAWRDKTARREDESYGYVLPNHMMLKIAEELPKEPQGIIACCNPVPPLVRQQINEMHLLIQQAREMPLLKSEVAAGVKKSGPLPSAEVECRICFLPQEGKRQVTASASTPLTEACADSWQKATAGLHVLHASLLVSFNAEIGECSLWTSRLLPCPSGWLSNHPNQW

SEQ ID NO: 45640 - protein, 248 aa, Homo sapiens
MAAGFKTVEPLEYYRRFLKENCRPDGRELGEFRTTTVNIGSISTADGSALVKLGNTTVICGVKAFRSGPPGEEAQVASQFIADVIENSQIIQKEDLCISPGKLVWVLYCDLICLDYDGNILDACTFALLAALKNVQLPEVTINEETALAEVNLKKKSYLNIRTHPVATSFAVFDDTLLIVDPTGEEEHLATGTLTIVMDEEGKLCCLHKPGGSGLTGAKLQDCMSRAVTRHKEVKKLMDEVIKSMKPK

SEQ ID NO: 45641 - protein, 276 aa, Homo sapiens
MAAGFKTVEPLEYYRRFLKENCRPDGRELGEFRTTTVNIGSISTADGSALVKLGNTTVICGVKAEFAAPSTDAPDKGYVVPNVDLPPLCSSRFRSGPPGEEAQVASQFIADVIENSQIIQKEDLCISPGKLVWVLYCDLICLDYDGNILDACTFALLAALKNVQLPEVTINEETALAEVNLKKKSYLNIRTHPVATSFAVFDDTLLIVDPTGEEEHLATGTLTIVMDEEGKLCCLHKPGGSGLTGAKLQDCMSRAVTRHKEVKKLMDEVIKSMKPK

SEQ ID NO: 45642 - protein, 439 aa, Homo sapiens
MKETPLSNCERRFLLRAIEEKKRLDGRQTYDYRNIRISFGTDYGCCIVELGKTRVLGQVSCELVSPKLNRATEGILFFNLELSQMAAPAFEPGRQSDLLVKLNRLMERCLRNSKCIDTESLCVVAGEKVWQIRVDLHLLNHDGNIIDAASIAAIVALCHFRRPDVSVQGDEVTLYTPEERDPVPLSIHHMPICVSFAFFQQGTYLLVDPNEREERVMDGLLVIAMNKHREICTIQSSGGIMLLKDQVLRCSKIAGVKVAEITELILKALENDQKVRKEGGKFGFAESIANQRITAFKMEKAPIDTSDVEEKAEEIIAEAEPPSEVVSTPVLWTPGTAQIGEGVENSWGDLEDSEKEDDEGGGDQAIILDGIKMDTGVEVSDIGSQDAPIILSDSEEEEMIILEPDKNPKKIRTQTTSAKQEKAPSKKPVKRRKKKRAAN

SEQ ID NO: 45643 - protein, 456 aa, Homo sapiens
MKETPLSNCERRFLLRAIEEKKRLDGRQTYDYRNIRISFGTDYGCCIVELGKTRVLGQVSCELVSPKLNRATEGILFFNLELSQMAAPAFEPGRQSDLLVKLNRLMERCLRNSKCIDTESLCVVAGEKVWQIRVDLHLLNHDGNIIDAASIAAIVALCHFRRPDVSVQGDEVTLYTPEERDPVPLSIHHMPICVSFAFFQQGTYLLVDPNEREERVMDGLLVIAMNKHREICTIQSSGGIMLLKDQVLRCSKIAGVKVAEITELILKALENDQKVRKEGGKFGFAESIANQRITAFKMEKAPIDTSDVEEKAEEIIAEAEPPSEVVSTPVLWTPGTAQIGEGVENSWGDLEDSEKEDDEGGGDQAIILDGIKMDTGVEVSDIGSQELGFHHVGQTGLEFLTSDAPIILSDSEEEEMIILEPDKNPKKIRTQTTSAKQEKAPSKKPVKRRKKKRAAN

SEQ ID NO: 45644 - protein, 676 aa, Homo sapiens
MQSWRRRKSLWLALSASWLLLVLLGGFSLLRLALPPRPRPGASQGWPRWLDAELLQSFSQPGELPEDAVSPPQAPHGGSCNWESCFDTSKCRGDGLKVFVYPAVGTISETHRRILASIEGSRFYTFSPAGACLLLLLSLDAQTGECSSMPLQWNRGRNHLVLRLHPAPCPRTFQLGQAMVAEASPTVDSFRPGFDVALPFLPEAHPLRGGAPGQLRQHSPQPGVALLALEEERGGWRTADTGSSACPWDGRCEQDPGPGQTQRQETLPNATFCLISGHRPEAASRFLQALQAGCIPVLLSPRWELPFSEVIDWTKAAIVADERLPLQVLAALQEMSPARVLALRQQTQFLWDAYFSSVEKVIHTTLEVIQDRIFGTSAHPSLLWNSPPGALLALSTFSTSPQDFPFYYLQQGSRPEGRFSALIWVGPPGQPPLKLIQAVAGSQHCAQILVLWSNERPLPSRWPETAVPLTVIDGHRKVSDRFYPYSTIRTDAILSLDARSSLSTSEVDFAFLVWQSFPERMVGFLTSSHFWDEAHGGWGYTAERTNEFSMVLTTAAFYHRYYHTLFTHSLPKALRTLADEAPTCVDVLMNFIVAAVTKLPPIKVPYGKQRQEAAPLAPGGPGPRPKPPAPAPDCINQIAAAFGHMPLLSSRLRLDPVLFKDPVSVQRKKYRSLEKP

SEQ ID NO: 45645 - protein, 330 aa, Homo sapiens
MRCCHICKLPGRVMGIRVLRLSLVVILVLLLVAGALTALLPSVKEDKMLMLRREIKSQGKSTMDSFTLIMQTYNRTDLLLKLLNHYQAVPNLHKVIVVWNNIGEKAPDELWNSLGPHPIPVIFKQQTANRMRNRLQVFPELETNAVLMVDDDTLISTPDLVFAFSVWQQFPDQIVGFVPRKHVSTSSGIYSYGSFEMQAPGSGNGDQYSMVLIGASFFNSKYLELFQRQPAAVHALIDDTQNCDDIAMNFIIAKHIGKTSGIFVKPVNMDNLEKETNSGYSGMWHRAEHALQRSYCINKLVNIYDSMPLRYSNIMISQFGFPYANYKRKI

SEQ ID NO: 45646 - protein, 330 aa, Homo sapiens; identical to SEQ ID NO: 45645

SEQ ID NO: 45647 - protein, 117 aa, Homo sapiens
MGIRVLRLSLVVILVLLLVAGALTALLPSVKEDKMLMLRREIKSQGKSTMDSFTLIMQTYNRTDLLLKLLNHYQAVPNLHKVIVVWNNIGEKAPDELWNSLGPHPIPVIFKQQTANR

SEQ ID NO: 45648 - protein, 266 aa, Homo sapiens
MRTWNSGGTKCCHICKLPGRVMGIRVLRLSLVVILVLLLVAGALTALLPSVKEDKMLMLRREIKSQGKSTMDSFTLIMQTYNRTDLLLKLLNHYQAVPNLHKVIVVWNNIGEKAPDELWNSLGPHPIPVIFKQQTANRMRNRLQVFPELETNAVLMVDDDTLISTPDLVFAFSVWQQFPDQIVGFVPRKHVSTSSGIYSYGSFEMQAPGSGNGDQYSMVLIGASFFNSKYLELFQRQPAAVHALIDDTQNCDDIAMNFIIAKHIGK

SEQ ID NO: 45649 - protein, 317 aa, Homo sapiens [sequence omitted]

SEQ ID NO: 45650 - protein, 919 aa, Homo sapiens
MTGYTMLRNGGAGNGGQTCMLRWSNRIRLTWLSFTLFVILVFFPLIAHYYLTTLDEADEAGKRIFGPRVGNELCEVKHVLDLCRIRESVSEELLQLEAKRQELNSEIAKLNLKIEACKKSIENAKQDLLQLKNVISQTEHSYKELMAQNQPKLSLPIRLLPEKDDAGLPPPKATRGCRLHNCFDYSRCPLTSGFPVYVYDSDQFVFGSYLDPLVKQAFQATARANVYVTENADIACLYVILVGEMQEPVVLRPAELEKQLYSLPHWRTDGHNHVIINLSRKSDTQNLLYNVSTGRAMVAQSTFYTVQYRPGFDLVVSPLVHAMSEPNFMEIPPQVPVKRKYLFTFQGEKIESLRSSLQEARSFEEEMEGDPPADYDDRIIATLKAVQDSKLDQVLVEFTCKNQPKPSLPTEWALCGEREDRLELLKLSTFALIITPGDPRLVISSGCATRLFEALEVGAVPVVLGEQVQLPYQDMLQWNEAALVVPKPRVTEVHFLLRSLSDSDLLAMRRQGRFLWETYFSTADSIFNTVLAMIRTRIQIPAAPIREEAAAEIPHRSGKAAGTDPNMADNGDLDLGPVETEPPYASPRYLRNFTLTVTDFYRSWNCAPGPFHLFPHTPFDPVLPSEAKFLGSGTGFRPIGGGAGGSGKEFQAALGGNVPREQFTVVMLTYEREEVLMNSLERLNGLPYLNKVVVVWNSPKLPSEDLLWPDIGVPIMVVRTEKNSLNNRFLPWNEIETEAILSIDDDAHLRHDEIMFGFRVWREARDRIVGFPGRYHAWDIPHQSWLYNSNYSCELSMVLTGAAFFHKYYAYLYSYVMPQAIRDMVDEYINCEDIAMNFLVSHITRKPPIKVTSRWTFRCPGCPQALSHDDSHFHERHKCINFFVKVYGYMPLLYTQFRVDSVLFKTRLPHDKTKCFKFI

SEQ ID NO: 45651 - protein, 535 aa, Homo sapiens
MLHKSEEGRVLVEFTCKNQPKPSLPTEWALCGEREDRLELLKLSTFALIITPGDPRLVISSGCATRLFEALEVGAVPVVLGEQVQLPYQDMLQWNEAALVVPKPRVTEVHFLLRSLSDSDLLAMRRQGRFLWETYFSTADSIFNTVLAMIRTRIQIPAAPIREEAAAEIPHRSGKAAGTDPNMADNGDLDLGPVETEPPYASPRYLRNFTLTVTDFYRSWNCAPGPFHLFPHTPFDPVLPSEAKFLGSGTGFRPIGGGAGGSGKEFQAALGGNVPREQFTVVMLTYEREEVLMNSLERLNGLPYLNKVVVVWNSPKLPSEDLLWPDIGVPIMVVRTEKNSLNNRFLPWNEIETEAILSIDDDAHLRHDEIMFGFRVWREARDRIVGFPGRYHAWDIPHQSWLYNSNYSCELSMVLTGAAFFHKYYAYLYSYVMPQAIRDMVDEYINCEDIAMNFLVSHITRKPPIKVTSRWTFRCPGCPQALSHDDSHFHERHKCINFFVKVYGYMPLLYTQFRVDSVLFKTRLPHDKTKCFKFI

SEQ ID NO: 45652 - protein, 1071 aa, Homo sapiens
MPAIMTMLADHAARQLLDFSQKLDINLLDNVVNCLYHGEGAQQRMAQEVLTHLKEHPDAWTRVDTILEFSQNMNTKYYGLQILENVIKTRWKILPRNQCEGIKKYVVGLIIKTSSDPTCVEKEKVYIGKLNMILVQILKQEWPKHWPTFISDIVGASRTSESLCQNNMVILKLLSEEVFDFSSGQITQVKSKHLKDSMCNEFSQIFQLCQFVMENSQNAPLVHATLETLLRFLNWIPLGYIFETKLISTLIYKFLNVPMFRNVSLKCLTEIAGVSVSQYEEQFVTLFTLTMMQLKQMLPLNTNIRLAYSNGKDDEQNFIQNLSLFLCTFLKEHDQLIEKRLNLRETLMEALHYMLLVSEVEETEIFKICLEYWNHLAAELYRESPFSTSASPLLSGSQHFDVPPRRQLYLPMLFKVRLLMVSRMAKPEEVLVVENDQGEVVREFMKDTDSINLYKNMRETLVYLTHLDYVDTERIMTEKLHNQVNGTEWSWKNLNTLCWAIGSISGAMHEEDEKRFLVTVIKDLLGLCEQKRGKDNKAIIASNIMYIVGQYPRFLRAHWKFLKTVVNKLFEFMHETHDGVQDMACDTFIKIAQKCRRHFVQVQVGEVMPFIDEILNNINTIICDLQPQQVHTFYEAVGYMIGAQTDQTVQEHLIEKYMLLPNQVWDSIIQQATKNVDILKDPETVKQLGSILKTNVRACKAVGHPFVIQLGRIYLDMLNVYKCLSENISAAIQANGEMVTKQPLIRSMRTVKRETLKLISGWVSRSNDPQMVAENFVPPLLDAVLIDYQRNVPAAREPEVLSTMAIIVNKLGGHITAEIPQIFDAVFECTLNMINKDFEEYPEHRTNFFLLLQAVNSHCFPAFLAIPPTQFKLVLDSIIWAFKHTMRNVADTGLQILFTLLQNVAQEEAAAQSFYQTYFCDILQHIFSVVTDTSHTAGLTMHASILAYMFNLVEEGKISTSLNPGNPVNNQIFLQEYVANLLKSAFPHLQDAQVKLFVTGLFSLNQDIPAFKEHLRDFLVQIKEFAGEDTSDLFLEEREIALRQADEEKHKRQMSVPGIFNPHEIPEEMCD

SEQ ID NO: 45653 - protein, 1071 aa, Homo sapiens; identical to SEQ ID NO: 45652

SEQ ID NO: 45654 - protein, 1071 aa, Homo sapiens; identical to SEQ ID NO: 45652

SEQ ID NO: 45655 - protein, 100 aa, Homo sapiens
MPAIMTMLADHAARQLLDFSQKLDINLLDNVVNCLYHGEGAQQRMAQEVLTHLKEHPDAWTRVDTILEFSQNMNTKYYGLQILENVIKTRWKILPRNQCE

SEQ ID NO: 45656 - protein, 95 aa, Homo sapiens
MPAIMTMLADHAARQLLDFSQKLDINLLDNVVNCLYHGEGAQQRMAQEVLTHLKEHPDAWTRVDTILEFSQNMNTKYYGLQILENVIKTRWKILP

SEQ ID NO: 45657 - protein, 59 aa, Homo sapiens
MPAIMTMLADHAARQLLDFSQKLDINLLDNVVNCLYHGEGAQQRMAQEVLTHLKEHPDA

SEQ ID NO: 45658 - protein, 132 aa, Homo sapiens
MPAIMTMLADHAARQLLDFSQKLDINLLDNVVNCLYHGEGAQQRMAQEVLTHLKEHPDAWTRVDTILEFSQNMNTKYYGLQILENVIKTRWKILPRNQCEGIKKYVVGLIIKTSSDPTCVEKEKVYIGKLNM

SEQ ID NO: 45659 - protein, 62 aa, Homo sapiens
MPAIMTMLADHAARQLLDFSQKLDINLLDNVVNCLYHGEGAQQRMAQEVLTHLKEHPDAWTR

SEQ ID NO: 45660 - protein, 179 aa, Homo sapiens
MPAIMTMLADHAARQLLDFSQKLDINLLDNVVNCLYHGEGAQQRMAQEVLTHLKEHPDAWTRVDTILEFSQNMNTKYYGLQILENVIKTRWKILPRNQCEGIKKYVVGLIIKTSSDPTCVEKEKVYIGKLNMILVQILKQEWPKHWPTFISDIVGASRTSESLCQNNMVILKLLSEEVF

SEQ ID NO: 45661 - protein, 94 aa, Homo sapiens
MPAIMTMLADHAARQLLDFSQKLDINLLDNVVNCLYHGEGAQQRMAQEVLTHLKEHPDAWTRVDTILEFSQNMNTKYYGLQILENVIKTRWKIL

SEQ ID NO: 45662 - protein, 1204 aa, Homo sapiens
MAMDQVNALCEQLVKAVTVMMDPNSTQRYRLEALKFCEEFKEKCPICVPCGLRLAEKTQVAIVRHFGLQILEHVVKFRWNGMSRLEKVYLKNSVMELIANGTLNILEEENHIKDALSRIVVEMIKREWPQHWPDMLIELDTLSKQGETQTELVMFILLRLAEDVVTFQTLPPQRRRDIQQTLTQNMERIFSFLLNTLQENVNKYQQVKTDTSQESKAQANCRVGVAALNTLAGYIDWVSMSHITAENCKLLEILCLLLNEQELQLGAAECLLIAVSRKGKLEDRKPLMVLFGDVAMHYILSAAQTADGGGLVEKHYVFLKRLCQVLCALGNQLCALLGADSDVETPSNFGKYLESFLAFTTHPSQFLRSSTQMTWGALFRHEILSRDPLLLAIIPKYLRASMTNLVKMGFPSKTDSPSCEYSRFDFDSDEDFNAFFNSSRAQQGEVMRLACRLDPKTSFQMAGEWLKYQLSTFLDAGSVNSCSAVGTGEGSLCSVFSPSFVQWEAMTLFLESVITQMFRTLNREEIPVNDGIELLQMVLNFDTKDPLILSCVLTNVSALFPFVTYRPEFLPQVFSKLFSSVTFETVEESKAPRTRAVRNVRRHACSSIIKMCRDYPQLVLPNFDMLYNHVKQLLSNELLLTQMEKCALMEALVLISNQFKNYERQKVFLEELMAPVASIWLSQDMHRVLSDVDAFIAYVGTDQKSCDPGLEDPCGLNRARMSFCVYSILGVVKRTCWPTDLEEAKAGGFVVGYTSSGNPIFRNPCTEQILKLLDNLLALIRTHNTLYAPEMLAKMAEPFTKALDMLDAEKSAILGLPQPLLELNDSPVFKTVLERMQRFFSTLYENCFHILGKAGPSMQQDFYTVEDLATQLLSSAFVNLNNIPDYRLRPMLRVFVKPLVLFCPPEHYEALVSPILGPLFTYLHMRLSQKWQVINQRSLLCGEDEAADENPESQEMLEEQLVRMLTREVMDLITVCCVSKKGADHSSAPPADGDDEEMMATEVTPSAMAELTDLGKCLMKHEDVCTALLITAFNSLAWKDTLSCQRTTSQLCWPLLKQVLSGTLLADAVTWLFTSVLKGLQMHGQHDGCMASLVHLAFQIYEALRPRYLEIRAVMEQIPEIQKDSLDQFDCKLLNPSLQKVADKRRKDQFKRLIAGCIGKPLGEQFRKEVHIKNLPSLFKKTKPMLETEVLDNDGGGLATIFEP

SEQ ID NO: 45663 - protein, 170 aa, Homo sapiens
MAGEWLKYQLSTFLDAGSVNSCSAVGTGEGSLCSVFSPSFVQWEAMTLFLESVITQMFRTLNREEIPVNDGIELLQMVLNFDTKDPLILSCVLTNVSALFPFVTYRPEFLPQVFSKLFSSVTFETVEESKPPHFPPLSAWKEIQVWSWREQALCRTRSNYTKVSRKGVRA

SEQ ID NO: 45664 - protein, 721 aa, Homo sapiens
MAGEWLKYQLSTFLDAGSVNSCSAVGTGEGSLCSVFSPSFVQWEAMTLFLESVITQMFRTLNREEIPVNDGIELLQMVLNFDTKDPLILSCVLTNVSALFPFVTYRPEFLPQVFSKLFSSVTFETVEESKAPRTRAVRNVRRHACSSIIKMCRDYPQLVLPNFDMLYNHVKQLLSNELLLTQMEKCALMEALVLISNQFKNYERQKVFLEELMAPVASIWLSQDMHRVLSDVDAFIAYVGTDQKSCDPGLEDPCGLNRARMSFCVYSILGVVKRTCWPTDLEEAKAGGFVVGYTSSGNPIFRNPCTEQILKLLDNLLALIRTHNTLYAPEMLAKMAEPFTKALDMLDAEKSAILGLPQPLLELNDSPVFKTVLERMQRFFSTLYENCFHILGKAGPSMQQDFYTVEDLATQLLSSAFVNLNNIPDYRLRPMLHILSKPLVLFCPPEHYEALVSPILGPLFTYLHMRLSQKWQVINQRSLLCGEDEAADENPESQEMLEEQLVRMLTREVMDLITVCCVSKKGADHSSAPPADGDDEEMMATEVTPSAMAELTDLGKCLMKHEDVCTALLITAFNSLAWKDTLSCQRTTSQLCWPLLKQVLSGTLLADAVTWLFTSVLKGLQMHGQHDGCMASLVHLAFQIYEALRPRYLEIRAVMEQIPEIQKDSLDQFDCKLLNPSLQKVADKRRKDQFKRLIAGCIGKPLGEQFRKEVHIKNLPFVADL

SEQ ID NO: 45665 - protein, 736 aa, Homo sapiens
MHYILSAAQTADGGGLVEKHYVFLKRLCQVLCALGNQLCALLGADSDVETPSNFGKYLESFLAFTTHPSQFLRSSTQMTWGALFRHEILSRDPLLLAIIPKYLRASMTNLVKMGFPSKTDSPSCEYSRFDFDSDEDFNAFFNSSRAQQGEVMRLACRLDPKTSFQMAGEWLKYQLSTFLDAGSVNSCSAVGTGEGSLCSVFSPSFVQWEAMTLFLESVITQMFRTLNREEIPVNDGIELLQMVLNFDTKDPLILSCVLTNVSALFPFVTYRPEFLPQVFSKLFSSVTFETVEESKAPRTRAVRNVRRHACSSIIKMCRDYPQLVLPNFDMLYNHVKQLLSNELLLTQMEKCALMEALVLISNQFKNYERQKVFLEELMAPVASIWLSQDMHRVLSDVDAFIAYVGTDQKSCDPGLEDPCGLNRARMSFCVYSILGVVKRTCWPTDLEEAKAGGFVVGYTSSGNPIFRNPCTEQILKLLDNLLALIRTHNTLYAPEMLAKMAEPFTKALDMLDAEKSAILGLPQPLLELNDSPVFKTVLERMQRFFSTLYENCFHILGKAGPSMQQDFYTVEDLATQLLSSAFVNLNNIPDYRLRPMLHILSKPLVLFCPPEHYEALVSPILGPLFTYLHMRLSQKWQVINQRSLLCGEDEAADENPESQEMLEEQLVRMLTREVMDLITVCCVSKKGADHSSAPPADGDDEEMMATEVTPSAMAELTDLVSIQSTDKRVSPRAEVD

SEQ ID NO: 45666 - protein, 832 aa, Homo sapiens
MTWGALFRHEILSRDPLLLAIIPKYLRASMTNLVKMGFPSKTDSPSCEYSRFDFDSDEDFNAFFNSSRAQQGEVMRLACRLDPKTSFQMAGEWLKYQLSTFLDAGSVNSCSAVGTGEGSLCSVFSPSFVQWEAMTLFLESVITQMFRTLNREEIPVNDGIELLQMVLNFDTKDPLILSCVLTNVSALFPFVTYRPEFLPQVFSKLFSSVTFETVEESKAPRTRAVRNVRRHACSSIIKMCRDYPQLVLPNFDMLYNHVKQLLSNELLLTQMEKCALMEALVLISNQFKNYERQKVFLEELMAPVASIWLSQDMHRVLSDVDAFIAYVGTDQKSCDPGLEDPCGLNRARMSFCVYSILGVVKRTCWPTDLEEAKAGGFVVGYTSSGNPIFRNPCTEQILKLLDNLLALIRTHNTLYAPEMLAKMAEPFTKALDMLDAEKSAILGLPQPLLELNDSPVFKTVLERMQRFFSTLYENCFHILGKAGPSMQQDFYTVEDLATQLLSSAFVNLNNIPDYRLRPMLRVFVKPLVLFCPPEHYEALVSPILGPLFTYLHMRLSQKWQVINQRSLLCGEDEAADENPESQEMLEEQLVRMLTREVMDLITVCCVSKKGADHSSAPPADGDDEEMMATEVTPSAMAELTDLGKCLMKHEDVCTALLITAFNSLAWKDTLSCQRTTSQLCWPLLKQVLSGTLLADAVTWLFTSVLKGLQMHGQHDGCMASLVHLAFQIYEALRPRYLEIRAVMEQIPEIQKDSLDQFDCKLLNPSLQKVADKRRKDQFKRLIAGCIGKPLGEQFRKEVHIKNLPSLFKKTKPMLETEVLDNDGGGLATIFEP

SEQ ID NO: 45667 - protein, 1125 aa, Homo sapiens
MASEEASLRALESLMTEFFHDCTTNERKREIEELLNNFAQQIGAWRFCLYFLSSTRNDYVMMYSLTVFENLINKMWLGVPSQDKMEIRSCLPKLLLAHHKTLPYFIRNKLCKVIVDIGRQDWPMFYHDFFTNILQLIQSPVTTPLGLIMLKTTSEELACPREDLSVARKEELRKLLLDQVQTVLGLLTGILETVWDKHSVTAATPPPSPTSGESGDLLSNLLQSPSSAKLLNQPIPILDVESEYICSLALECLAHLFSWIPLSASITPSLLTTIFHFARFGCDIRARKMASVNGSSQNCVSGQERGRLGVLAMSCINELMSKNCVPMEFEEYLLRMFQQTFYLLQKITKDNNAHTVKSRLEELDESYIEKFTDFLRLFVSVHLRRIESYSQFPVVEFLTLLFKYTFHQPTHEGYFSCLDIWTLFLDYLTSKIKSRLGDKEAVLNRYEDALVLLLTEVLNRIQFRYNQAQLEELDDETLDDDQQTEWQRYLRQSLEVVAKVMELLPTHAFSTLFPVLQDNLEVYLGLQQFIVTSGSGHRLNITAENDCRRLHCSLRDLSSLLQAVGRLAEYFIGDVFAARFNDALTVVERLVKVTLYGSQIKLYNIETAVPSVLKPDLIDVHAQSLAALQAYSHWLAQYCSEVHRQNTQQFVTLISTTMDAITPLISTKVQDKLLLSACHLLVSLATTVRPVFLISIPAVQKVFNRITDASALRLVDKAQVLVCRALSNILLLPWPNLPENEQQWPVRSINHASLISALSRDYRNLKPSAVAPQRKMPLDDTKLIIHQTLSVLEDIVENISGESTKSRQICYQSLQESVQVSLALFPAFIHQSDVTDEMLSFFLTLFRGLRVQMGVPFTEQIIQTFLNMFTREQLAESILHEGSTGCRVVEKFLKILQVVVQEPGQVFKPFLPSIIALCMEQVYPIIAERPSPDVKAELFELLFRTLHHNWRYFFKSTVLASVQRGIAEEQMENEPQFSAIMQAFGQSFLQPDIHLFKQNLFYLETLNTKQKLYHKKIFRTAMLFQFVNVLLQVLVHKSHDLLQEEIGIAIYNMASVDFDGFFAAFLPEFLTSCDGVDANQKSVLGRNFKMDRDLPSFTQNVHRLVNDLRYYRLCNDSLPPGTVKL

SEQ ID NO: 45668 - protein, 1111 aa, Homo sapiens
MTEFFHDCTTNERKREIEELLNNFAQQIGAWRFCLYFLSSTRNDYVMMYSLTVFENLINKMWLGVPSQDKMEIRSCLPKLLLAHHKTLPYFIRNKLCKVIVDIGRQDWPMFYHDFFTNILQLIQSPVTTPLGLIMLKTTSEELACPREDLSVARKEELRKLLLDQVQTVLGLLTGILETVWDKHSVTAATPPPSPTSGESGDLLSNLLQSPSSAKLLNQPIPILDVESEYICSLALECLAHLFSWIPLSASITPSLLTTIFHFARFGCDIRARKMASVNGSSQNCVSGQERGRLGVLAMSCINELMSKNCVPMEFEEYLLRMFQQTFYLLQKITKDNNAHTVKSRLEELDESYIEKFTDFLRLFVSVHLRRIESYSQFPVVEFLTLLFKYTFHQPTHEGYFSCLDIWTLFLDYLTSKIKSRLGDKEAVLNRYEDALVLLLTEVLNRIQFRYNQAQLEELDDETLDDDQQTEWQRYLRQSLEVVAKVMELLPTHAFSTLFPVLQDNLEVYLGLQQFIVTSGSGHRLNITAENDCRRLHCSLRDLSSLLQAVGRLAEYFIGDVFAARFNDALTVVERLVKVTLYGSQIKLYNIETAVPSVLKPDLIDVHAQSLAALQAYSHWLAQYCSEVHRQNTQQFVTLISTTMDAITPLISTKVQDKLLLSACHLLVSLATTVRPVFLISIPAVQKVFNRITDASALRLVDKAQVLVCRALSNILLLPWPNLPENEQQWPVRSINHASLISALSRDYRNLKPSAVAPQRKMPLDDTKLIIHQTLSVLEDIVENISGESTKSRQICYQSLQESVQVSLALFPAFIHQSDVTDEMLSFFLTLFRGLRVQMGVPFTEQIIQTFLNMFTREQLAESILHEGSTGCRVVEKFLKILQVVVQEPGQVFKPFLPSIIALCMEQVYPIIAERPSPDVKAELFELLFRTLHHNWRYFFKSTVLASVQRGIAEEQMENEPQFSAIMQAFGQSFLQPDIHLFKQNLFYLETLNTKQKLYHKKIFRTAMLFQFVNVLLQVLVHKSHDLLQEEIGIAIYNMASVDFDGFFAAFLPEFLTSCDGVDANQKSVLGRNFKMDRDLPSFTQNVHRLVNDLRYYRLCNDSLPPGTVKL

SEQ ID NO: 45669 - protein, 1087 aa, Homo sapiens
MADHVQSLAQLENLCKQLYETTDTTTRLQAEKALVEFTNSPDCLSKCQLLLERGSSSYSQLLAATCLTKLVSRTNNPLPLEQRIDIRNYVLNYLATRPKLATFVTQALIQLYARITKLGWFDCQKDDYVFRNAITDVTRFLQDSVEYCIIGVTILSQLTNEINQADTTHPLTKHRKIASSFRDSSLFDIFTLSCNLLKQASGKNLNLNDESQHGLLMQLLKLTHNCLNFDFIGTSTDESSDDLCTVQIPTSWRSAFLDSSTLQLFFDLYHSIPPSFSPLVLSCLVQIASVRRSLFNNAERAKFLSHLVDGVKRILENPQSLSDPNNYHEFCRLLARLKSNYQLGELVKVENYPEVIRLIANFTVTSLQHWEFAPNSVHYLLSLWQRLAASVPYVKATEPHMLETYTPEVTKAYITSRLESVHIILRDGLEDPLEDTGLVQQQLDQLSTIGRCEYEKTCALLVQLFDQSAQSYQELLQSASASPMDIAVQEGRLTWLVYIIGAVIGGRVSFASTDEQDAMDGELVCRVLQLMNLTDSRLAQAGNEKLELAMLSFFEQFRKIYIGDQVQKSSKLYRRLSEVLGLNDETMVLSVFIGKIITNLKYWGRCEPITSKTLQLLNDLSIGYSSVRKLVKLSAVQFMLNNHTSEHFSFLGINNQSNLTDMRCRTTFYTALGRLLMVDLGEDEDQYEQFMLPLTAAFEAVAQMFSTNSFNEQEAKRTLVGLVRDLRGIAFAFNAKTSFMMLFEWIYPSYMPILQRAIELWYHDPACTTPVLKLMAELVHNRSQRLQFDVSSPNGILLFRETSKMITMYGNRILTLGEVPKDQVYALKLKGISICFSMLKAALSGSYVNFGVFRLYGDDALDNALQTFIKLLLSIPHSDLLDYPKLSQSYYSLLEVLTQDHMNFIASLEPHVIMYILSSISEGLTALDTMVCTGCCSCLDHIVTYLFKQLSRSTKKRTTPLNQESDRFLHIMQQHPEMIQQMLSTVLNIIIFEDCRNQWSMSRPLLGLILLNEKYFSDLRNSIVNSQPPEKQQAMHLCFENLMEGIERNLLTKNRDRFTQNLSAFRREVNDSMKNSTYGVNSNDMMS

SEQ ID NO: 45670 - protein, 1088 aa, Homo sapiens
MRDPGRKSLAQLENLCKQLYETTDTTTRLQAEKALVEFTNSPDCLSKCQLLLERGSSSYSQLLAATCLTKLVSRTNNPLPLEQRIDIRNYVLNYLATRPKLATFVTQALIQLYARITKLGWFDCQKDDYVFRNAITDVTRFLQDSVEYCIIGVTILSQLTNEINQADTTHPLTKHRKIASSFRDSSLFDIFTLSCNLLKQASGKNLNLNDESQHGLLMQLLKLTHNCLNFDFIGTSTDESSDDLCTVQIPTSWRSAFLDSSTLQLFFDLYHSIPPSFSPLVLSCLVQIASVRRSLFNNAERAKFLSHLVDGVKRILENPQSLSDPNNYHEFCRLLARLKSNYQLGELVKVENYPEVIRLIANFTVTSLQHWEFAPNSVHYLLSLWQRLAASVPYVKATEPHMLETYTPEVTKAYITSRLESVHIILRDGLEDPLEDTGLVQQQLDQLSTIGRCEYEKTCALLVQLFDQSAQSYQELLQSASASPMDIAVQEGRLTWLVYIIGAVIGGRVSFASTDEQDAMDGELVCRVLQLMNLTDSRLAQAGNEKLELAMLSFFEQFRKIYIGDQVQKSSKLYRRLSEVLGLNDETMVLSVFIGKIITNLKYWGRCEPITSKTLQLLNDLSIGYSSVRKLVKLSAVQFMLNNHTSEHFSFLGINNQSNLTDMRCRTTFYTALGRLLMVDLGEDEDQYEQFMLPLTAAFEAVAQMFSTNSFNEQEAKRTLVGLVRDLRGIAFAFNAKTSFMMLFEWIYPSYMPILQRAIELWYHDPACTTPVLKLMAELVHNRSQRLQFDVSSPNGILLFRETSKMITMYGNRILTLGEVPKDQVYALKLKGISICFSMLKAALSGSYVNFGVFRLYGDDALDNALQTFIKLLLSIPHSDLLDYPKLSQSYYSLLEVLTQDHMNFIASLEPHVIMYILSSISEGLTALDTMVCTGCCSCLDHIVTYLFKQLSRSTKKRTTPLNQESDRFLHIMQQHPEMIQQMLSTVLNIIIFEDCRNQWSMSRPLLGLILLNEKYFSDLRNSIVNSQPPEKQQAMHLCFENLMEGIERNLLTKNRDRFTQNLSAFRREVNDSMKNSTYGVNSNDMMS

SEQ ID NO: 45671 - protein, 1096 aa, Homo sapiens
MADHVQSLAQLENLCKQLYETTDTTTRLQAEKALVEFTNSPDCLSKCQLLLERGSSSYSQLLAATCLTKLVSRTNNPLPLEQRIDIRNYVLNYLATRPKLATFVTQALIQLYARITKLGWFDCQKDDYVFRNAITDVTRFLQDSVEYCIIGVTILSQLTNEINQVSATAFLIEADTTHPLTKHRKIASSFRDSSLFDIFTLSCNLLKQASGKNLNLNDESQHGLLMQLLKLTHNCLNFDFIGTSTDESSDDLCTVQIPTSWRSAFLDSSTLQLFFDLYHSIPPSFSPLVLSCLVQIASVRRSLFNNAERAKFLSHLVDGVKRILENPQSLSDPNNYHEFCRLLARLKSNYQLGELVKVENYPEVIRLIANFTVTSLQHWEFAPNSVHYLLSLWQRLAASVPYVKATEPHMLETYTPEVTKAYITSRLESVHIILRDGLEDPLEDTGLVQQQLDQLSTIGRCEYEKTCALLVQLFDQSAQSYQELLQSASASPMDIAVQEGRLTWLVYIIGAVIGGRVSFASTDEQDAMDGELVCRVLQLMNLTDSRLAQAGNEKLELAMLSFFEQFRKIYIGDQVQKSSKLYRRLSEVLGLNDETMVLSVFIGKIITNLKYWGRCEPITSKTLQLLNDLSIGYSSVRKLVKLSAVQFMLNNHTSEHFSFLGINNQSNLTDMRCRTTFYTALGRLLMVDLGEDEDQYEQFMLPLTAAFEAVAQMFSTNSFNEQEAKRTLVGLVRDLRGIAFAFNAKTSFMMLFEWIYPSYMPILQRAIELWYHDPACTTPVLKLMAELVHNRSQRLQFDVSSPNGILLFRETSKMITMYGNRILTLGEVPKDQVYALKLKGISICFSMLKAALSGSYVNFGVFRLYGDDALDNALQTFIKLLLSIPHSDLLDYPKLSQSYYSLLEVLTQDHMNFIASLEPHVIMYILSSISEGLTALDTMVCTGCCSCLDHIVTYLFKQLSRSTKKRTTPLNQESDRFLHIMQQHPEMIQQMLSTVLNIIIFEDCRNQWSMSRPLLGLILLNEKYFSDLRNSIVNSQPPEKQQAMHLCFENLMEGIERNLLTKNRDRFTQNLSAFRREVNDSMKNSTYGVNSNDMMS

SEQ ID NO: 45672 - protein, 2120 aa, Homo sapiens
MRSFKRVNFGTLLSSQKEAEELLPALKEFLSNPPAGFPSSRSDAERRQACDAILRACNQQLTAKLACPRHLGSLLELAELACDGYLVSTPQRPPLYLERILFVLLRNAAAQGSPEATLRLAQPLHACLVQCSREAAPQDYEAVARGSFSLLWKGAEALLERRAAFAARLKALSFLVLLEDESTPCEVPHFASPTACRAVAAHQLFDASGHGLNEADADFLDDLLSRHVIRALVGERGSSSGLLSPQRALCLLELTLEHCRRFCWSRHHDKAISAVEKAHSYLRNTNLAPSLQLCQLGVKLLQVGEEGPQAVAKLLIKASAVLSKSMEAPSPPLRALYESCQFFLSGLERGTKRRYRLDAILSLFAFLGGYCSLLQQLRDDGVYGGSSKQQQSFLQMYFQGLHLYTVVVYDFAQGCQIVDLADLTQLVDSCKSTVVWMLEALEGLSGQELTDHMGMTASYTSNLAYSFYSHKLYAEACAISEPLCQHLGLVKPGTYPEVPPEKLHRCFRLQVESLKKLGKQAQGCKMVILWLAALQPCSPEHMAEPVTFWVRVKMDAARAGDKELQLKTLRDSLSGWDPETLALLLREELQAYKAVRADTGQERFNIICDLLELSPEETPAGAWARATHLVELAQVLCYHDFTQQTNCSALDAIREALQLLDSVRPEAQARDQLLDDKAQALLWLYICTLEAKMQEGIERDRRAQAPGNLEEFEVNDLNYEDKLQEDRFLYSNIAFNLAADAAQSKCLDQALALWKELLTKGQAPAVRCLQQTAASLQILAALYQLVAKPMQALEVLLLLRIVSERLKDHSKAAGSSCHITQLLLTLGCPSYAQLHLEEAASSLKHLDQTTDTYLLLSLTCDLLRSQLYWTHQKVTKGVSLLLSVLRDPALQKSSKAWYLLRVQVLQLVAAYLSLPSNNLSHSLWEQLCAQGWQTPEIALIDSHKLLRSIILLLMGSDILSTQKAAVETSFLDYGENLVQKWQVLSEVLSCSEKLVCHLGRLGSVSEAKAFCLEALKLTTKLQIPRQCALFLVLKGELELARNDIDLCQSDLQQVLFLLESCTEFGGVTQHLDSVKKVHLQKGKQQAQVPCPPQLPEEELFLRGPALELVATVAKEPGPIAPSTNSSPVLKTKPQPIPNFLSHSPTCDCSLCASPVLTAVCLRWVLVTAGVRLAMGHQAQGLDLLQVVLKGCPEAAERLTQALQASLNHKTPPSLVPSLLDEILAQAYTLLALEGLNQPSNESLQKVLQSGLKFVAARIPHLEPWRASLLLIWALTKLGGLSCCTTQLFASSWGWQPPLIKSVPGSEPSKTQGQKRSGRGRQKLASAPLRLNNTSQKGLEGRGLPCTPKPPDRIRQAGPHVPFTVFEEVCPTESKPEVPQAPRVQQRVQTRLKVNFSDDSDLEDPVSAEAWLAEEPKRRGTASRGRGRARKGLSLKTDAVVAPGSAPGNPGLNGRSRRAKKVASRHCEERRPQRASDQARPGPEIMRTIPEEELTDNWRKMSFEILRGSDGEDSASGGKTPAPGPEAASGEWELLRLDSSKKKLPSPCPDKESDKDLGPRLRLPSAPVATGLSTLDSICDSLSVAFRGISHCPPSGLYAHLCRFLALCLGHRDPYATAFLVTESVSITCRHQLLTHLHRQLSKAQKHRGSLEIADQLQGLSLQEMPGDVPLARIQRLFSFRALESGHFPQPEKESFQERLALIPSGVTVCVLALATLQPGTVGNTLLLTRLEKDSPPVSVQIPTGQNKLHLRSVLNEFDAIQKAQKENSSCTDKREWWTGRLALDHRMEVLIASLEKSVLGCWKGLLLPSSEEPGPAQEASRLQELLQDCGWKYPDRTLLKIMLSGAGALTPQDIQALAYGLCPTQPERAQELLNEAVGRLQGLTVPSNSHLVLVLDKDLQKLPWESMPSLQALPVTRLPSFRFLLSYSIIKEYGASPVLSQGVDPRSTFYVLNPHNNLSSTEEQFRANFSSEAGWRGVVGEVPRPEQVQEALTKHDLYIYAGHGAGARFLDGQAVLRLSCRAVALLFGCSSAALAVRGNLEGAGIVLKYIMAGCPLFLGNLWDVTDRDIDRYTEALLQGWLGAGPGAPLLYYVNQARQAPRLKYLIGAAPIAYGLPVSLR

SEQ ID NO: 45673 - protein, 2120 aa, Homo sapiens; identical to SEQ ID NO: 45672

SEQ ID NO: 45674 - protein, 1795 aa, Homo sapiens
MEAPSPPLRALYESCQFFLSGLERGTKRRYRLDAILSLFAFLGGYCSLLQQLRDDGVYGGSSKQQQSFLQMYFQGLHLYTVVVYDFAQGCQIVDLADLTQLVDSCKSTVVWMLEALEGLSGQELTDHMGMTASYTSNLAYSFYSHKLYAEACAISEPLCQHLGLVKPGTYPEVPPEKLHRCFRLQVESLKKLGKQAQGCKMVILWLAALQPCSPEHMAEPVTFWVRVKMDAARAGDKELQLKTLRDSLSGWDPETLALLLREELQAYKAVRADTGQERFNIICDLLELSPEETPAGAWARATHLVELAQVLCYHDFTQQTNCSALDAIREALQLLDSVRPEAQARDQLLDDKAQALLWLYICTLEAKMQEGIERDRRAQAPGNLEEFEVNDLNYEDKLQEDRFLYSNIAFNLAADAAQSKCLDQALALWKELLTKGQAPAVRCLQQTAASLQILAALYQLVAKPMQALEVLLLLRIVSERLKDHSKAAGSSCHITQLLLTLGCPSYAQLHLEEAASSLKHLDQTTDTYLLLSLTCDLLRSQLYWTHQKVTKGVSLLLSVLRDPALQKSSKAWYLLRVQVLQLVAAYLSLPSNNLSHSLWEQLCAQGWQTPEIALIDSHKLLRSIILLLMGSDILSTQKAAVETSFLDYGENLVQKWQVLSEVLSCSEKLVCHLGRLGSVSEAKAFCLEALKLTTKLQIPRQCALFLVLKGELELARNDIDLCQSDLQQVLFLLESCTEFGGVTQHLDSVKKVHLQKGKQQAQVPCPPQLPEEELFLRGPALELVATVAKEPGPIAPSTNSSPVLKTKPQPIPNFLSHSPTCDCSLCASPVLTAVCLRWVLVTAGVRLAMGHQAQGLDLLQVVLKGCPEAAERLTQALQASLNHKTPPSLVPSLLDEILAQAYTLLALEGLNQPSNESLQKVLQSGLKFVAARIPHLEPWRASLLLIWALTKLGGLSCCTTQLFASSWGWQPPLIKSVPGSEPSKTQGQKRSGRGRQKLASAPLRLNNTSQKGLEGRGLPCTPKPPDRIRQAGPHVPFTVFEEVCPTESKPEVPQAPRVQQRVQTRLKVNFSDDSDLEDPVSAEAWLAEEPKRRGTASRGRGRARKGLSLKTDAVVAPGSAPGNPGLNGRSRRAKKVASRHCEERRPQRASDQARPGPEIMRTIPEEELTDNWRKMSFEILRGSDGEDSASGGKTPAPGPEAASGEWELLRLDSSKKKLPSPCPDKESDKDLGPRLRLPSAPVATGLSTLDSICDSLSVAFRGISHCPPSGLYAHLCRFLALCLGHRDPYATAFLVTESVSITCRHQLLTHLHRQLSKAQKHRGSLEIADQLQGLSLQEMPGDVPLARIQRLFSFRALESGHFPQPEKESFQERLALIPSGVTVCVLALATLQPGTVGNTLLLTRLEKDSPPVSVQIPTGQNKLHLRSVLNEFDAIQKAQKENSSCTDKREWWTGRLALDHRMEVLIASLEKSVLGCWKGLLLPSSEEPGPAQEASRLQELLQDCGWKYPDRTLLKIMLSGAGALTPQDIQALAYGLCPTQPERAQELLNEAVGRLQGLTVPSNSHLVLVLDKDLQKLPWESMPSLQALPVTRLPSFRFLLSYSIIKEYGASPVLSQGVDPRSTFYVLNPHNNLSSTEEQFRANFSSEAGWRGVVGEVPRPEQVQEALTKHDLYIYAGHGAGARFLDGQAVLRLSCRAVALLFGCSSAALAVRGNLEGAGIVLKYIMAGCPLFLGNLWDVTDRDIDRYTEALLQGWLGAGPGAPLLYYVNQARQAPRLKYLIGAAPIAYGLPVSLR

SEQ ID NO: 45675 - protein, 415 aa, Homo sapiens
MGTTARAALVLTYLAVASAASEGGFTATGQRQLRPEHFQEVGYAAPPSPPLSRSLPMDHPDSSQHGPPFEGQSQVQPPPSQEATPLQQEKLLPAQLPAEKEVGPPLPQEAVPLQKELPSLQHPNEQKEGTPAPFGDQSHPEPESWNAAQHCQQDRSQGGWGHRLDGFPPGRPSPDNLNQICLPNRQHVVYGPWNLPQSSYSHLTRQGETLNFLEIGYSRCCHCRSHTNRLECAKLVWEDTLDKYCDREYAVKTHHHLCCRHPPSPTRDECFARRAPYPNYDRDILTIDIGRVTPNLMGHLCGNQRVLTKHKHIPGLIHNMTARCCDLPFPEQACCAEEEKLTFINDLCGPRRNIWRDPALCCYLSPGDEQVNCFNINYLRNVALVSGDTENAKGQGEQGSTGGTNISSTSEPKEE

SEQ ID NO: 45676 - protein, 540 aa, Homo sapiens
MGTTARAALVLTYLAVASAASEGGFTATGQRQLRPEHFQEVGYAAPPSPPLSRSLPMDHPDSSQHGPPFEGQSQVQPPPSQEATPLQQEKLLPAQLPAEKEVGPPLPQEAVPLQKELPSLQHPNEQKEGTPAPFGDQSHPEPESWNAAQHCQQDRSQGGWGHRLDGFPPGRPSPDNLNQICLPNRQHVVYGPWNLPQSSYSHLTRQGETLNFLEIGYSRCCHCRSHTNRLECAKLVWEEAMSRFCEAEFSVKTRPHWCCTRQGEARFSCFQEEAPQPHYQLRACPSHQPDISSGLELPFPPGVPTLDNIKNICHLRRFRSVPRNLPATDPLQRELLALIQLEREFQRCCRQGNNHTCTWKAWEDTLDKYCDREYAVKTHHHLCCRHPPSPTRDECFARRAPYPNYDRDILTIDIGRVTPNLMGHLCGNQRVLTKHKHIPGLIHNMTARCCDLPFPEQACCAEEEKLTFINDLCGPRRNIWRDPALCCYLSPGDEQVNCFNINYLRNVALVSGDTENAKGQGEQGSTGGTNISSTSEPKEE

SEQ ID NO: 45677 - protein, 567 aa, Homo sapiens
MGTTARAALVLTYLAVASAASEGGFTATGQRQLRPEHFQEVGYAAPPSPPLSRSLPMDHPDSSQHGPPFEGQSGKEGRGPRPHSQPWLGERVGCSHIPPSIVQPPPSQEATPLQQEKLLPAQLPAEKEVGPPLPQEAVPLQKELPSLQHPNEQKEGTPAPFGDQSHPEPESWNAAQHCQQDRSQGGWGHRLDGFPPGRPSPDNLNQICLPNRQHVVYGPWNLPQSSYSHLTRQGETLNFLEIGYSRCCHCRSHTNRLECAKLVWEEAMSRFCEAEFSVKTRPHWCCTRQGEARFSCFQEEAPQPHYQLRACPSHQPDISSGLELPFPPGVPTLDNIKNICHLRRFRSVPRNLPATDPLQRELLALIQLEREFQRCCRQGNNHTCTWKAWEDTLDKYCDREYAVKTHHHLCCRHPPSPTRDECFARRAPYPNYDRDILTIDIGRVTPNLMGHLCGNQRVLTKHKHIPGLIHNMTARCCDLPFPEQACCAEEEKLTFINDLCGPRRNIWRDPALCCYLSPGDEQVNCFNINYLRNVALVSGDTENAKGQGEQGSTGGTNISSTSEPKEE

SEQ ID NO: 45678 - protein, 699 aa, Homo sapiens
MKIAVLFCFFLLIIFQTDFGKNEEIPRKQRRKIYHRRLRKSSTSHKHRSNRQLGIQQTTVFTPVARLPIVNFDYSMEEKFESFSSFPGVESSYNVLPGKKGHCLVKGITMYNKAVWSPEPCTTCLCSDGRVLCDETMCHPQRCPQTVIPEGECCPVCSATVSYSLLSGIALNDRNEFSGDSSEQREPTNLLHKQLPPPQVGMDRIVRKEALQSEEDEEVKEEDTEQKRETPESRNQGQLYSEGDSRGGDRKQRPGEERRLAHQQQRQGREEEEDEEEEGEEGEEDEEDEEDPVRGDMFRMPSRSPLPAPPRGTLRLPSGCSLSYRTISCINAMLTQIPPLTAPQITSLELTGNSIASIPDEAFNGLPNLERLDLSKNNITSSGIGPKAFKLLKKLMRLNMDGNNLIQIPSQLPSTLEELKVNENNLQAIDEESLSDLNQLVTLELEGNNLSEANVNPLAFKPLKSLAYLRLGKNKFRIIPQGLPGSIEELYLENNQIEEITEICFNHTRKINVIVLRYNKIEENRIAPLAWINQENLESIDLSYNKLYHVPSYLPKSLLHLVLLGNQIERIPGYVFGHMEPGLEYLYLSFNKLADDGMDRVSFYGAYHSLRELFLDHNDLKSIPPGIQEMKALHFLRLNNNKIRNILPEEICNAEEDDDSNLEHLHLENNYIKIREIPSYTFSCIRSYSSIVLKPQNIK

SEQ ID NO: 45679 - protein, 164 aa, Homo sapiens
MKIAVLFCFFLLIIFQTDFGKNEEIPRKQRRKIYHRRLRKSSTSHKHRSNRQLGIQQTTVFTPVARLPIVNFDYSMEEKFESFSSFPGVESSYNVLPGKKGHCLVKGITMYNKAVWSPEPCTTCLCSDGRVLCDETMCHPQRCPQTVIPEGECCPVCSATGTEI

SEQ ID NO: 45680 - protein, 160 aa, Homo sapiens
MKIAVLFCFFLLIIFQTDFGKNEEIPRKQRRKIYHRRLRKSSTSHKHRSNRQLGIQQTTVFTPVARLPIVNFDYSMEEKFESFSSFPGVESSYNVLPGKKGHCLVKGITMYNKAVWSPEPCTTCLCSDGRVLCDETMCHPQRCPQTVIPEGECCPVCSAT

SEQ ID NO: 45681 - protein, 643 aa, Homo sapiens
MKIAVLFCFFLLIIFQTDFGKNEEIPRKQRRKIYHRRLRKSSTSHKHRSNRQLGIQQTTVFTPVARLPIVNFDYSMEEKFESFSSFPGVESSYNVLPGKKGHCLVKGITMYNKAVWSPEPCTTCLCSDGRVLCDETMCHPQRCPQTVIPEGECCPVCSATEQREPTNLLHKQLPPPQVGMDRIVRKEALQSEEDEEVKEEDTEQKRETPESRNQGQLYSEGDSRGGDRKQRPGEERRLAHQQQRQGREEEEDEEEEGEEGEEDEEDEEDPVRGDMFRMPSRSPLPAPPRGTLRLPSGCSLSYRTISCINAMLTQIPPLTAPQITSLELTGNSIASIPDEAFNGLPNLERLDLSKNNITSSGIGPKAFKLLKKLMRLNMDGNNLIQIPSQLPSTLEELKVNENNLQAIDEESLSDLNQLVTLELEGNNLSEANVNPLAFKPLKSLAYLRLGKNKFRIIPQGLPGSIEELYLENNQIEEITEICFNHTRKINVIVLRYNKIEENRIAPLAWINQENLESIDLSYNKLYHVPSYLPKSLLHLVLLGNQIERIPGYVFGHMEPGLEYLYLSFNKLADDGMDRVSFYGAYHSLRELFLDHNDLKSIPPGIQEMKALHFLRLNNNKIRCVSDAVLETVTNRSDVAFPLW

SEQ ID NO: 45682 - protein, 592 aa, Homo sapiens
MEMQDLTSPHSRLSGSSESPSGPKLGNSHINSNSMTPNGTEVKTEPMSSSETASTTADGSLNNFSGSAIGSSSFSPRPTHQFSPPQIYPSNRPYPHILPTPSSQTMAAYGQTQFTTGMQQATAYATYPQPGQPYGISSYGALWAGIKTEGGLSQSQSPGQTGFLSYGTSFSTPQPGQAPYSYQMQGSSFTTSSGIYTGNNSLTNSSGFNSSQQDYPSYPSFGQGQYAQYYNSSPYPAHYMTSSNTSPTTPSTNATYQLQEPPSGITSQAVTDPTAEYSTIHSPSTPIKDSDSDRLRRGSDGKSRGRGRRNNNPSPPPDSDLERVFIWDLDETIIVFHSLLTGSYANRYGRDPPTSVSLGLRMEEMIFNLADTHLFFNDLEECDQVHIDDVSSDDNGQDLSTYNFGTDGFPAAATSANLCLATGVRGGVDWMRKLAFRYRRVKEIYNTYKNNVGGLLGPAKREAWLQLRAEIEALTDSWLTLALKALSLIHSRTNCVNILVTTTQLIPALAKVLLYGLGIVFPIENIYSATKIGKESCFERIIQRFGRKVVYVVIGDGVEEEQGAKKHAMPFWRISSHSDLMALHHALELEYL

SEQ ID NO: 45683 - protein, 559 aa, Homo sapiens
MLLFPQVAVKTEPMSSSETASTTADGSLNNFSGSAIGSSSFSPRPTHQFSPPQIYPSNRPYPHILPTPSSQTMAAYGQTQFTTGMQQATAYATYPQPGQPYGISSYGALWAGIKTEGGLSQSQSPGQTGFLSYGTSFSTPQPGQAPYSYQMQGSSFTTSSGIYTGNNSLTNSSGFNSSQQDYPSYPSFGQGQYAQYYNSSPYPAHYMTSSNTSPTTPSTNATYQLQEPPSGITSQAVTDPTAEYSTIHSPSTPIKDSDSDRLRRGSDGKSRGRGRRNNNPSPPPDSDLERVFIWDLDETIIVFHSLLTGSYANRYGRDPPTSVSLGLRMEEMIFNLADTHLFFNDLEECDQVHIDDVSSDDNGQDLSTYNFGTDGFPAAATSANLCLATGVRGGVDWMRKLAFRYRRVKEIYNTYKNNVGGLLGPAKREAWLQLRAEIEALTDSWLTLALKALSLIHSRTNCVNILVTTTQLIPALAKVLLYGLGIVFPIENIYSATKIGKESCFERIIQRFGRKVVYVVIGDGVEEEQGAKKHAMPFWRISSHSDLMALHHALELEYL

SEQ ID NO: 45684 - protein, 592 aa, Homo sapiens; identical to SEQ ID NO: 45682

SEQ ID NO: 45685 - protein, 560 aa, Homo sapiens
MLMIYVQLVVKTEPMSSSETASTTADGSLNNFSGSAIGSSSFSPRPTHQFSPPQIYPSNRPYPHILPTPSSQTMAAYGQTQFTTGMQQATAYATYPQPGQPYGISSYGALWAGIKTEGGLSQSQSPGQTGFLSYGTSFSTPQPGQAPYSYQMQGSSFTTSSGIYTGNNSLTNSSGFNSSQQDYPSYPSFGQGQYAQYYNSSPYPAHYMTSSNTSPTTPSTNATYQLQEPPSGITSQAVTDPTAEYSTIHSPSTPIKDSDSDRLRRGSDGKSRGRGRRNNNPSPPPDSDLERVFIWDLDETIIVFHSLLTGSYANRYGRDPPTSVSLGLRMEEMIFNLADTHLFFNDLEECDQVHIDDVSSDDNGQDLSTYNFGTDGFPAAATSANLCLATGVRGGVDWMRKLAFRYRRVKEIYNTYKNNVGGLLGPAKREAWLQLRAEIEALTDSWLTLALKALSLIHSRTNCVNILVTTTQLIPALAKVLLYGLGIVFPIENIYSATKIGKESCFERIIQRFGRKVVYVVIGDGVEEEQGAKKHAMPFWRISSHSDLMALHHALELEYL

SEQ ID NO: 45686 - protein, 557 aa, Homo sapiens
MEMQDLTSPHSRLSGSSESPSGPKLGNSHINSNSMTPNGTEVKTEPMSSSETASTTADGSLNNFSGSAIGSSSFSPRPTHQFSPPQIYPSNRPYPHILPTPSSQTMAAYGQTQFTTGMQQATAYATYPQPGQPYGISSYGIKTEGGLSQSQSPGQTGFLSYGTSFSTPQPGQAPYSYQMQGSSFTTSSGIYTGNNSLTNSSGFNSSQQDYPSYPSFGQGQYAQYYNSSPYPAHYMTSSNTSPTTPSTNATYQLQEPPSGITSQAVTDPTAEYSTIHSPSTPIKDSDSDRLRRGSDGKSRGRGRRNNNPSPPPDSDLERVFIWDLDETIIVFHSLLTGSYANRYGRECDQVHIDDVSSDDNGQDLSTYNFGTDGFPAAATSANLCLATGVRGGVDWMRKLAFRYRRVKEIYNTYKNNVGGLLGPAKREAWLQLRAEIEALTDSWLTLALKALSLIHSRTNCVNILVTTTQLIPALAKVLLYGLGIVFPIENIYSATKIGKESCFERIIQRFGRKVVYVVIGDGVEEEQGAKKHAMPFWRISSHSDLMALHHALELEYL

SEQ ID NO: 45687 - protein, 508 aa, Homo sapiens
MVELVISPSLTVNSDCLDKLKFNRADAAVWTLSDRQGITKSAPLRVSQLFSRSCPRVLPRQPSTAMAAYGQTQYSAGIQQATPYTAYPPPAQAYGIPSYSIKTEDSLNHSPGQSGFLSYGSSFSTSPTGQSPYTYQMHGTTGFYQGGNGLGNAAGFGSVHQDYPSYPGFPQSQYPQYYGSSYNPPYVPASSICPSPLSTSTYVLQEASHNVPNQSSESLAGEYNTHNGPSTPAKEGDTDRPHRASDGKLRGRSKRSSDPSPAGDNEIERVFVWDLDETIIIFHSLLTGTFASRYGKDCDQIHVDDVSSDDNGQDLSTYNFSADGFHSSAPGANLCLGSGVHGGVDWMRKLAFRYRRVKEMYNTYKNNVGGLIGTPKRETWLQLRAELEALTDLWLTHSLKALNLINSRPNCVNVLVTTTQLIPALAKVLLYGLGSVFPIENIYSATKTGKESCFERIMQRFGRKAVYVVIGDGVEEEQGAKKHNMPFWRISCHADLEALRHALELEYL

SEQ ID NO: 45688 - protein, 538 aa, Homo sapiens
MVELVISPSLTVNSDCLDKLKFNRADAAVWTLSDRQGITKSAPLRVSQLFSRSCPRVLPRQPSTAMAAYGQTQYSAGIQQATPYTAYPPPAQAYGIPSYSIKTEDSLNHSPGQSGFLSYGSSFSTSPTGQSPYTYQMHGTTGFYQGGNGLGNAAGFGSVHQDYPSYPGFPQSQYPQYYGSSYNPPYVPASSICPSPLSTSTYVLQEASHNVPNQSSESLAGEYNTHNGPSTPAKEGDTDRPHRASDGKLRGRSKRSSDPSPAGDNEIERVFVWDLDETIIIFHSLLTGTFASRYGKDTTTSVRIGLMMEEMIFNLADTHLFFNDLEDCDQIHVDDVSSDDNGQDLSTYNFSADGFHSSAPGANLCLGSGVHGGVDWMRKLAFRYRRVKEMYNTYKNNVGGLIGTPKRETWLQLRAELEALTDLWLTHSLKALNLINSRPNCVNVLVTTTQLIPALAKVLLYGLGSVFPIENIYSATKTGKESCFERIMQRFGRKAVYVVIGDGVEEEQGAKKHNMPFWRISCHADLEALRHALELEYL

SEQ ID NO: 45689 - protein, 459 aa, Homo sapiens
MVELVISPSLTVNSDCLDKLKFNRADAAVWTLSDRQGITKSAPLRVSQLFSRSCPRVLPRQPSTAMAAYGQTQYSAGIQQATPYTAYPPPAQAYGIPSYSIKTEDSLNHSPGQSGFLSYGSSFSTSPTGQSPYTYQMHGTTGFYQGGNGLGNAAGFGSVHQDYPSYPGFPQSQYPQYYGSSYNPPYVPASSICPSPLSTSTYVLQEASHNVPNQSSESLAGEYNTHNGPSTPAKEGDTDRPHRASDGKLRGRSKRSSDPSPAGDNEIERVFVWDLDETIIIFHSLLTGTFASRYGKDTTTSVRIGLMMEEMIFNLADTHLFFNDLEDCDQIHVDDVSSDDNGQDLSTYNFSADGFHSSAPGANLCLGSGVHGGVDWMRKLAFRYRRVKEMYNTYKNNVGGKESCFERIMQRFGRKAVYVVIGDGVEEEQGAKKHNMPFWRISCHADLEALRHALELEYL

SEQ ID NO: 45690 - protein, 508 aa, Homo sapiens
MVELVISPSLTVNSDCLDKLKFNRADAAVWTLSDRQGITKSAPLRVSQLFSRSCPRVLPRQPSTAMAAYGQTQYSAGIQQATPYTAYPPPAQAYGIPSYSIKTEDSLNHSPGQSGFLSYGSSFSTSPTGQSPYTYQMHGTTGFYQGGNGLGNAAGFGSVHQDYPSYPGFPQSQYPQYYGSSYNPPYVPASSICPSPLSTSTYVLQEASHNVPNQSSESLAGEYNTHNGPSTPAKEGDTDRPHRASDGKLRGRSKRSSDPSPAGDNEIERVFVWDLDETIIIFHSLLTGTFASRYGKDCDQIHVDDVSSDDNGQDLSTYNFSADGFHSSAPGANLCLGSGVHGGVDWMRKLAFRYRRVKEMYNTYKNNVGGLIGTPKRETWLQLRAELEALTDLWLTHSLKALNLINSRQNCVNVLVTTTQLIPALAKVLLYGLGSVFPIENIYSATKTGKESCFERIMQRFGRKAVYVVIGDGVEEEQGAKKHNMPFWRISCHADLEALRHALELEYL

SEQ ID NO: 45691 - protein, 536 aa, Homo sapiens
MEEEQDLPEQPVKKAKMQESGEQTISQVSNPDVSDQKPETSSLASNLPMSEEIMTCTDYIPRSSNDYTSQMYSAKPYAHILSVPVSETAYPGQTQYQTLQQTQPYAVYPQATQTYGLPPFASSTNASLISTSSTIANIPAAAVASISNQDYPTYTILGQNQYQACYPSSSFGVTGQTNSDAESTTLAATTYQSEKPSVMAPAPAAQRLSSGDPSTSPSLSQTTPSKDTDDQSRKNMTSKNRGKRKADATSSQDSELERVFLWDLDETIIIFHSLLTGSYAQKYGKDPTVVIGSGLTMEEMIFEVADTHLFFNDLEECDQVHVEDVASDDNGQDLSNYSFSTDGFSGSGGSGSHGSSVGVQGGVDWMRKLAFRYRKVREIYDKHKSNVGGLLSPQRKEALQRLRAEIEVLTDSWLGTALKSLLLIQSRKNCVNVLITTTQLVPALAKVLLYGLGEIFPIENIYSATKIGKESCFERIVSRFGKKVTYVVIGDGRDEEIAAKQQLYFLDMEALGCQLEPTALILFIQLSGNLSNYNKL

SEQ ID NO: 45692 - protein, 416 aa, Homo sapiens
MIIPHKCILQTSSTNASLISTSSTIANIPAAAVASISNQDYPTYTILGQNQYQACYPSSSFGVTGQTNSDAESTTLAATTYQSEKPSVMAPAPAAQRLSSDPSTSPSLSQTTPSKDTDDQSRKNMTSKNRGKRKADATSSQDSELERVFLWDLDETIIIFHSLLTGSYAQKYGKDPTVVIGSGLTMEEMIFEVADTHLFFNDLEECDQVHVEDVASDDNGQDLSNYSFSTDGFSGSGGSGSHGSSVGVQGGVDWMRKLAFRYRKVREIYDKHKSNVGGLLSPQRKEALQRLRAEIEVLTDSWLGTALKSLLLIQSRKNCVNVLITTTQLVPALAKVLLYGLGEIFPIENIYSATKIGKESCFERIVSRFGKKVTYVVIGDGRDEEIAAKQHNMPFWRITNHGDLVSLHQALELDFL

SEQ ID NO: 45693 - protein, 573 aa, Homo sapiens
MEEEQDLPEQPVKKAKMQESGEQTISQVSNPDVSDQKPETSSLASNLPMSEEIMTCTDYIPRSSNDYTSQMYSAKPYAHILSVPVSETAYPGQTQYQTLQQTQPYAVYPQATQTYGLPPFGALWPGMKPESGLIQTPSPSQHSVLTCTTGLTTSQPSPAHYSYPIQASSTNASLISTSSTIANIPAAAVASISNQDYPTYTILGQNQYQACYPSSSFGVTGQTNSDAESTTLAATTYQSEKPSVMAPAPAAQRLSSGDPSTSPSLSQTTPSKDTDDQSRKNMTSKNRGKRKADATSSQDSELERVFLWDLDETIIIFHSLLTGSYAQKYGKDPTVVIGSGLTMEEMIFEVADTHLFFNDLEECDQVHVEDVASDDNGQDLSNYSFSTDGFSGSGGSGSHGSSVGVQGGVDWMRKLAFRYRKVREIYDKHKSNVGGLLSPQRKEALQRLRAEIEVLTDSWLGTALKSLLLIQSRKNCVNVLITTTQLVPALAKVLLYGLGEIFPIENIYSATKIGKESCFERIVSRFGKKVTYVVIGDGRDEEIAAKQHNMPFWRITNHGDLVSLHQALELDFL

SEQ ID NO: 45694 - protein, 447 aa, Homo sapiens
MKPESGLIQTPSPSQHSVLTCTTGLTTSQPSPAHYSYPIQASSTNASLISTSSTIANIPAAAVASISNQDYPTYTILGQNQYQACYPSSSFGVTGQTNSDAESTTLAATTYQSEKPSVMAPAPAAQRLSSGDPSTSPSLSQTTPSKDTDDQSRKNMTSKNRGKRKADATSSQDSELERVFLWDLDETIIIFHSLLTGSYAQKYGKDPTVVIGSGLTMEEMIFEVADTHLFFNDLEECDQVHVEDVASDDNGQDLSNYSFSTDGFSGSGGSGSHGSSVGVQGGVDWMRKLAFRYRKVREIYDKHKSNVGGLLSPQRKEALQRLRAEIEVLTDSWLGTALKSLLLIQSRKNCVNVLITTTQLVPALAKVLLYGLGEIFPIENIYSATKIGKESCFERIVSRFGKKVTYVVIGDGRDEEIAAKQHNMPFWRITNHGDLVSLHQALELDFL

SEQ ID NO: 45695 - protein, 527 aa, Homo sapiens
MEEEQDLPEQPVKKAKMQESGEQTISQVSNPDVSDQKPETSSLASNLPMSEEIMTCTDYIPRSSNDYTSQMYSAKPYAHILSVPVSETAYPGQTQYQTLQQTQPYAVYPQATQTYGLPPFASSTNASLISTSSTIANIPAAAVASISNQDYPTYTILGQNQYQACYPSSSFGVTGQTNSDAESTTLAATTYQSEKPSVMAPAPAAQRLSSGDPSTSPSLSQTTPSKDTDDQSRKNMTSKNRGKRKADATSSQDSELERVFLWDLDETIIIFHSLLTGSYAQKYGKDPTVVIGSGLTMEEMIFEVADTHLFFNDLEECDQVHVEDVASDDNGQDLSNYSFSTDGFSGSGGSGSHGSSVGVQGGVDWMRKLAFRYRKVREIYDKHKSNVGGLLSPQRKEALQRLRAEIEVLTDSWLGTALKSLLLIQSRKNCVNVLITTTQLVPALAKVLLYGLGEIFPIENIYSATKIGKESCFERIVSRFGKKVTYVVIGDGRDEEIAAKQHNMPFWRITNHGDLVSLHQALELDFL

SEQ ID NO: 45696 - protein, 520 aa, Homo sapiens
MTCTDYIPRSSNDYTSQMYSAKPYAHILSVPVSETAYPGQTQYQTLQQTQPYAVYPQATQTYGLPPFGALWPGMKPESGLIQTPSPSQHSVLTCTTGLTTSQPSPAHYSYPIQASSTNASLISTSSTIANIPAAAVASISNQDYPTYTILGQNQYQACYPSSSFGVTGQTNSDAESTTLAATTYQSEKPSVMAPAPAAQRLSSGDPSTSPSLSQTTPSKDTDDQSRKNMTSKNRGKRKADATSSQDSELERVFLWDLDETIIIFHSLLTGSYAQKYGKDPTVVIGSGLTMEEMIFEVADTHLFFNDLEECDQVHVEDVASDDNGQDLSNYSFSTDGFSGSGGSGSHGSSVGVQGGVDWMRKLAFRYRKVREIYDKHKSNVGGLLSPQRKEALQRLRAEIEVLTDSWLGTALKSLLLIQSRKNCVNVLITTTQLVPALAKVLLYGLGEIFPIENIYSATKIGKESCFERIVSRFGKKVTYVVIGDGRDEEIAAKQHNMPFWRITNHGDLVSLHQALELDFL

SEQ ID NO: 45697 - protein, 639 aa, Homo sapiens
MEDSQDLNEQSVKKTCTESDVSQSQNSRSMEMQDLASPHTLVGGGDTPGSSKLEKSNLSSTSVTTNGTGGENMTVLNTADWLLSCNTPSSATMSLLAVKTEPLNSSETTATTGDGALDTFTGSVITSSGYSPRSAHQYSPQLYPSKPYPHILSTPAAQTMSAYAGQTQYSGMQQPAVYTAYSQTGQPYSLPTYDLGVMLPAIKTESGLSQTQSPLQSGCLSYSPGFSTPQPGQTPYSYQMPGSSFAPSSTIYANNSVSNSTNFSGSQQDYPSYTAFGQNQYAQYYSASTYGAYMTSNNTADGTPSSTSTYQLQESLPGLTNQPGEFDTMQSPSTPIKDLDERTCRSSGSKSRGRGRKNNPSPPPDSDLERVFVWDLDETIIVFHSLLTGSYAQKYGKDPPMAVTLGLRMEEMIFNLADTHLFFNDLEECDQVHIDDVSSDDNGQDLSTYSFATDGFHAAASSANLCLPTGVRGGVDWMRKLAFRYRRVKELYNTYKNNVGGLLGPAKRDAWLQLRAEIEGLTDSWLTNALKSLSIISTRSNCINVLVTTTQLIPALAKVLLYSLGGAFPIENIYSATKIGKESCFERIVSRFGTNITYVVIGDGRDEEHAANQHNMPFWRISSHSDLLALHQALELEYL

SEQ ID NO: 45698 - protein, 616 aa, Homo sapiens
MEDSQDLNEQSVKKTCTESDVSQSQNSRSMEMQDLASPHTLVGGGDTPGSSKLEKSNLSSTSVTTNGTGVSLLAVKTEPLNSSETTATTGDGALDTFTGSVITSSGYSPRSAHQYSPQLYPSKPYPHILSTPAAQTMSAYAGQTQYSGMQQPAVYTAYSQTGQPYSLPTYDLGVMLPAIKTESGLSQTQSPLQSGCLSYSPGFSTPQPGQTPYSYQMPGSSFAPSSTIYANNSVSNSTNFSGSQQDYPSYTAFGQNQYAQYYSASTYGAYMTSNNTADGTPSSTSTYQLQESLPGLTNQPGEFDTMQSPSTPIKDLDERTCRSSGSKSRGRGRKNNPSPPPDSDLERVFVWDLDETIIVFHSLLTGSYAQKYGKDPPMAVTLGLRMEEMIFNLADTHLFFNDLEECDQVHIDDVSSDDNGQDLSTYSFATDGFHAAASSANLCLPTGVRGGVDWMRKLAFRYRRVKELYNTYKNNVGGLLGPAKRDAWLQLRAEIEGLTDSWLTNALKSLSIISTRSNCINVLVTTTQLIPALAKVLLYSLGGAFPIENIYSATKIGKESCFERIMQRFGRKVVYVVIGDGVEEEQAAKKHNMPFWRISSHSDLLALHQALELEYL

SEQ ID NO: 45699 - protein, 639 aa, Homo sapiens
MEDSQDLNEQSVKKTCTESDVSQSQNSRSMEMQDLASPHTLVGGGDTPGSSKLEKSNLSSTSVTTNGTGGENMTVLNTADWLLSCNTPSSATMSLLAVKTEPLNSSETTATTGDGALDTFTGSVITSSGYSPRSAHQYSPQLYPSKPYPHILSTPAAQTMSAYAGQTQYSGMQQPAVYTAYSQTGQPYSLPTYDLGVMLPAIKTESGLSQTQSPLQSGCLSYSPGFSTPQPGQTPYSYQMPGSSFAPSSTIYANNSVSNSTNFSGSQQDYPSYTAFGQNQYAQYYSASTYGAYMTSNNTADGTPSSTSTYQLQESLPGLTNQPGEFDTMQSPSTPIKDLDERTCRSSGSKSRGRGRKNNPSPPPDSDLERVFVWDLDETIIVFHSLLTGSYAQKYGKDPPMAVTLGLRMEEMIFNLADTHLFFNDLEECDQVHIDDVSSDDNGQDLSTYSFATDGFHAAASSANLCLPTGVRGGVDWMRKLAFRYRRVKELYNTYKNNVGGLLGPAKRDAWLQLRAEIEGLTDSWLTNALKSLSIISTRSNCINVLVTTTQLIPALAKVLLYSLGGAFPIENIYSATKIGKESCFERIMQRFGRKVVYVVIGDGVEEEQAAKKHNMPFWRISSHSDLLALHQALELEYL

SEQ ID NO: 45700 - protein, 3165 aa, Homo sapiens
MTDKSIVILSLMVFHSSFINGKTCRRQLVEEWHPQPSSYVVNWTLTENICLDFYRDCWFLGVNTKIDTSGNQAVPQICPLQIQLGDILVISSEPSLQFPEINLMNVSETSFVGCVQNTTTEDQLLFGCRLKGMHTVNSKWLSVGTHYFITVMASGPSPCPLGLRLNVTVKQQFCQESLSSEFCSGHGKCLSEAWSKTYSCHCQPPFSGKYCQELDACSFKPCKNNGSCINKRENWDEQAYECVCHPPFTGKNCSEIIGQCQPHVCFHGNCSNITSNSFICECDEQFSGPFCEVSAKPCVSLLFWKRGICPNSSSAYTYECPKGSSSQNGETDVSEFSLVPCQNGTDCIKISNDVMCICSPIFTDLLCKSIQTSCESFPLRNNATCKKCEKDYPCSCISGFTEKNCEKAIDHCKLLSINCLNEEWCFNIIGRFKYVCIPGCTKNPCWFLKNVYLIHQHLCYCGVTFHGICQDKGPAQFEYVWQLGFAGSEGEKCQGVIDAYFFLAANCTEDATYVNDPEDNNSSCWFPHEGTKEICANGCSCLSEEDSQEYRYLCFLRWAGNMYLENTTDDQENECQHEAVCKDEINRPRCSCSLSYIGRLCVVNVDYCLGNHSISVHGLCLALSHNCNCSGLQRYERNICEIDTEDCKSASCKNGTTSTHLRGYFFRKCVPGFKGTQCEIDIDECASHPCKNGATCIDQPGNYFCQCVPPFKVVDGFSCLCNPGYVGIRCEQDIDDCILNACEHNSTCKDLHLSYQCVCLSDWEGNFCEQESNECKMNPCKNNSTCTDLYKSYRCECTSGWTGQNCSEEINECDSDPCMNGGLCHESTIPGQFVCLCPPLYTGQFCHQRYNLCDLLHNPCRNNSTCLALVDANQHCICREEFEGKNCEIDVKDCLFLSCQDYGDCEDMVNNFRCICRPGFSGSLCEIEINECSSEPCKNNGTCVDLTNRFFCNCEPEYHGPFCELDVNKCKISPCLDEENCVYRTDGYNCLCAPGYTGINCEINLDECLSEPCLHDGVCIDGINHYTCDCKSGFFGTHCETNANDCLSNPCLHGRCTELINEYPCSCDADGTSTQCKIKINDCTSIPCMNEGFCQKSAHGFTCICPRGYTGAYCEKSIDNCAEPELNSVICLNGGICVDGPGHTFDCRCLPGFSGQFCEININECSSSPCLHGADCEDHINGYVCKCQPGWSGHHCENELECIPNSCVHELCMENEPGSTCLCTPGFMTCSIGLLCGDEIRRITCLTPIFQRTDPISTQTYTIPPSETLVSSFPSIKATRIPAIMDTYPVDQGPKQTGIVKHDILPTTGLATLRISTPLESYLLQELIVTRELSAKHSLLSSADVSSSRFLNFGIRDPAQIVQDKTSVSHMPIRTSAATLGFFFPDRRARTPFIMSSLMSDFIFPTQSLLFENCQTVALSATPTTSVIRSIPGADIELNRQSLLSRGFLLIAASISATPVVSRGAQEDIEEYSADSLISRREHWRLLSPSMSPIFPAKVIISKQVTILNSSALHRFSTKAFNPSEYQAITEASSNQRLTNIKSQAADSLRELSQTCATCSMTEIKSSREFSDQVLHSKQSHFYETFWMNSAILASWYALMGAQTITSGHSFSSATEITPSVAFTEVPSLFPSKKSAKRTILSSSLEESITLSSNLDVNLCLDKTCLSIVPSQTISSDLMNSDLTSKMTTDELSVSENILKLLKIRQYGITMGPTEVLNQESLLDMEKSKGSHTLFKLHPSDSSLDFELNLQIYPDVTLKTYSEITHANDFKNNLPPLTGSVPDFSEVTTNVAFYTVSATPALSIQTSSSMSVIRPDWPYFTDYMTSLKKEVKTSSEWSKWELQPSVQYQEFPTASRHLPFTRSLTLSSLESILAPQRLMISDFSCVRYYGDSYLEFQNVALNPQNNISLEFQTFSSYGLLLYVKQDSNLVDGFFIQLFIENGTLKYHFYCPGEAKFKSINTTVRVDNGQKYTLLIRQELDPCNAELTILGRNTQICESINHVLGKPLPKSGSVFIGGFPDLHGKIQMPVPVKNFTGCIEVIEINNWRSFIPSKAVKNYHINNCRSQGFMLSPTASFVDASDVTQGVDTMWTSVSPSVAAPSVCQQDVCHNGGTCHAIFLSSGIVSFQCDCPLHFTGRFCEKDAGLFFPSFNGNSYLELPFLKFVLEKEHNRTVTIYLTIKTNSLNGTILYSNGNNCGKQFLHLFLVEGRPSVKYGCGNSQNILTVSANYSINTNAFTPITIRYTTPVGSPGVVCMIEMTADGKPPVQKKDTEISHASQAYFESMFLGHIPANVQIHKKAGPVYGFRGCILDLQVNNKEFFIIDEARHGKNIENCHVPWCAHHLCRNNGTCISDNENLFCECPRLYSGKLCQFASCENNPCGNGATCVPKSGTDIVCLCPYGRSGPLCTDAINITQPRFSGTDAFGYTSFLAYSRISDISFHYEFHLKFQLANNHSALQNNLIFFTGQKGHGLNGDDFLAVGLLNGSVVYSYNLGSGIASIRSEPLNLSLGVHTVHLGKFFQEGWLKVDDHKNKSIIAPGRLVGLNVFSQFYVGGYSEYTPDLLPNGADFKNGFQGCIFTLQVRTEKDGHFRGLGNPEGHPNAGRSVGQCHASPCSLMKCGNGGTCIESGTSVYCNCTTGWKGSFCTETVSTCDPEHDPPHHCSRGATCISLPHGYTCFCPLGTTGIYCEQALILIVILEKPKPAERKVKKEALSISDPSFRSNELSWMSFASFHVRKKTHIQLQFQPLAADGILFYAAQHLKAQSGDFLCISLVNSSVQLRYNLGDRTIILETLQKVTINGSTWHIIKAGRVGAEGYLDLDGINVTEKASTKMSSLDTNTDFYIGGVSSLNLVNPMAIENEPVGFQGCIRQVIINNQELQLTEFGAKGGSNVGDCDGTACGYNTCRNGGECTVNGTTFSCRCLPDWAGNTCNQSVSCLNNLCLHQSLCIPDQSFSYSCLCTLGWVGRYCENKTSFSTAKFMGNSYIKYIDPNYRMRNLQFTTISLNFSTTKTEGLIVWMGIAQNEENDFLAIGLHNQTLKIAVNLGERISVPMSYNNGTFCCNKWHHVVVIQNQTLIKAYINNSLILSEDIDPHKNFVALNYDGICYLGGFEYGRKVNIVTQEIFKTNFVGKIKDVVFFQEPKNIELIKLEGYNVYDGDEQNEVT

SEQ ID NO: 45701 - protein, 594 aa, Homo sapiens
MTDKSIVILSLMVFHSSFINGKTCRRQLVEEWHPQPSSYVVNWTLTENICLDFYRDCWFLGVNTKIDTSGNQAVPQICPLQIQLGDILVISSEPSLQFPEINLMNVSETSFVGCVQNTTTEDQLLFGCRLKGMHTVNSKWLSVGTHYFITVMASGPSPCPLGLRLNVTVKQQFCQESLSSEFCSGHGKCLSEAWSKTYSCHCQPPFSGKYCQELDACSFKPCKNNGSCINKRENWDEQAYECVCHPPFTGKNCSEIIGQCQPHVCFHGNCSNITSNSFICECDEQFSGPFCEVSAKPCVSLLFWKRGICPNSSSAYTYECPKGSSSQNGETDVSEFSLVPCQNGTDCIKISNDVMCICSPIFTDLLCKSIQTSCESFPLRNNATCKKCEKDYPCSCISGFTEKNCEKAIDHCKLLSINCLNEEWCFNIIGRFKYVCIPGCTKNPCWFLKNVYLIHQHLCYCGVTFHGICQDKGPAQFEYVWQLGFAGSEGEKCQGVIDAYFFLAANCTEDATYVNDPEDNNSSCWFPHEGTKEICANGCSCLSEEDSQEYRYLCFLRWAGNMYLENTTDDQENECQHEAVCKDEINRPRYLCII

SEQ ID NO: 45702 - protein, 3165 aa, Homo sapiens; identical to SEQ ID NO: 45700

SEQ ID NO: 45703 - protein, 3144 aa, Homo sapiens
MTDKSIVILSLMVFHSSFINGKTCRRQLVEEWHPQPSSYVVNWTLTENICLDFYRDCWFLGVNTKIDTSGNQAVPQICPLQIQLGDILVISSEPSLQFPEINLMNVSETSFVGCVQNTTTEDQLLFGCRLKGMHTVNSKWLSVGTHYFITVMASGPSPCPLGLRLNVTVKQQFCQESLSSEFCSGHGKCLSEAWSKTYSCHCQPPFSGKYCQELDACSFKPCKNNGSCINKRENWDEQAYECVCHPPFTGKNCSEIIGQCQPHVCFHGNCSNITSNSFICECDEQFSGPFCEVSAKPCVSLLFWKRGICPNSSSAYTYECPKGSSSQNGETDVSEFSLVPCQNGTDCIKISNDVMCICSPIFTDLLCKSIQTSCESFPLRNNATCKKCEKDYPCSCISGFTEKNCEKAIDHCKLLSINCLNEEWCFNIIGRFKYVCIPGCTKNPCWFLKNVYLIHQHLCYCGVTFHGICQDKGPAQFEYVWQLGFAGSEGEKCQGVIDAYFFLAANCTEDATYVNDPEDNNSSCWFPHEGTKEICANGCSCLSEEDSQEYRYLCFLRWAGNMYLENTTDDQENECQHEAVCKDEINRPRCSCSLSYIGRLCVVNVDYCLGNHSISVHGLCLALSHNCNCSGLQRYERNICEIDTEDCKSASCKNGTTSTHLRGYFFRKCVPGFKGTQCEIDIDECASHPCKNGATCIDQPGNYFCQCVPPFKVVDGFSCLCNPGYVGIRCEQDIDDCILNACEHNSTCKDLHLSYQCVCLSDWEGNFCEQESNECKMNPCKNNSTCTDLYKSYRCECTSGWTGQNCSEEINECDSDPCMNGGLCHESTIPGQFVCLCPPLYTGQFCHQRYNLCDLLHNPCRNNSTCLALVDANQHCICREEFEGKNCEIDVKDCLFLSCQDYGDCEDMVNNFRCICRPGFSGSLCEIEINECSSEPCKNNGTCVDLTNRFFCNCEPEYHGPFCELDVNKCKISPCLDEENCVYRTDGYNCLCAPGYTGINCEINLDECLSEPCLHDGVCIDGINHYTCDCKSGFFGTHCETNANDCLSNPCLHGRCTELINEYPCSCDADGTSTQCKIKINDCTSIPCMNEGFCQKSAHGFTCICPRGYTGAYCEKSIDNCAEPELNSVICLNGGICVDGPGHTFDCRCLPGFSGQFCEININECSSSPCLHGADCEDHINGYVCKCQPGWSGHHCENELECIPNSCVHELCMENEPGSTCLCTPGFMTCSIGLLCGDEIRRITCLTPIFQRTDPISTQTYTIPPSETLVSSFPSIKATRIPAIMDTYPVDQGPKQTGIVKHDILPTTGLATLRISTPLESYLLQELIVTRELSAKHSLLSSADVSSSRFLNFGIRDPAQIVQDKTSVSHMPIRTSAATLGFFFPDRRARTPFIMSSLMSDFIFPTQSLLFENCQTVALSATPTTSVIRSIPGADIELNRQSLLSRGFLLIAASISATPVVSRGAQEDIEEYSADSLISRREHWRLLSPSMSPIFPAKVIISKQVTILNSSALHRFSTKAFNPSEYQAITEASSNQRLTNIKSQAADSLRELSQTCATCSMTEIKSSREFSDQVLHSKQSHFYETFWMNSAILASWYALMGAQTITSGHSFSSATEITPSVAFTEVPSLFPSKKSAKRTILSSSLEESITLSSNLDVNLCLDKTCLSIVPSQTISSDLMNSDLTSKMTTDELSVSENILKLLKIRQYGITMGPTEVLNQESLLDMEKSKGSHTLFKLHPSDSSLDFELNLQIYPDVTLKTYSEITHANDFKNNLPPLTGSVPDFSEVTTNVAFYTVSATPALSIQTSSSMSVIRPDWPYFTDYMTSLKKEVKTSSEWSKWELQPSVQYQEFPTASRHLPFTRSLTLSSLESILAPQRLMISDFSCVRYYGDSYLEFQNVALNPQNNISLEFQTFSSYGLLLYVKQDSNLVDGFFIQLFIENGTLKYHFYCPGEAKFKSINTTVRVDNGQKYTLLIRQELDPCNAELTILGRNTQICESINHVLGKPLPKSGSVFIGGFPDLHGKIQMPVPVKNFTGCIEVIEINNWRSFIPSKAVKNYHINNCRSQGFMLSPTASFVDASDVTQGVDTMWTSVSPSVAAPSVCQQDVCHNGGTCHAIFLSSGIVSFQCDCPLHFTGRFCEKDAGLFFPSFNGNSYLELPFLKFVLEKEHNRTVTIYLTIKTNSLNGTILYSNGNNCGKQFLHLFLVEGRPSVKYGCGNSQNILTVSANYSINTNAFTPITIRYTTPVGSPGVVCMIEMTADGKPPVQKKDTEISHASQAYFESMFLGHIPANVQIHKKAGPVYGFRGCILDLQVNNKEFFIIDEARHGKNIENCHVPWCAHHLCRNNGTCISDNENLFCECPRLYSGKLCQFASCENNPCGNGATCVPKSGTDIVCLCPYGRSGPLCTDAINITQPRFSGTDAFGYTSFLAYSRISDISFHYEFHLKFQLANNHSALQNNLIFFTGQKGHGLNGDDFLAVGLLNGSVVYSYNLGSGIASIRSEPLNLSLGVHTVHLGKFFQEGWLKVDDHKNKSIIAPGRLVGLNVFSQFYVGGYSEYTPDLLPNGADFKNGFQGCIFTLQVRTEKDGHFRGLGNPEGHPNAGRSVGQCHASPCSLMKCGNGGTCIESGTSVYCNCTTGWKGSFCTETVSTCDPEHDPPHHCSRGATCISLPHGYTCFCPLGTTGIYCEQALSISDPSFRSNELSWMSFASFHVRKKTHIQLQFQPLAADGILFYAAQHLKAQSGDFLCISLVNSSVQLRYNLGDRTIILETLQKVTINGSTWHIIKAGRVGAEGYLDLDGINVTEKASTKMSSLDTNTDFYIGGVSSLNLVNPMAIENEPVGFQGCIRQVIINNQELQLTEFGAKGGSNVGDCDGTACGYNTCRNGGECTVNGTTFSCRCLPDWAGNTCNQSVSCLNNLCLHQSLCIPDQSFSYSCLCTLGWVGRYCENKTSFSTAKFMGNSYIKYIDPNYRMRNLQFTTISLNFSTTKTEGLIVWMGIAQNEENDFLAIGLHNQTLKIAVNLGERISVPMSYNNGTFCCNKWHHVVVIQNQTLIKAYINNSLILSEDIDPHKNFVALNYDGICYLGGFEYGRKVNIVTQEIFKTNFVGKIKDVVFFQEPKNIELIKLEGYNVYDGDEQNEVT

SEQ ID NO: 45704 - protein, 594 aa, Homo sapiens; identical to SEQ ID NO: 45701

SEQ ID NO: 45705 - protein, 619 aa, Homo sapiens
MTDKSIVILSLMVFHSSFINGKTCRRQLVEEWHPQPSSYVVNWTLTENICLDFYRDCWFLGVNTKIDTSGNQAVPQICPLQIQLGDILVISSEPSLQFPEINLMNVSETSFVGCVQNTTTEDQLLFGCRLKGMHTVNSKWLSVGTHYFITVMASGPSPCPLGLRLNVTVKQQFCQESLSSEFCSGHGKCLSEAWSKTYSCHCQPPFSGKYCQELDACSFKPCKNNGSCINKRENWDEQAYECVCHPPFTGKNCSEIIGQCQPHVCFHGNCSNITSNSFICECDEQFSGPFCEVSAKPCVSLLFWKRGICPNSSSAYTYECPKGSSSQNGETDVSEFSLVPCQNGTDCIKISNDVMCICSPIFTDLLCKSIQTSCESFPLRNNATCKKCEKDYPCSCISGFTEKNCEKAIDHCKLLSINCLNEEWCFNIIGRFKYVCIPGCTKNPCWFLKNVYLIHQHLCYCGVTFHGICQDKGPAQFEYVWQLGFAGSEGEKCQGVIDAYFFLAANCTEDATYVNDPEDNNSSCWFPHEGTKEICANGCSCLSEEDSQEYRYLCFLRWAGNMYLENTTDDQENECQHEAVCKDEINRPRRILNTVIPHQIQQHIERFIQHDQVGFIVRI

SEQ ID NO: 45706 - protein, 587 aa, Homo sapiens
MGWDLGTRLFQRQEQRSRLSRIWLEKTRVFLEGSTRTPALPHCLFWLLQVPSTQDPLFPGYGPQCPVDLAGPPCLRPLFGGLGGYWRALQRGREGRTMTSRASELSPGRSVTAGIIIVGDEILKGHTQDTNTFFLCRTLRSLGVQVCRVSVVPDEVATIAAEVTSFSNRFTHVLTAGGIGPTHDDVTFEAVAQAFGDELKPHPKLEAATKALGGEGWEKLSLVPSSARLHYGTDPCTGQPFRFPLVSVRNVYLFPGIPELLRRVLEGMKGLFQNPAVQFHSKELYVAADEASIAPILAEAQAHFGRRLGLGSYPDWGSNYYQVKLTLDSEEEGPLEECLAYLTARLPQGSLVPYMPNAVEQASEAVYKLAESGSSLGKKVAGALQTIETSLAQYSLTQLCVGFNGGKDCTALLHLFHAAVQRKLPDVPNPLQILYIRSISPFPELEQFLQDTIKRYNLQMLEAEGSMKQALGELQARHPQLEAVLMGTRRTDPYSCSLCPFSPTDPGWPAFMRINPLLDWTYRDIWDFLRQLFVPYCILYDRGYTSLGSRENTVRNPALKCLSPGGHPTYRPAYLLENEEEERNSRT

SEQ ID NO: 45707 - protein, 170 aa, Homo sapiens
MKGLFQNPAVQFHSKELYVAADEASIAPILAEAQAHFGRRLGLGSYPDWGSNYYQVKLTLDSEEEGPLEECLAYLTARLPQGSLVPYMPNAVEQASEAVYKLAESGNYLMFQTPSRSCISAASPLSLSWNSFYRTLSREQAIPENQIASPPSEAKGAEEPWMGPFPGQQG

SEQ ID NO: 45708 - protein, 490 aa, Homo sapiens
MTSRASELSPGRSVTAGIIIVGDEILKGHTQDTNTFFLCRTLRSLGVQVCRVSVVPDEVATIAAEVTSFSNRFTHVLTAGGIGPTHDDVTFEAVAQAFGDELKPHPKLEAATKALGGEGWEKLSLVPSSARLHYGTDPCTGQPFRFPLVSVRNVYLFPGIPELLRRVLEGMKGLFQNPAVQFHSKELYVAADEASIAPILAEAQAHFGRRLGLGSYPDWGSNYYQVKLTLDSEEEGPLEECLAYLTARLPQGSLVPYMPNAVEQASEAVYKLAESGSSLGKKVAGALQTIETSLAQYSLTQLCVGFNGGKDCTALLHLFHAAVQRKLPDVPNPLQILYIRSISPFPELEQFLQDTIKRYNLQMLEAEGSMKQALGELQARHPQLEAVLMGTRRTDPYSCSLCPFSPTDPGWPAFMRINPLLDWTYRDIWDFLRQLFVPYCILYDRGYTSLGSRENTVRNPALKCLSPGGHPTYRPAYLLENEEEERNSRT

SEQ ID NO: 45709 - protein, 128 aa, Homo sapiens
MLEAEGSMKQALGELQARHPQLEAVLMGTRRTDPYSCSLCPFSPTDPGWPAFMRINPLLDWTYRDIWDFLRQLFVPYCILYDRGYTSLGSRENTVRNPALKCLSPGGHPTYRPAYLLENEEEERNSRT

SEQ ID NO: 45710 - protein, 294 aa, Homo sapiens
MQPSSSTPPLHPYSTDGLIFPFNPQGHTQDTNTFFLCRTLRSLGVQVCRVSVVPDEVATIAAEVTSFSNRFTHVLTAGGIGPTHDDVTFEAVAQAFGDELKPHPKLEAATKALGGEGWEKLSLVPSSARLHYGTDPCTGQPFRFPLVSVRNVYLFPGIPELLRRVLEGMKGLFQNPAVQFHSKELYVAADEASIAPILAEAQAHFGRRLGLGSYPDWGSNYYQVKLTLDSEEEGPLEECLAYLTARLPQGSLVPYMPNAVEQASEAVYKLAESGRDLMEEGHYAQSHWWHPRSQ

SEQ ID NO: 45711 - protein, 446 aa, Homo sapiens
MTSRASELSPGRSVTAGIIIVGDEILKGHTQDTNTFFLCRTLRSLGVQVCRVSVVPDEVATIAAEVTSFSNRFTHVLTAGGIGPTHDDVTFEAVAQAFGDELKPHPKLEAATKALGGEGWEKLSLVPSSARLHYGTDPCTGQPFRFPLVSVRNVYLFPGIPELLRRVLEGMKGLFQNPAVQFHSKELYVAADEASIAPILAEAQAHFGRRLGLGSYPDWGSNYYQVKLTLDSEEEGPLEECLAYLTARLPQGSLVPYMPNAVEQASEAVYKLAESGSSLGKKVAGALQTIETSLAQYSLTQLCVGFNGGKDCTALLHLFHAAVQRKLPDVPNPLQILYIRSISPFPELEQFLQDTIKRYNLQMLEAEGSMKQALGELQARHPQLEAVLMGTRRTDPYSCSLCPFSPTDPGWPAFMRINPLLDWTYRDIWDFLRQLFVPYCILYDRG

SEQ ID NO: 45712 - protein, 456 aa, Homo sapiens
MGWDLGTRLFQRQEQRSRLSRIWLEKTRVFLEGSTRTPALPHCLFWLLQVPSTQDPLFPGYGPQCPVDLAGPPCLRPLFGGLGGYWRALQRGREGRTMTSRASELSPGRSVTAGIIIVGDEILKGHTQDTNTFFLCRTLRSLGVQVCRVSVVPDEVATIAAEVTSFSNRFTHVLTAGGIGPTHDDVTFEAVAQAFGDELKPHPKLEAATKALGGEGWEKLSLVPSSARLHYGTDPCTGQPFRFPLVSVRNVYLFPGIPELLRRVLEGMKGLFQNPAVQFHSKELYVAADEASIAPILAEAQAHFGRRLGLGSYPDWGSNYYQVKLTLDSEEEGPLEECLAYLTARLPQGSLVPYMPNAVEQASEAVYKLAESGSSLGKKVAGALQTIETSLAQYSLTQLCVGFNGGKDCTALLHLFHAAVQRKLPDVPNPLQILYIRSISPFPELEQFLQDTIKRY

SEQ ID NO: 45713 - protein, 338 aa, Homo sapiens
MQPSSSTPPLHPYSTDGLIFPFNPQGHTQDTNTFFLCRTLRSLGVQVCRVSVVPDEVATIAAEVTSFSNRFTHVLTAGGIGPTHDDVTFEAVAQAFGDELKPHPKLEAATKALGGEGWEKLSLVPSSARLHYGTDPCTGQPFRFPLVSVRNVYLFPGIPELLRRVLEGMKGLFQNPAVQFHSKELYVAADEASIAPILAEAQAHFGRRLGLGSYPDWGSNYYQVKLTLDSEEEGPLEECLAYLTARLPQGSLVPYMPNAVEQASEAVYKLAESGNYLMFQTPSRSCISAASPLSLSWNSFYRTLSREQAIPENQIASPPSEAKGAEEPWMGPFPGQQG

SEQ ID NO: 45714 - protein, 486 aa, Homo sapiens
MIRRVLPHGMGRGLLTRRPGTRRGGFSLDWDGKVSEIKKKIKSILPGRSCDLLQDTSHLPPEHSDVVIVGGGVLGLSVAYWLKKLESRRGAIRVLVVERDHTYSQASTGLSVGGICQQFSLPENIQLSLFSASFLRNINEYLAVVDAPPLDLRFNPSGYLLLASEKDAAAMESNVKVQRQEGAKVSLMSPDQLRNKFPWINTEGVALASYGMEDEGWFDPWCLLQGLRRKVQSLGVLFCQGEVTRFVSSSQRMLTTDDKAVVLKRIHEVHVKMDRSLEYQPVECAIVINAAGAWSAQIAALAGVGEGPPGTLQGTKLPVEPRKRYVYVWHCPQGPGLETPLVADTSGAYFRREGLGSNYLGGRSPTEQEEPDPANLEVDHDFFQDKVWPHLALRVPAFETLKVQSAWAGYYDYNTFDQNGVVGPHPLVVNMYFATGFSGHGLQQAPGIGRAVAEMVLKGRFQTIDLSPFLFTRFYLGEKIQENNII

SEQ ID NO: 45715 - protein, 316 aa, Homo sapiens
MESNVKVQRQEGAKVSLMSPDQLRNKFPWINTEGVALASYGMEDEGWFDPWCLLQGLRRKVQSLGVLFCQGEVTRFVSSSQRMLTTDDKAVVLKRIHEVHVKMDRSLEYQPVECAIVINAAGAWSAQIAALAGVGEGPPGTLQGTKLPVEPRKRYVYVWHCPQGPGLETPLVADTSGAYFRREGLGSNYLGGRSPTEQEEPDPANLEVDHDFFQDKVWPHLALRVPAFETLKVQSAWAGYYDYNTFDQNGVVGPHPLVVNMYFATGFSGHGLQQAPGIGRAVAEMVLKGRFQTIDLSPFLFTRFYLGEKIQENNII

SEQ ID NO: 45716 - protein, 472 aa, Homo sapiens
MAHTGRTVGRLGEGDWDGKVSEIKKKIKSILPGRSCDLLQDTSHLPPEHSDVVIVGGGVLGLSVAYWLKKLESRRGAIRVLVVERDHTYSQASTGLSVGGICQQFSLPENIQLSLFSASFLRNINEYLAVVDAPPLDLRFNPSGYLLLASEKDAAAMESNVKVQRQEGAKVSLMSPDQLRNKFPWINTEGVALASYGMEDEGWFDPWCLLQGLRRKVQSLGVLFCQGEVTRFVSSSQRMLTTDDKAVVLKRIHEVHVKMDRSLEYQPVECAIVINAAGAWSAQIAALAGVGEGPPGTLQGTKLPVEPRKRYVYVWHCPQGPGLETPLVADTSGAYFRREGLGSNYLGGRSPTEQEEPDPANLEVDHDFFQDKVWPHLALRVPAFETLKVQSAWAGYYDYNTFDQNGVVGPHPLVVNMYFATGFSGHGLQQAPGIGRAVAEMVLKGRFQTIDLSPFLFTRFYLGEKIQENNII

SEQ ID NO: 45717 - protein, 684 aa, Homo sapiens
MGLSAAAPLWGPPGLLLAIALHPALSVPPRRDYCVLGAGPAGLQMAYFLQRAGRDYAVFERAPRPGSFFTRYPRHRKLISINKRYTGKANAEFNLRHDWNSLLSHDPRLLFRHYSRAYFPDARDMVRYLGDFADTLGLRVQYNTTIAHVTLDKDRQAWNGHYFILTDQKGQVHQCSVLFVATGLSVPNQVDFPGSEYAEGYESVSVDPEDFVGQNVLILGRGNSAFETAENILGVTNFIHMLSRSRVRLSWATHYVGDLRAINNGLLDTYQLKSLDGLLESDLTDLAILKDSKGKFHVTPKFFLEEANTNQSADSITLPQDDNDNFAMRVPYDRVIRCLGWNFDFSIFNKSLRLNSGNAFGKKYPLIRASYESKGSRGLFILGTASHSVDYRKSAGGFIHGFRYTVRAVHRLLEHRHHSVTWPATELPITQLTSSIVRRVNEASGLYQMFGVLADVILLKENSTAFEYLEEFPIQMLAQLETLTGRKAKHGLFVINMEYGRNFSGPDKDVFFDDRSVGHTEDAWQSNFLHPVIYYYRYLPTEQEVRFRPAHWPLPRPTAIHHIVEDFLTDWTAPIGHILPLRRFLENCLDTDLRSFYAESCFLFALTRQKLPPFCQQGYLRMQGLVSTESLWQHRVESRLLRDYAPTGRRLEDSSQQLGDQEPLGSPLAPGPLAQSVDSNKEEL

SEQ ID NO: 45718 - protein, 684 aa, Homo sapiens; identical to SEQ ID NO: 45717

SEQ ID NO: 45719 - protein, 684 aa, Homo sapiens; identical to SEQ ID NO: 45717

SEQ ID NO: 45720 - protein, 86 aa, Homo sapiens
MGLSAAAPLWGPPGLLLAIALHPALSVPPRRDYCVLGAGPAGLQMAYFLQRAGRDYAVFERAPRPGSFFTRYPRHRKLISINKRYT

SEQ ID NO: 45721 - protein, 242 aa, Homo sapiens
MFLLSGDPCFKTPPSTAKSISIPGQDSSLQLTCKGGGTSSGGSSTNSLTGSRPPKARPTILSSGLPEEPDQNLSSPEEVFHSGHSRNSSYASQQSKISGYSTEHSRSSSLSDLTHRRNTSTSSSASGGLGMTVEGPEGSEREHRPPEKPPRPPRPLHLSDRSFRRKKDSVESHPTWVDDTRIDADAIVEKIVQSQDFTDGSNTEDSNLRLFVSRDGSATLSGIQLATRVSSGVYEPVVIESH

SEQ ID NO: 45722 - protein, 384 aa, Homo sapiens
MAFLMKKKKFKFQTTFTLEELTAVPFVNGVLFCKVRLLDGGDFVSLSSREEVQENCVRWRKRFTFVCKMSANPATGLLDPCVFRVSVRKELKGGKAYSKLGFADLNLAEFAGSGSTVRCCLLEGYDTKNTRQDNSILKVTIGMFLLSGDPCFKTPPSTAKSISIPGQDSSLQLTCKGGGTSSGGSSTNSLTGSRPPKARPTILSSGLPEEPDQNLSSPEEVFHSGHSRNSSYASQQSKISGYSTEHSRSSSLSDLTHRRNTSTSSSASGGLGMTVEGPEGSEREHRPPEKPPRPPRPLHLSDRSFRRKKDSVESHPTWVDDTRIDADAIVEKIVQSQDFTDGSNTEDSNLRLFVSRDGSATLSGIQLATRVSSGVYEPVVIESH

SEQ ID NO: 45723 - protein, 144 aa, Homo sapiens
MYSEIQRERADIGGLMARPEYREWNPELIKPKKLLNPVKASRSHQELHRELLMNHRRGLGVDSKPELQRVLEHRRRNQLIKKKKEELEAKRLQCPFEQELLRRQQRLNQLEKPPEKEEDHAPEFIKVRENLRRIATLTSEEREL

SEQ ID NO: 45724 - protein, 144 aa, Homo sapiens; identical to SEQ ID NO: 45723

SEQ ID NO: 45725 - protein, 172 aa, Homo sapiens
MAQRLGEWARGPSDATGLYRAVLLRSAAMYSEIQRERADIGGLMARPEYREWNPELIKPKKLLNPVKASRSHQELHRELLMNHRRGLGVDSKPELQRVLEHRRRNQLIKKKKEELEAKRLQCPFEQELLRRQQRLNQLEKPPEKEEDHAPEFIKVRENLRRIATLTSEEREL

SEQ ID NO: 45726 - protein, 135 aa, Homo sapiens
MYSEIQRERADIGGLMARPEYREWNPELIKPKKLLNPVKASRSHQELHRELLMNHRRGLGVDSKPELQRVLEHRRRNQLIKKKKEELEAKRLQCPFEQELLRRQQRLNQVGDGHPAGTTHPPGLSSREELCCGHS

SEQ ID NO: 45727 - protein, 105 aa, Homo sapiens
MYSEIQRERADIGGLMARPEYREWNPELIKPKKLLNPVKASRSHQELHRELLMNHRRGLGVDSKPELQRVLEHRRRNQLIKKKKEELEAKRLQCPFEQELLRRQQ

SEQ ID NO: 45728 - protein, 175 aa, Homo sapiens
MGAAQGKKKTYSPQARFHSENEKQRRNGSAAMYSEIQRERADIGGLMARPEYREWNPELIKPKKLLNPVKASRSHQELHRELLMNHRRGLGVDSKPELQRVLEHRRRNQLIKKKKEELEAKRLQCPFEQELLRRQQRLNQLEKPPEKEEDHAPEFIKVRENLRRIATLTSEEREL

SEQ ID NO: 45729 - protein, 262 aa, Homo sapiens
MAPGSPPGPAIATMKLNERSLAFYATCDAPVDNAGFLYKKGGRHAAYHRRWFVLRGNMLFYFEDAASREPVGVIILEGCTVELVEAAEEFAFAVRFAGTRARTYVLAAESQDAMEGWVKALSRASFDYLRLVVRELEQQLAAVRGGGGMALPQPQPQSLPLPPSLPSALAPVPSLPSAPAPVPALPLPRRPSALPPKENGCAVWSTEATFRPGPEPPPPPPRRRASAPHGPLDMAPFARLHECYGQEIRALRGQWLSSRVQP

SEQ ID NO: 45730 - protein, 249 aa, Homo sapiens
MKLNERSLAFYATCDAPVDNAGFLYKKGGRHAAYHRRWFVLRGNMLFYFEDAASREPVGVIILEGCTVELVEAAEEFAFAVRFAGTRARTYVLAAESQDAMEGWVKALSRASFDYLRLVVRELEQQLAAVRGGGGMALPQPQPQSLPLPPSLPSALAPVPSLPSAPAPVPALPLPRRPSALPPKENGCAVWSTEATFRPGPEPPPPPPRRRASAPHGPLDMAPFARLHECYGQEIRALRGQWLSSRVQP

SEQ ID NO: 45731 - protein, 88 aa, Homo sapiens
MKLNERSLAFYATCDAPVDNAGFLYKKGGRHAAYHRRWFVLRGNMLFYFEDAASREPVGVIILVAVALWPRALSVSPWWLSQGSPDTP

SEQ ID NO: 45732 - protein, 282 aa, Homo sapiens
MQASCTRRVGGTRPTTGAGSCCAGTCSSTSRTLPAVSPWASSSWRAALWSWWRPPRSSPSLCALRGPGRAPTCWPLRVRMPWRAGSRPCRVPASTTCGWWCASWSSSWRLYVAGVAWPCPSPSPSPCPCPRPCPLPWPQSHPCLLPQPRSQPCPCPAGPVPSRPRRMAALSGALRPPSGLDPSPLHHRLAAGPRHPTGPWTWPPSPGCTSAMARRSGPCVASGSAAGSSPEATRAPVLGGHKLYALWDRPGPGETGGADPEGNHGQGWPPGPEWPGFGGCRL

SEQ ID NO: 45733 - protein, 117 aa, Homo sapiens
MKLNERSLAFYATCDAPVDNAGFLYKKGGRHAAYHRRWFVLRGNMLFYFEDAASREPVGVIILEGCTVELVEAAEEFAFAVRFAGTRARTYVLAAESQDAMEGWVKALSRASFDYLR

SEQ ID NO: 45734 - protein, 249 aa, Homo sapiens; identical to SEQ ID NO: 45730

SEQ ID NO: 45735 - protein, 249 aa, Homo sapiens; identical to SEQ ID NO: 45730

SEQ ID NO: 45736 - protein, 74 aa, Homo sapiens
MKLNERSLAFYATCDAPVDNAGFLYKKGGRHAAYHRRWFVLRGNMLFYFEDAASREPVGVIILEGCTVELVEAA

SEQ ID NO: 45737 - protein, 80 aa, Homo sapiens
MKLNERSLAFYATCDAPVDNAGFLYKKGGRHAAYHRRWFVLRGNMLFYFEDAASREPVGVIILEGCTVELVEAAEEFAFA

SEQ ID NO: 45738 - protein, 259 aa, Homo sapiens
MKLNERSVAHYALSDSPADHMGFLRTWGGPGTPPTPSGTGRRCWFVLKGNLLFSFESREGRAPLSLVVLEGCTVELAEAPVPEEFAFAICFDAPGVRPHLLAAEGPAAQEAWVKVLSRASFGYMRLVVRELESQLQDARQSLALQRRSSWKSVASRCKPQAPNHRAAGLENGHCLSKDSSPVGLVEEAGSRSAGWGLAEWELQGPASLLLGKGQSPVSPETSCFSTLHDWYGQEIVELRQCWQKRAQGSHSKCEEQDRP

SEQ ID NO: 45739 - protein, 108 aa, Homo sapiens
MKLNERSVAHYALSDSPADHMGFLRTWGGPGTPPTPSGTGRRCWFVLKGNLLFSFESREGRAPLSLVVLEGCTVELAEAPVPEEFAFAICFDAPGVRPHLLAAEGPAA

SEQ ID NO: 45740 - protein, 242 aa, Homo sapiens
MTIPGGTPSLKILWLNQEPEIQVRRLDTLLACFNLSSSREELQAVESPFQALCCLLIYLFVQVDTLCLEDLHAFIAQALCLQGKSTSQLVNLQPDYINPRAVQLGSLLVRGLTTLVLVNSACGFPWKTSDFMPWNVFDGKLFHQKYLQSEKGYAVEVLLEQNRSRLTKFHNLKAVVCKACMKENRRITGRAHWGSHHAGRWGRQGSSYHRTGSGYSRSSQGQPWRDQGPGSRQYEHDQWRRY

SEQ ID NO: 45741 - protein, 910 aa, Homo sapiens
MGVRGLQGFVGSTCPHICTVVNFKELAEHHRSKYPGCTPTIVVDAMCCLRYWYTPESWICGGQWREYFSALRDFVKTFTAAGIKLIFFFDGMVEQDKRDEWVKRRLKNNREISRIFHYIKSHKEQPGRNMFFIPSGLAVFTRFALKTLGQETLCSLQEADYEVASYGLQHNCLGILGEDTDYLIYDTCPYFSISELCLESLDTVMLCREKLCESLGLCVADLPLLACLLGNDIIPEGMFESFRYKCLSSYTSVKENFDKKGNIILAVSDHISKVLYLYQGEKKLEEILPLGPNKALFYKGMASYLLPGQKSPWFFQKPKGVITLDKQVISTSSDAESREEVPMCSDAESRQEVPMCTGPESRREVPVYTDSEPRQEVPMCSDPEPRQEVPTCTGPESRREVPMCSDPEPRQEVPMCTGPEARQEVPMYTDSEPRQEVPMYTDSEPRQEVPMYTGSEPRQEVPMYTGPESRQEVPMYTGPESRQEVLIRTDPESRQEIMCTGHESKQEVPICTDPISKQEDSMCTHAEINQKLPVATDFEFKLEALMCTNPEIKQEDPTNVGPEVKQQVTMVSDTEILKVARTHHVQAESYLVYNIMSSGEIECSNTLEDELDQALPSQAFIYRPIRQRVYSLLLEDCQDVTSTCLAVKEWFVYPGNPLRHPDLVRPLQMTIPGGTPSLKILWLNQEPEIQVRRLDTLLACFNLSSSREELQAVESPFQALCCLLIYLFVQVDTLCLEDLHAFIAQALCLQGKSTSQLVNLQPDYINPRAVQLGSLLVRGLTTLVLVNSACGFPWKTSDFMPWNVFDGKLFHQKYLQSEKGYAVEVLLEQNRSRLTKFHNLKAVVCKACMKENRRITGRAHWGSHHAGRWGRQGSSYHRTGSGYSRSSQGQPWRDQGPGSRQYEHDQWRRY

SEQ ID NO: 45742 - protein, 933 aa, Homo sapiens
MFGPRGSTSAGAGRKEILSRSSVMGVRGLQGFVGSTCPHICTVVNFKELAEHHRSKYPGCTPTIVVDAMCCLRYWYTPESWICGGQWREYFSALRDFVKTFTAAGIKLIFFFDGMVEQDKRDEWVKRRLKNNREISRIFHYIKSHKEQPGRNMFFIPSGLAVFTRFALKTLGQETLCSLQEADYEVASYGLQHNCLGILGEDTDYLIYDTCPYFSISELCLESLDTVMLCREKLCESLGLCVADLPLLACLLGNDIIPEGMFESFRYKCLSSYTSVKENFDKKGNIILAVSDHISKVLYLYQGEKKLEEILPLGPNKALFYKGMASYLLPGQKSPWFFQKPKGVITLDKQVISTSSDAESREEVPMCSDAESRQEVPMCTGPESRREVPVYTDSEPRQEVPMCSDPEPRQEVPTCTGPESRREVPMCSDPEPRQEVPMCTGPEARQEVPMYTDSEPRQEVPMYTDSEPRQEVPMYTGSEPRQEVPMYTGPESRQEVPMYTGPESRQEVLIRTDPESRQEIMCTGHESKQEVPICTDPISKQEDSMCTHAEINQKLPVATDFEFKLEALMCTNPEIKQEDPTNVGPEVKQQVTMVSDTEILKVARTHHVQAESYLVYNIMSSGEIECSNTLEDELDQALPSQAFIYRPIRQRVYSLLLEDCQDVTSTCLAVKEWFVYPGNPLRHPDLVRPLQMTIPGGTPSLKILWLNQEPEIQVRRLDTLLACFNLSSSREELQAVESPFQALCCLLIYLFVQVDTLCLEDLHAFIAQALCLQGKSTSQLVNLQPDYINPRAVQLGSLLVRGLTTLVLVNSACGFPWKTSDFMPWNVFDGKLFHQKYLQSEKGYAVEVLLEQNRSRLTKFHNLKAVVCKACMKENRRITGRAHWGSHHAGRWGRQGSSYHRTGSGYSRSSQGQPWRDQGPGSRQYEHDQWRRY

SEQ ID NO: 45743 - protein, 922 aa, Homo sapiens
MDRQMILSRSSVMGVRGLQGFVGSTCPHICTVVNFKELAEHHRSKYPGCTPTIVVDAMCCLRYWYTPESWICGGQWREYFSALRDFVKTFTAAGIKLIFFFDGMVEQDKRDEWVKRRLKNNREISRIFHYIKSHKEQPGRNMFFIPSGLAVFTRFALKTLGQETLCSLQEADYEVASYGLQHNCLGILGEDTDYLIYDTCPYFSISELCLESLDTVMLCREKLCESLGLCVADLPLLACLLGNDIIPEGMFESFRYKCLSSYTSVKENFDKKGNIILAVSDHISKVLYLYQGEKKLEEILPLGPNKALFYKGMASYLLPGQKSPWFFQKPKGVITLDKQVISTSSDAESREEVPMCSDAESRQEVPMCTGPESRREVPVYTDSEPRQEVPMCSDPEPRQEVPTCTGPESRREVPMCSDPEPRQEVPMCTGPEARQEVPMYTDSEPRQEVPMYTDSEPRQEVPMYTGSEPRQEVPMYTGPESRQEVPMYTGPESRQEVLIRTDPESRQEIMCTGHESKQEVPICTDPISKQEDSMCTHAEINQKLPVATDFEFKLEALMCTNPEIKQEDPTNVGPEVKQQVTMVSDTEILKVARTHHVQAESYLVYNIMSSGEIECSNTLEDELDQALPSQAFIYRPIRQRVYSLLLEDCQDVTSTCLAVKEWFVYPGNPLRHPDLVRPLQMTIPGGTPSLKILWLNQEPEIQVRRLDTLLACFNLSSSREELQAVESPFQALCCLLIYLFVQVDTLCLEDLHAFIAQALCLQGKSTSQLVNLQPDYINPRAVQLGSLLVRGLTTLVLVNSACGFPWKTSDFMPWNVFDGKLFHQKYLQSEKGYAVEVLLEQNRSRLTKFHNLKAVVCKACMKENRRITGRAHWGSHHAGRWGRQGSSYHRTGSGYSRSSQGQPWRDQGPGSRQYEHDQWRRY

SEQ ID NO: 45744 - protein, 1096 aa, Homo sapiens
MGVQGFQEFLEKRCPGAVVPVDLLKLARTVSRQQQQQHLHRQLPPTAALAPGAPRAARGSVPLQPPLPPAALGAYSGGAGPIRHHHPAHHFHHHGQAQPGLHPPLPPPPPPQLPGARVLVDAGSALPRLYGGYQTDWVCGGQWNAMLGYLSALCQACAYPGGDGLELVVMFPGGLGKDRLAEWGRRCQAERQTAQLIVGHVGNKGTPPPRAWFLPPACLSHCVRLALIRFRVKVFQSLEDHHLEVVAFFRENGFHGLLAHDSEYALYNIPSYYSSHALKLSWNGKNLTTNQFLMQEVAKQLGLKRMNFPIFAALLGNHILPDEDLAAFHWSLLGPEHPLASLKVRAHQLVLPPCDVVIKAVSEYVSSIKDPSNLDVVGKDVFKQSQSRTEDKIERFKKAVEYYSVTTKLSSLPVGPSFLGFRNNRLGNPPLPRNQVGTISAGKPMFSHQVPQKVKYPPPFPVGPNSSLLFSSHALGESHAFSEDPMLQNSPFANWAVSYDSSASQFPNYLPSKASPPLGPDSSHSSSSDGDEPNGASSDHITEAFHHQPEWGNPNRDRGSWAQPVDTGVSEASLGDGEPHIPSLLSMSTRNHMDITIPPLPPVAPEVLRVAEHRHRRGLMYPYIYHVLTKGEIKIPVCIEDECNMELPPAALLFRSARQYVYGVLFSLAETQRKMERLAMRRRLPVEVPSVILKEWSAYKGKSPQTPELVSALTFREWTCPNLKKLWLGKAVEDKNRRMRAFLACMKSDTPSMLNPANVPTHLLLMCCVLRYMVQWPGGRILHRHELDTFLAQAVSTQLYEPDRLQELKIEKLDARGIQLAALFMSGVDTALFANDACGQPVPWEHCCPWIYFDGKLFQSKLIKAGRERVSLVELCDGQADLATKVEKMRQSILEGVNMNHPPPSALLPSPTFVPPMVPSLYPVSLYSRAMGSMPLPPQGRSRGFAGLHPIPPQGGKLEIAGMVVGQWAGSRSSRGRGSFGMQVVSVGGPGKGHGKEQTGRGSKGHKKGNKQGSSDGVSKSLELHQGRSRSQVNGNSGALIKEEKSDHRLPAPSQCALSRDSNECNNGNRYLPMNNREKNHLQEQKLETVAQRKED

SEQ ID NO: 45745 - protein, 238 aa, Homo sapiens
MGVQGFQEFLEKRCPGAVVPVDLLKLARTVSRQQQQQHLHRQLPPTAALAPGAPRAARGSVPLQPPLPPAALGAYSGGAGPIRHHHPAHHFHHHGQAQPGLHPPLPPPPPPQLPGARVLVDAGSALPRLYGGYQTDWVCGGQWNAMLGYLSALCQACAYPGGDGLELVVMFPGGLGKDRLAEWGRRCQAERQTAQLIVGHVGNKGTPPPRAWFLPPACLSHCVRLALIRFRVKQAAML

SEQ ID NO: 45746 - protein, 1135 aa, Homo sapiens
METQKDEAAQAKGAAASGSTREQTAEKGAKNKAAEATEGPTSEPSSSGPGRLKKTAMKLFGGKKGICTLPSFFGGGRSKGSGKGSSKKGLSKSKTHDGLSEAAHGPEDVVSEGTGFSLPLPELPCQFPSSQSAHGALETGSRCKTSVAGATEKAVAEKFPSMPKPKKGLKGFFSSIRRHRKSKVTGAEQSEPGAKGPERVRARPHEHVSSAPQVPCFEETFQAPRKENANPQDAPGPKVSPTPEPSPPATEKMACKDPEKPMEACASAHVQPKPAPEASSLEEPHSPETGEKVVAGEVNPPNGPVGDPLSLLFGDVTSLKSFDSLTGCGDIIAEQDMDSMTDSMASGGQRANRDGTKRSSCLVTYQGGGEEMALPDDDDEEEEEEEEVELEEEEEEVKEEEEDDDLEYLWETAQMYPRPNMNLGYHPTTSPGHHGYMLLDPVRSYPGLAPGELLTPQSDQQESAPNSDEGYYDSTTPGFEDDSGEALGLVRRDCLPRDSYSGDALYEFYEPDDSLENSPPGDDCLYDLHGRSSEMFDPFLNFEPFLSSRPPGAMETEEERLVTIQKQLLYWELRREQLEAQEARAREAHAREAHAREAYTREAYGREAYAREAHTWEAHGREARTREAQAREVRCRETQVRETQARQEKPVLEYQMRPLGPSVMGLAAGVSGTSQISHRGITSAFPTTASSEPDWRDFRPLEKRYEGTCSKKDQSTCLMQLFQSDAMFEPDMQEANFGGSPRRAYPTYSPPEDPEEEEVEKEGNATVSFSQALVEFTSNGNLFSSMSCSSDSDSSFTQNLPELPPMVTFDIADVERDGEGKCEENPEFHNDEDLAASLEAFELGYYHKHAFNNYHSRFYQGLPWGVSSLPRYLGLPGLHPRPPPAAMALNRRSRSLDTAETLEMELSNSHLVQGYLESDELQAQQEDSDEEDEEEEEGEWSRDSPLSLYTEPPGAYDWPAWAPCPLPVGPGPAWISPNQLDRPSSQSPYRQATCCIPPMTMSISLSVPESRAPGESGPQLARPSHLHLPMGPCYNLQPQASQSMRARPRDVLLPVDEPSCSSSSGGFSPSPLPQAKPVGITHGIPQLPRVRPEHPQPQPTHYGPSSLDLSKERAEQGASLATSYSSTAMNGNLAK

SEQ ID NO: 45747 - protein, 804 aa, Homo sapiens
METQKDEAAQAKGAAASGSTREQTAEKGAKNKAAEATEGPTSEPSSSGPGRLKKTAMKLFGGKKGICTLPSFFGGGRSKGSGKGSSKKGLSKSKTHDGLSEAAHGPEDVVSEGTGFSLPLPELPCQFPSSQSAHGALETGSRCKTSVAGATEKAVAEKFPSMPKPKKGLKGFFSSIRRHRKSKVTGAEQSEPGAKGPERVRARPHEHVSSAPQVPCFEETFQAPRKENANPQDAPGPKVSPTPEPSPPATEKMACKDPEKPMEACASAHVQPKPAPEASSLEEPHSPETGEKVVAGEVNPPNGPVGDPLSLLFGDVTSLKSFDSLTGCGDIIAEQDMDSMTDSMASGGQRANRDGTKRSSCLVTYQGGGEEMALPDDDDEEEEEEEEVELEEEEEEVKEEEEDDDLEYLWETAQMYPRPNMNLGYHPTTSPGHHGYMLLDPVRSYPGLAPGELLTPQSDQQESAPNSDEGYYDSTTPGFEDDSGEALGLVRRDCLPRDSYSGDALYEFYEPDDSLENSPPGDDCLYDLHGRSSEMFDPFLNFEPFLSSRPPGAMETEEERLVTIQKQLLYWELRREQLEAQEARAREAHAREAHAREAYTREAYGREAYAREAHTWEAHGREARTREAQAREVRCRETQVRETQARQEKPVLEYQMRPLGPSVMGLAAGVSGTSQISHRGITSAFPTTASSEPDWRDFRPLEKRYEGTCSKKDQSTCLMQLFQSDAMFEPDMQEANFGGSPRRAYPTYSPPEDPEEEEVEKEGNATVSFSQALVEFTSNGNLFSSIRCPGTEDKRQVTQACGTW

SEQ ID NO: 45748 - protein, 521 aa, Homo sapiens
MFTSEKGVVEEWLSEFKTLPETSLPNYATNLKDKSSLVSSLYKVIQEPQSELLEPVCHQLFEFYRSGEEQLLQFTLQFLPELIWCYLAVSASRNVHSSGCIEALLLGVYNLEIVDKQGHTKVLSFTIPSLSKPSVYHEPSSIGSMALTESALSQHGLSKVVYSGPHPQREMLTAQNRFEVLTFLLLCYNAALTYMPSVSLQSLCQICSRICVCGYPRQHVRKYKGISSRIPVSSGFMVQMLTGIYFAFYNGEWDLAQKALDDIIYRAQLELYPEPLLVANAIKASLPHGPMKSNKEGTRCIQVEITPTSSRISRNAVTSMSIRGHRWKRHGNTELTGQEELMEISEVDEGFYSRAASSTSQSGLSNSSHNCSNKPSIGKNHRRSGGSKTGGKEKETTGESCKDHFARKQTQRAQSENLELLSLKRLTLTTSQSLPKPSSHGLAKTAATVFSKSFEQVSGVTVPHNPSSAVGCGAGTDANRFSACSLQEEKLIYVSERTELPMKHQSGQQRPPSISITLSTD

SEQ ID NO: 45749 - protein, 113 aa, Homo sapiens
MDGRVQLIKALLALPIRPATRRWRNPIPFPETFDGDTDRLPEFIVQTGSYMFVDENTFSSDALKVTFLITRLTGPALQWVIPYIKKESPLLNDYRGFLAEMKRVFGWEEDEDF

SEQ ID NO: 45750 - protein, 746 aa, Homo sapiens
MGDVLSTHLDDARRQHIAEKTGKILTEFLQFYEDQYGVALFNSMRHEIEGTGLPQAQLLWRKVPLDERIVFSGNLFQHQEDSKKWRNRFSLVPHNYGLVLYENKAAYERQVPPRAVINSAGYKILTSVDQYLELIGNSLPGTTAKSGSAPILKCPTQFPLILWHPYARHYYFCMMTEAEQDKWQAVLQDCIRHCNNGIPEDSKVEGPAFTDAIRMYRQSKELYGTWEMLCGNEVQILSNLVMEELGPELKAELGPRLKGKPQERQRQWIQISDAVYHMVYEQAKARFEEVLSKVQQVQPAMQAVIRTDMDQIITSKEHLASKIRAFILPKAEVCVRNHVQPYIPSILEALMVPTSQGFTEVRDVFFKEVTDMNLNVINEGGIDKLGEYMEKLSRLAYHPLKMQSCYEKMESLRLDGLQQRFDVSSTSVFKQRAQIHMREQMDNAVYTFETLLHQELGKGPTKEELCKSIQRVLERVLKKYDYDSSSVRKRFFREALLQISIPFLLKKLAPTCKSELPRFQELIFEDFARFILVENTYEEVVLQTVMKDILQAVKEAAVQRKHNLYRDSMVMHNSDPNLHLLAEGAPIDWGEEYSNSGGGGSPSPSTPESATLSEKRRRAKQVVSVVQDEEVGLPFEASPESPPPASPDGVTEIRGLLAQGLRPESPPPAGPLLNGAPAGESPQPKAAPEASSPPASPLQHLLPGKAVDLGPPKPSDQETGEQVSSPSSHPALHTTTEDSAGVQTEF

SEQ ID NO: 45751 - protein, 733 aa, Homo sapiens
MGWMGEKTGKILTEFLQFYEDQYGVALFNSMRHEIEGTGLPQAQLLWRKVPLDERIVFSGNLFQHQEDSKKWRNRFSLVPHNYGLVLYENKAAYERQVPPRAVINSAGYKILTSVDQYLELIGNSLPGTTAKSGSAPILKCPTQFPLILWHPYARHYYFCMMTEAEQDKWQAVLQDCIRHCNNGIPEDSKVEGPAFTDAIRMYRQSKELYGTWEMLCGNEVQILSNLVMEELGPELKAELGPRLKGKPQERQRQWIQISDAVYHMVYEQAKARFEEVLSKVQQVQPAMQAVIRTDMDQIITSKEHLASKIRAFILPKAEVCVRNHVQPYIPSILEALMVPTSQGFTEVRDVFFKEVTDMNLNVINEGGIDKLGEYMEKLSRLAYHPLKMQSCYEKMESLRLDGLQQRFDVSSTSVFKQRAQIHMREQMDNAVYTFETLLHQELGKGPTKEELCKSIQRVLERVLKKYDYDSSSVRKRFFREALLQISIPFLLKKLAPTCKSELPRFQELIFEDFARFILVENTYEEVVLQTVMKDILQAVKEAAVQRKHNLYRDSMVMHNSDPNLHLLAEGAPIDWGEEYSNSGGGGSPSPSTPESATLSEKRRRAKQVVSVVQDEEVGLPFEASPESPPPASPDGVTEIRGLLAQGLRPESPPPAGPLLNGAPAGESPQPKAAPEASSPPASPLQHLLPGKAVDLGPPKPSDQETGEQVSSPSSHPALHTTTEDSAGVQTEF

SEQ ID NO: 45752 - protein, 396 aa, Homo sapiens [sequence omitted]

SEQ ID NO: 45753 - protein, 1023 aa, Homo sapiens
MGAGALAICQSKAAVRLKEDMKKIVAVPLNEQKDFTYQKLFGVSLQELERQGLTENGIPAVVWNIVEYLTQHGLTQEGLFRVNGNVKVVEQLRLKFESGVPVELGKDGDVCSAASLLKLFLRELPDSLITSALQPRFIQLFQDGRNDVQESSLRDLIKELPDTHYCLLKYLCQFLTKVAKHHVQNRMNVHNLATVFGPNCFHVPPGLEGMKEQDLCNKIMAKILENYNTLFEVEYTENDHLRCENLARLIIVKEVYYKNSLPILLTRGLERDMPKPPPKTKIPKSRSEGSIQAHRVLQPELSDGIPQLSLRLSYRKACLEDMNSAEGAISAKLVPSSQEDERPLSPFYLSAHVPQVSNVSATGELLERTIRSAVEQHLFDVNNSGGQSSEDSESGTLSASSATSARQRRRQSKEQDEVRHGRDKGLINKENTPSGFNHLDDCILNTQEVEKVHKNTFGCAGERSKPKRQKSSTKLSELHDNQDGLVNMESLNSTRSHERTGPDDFEWMSDERKGNEKDGGHTQHFESPTMKIQEHPSLSDTKQQRNQDAGDQEESFVSEVPQSDLTALCDEKNWEEPIPAFSSWQRENSDSDEAHLSPQAGRLIRQLLDEDSDPMLSPRFYAYGQSRQYLDDTEVPPSPPNSHSFMRRRSSSLGSYDDEQEDLTPAQLTRRIQSLKKKIRKFEDRFEEEKKYRPSHSDKAANPEVLKWTNDLAKFRRQLKESKLKISEEDLTPRMRQRSNTLPKSFGSQLEKEDEKKQELVDKAIKPSVEATLESIQRKLQEKRAESSRPEDIKDMTKDQIANEKVALQKALLYYESIHGRPVTKNERQVMKPLYDRYRLVKQILSRANTIPIIGSPSSKRRSPLLQPIIEGETASFFKEIKEEEEGSEDDSNVKPDFMVTLKTDFSARCFLDQFEDDADGFISPMDDKIPSKCSQDTGLSNLHAASIPELLEHLQEMREEKKRIRKKLRDFEDNFFRQNGRNVQKEDRTPMAEEYSEYKHIKAKLRLLEVLISKRDTDSKSM

SEQ ID NO: 45754 - protein, 669 aa, Homo sapiens
MACEIMPLQSSQEDERPLSPFYLSAHVPQVSNVSATGELLERTIRSAVEQHLFDVNNSGGQSSEDSESGTLSASSATSARQRRRQSKEQDEVRHGRDKGLINKENTPSGFNHLDDCILNTQEVEKVHKNTFGCAGERSKPKRQKSSTKLSELHDNQDGLVNMESLNSTRSHERTGPDDFEWMSDERKGNEKDGGHTQHFESPTMKIQEHPSLSDTKQQRNQDAGDQEESFVSEVPQSDLTALCDEKNWEEPIPAFSSWQRENSDSDEAHLSPQAGRLIRQLLDEDSDPMLSPRFYAYGQSRQYLDDTEVPPSPPNSHSFMRRRSSSLGSYDDEQEDLTPAQLTRRIQSLKKKIRKFEDRFEEEKKYRPSHSDKAANPEVLKWTNDLAKFRRQLKESKLKISEEDLTPRMRQRSNTLPKSFGSQLEKEDEKKQELVDKAIKPSVEATLESIQRKLQEKRAESSRPEDIKDMTKDQIANEKVALQKALLYYESIHGRPVTKNERQVMKPLYDRYRLVKQILSRANTIPIIEEEEGSEDDSNVKPDFMVTLKTDFSARCFLDQFEDDADGFISPMDDKIPSKCSQDTGLSNLHAASIPELLEHLQEMREEKKRIRKKLRDFEDNFFRQNGRNVQKEDRTPMAEEYSEYKHIKAKLRLLEVLISKRDTDSKSM

SEQ ID NO: 45755 - protein, 697 aa, Homo sapiens
MACEIMPLQSSQEDERPLSPFYLSAHVPQVSNVSATGELLERTIRSAVEQHLFDVNNSGGQSSEDSESGTLSASSATSARQRRRQSKEQDEVRHGRDKGLINKENTPSGFNHLDDCILNTQEVEKVHKNTFGCAGERSKPKRQKSSTKLSELHDNQDGLVNMESLNSTRSHERTGPDDFEWMSDERKGNEKDGGHTQHFESPTMKIQEHPSLSDTKQQRNQDAGDQEESFVSEVPQSDLTALCDEKNWEEPIPAFSSWQRENSDSDEAHLSPQAGRLIRQLLDEDSDPMLSPRFYAYGQSRQYLDDTEVPPSPPNSHSFMRRRSSSLGSYDDEQEDLTPAQLTRRIQSLKKKIRKFEDRFEEEKKYRPSHSDKAANPEVLKWTNDLAKFRRQLKESKLKISEEDLTPRMRQRSNTLPKSFGSQLEKEDEKKQELVDKAIKPSVEATLESIQRKLQEKRAESSRPEDIKDMTKDQIANEKVALQKALLYYESIHGRPVTKNERQVMKPLYDRYRLVKQILSRANTIPIIGSPSSKRRSPLLQPIIEGETASFFKEIKEEEEGSEDDSNVKPDFMVTLKTDFSARCFLDQFEDDADGFISPMDDKIPSKCSQDTGLSNLHAASIPELLEHLQEMREEKKRIRKKLRDFEDNFFRQNGRNVQKEDRTPMAEEYSEYKHIKAKLRLLEVLISKRDTDSKSM

SEQ ID NO: 45756 - protein, 202 aa, Homo sapiens
MGAGALAICQSKAAVRLKEDMKKIVAVPLNEQKDFTYQKLFGVSLQELERQGLTENGIPAVVWNIVEYLTQHGLTQEGLFRVNGNVKVVEQLRLKFESGVPVELGKDGDVCSAASLLKLFLRELPDSLITSALQPRFIQLFQDGRNDVQESSLRDLIKELPDTHYCLLKYLCQFLTKVAKHHVQNRMNVHNLATVFGPNCFQ

SEQ ID NO: 45757 - protein, 497 aa, Homo sapiens
MASPAPPEHAEEGCPAPAAEEQAPPSPPPPQASPAERQQQEEEAQEAGAAEGAGLQVEEAAGRAAAAVTWLLGEPVLWLGCRADELLSWKRPLRSLLGFVAANLLFWFLALTPWRVYHLISVMILGRVIMQIIKDMVLSRTRGAQLWRSLSESWEVINSKPDERPRLSHCIAESWMNFSIFLQEMSLFKQQSPGKFCLLVCSVCTFFTILGSYIPGVILSYLLLLCAFLCPLFKCNDIGQKIYSKIKSVLLKLDFGIGEYINQKKRERSEADKEKSHKDDSELDFSALCPKISLTVAAKELSVSDTDVSEVSWTDNGTFNLSEGYTPQTDTSDDLDRPSEEVFSRDLSDFPSLENGMGTNDEDELSLGLPTELKRKKEQLDSGHRPSKETQSAAGLTLPLNSDQTFHLMSNLAGDVITAAVTAAIKDQLEGVQQALSQAAPIPEEDTDTEEGDDFELLDQSELDQIESELGLTQDQEAEAQQNKKSSGFLSNLLGGH

SEQ ID NO: 45758 - protein, 356 aa, Homo sapiens
MPEGEDFGPGKSWEVINSKPDERPRLSHCIAESWMNFSIFLQEMSLFKQQSPGKFCLLVCSVCTFFTILGSYIPGVILSYLLLLCAFLCPLFKCNDIGQKIYSKIKSVLLKLDFGIGEYINQKKRERSEADKEKSHKDDSELDFSALCPKISLTVAAKELSVSDTDVSEVSWTDNGTFNLSEGYTPQTDTSDDLDRPSEEVFSRDLSDFPSLENGMGTNDEDELSLGLPTELKRKKEQLDSGHRPSKETQSAAGLTLPLNSDQTFHLMSNLAGDVITAAVTAAIKDQLEGVQQALSQAAPIPEEDTDTEEGDDFELLDQSELDQIESELGLTQDQEAEAQQNKKSSGFLSNLLGGH

SEQ ID NO: 45759 - protein, 716 aa, Homo sapiens
MATSHRVAKLVASSLQTPVNPITGARVAQYEREDPLKALAAAEAILEDEEEEKVAQPAGASADLNTSFSGVDEHAPISYEDFVNFPDIHHSNEEYFKKVEELKAAHIETMAKLEKMYQDKLHLKEVQPVVIREDSLSDSSRSVSEKNSYHPVSLMTSFSEPDLGQSSSLYVSSSEEELPNLEKEYPRKNRMMTYAKELINNMWTDFCVEDYIRCKDTGFHAAEKRRKKRKEWVPTITVPEPFQMMIREQKKKEESMKSKSDIEMVHKALKKQEEDPEYKKKFRANPVPASVFLPLYHDLVKQKEERRRSLKEKSKEALLASQKPFKFIAREEQKRAAREKQLRDFLKYKKKTNRFKARPIPRSTYGSTTNDKLKEEELYRNLRTQLRAQEHLQNSSPLPCRSACGCRNPRCPEQAVKLKCKHKVRCPTPDFEDLPERYQKHLSEHKSPKLLTVCKPFDLHASPHASIKREKILADIEADEENLKETRWPYLSPRRKSPVRCAGVNPVPCNCNPPVPTVSSRGREQAVRRSLEEKKMLEEERNRILTKQKQRMKELQKLLTTRAKAYDSHQSLAQISKSRVKCLRKSEKERMREYQRELEEREEKLKKRPLLFERVAQKNARMAAEKHYSNTLKALGISDEFVSKKGQSGKVLEYFNNQETKSVTEDKESFNEEEKIEERENGEENYFIDTNSQDSYKEKDEANEESEEEKSVEESH

SEQ ID NO: 45760 - protein, 660 aa, Homo sapiens
MATSHRVAKLVASSLQTPVNPITGARVAQYEREDPLKALAAAEAILEDEEEEKVAQPAGASADLNTSFSGVDEHAPISYEDFVNFPDIHHSNEEYFKKVEELKAAHIETMAKLEKMYQDKLHLKEVQPVVIREDSLSDSSRSVSEKNSYHPVSLMTSFSEPDLGQSSSLYVSSSEEELPNLEKEYPRKNRMMTYAKELINNMWTDFCVEDYIRCKDTGFHAAEKRRKKRKEWVPTITVPEPFQMMIREQKKKEESMKSKSDIEMVHKALKKQEEDPEYKKKFRANPVPASVFLPLYHDLVKQKEERRRSLKEKSKEALLASQKPFKFIAREEQKRAAREKQLRDFLKYKKKTNRFKARPIPRSTYGSTTNDKLKEEELYRNLRTQLRAQEHLQNSSPLPCRSACGCRNPRCPEQAVKLKCKHKVRCPTPDFEDLPERYQKHLSEHKSPKLLTVCKPFDLHASPHASIKREKILADIEADEENLKETRWPYLSPRRKSPVRCAGVNPVPCNCNPPVPTVSSRGREQAVRKSEKERMREYQRELEEREEKLKKRPLLFERVAQKNARMAAEKHYSNTLKALGISDEFVSKKGQSGKVLEYFNNQETKSVTEDKESFNEEEKIEERENGEENYFIDTNSQDSYKEKDEANEESEEEKSVEESH

SEQ ID NO: 45761 - protein, 214 aa, Homo sapiens
MSVPQIHVEEVGAEEGAGAAAPPDDHLRSLKALTEKLRLETRRPSYLEWQARLEEHTWPFPRPAAEPQASLEEGERGGQEPLLPLREAGQHPPSARSASQGARPLSTGKLEGFQSIDEAIAWLRKELTEMRLQDQQLARQLMRLRGDINKLKIEHTCRLHRRMLNDATYELEERDELADLFCDSPLASSFSLSTPLKLIGVTKMNINSRRFSLC

SEQ ID NO: 45762 - protein, 415 aa, Homo sapiens
MAASISGYTFSAVCFHSANSNADHEGFLLGEVRQEETFSISDSQISNTEFLQVIEIHNHQPCSKLFSFYDYASKVNEESLDRILKDRRKKVIGWYRFRRNTQQQMSYREQVLHKQLTRILGVPDLVFLLFSFISTANNSTHALEYVLFRPNRRYNQRISLAIPNLGNTSQQEYKVSSVPNTSQSYAKVIKEHGTDFFDKDGVMKDIRAIYQVYNALQEKVQAVCADVEKSERVVESCQAEVNKLRRQITQRKNEKEQERRLQQAVLSRQMPSESLDPAFSPRMPSSGFAAEGRSTLGDAEASDPPPPYSDFHPNNQESTLSHSRMERSVFMPRPQAVGSSNYASTSAGLKYPGSGADLPPPQRAAGDSGEDSDDSDYENLIDPTEPSNSEYSHSKDSRPMAHPDEDPRNTQTSQI

SEQ ID NO: 45763 - protein, 1173 aa, Homo sapiens
MTRRCMPARPGFPSSPAPGSSPPRCHLRPGSTAHAAAGKRTESPGDRKQSIIDFFKPASKQDRHMLDSPQKSNIKYGGSRLSITGTEQFERKLSSPKESKPKRVPPEKSPIIEAFMKGVKEHHEDHGIHESRRPCLSLASKYLAKGTNIYVPSSYHLPKEMKSLKKKHRSPERRKSLFIHENNEKNDRDRGKTNADSKKQTTVAEADIFNNSSRSLSSRSSLSRHHPEESPLGAKFQLSLASYCRERELKRLRKEQMEQRINSENSFSEASSLSLKSSIERKYKPRQEQRKQNDIIPGKNNLSNVENGHLSRKRSSSDSWEPTSAGSKQNKFPEKRKRNSVDSDLKSTRESMIPKARESFLEKRPDGPHQKEKFIKHIALKTPGDVLRLEDISKEPSDETDGSSAGLAPSNSGNSGHHSTRNSDQIQVAGTKETKMQKPHLPLSQEKSAIKKASNLQKNKTASSTTKEKETKLPLLSRVPSAGSSLVPLNAKNCALPVSKKDKERSSSKECSGHSTESTKHKEHKAKTNKADSNVSSGKISGGPLRSEYGTPTKSPPAALEVVPCIPSPAAPSDKAPSEGESSGNSNAGSSALKRKLRGDFDSDEESLGYNLDSDEEEETLKSLEEIMALNFNQTPAATGKPPALSKGLRSQSSDYTGHVHPGTYTNTLERLVKEMEDTQRLDELQKQLQEDIRQGRGIKSPIRIGEEDSTDDEDGLLEEHKEFLKKFSVTIDAIPDHHPGEEIFNFLNSGKIFNQYTLDLRDSGFIGQSAVEKLILKSGKTDQIFLTTQGFLTSAYHYVQCPVPVLKWLFRMMSVHTDCIVSVQILSTLMEITIRNDTFSDSPVWPWIPSLSDVAAVFFNMGIDFRSLFPLENLQPDFNEDYLVSETQTTSRGKESEDSSYKPIFSTLPETNILNVVKFLGLCTSIHPEGYQDREIMLLILMLFKMSLEKQLKQIPLVDFQSLLINLMKNIRDWNTKVPELCLGINELSSHPHNLLWLVQLVPNWTSRGRQLRQCLSLVIISKLLDEKHEDVPNASNLQVSVLHRYLVQMKPSDLLKKMVLKKKAEQPDGIIDDSLHLELEKQAYYLTYILLHLVGEVSCSHSFSSGQRKHFVLLCGALEKHVKCDIREDARLFYRTKVKDLVARIHGKWQEIIQNCRPTQGQLHDFWVPDS

SEQ ID NO: 45764 - protein, 1186 aa, Homo sapiens
MTRRCMPARPGFPSSPAPGSSPPRCHLRPGSTAHAAAGKRTESPGDRKQSIIDFFKPASKQDRHMLDSPQKSNIKYGGSRLSITGTEQFERKLSSPKESKPKRVPPEKSPIIEAFMKGVKEHHEDHGIHESRRPCLSLASKYLAKGTNIYVPSSYHLPKEMKSLKKKHRSPERRKSLFIHENNEKNDRDRGKTNADSKKQTTVAEADIFNNSSRSLSSRSSLSRHHPEESPLGAKFQLSLASYCRERELKRLRKEQMEQRINSENSFSEASSLSLKSSIERKYKPRQEQRKQNDIIPGKNNLSNVENGHLSRKRSSSDSWEPTSAGSKQNKFPEKRKRNSVDSDLKSTRESMIPKARESFLEKRPDGPHQKEKFIKHIALKTPGDVLRLEDISKEPSDETDGSSAGLAPSNSGNSGHHSTRNSDQIQVAGTKETKMQKPHLPLSQEKSAIKKASNLQKNKTASSTTKEKETKLPLLSRVPSAGSSLVPLNAKNCALPVSKKDKERSSSKECSGHSTESTKHKEHKAKTNKADSNVSSGKISGGPLRSEYGTPTKSPPAALEVVPCIPSPAAPSDKAPSEGESSGNSNAGSSALKRKLRGDFDSDEESLGYNLDSDEEEETLKSLEEIMALNFNQTPAATGKPPALSKGLRSQSSDYTGHVHPGTYTNTLERLVKEMEDTQRLDELQKQLQEDIRQGRGIKSPIRIGEEDSTDDEDGLLEEHKEFLKKFSVTIDAIPDHHPGEEIFNFLNSGKIFNQYTLDLRDSGFIGQSAVEKLILKSGKTDQIFLTTQGFLTSAYHYVQCPVPVLKWLFRMMSVHTDCIVSVQILSTLMEITIRNDTFSDSPVWPWIPSLSDVAAVFFNMGIDFRSLFPLENLQPDFNEDYLVSETQTTSRGKESEDSSYKPIFSTLPETNILNVVKFLGLCTSIHPEGYQDREIMLLILMLFKMSLEKQLKQIPLVDFQSLLINLMKNIRDWNTKVPELCLGINELSSHPHNLLWLVQLVPNWTSRGRQLRQCLSLVIISKLLDEKHEDVPNASNLQVSVLHRYLVQMKPSDLLKKMVLKKKAEQPDGIIDDSLHLELEKQAYYLTYILLHLVGEVSCSHSFSSGQRKHFVLLCGALEKHVKCDIREDARLFYRTKVKDLVARIHGKWQEIIQNCRPTQVSFCYTISCILNSFAEWHSSYCLK

SEQ ID NO: 45765 - protein, 758 aa, Homo sapiens
MTRRCMPARPGFPSSPAPGSSPPRCHLRPGSTAHAAAGKRTESPGDRKQSIIDFFKPASKQDRHMLDSPQKSNIKYGGSRLSITGTEQFERKLSSPKESKPKRVPPEKSPIIEAFMKGVKEHHEDHGIHESRRPCLSLASKYLAKGTNIYVPSSYHLPKEMKSLKKKHRSPERRKSLFIHENNEKNDRDRGKTNADSKKQTTVAEADIFNNSSRSLSSRSSLSRHHPEESPLGAKFQLSLASYCRERELKRLRKEQMEQRINSENSFSEASSLSLKSSIERKYKPRQEQRKQNDIIPGKNNLSNVENGHLSRKRSSSDSWEPTSAGSKQNKFPEKRKRNSVDSDLKSTRESMIPKARESFLEKRPDGPHQKEKFIKHIALKTPGDVLRLEDISKEPSDETDGSSAGLAPSNSGNSGHHSTRNSDQIQVAGTKETKMQKPHLPLSQEKSAIKKASNLQKNKTASSTTKEKETKLPLLSRVPSAGSSLVPLNAKNCALPVSKKDKERSSSKECSGHSTESTKHKEHKAKTNKADSNVSSGKISGGPLRSEYGTPTKSPPAALEVVPCIPSPAAPSDKAPSEGESSGNSNAGSSALKRKLRGDFDSDEESLGYNLDSDEEEETLKSLEEIMALNFNQTPAATGKPPALSKGLRSQSSDYTGHVHPGTYTNTLERLVKEMEDTQRFVSIKINLLNLTFCLFVWLTFNLPFLKNHEKLACILDSVVNCVRIRYVGRTQWLMPVITTLWETQARLLEPRSSRLR

SEQ ID NO: 45766 - protein, 224 aa, Homo sapiens
MTRITELWSSPQWKVGAEVCGRQMREQRTAEQSETQRTWLSMAATLQFLVCLVVAICLLSGVTTTQPHAGQPMDSTSVGGGLQEPEAPEVMFELLWAGLELDVMGQLHIQDEELASTHPGRRLRLLLQHHVPSDLEGTEQWLQQLQDLRKGPPLSTWDFEHLLLTGLSCVYRLHAASEAEERGRWAQVFALLAQETLWDLCKGFCPQDRPPSLGSWASILDPFP

SEQ ID NO: 45767 - protein, 201 aa, Homo sapiens
MREQRTAEQSETQRTWLSMAATLQFLVCLVVAICLLSGVTTTQPHAGQPMDSTSVGGGLQEPEAPEVMFELLWAGLELDVMGQLHIQDEELASTHPGRRLRLLLQHHVPSDLEGTEQWLQQLQDLRKGPPLSTWDFEHLLLTGLSCVYRLHAASEAEERGRWAQVFALLAQETLWDLCKGFCPQDRPPSLGSWASILDPFP

SEQ ID NO: 45768 - protein, 541 aa, Homo sapiens
MPGLRRDRLLTLLLLGALLSADLYFHLWPQVQRQLRPRERPRGCPCTGRASSLARDSAAAASDPGTIVHNFSRTEPRTEPAGGSHSGSSSKLQALFAHPLYNVPEEPPLLGAEDSLLASQEALRYYRRKVARWNRRHKMYREQMNLTSLDPPLQLRLEASWVQFHLGINRHGLYSRSSPVVSKLLQDMRHFPTISADYSQDEKALLGACDCTQIVKPSGVHLKLVLRFSDFGKAMFKPMRQQRDEETPVDFFYFIDFQRHNAEIAAFHLDRILDFRRVPPTVGRIVNVTKEILEVTKNEILQSVFFVSPASNVCFFAKCPYMCKTEYAVCGNPHLLEGSLSAFLPSLNLAPRLSVPNPWIRSYTLAGKEEWEVNPLYCDTVKQIYPYNNSQRLLNVIDMAIFDFLIGNMDRHHYEMFTKFGDDGFLIHLDNARGFGRHSHDEISILSPLSQCCMIKKKTLLHLQLLAQADYRLSDVMRESLLEDQLSPVLTEPHLLALDRRLQTILRTVEGCIVAHGQQSVIVDGPVEQLAPDSGQANLTS

SEQ ID NO: 45769 - protein, 541 aa, Homo sapiens; identical to SEQ ID NO: 45768

SEQ ID NO: 45770 - protein, 145 aa, Homo sapiens
MFTSPSEGKPGNMDRHHYEMFTKFGDDGFLIHLDNARGFGRHSHDEISILSPLSQCCMIKKKTLLHLQLLAQADYRLSDVMRESLLEDQLSPVLTEPHLLALDRRLQTILRTVEGCIVAHGQQSVIVDGPVEQLAPDSGQANLTS

SEQ ID NO: 45771 - protein, 409 aa, Homo sapiens
MKLKQRVVLLAILLVIFIFTKVFLIDNLDTSAANREDQRAFHRMMTGLRVELAPKLDHTLQSPWEIAAQWVVPREVYPEETPELGAVMHAMATKKIIKADVGYKGTQLKALLILEGGQKVVFKPKRYSRDHVVEGEPYAGYDRHNAEVAAFHLDRILGFHRAPLVVGRFVNLRTEIKPVATEQLLSTFLTVGNNTCFYGKCYYCRETEPACADGDIMEGSVTLWLPDVWPLQKHRHPWGRTYREGKLARWEYDESYCDAVKKTSPYDSGPRLLDIIDTAVFDYLIGNADRHHYESFQDDEGASMLILLDNAKSFGNPSLDERSILAPLYQCCIIRVSTWNRLNYLKNGVLKSALKSAMAHDPISPVLSDPHLDAVDQRLLSVLATVKQCTDQFGMDTVLVEDRMPLSHL

SEQ ID NO: 45772 - protein, 138 aa, Homo sapiens
MKLKQRVVLLAILLVIFIFTKVFLIDNLDTSAANREDQRAFHRMMTGLRVELAPKLDHTLQSPWEIAAQWVVPREVYPEETPELGAVMHAMATKKIIKADVGYKGTQLKALLILEGGQKVVFKPKRYSRDHVVEGEPY

SEQ ID NO: 45773 - protein, 584 aa, Homo sapiens
MKMMLVRRFRVLILMVFLVACALHIALDLLPRLERRGARPSGEPGCSCAQPAAEVAAPGWAQVRGRPGEPPAASSAAGDAGWPNKHTLRILQDFSSDPSSNLSSHSLEKLPPAAEPAERALRGRDPGALRPHDPAHRPLLRDPGPRRSESPPGPGGDASLLARLFEHPLYRVAVPPLTEEDVLFNVNSDTRLSPKAAENPDWPHAGAEGAEFLSPGEAAVDSYPNWLKFHIGINRYELYSRHNPAIEALLHDLSSQRITSVAMKSGGTQLKLIMTFQNYGQALFKPMKQTREQETPPDFFYFSDYERHNAEIAAFHLDRILDFRRVPPVAGRMVNMTKEIRDVTRDKKLWRTFFISPANNICFYGECSYYCSTEHALCGKPDQIEGSLAAFLPDLSLAKRKTWRNPWRRSYHKRKKAEWEVDPDYCEEVKQTPPYDSSHRILDVMDMTIFDFLMGNMDRHHYETFEKFGNETFIIHLDNGRGFGKYSHDELSILVPLQQCCRIRKSTYLRLQLLAKEEYKLSLLMAESLRGDQVAPVLYQPHLEALDRRLRVVLKAVRDCVERNGLHSVVDDDLDTEHRAASAR

SEQ ID NO: 45774 - protein, 1318 aa, Homo sapiens
MMNRTTPDQELVPASEPVWERPWSVEEIRRSSQSWSLAADAGLLQFLQEFSQQTISRTHEIKKQVDGLIRETKATDCRLHNVFNDFLMLSNTQFIENRVYDEEVEEPVLKAEAEKTEQEKTREQKEVDLIPKVQEAVNYGLQVLDSAFEQLDIKAGNSDSEEDDANGRVELILEPKDLYIDRPLPYLIGSKLFMEQEDVGLGELSSEEGSVGSDRGSIVDTEEEKEEEESDEDFAHHSDNEQNQHTTQMSDEEEDDDGCDLFADSEKEEEDIEDIEENTRPKRSRPTSFADELAARIKGDAMGRVDEEPTTLPSGEAKPRKTLKEKKERRTPSDDEEDNLFAPPKLTDEDFSPFGSGGGLFSGGKGLFDDEDEESDLFTEASQDRQAGASVKEESSSSKPGKKIPAGAVSVFLGDTDVFGAASVPSLKEPQKPEQPTPRKSPYGPPPTGLFDDDDGDDDDDFFSAPHSKPSKTRKVQSTADIFGDEEGDLFKEKAVASPEATVSQTDENKARAEKKVTLSYSKNLKPSSETKTQKGLFSDEEDSEDLFSSQSASNLKGASLLPGKLPTSVSLFDDEDEEDNLFGGTAAKKQTLSLQAQREEKAKASELSKKKASALLFSSDEEWNIPASQTHLASDSRSKGEPRDSGTLQSQEAKAVKKTSLFEEDKEDDLFAIAKDSQKKTQRVSLLFEDDVDSGGSLFGSPPTSVPPATKKKETVSEAPPLLFSDEEEKEAQLGVKSVDKKVESAKESLKFGRTDVAESEKEGLLTRSAQETVKHSDLFSSSSPWDKGTKPRTKTVLSLFDEEEDKMEDQNIIQAPQKEVGKGCDPDAHPKSTGVFQDEELLFSHKLQKDNDPDVDLFAGTKKTKLLEPSVGSLFGDDEDDDLFSSAKSQPLVQEKKRVVKKDHSVNSFKNQKHPESIQGSKEKGIWKPETPQANLAINPAALLPTAASQISEVKPVLPELAFPSSEHRRSHGLESVPVLPGSGEAGVSFDLPAQADTLHSANKSRVKMRGKRRPQTRAARRLAAQESSEAEDMSVPRGPIAQWADGAISPNGHRPQLRAASGEDSTEEALAAAAAPWEGGPVPGVDTSPFAKSLGHSRGEADLFDSGDIFSTGTGSQSVERTKPKAKIAENPANPPVGGKAKSPMFPALGEASSDDDLFQSAKPKPAKKTNPFPLLEDEDDLFTDQKVKKNETKSSSQQDVILTTQDIFEDDIFATEAIKPSQKTREKEKTLESNLFDDNIDIFADLTVKPKEKSKKKVEAKSIFDDDMDDIFSTGIQAKTTKPKSRSAQAAPEPRFEHKVSNIFDDPLNAFGGQ

SEQ ID NO: 45775 - protein, 1262 aa, Homo sapiens
MNRTTPDQELVPASEPVWERPWSVEEIRRSSQSWSLAADAGRVYDEEVEEPVLKAEAEKTEQEKTREQKEVDLIPKVQEAVNYGLQVLDSAFEQLDIKAGNSDSEEDDANGRVELILEPKDLYIDRPLPYLIGSKLFMEQEDVGLGELSSEEGSVGSDRGSIVDTEEEKEEEESDEDFAHHSDNEQNQHTTQMSDEEEDDDGCDLFADSEKEEEDIEDIEENTRPKRSRPTSFADELAARIKGDAMGRVDEEPTTLPSGEAKPRKTLKEKKERRTPSDDEEDNLFAPPKLTDEDFSPFGSGGGLFSGGKGLFDDEDEESDLFTEASQDRQAGASVKEESSSSKPGKKIPAGAVSVFLGDTDVFGAASVPSLKEPQKPEQPTPRKSPYGPPPTGLFDDDDGDDDDDFFSAPHSKPSKTRKVQSTADIFGDEEGDLFKEKAVASPEATVSQTDENKARAEKKVTLSYSKNLKPSSETKTQKGLFSDEEDSEDLFSSQSASNLKGASLLPGKLPTSVSLFDDEDEEDNLFGGTAAKKQTLSLQAQREEKAKASELSKKKASALLFSSDEEWNIPASQTHLASDSRSKGEPRDSGTLQSQEAKAVKKTSLFEEDKEDDLFAIAKDSQKKTQRVSLLFEDDVDSGGSLFGSPPTSVPPATKKKETVSEAPPLLFSDEEEKEAQLGVKSVDKKVESAKESLKFGRTDVAESEKEGLLTRSAQETVKHSDLFSSSSPWDKGTKPRTKTVLSLFDEEEDKMEDQNIIQAPQKEVGKGCDPDAHPKSTGVFQDEELLFSHKLQKDNDPDVDLFAGTKKTKLLEPSVGSLFGDDEDDDLFSSAKSQPLVQEKKRVVKKDHSVNSFKNQKHPESIQGSKEKGIWKPETPQANLAINPAALLPTAASQISEVKPVLPELAFPSSEHRRSHGLESVPVLPGSGEAGVSFDLPAQADTLHSANKSRVKMRGKRRPQTRAARRLAAQESSEAEDMSVPRGPIAQWADGAISPNGHRPQLRAASGEDSTEEALAAAAAPWEGGPVPGVDTSPFAKSLGHSRGEADLFDSGDIFSTGTGSQSVERTKPKAKIAENPANPPVGGKAKSPMFPALGEASSDDDLFQSAKPKPAKKTNPFPLLEDEDDLFTDQKVKKNETKSSSQQDVILTTQDIFEDDIFATEAIKPSQKTREKEKTLESNLFDDNIDIFADLTVKPKEKSKKKVEAKSIFDDDMDDIFSTGIQAKTTKPKSRSAQAAPEPRFEHKVSNIFDDPLNAFGGQ

SEQ ID NO: 45776 - protein, 132 aa, Homo sapiens
MEDQNIIQAPQKEVGKGCDPDAHPKSTGVFQDEELLFSHKLQKDNDPDVDLFAGTKKTKLLEPSVGSLFGDDEDDDLFSSAKSQPLVQEKKRVVKKDHSVNSFKNQKHPESIQGSKEKGIWKPETPQVRNPL

SEQ ID NO: 45777 - protein, 1320 aa, Homo sapiens
MMNRTTPDQELVPASEPVWERPWSVEEIRRSSQSWSLAADAGLLQFLQEFSQQTISRTHEIKKQVDGLIRETKATDCRLHNVFNDFLMLSNTQFIENRVYDEEVEEPVLKAEAEKTEQEKTREQKEVDLIPKVQEAVNYGLQVLDSAFEQLDIKAGNSDSEEDDANGRVELILEPKDLYIDRPLPYLIGSKLFMEQEDVGLGELSSEEGSVGSDRGSIVDTEEEKEEEESDEDFAHHSDNEQNQHTTQMSDEEEDDDGCDLFADSEKEEEDIEDIEENTRPKRSRPTSFADELAARIKGDAMGRVDEEPTTLPSGEAKPRKTLKEKKERRTPSDDEEDNLFAPPKLTDEDFSPFGSGGGLFSGGKGLFDDEDEESDLFTEASQDRQAGASVKEESSSSKPGKKIPAGAVSVFLGDTDVFGAASVPSLKEPQKPEQPTPRKSPYGPPPTGLFDDDDGDDDDDFFSAPHSKPSKTRKVQSTADIFGDEEGDLFKEKAVASPEATVSQTDENKARAEKKVTLSYSKNLKPSSETKTQKGLFSDEEDSEDLFSSQSASNLKGASLLPGKLPTSVSLFDDEDEEDNLFGGTAAKKQTLSLQAQREEKAKASELSKKKASALLFSSDEEDQWNIPASQTHLASDSRSKGEPRDSGTLQSQEAKAVKKTSLFEEDKEDDLFAIAKDSQKKTQRVSLLFEDDVDSGGSLFGSPPTSVPPATKKKETVSEAPPLLFSDEEEKEAQLGVKSVDKKVESAKESLKFGRTDVAESEKEGLLTRSAQETVKHSDLFSSSSPWDKGTKPRTKTVLSLFDEEEDKMEDQNIIQAPQKEVGKGCDPDAHPKSTGVFQDEELLFSHKLQKDNDPDVDLFAGTKKTKLLEPSVGSLFGDDEDDDLFSSAKSQPLVQEKKRVVKKDHSVNSFKNQKHPESIQGSKEKGIWKPETPQANLAINPAALLPTAASQISEVKPVLPELAFPSSEHRRSHGLESVPVLPGSGEAGVSFDLPAQADTLHSANKSRVKMRGKRRPQTRAARRLAAQESSEAEDMSVPRGPIAQWADGAISPNGHRPQLRAASGEDSTEEALAAAAAPWEGGPVPGVDTSPFAKSLGHSRGEADLFDSGDIFSTGTGSQSVERTKPKAKIAENPANPPVGGKAKSPMFPALGEASSDDDLFQSAKPKPAKKTNPFPLLEDEDDLFTDQKVKKNETKSSSQQDVILTTQDIFEDDIFATEAIKPSQKTREKEKTLESNLFDDNIDIFADLTVKPKEKSKKKVEAKSIFDDDMDDIFSTGIQAKTTKPKSRSAQAAPEPRFEHKVSNIFDDPLNAFGGQ

SEQ ID NO: 45778 - protein, 1341 aa, Homo sapiens [sequence omitted]

SEQ ID NO: 45779 - protein, 279 aa, Homo sapiens
MMNRTTPDQELVPASEPVWERPWSVEEIRRSSQSWSLAADAGRVYDEEVEEPVLKAEAEKTEQEKTREQKEVDLIPKVQEAVNYGLQVLDSAFEQLDIKAGNSDSEEDDANGRVELILEPKDLYIDRPLPYLIGSKLFMEQEDVGLGELSSEEGSVGSDRGSIVDTEEEKEEEESDEDFAHHSDNEQNQHTTQMSDEEEDDDGCDLFADSEKEEEDIEDIEENTRPKRSRPTSFADELAARIKGDAMGRVDEEPTTLPSGEAKPRKTLKEKKERRTPSD

SEQ ID NO: 45780 - protein, 1253 aa, Homo sapiens
MPRLSGKSVRVYDEEVEEPVLKAEAEKTEQEKTREQKEVDLIPKVQEAVNYGLQVLDSAFEQLDIKAGNSDSEEDDANGRVELILEPKDLYIDRPLPYLIGSKLFMEQEDVGLGELSSEEGSVGSDRGSIVDTEEEKEEEESDEDFAHHSDNEQNQHTTQMSDEEEDDDGCDLFADSEKEEEDIEDIEENTRPKRSRPTSFADELAARIKGDAMGRVDEEPTTLPSGEAKPRKTLKEKKERRTPSDDEEDNLFAPPKLTDEDFSPFGSGGGLFSGGKGLFDDEDEESDLFTEASQDRQAGASVKEESSSSKPGKKIPAGAVSVFLGDTDVFGAASVPSLKEPQKPEQPTPRKSPYGPPPTGLFDDDDGDDDDDFFSAPHSKPSKTGKVQSTADIFGDEEGDLFKEKAVASPEATVSQTDENKARAEKKVTLSYSKNLKPSSETKTQKGLFSDEEDSEDLFSSQSASNLKGASLLPGKLPTSVSLFDDEDEEDNLFGGTAAKKQTLSLQAQREEKAKASELSKKKASALLFSSDEEDQWNIPASQTHLASDSRSKGEPRDSGTLQSQEAKAVKKTSLFEEDKEDDLFAIAKDSQKKTQRVSLLFEDDVDSGGSLFGSPPTSVPPATKKKETVSEAPPLLFSDEEEKEAQLGVKSVDKKVESAKESLKFGRTDVAESEKEGLLTRSAQETVKHSDLFSSSSPWDKGTKPRTKTVLSLFDEEEDKMEDQNIIQAPQKEVGKGCDPDAHPKSTGVFQDEELLFSHKLQKDNDPDVDLFAGTKKTKLLEPSVGSLFGDDEDDDLFSSAKSQPLVQEKKRVVKKDHSVNSFKNQKHPESIQGSKEKGIWKPETPQDSSGLAPFKTKEPSTRIGKIQANLAINPAALLPTAASQISEVKPVLPELAFPSSEHRRSHGLESVPVLPGSGEAGVSFDLPAQADTLHSANKSRVKMRGKRRPQTRAARRLAAQESSEAEDMSVPRGPIAQWADGAISPNGHRPQLRAASGEDSTEEALAAAAAPWEGGPVPGVDTSPFAKSLGHSRGEADLFDSGDIFSTGTGSQSVERTKPKAKIAENPANPPVGGKAKSPMFPALGEASSDDDLFQSAKPKPAKKTNPFPLLEDEDDLFTDQKVKKNETKSSSQQDVILTTQDIFEDDIFATEAIKPSQKTREKEKTLESNLFDDNIDIFADLTVKPKEKSKKKVEAKSIFDDDMDDIFSTGIQAKTTKPKSRSAQAAPEPRFEHKVSNIFDDPLNAFGGQ

SEQ ID NO: 45781 - protein, 1245 aa, Homo sapiens
MMNRTTPDQELVPASEPVWERPWSVEEIRRSSQSWSLAADAGLLQFLQEFSQQTISRTHEIKKQVDGLIRETKATDCRLHNVFNDFLMLSNTQFIENRVYDEEVEEPVLKAEAEKTEQEKTREQKEVDLIPKVQEAVNYGLQVLDSAFEQLDIKAGNSDSEEDDANGRVELILEPKDLYIDRPLPYLIGSKLFMEQEDVGLGELSSEEGSVGSDRGSIVDTEEEKEEEESDEDFAHHSDNEQNQHTTQMSDEEEDDDGCDLFADSEKEEEDIEDIEENTRPKRSRPTSFADELAARIKGDAMGRVDEEPTNEEDNLFAPPKLTDEDFSPFGSGGGLFSGGKGLFDDEDEESDLFTEASQDRQAGASVKEESSSSKPGKKIPAGAVSVFLGDTDVFGAASVPSLKEPQKPEQPTPRKSPYGPPPTGLFDDDDGDDDDDFFSAPHSKPSKTRKVQSTADIFGDEEGDLFKEKAVASPEATVSQTDENKARAEKKVTLSYSKNLKPSSETKTQKGLFSDEEDSEDLFSSQSASNLKGASLLPGKLPTSVSLFDDEDEEDNLFGGTAAKKQTLSLQAQREEKAKASELSKKKASALLFSSDEEDQWNIPASQTHLASDSRSKGEPRDSGTLQSQEAKAVKKTSLFEEDKEDDLFAIAKDSQKKTQRVSLLFEDDVDSGGSLFGSPPTSVPPATKEGLLTRSAQETVKHSDLFSSSSPWDKGTKPRTKTVLSLFDEEEDKMEDQNIIQAPQKEVGKGCDPDAHPKSTGVFQDEELLFSHKLQKDNDPDVDLFAGTKKTKLLEPSVGSLFGDDEDDDLFSSAKSQPLVQEKKRVVKKDHSVNSFKNQKHPESIQGSKEKGIWKPETPQANLAINPAALLPTAASQISEVKPVLPELAFPSSEHRRSHGLESVPVLPGSGEAGVSFDLPAQADTLHSANKSRVKMRGKRRPQTRAARRLAAQESSEAEDMSVPRGPIAQWADGAISPNGHRPQLRAASGEDSTEEALAAAAAPWEGGPVPGVDTSPFAKSLGHSRGEADLFDSGDIFSTGTGSQSVERTKPKAKIAENPANPPVGGKAKSPMFPALGEASSDDDLFQSAKPKPAKKTNPFPLLEDEDDLFTDQKVKKNETKSSSQQDVILTTQDIFEDDIFATEAIKPSQKTREKEKTLESNLFDDNIDIFADLTVKPKEKSKKKVEAKSIFDDDMDDIFSTGIQAKTTKPKSRSAQAAPEPRFEHKVSNIFDDPLNAFGGQ

SEQ ID NO: 45782 - protein, 1279 aa, Homo sapiens
MMNRTTPDQELVPASEPVWERPWSVEEIRRSSQSWSLAADAGLLQFLQEFSQQTISRTHEIKKQVDGLIRETKATDCRLHNVFNDFLMLSNTQFIENRVYDEEVEEPVLKAEAEKTEQEKTREQKEVDLIPKVQEAVNYGLQVLDSAFEQLDIKAGNSDSEEDDANGRVELILEPKDLYIDRPLPYLIGSKLFMEQEDVGLGELSSEEGSVGSDRGSIVDTEEEKEEEESDEDFAHHSDNEQNQHTTQMSDEEEDDDGCDLFADSEKEEEDIEDIEENTRPKRSRPTSFADELAARIKGDAMGRVDEEPTTLPSGEAKPRKTLKEKKERRTPSDDEEDNLFAPPKLTDEDFSPFGSGGGLFSGGKGLFDDEDEESDLFTEASQDRQAGASVKEESSSSKPGKKIPAGAVSVFLGDTDVFGAASVPSLKEPQKPEQPTPRKSPYGPPPTGLFDDDDGDDDDDFFSAPHSKPSKTRKVQSTADIFGDEEGDLFKEKAVASPEATVSQTDENKARAEKKVTLSYSKNLKPSSETKTQKGLFSDEEDSEDLFSSQSASNLKGASLLPGKLPTSVSLFDDEDEEDNLFGGTAAKKQTLSLQAQREEKAKASELSKKKASALLFSSDEEDQWNIPASQTHLASDSRSKGEPRDSGTLQSQEAKAVKKTSLFEEDKEDDLFAIAKDSQKKTQRVSLLFEDDVDSGGSLFGSPPTSVPPATKKKETVSEAPPLLFSDEEEKEAQLGVKSVDKKVESAKESLKFGRTDVAESEKEGLLTRSAQETVKHSDLFSSSSPWDKGTKPRTKTVLSLFDEEEDKMEDQNIIQAPQKEVGKGCDPDAHPKSTGVFQDEELLFSHKLQKDNDPDVDLFAGTKKTKLLEPSVGSLFGDDEDDDLFSSAKSQPLANLAINPAALLPTAASQISEVKPVLPELAFPSSEHRRSHGLESVPVLPGSGEAGVSFDLPAQADTLHSANKSRVKMRGKRRPQTRAARRLAAQESSEAEDMSVPRGPIAQWADGAISPNGHRPQLRAASGEDSTEEALAAAAAPWEGGPVPGVDTSPFAKSLGHSRGEADLFDSGDIFSTGTGSQSVERTKPKAKIAENPANPPVGGKAKSPMFPALGEASSDDDLFQSAKPKPAKKTNPFPLLEDEDDLFTDQKVKKNETKSSSQQDVILTTQDIFEDDIFATEAIKPSQKTREKEKTLESNLFDDNIDIFADLTVKPKEKSKKKVEAKSIFDDDMDDIFSTGIQAKTTKPKSRSAQAAPEPRFEHKVSNIFDDPLNAFGGQ

SEQ ID NO: 45783 - protein, 442 aa, Homo sapiens
MAEGEGYFAMSEDELACSPYIPLGGDFGGGDFGGGDFGGGDFGGGGSFGGHCLDYCESPTAHCNVLNWEQVQRLDGILSETIPIHGRGNFPTLELQPSLIVKVVRRRLAEKRIGVRDVRLNGSAASHVLHQDSGLGYKDLDLIFCADLRGEGEFQTVKDVVLDCLLDFLPEGVNKEKITPLTLKEAYVQKMVKVCNDSDRWSLISLSNNSGKNVELKFVDSLRRQFEFSVDSFQIKLDSLLLFYECSENPMTETFHPTIIGESVYGDFQEAFDHLCNKIIATRNPEEIRGGGLLKYCNLLVRGFRPASDEIKTLQRYMCSRFFIDFSDIGEQQRKLESYLQNHFVGLEDRKYEYLMTLHGVVNESTVCLMGHERRQTLNLITMLAIRVLADQNVIPNVANVTCYYQPAPYVADANFSNYYIAQVQPVFTCQQQTYSTWLPCN

SEQ ID NO: 45784 - protein, 391 aa, Homo sapiens
MAEESSCTRDCMSFSVLNWDQVSRLHEVLTEVVPIHGRGNFPTLEITLKDIVQTVRSRLEEAGIKVHDVRLNGSAAGHVLVKDNGLGCKDLDLIFHVALPTEAEFQLVRDVVLCSLLNFLPEGVNKLKISPVTLKEAYVQKLVKVCTDTDRWSLISLSNKNGKNVELKFVDSIRRQFEFSVDSFQIILDSLLFFYDCSNNPISEHFHPTVIGESMYGDFEEAFDHLQNRLIATKNPEEIRGGGLLKYSNLLVRDFRPTDQEEIKTLERYMCSRFFIDFPDILEQQRKLETYLQNHFAEEERSKYDYLMILRRVVNESTVCLMGHERRQTLNLISLLALRVLAEQNIIPSATNVTCYYQPAPYVSDGNFSNYYVAHPPVTYSQPYPTWLPCN

SEQ ID NO: 45785 - protein, 779 aa, Homo sapiens
MQQALELALDRAEYVIESARQRPPKRKYLSSGRKSVFQKLYDLYIEECEKEPEVKKLRRNVNLLEKLVMQETLSCLVVNLYPGNEGYSLMLRGKNGSDSETIRLPYEEGELLEYLDAEELPPILVDLLEKSQVNIFHCGCVIAEIRDYRQSSNMKSPGYQSRHILLRPTMQTLICDVHSITSDNHKWTQEDKLLLESQLILATAEPLCLDPSIAVTCTANRLLYNKQKMNTRPMKRCFKRYSRSSLNRQQDLSHCPPPPQLRLLDFLQKRKERKAGQHYDLKISKAGNCVDMWKRSPCNLAIPSEVDVEKYAKVEKSIKSDDSQPTVWPAHDVKDDYVFECEAGTQYQKTKLTILQSLGDPLYYGKIQPCKADEESDSQMSPSHSSTDDHSNWFIIGSKTDAERVVNQYQELVQNEAKCPVKMSHSSSGSASLSQVSPGKETDQTETVSVQSSVLGKGVKHRPPPIKLPSSSGNSSSGNYFTPQQTSSFLKSPTPPPSSKPSSIPRKSSVDLNQVSMLSPAALSPASSSQRTTATQVMANSAGLNFINVVGSVCGAQALMSGSNPMLGCNTGAITPAGINLSGLLPSGGLLPNALPSAMQAASQAGVPFGLKNTSSLRPLNLLQLPGGSLIFNTLQQQQQQLSQFTPQQPQQPTTCSPQQPGEQGSEQGSTSQEQALSAQQAAVINLTGVGSFMQSQAAVLSQLGSAENRPEQSLPQQRFQLSSAFQQQQQQIQQLRFLQHQMAMAAAAAQTAQLHHHRHTGSQSKSKMKRGTPTTPKF

SEQ ID NO: 45786 - protein, 733 aa, Homo sapiens
MQQALELALDRAEYVIESARQRPPKRKYLSSGRKSVFQKLYDLYIEECEKEPEVKQKLRRNVNLLEKLVMQETLSCLVVNLYPGNEGYSLMLRGKNGSDSETIRLPYEEGELLEYLDAEELPPILVDLLEKSQVNIFHCGCVIAEIRDYRQSSNMKSPGYQSRHILLRPTMQTLICDVHSITSDNHKWTQEDKLLLESQLILATAEPLCLDPSIAVTCTANRLLYNKQKMNTRPMKRCFKRYSRSSLNRQQDLSHCPPPPQLRLLDFLQKRKERKAGQHYDLKISKAGNCVDMWKRSPCNLAIPSEVDVEKYAKVEKSIKSDDSQPTVWPAHDVKDDYVFECEAGTQYQKTKLTILQSLGDPLYYGKIQPCKADEESDSQMSPSHSSTDDHSNWFIIGSKTDAERVVNQYQELVQNEAKCPVKMSHSSSGSASLSQVSPGKETDQTETVSVQSSVLGKGVKHRPPPIKLPSSSGNSSSGNYFTPQQTSSFLKSPTPPPSSKPSSIPRKSSVDLNQVSMLSPAALSPASSSQRTTATQVMANSAGLNFINVVGSVCGAQALMSGSNPMLGCNTGAITPAGINLSGLLPSGGLLPNALPSAMQAASQAGVPFGLKNTSSLRPLNLLQLPGGSLIFNTLQQQQQQLSQFTPQQPQQPTTCSPQQPGEQGSEQGSTSQEQALSAQQAAVINLTGVGSFMQSQAAAVAILAASNGYGSSSSTNSSATSSSAYRQPVKK

SEQ ID NO: 45787 - protein, 733 aa, Homo sapiens; identical to SEQ ID NO: 45786

SEQ ID NO: 45788 - protein, 733 aa, Homo sapiens; identical to SEQ ID NO: 45786

SEQ ID NO: 45789 - protein, 738 aa, Homo sapiens
MQQALELALDRAEYVIESARQRPPKRKYLSSGRKSVFQKLYDLYIEECEKEPEVKKLRRNVNLLEKLVMQETLSCLVVNLYPGNEGYSLMLRGKNGSDSETIRLPYEEGELLEYLDAEELPPILVDLLEKSQVNIFHCGCVIAEIRDYRQSSNMKSPGYQSRHILLRPTMQTLICDVHSITSDNHKWTQEDKLLLESQLILATAEPLCLDPSIAVTCTANRLLYNKQKMNTRPMKRCFKRYSRSSLNRQQDLSHCPPPPQLRLLDFLQKRKERKAGQHYDLKISKAGNCVDMWKRSPCNLAIPSEVDVEKYAKVEKSIKSDDSQPTVWPAHDVKDDYVFECEAGTQYQKTKLTILQSLGDPLYYGKIQPCKADEESDSQMSPSHSSTDDHSNWFIIGSKTDAERVVNQYQELVQNEAKCPVKMSHSSSGSASLSQVSPGKETDQTETVSVQSSVLGKGVKHRPPPIKLPSSSGNSSSGNYFTPQQTSSFLKSPTPPPSSKPSSIPRKSSVDLNQVSMLSPAALSPASSSQRTTATQVMANSAGLNFINVVGSVCGAQALMSGSNPMLGCNTGAITPAGINLSGLLPSGGLLPNALPSAMQAASQAGVPFGLKNTSSLRPLNLLQLPGGSLIFNTLQQQQQQLSQFTPQQPQQPTTCSPQQPGEQGSEQGSTSQEQALSAQQAAVINLTGVGSFMQSQAAAVAILAASNGYGSSSSTNSSATSSSAYRQPDTRALNQKN

SEQ ID NO: 45790 - protein, 498 aa, Homo sapiens
MYVIESARQRPPKRKYLSSGRKSVFQKLYDLYIEECEKEPEVKKLRRNVNLLEKLVMQETLSCLVVNLYPGNEGYSLMLRGKNGSDSETIRLPYEEGELLEYLDAEELPPILVDLLEKSQVNIFHCGCVIAEIRDYRQSSNMKSPGYQSRHILLRPTMQTLICDVHSITSDNHKWTQEDKLLLESQLILATAEPLCLDPSIAVTCTANRLLYNKQKMNTRPMKRCFKRYSRSSLNRQQDLSHCPPPPQLRLLDFLQKRKERKAGQHYDLKISKAGNCVDMWKRSPCNLAIPSEVDDVKDDYVFECEAGTQYQKTKLTILQSLGDPLYYGKIQPCKADEESDSQMSPSHSSTDDHSNWFIIGSKTDAERVVNQYQELVQNEAKCPVKMSHSSSGSASLSQVSPGKETDQTETVSVQSSVLGKGVKHRPPPIKLPSSSGNSSSGNYFTPQQTSSFLKSPTPPPSSKPSSIPRKSSVDLNQVSMLSPAALSPASSSQRHES

SEQ ID NO: 45791 - protein, 225 aa, Homo sapiens
MLLTLAGGALFFPGLFALCTWALRRSQPGWSRTDCVMISTRLVSSVHAVLATGSGIVIIRSCDDVITGRHWLAREYVWFLIPYMIYDSYAMYLCEWCRTRDQNRAPSLTLRNFLSRNRLMITHHAVILFVLVPVAQLKQQHTLLYKVNGILTLATFLSCRILLFPFMYWSYGRQQGLSLLQVPFSIPFYCNVANAFLVAPQIYWFCLLCRKAVRLFDTPQAKKDG

SEQ ID NO: 45792 - protein, 257 aa, Homo sapiens
MLLTLAGGALFFPGLFALCTWALRRSQPGWSRTDCVMISTRLVSSVHAVLATGSGIVIIRSCDDVITGRHWLAREYVWFLIPYMIYDSYAMYLCEWCRTRDQNRAPSLTLRNFLSRNRLMITHHAVILFVLVPVAQRLRGDLGDFFVGCIFTAELSTPFVSLGRVLIQLKQQHTLLYKVNGILTLATFLSCRILLFPFMYWSYGRQQGLSLLQVPFSIPFYCNVANAFLVAPQIYWFCLLCRKAVRLFDTPQAKKDG

SEQ ID NO: 45793 - protein, 330 aa, Homo sapiens
MISTRYRRRRDAPRGPGRCPPHPTRPRGPGRKRGAAGSPGAAPSASRRPEFPKPLRVLPWRERGRGGREWPMSLRSPLPTSACGWGESGRRPGRAPCGPRTGLSARAVLSARARLVSSVHAVLATGSGIVIIRSCDDVITGRHWLAREYVWFLIPYMIYDSYAMYLCEWCRTRDQNRAPSLTLRNFLSRNRLMITHHAVILFVLVPVAQRLRGDLGDFFVGCIFTAELSTPFVSLGRVLIQLKQQHTLLYKVNGILTLATFLSCRILLFPFMYWSYGRQQGLSLLQVPFSIPFYCNVANAFLVAPQIYWFCLLCRKAVRLFDTPQAKKDG

SEQ ID NO: 45794 - protein, 246 aa, Homo sapiens [sequence omitted]

SEQ ID NO: 45795 - protein, 194 aa, Homo sapiens
MEAGVKLGMRSIPIATACTIYHKFFCETNLDAYDPYLIAMSSIYLAGKVEEQHLRTRDIINVSNRYFNPSGEPLELDSRFWELRDSIVQCELLMLRVLRFQVSFQHPHKYLLHYLVSLQNWLNRHSWQRTPVAVTAWALLRDSYHGALCLRFQAQHIAVAVLYLALQVYGVEVPAEVEAEKPWWQIYTMDTEIP

SEQ ID NO: 45796 - protein, 226 aa, Homo sapiens
MEAPEAAEGGLQRGARRAAGARSQGALPSGEVHHGGVKLGMRSIPIATACTIYHKFFCETNLDAYDPYLIAMSSIYLAGKVEEQHLRTRDIINVSNRYFNPSGEPLELDSRFWELRDSIVQCELLMLRVLRFQVSFQHPHKYLLHYLVSLQNWLNRHSWQRTPVAVTAWALLRDSYHGALCLRFQAQHIAVAVLYLALQVYGVEVPAEVEAEKPWWQIYTMDTEIP

SEQ ID NO: 45797 - protein, 214 aa, Homo sapiens
MEAGVKLGMRSIPIATACTIYHKFFCETNLDAYDPYLIAMSSIYLAGKVEEQHLRTRDIINVSNRYFNPSGEPLELDSRFWELRDSIVQCELLMLRVLRFQVSFQHPHKYLLHYLVSLQNWLNRHSWQRTPVAVTAWALLRDSYHGALCLRFQAQHIAVAVLYLALQVYGVEVPAEVEAEKPWWQVFNDDLTKPIIDNIVSDLIQIYTMDTEIP

SEQ ID NO: 45798 - protein, 246 aa, Homo sapiens
MEAPEGGGGPAARGPEGPAPEARVHFRVARFIMEAGVKLGMRSIPIATACTIYHKFFCETNLDAYDPYLIAMSSIYLAGKVEEQHLRTRDIINVSNRYFNPSGEPLELDSRFWELRDSIVQCELLMLRVLRFQVSFQHPHKYLLHYLVSLQNWLNRHSWQRTPVAVTAWALLRDSYHGALCLRFQAQHIAVAVLYLALQVYGVEVPAEVEAEKPWWQVFNDDLTKPIIDNIVSDLIQIYTMDTEIP

SEQ ID NO: 45799 - protein, 142 aa, Homo sapiens
MEAGVKLGMRSIPIATACTIYHKFFCETNLDAYDPYLIAMSSIYLAGKVEEQHLRTRDIINVSNRFIPWTQRSPKVLAQACPKRSPGWSAAWGHCHHVAMTAGPHRTSWEDWLCCWRRAGEGNGMLPLCQSLEVAVQVMVGA

SEQ ID NO: 45800 - protein, 94 aa, Homo sapiens
  VARIANT 1: note = MOD_RES - Any amino acid
XAGKVEEQHLRTRDIINVSNRYFNPSGEPLELDSRFWELRDSIVQCELLMLRVLRFQVSFQHPHKVFNDDLTKPIIDNIVSDLIQIYTMDTEIP

SEQ ID NO: 45801 - protein, 121 aa, Homo sapiens
  VARIANT 1: note = MOD_RES - Any amino acid
XRYFNPSGEPLELDSRFWELRDSIVQCELLMLRVLRFQVSFQHPHKNWLNRHSWQRTPVAVTAWALLRDSYHGALCLRFQAQHIAVAVLYLALQVYGVEVPAEVEAEKPWWQIYTMDTEIP

SEQ ID NO: 45802 - protein, 1068 aa, Homo sapiens
MLVGSQSFSPGGPNGIIRSQSFAGFSGLQERRSRCNSFIENSSALKKPQAKLKKMHNLGHKNNNPPKEPQPKRVEEVYRALKNGLDEYLEVHQTELDKLTAQLKDMKRNSRLGVLYDLDKQIKTIERYMRRLEFHISKVDELYEAYCIQRRLQDGASKMKQAFATSPASKAARESLTEINRSFKEYTENMCTIEVELENLLGEFSIKMKGLAGFARLCPGDQYEIFMKYGRQRWKLKGKIEVNGKQSWDGEETVFLPLIVGFISIKVTELKGLATHILVGSVTCETKELFAARPQVVAVDINDLGTIKLNLEITWYPFDVEDMTASSGAGNKAAALQRRMSMYSQGTPETPTFKDHSFFRWLHPSPDKPRRLSVLSALQDTFFAKLHRSRSFSDLPSLRPSPKAVLELYSNLPDDIFENGKAAEEKMPLSLSFSDLPNGDCALTSHSTGSPSNSTNPEITITPAEFNLSSLASQNEGMDDTSSASSRNSLGEGQEPKSHLKEEDPEEPRKPASAPSEACRRQSSGAGAEHLFLENDVAEALLQESEEASELKPVELDTSEGNITKQLVKRLTSAEVPMATDRLLSEGSVGGESEGCRSFLDGSLEDAFNGLLLALEPHKEQYKEFQDLNQEVMNLDDILKCKPAVSRSRSSSLSLTVESALESFDFLNTSDFDEEEDGDEVCNVGGGADSVFSDTETEKHSYRSVHPEARGHLSEALTEDTGVGTSVAGSPLPLTTGNESLDITIVRHLQYCTQLVQQIVFSSKTPFVARSLLEKLSRQIQVMEKLAAVSDENIGNISSVVEAIPEFHKKLSLLSFWTKCCSPVGVYHSPADRVMKQLEASFARTVNKEYPGLADPVFRTLVSQILDRAEPLLSSSLSSEVVTVFQYYSYFTSHGVSDLESYLSQLARQVSMVQTLQSLRDEKLLQTMSDLAPSNLLAQQEVLRTLALLLTREDNEVSEAVTLYLAAASKNQHFREKALLYYCEALTKTNLQLQKAACLALKILEATESIKMLVTLCQSDTEEIRNVASETLLSLGEDGRLAYEQLDKFPRDCVKVGGRHGTEVATAF

SEQ ID NO: 45803 - protein, 591 aa, Homo sapiens
MLVGSQSFSPGGPNGIIRSQSFAGFSGLQERRSRCNSFIENSSALKKPQAKLKKMHNLGHKNNNPPKEPQPKRVEEVYRALKNGLDEYLEVHQTELDKLTAQLKDMKRNSRLGVLYDLDKQIKTIERYMRRLEFHISKVDELYEAYCIQRRLQDGASKMKQAFATSPASKAARESLTEINRSFKEYTENMCTIEVELENLLGEFSIKMKGLAGFARLCPGDQYEIFMKYGRQRWKLKGKIEVNGKQSWDGEETVFLPLIVGFISIKVTELKGLATHILVGSVTCETKELFAARPQVVAVDINDLGTIKLNLEITWYPFDVEDMTASSGAGNKAAALQRRMSMYSQGTPETPTFKDHSFFSNLPDDIFENGKAAEEKMPLSLSFSDLPNGDCALTSHSTGSPSNSTNPEITITPAEFNLSSLASQNEGMDDTSSASSRNSLGEGQEPKSHLKEEDPEEPRKPASAPSEACRRQSSGAGAEHLFLENDVAEALLQESEEASELKPVELDTSEGNITKQLVKRLTSAEVPMATDRLLSEGSVGGESEGCRSFLDGSLEDAFNGLLLALEPHKEQYKEFQDLNQEVMNLDDILKK

SEQ ID NO: 45804 - protein, 647 aa, Homo sapiens
MVLPSRLHWIRNRPWRDRIRRRQLNRLPTRLPEIMLVGSQSFSPGGPNGIIRSQSFAGFSGLQERRSRCNSFIENSSALKKPQAKLKKMHNLGHKNNNPPKEPQPKRVEEVYRALKNGLDEYLEVHQTELDKLTAQLKDMKRNSRLGVLYDLDKQIKTIERYMRRLEFHISKVDELYEAYCIQRRLQDGASKMKQAFATSPASKAARESLTEINRSFKEYTENMCTIEVELENLLGEFSIKMKGLAGFARLCPGDQYEIFMKYGRQRWKLKGKIEVNGKQSWDGEETVFLPLIVGFISIKVTELKGLATHILVGSVTCETKELFAARPQVVAVDINDLGTIKLNLEITWYPFDVEDMTASSGAGNKAAALQRRMSMYSQGTPETPTFKDHSFFSNLPDDIFENGKAAEEKMPLSLSFSDLPNGDCALTSHSTGSPSNSTNPEITITPAEFNLSSLASQNEGMDDTSSASSRNSLGEGQEPKSHLKEEDPEEPRKPASAPSEACRRQSSGAGAEHLFLENDVAEALLQESEEASELKPVELDTSEGNITKQLVKRLTSAEVPMATDRLLSEGSVGGESEGCRSFLDGSLEDAFNGLLLALEPHKEQYKEFQDLNQEVMNLDDILKDAKHLDDQKLNGAASWTEITEGE

SEQ ID NO: 45805 - protein, 1047 aa, Homo sapiens
MQFFDAEELLVDEEDDVFGEGLPTRLPEIMLVGSQSFSPGGPNGIIRSQSFAGFSGLQERRSRCNSFIENSSALKKPQAKLKKMHNLGHKNNNPPKEPQPKRVEEVYRALKNGLDEYLEVHQTELDKLTAQLKDMKRNSRLGVLYDLDKQIKTIERYMRRLEFHISKVDELYEAYCIQRRLQDGASKMKQAFATSPASKAARESLTEINRSFKEYTENMCTIEVELENLLGEFSIKMKGLAGFARLCPGDQYEIFMKYGRQRWKLKGKIEVNGKQSWDGEETVFLPLIVGFISIKVTELKGLATHILVGSVTCETKELFAARPQVVAVDINDLGTIKLNLEITWYPFDVEDMTASSGAGNKAAALQRRMSMYSQGTPETPTFKDHSFFSNLPDDIFENGKAAEEKMPLSLSFSDLPNGDCALTSHSTGSPSNSTNPEITITPAEFNLSSLASQNEGMDDTSSASSRNSLGEGQEPKSHLKEEDPEEPRKPASAPSEACRRQSSGAGAEHLFLENDVAEALLQESEEASELKPVELDTSEGNITKQLVKRLTSAEVPMATDRLLSEGSVGGESEGCRSFLDGSLEDAFNGLLLALEPHKEQYKEFQDLNQEVMNLDDILKCKPAVSRSRSSSLSLTVESALESFDFLNTSDFDEEEDGDEVCNVGGGADSVFSDTETEKHSYRSVHPEARGHLSEALTEDTGVGTSVAGSPLPLTTGNESLDITIVRHLQYCTQLVQQIVFSSKTPFVARSLLEKLSRQIQVMEKLAAVSDENIGNISSVVEAIPEFHKKLSLLSFWTKCCSPVGVYHSPADRVMKQLEASFARTVNKEYPGLADPVFRTLVSQILDRAEPLLSSSLSSEVVTVFQYYSYFTSHGVSDLESYLSQLARQVSMVQTLQSLRDEKLLQTMSDLAPSNLLAQQEVLRTLALLLTREDNEVSEAVTLYLAAASKNQHFREKALLYYCEALTKTNLQLQKAACLALKILEATESIKMLVTLCQSDTEEIRNVASETLLSLGEDGRLAYEQLDKFPRDCVKVGGRHGTEVATAF

SEQ ID NO: 45806 - protein, 613 aa, Homo sapiens
MLVGSQSFSPGGPNGIIRSQSFAGFSGLQERRSRCNSFIENSSALKKPQAKLKKMHNLGHKNNNPPKEPQPKRVEEVYRALKNGLDEYLEVHQTELDKLTAQLKDMKRNSRLGVLYDLDKQIKTIERYMRRLEFHISKVDELYEAYCIQRRLQDGASKMKQAFATSPASKAARESLTEINRSFKEYTENMCTIEVELENLLGEFSIKMKGLAGFARLCPGDQYEIFMKYGRQRWKLKGKIEVNGKQSWDGEETVFLPLIVGFISIKVTELKGLATHILVGSVTCETKELFAARPQVVAVDINDLGTIKLNLEITWYPFDVEDMTASSGAGNKAAALQRRMSMYSQGTPETPTFKDHSFFSNLPDDIFENGKAAEEKMPLSLSFSDLPNGDCALTSHSTGSPSNSTNPEITITPAEFNLSSLASQNEGMDDTSSASSRNSLGEGQEPKSHLKEEDPEEPRKPASAPSEACRRQSSGAGAEHLFLENDVAEALLQESEEASELKPVELDTSEGNITKQLVKRLTSAEVPMATDRLLSEGSVGGESEGCRSFLDGSLEDAFNGLLLALEPHKEQYKEFQDLNQEVMNLDDILKDAKHLDDQKLNGAASWTEITEGE

SEQ ID NO: 45807 - protein, 573 aa, Homo sapiens
MGKCLSCCKEDQSFQRCSPEDQVSTDAQHRGASSISQPSISLGHKTSYSPVTHKVNAAKASRRLLSVSSPSFSERRYSLFVGFQKRNASPYWQQSRANFDSEEDTGFTDIKSSSDHCGSFISRRRRFSSRKLSIVSYYKSAIFFDPQASGQNVFNLNEIEIFSKTSSNTDAKKHITISAPEYNTKNFKNFETNTTSPAFGNTIDTASYQQSTSSFFSLASDISSPDQQNGIANDIQQRGQLCKDLKDFLHPRPESYSTGHSPIMIPQHPSQSGTFPFLHKAGFSSSYKNSGCFIPPQSELTSGLFEDEDFAVLFQDEDRSSPIEIPKIRYITANTDTEEQSFPVPKAFNTRVEELNLDVLLQKVDHLRMSESGKSESFELLRDHKEKFRDEIEFMWRFARAYGDMYELSTNTQEKKHYANIGKTLSERAINRAPMNGHCHLWYAVLCGYVSEFEGLQNKINYGHLFKEHLDIAIKLLPEEPFLYYLKGRYCYTVSKLSWIEKKMAATLFGKIPSSTVQEALHNFLKAEELCPGYSNPNYMYLAKCYTDLEENQNALKFCNLALLLPTVTKEEL

SEQ ID NO: 45808 - protein, 410 aa, Homo sapiens
MPYSTNKELILGIMVGTAGISLLLLWYHKVRKPGIAMKLPEFLSLGNTFNSITLQDEIHDDQGTTVIFQERQLQILEKLNELLTNMEELKEEIRFLKEAIPKLEEYIQDELGGKITVHKISPQHRARKRRLPTIQSSATSNSSEEAESEGGYITANTDTEEQSFPVPKAFNTRVEELNLDVLLQKVDHLRMSESGKSESFELLRDHKEKFRDEIEFMWRFARAYGDMYELSTNTQEKKHYANIGKTLSERAINRAPMNGHCHLWYAVLCGYVSEFEGLQNKINYGHLFKEHLDIAIKLLPEEPFLYYLKGRYCYTVSKLSWIEKKMAATLFGKIPSSTVQEALHNFLKAEELCPGYSNPNYMYLAKCYTDLEENQNALKFCNLALLLPTVTKEDKEAQKEMQKIMTSLKR

SEQ ID NO: 45809 - protein, 410 aa, Homo sapiens; identical to SEQ ID NO: 45808

SEQ ID NO: 45810 - protein, 175 aa, Homo sapiens
MPYSTNKELILGIMVGTAGISLLLLWYHKVRKPGIAMKLPEFLSLGNTFNSITLQDEIHDDQGTTVIFQERQLQILEKLNELLTNMEELKEEIRFLKEAIPKLEEYIQDELGGKITVHKISPQHRARKRRLPTIQSSATSNSSEEAESEGGYITANTDTEEQSFPVPKAFNTRVE

SEQ ID NO: 45811 - protein, 265 aa, Homo sapiens
MGKCLRYITANTDTEEQSFPVPKAFNTRVEELNLDVLLQKVDHLRMSESGKSESFELLRDHKEKFRDEIEFMWRFARAYGDMYELSTNTQEKKHYANIGKTLSERAINRAPMNGHCHLWYAVLCGYVSEFEGLQNKINYGHLFKEHLDIAIKLLPEEPFLYYLKGRYCYTVSKLSWIEKKMAATLFGKIPSSTVQEALHNFLKAEELCPGYSNPNYMYLAKCYTDLEENQNALKFCNLALLLPTVTKEDKEAQKEMQKIMTSLKR

SEQ ID NO: 45812 - protein, 150 aa, Homo sapiens
  VARIANT 1: note = MOD_RES - Any amino acid
XVLCGYVSEFEGLQNKINYGHLFKEHLDIAIKLLPEEPFLYYLKGRYCYTVSKLSWIEKKMAATLFGKIPSSTVQEALHNFLKAEELCPGYSNPNYMYLAKCYTDLEENQNALKFCNLALLLPTVTKEDKEAQKEMQKIMTSLKRLRKTK

SEQ ID NO: 45813 - protein, 238 aa, Homo sapiens
MGKCLRYITANTDTEEQSFPVPKAFNTRVEELNLDVLLQKVDHLRMSESGKSESFELLRDHKEKFRDEIEFMWRFARAYGDMYELSTNTQEKKHYANIGKTLSERAINRAPMNGHCHLWYAVLCGYVSEFEGLQNKINYGHLFKEHLDIAIKLLPEEPFLYYLKGRYCYTVSKLSWIEKKMAATLFGKIPSSTVQEALHNFLKAEELCPGYSNPNYMYLAKCYTDLEENQNALKFCNL

SEQ ID NO: 45814 - protein, 470 aa, Homo sapiens
MSRLGALGGARAGLGLLLGTAAGLGFLCLLYSQRWKRTQRHGRSQSLPNSLDYTQTSDPGRHVMLLRAVPGGAGDASVLPSLPREGQEKVLDRLDFVLTSLVALRREVEELRSSLRGLAGEIVGEVRCHMEENQRVARRRRFPFVRERSDSTGSSSVYFTASSGATFTDAESEGGYTTANAESDNERDSDKESEDGEDEVSCETVKMGRKDSLDLEEEAASGASSALEAGGSSGLEDVLPLLQQADELHRGDEQGKREGFQLLLNNKLVYGSRQDFLWRLARAYSDMCELTEEVSEKKSYALDGKEEAEAALEKGDESADCHLWYAVLCGQLAEHESIQRRIQSGFSFKEHVDKAIALQPENPMAHFLLGRWCYQVSHLSWLEKKTATALLESPLSATVEDALQSFLKAEELQPGFSKAGRVYISKCYRELGKNSEARWWMKLALELPDVTKEDLAIQKDLEELEVILRD

SEQ ID NO: 45815 - protein, 470 aa, Homo sapiens; identical to SEQ ID NO: 45814

SEQ ID NO: 45816 - protein, 407 aa, Homo sapiens [sequence omitted]

SEQ ID NO: 45817 - protein, 287 aa, Homo sapiens
MSRLGALGGARAGLGLLLGTAAGLGFLCLLYSQRWKRTQRHGRSQSLPNSLDYTQTSDPGRHVMLLRAVPGGAGDASVLPSLPREGQEKVLDRLDFVLTSLVALRREVEELRSSLRGLAGEIVGEVRCHMEENQRVARRRRFPFVRERSDSTGSSSVYFTASSGATFTDAESEGGYTTANAESDNERDSDKESEDGEDEVSCETVKMGRKDSLDLEEEAASGASSALEAGGSSGLEDVLPLLQQADELHRGDEQGKREGFQLLLNNKLVYGSRQDFLWRLARAYSDM

SEQ ID NO: 45818 - protein, 314 aa, Homo sapiens
MALAARLWRLLPFRRGAAPGSRLPAGTSGSRGHCGPCRFRGFEVMGNPGTFKRGLLLSALSYLGFETYQVISQAAVVHATAKVEEILEQADYLYESGETEKLYQLLTQYKESEDAELLWRLARASRDVAQLSRTSEEEKKLLVYEALEYAKRALEKNESSFASHKWYAICLSDVGDYEGIKAKIANAYIIKEHFEKAIELNPKDATSIHLMGIWCYTFAEMPWYQRRIAKMLFATPPSSTYEKALGYFHRAEQVDPNFYSKNLLLLGKTYLKLHNKKLAAFWLMKAKDYPAHTEEDKQIQTEAAQLLTSFSEKN

SEQ ID NO: 45819 - protein, 284 aa, Homo sapiens
MALAARLWRLLPFRRGAAPGSRLPAGTSGSRGHCGPCRFRGFEVMGNPGTFKRGLLLSALSYLGFETYQVISQAAVVHATAKVEEILEQADYLYESGETEKLYQLLTQYKESEDAELLWRLARASRDVAQLSRTSEEEKKLLVYEALEYAKRALEKNESSFASHKKAIELNPKDATSIHLMGIWCYTFAEMPWYQRRIAKMLFATPPSSTYEKALGYFHRAEQVDPNFYSKNLLLLGKTYLKLHNKKLAAFWLMKAKDYPAHTEEDKQIQTEAAQLLTSFSEKN

SEQ ID NO: 45820 - protein, 1179 aa, Homo sapiens
MARRSQSSSQGDNPLAPGYLPPHYKEYYRLAVDALAEGGSEAYSRFLATEGAPDFLCPEELEHVSRHLRPPQYVTREPPEGSLLDVDMDGSSGTYWPVNSDQAVPELDLGWPLTFGFQGTEVTTLVQPPPPDSPSIKDEARRMIRSAQQVVAVVMDMFTDVDLLSEVLEAAARRVPVYILLDEMNAQHFLDMADKCRVNLQHVDFLRVRTVAGPTYYCRTGKSFKGHVKEKFLLVDCAVVMSGSYSFMWSFEKIHRSLAHVFQGELVSSFDEEFRILFAQSEPLVPSAAALARMDAYALAPYAGAGPLVGVPGVGAPTPFSFPKRAHLLFPPPREEGLGFPSFLDPDRHFLSAFRREEPPRMPGGALEPHAGLRPLSRRLEAEAGPAGELAGARGFFQARHLEMDAFKRHSFATEGAGAVENFAAARQVSRQTFLSHGDDFRFQTSHFHRDQLYQQQYQWDPQLTPARPQGLFEKLRGGRAGFADPDDFTLGAGPRFPELGPDGHQRLDYVPSSASREVRHGSDPAFAPGPRGLEPSGAPRPNLTQRFPCQAAARPGPDPAPEAEPERRGGPEGRAGLRRWRLASYLSGCHGEDGGDDGLPAPMEAEAYEDDVLAPGGRAPAGDLLPSAFRVPAAFPTKVPVPGPGSGGNGPEREGPEEPGLAKQDSFRSRLNPLVQRSSRLRSSLIFSTSQAEGAAGAAAATEKVQLLHKEQTVSETLGPGGEAVRSAASTKVAELLEKYKGPARDPGGGAGAITVASHSKAVVSQAWREEVAAPGAVGGERRSLESCLLDLRDSFAQQLHQEAERQPGAASLTAAQLLDTLGRSGSDRLPSRFLSAQSHSTSPQGLDSPLPLEGSGAHQVLHNESKGSPTSAYPERKGSPTPGFSTRRGSPTTGFIEQKGSPTSAYPERRGSPVPPVPERRSSPVPPVPERRGSLTLTISGESPKAGPAEEGPSGPMEVLRKGSLRLRQLLSPKGERRMEDEGGFPVPQENGQPESPRRLSLGQGDSTEAATEERGPRARLSSATANALYSSNLRDDTKAILEQISAHGQKHRAVPAPSPGPTHNSPELGRPPAAGVLAPDMSDKDKCSAIFRSDSLGTQGRLSRTLPASAEERDRLLRRMESMRKEKRVYSRFEVFCKKEEASSPGAGEGPAEEGTRDSKVGKFVPKILGTFKSKK

SEQ ID NO: 45821 - protein, 310 aa, Homo sapiens
MGNQVEKLTHLSYKEVPTADPTGVDRDDGPRIGVSYIFSNDDEDVEPQPPPQGPDGGGLPDGGDGPPPPQPQPYDPRLHEVECSVFYRDECIYQKSFAPGSAALSTYTPENLLNKCKPGDLVEFVSQAQYPHWAVYVGNFQVVHLHRLEVINSFLTDASQGRRGRVVNDLYRYKPLSSSAVVRNALAHVGAKERELSWRNSESFAAWCRYGKREFKIGGELRIGKQPYRLQIQLSAQRSHTLEFQSLEDLIMEKRRNDQIGRAAVLQELATHLHPAEPEEGDSNVARTTPPPGRPPAPSSEEEDGEAVAH

SEQ ID NO: 45822 - protein, 332 aa, Homo sapiens
MEPVGRKRSRKAAKAQLEAQVTAAQGATKEGSGIASNFPGQPTMEPVGRKRSRKAAKAQLEAQVRAAPAKKHTGKDPVRDECEERNPFTETREEDVTDEHGEREPFAEKDEHTGIHTMKLEHIAADIKKGLAAKREMIKIDKAAYRKTKNTIERALKKKQLKRQKRDYRHTRKLLNVLKEYIAEKQKDDEAEEAEAAAAAAEAAAAAEAAAAAAEVIVVEDEEEEEKEEEEEKEEEEEEGEEEGGGEEGEEGGGGGEGEETEEEEEEEEEEEEEEQIKAFQEKQKRWQQPTGVRSWRLREMKPLLEQLLKAAKDTKDNYCIISSSEESELDN

SEQ ID NO: 45823 - protein, 332 aa, Homo sapiens; identical to SEQ ID NO: 45822

SEQ ID NO: 45824 - protein, 186 aa, Homo sapiens
MAAWGKKHAGKDPVRDECEERNRFTETREEDVTDEHGEREPFAETDEHTGANTKKPEDTAEDLTAKRKRMKMDKTCSKTKNKSKHALRKKQLKRQKRDYIHSLKLLNVLEEYITDEQKEEEEEEGEEEELIRIFQEQQKKWQQYRSVRRERLKEMKLLRDQFVKALEDFEDLCDRVFSDEDSELDN

SEQ ID NO: 45825 - protein, 226 aa, Homo sapiens
MPGFLSFLSVSLRSPGSGIASSFPGQPATDPVGRRAAKAQLEAQFMAAWGKKHAGKDPVRDECEERNRFTETREEDVTDEHGEREPFAETDEHTGANTKKPEDTAVGANNFKNYPVHIGVSSEQHILLDCSLSRQKRDYIHSLKLLNVLEEYITDEQKEEEEEEGEEEELIRIFQEQQKKWQQYRSVRRERLKEMKLLRDQFVKALEDFEDLCDRVFSDEDSELDN

SEQ ID NO: 45826 - protein, 186 aa, Homo sapiens; identical to SEQ ID NO: 45824

SEQ ID NO: 45827 - protein, 166 aa, Homo sapiens
MAAKDQLEVQVMAAQEMELAGKDPVSHEHEERKPVTETKEGDVTDEHGERGSFAETDEHTGVDTKELEDIAADIKEHLAAKRKRIEKIAKACSEIKNRIKNVLRTTQLKRQKRDYRISLKLPNVLEEFITDEQKDEEGDGEKEEQIKIFQEQQKRWQQDGKGTERD

SEQ ID NO: 45828 - protein, 166 aa, Homo sapiens; identical to SEQ ID NO: 45827

SEQ ID NO: 45829 - protein, 126 aa, Homo sapiens
  VARIANT 1: note = MOD_RES - Any amino acid
XDVTDEHGERGSFAETDEHTGVDTKELEDIAADIKEHLAAKRKRIEKIAKACSEIKNRIKNVLRTTQLKRQKRDYRISLKLPNVLEEFITDEQKDEEGDGEKEEQIKIFQEQQKRWQQDGKGTERD

SEQ ID NO: 45830 - protein, 128 aa, Homo sapiens
MAAKDQLEVQVMAAQEMELAGKDPVSHEHEERKPVTETKEGDVTDEHGERGSFAETDEHTGVDTKELEDIAGMFYELFVVYENCFQPYNPYSRLYELVDDKTVLNAFFSYIAFNVICLIIFLTYFFNC

SEQ ID NO: 45831 - protein, 464 aa, Homo sapiens
MMARRDPKPGAKRLVRAQTLQKQRRAPVGPRAPPPDEEDPRLKCKNCEAFGHTARSTRCPMKCWKAALVPPNFGEKEGKENLKPWKPQVEANPGPLNKDKGEKEERPRPQDPQRKALLHIFSRKPPEKPLPNQKGSTESSDYLRVASGPMPVHTTSKRPRVDPVLSDRSATEMSDRGSVLASLSPLRKASLSSSSSLGPKERQTGAAADIPQTAVRHQGPEPLLVVKPTHSSPAGGCREVPQAASKTHGLLQAVSPQAQDKRPAVTSQPCPPAATHSLGLGSNLSFGPGAKRSAPAPIQACLNFPKKPRLGPFQIPESAIQGGELGAPENLQPPPAATELGPRTSPQTGTRTPAQVLSGDRQPPHSRPCLPTAQACTMSHHPAASHDGAQPLRVLFRRLENGRWSSSLLTAPSFHSPEKPGAFLAQSPHVSEKSEGPCVRVPPSVLYEDLQVPSSSEDSDSDLE

SEQ ID NO: 45832 - protein, 14 aa, Homo sapiens
MMARRDPKPGAKRL

SEQ ID NO: 45833 - protein, 464 aa, Homo sapiens; identical to SEQ ID NO: 45831

SEQ ID NO: 45834 - protein, 380 aa, Homo sapiens
MAVTEASLLRQCPLLLPQNRSKTVYEGFISAQGRDFHLRIVLPEDLQLKNARLLCSWQLRTILSGYHRIVQQRMQHSPDLMSFMMELKMLLEVALKNRQELYALPPPPQFYSSLIEEIGTLGWDKLVYADTCFSTIKLKAEDASGREHLITLKLKAKYPAESPDYFVDFPVPFCASWTPQVNSPQSSLISIYSQFLAAIESLKAFWDVMDEIDEKTWVLEPEKPPRSATARRIALGNNVSINIEVDPRHPTMLPECFFLGADHVVKPLGIKLSRNIHLWDPENSVLQNLKDVLEIDFPARAILEKSDFTMDCGICYAYQLDGTIPDQVCDNSQCGQPFHQICLYEWLRGLLTSRQSFNIIFGECPYCSKPITLKMSGRKH

SEQ ID NO: 45835 - protein, 859 aa, Homo sapiens
MTSKQAMSSNEQERLLCYNGEVLVFQLSKGNFADKEPTKTPILHVRRMVFDRGTKVFVQKSTGFFTIKEENSHLKIMCCNCVSDFRTGINLPYIVIEKNKKNNVFEYFLLILHSTNKFEMRLSFKLGYEMKDGLRVLNGPLILWRHVKAFFFISSQTGKVVSVSGNFSSIQWAGEIENLGMVLLGLKECCLSEEECTQEPSKSDYAIWNTKFCVYSLESQEVLSDIYIIPPAYSSVVTYVHICATEIIKNQLRISLIALTRKNQLISFQNGTPKNVCQLPFGDPCAVQLMDSGGGNLFFVVSFISNNACAVWKESFQVAAKWEKLSLVLIDDFIGSGTEQVLLLFKDSLNSDCLTSFKITDLGKINYSSEPSDCNEDDLFEDKQENRYLVVPPLETGLKVCFSSFRELRQHLLLKEKIISKSYKALINLVQGKDDNTSSAEEKECLVPLCGEEENSVHILDEKLSDNFQDSEQLVEKIWYRVIDDSLVVGVKTTSSLKLSLNDVTLSLLMDQAHDSRFRLLKCQNRVIKLSTNPFPAPYLMPCEIGLEAKRVTLTPDSKKEESFVCEHPSKKECVQIITAVTSLSPLLTFSKFCCTVLLQIMERESGNCPKDRYVVCGRVFLSLEDLSTGKYLLTFPKKKPIEHMEDLFALLAAFHKSCFQITSPGYALNSMKVWLLEHMKCEIIKEFPEVYFCERPGSFYGTLFTWKQRTPFEGILIIYSRNQTVMFQCLHNLIRILPINCFLKNLKSGSENFLIDNMAFTLEKELVTLSSLSSAIAKHESNFMQRCEVSKGKSSVVAAALSDRRENIHPYRKELQREKKKMLQTNLKVSGALYREITLKVAEVQLKSDFAAQKLSNL

SEQ ID NO: 45836 - protein, 859 aa, Homo sapiens; identical to SEQ ID NO: 45835

SEQ ID NO: 45837 - protein, 818 aa, Homo sapiens
MTSKQAMSSNEQERLLCYNGEVLVFQLSKGNFADKEPTKTPILHVRRMVFDRGTKVFVQKSTGFFTIKEENSHLKIMCCNCVSDFRTGINLPYIVIEKNKKNNVFEYFLLILHSTNKFEMRLSFKLGYEMKDGLRVLNGPLILWRHVKAFFFISSQTGKVVSVSGNFSSIQWAGEIENLGMVLLGLKECCLSEEECTQEPSKSDYAIWNTKFCVYSLESQEVLSDIYIIPPAYSSVVTYVHICATEIIKNQLRISLIALTRKNQLISFQNGTPKNVCQLPFGDPCAVQLMDSGGGNLFFVVSFISNNACAVWKESFQVAAKWEKLSLVLIDDFIGSGTEQVLLLFKDSLNSDCLTSFKITDLGKINYSSEPSDCNEDDLFEDKQENRYLVVPPLETGLKVCFSSFRELRQHLLLKEKIISKSYKALINLVQGKDDNTSSAEEKECLVPLCGEEENSVHILDEKLSDNFQDSEQLVEKIWYRVIDDSLVVGVKTTSSLKLSLNDVTLSLLMDQAHDSRFRLLKCQNRVIKLSTNPFPAPYLMPCEIGLEAKRVTLTPDSKKEESFVCEHPSKKECVQIITAVTSLSPLLTFSKFCCTVLLQIMERESGNCPKDRYVVCGRVFLSLEDLSTGKYLLTFPKKKPIEHMEDLFALLAAFHKSCFQITSPGYALNSMKVWLLEHMKCEIIKEFPEVYFCERPGSFYGTLFTWKQRTPFEGILIIYSRNQTVMFQCLHNLIRILPINCFLKNLKSGSENFLIDNMAFTLEKELVTLSSLSSAIAKHESNFMQRCEVSKGKSSVVAAALSDRRENIHPYRKELQR

SEQ ID NO: 45838 - protein, 558 aa, Homo sapiens
MAQDSVDLSCDYQFWMQKLSVWDQASTLETQQDTCLHVAQFQEFLRKMYEALKEMDSNTVIERFPTIGQLLAKACWNPFILAYDESQKILIWCLCCLINKEPQNSGQSKLNSWIQGVLSHILSALRFDKEVALFTQGLGYAPIDYYPGLLKNMVLSLASELRENHLNGFNTQRRMAPERVASLSRVCVPLITLTDVDPLVEALLICHGREPQEILQPEFFEAVNEAILLKKISLPMSAVVCLWLRHLPSLEKAMLHLFEKLISSERNCLRRIECFIKDSSLPQAACHPAIFRVVDEMFRCALLETDGALEIIATIQVFTQCFVEALEKASKQLRFALKTYFPYTSPSLAMVLLQDPQDIPRGHWLQTLKHISELLREAVEDQTHGSCGGPFESWFLFIHFGGWAEMVAEQLLMSAAEPPTALLWLLAFYYGPRDGRQQRAQTMVQVKAVLGHLLAMSRSSSLSAQDLQTVAGQGTDTDLRAPAQQLIRHLLLNFLLWAPGGHTIAWDVITLMAHTAEITHEIIGFLDQTLYRWNRLGIESPRSEKLARELLKELRTQV

SEQ ID NO: 45839 - protein, 558 aa, Homo sapiens; identical to SEQ ID NO: 45838

SEQ ID NO: 45840 - protein, 150 aa, Homo sapiens
MAQDSVDLSCDYQFWMQKLSVWDQASTLETQQDTCLHVAQFQEFLRKMYEALKEMDSNTVIERFPTIGQLLAKACWNPFILAYDESQKILIWCLCCLINKEPQNSGQSKLNSWIQGVLSHILSALRFDKEVALFTQGLGYAPIDYYPGLL

SEQ ID NO: 45841 - protein, 1471 aa, Homo sapiens
MVSKRRLSKSEDKESLTEDASKTRKQPLSKKTKKSHIANEVEENDSIFVKLLKISGIILKTGESQNQLAVDQIAFQKKLFQTLRRHPSYPKIIEEFVSGLESYIEDEDSFRNCLLSCERLQDEEASMGASYSKSLIKLLLGIDILQPAIIKTLFEKLPEYFFENKNSDEINIPRLIVSQLKWLDRVVDGKDLTTKIMQLISIAPENLQHDIITSLPEILGDSQHADVGKELSDLLIENTSLTVPILDVLSSLRLDPNFLLKVRQLVMDKLSSIRLEDLPVIIKFILHSVTAMDTLEVISELREKLDLQHCVLPSRLQASQVKLKSKGRASSSGNQESSGQSCIILLFDVIKSAIRYEKTISEAWIKAIENTASVSEHKVFDLVMLFIIYSTNTQTKKYIDRVLRNKIRSGCIQEQLLQSTFSVHYLVLKDMCSSILSLAQSLLHSLDQSIISFGSLLYKYAFKFFDTYCQQEVVGALVTHICSGNEAEVDTALDVLLELVVLNPSAMMMNAVFVKGILDYLDNISPQQIRKLFYVLSTLAFSKQNEASSHIQDDMHLVIRKQLSSTVFKYKLIGIIGAVTMAGIMAADRSESPSLTQERANLSDEQCTQVTSLLQLVHSCSEQSPQASALYYDEFANLIQHEKLDPKALEWVGHTICNDFQDAFVVDSCVVPEGDFPFPVKALYGLEEYDTQDGIAINLLPLLFSQDFAKDGGPVTSQESGQKLVSPLCLAPYFRLLRLCVERQHNGNLEEIDGLLDCPIFLTDLEPGEKLESMSAKERSFMCSLIFLTLNWFREIVNAFCQETSPEMKGKVLTRLKHIVELQIILEKYLAVTPDYVPPLGNFDVETLDITPHTVTAISAKIRKKGKIERKQKTDGSKTSSSDTLSEEKNSECDPTPSHRGQLNKEFTGKEEKTSLLLHNSHAFFRELDIEVFSILHCGLVTKFILDTEMHTEATEVVQLGPPELLFLLEDLSQKLESMLTPPIARRVPFLKNKGSRNIGFSHLQQRSAQEIVHCVFQLLTPMCNHLENIHNYFQCLAAENHGVVDGPGVKVQEYHIMSSCYQRLLQIFHGLFAWSGFSQPENQNLLYSALHVLSSRLKQGEHSQPLEELLSQSVHYLQNFHQSIPSFQCALYLIRLLMVILEKSTASAQNKEKIASLARQFLCRVWPSGDKEKSNISNDQLHALLCIYLEHTESILKAIEEIAGVGVPELINSPKDASSSTFPTLTRHTFVVFFRVMMAELEKTVKKIEPGTAADSQQIHEEKLLYWNMAVRDFSILINLIKVFDSHPVLHVCLKYGRLFVEAFLKQCMPLLDFSFRKHREDVLSLLETFQLDTRLLHHLCGHSKIHQDTRLTQHVPLLKKTLELLVCRVKAMLTLNNCREAFWLGNLKNRDLQGEEIKSQNSQESTADESEDDMSSQASKSKATEVSLQNPPESGTDGCILLIVLSWWSRTLPTYVYCQMLLCPFPFPP

SEQ ID NO: 45842 - protein, 1249 aa, Homo sapiens
MVSKRRLSKSEDKESLTEDASKTRKQPLSKKTKKSHIANEVEENDSIFVKLLKISGIILKTGESQNQLAVDQIAFQKKLFQTLRRHPSYPKIIEEFVSGLESYIEDEDSFRNCLLSCERLQDEEASMGASYSKSLIKLLLGIDILQPAIIKTLFEKLPEYFFENKNSDEINIPRLIVSQLKWLDRVVDGKDLTTKIMQLISIAPENLQHDIITSLPEILGDSQHADVGKELSDLLIENTSLTVPILDVLSSLRLDPNFLLKVRQLVMDKLSSIRLEDLPVIIKFILHSVTAMDTLEVISELREKLDLQHCVLPSRLQASQVKLKSKGRASSSGNQESSGQSCIILLFDVIKSAIRYEKTISEAWIKAIENTASVSEHKVFDLVMLFIIYSTNTQTKKYIDRVLRNKIRSGCIQEQLLQSTFSVHYLVLKDMCSSILSLAQSLLHSLDQSIISFGSLLYKYAFKFFDTYCQQEVVGALVTHICSGNEAEVDTALDVLLELVVLNPSAMMMNAVFVKGILDYLDNISPQQIRKLFYVLSTLAFSKQNEASSHIQDDMHLVIRKQLSSTVFKYKLIGIIGAVTMAGIMAADRSESPSLTQERANLSDEQCTQVTSLLQLVHSCSEQSPQASALYYDEFANLIQHEKLDPKALEWVGHTICNDFQDAFVVDSCVVPEGDFPFPVKALYGLEEYDTQDGIAINLLPLLFSQDFAKDGGPVTSQESGQKLVSPLCLAPYFRLLRLCVERQHNGNLEEIDGLLDCPIFLTDLEPGEKLESMSAKERSFMCSLIFLTLNWFREIVNAFCQETSPEMKGKVLTRLKHIVELQIILEKYLAVTPDYVPPLGNFDVETLDITPHTVTAISAKIRKKGKIERKQKTDGSKTSSSDTLSEEKNSECDPTPSHRGQLNKEFTGKEEKTSLLLHNSHAFFRELDIEVFSILHCGLVTKFILDTEMHTEATEVVQLGPPELLFLLEDLSQKLESMLTPPIARRVPFLKNKGSRNIGFSHLQQRSAQEIVHCVFQLLTPMCNHLENIHNYFQCLAAENHGVVDGPGVKVQEYHIMSSCYQRLLQIFHGLFAWSGFSQPENQNLLYSALHVLSSRLKQGEHSQPLEELLSQSVHYLQNFHQSIPSFQCALYLIRLLMVILEKSTASAQNKEKIASLARQFLCRVWPSGDKEKSNISNDQLHALLCIYLEHTESILKAIEEIAGVGVPELINSPKDASSSTFPTLTRFMKRNSSTGTWLFETSVSSST

SEQ ID NO: 45843 - protein, 1451 aa, Homo sapiens
MVSKRRLSKSEDKESLTEDASKTRKQPLSKKTKKSHIANEVEENDSIFVKLLKISGIILKTGESQNQLAVDQIAFQKKLFQTLRRHPSYPKIIEEFVSGLESYIEDEDSFRNCLLSCERLQDEEASMGASYSKSLIKLLLGIDILQPAIIKTLFEKLPEYFFENKNSDEINIPRLIVSQLKWLDRVVDGKDLTTKIMQLISIAPENLQHDIITSLPEILGDSQHADVGKELSDLLIENTSLTVPILDVLSSLRLDPNFLLKVRQLVMDKLSSIRLEDLPVIIKFILHSVTAMDTLEVISELREKLDLQHCVLPSRLQASQVKLKSKGRASSSGNQESSGQSCIILLFDVIKSAIRYEKTISEAWIKAIENTASVSEHKVFDLVMLFIIYSTNTQTKKYIDRVLRNKIRSGCIQEQLLQSTFSVHYLVLKDMCSSILSLAQSLLHSLDQSIISFGSLLYKYAFKFFDTYCQQEVVGALVTHICSGNEAEVDTALDVLLELVVLNPSAMMMNAVFVKGILDYLDNISPQQIRKLFYVLSTLAFSKQNEASSHIQDDMHLVIRKQLSSTVFKYKLIGIIGAVTMAGIMAADRSESPSLTQERANLSDEQCTQVTSLLQLVHSCSEQSPQASALYYDEFANLIQHEKLDPKALEWVGHTICNDFQDAFVVDSCVVPEGDFPFPVKALYGLEEYDTQDGIAINLLPLLFSQDFAKDGGPVTSQESGQKLVSPLCLAPYFRLLRLCVERQHNGNLEEIDGLLDCPIFLTDLEPGEKLESMSAKERSFMCSLIFLTLNWFREIVNAFCQETSPEMKGKVLTRLKHIVELQIILEKYLAVTPDYVPPLGNFDVETLDITPHTVTAISAKIRKKGKIERKQKTDGSKTSSSDTLSEEKNSECDPTPSHRGQLNKEFTGKEEKTSLLLHNSHAFFRELDIEVFSILHCGLVTKFILDTEMHTEATEVVQLGPPELLFLLEDLSQKLESMLTPPIARRVPFLKNKGSRNIGFSHLQQRSAQEIVHCVFQLLTPMCNHLENIHNYFQCLAAENHGVVDGPGVKVQEYHIMSSCYQRLLQIFHGLFAWSGFSQPENQNLLYSALHVLSSRLKQGEHSQPLEELLSQSVHYLQNFHQSIPSFQCALYLIRLLMVILEKSTASAQNKEKIASLARQFLCRVWPSGDKEKSNISNDQLHALLCIYLEHTESILKAIEEIAGVGVPELINSPKDASSSTFPTLTRHTFVVFFRVMMAELEKTVKKIEPGTAADSQQIHEEKLLYWNMAVRDFSILINLIKVFDSHPVLHVCLKYGRLFVEAFLKQCMPLLDFSFRKHREDVLSLLETFQLDTRLLHHLCGHSKIHQDTRLTQHVPLLKKTLELLVCRVKAMLTLNNCREAFWLGNLKNRDLQGEEIKSQNSQESTADESEDDMSSQASKSKATEDGEEDEVSAGEKEQDSDESYDDSD

SEQ ID NO: 45844 - protein, 1451 aa, Homo sapiens; identical to SEQ ID NO: 45843

SEQ ID NO: 45845 - protein, 536 aa, Homo sapiens
MATPDAGLPGAEGVEPAPWAQLEAPARLLLQALQAGPEGARRGLGVLRALGSRGWEPFDWGRLLEALCREEPVVQGPDGRLELKPLLLRLPRICQRNLMSLLMAVRPSLPESGLLSVLQIAQQDLAPDPDAWLRALGELLRRDLGVGTSMEGASPLSERCQRQLQSLCRGLGLGGRRLKSPQAPDPEEEENRDSQQPGKRRKDSEEEAASPEGKRVPKRLRCWEEEEDHEKERPEHKSLESLADGGSASPIKDQPVMAVKTGEDGSNLDDAKGLAESLELPKAIQDQLPRLQQLLKTLEEGLEGLEDAPPVELQLLHECSPSQMDLLCAQLQLPQLSDLGLLRLCTWLLALSPDLSLSNATVLTRSLFLGRILSLTSSASRLLTTALTSFCAKYTYPVCSALLDPVLQAPGTGPAQTELLCCLVKMESLEPDAQVLMLGQILELPWKEETFLVLQSLLERQVEMTPEKFSVLMEKLCKKGLAATTSMAYAKLMLTVMTKYQANITETQRLGLAMALEPNTTFLRKSLKAALKHLGP

SEQ ID NO: 45846 - protein, 374 aa, Homo sapiens
MESLLQHLDRFSELLAVSSTTYVSTWDPATVRRALQWARYLRHIHRRFGRHGPIRTALERRLHNQWRQEGGFGRGPVPGLANFQALGHCDVLLSLRLLENRALGDAARYHLVQQLFPGPGVRDADEETLQESLARLARRRSAVHMLRFNGYRENPNLQEDSLMKTQAELLLERLQEVGKAEAERPARFLSSLWERLPQNNFLKVIAVALLQPPLSRRPQEELEPGIHKSPGEGSQVLVHWLLGNSEVFAAFCRALPAGLLTLVTSRHPALSPVYLGLLTDWGQRLHYDLQKGIWVGTESQDVPWEELHNRFQSLCQAPPPLKDKVLTALETCKAQDGDFEVPGLSIWTDLLLALRSGAFRKRQVLGLSAGLSSV

SEQ ID NO: 45847 - protein, 1268 aa, Homo sapiens
MDQKILSLAAEKTADKLQEFLQTLREGDLTNLLQNQAVKGKVAGALLRAIFKGSPCSEEAGTLRRRKIYTCCIQLVESGDLQKEIASEIIGLLMLEAHHFPGPLLVELANEFISAVREGSLVNGKSLELLPIILTALATKKENLAYGKGVLSGEECKKQLINTLCSGRWDQQYVIQLTSMFKDVPLTAEEVEFVVEKALSMFSKMNLQEIPPLVYQLLVLSSKGSRKSVLEGIIAFFSALDKQHNEEQSGDELLDVVTVPSGELRHVEGTIILHIVFAIKLDYELGRELVKHLKVGQQGDSNNNLSPFSIALLLSVTRIQRFQDQVLDLLKTSVVKSFKDLQLLQGSKFLQNLVPHRSYVSTMILEVVKNSVHSWDHVTQGLVELGFILMDSYGPKKVLDGKTIETSPSLSRMPNQHACKLGANILLETFKIHEMIRQEILEQVLNRVVTRASSPISHFLDLLSNIVMYAPLVLQSCSSKVTEAFDYLSFLPLQTVQRLLKAVQPLLKVSMSMRDCLILVLRKAMFANQLDARKSAVAGFLLLLKNFKVLGSLSSSQCSQSLSVSQVHVDVHSHYNSVANETFCLEIMDSLRRCLSQQADVRLMLYEGFYDVLRRNSQLANSVMQTLLSQLKQFYEPKPDLLPPLKLEACILTQGDKISLQEPLDYLLCCIQHCLAWYKNTVIPLQQGEEEEEEEEAFYEDLDDILESITNRMIKSELEDFELDKSADFSQSTSIGIKNNICAFLVMGVCEVLIEYNFSISSFSKNRFEDILSLFMCYKKLSDILNEKAGKAKTKMANKTSDSLLSMKFVSSLLTALFRVLLWRYTSIPTSVEESGKKEKGKSISLLCLEGLQKIFSAVQQFYQPKIQQFLRALDVTDKEGEEREDADVSVTQRTAFQIRQFQRSLLNLLSSQEEDFNSKEALLLVTVLTSLSKLLEPSSPQFVQMLSWTSKICKENSREDALFCKSLMNLLFSLHVSYKSPVILLRDLSQDIHGHLGDIDQDVEVEKTNHFAIVNLRTAAPTVCLLVLSQAEKVLEEVDWLITKLKGQVSQETLSEEASSQATLPNQPVEKAIIMQLGTLLTFFHELVQTALPSGSCVDTLLKDLCKMYTTLTALVRYYLQVCQSSGGIPKNMEKLVKLSGSHLTPLCYSFISYVQNKSKSLNYTGEKKEKPAAVATAMARVLRETKPIPNLIFAIEQYEKFLIHLSKKSKVNLMQHMKLSTSRDFKIKGNILDMVLREDGEDENEEGTASEHGGQNKEPAKKKRKK

SEQ ID NO: 45848 - protein, 1328 aa, Homo sapiens
MDQKILSLAAEKTADKLQEFLQTLREGDLTNLLQNQAVKGKVAGALLRAIFKGSPCSEEAGTLRRRKIYTCCIQLVESGDLQKEIASEIIGLLMLEAHHFPGPLLVELANEFISAVREGSLVNGKSLELLPIILTALATKKENLAYGKGVLSGEECKKQLINTLCSGRWDQQYVIQLTSMFKDVPLTAEEVEFVVEKALSMFSKMNLQEIPPLVYQLLVLSSKGSRKSVLEGIIAFFSALDKQHNEEQSGDELLDVVTVPSGELRHVEGTIILHIVFAIKLDYELGRELVKHLKVGQQGDSNNNLSPFSIALLLSVTRIQRFQDQVLDLLKTSVVKSFKDLQLLQGSKFLQNLVPHRSYVSTMILEVVKNSVHSWDHVTQGLVELGFILMDSYGPKKVLDGKTIETSPSLSRMPNQHACKLGANILLETFKIHEMIRQEILEQVLNRVVTRASSPISHFLDLLSNIVMYAPLVLQSCSSKVTEAFDYLSFLPLQTVQRLLKAVQPLLKVSMSMRDCLILVLRKAMFANQLDARKSAVAGFLLLLKNFKVLGSLSSSQCSQSLSVSQVHVDVHSHYNSVANETFCLEIMDSLRRCLSQQADVRLMLYEGFYDVLRRNSQLANSVMQTLLSQLKQFYEPKPDLLPPLKLEACILTQGDKISLQEPLDYLLCCIQHCLAWYKNTVIPLQQGEEEEEEEEAFYEDLDDILESITNRMIKSELEDFELDKSADFSQSTSIGIKNNICAFLVMGVCEVLIEYNFSISSFSKNRFEDILSLFMCYKKLSDILNEKAGKAKTKMANKTSDSLLSMKFVSSLLTALFRDSIQSHQESLSVLRSSNEFMRYAVNVALQKVQQLKETGHVSGPDGQNPEKIFQNLCDITRVLLWRYTSIPTSVEESGKKEKGKSISLLCLEGLQKIFSAVQQFYQPKIQQFLRALDVTDKEGEEREDADVSVTQRTAFQIRQFQRSLLNLLSSQEEDFNSKEALLLVTVLTSLSKLLEPSSPQFVQMLSWTSKICKENSREDALFCKSLMNLLFSLHVSYKSPVILLRDLSQDIHGHLGDIDQDVEVEKTNHFAIVNLRTAAPTVCLLVLSQAEKVLEEVDWLITKLKGQVSQETLSEEASSQATLPNQPVEKAIIMQLGTLLTFFHELVQTALPSGSCVDTLLKDLCKMYTTLTALVRYYLQVCQSSGGIPKNMEKLVKLSGSHLTPLCYSFISYVQNKSKSLNYTGEKKEKPAAVATAMARVLRETKPIPNLIFAIEQYEKFLIHLSKKSKVNLMQHMKLSTSRDFKIKGNILDMVLREDGEDENEEGTASEHGGQNKEPAKKKRKK

SEQ ID NO: 45849 - protein, 1095 aa, Homo sapiens
MDQKILSLAAEKTADKLQEFLQTLREGDLTNLLQNQAVKGKVAGALLRAIFKGSPCSEEAGTLRRRKIYTCCIQLVESGDLQKEIASEIIGLLMLEAHHFPGPLLVELANEFISAVREGSLVNGKSLELLPIILTALATKKENLAYGKGVLSGEECKKQLINTLCSGRWDQQYVIQLTSMFKDVPLTAEEVEFVVEKALSMFSKMNLQEIPPLVYQLLVLSSKGSRKSVLEGIIAFFSALDKQHNEEQSGDELLDVVTVPSGELRHVEGTIILHIVFAIKLDYELGRELVKHLKVGQQGDSNNNLSPFSIALLLSVTRIQRFQDQVLDLLKTSVVKSFKDLQLLQGSKFLQNLVPHRSYVSTMILEVVKNSVHSWDHVTQGLVELGFILMDSYGPKKVLDGKTIETSPSLSRMPNQHACKLGANILLETFKIHEMIRQEILEQVLNRVVTRASSPISHFLDLLSNIVMYAPLVLQSCSSKVTEAFDYLSFLPLQTVQRLLKAVQPLLKVSMSMRDCLILVLRKAMFANQLDARKSAVAGFLLLLKNFKVLGSLSSSQCSQSLSVSQVHVDVHSHYNSVANETFCLEIMDSLRRCLSQQADVRLMLYEGFYDVLRRNSQLANSVMQTLLSQLKQFYEPKPDLLPPLKLEACILTQGDKISLQEPLDYLLCCIQHCLAWYKNTVIPLQQGEEEEEEEEAFYEDLDDILESITNRMIKSELEDFELDKSADFSQSTSIGIKNNICAFLVMGVCEVLIEYNFSISSFSKNRFEDILSLFMCYKKLSDILNEKAGKAKTKMANKTSDSLLSMKFVSSLLTALFRVLLWRYTSIPTSVEESGKKEKGKSISLLCLEGLQKIFSAVQQFYQPKIQQFLRALDVTDKEGEEREDADVSVTQRTAFQIRQFQRSLLNLLSSQEEDFNSKEALLLVTVLTSLSKLLEPSSPQFVQMLSWTSKICKENSREDALFCKSLMNLLFSLHVSYKSPVILLRDLSQDIHGHLGDIDQDVEVEKTNHFAIVNLRTAAPTVCLLVLSQAEKVLEEVDWLITKLKGQVSQETLSVSPGVSELRRNSKKYGKAGEAVWFSSDPPVLFFHFLRTE

SEQ ID NO: 45850 - protein, 73 aa, Homo sapiens
MFKDVPLTAEEVEFVVEKALSMFSKMNLQEIPPLVYQLLVLSSKGSRKSVLEGIIAFFSALDKQHNEEQSGDE

SEQ ID NO: 45851 - protein, 375 aa, Homo sapiens
MAVTEASLLRQCPLLLPQNRSKTVYEGFISAQGRDFHLRIVLPEDLQLKNARLLCSWQLRTILSGYHRIVQQRMQHSPDLMSFMMELKMLLEVALKNRQELYALPPPPQFYSSLIEEIGTLGWDKLVYADTCFSTIKLKAEDASGREHLITLKLKAKYPAESPDYFVDFPVPFCASWTPQSSLISIYSQFLAAIESLKAFWDVMDEIDEKTWVLEPEKPPRSATARRIALGNNVSINIEVDPRHPTMLPECFFLGADHVVKPLGIKLSRNIHLWDPENSVLQNLKDVLEIDFPARAILEKSDFTMDCGICYAYQLDGTIPDQVCDNSQCGQPFHQICLYEWLRGLLTSRQSFNIIFGECPYCSKPITLKMSGRKH

SEQ ID NO: 45852 - protein, 127 aa, Homo sapiens
MAVTEASLLRQCPLLLPQNRSKTVYEGFISAQGRDFHLRIVLPEDLQLKNARLLCSWQLRTILSGYHRIVQQRMQHSPDLMSFMMELKMLLEVALKNRQELYALPPPPQFYSSLIEEIGTLGWDKAP

SEQ ID NO: 45853 - protein, 2048 aa, Homo sapiens
MSGRQRTLFQTWGSSISRSSGTPGCSSGTERPQSPGSSKAPLPAAAEAQLESDDDVLLVAAYEAERQLCLENGGFCTSAGALWIYPTNCPVRDYQLHISRAALFCNTLVCLPTGLGKTFIAAVVMYNFYRWFPSGKVVFMAPTKPLVTQQIEACYQVMGIPQSHMAEMTGSTQASTRKEIWCSKRVLFLTPQVMVNDLSRGACPAAEIKCLVIDEAHKALGNYAYCQVVRELVKYTNHFRILALSATPGSDIKAVQQVITNLLIGQIELRSEDSPDILTYSHERKVEKLIVPLGEELAAIQKTYIQILESFARSLIQRNVLMRRDIPNLTKYQIILARDQFRKNPSPNIVGIQQGIIEGEFAICISLYHGYELLQQMGMRSLYFFLCGIMDGTKGMTRSKNELGRNEDFMKLYNHLECMFARTRSTSANGISAIQQGDKNKKFVYSHPKLKKLEEVVIEHFKSWNAENTTEKKRDETRVMIFSSFRDSVQEIAEMLSQHQPIIRVMTFVGHASGKSTKGFTQKEQLEVVKQFRDGGYNTLVSTCVGEEGLDIGEVDLIICFDSQKSPIRLVQRMGRTGRKRQGRIVIILSEGREERIYNQSQSNKRSIYKAISSNRQVLHFYQRSPRMVPDGINPKLHKMFITHGVYEPEKPSRNLQRKSSIFSYRDGMRQSSLKKDWFLSEEEFKLWNRLYRLRDSDEIKEITLPQVQFSSLQNEENKPAQESTTGIHQLSLSEWRLWQDHPLPTHQVDHSDRCRHFIGLMQMIEGMRHEEGECSYELEVESYLQMEDVTSTFIAPRNESNNLASDTFITHKKSSFIKNINQGSSSSVIESDEECAEIVKQTHIKPTKIVSLKKKVSKEIKKDQLKKENNHGIIDSVDNDRNSTVENIFQEDLPNDKRTSDTDEIAATCTINENVIKEPCVLLTECQFTNKSTSSLAGNVLDSGYNSFNDEKSVSSNLFLPFEEELYIVRTDDQFYNCHSLTKEVLANVERFLSYSPPPLSGLSDLEYEIAKGTALENLLFLPCAEHLRSDKCTCLLSHSAVNSQQNLELNSLKCINYPSEKSCLYDIPNDNISDEPSLCDCDVHKHNQNENLVPNNRVQIHRSPAQNLVGENNHDVDNSDLPVLSTDQDESLLLFEDVNTEFDDVSLSPLNSKSESLPVSDKTAISETPLVSQFLISDELLLDNNSELQDQITRDANSFKSRDQRGVQEEKVKNHEDIFDCSRDLFSVTFDLGFCSPDSDDEILEHTSDSNRPLDDLYGRYLEIKEISDANYVSNQALIPRDHSKNFTSGTVIIPSNEDMQNPNYVHLPLSAAKNEELLSPGYSQFSLPVQKKVMSTPLSKSNTLNSFSKIRKEILKTPDSSKEKVNLQRFKEALNSTFDYSEFSLEKSKSSGPMYLHKSCHSVEDGQLLTSNESEDDEIFRRKVKRAKGNVLNSPEDQKNSEVDSPLHAVKKRRFPINRSELSSSDESENFPKPCSQLEDFKVCNGNARRGIKVPKRQSHLKHVARKFLDDEAELSEEDAEYVSSDENDESENEQDSSLLDFLNDETQLSQAINDSEMRAIYMKSLRSPMMNNKYKMIHKTHKNINIFSQIPEQDETYLEDSFCVDEEESCKGQSSEEEVCVDFNLITDDCFANSKKYKTRRAVMLKEMMEQNCAHSKKKLSRIILPDDSSEEENNVNDKRESNIAVNPSTVKKNKQQDHCLNSVPSGSSAQSKVRSTPRVNPLAKQSKQTSLNLKDTISEVSDFKPQNHNEVQSTTPPFTTVDSQKDCRKFPVPQKDGSALEDSSTSGASCSKSRPHLAGTHTSLRLPQEGKGTCILVGGHEITSGLEVISSLRAIHGLQVEVCPLNGCDYIVSNRMVVERRSQSEMLNSVNKNKFIEQIQHLQSMFERICVIVEKDREKTGDTSRMFRRTKSYDSLLTTLIGAGIRILFSSCQEETADLLKELSLVEQRKNVGIHVPTVVNSNKSEALQFYLSIPNISYITALNMCHQFSSVKRMANSSLQEISMYAQVTHQKAEEIYRYIHYVFDIQMLPNDLNQDRLKSDI

SEQ ID NO: 45854 - protein, 669 aa, Homo sapiens
MSGRQRTLFQTWGSSISRSSGTPGCSSGTERPQSPGSSKAPLPAAAEAQLESDDDVLLVAAYEAERQLCLENGGFCTSAGALWIYPTNCPVRDYQLHISRAALFCNTLVCLPTGLGKTFIAAVVMYNFYRWFPSGKVVFMAPTKPLVTQQIEACYQVMGIPQSHMAEMTGSTQASTRKEIWCSKRVLFLTPQVMVNDLSRGACPAAEIKCLVIDEAHKALGNYAYCQVVRELVKYTNHFRILALSATPGSDIKAVQQVITNLLIGQIELRSEDSPDILTYSHERKVEKLIVPLGEELAAIQKTYIQILESFARSLIQRNVLMRRDIPNLTKYQIILARDQFRKNPSPNIVGIQQGIIEGEFAICISLYHGYELLQQMGMRSLYFFLCGIMDGTKGMTRSKNELGRNEDFMKLYNHLECMFARTRSTSANGISAIQQGDKNKKFVYSHPKLKKLEEVVIEHFKSWNAENTTEKKRDETRVMIFSSFRDSVQEIAEMLSQHQPIIRVMTFVGHASGKSTKGFTQKEQLEVVKQFRDGGYNTLVSTCVGEEGLDIGEVDLIICFDSQKSPIRLVQRMGRTGRKRQGRIVIILSEGREERIYNQSQSNKRSIYKAISSNRQVLHFYQRSPRMVPDGINPKLHKMFITHGVYEPEKPSRNLQRKSSIFSYRDGK

SEQ ID NO: 45855 - protein, 655 aa, Homo sapiens
MADYSTVPPPSSGSAGGGGGGGGGGGVNDAFKDALQRARQIAAKIGGDAGTSLNSNDYGYGGQKRPLEDGDQPDAKKVAPQNDSFGTQLPPMHQQQSRSVMTEEYKVPDGMVGFIIGRGGEQISRIQQESGCKIQIAPDSGGLPERSCMLTGTPESVQSAKRLLDQIVEKGRPAPGFHHGDGPGNAVQEIMIPASKAGLVIGKGGETIKQLQERAGVKMVMIQDGPQNTGADKPLRITGDPYKVQQAKEMVLELIRDQGGFREVRNEYGSRIGGNEGIDVPIPRFAVGIVIGRNGEMIKKIQNDAGVRIQFKPDDGTTPERIAQITGPPDRCQHAAEIITDLLRSVQAGNPGGPGPGGRGRGRGQGNWNMGPPGGLQEFNFIVPTGKTGLIIGKGGETIKSISQQSGARIELQRNPPPNADPNMKLFTIRGTPQQIDYARQLIEEKIGGPVNPLGPPVPHGPHGVPGPHGPPGPPGPGTPMGPYNPAPYNPGPPGPAPHGPPAPYAPQGWGNAYPHWQQQAPPDPAKAGTDPNSAAWAAYYAHYYQQQAQPPPAAPAGAPTTTQTNGQGDQQNPAPAGQVDYTKAWEEYYKKMGQAVPAPTGAPPGGQPDYSAAWAEYYRQQAAYYAQTSPQGMPQHPPAPQGFANHARSHHHLY

SEQ ID NO: 45856 - protein, 644 aa, Homo sapiens
MADYSTVPPPSSGSAGGGGGGGGGGGVNDAFKDALQRARQIAAKIGGDAGTSLNSNDYGYGGQKRPLEDGDQPDAKKVAPQNDSFGTQLPPMHQQQSRSVMTEEYKVPDGMVGFIIGRGGEQISRIQQESGCKIQIAPDSGGLPERSCMLTGTPESVQSAKRLLDQIVEKGRPAPGFHHGDGPGNAVQEIMIPASKAGLVIGKGGETIKQLQERAGVKMVMIQDGPQNTGADKPLRITGDPYKVQQAKEMVLELIRDQGGFREVRNEYGSRIGGNEGIDVPIPRFAVGIVIGRNGEMIKKIQNDAGVRIQFKPDDGTTPERIAQITGPPDRCQHAAEIITDLLRSVQAGNPGGPGPGGRGRGRGQGNWNMGPPGGLQEFNFIVPTGKTGLIIGKGGETIKSISQQSGARIELQRNPPPNADPNMKLFTIRGTPQQIDYARQLIEEKIGGPVNPLGPPVPHGPHGVPGPHGPPGPPGPGTPMGPYNPAPYNPGPPGPAPHGPPAPYAPQGWGNAYPHWQQQAPPDPAKAGTDPNSAAWAAYYAHYYQQQAQPPPAAPAGAPTTTQTNGQGDQQNPAPAGQVDYTKAWEEYYKKMGQAVPAPTGAPPGGQPDYSAAWAEYYRQQAAYYAQTSPQGMPQHPPAPQGQ

SEQ ID NO: 45857 - protein, 654 aa, Homo sapiens
MADYSTVPPPSSGSAGGGGGGGGGGGVNDAFKDALQRARQIAAKIGGDAGTSLNSNDYGYGGQKRPLEDGDQPDAKKVAPQNDSFGTQLPPMHQQQRSVMTEEYKVPDGMVGFIIGRGGEQISRIQQESGCKIQIAPDSGGLPERSCMLTGTPESVQSAKRLLDQIVEKGRPAPGFHHGDGPGNAVQEIMIPASKAGLVIGKGGETIKQLQERAGVKMVMIQDGPQNTGADKPLRITGDPYKVQQAKEMVLELIRDQGGFREVRNEYGSRIGGNEGIDVPIPRFAVGIVIGRNGEMIKKIQNDAGVRIQFKPDDGTTPERIAQITGPPDRCQHAAEIITDLLRSVQAGNPGGPGPGGRGRGRGQGNWNMGPPGGLQEFNFIVPTGKTGLIIGKGGETIKSISQQSGARIELQRNPPPNADPNMKLFTIRGTPQQIDYARQLIEEKIGGPVNPLGPPVPHGPHGVPGPHGPPGPPGPGTPMGPYNPAPYNPGPPGPAPHGPPAPYAPQGWGNAYPHWQQQAPPDPAKAGTDPNSAAWAAYYAHYYQQQAQPPPAAPAGAPTTTQTNGQEGDQQNPAPAGQVDYTKAWEEYYKKMGQAVPAPTGAPPGGQPDYSAAWAEYYRQQAAYYAQTSPQGMPQHPPAPQCRFDPASIELAL

SEQ ID NO: 45858 - protein, 629 aa, Homo sapiens
MADYSTVPPPSSGSAGGGGGGGGGGGVNDAFKDALQRARQIAAKIGGDAGTSLNSNDYGYGGQKRPLEDGDQPDAKKVAPQNDSFGTQLPPMHQQQRSVMTEEYKVPDGMVGFIIGRGGEQISRIQQESGCKIQIAPDSGGLPERSCMLTGTPESVQSAKRLLDQIVEKGRPAPGFHHGDGPGNAVQEIMIPASKAGLVIGKGGETIKQLQERAGVKMVMIQDGPQNTGADKPLRITGDPYKVQQAKEMVLELIRDQGGFREVRNEYGSRIGGNEGIDVPIPRFAVGIVIGRNGEMIKKIQNDAGVRIQFKPDDGTTPERIAQITGPPDRCQHAAEIITDLLRSVQAGNPGGPGPGGRGRGRGQGNWNMGPPGGLQEFNFIVPTGKTGLIIGKGGETIKSISQQSGARIELQRNPPPNADPNMKLFTIRGTPQQIDYARQLIEEKIGGPVNPLGPPVPHGPPGTPMGPYNPAPYNPGPPGPAPHGPPAPYAPQGWGNAYPHWQQQAPPDPAKAGTDPNSAAWAAYYAHYYQQQAQPPPAAPAGAPTTTQTNGQGDQQNPAPAGQVDYTKAWEEYYKKMGQAVPAPTGAPPGGQPDYSAAWAEYYRQQAAYYAQTSPQGMPQHPPAPQGQ

SEQ ID NO: 45859 - protein, 232 aa, Homo sapiens
MADYSTVPPPSSGSAGGGGGGGGGGGVNDAFKDALQRARQIAAKIGGDAGTSLNSNDYGYGGQKRPLEDGDGSWTSPSSTTHWEGMPSPFKDQPDAKKVAPQNDSFGTQLPPMHQQQRSVMTEEYKVPDGMVGFIIGRGGEQISRIQQESGCKIQIAPDSGGLPERSCMLTGTPESVQSAKRLLDQIVEKGRPAPGFHHGDGPGNAVQEIMIPASKAGLVIGKGGETIKQLQ

SEQ ID NO: 45860 - protein, 665 aa, Homo sapiens
MADYSTVPPPSSGSAGGGGGGGGGGGVNDAFKDALQRARQIAAKIGGDAGTSLNSNDYGYGGQKRPLEDGDGSWTSPSSTTHWEGMPSPFKDQPDAKKVAPQNDSFGTQLPPMHQQQSRSVMTEEYKVPDGMVGFIIGRGGEQISRIQQESGCKIQIAPDSGGLPERSCMLTGTPESVQSAKRLLDQIVEKGRPAPGFHHGDGPGNAVQEIMIPASKAGLVIGKGGETIKQLQERAGVKMVMIQDGPQNTGADKPLRITGDPYKVQQAKEMVLELIRDQGGFREVRNEYGSRIGGNEGIDVPIPRFAVGIVIGRNGEMIKKIQNDAGVRIQFKPDDGTTPERIAQITGPPDRCQHAAEIITDLLRSVQAGNPGGPGPGGRGRGRGQGNWNMGPPGGLQEFNFIVPTGKTGLIIGKGGETIKSISQQSGARIELQRNPPPNADPNMKLFTIRGTPQQIDYARQLIEEKIGGPVNPLGPPVPHGPHGVPGPHGPPGPPGPGTPMGPYNPAPYNPGPPGPAPHGPPAPYAPQGWGNAYPHWQQQAPPDPAKAGTDPNSAAWAAYYAHYYQQQAQPPPAAPAGAPTTTQTNGQGDQQNPAPAGQVDYTKAWEEYYKKMGQAVPAPTGAPPGGQPDYSAAWAEYYRQQAAYYAQTSPQGMPQHPPAPQGQ

SEQ ID NO: 45861 - protein, 419 aa, Homo sapiens
MPLSRWLRSVGVFLLPAPYWAPRERWLGSLRRPSLVHGYPVLAWHSARCWCQAWTEEPRALCSSLRMNGDQNSDVYAQEKQDFVQHFSQIVRVLTEDEMGHPEIGDAIARLKEVLEYNAIGGKYNRGLTVVVAFRELVEPRKQDADSLQRAWTVGWCVELLQAFFLVADDIMDSSLTRRGQICWYQKPGVGLDAINDANLLEACIYRLLKLYCREQPYYLNLIELFLQSSYQTEIGQTLDLLTAPQGNVDLVRFTEKRYKSIVKYKTAFYSFYLPIAAAMYMAGIDGEKEHANAKKILLEMGEFFQIQDDYLDLFGDPSVTGKIGTDIQDNKCSWLVVQCLQRATPEQYQILKENYGQKEAEKVARVKALYEELDLPAVFLQYEEDSYSHIMALIEQYAAPLPPAVFLGLARKIYKRRK

SEQ ID NO: 45862 - protein, 419 aa, Homo sapiens; identical to SEQ ID NO: 45861

SEQ ID NO: 45863 - protein, 353 aa, Homo sapiens
MNGDQNSDVYAQEKQDFVQHFSQIVRVLTEDEMGHPEIGDAIARLKEVLEYNAIGGKYNRGLTVVVAFRELVEPRKQDADSLQRAWTVGWCVELLQAFFLVADDIMDSSLTRRGQICWYQKPGVGLDAINDANLLEACIYRLLKLYCREQPYYLNLIELFLQSSYQTEIGQTLDLLTAPQGNVDLVRFTEKRYKSIVKYKTAFYSFYLPIAAAMYMAGIDGEKEHANAKKILLEMGEFFQIQDDYLDLFGDPSVTGKIGTDIQDNKCSWLVVQCLQRATPEQYQILKENYGQKEAEKVARVKALYEELDLPAVFLQYEEDSYSHIMALIEQYAAPLPPAVFLGLARKIYKRRK

SEQ ID NO: 45864 - protein, 417 aa, Homo sapiens
MEFVKCLGHPEEFYNLVRFRIGGKRKVMPKMDQDSLSSSLKTCYKYLNQTSRSFAAVIQALDGEMRNAVCIFYLVLRALDTLEDDMTISVEKKVPLLHNFHSFLYQPDWRFMESKEKDRQVLEDFPTISLEFRNLAEKYQTVIADICRRMGIGMAEFLDKHVTSEQEWDKYCHYVAGLVGIGLSRLFSASEFEDPLVGEDTERANSMGLFLQKTNIIRDYLEDQQGGREFWPQEVWSRYVKKLGDFAKPENIDLAVQCLNELITNALHHIPDVITYLSRLRNQSVFNFCAIPQVMAIATLAACYNNQQVFKGAVKIRKGQAVTLMMDATNMPAVKAIIYQYMEEIYHRIPDSDPSSSKTRQIISTIRTQNLPNCQLISRSHYSPIYLSFVMLLAALSWQYLTTLSQVTEDYVQTGEH

SEQ ID NO: 45865 - protein, 374 aa, Homo sapiens
MEFVKCLGHPEEFYNLVRFRIGGKRKVMPKMDQDSLSSSLKTCYKYLNQTSRSFAAVIQALDGEMRNAVCIFYLVLRALDTLEDDMTISVEKKVPLLHNFHSFLYQPDWRFMESKEKDRQVLEDFPTYCHYVAGLVGIGLSRLFSASEFEDPLVGEDTERANSMGLFLQKTNIIRDYLEDQQGGREFWPQEVWSRYVKKLGDFAKPENIDLAVQCLNELITNALHHIPDVITYLSRLRNQSVFNFCAIPQVMAIATLAACYNNQQVFKGAVKIRKGQAVTLMMDATNMPAVKAIIYQYMEEIYHRIPDSDPSSSKTRQIISTIRTQNLPNCQLISRSHYSPIYLSFVMLLAALSWQYLTTLSQVTEDYVQTGEH

SEQ ID NO: 45866 - protein, 332 aa, Homo sapiens
MTISVEKKVPLLHNFHSFLYQPDWRFMESKEKDRQVLEDFPTISLEFRNLAEKYQTVIADICRRMGIGMAEFLDKHVTSEQEWDKYCHYVAGLVGIGLSRLFSASEFEDPLVGEDTERANSMGLFLQKTNIIRDYLEDQQGGREFWPQEVWSRYVKKLGDFAKPENIDLAVQCLNELITNALHHIPDVITYLSRLRNQSVFNFCAIPQVMAIATLAACYNNQQVFKGAVKIRKGQAVTLMMDATNMPAVKAIIYQYMEEIYHRIPDSDPSSSKTRQIISTIRTQNLPNCQLISRSHYSPIYLSFVMLLAALSWQYLTTLSQVTEDYVQTGEH

SEQ ID NO: 45867 - protein, 410 aa, Homo sapiens
MEFVKCLGHPEEFYNLVRFRIGGKRKDSLSSSLKTCYKYLNQTSRSFAAVIQALDGEMRNAVCIFYLVLRALDTLEDDMTISVEKKVPLLHNFHSFLYQPDWRFMESKEKDRQVLEDFPTISLEFRNLAEKYQTVIADICRRMGIGMAEFLDKHVTSEQEWDKYCHYVAGLVGIGLSRLFSASEFEDPLVGEDTERANSMGLFLQKTNIIRDYLEDQQGGREFWPQEVWSRYVKKLGDFAKPENIDLAVQCLNELITNALHHIPDVITYLSRLRNQSVFNFCAIPQVMAIATLAACYNNQQVFKGAVKIRKGQAVTLMMDATNMPAVKAIIYQYMEEIYHRIPDSDPSSSKTRQIISTIRTQNLPNCQLISRSHYSPIYLSFVMLLAALSWQYLTTLSQVTEDYVQTGEH

SEQ ID NO: 45868 - protein, 332 aa, Homo sapiens; identical to SEQ ID NO: 45866

SEQ ID NO: 45869 - protein, 353 aa, Homo sapiens
MRNAVCIFYLVLRALDTLEDDMTISVEKKVPLLHNFHSFLYQPDWRFMESKEKDRQVLEDFPTISLEFRNLAEKYQTVIADICRRMGIGMAEFLDKHVTSEQEWDKYCHYVAGLVGIGLSRLFSASEFEDPLVGEDTERANSMGLFLQKTNIIRDYLEDQQGGREFWPQEVWSRYVKKLGDFAKPENIDLAVQCLNELITNALHHIPDVITYLSRLRNQSVFNFCAIPQVMAIATLAACYNNQQVFKGAVKIRKGQAVTLMMDATNMPAVKAIIYQYMEEIYHRIPDSDPSSSKTRQIISTIRTQNLPNCQLISRSHYSPIYLSFVMLLAALSWQYLTTLSQVTEDYVQTGEH

SEQ ID NO: 45870 - protein, 353 aa, Homo sapiens; identical to SEQ ID NO: 45869

SEQ ID NO: 45871 - protein, 306 aa, Homo sapiens
MESKEKDRQVLEDFPTISLEFRNLAEKYQTVIADICRRMGIGMAEFLDKHVTSEQEWDKYCHYVAGLVGIGLSRLFSASEFEDPLVGEDTERANSMGLFLQKTNIIRDYLEDQQGGREFWPQEVWSRYVKKLGDFAKPENIDLAVQCLNELITNALHHIPDVITYLSRLRNQSVFNFCAIPQVMAIATLAACYNNQQVFKGAVKIRKGQAVTLMMDATNMPAVKAIIYQYMEEIYHRIPDSDPSSSKTRQIISTIRTQNLPNCQLISRSHYSPIYLSFVMLLAALSWQYLTTLSQVTEDYVQTGEH

SEQ ID NO: 45872 - protein, 379 aa, Homo sapiens
MAATEGVGEAAQGGEPGQPAQPPPQPHPPPPQQQHKEEMAAEAGEAVASPMDDGFVSLDSPSYVLYRDRAEWADIDPVPQNDGPNPVVQIIYSDKFRDVYDYFRAVLQRDERSERAFKLTRDAIELNAANYTVWHFRRVLLKSLQKDLHEEMNYITAIIEEQPKNYQVWHHRRVLVEWLRDPSQELEFIADILNQDAKNYHAWQHRQWVIQEFKLWDNELQYVDQLLKEDVRNNSVWNQRYFVISNTTGYNDRAVLEREVQYTLEMIKLVPHNESAWNYLKGILQDRGLSKYPNLLNQLLDLQPSHSSPYLIAFLVDIYEDMLENQCDNKEDILNKALELCEILAKEKDTIRKEYWRYIGRSLQSKHSTENDSPTNVQQ

SEQ ID NO: 45873 - protein, 312 aa, Homo sapiens
MAATEGVGEAAQGGEPGQPAQPPPQPHPPPPQQQHKEEMAAEAGEAVASPMDDGFVSLDSPSYVLYRHFRRVLLKSLQKDLHEEMNYITAIIEEQPKNYQVWHHRRVLVEWLRDPSQELEFIADILNQDAKNYHAWQHRQWVIQEFKLWDNELQYVDQLLKEDVRNNSVWNQRYFVISNTTGYNDRAVLEREVQYTLEMIKLVPHNESAWNYLKGILQDRGLSKYPNLLNQLLDLQPSHSSPYLIAFLVDIYEDMLENQCDNKEDILNKALELCEILAKEKDTIRKEYWRYIGRSLQSKHSTENDSPTNVQQ

SEQ ID NO: 45874 - protein, 437 aa, Homo sapiens
MASPSSFTYYCPPSSSPVWSEPLYSLRPEHARERLQDDSVETVTSIEQAKVEEKIQEVFSSYKFNHLVPRLVLQREKHFHYLKRGLRQLTDAYECLDASRPWLCYWILHSLELLDEPIPQIVATDVCQFLELCQSPEGGFGGGPGQYPHLAPTYAAVNALCIIGTEEAYDIINREKLLQYLYSLKQPDGSFLMHVGGEVDVRSAYCAASVASLTNIITPDLFEGTAEWIARCQNWEGGIGGVPGMEAHGGYTFCGLAALVILKRERSLNLKSLLQWVTSRQMRFEGGFQGRCNKLVDGCYSFWQAGLLPLLHRALHAQGDPALSMSHWMFHQQALQEYILMCCQCPAGGLLDKPGKSRDFYHTCYCLSGLSIAQHFGSGAMLHDVVLGVPENALQPTHPVYNIGPDKVIQATTYFLQKPVPGFEELKDETSAEPATD

SEQ ID NO: 45875 - protein, 650 aa, Homo sapiens
MASNMDREMILADFQACTGIENIDEAITLLEQNNWDLVAAINGVIPQENGILQSEYGGETIPGPAFNPASHPASAPTSSSSSAFRPVMPSRQIVERQPRMLDFRVEYRDRNVDVVLEDTCTVGEIKQILENELQIPVSKMLLKGWKTGDVEDSTVLKSLHLPKNNSLYVLTPDLPPPSSSSHAGALQESLNQNFMLIITHREVQREYNLNFSGSSTIQEVKRNVYDLTSIPVRHQLWEGWPTSATDDSMCLAESGLSYPCHRLTVGRRSSPAQTREQSEEQITDVHMVSDSDGDDFEDATEFGVDDGEVFGMASSALRKSPMMPENAENEGDALLQFTAEFSSRYGDCHPVFFIGSLEAAFQEAFYVKARDRKLLAIYLHHDESVLTNVFCSQMLCAESIVSYLSQNFITWAWDLTKDSNRARFLTMCNRHFGSVVAQTIRTQKTDQFPLFLIIMGKRSSNEVLNVIQGNTTVDELMMRLMAAMEIFTAQQQEDIKDEDEREARENVKREQDEAYRLSLEADRAKREAHEREMAEQFRLEQIRKEQEEEREAIRLSLEQALPPEPKEENAEPVSKLRIRTPSGEFLERRFLASNKLQIVFDFVASKGFPWDEYKLLSTFPRRDVTQLDPNKSLLEVKLFPQETLFLEAKE

SEQ ID NO: 45876 - protein, 490 aa, Homo sapiens
MILADFQACTGIENIDEAITLLEQNNWDLVAAINGVIPQENGILQSEYGGETIPGPAFNPASHPASAPTSSSSSAFRPVMPSRQIVERQPRMLDFRVEYRDRNVDVVLEDTCTVGEIKQILENELQIPVSKMLLKGWKTGDVEDSTVLKSLHLPKNNSLYVLTPDLPPPSSSSHAGALQEFSSRYGDCHPVFFIGSLEAAFQEAFYVKARDRKLLAIYLHHDESVLTNVFCSQMLCAESIVSYLSQNFITWAWDLTKDSNRARFLTMCNRHFGSVVAQTIRTQKTDQFPLFLIIMGKRSSNEVLNVIQGNTTVDELMMRLMAAMEIFTAQQQEDIKDEDEREARENVKREQDEAYRLSLEADRAKREAHEREMAEQFRLEQIRKEQEEEREAIRLSLEQALPPEPKEENAEPVSKLRIRTPSGEFLERRFLASNKLQIVFDFVASKGFPWDEYKLLSTFPRRDVTQLDPNKSLLEVKLFPQETLFLEAKE

SEQ ID NO: 45877 - protein, 650 aa, Homo sapiens; identical to SEQ ID NO: 45875

SEQ ID NO: 45878 - protein, 498 aa, Homo sapiens
MASNMDREMILADFQACTGIENIDEAITLLEQNNWDLVAAINGVIPQENGILQSEYGGETIPGPAFNPASHPASAPTSSSSSAFRPVMPSRQIVERQPRMLDFRVEYRDRNVDVVLEDTCTVGEIKQILENELQIPVSKMLLKGWKTGDVEDSTVLKSLHLPKNNSLYVLTPDLPPPSSSSHAGTLQQFSYRYGDCHPVFFIGSLEAAFQEAFYVKARDRKLLAIYLHHDESVLTNVFCSQMLCAESIVSYLSQNFITWAWDLTKDSNRARFLTMCNRHFGSVVAQTIRTQKTDQFPLFLIIMGKRSSNEVLNVIQGNTTVDELMMRLMAAMEIFTAQQQEDIKDEDEREARENVKREQDEAYRLSLEADRAKREAHEREMAEQFRLEQIRKEQEEEREAIRLSLEQALPPEPKEENAEPVSKLRIRTPSGEFLERRFLASNKLQIVFDFVASKGFPWDEYKLLSTFPRRDVTQLDPNKSLLEVKLFPQETLFLEAKE

SEQ ID NO: 45879 - protein, 408 aa, Homo sapiens [sequence omitted]

SEQ ID NO: 45880 - protein, 316 aa, Homo sapiens
MTQGKLSVANKAPGTEGQQQVHGEKKEAPAVPSAPPSYEEATSGEGMKAGAFPPAPTAVPLHPSWAYVDPSSSSSYDNGFPTGDHELFTTFSWDDQKVRRVFVRKVYTILLIQLLVTLAVVALFTFCDPVKDYVQANPGWYWASYAVFFATYLTLACCSGPRRHFPWNLILLTVFTLSMAYLTGMLSSYYNTTSVLLCLGITALVCLSVTVFSFQTKFDFTSCQGVLFVLLMTLFFSGLILAILLPFQYVPWLHAVYAALGAGVFTLFLALDTQLLMGNRRHSLSPEEYIFGALNIYLDIIYIFTFFLQLFGTNRE

SEQ ID NO: 45881 - protein, 316 aa, Homo sapiens; identical to SEQ ID NO: 45880

SEQ ID NO: 45882 - protein, 270 aa, Homo sapiens
MKAGAFPPAPTAVPLHPSWAYVDPSSSSSYDNGFPTGDHELFTTFSWDDQKVRRVFVRKVYTILLIQLLVTLAVVALFTFCDPVKDYVQANPGWYWASYAVFFATYLTLACCSGPRRHFPWNLILLTVFTLSMAYLTGMLSSYYNTTSVLLCLGITALVCLSVTVFSFQTKFDFTSCQGVLFVLLMTLFFSGLILAILLPFQYVPWLHAVYAALGAGVFTLFLALDTQLLMGNRRHSLSPEEYIFGALNIYLDIIYIFTFFLQLFGTNRE

SEQ ID NO: 45883 - protein, 390 aa, Homo sapiens
MDFWLWPLYFLPVSGALRILPEVKVEGELGGSVTIKCPLPEMHVRIYLCREMAGSGTCGTVVSTTNFIKAEYKGRVTLKQYPRKNLFLVEVTQLTESDSGVYACGAGMNTDRGKTQKVTLNVHSEYEPSWEEQPMPETPKWFHLPYLFQMPAYASSSKFVTRVTTPAQRGKVPPVHHSSPTTQITHRPRVSRASSVAGDKPRTFLPSTTASKISALEGLLKPQTPSYNHHTRLHRQRALDYGSQSGREGQGFHILIPTILGLFLLALLGLVVKRAVERRKALSRRARRLAVRMRALESSQRPRGSPRPRSQNNIYSACPRRARGADAAGTGEAPVPGPGAPLPPAPLQVSESPWLHAPSLKTSCEYVSLYHQPAAMMEDSDSDDYINVPA

SEQ ID NO: 45884 - protein, 306 aa, Homo sapiens
MDFWLWPLYFLPVSGALRILPEVKVEGELGGSVTIKCPLPEMHVRIYLCREMAGSGTCGTVVSTTNFIKAEYKGRVTLKQYPRKNLFLVEVTQLTESDSGVYACGAGMNTDRGKTQKVTLNVHSEYEPSWEEQPMPETPKWFHLPYLFQMPAYASSSKFVTRVTTPAQRGKVPPVHHSSPTTQITHRPRVSRASSVAGDKPRTFLPSTTASKISALEGLLKPQTPSYNHHTRLHRQSPLQAGPPTGREDARPGELPEAPRVAATALPKQHLQRLPAARSWSGRCRHRGGPRSRPRSAVAPRPAAGV

SEQ ID NO: 45885 - protein, 278 aa, Homo sapiens
MDFWLWPLYFLPEYEPSWEEQPMPETPKWFHLPYLFQMPAYASSSKFVTRVTTPAQRGKVPPVHHSSPTTQITHRPRVSRASSVAGDKPRTFLPSTTASKISALEGLLKPQTPSYNHHTRLHRQRALDYGSQSGREGQGFHILIPTILGLFLLALLGLVVKRAVERRKALSRRARRLAVRMRALESSQRPRGSPRPRSQNNIYSACPRRARGADAAGTGEAPVPGPGAPLPPAPLQVSESPWLHAPSLKTSCEYVSLYHQPAAMMEDSDSDDYINVPA

SEQ ID NO: 45886 - protein, 151 aa, Homo sapiens
MDFWLWPLYFLPVSGALRILPEVKVEGELGGSVTIKCPLPEMHVRIYLCREMAGSGTCGTVVSTTNFIKAEYKGRVTLKQYPRKNLFLVEVTQLTESDSGVYACGAGMNTDRGKTQKVTLNVHSEYEPSWEEQPMPETPKWFHLPYLFQMP

SEQ ID NO: 45887 - protein, 147 aa, Homo sapiens
MDFWLWPLYFLPVSGALRILPEVKVEGELGGSVTIKCPLPEMHVRIYLCREMAGSGTCGTVVSTTNFIKAEYKGRVTLKQYPRKNLFLVEVTQLTESDSGVYACGAGMNTDRGKTQKVTLNVHSEYEPSWEEQPMPETPKWFHLPYL

SEQ ID NO: 45888 - protein, 141 aa, Homo sapiens
MDFWLWPLYFLPEMESCCVAQDGLELVALSDPPGSASQSAGITVSGALRILPEVKVEGELGGSVTIKCPLPEMHVRIYLCREMAGSGTCGTVVSTTNFIKAEYKGRVTLKQYPRKNLFLVEVTQLTESDSGVYACGAGMNT

SEQ ID NO: 45889 - protein, 465 aa, Homo sapiens [sequence omitted]

SEQ ID NO: 45890 - protein, 549 aa, Homo sapiens
MRRPRGEPGPRAPRPTEGATCAGPGESWSPSPNSMLRVLLSAQTSPARLSGLLLIPPVQPCCLGPSKWGDRPVGGGPSAGPVQGLQRLLEQAKSPGELLRWLGQNPSKVRAHHYSVALRRLGQLLGSRPRPPPVEQVTLQDLSQLIIRNCPSFDIHTIHVCLHLAVLLGFPSDGPLVCALEQERRLRLPPKPPPPLQPLLRGGQGLEAALSCPRFLRYPRQHLISSLAEARPEELTPHVMVLLAQHLARHRLREPQLLEAIAHFLVVQETQLSSKVVQKLVLPFGRLNYLPLEQQFMPCLERILAREAGVAPLATVNILMSLCQLRCLPFRALHFVFSPGFINYISGTPHALIVRRYLSLLDTAVELELPGYRGPRLPRRQQVPIFPQPLITDRARCKYSHKDIVAEGLRQLLGEEKYRQDLTVPPGYCTDFLLCASSSGAVLPVRTQDPFLPYPPRSCPQGQAASSATTRDPAQRVVLVLRERWHFCRDGRVLLGSRALRERHLGLMGYQLLPLPFEELESQRGLPQLKSYLRQKLQALGLRWGPEGG

SEQ ID NO: 45891 - protein, 408 aa, Homo sapiens
MRRPRGEPGPRAPRPTEGATCAGPGESCFPSDGPLVCALEQERRLRLPPKPPPPLQPLLRGGQGLEAALSCPRFLRYPRQHLISSLAEARPEELTPHVMVLLAQHLARHRLREPQLLEAIAHFLVVQETQLSSKVVQKLVLPFGRLNYLPLEQQFMPCLERILAREAGVAPLATVNILMSLCQLRCLPFRALHFVFSPGFINYISGTPHALIVRRYLSLLDTAVELELPGYRGPRLPRRQQVPIFPQPLITDRARCKYSHKDIVAEGLRQLLGEEKYRQDLTVPPGYCTDFLLCASSSGAVLPVRTQDPFLPYPPRSCPQGQAASSATTRDPAQRVVLVLRERWHFCRDGRVLLGSRALRERHLGLMGYQLLPLPFEELESQRGLPQLKSYLRQKLQALGLRWGPEGG

SEQ ID NO: 45892 - protein, 159 aa, Homo sapiens
MLRVLLSAQTSPARLSGLLLIPPVQPCCLGPSKWGDRPVGGGPSAGPVQGLQRLLEQAKSPGELLRWLGQNPSKVRAHHYSVALRRLGQLLGSRPRPPPVEQVTLQDLSQLIIRNCPSFDIHTIHVCLHLAVLLGGTEVGPALWATELPAPGTAVYALP

SEQ ID NO: 45893 - protein, 522 aa, Homo sapiens
MRRPRGEPGPRAPRPTEGATCAGPGESWSPSPNSMLRVLLSAQTSPARLSGLLLIPPVQPCCLGPSKWGDRPVGGGPSAGPVQGLQRLLEQAKSPGELLRWLGQNPSKVRAHHYSVALRRLGQLLGSRPRPPPVEQVTLQDLSQLIIRNCPSFDIHTIHVCLHLAVLLGFPSDGPLVCALEQERRLRLPPKPPPPLQPLLREARPEELTPHVMVLLAQHLARHRLREPQLLEAIAHFLVVQETQLSSKVVQKLVLPFGRLNYLPLEQQFMPCLERILAREAGVAPLATVNILMSLCQLRCLPFRALHFVFSPGFINYISGTPHALIVRRYLSLLDTAVELELPGYRGPRLPRRQQVPIFPQPLITDRARCKYSHKDIVAEGLRQLLGEEKYRQDLTVPPGYCTDFLLCASSSGAVLPVRTQDPFLPYPPRSCPQGQAASSATTRDPAQRVVLVLRERWHFCRDGRVLLGSRALRERHLGLMGYQLLPLPFEELESQRGLPQLKSYLRQKLQALGLRWGPEGG

SEQ ID NO: 45894 - protein, 392 aa, Homo sapiens
MEAPLVSLDEEFEDLRPSCSEDPEEKPQCFYGSSPHHLEDPSLSELENFSSEIISFKSMEDLVNEFDEKLNVCFRNYNAKTENLAPVKNQLQIQEEEETLQDEEVWDALTDNYIPSLSEDWRDPNIEALNGNCSDTEIHEKEEEEFNEKSENDSGINEEPLLTADQVIEEIEEMMQNSPDPEEEEEVLEEEDGGETSSQADSVLLQEMQALTQTFNNNWSYEGLRHMSGSELTELLDQVEGAIRDFSEELVQQLARRDELEFEKEVKNSFITVLIEVQNKQKEQRELMKKRRKEKGLSLQSSRIEKGNQMPLKRFSMEGISNILQSGIRQTFGSSGTDKQYLNTVIPYEKKASPPSVEDLQMLTNILFAMKEDNEKVPTLLTDYILKVLCPT

SEQ ID NO: 45895 - protein, 104 aa, Homo sapiens
MEAPLVSLDEEFEDLRPSCSEDPEEKPQCFYGSSPHHLEDPSLSELENFSSEIISFKSMEDLVNEFDEKLNVCFRNYNAKTENLAPVKNQLQIQEEEETLQDEE

SEQ ID NO: 45896 - protein, 104 aa, Homo sapiens; identical to SEQ ID NO: 45895

SEQ ID NO: 45897 - protein, 472 aa, Homo sapiens
MTANGTAEAVQIQFGLINCGNKYLTAEAFGFKVNASASSLKKNHLGRYLAADKDGNVTCEREVPGPDCRFLIVAHDDGRWSLQSEAHRRYFGGTEDRLSCFAQTVSPAEKWSVHIAMHPQVNIYSVTRKRYAHLSARPADEIAVDRDVPWGVDSLITLAFQDQRYSVQTADHRFLRHDGRLVARPEPATGYTLEFRSGKVAFRDCEGRYLAPSGPSGTLKAGKATKVGKDELFALEQSCAQVVLQAANERNVSTRQGMDLSANQDEETDQETFQLEIDRDTKKCAFRTHTGKYWTLTATGGVQSTASSKNASCYFDIEWRDRRITLRASNGKFVTSKKNGQLAASVETAGDSELFLMKLINRPIIVFRGEHGFIGCRKVTGTLDANRSSYDVFQLEFNDGAYNIKDSTGKYWTVGSDSAVTSSGDTPVDFFFEFCDYNKVAIKVGGRYLKGDHAGVLKASAETVDPASLWEY

SEQ ID NO: 45898 - protein, 493 aa, Homo sapiens
MTANGTAEAVQIQFGLINCGNKYLTAEAFGFKVNASASSLKKKQIWTLEQPPDEAGSAAVCLRSHLGRYLAADKDGNVTCEREVPGPDCRFLIVAHDDGRWSLQSEAHRRYFGGTEDRLSCFAQTVSPAEKWSVHIAMHPQVNIYSVTRKRYAHLSARPADEIAVDRDVPWGVDSLITLAFQDQRYSVQTADHRFLRHDGRLVARPEPATGYTLEFRSGKVAFRDCEGRYLAPSGPSGTLKAGKATKVGKDELFALEQSCAQVVLQAANERNVSTRQGMDLSANQDEETDQETFQLEIDRDTKKCAFRTHTGKYWTLTATGGVQSTASSKNASCYFDIEWRDRRITLRASNGKFVTSKKNGQLAASVETAGDSELFLMKLINRPIIVFRGEHGFIGCRKVTGTLDANRSSYDVFQLEFNDGAYNIKDSTGKYWTVGSDSAVTSSGDTPVDFFFEFCDYNKVAIKVGGRYLKGDHAGVLKASAETVDPASLWEY

SEQ ID NO: 45899 - protein, 215 aa, Homo sapiens
MDLSANQDEETDQETFQLEIDRDTKKCAFRTHTGKYWTLTATGGVQSTASSKNASCYFDIEWRDRRITLRASNGKFVTSKKNGQLAASVETAGDSELFLMKLINRPIIVFRGEHGFIGCRKVTGTLDANRSSYDVFQLEFNDGAYNIKDSTGKYWTVGSDSAVTSSGDTPVDFFFEFCDYNKVAIKVGGRYLKGDHAGVLKASAETVDPASLWEY

SEQ ID NO: 45900 - protein, 516 aa, Homo sapiens
MPTNGLHQVLKIQFGLVNDTDRYLTAESFGFKVNASAPSLKRKQTWVLEPDPGQGTAVLLRSSHLGRYLSAEEDGRVACEAEQPGRDCRFLVLPQPDGRWVLRSEPHGRFFGGTEDQLSCFATAVSPAELWTVHLAIHPQAHLLSVSRRRYVHLCPREDEMAADGDKPWGVDALLTLIFRSRRYCLKSCDSRYLRSDGRLVWEPEPRACYTLEFKAGKLAFKDCDGHYLAPVGPAGTLKAGRNTRPGKDELFDLEESHPQVVLVAANHRYVSVRQGVNVSANQDDELDHETFLMQIDQETKKCTFYSSTGGYWTLVTHGGIHATATQVSANTMFEMEWRGRRVALKASNGRYVCMKKNGQLAAISDFVGPPPRPAWTGKVAGGAAQQTLSPPGKDEEFTLKLINRPILVLRGLDGFVCHHRGSNQLDTNRSVYDVFHLSFSDGAYRIRGRDGGFWYTGSHGSVCSDGERAEDFVFEFRERGRLAIRARSGKYLRGGASGLLRADADAPAGTALWEY

SEQ ID NO: 45901 - protein, 492 aa, Homo sapiens
MPTNGLHQVLKIQFGLVNDTDRYLTAESFGFKVNASAPSLKRKQTWVLEPDPGQGTAVLLRSSHLGRYLSAEEDGRVACEAEQPGRDCRFLVLPQPDGRWVLRSEPHGRFFGGTEDQLSCFATAVSPAELWTVHLAIHPQAHLLSVSRRRYVHLCPREDEMAADGDKPWGVDALLTLIFRSRRYCLKSCDSRYLRSDGRLVWEPEPRACYTLEFKAGKLAFKDCDGHYLAPVGPAGTLKAGRNTRPGKDELFDLEESHPQVVLVAANHRYVSVRQGVNVSANQDDELDHETFLMQIDQETKKCTFYSSTGGYWTLVTHGGIHATATQVSANTMFEMEWRGRRVALKASNGRYVCMKKNGQLAAISDFVGKDEEFTLKLINRPILVLRGLDGFVCHHRGSNQLDTNRSVYDVFHLSFSDGAYRIRGRDGGFWYTGSHGSVCSDGERAEDFVFEFRERGRLAIRARSGKYLRGGASGLLRADADAPAGTALWEY

SEQ ID NO: 45902 - protein, 710 aa, Homo sapiens
MLTTLKPFGSVSVESKMNNKAGSFFWNLRQFSTLVSTSRTMRLCCLGLCKPKIVHSNWNILNNFHNRMQSTDIIRYLFQDAFIFKSDVGFQTKGISTLTALRIERLLYAKRLFFDSKQSLVPVDKSDDELKKVNLNHEVSNEDVLTKETKPNRISSRKLSEECNSLSDVLDAFSKAPTFPSSNYFTAMWTIAKRLSDDQKRFEKRLMFSHPAFNQLCEHMMREAKIMQYKYLLFSLHAIVKLGIPQNTILVQTLLRVTQERINECDEICLSVLSTVLEAMEPCKNVHVLRTGFRILVDQQVWKIEDVFTLQVVMKCIGKDAPIALKRKLEMKALRELDRFSVLNSQHMFEVLAAMNHRSLILLDECSKVVLDNIHGCPLRIMINILQSCKDLQYHNLDLFKGLADYVAATFDIWKFRKVLFILILFENLGFRPVGLMDLFMKRIVEDPESLNMKNILSILHTYSSLNHVYKCQNKEQFVEVMASALTGYLHTISSENLLDAVYSFCLMNYFPLAPFNQLLQKDIISELLTSDDMKNAYKLHTLDTCLKLDDTVYLRDIALSLPQLPRELPSSHTNAKVAEVLSSLLGGEGHFSKDVHLPHNYHIDFEIRMDTNRNQVLPLSDVDTTSATDIQRVAVLCVSRSAYCLGSSHPRGFLAMKMRHLNAMGFHVILVNNWEMDKLEMEDAVTFLKTKIYSVEALPVAAVNVQSTQ

SEQ ID NO: 45903 - protein, 710 aa, Homo sapiens; identical to SEQ ID NO: 45902

SEQ ID NO: 45904 - protein, 710 aa, Homo sapiens; identical to SEQ ID NO: 45902

SEQ ID NO: 45905 - protein, 124 aa, Homo sapiens
MLTTLKPFGSVSVESKMNNKAGSFFWNLRQFSTLVSTSRTMRLCCLGLCKPKIVHSNWNILNNFHNRMQSTDIIRYLFQDAFIFKSDVGFQTKGISTLTALRIERLLYAKRLFFDSKQSLVPVD

SEQ ID NO: 45906 - protein, 764 aa, Homo sapiens
MAATLKSLKLVRYRAFCSPSAFGAVRSVSYWNVSSTQHGGQDPPEHISLCHSAKKVKNICSTFSSRRILTTSSAHPGLEFSKTSSSKASTLQLGSPRATGVDEEDVEVFDSFENMRVFLQLRPEYRVHSYNASETSQLLSVSEGELILHKVRVNQNNLQAQVIVDYLCKLSSLPAEQHPVLLGSTSFALLCQLSVKKIQLFDTQDLINVLKAFVILGIPHSHSMLDVYETKCCHQVWEMNMDQLLLVADLWRYLGRKVPRFLNIFSSYLNLHWKDLSLSQLVHLIYVIGENRQVSQDLMQKLESLILKYIDLINLEEVGTICLGFFKSSTNLSEFVMRKIGDLACANIQHLSSRSLVNIVKMFRFTHVDHINFMKQIGEIAPQRIPSLGVQGVMHLTLYCSALRFLNEGVMNAVAASLPPRVAHCRSKDVAKILWSFGTLNYKPPNAEEFYSSLISEIHRKMPEFNQYPEHLPTCLLGLAFLEYFPVELIDFALSPGFVRLAQERTKFDLLKELYTLDGTVGIECPDYRGNRLSTHLQQEGSELLWYLAEKDMNSKPEFLETVFLLETMLGGPQYVKHHMILPHTRSSDLEVQLDVNLKPLPFNREATPAENVAKLRLEHVGVSLTDDLMNKLLKGKARGHFQGKTESEPGQQPMELENKAAVPLGGFLCNVADKSGAMEMAGLCPAACMQTPRMKLAVQFTNRNQYCYGSRDLLGLHNMKRRQLARLGYRVVELSYWEWLPLLKRTRLEKLAFLHEKVFTSAL

SEQ ID NO: 45907 - protein, 60 aa, Homo sapiens
MACQGREECWCQSRIARTLPADQKPECRPYWEKDDASMPLPFDLTDIVSELRGQLLEAKP

SEQ ID NO: 45908 - protein, 209 aa, Homo sapiens
MLDDLNATHQHCVLAGSQPRFSSTHRVAECSTGTLDYILQRCQLALQNVCDDVDNDDVSLKSFEPAVLKQGEEIHNEVEFEWLRQFWFQGNRYRKCTDWWCQPMAQLEALWKKMEGVTNAVLHEVKREGLPVEQRNEILTAILASLTARQNLRREWHARCQSRIARTLPADQKPECRPYWEKDDASMPLPFDLTDIVSELRGQLLEAKP

SEQ ID NO: 45909 - protein, 106 aa, Homo sapiens
MAQLEALWKKMEGVTNAVLHEVKREGLPVEQRNEILTAILASLTARQNLRREWHARCQSRIARTLPADQKPECRPYWEKDDASMPLPFDLTDIVSELRGQLLEAKP

SEQ ID NO: 45910 - protein, 106 aa, Homo sapiens; identical to SEQ ID NO: 45909

SEQ ID NO: 45911 - protein, 127 aa, Homo sapiens
MEWRKVSECNSVEPCREVKKWPYRCIHHGKNFSRMTNAVLHEVKREGLPVEQRNEILTAILASLTARQNLRREWHARCQSRIARTLPADQKPECRPYWEKDDASMPLPFDLTDIVSELRGQLLEAKP

SEQ ID NO: 45912 - protein, 505 aa, Homo sapiens
MKRTPTAEEREREAKKLRLLEELEDTWLPYLTPKDDEFYQQWQLKYPKLILREASSVSEELHKEVQEAFLTLHKHGCLFRDLVRIQGKDLLTPVSRILIGNPGCTYKYLNTRLFTVPWPVKGSNIKHTEAEIAAACETFLKLNDYLQIETIQALEELAAKEKANEDAVPLCMSADFPRVGMGSSYNGQDEVDIKSRAAYNVTLLNFMDPQKMPYLKEEPYFGMGKMAVSWHHDENLVDRSAVAVYSYSCEGPEEESEDDSHLEGRDPDIWHVGFKISWDIETPGLAIPLHQGDCYFMLDDLNATHQHCVLAGSQPRFSSTHRVAECSTGTLDYILQRCQLALQNVCDDVDNDDVSLKSFEPAVLKQGEEIHNEVEFEWLRQFWFQGNRYRKCTDWWCQPMAQLEALWKKMEGVTNAVLHEVKREGLPVEQRNEILTAILASLTARQNLRREWHARCQSRIARTLPADQKPECRPYWEKDDASMPLPFDLTDIVSELRGQLLEAKP

SEQ ID NO: 45913 - protein, 106 aa, Homo sapiens; identical to SEQ ID NO: 45909

SEQ ID NO: 45914 - protein, 4349 aa, Homo sapiens
MTIALLGFAIFLLHCATCEKPLEGILSSSAWHFTHSHYNATIYENSSPKTYVESFEKMGIYLAEPQWAVRYRIISGDVANVFKTEEYVVGNFCFLRIRTKSSNTALLNREVRDSYTLIIQATEKTLELEALTRVVVHILDQNDLKPLFSPPSYRVTISEDMPLKSPICKVTATDADLGQNAEFYYAFNTRSEMFAIHPTSGVVTVAGKLNVTWRGKHELQVLAVDRMRKISEGNGFGSLAALVVHVEPALRKPPAIASVVVTPPDSNDGTTYATVLVDANSSGAEVESVEVVGGDPGKHFKAIKSYARSNEFSLVSVKDINWMEYLHGFNLSLQARSGSGPYFYSQIRGFHLPPSKLSSLKFEKAVYRVQLSEFSPPGSRVVMVRVTPAFPNLQYVLKPSSENVGFKLNARTGLITTTKLMDFHDRAHYQLHIRTSPGQASTVVVIDIVDCNNHAPLFNRSSYDGTLDENIPPGTSVLAVTATDRDHGENGYVTYSIAGPKALPFSIDPYLGIISTSKPMDYELMKRIYTFRVRASDWGSPFRREKEVSIFLQLRNLNDNQPMFEEVNCTGSIRQDWPVGKSIMTMSAIDVDELQNLKYEIVSGNELEYFDLNHFSGVISLKRPFINLTAGQPTSYSLKITASDGKNYASPTTLNITVVKDPHFEVPVTCDKTGVLTQFTKTILHFIGLQNQESSDEEFTSLSTYQINHYTPQFEDHFPQSIDVLESVPINTPLARLAATDPDAGFNGKLVYVIADGNEEGCFDIELETGLLTVAAPLDYEATNFYILNVTVYDLGTPQKSSWKLLTVNVKDWNDNAPRFPPGGYQLTISEDTEVGTTIAELTTKDADSEDNGRVRYTLLSPTEKFSLHPLTGELVVTGHLDRESEPRYILKVEARDQPSKGHQLFSVTDLIITLEDVNDNSPQCITEHNRLKVPEDLPPGTVLTFLDASDPDLGPAGEVRYVLMDGAHGTFRVDLMTGALILERELDFERRAGYNLSLWASDGGRPLARRTLCHVEVIVLDVNENLHPPHFASFVHQGQVQENSPSGTQVIVVAAQDDDSGLDGELQYFLRAGTGLAAFSINQDTGMIQTLAPLDREFASYYWLTVLAVDRGSVPLSSVTEVYIEVTDANDNPPQMSQAVFYPSIQEDAPVGTSVLQLDAWDPDSSSKGKLTFNITSGNYMGFFMIHPVTGLLSTAQQLDRENKDEHILEVTVLDNGEPSLKSTSRVVVGILDVNDNPPIFSHKLFNVRLPERLSPVSPGPVYRLVASDLDEGLNGRVTYSIEDSDEEAFSIDLVTGVVSSSSTFTAGEYNILTIKATDSGQPPLSASVRLHIEWIPWPRPSSIPLAFDETYYSFTVMETDPVNHMVGVISVEGRPGLFWFNISGGDKDMDFDIEKTTGSIVIARPLDTRRRSNYNLTVEVTDGSRTIATQVHIFMIANINHHRPQFLETRYEVRVPQDTVPGVELLRVQAIDQDKGKSLIYTIHGSQDPGSASLFQLDPSSGVLVTVGKLDLGSGPSQHTLTVMVRDQEIPIKRNFVWVTIHVEDGNLHPPRFTQLHYEASVPDTIAPGTELLQVRAMDADRGVNAEVHYSLLKGNSEGFFNINALLGIITLAQKLDQANHAPHTLTVKAEDQGSPQWHDLATVIIHVYPSDRSAPIFSKSEYFVEIPESIPVGSPILLVSAMSPSEVTYELREGNKDGVFSMNSYSGLISTQKKLDHEKISSYQLKIRGSNMAGAFTDVMVVVDIIDENDNAPMFLKSTFVGQISEAAPLYSMIMDKNNNPFVIHASDSDKEANSLLVYKILEPEALKFFKIDPSMGTLTIVSEMDYESMPSFQFCVYVHDQGSPVLFAPRPAQVIIHVRDVNDSPPRFSEQIYEVAIVGPIHPGMELLMVRASDEDSEVNYSIKTGNADEAVTIHPVTGSISVLNPAFLGLSRKLTIRASDGLYQDTALVKISLTQVLDKSLQFDQDVYWAAVKENLQDRKALVILGAQGNHLNDTLSYFLLNGTDMFHMVQSAGVLQTRGVAFDREQQDTHELAVEVRDNRTPQRVAQGLVRVSIEDVNDNPPKFKHLPYYTIIQDGTEPGDVLFQVSATDEDLGTNGAVTYEFAEDYTYFRIDPYLGDISLKKPFDYQALNKYHLKVIARDGGTPSLQSEEEVLVTVRNKSNPLFQSPYYKVRVPENITLYTPILHTQARSPEGLRLIYNIVEEEPLMLFTTDFKTGVLTVTGPLDYESKTKHVFTVRATDTALGSFSEATVEVLVEDVNDNPPTFSQLVYTTSISEGLPAQTPVIQLLASDQDSGRNRDVSYQIVEDGSDVSKFFQINGSTGEMSTVQELDYEAQQHFHVKVRAMDKGDPPLTGETLVVVNVSDINDNPPEFRQPQYEANVSELATCGHLVLKVQAIDPDSRDTSRLEYLILSGNQDRHFFINSSSGIISMFNLCKKHLDSSYNLRVGASDGVFRATVPVYINTTNANKYSPEFQQHLYEAELAENAMVGTKVIDLLAIDKDSGPYGTIDYTIINKLASEKFSINPNGQIATLQKLDRENSTERVIAIKVMARDGGGRVAFCTVKIILTDENDNPPQFKASEYTVSIQSNVSKDSPVIQVLAYDADEGQNADVTYSVNPEDLVKDVIEINPVTGVVKVKDSLVGLENQTLDFFIKAQDGGPPHWNSLVPVRLQVVPKKVSLPKFSEPLYTFSAPEDLPEGSEIGIVKAVAAQDPVIYSLVRGTTPESNKDGVFSLDPDTGVIKVRKPMDHESTKLYQIDVMAHCLQNTDVVSLVSVNIQVGDVNDNRPVFEADPYKAVLTENMPVGTSVIQVTAIDKDTGRDGQVSYRLSADPGSNVHELFAIDSESGWITTLQELDCETCQTYHFHVVAYDHGQTIQLSSQALVQVSITDENDNAPRFASEEYRGSVVENSEPGELVATLKTLDADISEQNRQVTCYITEGDPLGQFGISQVGDEWRISSRKTLDREHTAKYLLRVTASDGKFQASVTVEIFVLDVNDNSPQCSQLLYTGKVHEDVFPGHFILKVSATDLDTDTNAQITYSLHGPGAHEFKLDPHTGELTTLTALDRERKDVFNLVAKATDGGGRSCQADITLHVEDVNDNAPRFFPSHCAVAVFDNTTVKTPVAVVFARDPDQGANAQVVYSLPDSAEGHFSIDATTGVIRLEKPLQVRPQAPLELTVRASDLGTPIPLSTLGTVTVSVVGLEDYLPVFLNTEHSVQVPEDAPPGTEVLQLATLTRPGAEKTGYRVVSGNEQGRFRLDARTGILYVNASLDFETSPKYFLSIECSRKSSSSLSDVTTVMVNITDVNEHRPQFPQDPYSTRVLENALVGDVILTVSATDEDGPLNSDITYSLIGGNQLGHFTIHPKKGELQVAKALDREQASSYSLKLRATDSGQPPLHEDTDIAIQVADVNDNPPRFFQLNYSTTVQENSPIGSKVLQLILSDPDSPENGPPYSFRITKGNNGSAFRVTPDGWLVTAEGLSRRAQEWYQLQIQASDSGIPPLSSLTSVRVHVTEQSHYAPSALPLEIFITVGEDEFQGGMVGKIHATDRDPQDTLTYSLAEEETLGRHFSVGAPDGKIIAAQGLPRGHYSFNVTVSDGTFTTTAGVHVYVWHVGQEALQQAMWMGFYQLTPEELVSDHWRNLQRFLSHKLDIKRANIHLASLQPAEAVAGVDVLLVFEGHSGTFYEFQELASIITHSAKEMEHSVGVQMRSAMPMVPCQGPTCQGQICHNTVHLDPKVGPTYSTARLSILTPRHHLQRSCSCNGTATRFSGQSYVRYRAPAARNWHIHFYLKTLQPQAILLFTNETASVSLKLASGVPQLEYHCLGGFYGNLSSQRHVNDHEWHSILVEEMDASIRLMVDSMGNTSLVVPENCRGLRPERHLLLGGLILLHSSSNVSQGFEGCLDAVVVNEEALDLLAPGKTVAGLLETQALTQCCLHSDYCSQNTCLNGGKCSWTHGAGYVCKCPPQFSGKHCEQGRENCTFAPCLEGGTCILSPKGASCNCPHPYTGDRCEMEARGCSEGHCLVTPEIQRGDWGQQELLIITVAVAFIIISTVGLLFYCRRCKSHKPVAMEDPDLLARSVGVDTQAMPAIELNPLSASSCNNLNQPEPSKASVPNELVTFGPNSKQRPVVCSVPPRLPPAAVPSHSDNEPVIKRTWSSEEMVYPGGAMVWPPTYSRNERWEYPHSEVTQGPLPPSAHRHSTPVVMPEPNGLYGGFPFPLEMENKRAPLPPRYSNQNLEDLMPSRPPSPRERLVAPCLNEYTAISYYHSQFRQGGGGPCLADGGYKGVGMRLSRAGPSYAVCEVEGAPLAGQGQPRVPPNYEGSDMVESDYGSCEEVMF

SEQ ID NO: 45915 - protein, 4589 aa, Homo sapiens
MDIIMGHCVGTRPPACCLILLLFKLLATVSQGLPGTGPLGFHFTHSIYNATVYENSAARTYVNSQSRMGITLIDLSWDIKYRIVSGDEEGFFKAEEVIIADFCFLRIRTKGGNSAILNREIQDNYLLIVKGSVRGEDLEAWTKVNIQVLDMNDLRPLFSPTTYSVTIAESTPLRTSVAQVTATDADIGSNGEFYYYFKNKVDLFSVHPTSGVISLSGRLNYDEKNRYDLEILAVDRGMKLYGNNGVSSTAKLYVHIERINEHAPTIHVVTHVPFSLEKEPTYAVVTVDDLDDGANGEIESVSIVAGDPLDQFFLAKEGKWLNEYKIKERKQIDWESFPYGYNLTLQAKDKGSPQKCSALKAVYIGNPTRDTVPIRFEKEVYDVSISEFSPPGVVVAIVKLSPEPIDVEYKLSPGEDAVYFKINPRSGLIVTARPLNTVKKEVYKLEVTNKEGDLKAQVTISIEDANDHTPEFQQPLYDAYVNESVPVGTSVLTVSASDKDKGENGYITYSIASLNLLPFVINQFTGVISTTEELDFESSPEIYRFIVRASDWGSPYRHESEVNVTIRIGNVNDNSPLFEKVACQGVISYDFPVGGHITAVSAIDIDELELVKYKIISGNELGFFYLNPDSGVLQLKKSLTNSGIKNGNFALRITATDGENLADPMSINISVLHGKVSSKSFSCRETRVAQKLAEKLLIKAKANGKLNLEDGFLDFYSINRQGPYFDKSFPSDVAVKEDLPVGANILKIKAYDADSGFNGKVLFTISDGNTDSCFNIDMETGQLKVLMPMDREHTDLYLLNITIYDLGNPQKSSWRLLTINVEDANDNSPVFIQDSYSVNILESSGIGTEIIQVEARDKDLGSNGEVTYSVLTDTQQFAINSSTGIVYVADQLDRESKANYSLKIEARDKAESGQQLFSVVTLKVFLDDVNDCSPAFIPSSYSVKVLEDLPVGTVIAWLETHDPDLGLGGQVRYSLVNDYNGRFEIDKASGAIRLSKELDYEKQQFYNLTVRAKDKGRPVSLSSVSFVEVEVVDVNENLHTPYFPDFAVVGSVKENSRIGTSVLQVTARDEDSGRDGEIQYSIRDGSGLGRFSIDDESGVITAADILDRETMGSYWLTVYATDRGVVPLYSTIEVYIEVEDVNDNAPLTSEPIYYPVVMENSPKDVSVIQIQAEDPDSSSNEKLTYRITSGNPQNFFAINIKTGLITTTSRKLDREQQAEHFLEVTVTDGGPSPKQSTIWVVVQVLDENDNKPQFPEKVYQIKLPERDRKKRGEPIYRAFAFDRDEGPNAEISYSIVDGNDDGKFFIDPKTGMVSSRKQFTAGSYDILTIKAVDNGRPQKSSTARLHIEWIKKPPPSPIPLTFDEPFYNFTVMESDRVTEIVGVVSVQPANTPLWFDIVGGNFDSAFDAEKGVGTIVIAKPLDAEQRSIYNMSVEVTDGTNVAVTQVFIKVLDNNDNGPEFSQPNYDVTISEDVLPDTEILQIEATDRDEKHKLSYTVHSSIDSISMRKFRIDPSTGVLYTAERLDHEAQDKHILNIMVRDQEFPYRRNLARVIVNVEDANDHSPYFTNPLYEASVFESAALGSAVLQVTALDKDKGENAELIYTIEAGNTGNMFKIEPVLGIITICKEPDMTTMGQFVLSIKVTDQGSPPMSATAIVRISVTMSDNSHPKFIHKDYQAEVNENVDIGTSVILISAISQSTLIYEVKDGDINGIFTINPYSGVITTQKALDYERTSSYQLIIQATNMAGMASNATVNIQIVDENDNAPVFLFSQYSGSLSEAAPINSIVRSLDNSPLVIRATDADSNRNALLVYQIVESTAKKFFTVDSSTGAIRTIANLDHETIAHFHFHVHVRDSGSPQLTAESPVEVNIEVTDVNDNPPVFTQAVFETILLLPTYVGVEVLKVSATDPDSEVPPELTYSLMEGSLDHFLIDSNSGVLTIKNNNLSKDHYMLIVKVSDGKFYSTSMVTIMVKEAMDSGLHFTQSFYSTSISENNTNITKVAIVNAVGNRLNEPLKYSILNPGNKFKIKSTSGVIQTTGVPFDREEQELYELVVEASRELDHLRVARVVVRVNIEDINDNSPVFVGLPYYAAVQVDAEPGTLIYQVTAIDKDKGPNGEVTYVLQDDYGHFEINPNSGNVILKEAFNSDLSNIEYGVTILAKDGGKPSLSTSVELPITIVNKAMPVFDKPFYTASVNEDIRMNTPILSINATSPEGQGIIYIIIDGDPFKQFNIDFDTGVLKVVSPLDYEVTSAYKLTIRASDALTGARAEVTVDLLVNDVNDNPPIFDQPTYNTTLSEASLIGTPVLQVVSIDADSENNKMVHYQIVQDTYNSTDYFHIDSSSGLILTARMLDHELVQHCTLKVRSIDSGFPSLSSEVLVHIYISDVNDNPPVFNQLIYESYVSELAPRGHFVTCVQASDADSSDFDRLEYSILSGNDRTSFLMDSKSGVITLSNHRKQRMEPLYSLNVSVSDGLFTSTAQVHIRVLGANLYSPAFSQSTYVAEVRENVAAGTKVIHVRATDGDPGTYGQISYAIINDFAKDRFLIDSNGQVITTERLDRENPLEGDVSIFVRALDGGGRTTFCTVRVIVVDENDNAPQFMTVEYRASVRADVGRGHLVTQVQAIDPDDGANSRITYSLYSEASVSVADLLEIDPDNGWMVTKGNFNQLKNTVLSFFVKAVDGGIPVKHSLIPVYIHVLPPETFLPSFTQSQYSFTIAEDTAIGSTVDTLRILPSQNVWFSTVNGERPENNKGGIFVIEQETGTIKLDKRLDRETSPAFHFKVAATIPLDKVDIVFTVDVDIKVLDLNDNKPVFETSSYDTIIMEGMPVGTKLTQVRAIDMDWGANGQVTYSLHSDSQPEKVMEAFNIDSNTGWISTLKDLDHETDPTFTFSVVASDLGEAFSLSSTALVSVRVTDINDNAPVFAQEVYRGNVKESDPPGEVVAVLSTWDRDTSDVNRQVSYHITGGNPRGRFALGLVQSEWKVYVKRPLDREEQDIYFLNITATDGLFVTQAMVEVSVSDVNDNSPVCDQVAYTALLPEDIPSNKIILKVSAKDADIGSNGYIRYSLYGSGNSEFFLDPESGELKTLALLDRERIPVYSLMAKATDGGGRFCQSNIHLILEDVNDNPPVFSSDHYNTCVYENTATKALLTRVQAVDPDIGINRKVVYSLADSAGGVFSIDSSSGIIILEQPLDREQQSSYNISVRATDQSPGQSLSSLTTVTITVLDINDNPPVFERRDYLVTVPEDTSPGTQVLAVFATSKDIGTNAEITYLIRSGNEQGKFKINPKTGGISVSEVLDYELCKRFYLVVEAKDGGTPALSAVATVNINLTDVNDNPPKFSQDVYSAVISEDALVGDSVILLIAEDVDSQPNGQIHFSIVNGDRDNEFTVDPVLGLVKVKKKLDRERVSGYSLLVQAVDSGIPAMSSTATVNIDISDVNDNSPVFTPANYTAVIQENKPVGTSILQLVVTDRDSFHNGPPFSFSILSGNEEEEFVLDPHGILRSAVVFQHTESLEYVLCVQAKDSGKPQQVSHTYIRVRVIEESTHKPTAIPLEIFIVTMEDDFPGGVIGKIHATDQDMYDVLTFALKSEQKSLFKVNSHDGKIIALGGLDSGKYVLNVSVSDGRFQVPIDVVVHVEQLVHEMLQNTVTIRFENVSPEDFVGLHMHGFRRTLRNAVLTQKQDSLRIISIQPVAGTNQLDMLFAVEMHSSEFYKPAYLIQKLSNARRHLENIMRISAILEKNCSGLDCQEQHCEQGLSLDSHALMTYSTARISFVCPRFYRNVRCTCNGGLCPGSNDPCVEKPCPGDMQCVSYEASRRPFLCQCPPGKLGECSGHTSLSFAGNSYIKYRLSENSKEEDFKLALRLRTLQSNGIIMYTRANPCIILKIVDGKLWFQLDCGSGPGILGISGRAVNDGSWHSVFLELNRNFTSLSLDDSYVERRRAPLYFQTLSTESSIYFGALVQADNIRSLTDTRVTQVLSGFQGCLDSVILNNNELPLQNKRSSFAEVVGLTELKLGCVLYPDACKRSPCQHGGSCTGLPSGGYQCTCLSQFTGRNCESEITACFPNPCRNGGSCDPIGNTFICNCKAGLTGVTCEEDINECEREECENGGSCVNVFGSFLCNCTPGYVGQYCGLRPVVVPNIQAGHSYVGKEELIGIAVVLFVIFILVVLFIVFRKKVFRKNYSRNNITLVQDPATAALLNKSNGIPFRNLRGSGDGRNVYQEVGPPQVPVRPMAYTPCFQSDSRSNLDKIVDGLGGEHQEMTTFHPESPRILTARRGVVVCSVAPNLPAVSPCRSDCDSIRKNGWDAGTENKGVDDPGEVTCFAGSNKGSNSEVQSLSSFQSDSGDDNASIVTVIQLVNNVVDTIENEVSVMDQGQNYNRAYHWDTSDWMPGARLSDIEEVPNYENQDGGSAHQGSTRELESDYYLGGYDIDSEYPPPHEEEFLSQDQLPPPLPEDFPDQYEALPPSQPVSLASTLSPDCRRRPQFHPSQYLPPHPFPNETDLVGPPASCEFSTFAVSMNQGTEPTGPADSVSLSLHNSRGTSSSDVSANCGFDDSEVAMSDYESVGELSLASLHIPFVETQHQTQV

SEQ ID NO: 45916 - protein, 4557 aa, Homo sapiens
MDIIMGHCVGTRPPACCLILLLFKLLATVSQGLPGTGPLGFHFTHSIYNATVYENSAARTYVNSQSRMGITLIDLSWDIKYRIVSGDEEGFFKAEEVIIADFCFLRIRTKGGNSAILNREIQDNYLLIVKGSVRGEDLEAWTKVNIQVLDMNDLRPLFSPTTYSVTIAESTPLRTSVAQVTATDADIGSNGEFYYYFKNKVDLFSVHPTSGVISLSGRLNYDEKNRYDLEILAVDRGMKLYGNNGVSSTAKLYVHIERINEHAPTIHVVTHVPFSLEKEPTYAVVTVDDLDDGANGEIESVSIVAGDPLDQFFLAKEGKWLNEYKIKERKQIDWESFPYGYNLTLQAKDKGSPQKCSALKAVYIGNPTRDTVPIRFEKEVYDVSISEFSPPGVVVAIVKLSPEPIDVEYKLSPGEDAVYFKINPRSGLIVTARPLNTVKKEVYKLEVTNKEGDLKAQVTISIEDANDHTPEFQQPLYDAYVNESVPVGTSVLTVSASDKDKGENGYITYSIASLNLLPFVINQFTGVISTTEELDFESSPEIYRFIVRASDWGSPYRHESEVNVTIRIGNVNDNSPLFEKVACQGVISYDFPVGGHITAVSAIDIDELELVKYKIISGNELGFFYLNPDSGVLQLKKSLTNSGIKNGNFALRITATDGENLADPMSINISVLHGKVSSKSFSCRETRVAQKLAEKLLIKAKANGKLNLEDGFLDFYSINRQGPYFDKSFPSDVAVKEDLPVGANILKIKAYDADSGFNGKVLFTISDGNTDSCFNIDMETGQLKVLMPMDREHTDLYLLNITIYDLGNPQKSSWRLLTINVEDANDNSPVFIQDSYSVNILESSGIGTEIIQVEARDKDLGSNGEVTYSVLTDTQQFAINSSTGIVYVADQLDRESKANYSLKIEARDKAESGQQLFSVVTLKVFLDDVNDCSPAFIPSSYSVKVLEDLPVGTVIAWLETHDPDLGLGGQVRYSLVNDYNGRFEIDKASGAIRLSKELDYEKQQFYNLTVRAKDKGRPVSLSSVSFVEVEVVDVNENLHTPYFPDFAVVGSVKENSRIGTSVLQVTARDEDSGRDGEIQYSIRDGSGLGRFSIDDESGVITAADILDRETMGSYWLTVYATDRGVVPLYSTIEVYIEVEDVNDNAPLTSEPIYYPVVMENSPKDVSVIQIQAEDPDSSSNEKLTYRITSGNPQNFFAINIKTGLITTTSRKLDREQQAEHFLEVTVTDGGPSPKQSTIWVVVQVLDENDNKPQFPEKVYQIKLPERDRKKRGEPIYRAFAFDRDEGPNAEISYSIVDGNDDGKFFIDPKTGMVSSRKQFTAGSYDILTIKAVDNGRPQKSSTARLHIEWIKKPPPSPIPLTFDEPFYNFTVMESDRVTEIVGVVSVQPANTPLWFDIVGGNFDSAFDAEKGVGTIVIAKPLDAEQRSIYNMSVEVTDGTNVAVTQVFIKVLDNNDNGPEFSQPNYDVTISEDVLPDTEILQIEATDRDEKHKLSYTVHSSIDSISMRKFRIDPSTGVLYTAERLDHEAQDKHILNIMVRDQEFPYRRNLARVIVNVEDANDHSPYFTNPLYEASVFESAALGSAVLQVTALDKDKGENAELIYTIEAGNTGNMFKIEPVLGIITICKEPDMTTMGQFVLSIKVTDQGSPPMSATAIVRISVTMSDNSHPKFIHKDYQAEVNENVDIGTSVILISAISQSTLIYEVKDGDINGIFTINPYSGVITTQKALDYERTSSYQLIIQATNMAGMASNATVNIQIVDENDNAPVFLFSQYSGSLSEAAPINSIVRSLDNSPLVIRATDADSNRNALLVYQIVESTAKKFFTVDSSTGAIRTIANLDHETIAHFHFHVHVRDSGSPQLTAESPVEVNIEVTDVNDNPPVFTQAVFETILLLPTYVGVEVLKVSATDPDSEVPPELTYSLMEGSLDHFLIDSNSGVLTIKNNNLSKDHYMLIVKVSDGKFYSTSMVTIMVKEAMDSGLHFTQSFYSTSISENNTNITKVAIVNAVGNRLNEPLKYSILNPGNKFKIKSTSGVIQTTGVPFDREEQELYELVVEASRELDHLRVARVVVRVNIEDINDNSPVFVGLPYYAAVQVDAEPGTLIYQVTAIDKDKGPNGEVTYVLQDDYGHFEINPNSGNVILKEAFNSDLSNIEYGVTILAKDGGKPSLSTSVELPITIVNKAMPVFDKPFYTASVNEDIRMNTPILSINATSPEGQGIIYIIIDGDPFKQFNIDFDTGVLKVVSPLDYEVTSAYKLTIRASDALTGARAEVTVDLLVNDVNDNPPIFDQPTYNTTLSEASLIGTPVLQVVSIDADSENNKMVHYQIVQDTYNSTDYFHIDSSSGLILTARMLDHELVQHCTLKVRSIDSGFPSLSSEVLVHIYISDVNDNPPVFNQLIYESYVSELAPRGHFVTCVQASDADSSDFDRLEYSILSGNDRTSFLMDSKSGVITLSNHRKQRMEPLYSLNVSVSDGLFTSTAQVHIRVLGANLYSPAFSQSTYVAEVRENVAAGTKVIHVRATDGDPGTYGQISYAIINDFAKDRFLIDSNGQVITTERLDRENPLEGDVSIFVRALDGGGRTTFCTVRVIVVDENDNAPQFMTVEYRASVRADVGRGHLVTQVQAIDPDDGANSRITYSLYSEASVSVADLLEIDPDNGWMVTKGNFNQLKNTVLSFFVKAVDGGIPVKHSLIPVYIHVLPPETFLPSFTQSQYSFTIAEDTAIGSTVDTLRILPSQNVWFSTVNGERPENNKGGIFVIEQETGTIKLDKRLDRETSPAFHFKVAATIPLDKVDIVFTVDVDIKVLDLNDNKPVFETSSYDTIIMEGMPVGTKLTQVRAIDMDWGANGQVTYSLHSDSQPEKVMEAFNIDSNTGWISTLKDLDHETDPTFTFSVVASDLGEAFSLSSTALVSVRVTDINDNAPVFAQEVYRGNVKESDPPGEVVAVLSTWDRDTSDVNRQVSYHITGGNPRGRFALGLVQSEWKVYVKRPLDREEQDIYFLNITATDGLFVTQAMVEVSVSDVNDNSPVCDQVAYTALLPEDIPSNKIILKVSAKDADIGSNGYIRYSLYGSGNSEFFLDPESGELKTLALLDRERIPVYSLMAKATDGGGRFCQSNIHLILEDVNDNPPVFSSDHYNTCVYENTATKALLTRVQAVDPDIGINRKVVYSLADSAGGVFSIDSSSGIIILEQPLDREQQSSYNISVRATDQSPGQSLSSLTTVTITVLDINDNPPVFERRDYLVTVPEDTSPGTQVLAVFATSKDIGTNAEITYLIRSGNEQGKFKINPKTGGISVSEVLDYELCKRFYLVVEAKDGGTPALSAVATVNINLTDVNDNPPKFSQDVYSAVISEDALVGDSVILLIAEDVDSQPNGQIHFSIVNGDRDNEFTVDPVLGLVKVKKKLDRERVSGYSLLVQAVDSGIPAMSSTATVNIDISDVNDNSPVFTPANYTAVIQENKPVGTSILQLVVTDRDSFHNGPPFSFSILSGNEEEEFVLDPHGILRSAVVFQHTESLEYVLCVQAKDSGKPQQVSHTYIRVRVIEESTHKPTAIPLEIFIVTMEDDFPGGVIGKIHATDQDMYDVLTFALKSEQKSLFKVNSHDGKIIALGGLDSGKYVLNVSVSDGRFQVPIDVVVHVEQLVHEMLQNTVTIRFENVSPEDFVGLHMHGFRRTLRNAVLTQKQDSLRIISIQPVAGTNQLDMLFAVEMHSSEFYKPAYLIQKLSNARRHLENIMRISAILEKNCSGLDCQEQHCEQGLSLDSHALMTYSTARISFVCPRFYRNVRCTCNGGLCPGSNDPCVEKPCPGDMQCVSYEASRRPFLCQCPPGKLGECSGHTSLSFAGNSYIKYRLSENSKEEDFKLALRLRTLQSNGIIMYTRANPCIILKIVDGKLWFQLDCGSGPGILGISGRAVNDGSWHSVFLELNRNFTSLSLDDSYVERRRAPLYFQTLSTESSIYFGALVQADNIRSLTDTRVTQVLSGFQGCLDSVILNNNELPLQNKRSSFAEVVGLTELKLGCVLYPDACKRSPCQHGGSCTGLPSGGYQCTCLSQFTGRNCESEITACFPNPCRNGGSCDPIGNTFICNCKAGLTGVTCEEDINECEREECENGGSCVNVFGSFLCNCTPGYVGQYCGLRPVVVPNIQAGHSYVGKEELIGIAVVLFVIFILVVLFIVFRKKVFRKNYSRNNITLVQDPATAALLNKSNGIPFRNLRGSGDGRNVYQEVGPPQVPVRPMAYTPCFQSDSRSNLDKIVDGLGGEHQEMTTFHPESPRILTARRGVVVCSVAPNLPAVSPCRSDCDSIRKNGWDAGTENKGVDDPGEVTCFAGSNKGSNSEVQSLSSFQSDSGDDNAYHWDTSDWMPGARLSDIEEVPNYENQDGGSAHQGSTRELESDYYLGGYDIDSEYPPPHEEEFLSQDQLPPPLPEDFPDQYEALPPSQPVSLASTLSPDCRRRPQFHPSQYLPPHPFPNETDLVGPPASCEFSTFAVSMNQGTEPTGPADSVSLSLHNSRGTSSSDVSANCGFDDSEVAMSDYESVGELSLASLHIPFVETQHQTQV

SEQ ID NO: 45917 - protein, 1254 aa, Homo sapiens
MDIIMGHCVGTRPPACCLILLLFKLLATVSQGLPGTGPLGFHFTHSIYNATVYENSAARTYVNSQSRMGITLIDLSWDIKYRIVSGDEEGFFKAEEVIIADFCFLRIRTKGGNSAILNREIQDNYLLIVKGSVRGEDLEAWTKVNIQVLDMNDLRPLFSPTTYSVTIAESTPLRTSVAQVTATDADIGSNGEFYYYFKNKVDLFSVHPTSGVISLSGRLNYDEKNRYDLEILAVDRGMKLYGNNGVSSTAKLYVHIERINEHAPTIHVVTHVPFSLEKEPTYAVVTVDDLDDGANGEIESVSIVAGDPLDQFFLAKEGKWLNEYKIKERKQIDWESFPYGYNLTLQAKDKGSPQKCSALKAVYIGNPTRDTVPIRFEKEVYDVSISEFSPPGVVVAIVKLSPEPIDVEYKLSPGEDAVYFKINPRSGLIVTARPLNTVKKEVYKLEVTNKEGDLKAQVTISIEDANDHTPEFQQPLYDAYVNESVPVGTSVLTVSASDKDKGENGYITYSIASLNLLPFVINQFTGVISTTEELDFESSPEIYRFIVRASDWGSPYRHESEVNVTIRIGNVNDNSPLFEKVACQGVISYDFPVGGHITAVSAIDIDELELVKYKIISGNELGFFYLNPDSGVLQLKKSLTNSGIKNGNFALRITATDGENLADPMSINISVLHGKVSSKSFSCRETRVAQKLAEKLLIKAKANGKLNLEDGFLDFYSINRQGPYFDKSFPSDVAVKEDLPVGANILKIKAYDADSGFNGKVLFTISDGNTDSCFNIDMETGQLKVLMPMDREHTDLYLLNITIYDLGNPQKSSWRLLTINVEDANDNSPVFIQDSYSVNILESSGIGTEIIQVEARDKDLGSNGEVTYSVLTDTQQFAINSSTGIVYVADQLDRESKANYSLKIEARDKAESGQQLFSVVTLKVFLDDVNDCSPAFIPSSYSVKVLEDLPVGTVIAWLETHDPDLGLGGQVRYSLVNDYNGRFEIDKASGAIRLSKELDYEKQQFYNLTVRAKDKGRPVSLSSVSFVEVEVVDVNENLHTPYFPDFAVVGSVKENSRIGTSVLQVTARDEDSGRDGEIQYSIRDGSGLGRFSIDDESGVITAADILDRETMGSYWLTVYATDRGVVPLYSTIEVYIEVEDVNDNAPLTSEPIYYPVVMENSPKDVSVIQIQAEDPDSSSNEKLTYRITSGNPQNFFAINIKTGSCSVAQAGMQWHDHSSLQSRTPGFKGYPCLSLLSSWDYRHAPPCPATFLNS

SEQ ID NO: 45918 - protein, 3222 aa, Homo sapiens
MVTTVVAVGDTLAQPLAAAEVFIVEITLQDINDNPPVFPTDMLDLTVEENIGDGSKIMQLTAMDADEGANALVTYTIISGADDSFRIDPESGDLIATRRLDRERRSKYSLLVRADDGLQSSDMRINITVSDVNDHTPKFSRPVYSFDIPEDTIPGSLVAAILATDDDSGVNGEITYIVNEDDEDGIFFLNPITGVFNLTRLLDYEVQQYYILTVRAEDGGGQFTTIRVYFNILDVNDNPPIFSLNSYSTSLMENLPVGSTVLVFNVTDADDGINSQLTYSIASGDSLGQFTVDKNGVLKVLKALDRESQSFYNLVVQVHDLPQIPASRFTSTAQVSIILLDVNDNPPTFLSPKLTYIPENTPIDTVVFKAQATDPDSGPNSYIEYTLLNPLGNKFSIGTIDGEVRLTGELDREEVSNYTLTVVATDKGQPSLSSSTEVVVMVLDINDNNPIFAQALYKVEINENTLTGTDIIQVFAADGDEGTNGQVRYGIVNGNTNQEFRIDSVTGAITVAKPLDREKTPTYHLTVQATDRGSTPRTDTSTVSIVLLDINDFVPVFELSPYSVNVPENLGTLPRTILQVVARDDDRGSNSKLSYVLFGGNEDNAFTLSASGELGVTQSLDRETKERFVLMITATDSGSPALTGTGTINVIVDDVNDNVPTFASKAYFTTIPEDAPTGTDVLLVNASDADASKNAVIRIIGGNSQFTINPSTGQIITSALLDRETKDNYTLVVVCSDAGSPEPLSSSTSVLVTVTDVNDNPPRFQHHPYVTHIPSPTLPGSFVFAVTVTDADIGPNSELHYSLSGRNSEKFHIDPLRGAIMAAGPLNGASEVTFSVHVKDGGSFPKTDSTTVTVRFVNKADFPKVRAKEQTFMFPENQPVSSLVTTITGSSLRGEPMSYYIASGNLGNTFQIDQLTGQVSISQPLDFEKIQKYVVWIEARDGGFPPFSSYEKLDITVLDVNDNAPIFKEDPFISEILENLSPRKILTVSAMDKDSGPNGQLDYEIVNGNMENSFSINHATGEIRSVRPLDREKVSHYVLTIKSSDKGSPSQSTSVKVMINILDENDNAPRFSQIFSAHVPENSPLGYTVTRVTTSDEDIGINAISRYSIMDASLPFTINPSTGDIVISRPLNREDTDRYRIRVSAHDSGWTVSTDVTIFVTDINDNAPRFSRTSYYLDCPELTEIGSKVTQVFATDPDEGSNGQVFYFIKSQSEYFRINATTGEIFNKQILKYQNVTGFSNVNINRHSFIVTSSDRGKPSLISETTVTINIVDSNDNAPQFLKSKYFTPVTKNVKVGTKLIRVTAIDDKDFGLNSEVEYFISNDNHLGKFKLDNDTGWISVASSLISDLNQNFFITVTAKDKGNPPLSSQATVHITVTEENYHTPEFSQSHMSATIPESHSIGSIVRTVSARDRDAAMNGLIKYSISSGNEEGIFAINSSTGILTLAKALDYELCQKHEMTISAIDGGWVARTGYCSVTVNVIDVNDNSPVFLSDDYFPTVLENAPSGTTVIHLNATDADSGTNAVIAYTVQSSDSDLFVIDPNTGVITTQGFLDFETKQSYHLTVKAFNVPDEERCSFATVNIQLKGTNEYVPRFVSKLYYFEISEAAPKGTIVGEVFASDRDLGTDGEVHYLIFGNSRKKGFQINKKTGQIYVSGILDREKEERVSLKVLAKNFGSIRGADIDEVTVNVTVLDANDPPIFTLNIYSVQISEGVPIGTHVTFVSAFDSDSIPSWSRFSYFIGSGNENGAFSINPQTGQITVTAELDRETLPIYNLSVLAVDSGTPSATGSASLLVTLEDINDNGPMLTVSEGEVMENKRPGTLVMTLQSTDPDLPPNQGPFTYYLLSTGPATSYFSLSTAGVLSTTREIDREQIADFYLSVVTKDSGVPQMSSTGTVHITVIDQNDNPSQSRTVEIFVNYYGNLFPGGILGSVKPQDPDVLDSFHCSLTSGVTSLFSIPGGTCDLNSQPRSTDGTFDLTVLSNDGVHSTVTSNIRVFFAGFSNATVDNSILLRLGVPTVKDFLTNHYLHFLRIASSQLTGLGTAVQLYSAYEENNRTFLLAAVKRNHNQYVNPSGVATFFESIKEILLRQSGVKVESVDHDSCVHGPCQNGGSCLRRLAVSSVLKSRESLPVIIVANEPLQPFLCKCLPGYAGSWCEIDIDECLPSPCHSGGTCHNLVGGFSCSCPDGFTGRACERDINECLQSPCKNGAICQNFPGSFNCVCKTGYTGVFGKHCELNSYGFEELSYMEFPSLDPNNNYIYVKFATIKSHALLLYNYDNQTGDRAEFLALEIAEERLRFSYNLGSGTYKLTTMKKVSDGHFHTVIARRAGMAASLTVDSCSENQEPGYCTVSNVAVSDDWTLDVQPNRVTVGGIRSLEPILQRRGHVESHDFVGCIMEFAVNGRPLEPSQALAAQGILDQYGDFISYCFKEKKCKKVCFTVTPDTALSLEGKGRLDYHMSQNEKREYLLRQSLRGAMLEPFGVNSLEVKFRTRSENGVLIHIQESSNYTTVKIKNGKVYFTSDAGIAGKVERNIPEVYVADGHWHTFLIGKNGTATVLSVDRIYNRDIIHPTQDFGGLDVLTISLGGIPPNQAHRDAQTAGFDGCIASMWYGGESLPFSGKHSLASISKTDPSVKIGCRGPNICASNPCWGDLLCINQWYAYRCVPPGDCASHPCQNGGSCEPGLHSGFTCSCPDSHTGRTCEMVVACLGVLCPQGKVCKAGSPAGHVCVLSQGPEEISLPLWAVPAIVGSCATVLALLVLSLILCNQCRGKKAKNPKEEKKPKEKKKKGSENVAFDDPDNIPPYGDDMTVRKQPEGNPKPDIIERENPYLIYDETDIPHNSETIPSAPLASPEQEIEHYDIDNASSIAPSDADIIQHYKQFRSHTPKFSIQRHSPLGFARQSPMPLGASSLTYQPSYGQGLRTSSLSHSACPTPNPLSRHSPAPFSKSSTFYRNSPARELHLPIRDGNTLEMHGDTCQPGIFNYATRLGRRSKSPQAMASHGSRPGSRLKQPIGQIPLESSPPVGLSIEEVERLNTPRPRNPSICSADHGRSSSEEDCRRPLSRTRNPADGIPAPESSSDSDSHESFTCSEMEYDREKPMVYTSRMPKLSQVNESDADDEDNYGARLKPRRYHGRRAEGGPVGTQAAAPGTADNTLPMKLGQQAGTFNWDNLLNWGPGFGHYVDVFKDLASLPEKAAANEEGKAGTTKPVPKDGEAEQYV

SEQ ID NO: 45919 - protein, 4981 aa, Homo sapiens
MDLAPDRATGRPWLPLHTLSVSQLLRVFWLLSLLPGQAWVHGAEPRQVFQVLEEQPPGTLVGTIQTRPGFTYRLSESHALFAINSSTGALYTTSTIDRESLPSDVINLVVLSSAPTYPTEVRVLVRDLNDNAPVFPDPSIVVTFKEDSSSGRQVILDTATDSDIGSNGVDHRSYRIIRGNEAGRFRLDITLNPSGEGAFLHLVSKGGLDREVTPQYQLLVEVEDKGEPKRRGYLQVNVTVQDINDNPPVFGSSHYQAGVPEDAVVGSSVLQVAAADADEGTNADIRYRLQDEGTPFQMDPETGLITVREPLDFEARRQYSLTVQAMDRGVPSLTGRAEALIQLLDVNDNDPVVKFRYFPATSRYASVDENAQVGTVVALLTVTDADSPAANGNISVQILGGNEQRHFEVQSSKVPNLSLIKVASALDRERIPSYNLTVSVSDNYGAPPGAAVQARSSVASLVIFVNDINDHPPVFSQQVYRVNLSEEAPPGSYVSGISATDGDSGLNANLRYSIVSGNGLGWFHISEHSGLVTTGSSGGLDRELASQIVLNISARDQGVHPKVSYAQLVVTLLDVNDEKPVFSQPEGYDVSVVENAPTGTELLMLRATDGDLGDNGTVRFSLQEAETDRRSFRLDPVSGRLSTISSLDREEQAFYSLLVLATDLGSPPQSSMARINVSLLDINDNSPVFYPVQYFAHIKENEPGGSYITTVSATDPDLGTNGTVKYSISAGDRSRFQVNAQSGVISTRMALDREEKTAYQLQIVATDGGNLQSPNQAIVTITVLDTQDNPPVFSQVAYSFVVFENVALGYHVGSVSASTMDLNSNISYLITTGDQKGMFAINQVTGQLTTANVIDREEQSFYQLKVVASGGTVTGDTMVNITVKDLNDNSPHFLQAIESVNVVENWQAGHSIFQAKAVDPDEGVNGMVLYSLKQNPKNLFAINEKNGTISLLGPLDVHAGSYQIEILASDMGVPQLSSSVILTVYVHDVNDNSPVFDQLSYEVTLSESEPVNSRFFKVQASDKDSGANGEIAYTIAEGNTGDAFGIFPDGQLYIKSELDRELQDRYVLMVVASDRAVEPLSATVNVTVILEDVNDNRPLFNSTNYTFYFEEEQRAGSFVGKVSAVDKDFGPNGEVRYSFEMVQPDFELHAISGEITNTHQFDRESLMRRRGTAVFSFTVIATDQGIPQPLKDQATVHVYMKDINDNAPKFLKDFYQATISESAANLTQVLRVSASDVDEGNNGLIHYSIIKGNEERQFAIDSTSGQVTLIGKLDYEATPAYSLVIQAVDSGTIPLNSTCTLNIDILDENDNTPSFPKSTLFVDVLENMRIGELVSSVTATDSDSGDNADLYYSITGTNNHGTFSISPNTGSIFLAKKLDFETQSLYKLNITAKDQGRPPRSSTMSVVIHVRDFNDNPPSFPPGDIFKSIVENIPIGTSVISVTAHDPDADINGQLSYTIIQQMPRGNHFTIDEVKGTIYTNAEIDREFANLFELTVKANDQAVPIETRRYALKNVTILVTDLNDNVPMFISQNALAADPSAVIGSVLTTIMAADPDEGANGEIEYEIINGDTDTFIVDRYSGDLRVASALVPSQLIYNLIVSATDLGPERRKSTTELTIILQGLDGPVFTQPKYITILKEGEPIGTNVISIEAASPRGSEAPVEYYIVSVRCEEKTVGRLFTIGRHTGIIQTAAILDREQGACLYLVDVYAIEKSTAFPRTQRAEVEITLQDINDNPPVFPTDMLDLTVEENIGDGSKIMQLTAMDADEGANALVTYTIISGADDSFRIDPESGDLIATRRLDRERRSKYSLLVRADDGLQSSDMRINITVSDVNDHTPKFSRPVYSFDIPEDTIPGSLVAAILATDDDSGVNGEITYIVNEDDEDGIFFLNPITGVFNLTRLLDYEVQQYYILTVRAEDGGGQFTTIRVYFNILDVNDNPPIFSLNSYSTSLMENLPVGSTVLVFNVTDADDGINSQLTYSIASGDSLGQFTVDKNGVLKVLKALDRESQSFYNLVVQVHDLPQIPASRFTSTAQVSIILLDVNDNPPTFLSPKLTYIPENTPIDTVVFKAQATDPDSGPNSYIEYTLLNPLGNKFSIGTIDGEVRLTGELDREEVSNYTLTVVATDKGQPSLSSSTEVVVMVLDINDNNPIFAQALYKVEINENTLTGTDIIQVFAADGDEGTNGQVRYGIVNGNTNQEFRIDSVTGAITVAKPLDREKTPTYHLTVQATDRGSTPRTDTSTVSIVLLDINDFVPVFELSPYSVNVPENLGTLPRTILQVVARDDDRGSNSKLSYVLFGGNEDNAFTLSASGELGVTQSLDRETKERFVLMITATDSGSPALTGTGTINVIVDDVNDNVPTFASKAYFTTIPEDAPTGTDVLLVNASDADASKNAVIRIIGGNSQFTINPSTGQIITSALLDRETKDNYTLVVVCSDAGSPEPLSSSTSVLVTVTDVNDNPPRFQHHPYVTHIPSPTLPGSFVFAVTVTDADIGPNSELHYSLSGRNSEKFHIDPLRGAIMAAGPLNGASEVTFSVHVKDGGSFPKTDSTTVTVRFVNKADFPKVRAKEQTFMFPENQPVSSLVTTITGSSLRGEPMSYYIASGNLGNTFQIDQLTGQVSISQPLDFEKIQKYVVWIEARDGGFPPFSSYEKLDITVLDVNDNAPIFKEDPFISEILENLSPRKILTVSAMDKDSGPNGQLDYEIVNGNMENSFSINHATGEIRSVRPLDREKVSHYVLTIKSSDKGSPSQSTSVKVMINILDENDNAPRFSQIFSAHVPENSPLGYTVTRVTTSDEDIGINAISRYSIMDASLPFTINPSTGDIVISRPLNREDTDRYRIRVSAHDSGWTVSTDVTIFVTDINDNAPRFSRTSYYLDCPELTEIGSKVTQVFATDPDEGSNGQVFYFIKSQSEYFRINATTGEIFNKQILKYQNVTGFSNVNINRHSFIVTSSDRGKPSLISETTVTINIVDSNDNAPQFLKSKYFTPVTKNVKVGTKLIRVTAIDDKDFGLNSEVEYFISNDNHLGKFKLDNDTGWISVASSLISDLNQNFFITVTAKDKGNPPLSSQATVHITVTEENYHTPEFSQSHMSATIPESHSIGSIVRTVSARDRDAAMNGLIKYSISSGNEEGIFAINSSTGILTLAKALDYELCQKHEMTISAIDGGWVARTGYCSVTVNVIDVNDNSPVFLSDDYFPTVLENAPSGTTVIHLNATDADSGTNAVIAYTVQSSDSDLFVIDPNTGVITTQGFLDFETKQSYHLTVKAFNVPDEERCSFATVNIQLKGTNEYVPRFVSKLYYFEISEAAPKGTIVGEVFASDRDLGTDGEVHYLIFGNSRKKGFQINKKTGQIYVSGILDREKEERVSLKVLAKNFGSIRGADIDEVTVNVTVLDANDPPIFTLNIYSVQISEGVPIGTHVTFVSAFDSDSIPSWSRFSYFIGSGNENGAFSINPQTGQITVTAELDRETLPIYNLSVLAVDSGTPSATGSASLLVTLEDINDNGPMLTVSEGEVMENKRPGTLVMTLQSTDPDLPPNQGPFTYYLLSTGPATSYFSLSTAGVLSTTREIDREQIADFYLSVVTKDSGVPQMSSTGTVHITVIDQNDNPSQSRTVEIFVNYYGNLFPGGILGSVKPQDPDVLDSFHCSLTSGVTSLFSIPGGTCDLNSQPRSTDGTFDLTVLSNDGVHSTVTSNIRVFFAGFSNATVDNSILLRLGVPTVKDFLTNHYLHFLRIASSQLTGLGTAVQLYSAYEENNRTFLLAAVKRNHNQYVNPSGVATFFESIKEILLRQSGVKVESVDHDSCVHGPCQNGGSCLRRLAVSSVLKSRESLPVIIVANEPLQPFLCKCLPGYAGSWCEIDIDECLPSPCHSGGTCHNLVGGFSCSCPDGFTGRACERDINECLQSPCKNGAICQNFPGSFNCVCKTGYTGKMCESSVNYCECNPCFNGGSCQSGVDSYYCHCPFGVFGKHCELNSYGFEELSYMEFPSLDPNNNYIYVKFATIKSHALLLYNYDNQTGDRAEFLALEIAEERLRFSYNLGSGTYKLTTMKKVSDGHFHTVIARRAGMAASLTVDSCSENQEPGYCTVSNVAVSDDWTLDVQPNRVTVGGIRSLEPILQRRGHVESHDFVGCIMEFAVNGRPLEPSQALAAQGILDQCPRLEGACTRSPCQHGGTCMDYWSWQQCHCKEGLTGKYCEKSVTPDTALSLEGKGRLDYHMSQNEKREYLLRQSLRGAMLEPFGVNSLEVKFRTRSENGVLIHIQESSNYTTVKIKNGKVYFTSDAGIAGKVERNIPEVYVADGHWHTFLIGKNGTATVLSVDRIYNRDIIHPTQDFGGLDVLTISLGGIPPNQAHRDAQTAGFDGCIASMWYGGESLPFSGKHSLASISKTDPSVKIGCRGPNICASNPCWGDLLCINQWYAYRCVPPGDCASHPCQNGGSCEPGLHSGFTCSCPDSHTGRTCEMVVACLGVLCPQGKVCKAGSPAGHVCVLSQGPEEISLPLWAVPAIVGSCATVLALLVLSLILCNQCRGKKAKNPKEEKKPKEKKKKGSENVAFDDPDNIPPYGDDMTVRKQPEGNPKPDIIERENPYLIYDETDIPHNSETIPSAPLASPEQEIEHYDIDNASSIAPSDADIIQHYKQFRSHTPKFSIQRHSPLGFARQSPMPLGASSLTYQPSYGQGLRTSSLSHSACPTPNPLSRHSPAPFSKSSTFYRNSPARELHLPIRDGNTLEMHGDTCQPGIFNYATRLGRRSKSPQAMASHGSRPGSRLKQPIGQIPLESSPPVGLSIEEVERLNTPRPRNPSICSADHGRSSSEEDCRRPLSRTRNPADGIPAPESSSDSDSHESFTCSEMEYDREKPMVYTSRMPKLSQVNESDADDEDNYGARLKPRRYHGRRAEGGPVGTQAAAPGTADNTLPMKLGQQAGTFNWDNLLNWGPGFGHYVDVFKDLASLPEKAAANEEGKAGTTKPVPKDGEAEQYV

SEQ ID NO: 45920 - protein, 372 aa, Homo sapiens
MAPAPPPAASFSPSEVQRRLAAGACWVRRGARLYDLSSFVRHHPGGEQLLRARAGQDISADLDGPPHRHSANARRWLEQYYVGELRGEQQGSMENEPVALEETQKTDPAMEPRFKVVDWDKDLVDWRKPLLWQVGHLGEKYDEWVHQPVTRPIRLFHSDLIEGLSKTVWYSVPIIWVPLVLYLSWSYYRTFAQGNVRLFTSFTTEYTVAVPKSMFPGLFMLGTFLWSLIEYLIHRFLFHMKPPSDSYYLIMLHFVMHGQHHKAPFDGSRLVFPPVPASLVIGVFYLCMQLILPEAVGGTVFAGGLLGYVLYDMTHYYLHFGSPHKGSYLYSLKAHHVKHHFAHQKSGFGISTKLWDYCFHTLTPEKPHLKTQ

SEQ ID NO: 45921 - protein, 159 aa, Homo sapiens
MFPGLFMLGTFLWSLIEYLIHRFLFHMKPPSDSYYLIMLHFVMHGQHHKAPFDGSRLVFPPVPASLVIGVFYLCMQLILPEAVGGTVFAGGLLGYVLYDMTHYYLHFGSPHKGSYLYSLKAHHVKHHFAHQKSGFGISTKLWDYCFHTLTPEKPHLKTQ

SEQ ID NO: 45922 - protein, 579 aa, Homo sapiens
MVQYELWAALPGASGVALACCFVAAAVALRWSGRRTARGAVVRARQRQRAGLENMDRAAQRFRLQNPDLDSEALLALPLPQLVQKLHSRELAPEAVLFTYVGKAWEVNKGTNCVTSYLADCETQLSQAPRQGLLYGVPVSLKECFTYKGQDSTLGLSLNEGVPAECDSVVVHVLKLQGAVPFVHTNVPQSMFSYDCSNPLFGQTVNPWKSSKSPGGSSGGEGALIGSGGSPLGLGTDIGGSIRFPSSFCGICGLKPTGNRLSKSGLKGCVYGQEAVRLSVGPMARDVESLALCLRALLCEDMFRLDPTVPPLPFREEVYTSSQPLRVGYYETDNYTMPSPAMRRAVLETKQSLEAAGHTLVPFLPSNIPHALETLSTGGLFSDGGHTFLQNFKGDFVDPCLGDLVSILKLPQWLKGLLAFLVKPLLPRLSAFLSNMKSRSAGKLWELQHEIEVYRKTVIAQWRALDLDVVLTPMLAPALDLNAPGRATGAVSYTMLYNCLDFPAGVVPVTTVTAEDEAQMEHYRGYFGDIWDKMLQKGMKKSVGLPVAVQCVALPWQEELCLRFMREVERLMTPEKQSS

SEQ ID NO: 45923 - protein, 151 aa, Homo sapiens
RRQHPLPLLLLRHLRPQAHREPPQVYTSSQPLRVGYYETDNYTMPSPAMRRAVLETKQSLEAAGHTLVPFLPSNIPHALETLSTGGLFSDGGHTFLQNFKGDFVDPCLGDLVSILKLPQWLKGLLAFLVKPLLPRLSAFLSNMKSRCRPLP

SEQ ID NO: 45924 - protein, 532 aa, Homo sapiens
MAPSFTARIQLFLLRALGFLIGLVGRAALVLGGPKFASKTPRPVTEPLLLLSGMQLAKLIRQRKVKCIDVVQAYINRIKDVNPMINGIVKYRFEEAMKEAHAVDQKLAEKQEDEATLENKWPFLGVPLTVKEAFQLQGMPNSSGLMNRRDAIAKTDATVVALLKGAGAIPLGITNCSELCMWYESSNKIYGRSNNPYDLQHIVGGSSGGEGCTLAAACSVIGVGSDIGGSIRMPAFFNGIFGHKPSPGVVPNKGQFPLAVGAQELFLCTGPMCRYAEDLAPMLKVMAGPGIKRLKLDTKVHLKDLKFYWMEHDGGSFLMSKVDQDLIMTQKKVVVHLETILGASVQHVKLKKMKYSFQLWIAMMSAKGHDGKEPVKFVDLLGDHGKHVSPLWELIKWCLGLSVYTIPSIGLALLEEKLRYSNEKYQKFKAVEESLRKELVDMLGDDGVFLYPSHPTVAPKHHVPLTRPFNFAYTGVFSALGLPVTQCPLGLNAKGLPLGIQVVAGPFNDHLTLAVAQYLEKTFGGWVCPGKF

SEQ ID NO: 45925 - protein, 127 aa, Homo sapiens
MSFSGKYQLQSQENFEAFMKAIGLPEELIQKGKDIKGVSEIVQNGKHFKFTITAGSKVIQNEFTVGEECELETMTGEKVKTVVQLEGDNKLVTTFKNIKSVTELNGDIITNTMTLGDIVFKRISKRI

SEQ ID NO: 45926 - protein, 132 aa, Homo sapiens
MAFDSTWKVDRSENYDKFMEKMGVNIVKRKLAAHDNLKLTITQEGNKFTVKESSTFRNIEVVFELGVTFNYNLADGTELRGTWSLEGNKLIGKFKRTDNGNELNTVREIIGDELVQTYVYEGVEAKRIFKKD

SEQ ID NO: 45927 - protein, 133 aa, Homo sapiens [sequence omitted]

SEQ ID NO: 45928 - protein, 135 aa, Homo sapiens
MATVQQLEGRWRLVDSKGFDEYMKELGVGIALRKMGAMAKPDCIITCDGKNLTIKTESTLKTTQFSCTLGEKFEETTADGRKTQTVCNFTDGALVQHQEWDGKESTITRKLKDGKLVVECVMNNVTCTRIYEKVE

SEQ ID NO: 45929 - protein, 177 aa, Homo sapiens
MKTVTMMMVVEMQALTQVLRAVLSACTWVSRKGDLQRMKQTHKGKPPSSMAFTGKFEMESEKNYDEFMKLLGISSDVIEKARNFKIVTEVQQDGQDFTWSQHYSGGHTMTNKFTVGKESNIQTMGGKTFKATVQMEGGKLVVNFPNYHQTSEIVGDKLVEVSTIGGVTYERVSKRLA

SEQ ID NO: 45930 - protein, 177 aa, Homo sapiens; identical to SEQ ID NO: 45929

SEQ ID NO: 45931 - protein, 128 aa, Homo sapiens
MAFTGKFEMESEKNYDEFMKLLGISSDVIEKARNFKIVTEVQQDGQDFTWSQHYSGGHTMTNKFTVGKESNIQTMGGKTFKATVQMEGGKLVVNFPNYHQTSEIVGDKLVEVSTIGGVTYERVSKRLA

SEQ ID NO: 45932 - protein, 166 aa, Homo sapiens
MVEAFCATWKLTNSQNFDEYMKALGVGFATRQVGNVTKPTVIISQEGDKVVIRTLSTFKNTEISFQLGEEFDETTADDRNCKSVVSLDGDKLVHIQKWDGKETNFVREIKDGKMVMVSNDNSPFFLVFFSSPHTSHLLPSSSLLLPFFLLPSFFNNTSLARFFNYM

SEQ ID NO: 45933 - protein, 132 aa, Homo sapiens
MVEAFCATWKLTNSQNFDEYMKALGVGFATRQVGNVTKPTVIISQEGDKVVIRTLSTFKNTEISFQLGEEFDETTADDRNCKSVVSLDGDKLVHIQKWDGKETNFVREIKDGKMVMTLTFGDVVAVRHYEKA

SEQ ID NO: 45934 - protein, 501 aa, Homo sapiens
MGTRAARPAGLPCGAENPARRRLALGARQQIHSWSPRTPSTRLTAPAGPARGVARPAMAPDPVAAETAAQGPTPRYFTWDEVAQRSGCEERWLVIDRKVYNISEFTRRHPGGSRVISHYAGQDATDPFVAFHINKGLVKKYMNSLLIGELSPEQPSFEPTKNKELTDEFRELRATVERMGLMKANHVFFLLYLLHILLLDGAAWLTLWVFGTSFLPFLLCAVLLSAVQAQAGWLQHDFGHLSVFSTSKWNHLLHHFVIGHLKGAPASWWNHMHFQHHAKPNCFRKDPDINMHPFFFALGKILSVELGKQKKKYMPYNHQHKYFFLIGPPALLPLYFQWYIFYFVIQRKKWVDLAWMITFYVRFFLTYVPLLGLKAFLGLFFIVRFLESNWFVWVTQMNHIPMHIDHDRNMDWVSTQLQATCNVHKSAFNDWFSGHLNFQIEHHLFPTMPRHNYHKVAPLVQSLCAKHGIEYQSKPLLSAFADIIHSLKESGQLWLDAYLHQ

SEQ ID NO: 45935 - protein, 360 aa, Homo sapiens
MNSLLIGELSPEQPSFEPTKNKELTDEFRELRATVERMGLMKANHVFFLLYLLHILLLDGAAWLTLWVFGTSFLPFLLCAVLLSAVQAQAGWLQHDFGHLSVFSTSKWNHLLHHFVIGHLKGAPASWWNHMHFQHHAKPNCFRKDPDINMHPFFFALGKILSVELGKQKKKYMPYNHQHKYFFLIGPPALLPLYFQWYIFYFVIQRKKWVDLAWMITFYVRFFLTYVPLLGLKAFLGLFFIVRFLESNWFVWVTQMNHIPMHIDHDRNMDWVSTQLQATCNVHKSAFNDWFSGHLNFQIEHHLFPTMPRHNYHKVAPLVQSLCAKHGIEYQSKPLLSAFADIIHSLKESGQLWLDAYLHQ

SEQ ID NO: 45936 - protein, 360 aa, Homo sapiens; identical to SEQ ID NO: 45935

SEQ ID NO: 45937 - protein, 360 aa, Homo sapiens; identical to SEQ ID NO: 45935

SEQ ID NO: 45938 - protein, 376 aa, Homo sapiens
QDAFRAFHQDLNFVRKFLQPLLIGELAPEEPSQDGPLNAQLVEDFRALHQAAEDMKLFDASPTFFAFLLGHILAMEVLAWLLIYLLGPGWVPSALAAFILAISQAQAGWLQHDFGHLSVFSTSKWNHLLHHFVIGHLKGAPASWWNHMHFQHHAKPNCFRKDPDINMHPFFFALGKILSVELGKQKKKYMPYNHQHKYFFLIGPPALLPLYFQWYIFYFVIQRKKWVDLAWMITFYVRFFLTYVPLLGLKAFLGLFFIRFLESNWFVWVTQMNHIPMHIDHDRNMDWVSTQLQATCNVHKSAFNDWFSGHLNFQIEHHLFPTMPRHNYHKVAPLVQSLCAKHGIEYQSKPLLSAFADIIHSLKESGQLWLDAYLHQ

SEQ ID NO: 45939 - protein, 422 aa, Homo sapiens
MHGREAGPFVCVCVLLASIPTPQTPLLQASLPPFHPASAGHPITGQQDAFRAFHPDLEFVGKFLKPLLIGELAPEEPSQDHGKNSKITEDFRALRKTAEDMNLFKTNHVFFLLLLAHIIALESIAWFTVFYFGNGWIPTLITAFVLATSQAQAGWLQHDYGHLSVYRKPKWNHLVHKFVIGHLKGASANWWNHRHFQHHAKPNIFHKDPDVNMLHVFVLGEWQPIEYGKKKLKYLPYNHQHEYFFLIGPPLLIPMYFQYQIIMTMIVHKNWVDLAWAVSYYIRFFITYIPFYGILGALLFLNFIRFLESHWFVWVTQMNHIVMEIDQEAYRDWFSSQLTATCNVEQSFFNDWFSGHLNFQIEHHLFPTMPRHNLHKIAPLVKSLCAKHGIEYQEKPLLRALLDIIRSLKKSGKLWLDAYLHK

SEQ ID NO: 45940 - protein, 444 aa, Homo sapiens
MGKGGNQGEGAAEREVSVPTFSWEEIQKHNLRTDRWLVIDRKVYNITKWSIQHPGGQRVIGHYAGEDATDAFRAFHPDLEFVGKFLKPLLIGELAPEEPSQDHGKNSKITEDFRALRKTAEDMNLFKTNHVFFLLLLAHIIALESIAWFTVFYFGNGWIPTLITAFVLATSQAQAGWLQHDYGHLSVYRKPKWNHLVHKFVIGHLKGASANWWNHRHFQHHAKPNIFHKDPDVNMLHVFVLGEWQPIEYGKKKLKYLPYNHQHEYFFLIGPPLLIPMYFQYQIIMTMIVHKNWVDLAWAVSYYIRFFITYIPFYGILGALLFLNFIRFLESHWFVWVTQMNHIVMEIDQEAYRDWFSSQLTATCNVEQSFFNDWFSGHLNFQIEHHLFPTMPRHNLHKIAPLVKSLCAKHGIEYQEKPLLRALLDIIRSLKKSGKLWLDAYLHK

SEQ ID NO: 45941 - protein, 386 aa, Homo sapiens
MGKGGNQGEGAAEREVSVPTFSWEEIQKHNLRTDRWLVIDRKVYNITKWSIQHPGGQRVIGHYAGEDATDAFRAFHPDLEFVGKFLKPLLIGELAPEEPSQDHGKNSKITEDFRALRKTAEDMNLFKTNHVFFLLLLAHIIALESIAWFTVFYFGNGWIPTLITAFVLATSQAQAGWLQHDYGHLSVYRKPKWNHLVHKFVIGHLKGASANWWNHRHFQHHAKPNIFHKDPDVNMLHVFVLGEWQPIEYGKKKLKYLPYNHQHEYFFLIGPPLLIPMYFQYQIIMTMIVHKNWVDLAWAVSYYIRFFITYIPFYGILGALLFLNFIRFLESHWFVWVTQMNHIVMEIDQEAYRDWFSSQLTATCNVEQSFFNDWFSGHLNFQIEHQ

SEQ ID NO: 45942 - protein, 445 aa, Homo sapiens
MGGVGEPGPREGPAQPGAPLPTFCWEQIRAHDQPGDKWLVIERRVYDISRWAQRHPGGSRLIGHHGAEDATDAFRAFHQDLNFVRKFLQPLLIGELAPEEPSQDGPLNAQLVEDFRALHQAAEDMKLFDASPTFFAFLLGHILAMEVLAWLLIYLLGPGWVPSALAAFILAISQAQSWCLQHDLGHASIFKKSWWNHVAQKFVMGQLKGFSAHWWNFRHFQHHAKPNIFHKDPDVTVAPVFLLGESSVEYGKKKRRYLPYNQQHLYFFLIGPPLLTLVNFEVENLAYMLVCMQWADLLWAASFYARFFLSYLPFYGVPGVLLFFVAVRVLESHWFVWITQMNHIPKEIGHEKHRDWVSSQLAATCNVEPSLFTNWFSGHLNFQIEHHLFPRMPRHNYSRVAPLVKSLCAKHGLSYEVKPFLTALVDIVRSLKKSGDIWLDAYLHQ

SEQ ID NO: 45943 - protein, 385 aa, Homo sapiens [sequence omitted]

SEQ ID NO: 45944 - protein, 338 aa, Homo sapiens
MFQAFPGDYDSGSRCSSSPSAESQYLSSVDSFGSPPTAAASQECAGLGEMPGSFVPTVTAITTSQDLQWLVQPTLISSMAQSQGQPLASQPPVVDPYDMPGTSYSTPGMSGYSSGGASGSGGPSTSGTTSGPGPARPARARPRRPREETLTPEEEEKRRVRRERNKLAAAKCRNRRRELTDRLQAETDQLEEEKAELESEIAELQKEKERLEFVLVAHKPGCKIPYEEGPGPGPLAEVRDLPGSAPAKEDGFSWLLPPPPPPPLPFQTSQDAPPNLTASLFTHSEVQVLGDPFPVVNPSYTSSFVLTCPEVSAFAGAQRTSGSDQPSDPLNSPSLLAL

SEQ ID NO: 45945 - protein, 302 aa, Homo sapiens
MFQAFPGDYDSGSRCSSSPSAESQYLSSVDSFGSPPTAAASQECAGLGEMPGSFVPTVTAITTSQDLQWLVQPTLISSMAQSQGQPLASQPPVVDPYDMPGTSYSTPGMSGYSSGGASGSGGPSTSGTTSGPGPARPARARPRRPREETETDQLEEEKAELESEIAELQKEKERLEFVLVAHKPGCKIPYEEGPGPGPLAEVRDLPGSAPAKEDGFSWLLPPPPPPPLPFQTSQDAPPNLTASLFTHSEVQVLGDPFPVVNPSYTSSFVLTCPEVSAFAGAQRTSGSDQPSDPLNSPSLLAL

SEQ ID NO: 45946 - protein, 195 aa, Homo sapiens
MFQAFPGDYDSGSRCSSSPSAESQYLSSVDSFGSPPTAAASQETDQLEEEKAELESEIAELQKEKERLEFVLVAHKPGCKIPYEEGPGPGPLAEVRDLPGSAPAKEDGFSWLLPPPPPPPLPFQTSQDAPPNLTASLFTHSEVQVLGDPFPVVNPSYTSSFVLTCPEVSAFAGAQRTSGSDQPSDPLNSPSLLAL

SEQ ID NO: 45947 - protein, 291 aa, Homo sapiens
MFQAFPGDYDSGSRCSSSPSAESQYLSSVDSFGSPPTAAASQECAGLGEMPGSFVPTVTAITTSQDLQWLVQPTLISSMAQSQGQPLASQPPVVDPYDMPGTSYSTPGMSGYSSGGASGSGGPSTSGTTSGPGPARPARARPRRPREETLTPEEEEKRRVRRERNKLAAAKCRNRRRELTDRLQAETDQLEEEKAELESEIAELQKEKERLEFVLVAHKPGCKIPYEEGPGPGPLAEEVQVLGDPFPVVNPSYTSSFVLTCPEVSAFAGAQRTSGSDQPSDPLNSPSLLAL

SEQ ID NO: 45948 - protein, 303 aa, Homo sapiens
MSDNGVCVLAFKCPGLLRYTAYRCKQLSDTSIIAVASHCPLLQKVHVGNQDKLTDEGLKQLGSKCRELKDIHFGQCYKISDEGMIVIAKGCLKLQRIYMQENKLVTDQSVKAFAEHCPELQYVGFMGCSVTSKGVIHLTKLRNLSSLDLRHITELDNETVMEIVKRCKNLSSLNLCLNWIINDRCVEVIAKEGQNLKELYLVSCKITDYALIAIGRYSMTIETVDVGWCKEITDQGATLIAQSSKSLRYLGLMRCDKVNEVTVEQLVQQYPHITFSTVLQDCKRTLERAYQMGWTPNMSAASS

SEQ ID NO: 45949 - protein, 314 aa, Homo sapiens
MSDNGVCVLAFKCPGLLRYTAYRCKQLSDTSIIAVASHCPLLQKVHVGNQDKLTDEGLKQLGSKCRELKDIHFGQCYKISDEGMIVIAKGCLKLQRIYMQENKLVTDQSVKAFAEHCPELQYVGFMGCSVTSKGVIHLTKLRNLSSLDLRHITELDNETVMEIVKRCKNLSSLNLCLNWIINDRCVEVIAKEGQNLKELYLVSCKITDYALIAIGRYSMTIETVDVGWCKEITDQGATLIAQSSKSLRYLGLMRCDKVRVDYQVVCFLHISIVNSLMSYPLSFSISTPVYYILYIHFICIYAIIAMHCLPAFVN

SEQ ID NO: 45950 - protein, 701 aa, Homo sapiens
MGHLLSKEPRNRPSQKRPRCCSWCRRRRPLLRLPRRTPAKVPPQPAAPRSRDCFFRGPCMLCFIVHSPGAPAPAGPEEEPPLSPPPRDGAYAAASSSQHLARRYAALAAEDCAAAARRFLLSSAAAAAAAAASASSPASCCKELGLAAAAAWEQQGRSLFLASLGPVRFLGPPAAVQLFRGPTPSPAELPTPPEMVCKRKGAGVPACTPCKQPRCGGGGCGGGGGGGGGGGPAGGGASPPRPPDAGCCQAPEQPPQPLCPPPSSPTSEGAPTEAGGDAVRAGGTAPLSAQQQHECGDADCRESPENPCDCHREPPPETPDINQLPPSILLKIFSNLSLDERCLSASLVCKYWRDLCLDFQFWKQLDLSSRQQVTDELLEKIASRSQNIIEINISDCRSMSDNGVCVLAFKCPGLLRYTAYRCKQLSDTSIIAVASHCPLLQKVHVGNQDKLTDEGLKQLGSKCRELKDIHFGQCYKISDEGMIVIAKGCLKLQRIYMQENKLVTDQSVKAFAEHCPELQYVGFMGCSVTSKGVIHLTKLRNLSSLDLRHITELDNETVMEIVKRCKNLSSLNLCLNWIINDRCVEVIAKEGQNLKELYLVSCKITDYALIAIGRYSMTIETVDVGWCKEITDQGATLIAQSSKSLRYLGLMRCDKVNEVTVEQLVQQYPHITFSTVLQDCKRTLERAYQMGWTPNMSAASS

SEQ ID NO: 45951 - protein, 674 aa, Homo sapiens
MSSSSRGPGAGARRRRTRCRRCRACVRTECGDCHFCRDMKKFGGPGRMKQSCLLRQCTAPVLPHTAVCLLCGEAGKEDTVEGEEEKFGLSLMECTICNEIVHPGCLKMGKAEGVINAEIPNCWECPRCTQEGRTSKDSGEGPGRRRADNGEEGASLGSGWKLTEEPPLPPPPPRRKGPLPAGPPPEDVPGPPKRKEREAGNEPPTPRKKVKGGRERHLKKVGGDACLLRGSDPGGPGLLPPRVLNPSQAFSSCHPGLPPENWEKPKPPLASAEGPAVPSPSPQREKLERFKRMCQLLERVPDTSSSSSDSDSDSDSSGTSLSEDEAPGEARNGRRPARGSSGEKENRGGRRAVRPGSGGPLLSWPLGPAPPPRPPQLERHVVRPPPRSPEPDTLPLAAGSDHPLPRAAWLRVFQHLGPRELCICMRVCRTWSRWCYDKRLWPRMDLSRRKSLTPPMLSGVVRRQPRALDLSWTGVSKKQLMWLLNRLQGLQELVLSGCSWLSVSALGSAPLPALRLLDLRWIEDVKDSQLRELLLPPPDTKPGQTESRGRLQGVAELRLAGLELTDASLRLLLRHAPQLSALDLSHCAHVGDPSVHLLTAPTSPLRETLVHLNLAGCHRLTDHCLPLFRRCPRLRRLDLRSCRQLSPEACARLAAAGPPGPFRCPEEKLLLKDS

SEQ ID NO: 45952 - protein, 694 aa, Homo sapiens
MGMKVPGKGESGPSALLTPPMSSSSRGPGAGARRRRTRCRRCRACVRTECGDCHFCRDMKKFGGPGRMKQSCLLRQCTAPVLPHTAVCLLCGEAGKEDTVEGEEEKFGLSLMECTICNEIVHPGCLKMGKAEGVINAEIPNCWECPRCTQEGRTSKDSGEGPGRRRADNGEEGASLGSGWKLTEEPPLPPPPPRRKGPLPAGPPPEDVPGPPKRKEREAGNEPPTPRKKVKGGRERHLKKVGGDACLLRGSDPGGPGLLPPRVLNPSQAFSSCHPGLPPENWEKPKPPLASAEGPAVPSPSPQREKLERFKRMCQLLERVPDTSSSSSDSDSDSDSSGTSLSEDEAPGEARNGRRPARGSSGEKENRGGRRAVRPGSGGPLLSWPLGPAPPPRPPQLERHVVRPPPRSPEPDTLPLAAGSDHPLPRAAWLRVFQHLGPRELCICMRVCRTWSRWCYDKRLWPRMDLSRRKSLTPPMLSGVVRRQPRALDLSWTGVSKKQLMWLLNRLQGLQELVLSGCSWLSVSALGSAPLPALRLLDLRWIEDVKDSQLRELLLPPPDTKPGQTESRGRLQGVAELRLAGLELTDASLRLLLRHAPQLSALDLSHCAHVGDPSVHLLTAPTSPLRETLVHLNLAGCHRLTDHCLPLFRRCPRLRRLDLRSCRQLSPEACARLAAAGPPGPFRCPEEKLLLKDS

SEQ ID NO: 45953 - protein, 586 aa, Homo sapiens
  VARIANT 1: note = MOD_RES - Any amino acid
XRMKQSCLLRQCTAPVLPHTAVCLLCGEAGKEDTVEGEEEKFGLSLMECTICNEIVHPGCLKMGKAEGVINAEIPNCWECPRCTQEGRTSKDSGEGPGRRRADNGEEGASLGSGWKLTEEPPLPPPPPRRKGPLPAGPPPEDVPGPPKRKEREAGNEPPTPRKKVKGGRERHLKKKPKPPLASAEGPAVPSPSPQREKLERFKRMCQLLERVPDTSSSSSDSDSDSDSSGTSLSEDEAPGEARNGRRPARGSSGEKENRGGRRAVRPGSGGPLLSWPLGPAPPPRPPQLERHVVRPPPRSPEPDTLPLAAGSDHPLPRAAWLRVFQHLGPRELCICMRVCRTWSRWCYDKRLWPRMDLSRRKSLTPPMLSGVVRRQPRALDLSWTGVSKKQLMWLLNRLQGLQELVLSGCSWLSVSALGSAPLPALRLLDLRWIEDVKDSQLRELLLPPPDTKPGQTESRGRLQGVAELRLAGLELTDASLRLLLRHAPQLSALDLSHCAHVGDPSVHLLTAPTSPLRETLVHLNLAGCHRLTDHCLPLFRRCPRLRRLDLRSCRQLSPEACARLAAAGPPGPFRCPEEKLLLKDS

SEQ ID NO: 45954 - protein, 164 aa, Homo sapiens
MDLEECILITDSTLIQLSIHCPKLQALVSLSFSDIIHLLKMKEPSHHNKKLFGFSFCKSLSHCELITDDGILHLSNSTCGHERLRVLELDNCLLITDVALEHLENCRGLERLELYDCQQVTRAGIKRMRAQLPHVKVHAYFAPVTPPTAVAGSGQRLCRCCVIL

SEQ ID NO: 45955 - protein, 423 aa, Homo sapiens
MVFSNNDEGLINKKLPKELLLRIFSFLDIVTLCRCAQISKAWNILALDGSNWQRIDLFNFQTDVEGRVVENISKRCGGFLRKLSLRGCIGVGDSSLKTFAQNCRNIEHLNLNGCTKITDSTCYSLSRFCSKLKHLDLTSCVSITNSSLKGISEGCRNLEYLNLSWCDQITKDGIEALVRGCRGLKALLLRGCTQLEDEALKHIQNYCHELVSLNLQSCSRITDEGVVQICRGCHRLQALCLSGCSNLTDASLTALGLNCPRLQILEAARCSHLTDAGFTLLARNCHELEKMDLEECILITDSTLIQLSIHCPKLQALSLSHCELITDDGILHLSNSTCGHERLRVLELDNCLLITDVALEHLENCRGLERLELYDCQQVTRAGIKRMRAQLPHVKVHAYFAPVTPPTAVAGSGQRLCRCCVIL

SEQ ID NO: 45956 - protein, 339 aa, Homo sapiens
MYIALVWILFVMWTFAQNCRNIEHLNLNGCTKITDSTCYSLSRFCSKLKHLDLTSCVSITNSSLKGISEGCRNLEYLNLSWCDQITKDGIEALVRGCRGLKALLLRGCTQLEDEALKHIQNYCHELVSLNLQSCSRITDEGVVQICRGCHRLQALCLSGCSNLTDASLTALGLNCPRLQILEAARCSHLTDAGFTLLARNCHELEKMDLEECILITDSTLIQLSIHCPKLQALSLSHCELITDDGILHLSNSTCGHERLRVLELDNCLLITDVALEHLENCRGLERLELYDCQQVTRAGIKRMRAQLPHVKVHAYFAPVTPPTAVAGSGQRLCRCCVIL

SEQ ID NO: 45957 - protein, 355 aa, Homo sapiens
MVFSNNDEGLINKKLPKELLLRIFSFLDIVTLCRCAQISKAWNILALDGSNWQRIDLFNFQTDVEGRVVENISKRCGGFLRKLSLRGCIGVGDSSLKTFAQNCRNIEHLNLNGCTKITDSTCYSLSRFCSKLKHIQNYCHELVSLNLQSCSRITDEGVVQICRGCHRLQALCLSGCSNLTDASLTALGLNCPRLQILEAARCSHLTDAGFTLLARNCHELEKMDLEECILITDSTLIQLSIHCPKLQALSLSHCELITDDGILHLSNSTCGHERLRVLELDNCLLITDVALEHLENCRGLERLELYDCQQVTRAGIKRMRAQLPHVKVHAYFAPVTPPTAVAGSGQRLCRCCVIL

SEQ ID NO: 45958 - protein, 133 aa, Homo sapiens
MDLEECILITDSTLIQLSIHCPKLQALSLSHCELITDDGILHLSNSTCGHERLRVLELDNCLLITDVALEHLENCRGLERLELYDCQQVTRAGIKRMRAQLPHVKVHAYFAPVTPPTAVAGSGQRLCRCCVIL

SEQ ID NO: 45959 - protein, 355 aa, Homo sapiens; identical to SEQ ID NO: 45957

SEQ ID NO: 45960 - protein, 621 aa, Homo sapiens
MSPVFPMLTVLTMFYYICLRRRARTATRGEMMNTHRAIESNSQTSPLNAEVVQYAKEVVDFSSHYGSENSMSYTMWNLAGVPNVFPSSGDFTQTAVFRTYGTWWDQCPSASLPFKRTPPNFQSQDYVELTFEQQVYPTAVHVLETYHPGAVIRILACSANPYSPNPPAEVRWEILWSERPTKVNASQARQFKPCIKQINFPTNLIRLEVNSSLLEYYTELDAVVLHGVKDKPVLSLKTSLIDMNDIEDDAYAEKDGCGMDSLNKKFSSAVLGEGPNNGYFDKLPYELIQLILNHLTLPDLCRLAQTCKLLSQHCCDPLQYIHLNLQPYWAKLDDTSLEFLQSRCTLVQWLNLSWTGNRGFISVAGFSRFLKVCGSELVRLELSCSHFLNETCLEVISEMCPNLQALNLSSCDKLPPQAFNHIAKLCSLKRLVLYRTKVEQTALLSILNFCSELQHLSLGSCVMIEDYDVIASMIGAKCKKLRTLDLWRCKNITENGIAELASGCPLLEELDLGWCPTLQSSTGCFTRLAHQLPNLQKLFLTANRSVCDTDIDELACNCTRLQQLDILGTRMVSPASLRKLLESCKDLSLLDVSFCSQIDNRAVLELNASFPKVFIKKSFTQ

SEQ ID NO: 45961 - protein, 621 aa, Homo sapiens; identical to SEQ ID NO: 45960

SEQ ID NO: 45962 - protein, 691 aa, Homo sapiens
MAPFPEEVDVFTAPHWRMKQLVGLYCDKLSKTNFSNNNDFRALLQSLYATFKEFKMHEQIENEYIIGLLQQRSQTIYNVHSDNKLSEMLSLFEKGLKNVKNEYEQLNYAKQLKERLEAFTRDFLPHMKEEEEVFQPMLMEYFTYEELKDIKKKVIAQHCSQKDTAELLRGLSLWNHAEERQKFFKYSVDEKSDKEAEVSEHSTGITHLPPEVMLSIFSYLNPQELCRCSQVSMKWSQLTKTGSLWKHLYPVHWARGDWYSGPATELDTEPDDEWVKNRKDESRAFHEWDEDADIDESEESAEESIAISIAQMEKRLLHGLIHNVLPYVGTSVKTLVLAYSSAVSSKMVRQILELCPNLEHLDLTQTDISDSAFDSWSWLGCCQSLRHLDLSGCEKITDVALEKISRALGILTSHQSGFLKTSTSKITSTAWKNKDITMQSTKQYACLHDLTNKGIGEEIDNEHPWTKPVSSENFTSPYVWMLDAEDLADIEDTVEWRHRNVESLCVMETASNFSCSTSGCFSKDIVGLRTSVCWQQHCASPAFAYCGHSFCCTGTALRTMSSLPESSAMCRKAARTRLPRGKDLIYFGSEKSDQETGRVLLFLSLSGCYQITDHGLRVLTLGGGLPYLEHLNLSGCLTITGAGLQDLVSACPSLNDEYFYYCDNINGPHADTASGCQNLQCGFRACCRSGE

SEQ ID NO: 45963 - protein, 565 aa, Homo sapiens
MKEEEEVFQPMLMEYFTYEELKDIKKKVIAQHCSQKDTAELLRGLSLWNHAEERQKFFKYSVDEKSDKEAEVSEHSTGITHLPPEVMLSIFSYLNPQELCRCSQVSMKWSQLTKTGSLWKHLYPVHWARGDWYSGPATELDTEPDDEWVKNRKDESRAFHEWDEDADIDESEESAEESIAISIAQMEKRLLHGLIHNVLPYVGTSVKTLVLAYSSAVSSKMVRQILELCPNLEHLDLTQTDISDSAFDSWSWLGCCQSLRHLDLSGCEKITDVALEKISRALGILTSHQSGFLKTSTSKITSTAWKNKDITMQSTKQYACLHDLTNKGIGEEIDNEHPWTKPVSSENFTSPYVWMLDAEDLADIEDTVEWRHRNVESLCVMETASNFSCSTSGCFSKDIVGLRTSVCWQQHCASPAFAYCGHSFCCTGTALRTMSSLPESSAMCRKAARTRLPRGKDLIYFGSEKSDQETGRVLLFLSLSGCYQITDHGLRVLTLGGGLPYLEHLNLSGCLTITGAGLQDLVSACPSLNDEYFYYCDNINGPHADTASGCQNLQCGFRACCRSGE

SEQ ID NO: 45964 - protein, 674 aa, Homo sapiens
MAPFPEEVDVFTAPHWRMKQLVGLYCDKSLYATFKEFKMHEQIENEYIIGLLQQRSQTIYNVHSDNKLSEMLSLFEKGLKNVKNEYEQLNYAKQLKERLEAFTRDFLPHMKEEEEVFQPMLMEYFTYEELKDIKKKVIAQHCSQKDTAELLRGLSLWNHAEERQKFFKYSVDEKSDKEAEVSEHSTGITHLPPEVMLSIFSYLNPQELCRCSQVSMKWSQLTKTGSLWKHLYPVHWARGDWYSGPATELDTEPDDEWVKNRKDESRAFHEWDEDADIDESEESAEESIAISIAQMEKRLLHGLIHNVLPYVGTSVKTLVLAYSSAVSSKMVRQILELCPNLEHLDLTQTDISDSAFDSWSWLGCCQSLRHLDLSGCEKITDVALEKISRALGILTSHQSGFLKTSTSKITSTAWKNKDITMQSTKQYACLHDLTNKGIGEEIDNEHPWTKPVSSENFTSPYVWMLDAEDLADIEDTVEWRHRNVESLCVMETASNFSCSTSGCFSKDIVGLRTSVCWQQHCASPAFAYCGHSFCCTGTALRTMSSLPESSAMCRKAARTRLPRGKDLIYFGSEKSDQETGRVLLFLSLSGCYQITDHGLRVLTLGGGLPYLEHLNLSGCLTITGAGLQDLVSACPSLNDEYFYYCDNINGPHADTASGCQNLQCGFRACCRSGE

SEQ ID NO: 45965 - protein, 479 aa, Homo sapiens
GKGSSSISSDVSSSTDHTPTKAQKNVATSEDSDLSMRTLSTPSPALICPPNLPGFQNGRGSSTSSSSITGETVAMVHSPPPTRLTHPLIRLASRPQKEQASIDRLPDHSMVQIFSFLPTNQLCRCARVCRRWYNLAWDPRLWRTIRLTGETINVDRALKVLTRRLCQDTPNVCLMLETVTVSGCRRLTDRGLYTIAQCCPELRRLEVSGCYNISNEAVFDVVSLCPNLEHLDVSGCSKVTCISLTREASIKLSPLHGKQISIRYLDMTDCFVLEDEGLHTIAAHCTQLTHLYLRRCVRLTDEGLRYLVIYCASIKELSVSDCRFVSDFGLREIAKLESRLRYLSIAHCGRVTDVGIRYVAKYCSKLRYLNARGCEGITDHGVEYLAKNCTKLKSLDIGKCPLVSDTGLECLALNCFNLKRLSLKSCESITGQGLQIVAANCFDLQTLNVQDCEVSVEALRFVKRHCKRCVIEHTNPAFF

SEQ ID NO: 45966 - protein, 491 aa, Homo sapiens
MGANNGKQYGSEGKGSSSISSDVSSSTDHTPTKAQKNVATSEDSDLSMRTLSTPSPALICPPNLPGFQNGRGSSTSSSSITGETVAMVHSPPPTRLTHPLIRLASRPQKEQASIDRLPDHSMVQIFSFLPTNQLCRCARVCRRWYNLAWDPRLWRTIRLTGETINVDRALKVLTRRLCQDTPNVCLMLETVTVSGCRRLTDRGLYTIAQCCPELRRLEVSGCYNISNEAVFDVVSLCPNLEHLDVSGCSKVTCISLTREASIKLSPLHGKQISIRYLDMTDCFVLEDEGLHTIAAHCTQLTHLYLRRCVRLTDEGLRYLVIYCASIKELSVSDCRFVSDFGLREIAKLESRLRYLSIAHCGRVTDVGIRYVAKYCSKLRYLNARGCEGITDHGVEYLAKNCTKLKSLDIGKCPLVSDTGLECLALNCFNLKRLSLKSCESITGQGLQIVAANCFDLQTLNVQDCEVSVEALRFVKRHCKRCVIEHTNPAFF

SEQ ID NO: 45967 - protein, 999 aa, Homo sapiens
MENLESRLKNAPYFRCEKGTDSIPLCRKCETCVLAWKIFSTKEWFCRINDISQRRFLVGILKQLNSLYLLHYFQNILQTTQGKDFIYNRSRINLSKKEGKVVKSSLNQMLDKTVEQKMKEILYWFANSTQWTKANYTLLLLQMCNPKLLLTAANVIRVLFLREENNISGLNQDITDVCFSPEKDHSSKSATSQVYWTAKTQHTSLPLSKAPENEHLLGAASNPEEPWRNSLRCISEMNRLFSGKGDITKPGYDPCNLLVDLDDIRDLSSGFSKYRDFIRYLPIHLSKYILRMLDRHTLNKCASVSQHWAAMAQQVKMDLSAHGFIQNQITFLQGSYTRGIDPNYANKVSIPVPKMVDDGKSMRVKHPKWKLRTKNEYNLWTAYQNEETQQVLIEERNVFCGTYNVRILSDTWDQNRVIHYSGGDLIAVSSNRKIHLLDIIQVKAIPVEFRGHAGSVRALFLCEEENFLLSGSYDLSIRYWDLKSGVCTRIFGGHQGTITCMDLCKNRLVSGGRDCQVKVWDVDTGKCLKTFRHKDPILATRINDTYIVSSCERGLVKVWHIAMAQLVKTLSGHEGAVKCLFFDQWHLLSGSTDGLVMAWSMVGKYERCLMAFKHPKMVVNTESNVLMFQFEHIKWQYAVEKTKQKKNKEKEEEKEENSLMEILSKCNIQVHSPRESVSSKQTVIQELLPGKPPKSRVLLKPAKFSSAVLIEELQSQGKSKSPRRDADDVEKAQKQGQLETPGKLPSHPKKKSWKIPMSPDQFLLTVSALQHAHNSGEFAYPCRPQTEITDVWGPSISYPRKVLNFKGKSIQRAVDRLRLSNPPIDVKRTSIPLEIQKLQPNLKISLHSPRVQSTIPQPMIIRSRFSGSLKGGDQVTSSIERAVCSTGPLTSMQVIKPNRMLAPQVGTATLSLKKERPRIYTALDPFRVNTEFVLLTVKEEKEHQEAKMKEYQARESTGVVDPGKVSKAAWIRKIKGLPIDNFTKQGKTAAPELGQNVFI

SEQ ID NO: 45968 - protein, 1061 aa, Homo sapiens
MENLESRLKNAPYFRCEKGTDSIPLCRKCETCVLAWKIFSTKEWFCRINDISQRRFLVGILKQLNSLYLLHYFQNILQTTQGKDFIYNRSRINLSKKEGKVVKSSLNQMLDKTVEQKMKEILYWFANSTQWTKANYTLLLLQMCNPKLLLTAANVIRVLFLREENNISGLNQDITDVCFSPEKDHSSKSATSQVYWTAKTQHTSLPLSKAPENEHLLGAASNPEEPWRNSLRCISEMNRLFSGKGDITKPGYDPCNLLVDLDDIRDLSSGFSKYRDFIRYLPIHLSKYILSMLGCMRGFPRHLPSWPSSGVSGSIFFFPGMLDRHTLNKCASVSQHWAAMAQQVKMDLSAHGFIQNQITFLQGSYTRGIDPNYANKVSIPVPKMVDDGKSMRVKHPKWKLRTKNEYNLWTAYQNEETQQVLIEERNVFCGTYNVRILSDTWDQNRVIHYSGGDLIAVSSNRKIHLLDIIQVKAIPVEFRGHAGSVRALFLCEEENFLLSGSYDLSIRYWDLKSGVCTRIFGGHQGTITCMDLCKNRLVSGGRDCQVKVWDVDTGKCLKTFRHKDPILATRINDTYIVSSCERGLVKVWHIAMAQLVKTLSGHEGAVKCLFFDQWHLLSGSTDGLVMAWSMVGKYERCLMAFKHPKEVLDVSLLFLRVISACADGKIRIYNFLNGNCMKVLKANGRGDPVLSFFIQGNRMVVNTESNVLMFQFEHIKWQYAVEKTKQKKNKEKEEEKEENSLMEILSKCNIQVHSPRESVSSKQTVIQELLPGKPPKSRVLLKPAKFSSDDVEKAQKQGQLETPGKLPSHPKKKSWKIPMSPDQFLLTVSALQHAHNSGEFAYPCRPQTEITDVWGPSISYPRKVLNFKGKSIQRAVDRLRLSNPPIDVKRTSIPLEIQKLQPNLKISLHSPRVQSTIPQPMIIRSRFSGSLKGGDQVTSSIERAVCSTGPLTSMQVIKPNRMLAPQVGTATLSLKKERPRIYTALDPFRVNTEFVLLTVKEEKEHQEAKMKEYQARESTGVVDPGKVSKAAWIRKIKGLPIDNFTKQGKTAAPELGQNVFI

SEQ ID NO: 45969 - protein, 1052 aa, Homo sapiens
MENLESRLKNAPYFRCEKGTDSIPLCRKCETCVLAWKIFSTKEWFCRINDISQRRFLVGILKQLNSLYLLHYFQNILQTTQGKDFIYNRSRINLSKKEGKVVKSSLNQMLDKTVEQKMKEILYWFANSTQWTKANYTLLLLQMCNPKLLLTAANVIRVLFLREENNISGLNQDITDVCFSPEKDHSSKSATSQVYWTAKTQHTSLPLSKAPENEHLLGAASNPEEPWRNSLRCISEMNRLFSGKGDITKPGYDPCNLLVDLDDIRDLSSGFSKYRDFIRYLPIHLSKYILRMLDRHTLNKCASVSQHWAAMAQQVKMDLSAHGFIQNQITFLQGSYTRGIDPNYANKVSIPVPKMVDDGKSMRVKHPKWKLRTKNEYNLWTAYQNEETQQVLIEERNVFCGTYNVRILSDTWDQNRVIHYSGGDLIAVSSNRKIHLLDIIQVKAIPVEFRGHAGSVRALFLCEEENFLLSGSYDLSIRYWDLKSGVCTRIFGGHQGTITCMDLCKNRLVSGGRDCQVKVWDVDTGKCLKTFRHKDPILATRINDTYIVSSCERGLVKVWHIAMAQLVKTLSGHEGAVKCLFFDQWHLLSGSTDGLVMAWSMVGKYERCLMAFKHPKEVLDVSLLFLRVISACADGKIRIYNFLNGNCMKVLKANGRGDPVLSFFIQGNRMVVNTESNVLMFQFEHIKWQYAVEKTKQKKNKEKEEEKEENSLMEILSKCNIQVHSPRESVSSKQTVIQELLPGKPPKSRVLLKPAKFSSAVLIEELQSQGKSKSPRRDADDVEKAQKQGQLETPGKLPSHPKKKSWKIPMSPDQFLLTVSALQHAHNSGEFAYPCRPQTEITDVWGPSISYPRKVLNFKGKSIQRAVDRLRLSNPPIDVKRTSIPLEIQKLQPNLKISLHSPRVQSTIPQPMIIRSRFSGSLKGGDQVTSSIERAVCSTGPLTSMQVIKPNRMLAPQVGTATLSLKKERPRIYTALDPFRVNTEFVLLTVKEEKEHQEAKMKEYQARESTGVVDPGKVSKAAWIRKIKGLPIDNFTKQGKTAAPELGQNVFI

SEQ ID NO: 45970 - protein, 1051 aa, Homo sapiens
MENLESRLKNAPYFRCEKGTDSIPLCRKCETCVLAWKIFSTKEWFCRINDISQRRFLVGILKQLNSLYLLHYFQNILQTTQGKDFIYNRSRINLSKKEGKVVKSSLNQMLDKTVEQKMKEILYWFANSTQWTKANYTLLLLQMCNPKLLLTAANVIRVLFLREENNISGLNQDITDVCFSPEKDHSSKSATSQVYWTAKTQHTSLPLSKAPENEHLLGAASNPEEPWRNSLRCISEMNRLFSGKGDITKPGYDPCNLLVDLDDIRDLSSGFSKYRDFIRYLPIHLSKYILRMLDRHTLNKCASVSQHWAAMAQQVKMDLSAHGFIQNQITFLQGSYTRGIDPNYANKVSIPVPKMVDDGKSMRVKHPKWKLRTKNEYNLWTAYQNEETQQVLIEERNVFCGTYNVRILSDTWDQNRVIHYSGGDLIAVSSNRKIHLLDIIQVKAIPVEFRGHAGSVRALFLCEEENFLLSGSYDLSIRYWDLKSGVCTRIFGGHQGTITCMDLCKNRLVSGGRDCQVKVWDVDTGKCLKTFRHKDPILATRINDTYIVSSCERGLVKVWHIAMAQLVKTLSGHEGAVKCLFFDQWHLLSGSTDGLVMAWSMVGKYERCLMAFKHPKEVLDVSLLFLRVISACADGKIRIYNFLNGNCMKVLKANGRGDPVLSFFIQGNRMVVNTESNVLMFQFEHIKWQYAVEKTKQKKNKEKEEEKEENSLMEILSKCNIQVHSPRESVSSKQTVIQELLPGKPPKSRVLLKPAKFSSAVLIEELQSQGKSKSPRRDDDVEKAQKQGQLETPGKLPSHPKKKSWKIPMSPDQFLLTVSALQHAHNSGEFAYPCRPQTEITDVWGPSISYPRKVLNFKGKSIQRAVDRLRLSNPPIDVKRTSIPLEIQKLQPNLKISLHSPRVQSTIPQPMIIRSRFSGSLKGGDQVTSSIERAVCSTGPLTSMQVIKPNRMLAPQVGTATLSLKKERPRIYTALDPFRVNTEFVLLTVKEEKEHQEAKMKEYQARESTGVVDPGKVSKAAWIRKIKGLPIDNFTKQGKTAAPELGQNVFI

SEQ ID NO: 45971 - protein, 542 aa, Homo sapiens
MEPDSVIEDKTIELMCSVPRSLWLGCANLVESMCALSCLQSMPSVRCLQISNGTSSVIVSRKRPSEGNYQKEKDLCIKYFDQWSESDQVEFVEHLISRMCHYQHGHINSYLKPMLQRDFITALPEQGLDHIAENILSYLDARSLCAAELVCKEWQRVISEGMLWKKLIERMVRTDPLWKGLSERRGWDQYLFKNRPTDGPPNSFYRSLYPKIIQDIETIESNWRCGRHNLQRIQCRSENSKGVYCLQYDDEKIISGLRDNSIKIWDKTSLECLKVLTGHTGSVLCLQYDERVIVTGSSDSTVRVWDVNTGEVLNTLIHHNEAVLHLRFSNGLMVTCSKDRSIAVWDMASATDITLRRVLVGHRAAVNVVDFDDKYIVSASGDRTIKVWSTSTCEFVRTLNGHKRGIACLQYRDRLVVSGSSDNTIRLWDIECGACLRVLEGHEELVRCIRFDNKRIVSGAYDGKIKVWDLQAALDPRAPASTLCLRTLVEHSGRVFRLQFDEFQIISSSHDDTILIWDFLNVPPSAQNETRSPSRTYTYISR

SEQ ID NO: 45972 - protein, 529 aa, Homo sapiens
MEPDSVIEDKTIELMNTSVMEDQNEDESPKKNTLWQISNGTSSVIVSRKRPSEGNYQKEKDLCIKYFDQWSESDQVEFVEHLISRMCHYQHGHINSYLKPMLQRDFITALPEQGLDHIAENILSYLDARSLCAAELVCKEWQRVISEGMLWKKLIERMVRTDPLWKGLSERRGWDQYLFKNRPTDGPPNSFYRSLYPKIIQDIETIESNWRCGRHNLQRIQCRSENSKGVYCLQYDDEKIISGLRDNSIKIWDKTSLECLKVLTGHTGSVLCLQYDERVIVTGSSDSTVRVWDVNTGEVLNTLIHHNEAVLHLRFSNGLMVTCSKDRSIAVWDMASATDITLRRVLVGHRAAVNVVDFDDKYIVSASGDRTIKVWSTSTCEFVRTLNGHKRGIACLQYRDRLVVSGSSDNTIRLWDIECGACLRVLEGHEELVRCIRFDNKRIVSGAYDGKIKVWDLQAALDPRAPASTLCLRTLVEHSGRVFRLQFDEFQIISSSHDDTILIWDFLNVPPSAQNETRSPSRTYTYISR

SEQ ID NO: 45973 - protein, 508 aa, Homo sapiens
MEPDSVIEDKTIELMISNGTSSVIVSRKRPSEGNYQKEKDLCIKYFDQWSESDQVEFVEHLISRMCHYQHGHINSYLKPMLQRDFITALPEQGLDHIAENILSYLDARSLCAAELVCKEWQRVISEGMLWKKLIERMVRTDPLWKGLSERRGWDQYLFKNRPTDGPPNSFYRSLYPKIIQDIETIESNWRCGRHNLQRIQCRSENSKGVYCLQYDDEKIISGLRDNSIKIWDKTSLECLKVLTGHTGSVLCLQYDERVIVTGSSDSTVRVWDVNTGEVLNTLIHHNEAVLHLRFSNGLMVTCSKDRSIAVWDMASATDITLRRVLVGHRAAVNVVDFDDKYIVSASGDRTIKVWSTSTCEFVRTLNGHKRGIACLQYRDRLVVSGSSDNTIRLWDIECGACLRVLEGHEELVRCIRFDNKRIVSGAYDGKIKVWDLQAALDPRAPASTLCLRTLVEHSGRVFRLQFDEFQIISSSHDDTILIWDFLNVPPSAQNETRSPSRTYTYISR

SEQ ID NO: 45974 - protein, 510 aa, Homo sapiens
MEDQNEDESPKKNTLWQISNGTSSVIVSRKRPSEGNYQKEKDLCIKYFDQWSESDQVEFVEHLISRMCHYQHGHINSYLKPMLQRDFITALPEQGLDHIAENILSYLDARSLCAAELVCKEWQRVISEGMLWKKLIERMVRTDPLWKGLSERRGWDQYLFKNRPTDGPPNSFYRSLYPKIIQDIETIESNWRCGRHNLQRIQCRSENSKGVYCLQYDDEKIISGLRDNSIKIWDKTSLECLKVLTGHTGSVLCLQYDERVIVTGSSDSTVRVWDVNTGEVLNTLIHHNEAVLHLRFSNGLMVTCSKDRSIAVWDMASATDITLRRVLVGHRAAVNVVDFDDKYIVSASGDRTIKVWSTSTCEFVRTLNGHKRGIACLQYRDRLVVSGSSDNTIRLWDIECGACLRVLEGHEELVRCIRFDNKRIVSGAYDGKIKVWDLQAALDPRAPASTLCLRTLVEHSGRVFRLQFDEFQIISSSHDDTILIWDFLNVPPSAQNETRSPSRTYTYISR

SEQ ID NO: 45975 - protein, 464 aa, Homo sapiens
MEIRLPDLALKRIFSFLDLFGLLQVSQVNKHWNRIADSDYLWRSLSLQRWDCSNFTNQHLGTHTWKQFFLHQRRKELRLALAQPHNFIYKVTKNIAFETELAYLSGNRLTVDEQEKSIICSVSPKQELCAWDVQEGTMIWSSPVQEFHFSNLVTLPQMHLAITMDRKKTIKVWNCQDRDALAVLPMPQPCYCMEAYLTKDGPFLMVGDAAGDIYTFTLPGLRDVSKVTAFQYGIVLLHCSPDKKWVFACGTYSRTLPQVFLTESLLRPSEGSVPLSTFLPHKLCASACWTPKVKNRITLMSQSSTGKKTEFITFDLTTKKTGGQTVIQAYEIASFQVAAHLKCPIWMGASDGYMIVFTSGPYLLLFSITGFLLQRFEDHQAAINNFWVDPCYVLTTSENSVHVYMWEEGGRHPYLRSCCHLENTWHDHTTDSCISSVMCDNASIVLRVRKVSDSSILVMYSLNT

SEQ ID NO: 45976 - protein, 363 aa, Homo sapiens
MLALRDEPHSPDSRSQAFETELAYLSGNRLTVDEQEKSIICSVSPKQELCAWDVQEMHLAITMDRKKTIKVWNCQDRDALAVLPMPQPCYCMEAYLTKDGPFLMVGDAAGDIYTFTLPGLRDVSKVTAFQYGIVLLHCSPDKKWVFACGTYSRTLPQVFLTESLLRPSEGSVPLSTFLPHKLCASACWTPKVKNRITLMSQSSTGKKTEFITFDLTTKKTGGQTVIQAYEIASFQVAAHLKCPIWMGASDGYMIVFTSGPYLLLFSITGFLLQRFEDHQAAINNFWVDPCYVLTTSENSVHVYMWEEGGRHPYLRSCCHLENTWHDHTTDSCISSVMCDNASIVLRVRKVSDSSILVMYSLNT

SEQ ID NO: 45977 - protein, 394 aa, Homo sapiens
MEIRLPDLALKRIFSFLDLFGLLQVSQVNKHWNRIADSDYLWRSLSLQRWDCSNFTNQHLGTHTWKQFFLHQRRKELRLALAQPHNFIYKVTKNIAFETELAYLSGNRLTVDEQEKSIICSVSPKQELCAWDVQEVGDAAGDIYTFTLPGLRDVSKVTAFQYGIVLLHCSPDKKWVFACGTYSRTLPQVFLTESLLRPSEGSVPLSTFLPHKLCASACWTPKVKNRITLMSQSSTGKKTEFITFDLTTKKTGGQTVIQAYEIASFQVAAHLKCPIWMGASDGYMIVFTSGPYLLLFSITGFLLQRFEDHQAAINNFWVDPCYVLTTSENSVHVYMWEEGGRHPYLRSCCHLENTWHDHTTDSCISSVMCDNASIVLRVRKVSDSSILVMYSLNT

SEQ ID NO: 45978 - protein, 445 aa, Homo sapiens
MSPTHQIQDPKHWNRIADSDYLWRSLSLQRWDCSNFTNQHLGTHTWKQFFLHQRRKELRLALAQPHNFIYKVTKNIAFETELAYLSGNRLTVDEQEKSIICSVSPKQELCAWDVQEGTMIWSSPVQEFHFSNLVTLPQMHLAITMDRKKTIKVWNCQDRDALAVLPMPQPCYCMEAYLTKDGPFLMVGDAAGDIYTFTLPGLRDVSKVTAFQYGIVLLHCSPDKKWVFACGTYSRTLPQVFLTESLLRPSEGSVPLSTFLPHKLCASACWTPKVKNRITLMSQSSTGKKTEFITFDLTTKKTGGQTVIQAYEIASFQVAAHLKCPIWMGASDGYMIVFTSGPYLLLFSITGFLLQRFEDHQAAINNFWVDPCYVLTTSENSVHVYMWEEGGRHPYLRSCCHLENTWHDHTTDSCISSVMCDNASIVLRVRKVSDSSILVMYSLNT

SEQ ID NO: 45979 - protein, 412 aa, Homo sapiens
MAAAAGEEEEEEEAARESAARPAAGPALWRLPEELLLLICSYLDMRALGRLAQVCRWLRRFTSCDLLWRRIARASLNSGFTRLGTDLMTSVPVKERVKVSQNWRLGRCREGILLKWRCRQMPWMQLEDDSLYISQANFILAYQFRPDGASLNRRPLGVFAGHDEDVCHFVLANSHIVSAGGDGKIGIHKIHSTFTVKYSAHEQEVNCVDCKGGIIVSGSRDRTAKVWPLASGRLGQCLHTIQTEDRVWSIAISPLLSSFVTGTACCGHFSPLRIWDLNSGQLMTHLGSDFPPGAGVLDVMYESPFTLLSCGYDTYVRYWDLRTSVRKCVMEWEEPHDSTLYCLQTDGNHLLATGSSYYGVVRLWDRRQRACLHAFPLTSTPLSSPVYCLRLTTKHLYAALSYNLHVLDFQNP

SEQ ID NO: 45980 - protein, 412 aa, Homo sapiens
MAAAAGEEEEEEEAARESAARPAAGPALWRLPEELLLLICSYLDMRALGRLAQVCRWLRRFTSCDLLWRRIARASLNSGFTRLGTDLMTSVPVKERVKVSQNWRLGRCREGILLKWRCSQMPWMQLEDDSLYISQANFILAYQFRPDGASLNRRPLGVFAGHDEDVCHFVLANSHIVSAGGDGKIGIHKIHSTFTVKYSAHEQEVNCVDCKGGIIVSGSRDRTAKVWPLASGRLGQCLHTIQTEDRVWSIAISPLLSSFVTGTACCGHFSPLRIWDLNSGQLMTHLGSDFPPGAGVLDVMYESPFTLLSCGYDTYVRYWDLRTSVRKCVMEWEEPHDSTLYCLQTDGNHLLATGSSYYGVVRLWDRRQRACLHAFPLTSTPLSSPVYCLRLTTKHLYAALSYNLHVLDFQNP

SEQ ID NO: 45981 - protein, 212 aa, Homo sapiens
MRALGRLAQVCRWLRRFTSCDLLWRRIARASLNSGFTRLGTDLMTSVPVKERVKVSQNWRLGRCREGILLKWRCRQMPWMQLEDDSLYISQANFILAYQFRPDGASLNRRPLGVFAGHDEDVCHFVLANSHIVSAGGDGKIGIHKIHSTFTVKYSAHEQEVNCVDCKGGIIVSGSRDRTAKVWPLASGRLGQCLHTIQTEDRVWSIAISPLL

SEQ ID NO: 45982 - protein, 191 aa, Homo sapiens
MTSVPVKERVKVSQNWRLGRCREGILLKWRCRQMPWMQLEDDSLYISQANFILAYQFRPDGASLNRRPLGVFAGHDEDVCHFVLANSHIVSAGGDGKIGIHKIHSTFTVKYSAHEQEVNCVDCKGGIIVSGSRDRTAKVWPLASGRLGQCLHTIQTEDRVWSIAISPLLSSFVTGTACCGHFSPLRIWDLN

SEQ ID NO: 45983 - protein, 627 aa, Homo sapiens
MCVPRSGLILSCICLYCGVLLPVLLPNLPFLTCLSMSTLESVTYLPEKGLYCQRLPSSRTHGGTESLKGKNTENMGFYGTLKMIFYKMKRKLDHGSEVRSFSLGKKPCKVSEYTSTTGLVPCSATPTTFGDLRAANGQGQQRRRITSVQPPTGLQEWLKMFQSWSGPEKLLALDELIDSCEPTQVKHMMQVIEPQFQRDFISLLPKELALYVLSFLEPKDLLQAAQTCRYWRILAEDNLLWREKCKEEGIDEPLHIKRRKVIKPGFIHSPWKSAYIRQHRIDTNWRRGELKSPKVLKGHDDHVITCLQFCGNRIVSGSDDNTLKVWSAVTGKCLRTLVGHTGGVWSSQMRDNIIISGSTDRTLKVWNAETGECIHTLYGHTSTVRCMHLHEKRVVSGSRDATLRVWDIETGQCLHVLMGHVAAVRCVQYDGRRVVSGAYDFMVKVWDPETETCLHTLQGHTNRVYSLQFDGIHVVSGSLDTSIRVWDVETGNCIHTLTGHQSLTSGMELKDNILVSGNADSTVKIWDIKTGQCLQTLQGPNKHQSAVTCLQFNKNFVITSSDDGTVKLWDLKTGEFIRNLVTLESGGSGGVVWRIRASNTKLVCAVGSRNGTEETKLLVLDFDVDMK

SEQ ID NO: 45984 - protein, 707 aa, Homo sapiens
MNQELLSVGSKRRRTGGSLRGNPSSSQVDEEQMNRVVEEEQQQQLRQQEEEHTARNGEVVGVEPRPGGQNDSQQGQLEENNNRFISVDEDSSGNQEEQEEDEEHAGEQDEEDEEEEEMDQESDDFDQSDDSSREDEHTHTNSVTNSSSIVDLPVHQLSSPFYTKTTKMKRKLDHGSEVRSFSLGKKPCKVSEYTSTTGLVPCSATPTTFGDLRAANGQGQQRRRITSVQPPTGLQEWLKMFQSWSGPEKLLALDELIDSCEPTQVKHMMQVIEPQFQRDFISLLPKELALYVLSFLEPKDLLQAAQTCRYWRILAEDNLLWREKCKEEGIDEPLHIKRRKVIKPGFIHSPWKSAYIRQHRIDTNWRRGELKSPKVLKGHDDHVITCLQFCGNRIVSGSDDNTLKVWSAVTGKCLRTLVGHTGGVWSSQMRDNIIISGSTDRTLKVWNAETGECIHTLYGHTSTVRCMHLHEKRVVSGSRDATLRVWDIETGQCLHVLMGHVAAVRCVQYDGRRVVSGAYDFMVKVWDPETETCLHTLQGHTNRVYSLQFDGIHVVSGSLDTSIRVWDVETGNCIHTLTGHQSLTSGMELKDNILVSGNADSTVKIWDIKTGQCLQTLQGPNKHQSAVTCLQFNKNFVITSSDDGTVKLWDLKTGEFIRNLVTLESGGSGGVVWRIRASNTKLVCAVGSRNGTEETKLLVLDFDVDMK

SEQ ID NO: 45985 - protein, 589 aa, Homo sapiens
MSKPGKPTLNHGLVPVDLKSAKEPLPHQTVMKIFSISIIAQGLPFCRRRMKRKLDHGSEVRSFSLGKKPCKVSEYTSTTGLVPCSATPTTFGDLRAANGQGQQRRRITSVQPPTGLQEWLKMFQSWSGPEKLLALDELIDSCEPTQVKHMMQVIEPQFQRDFISLLPKELALYVLSFLEPKDLLQAAQTCRYWRILAEDNLLWREKCKEEGIDEPLHIKRRKVIKPGFIHSPWKSAYIRQHRIDTNWRRGELKSPKVLKGHDDHVITCLQFCGNRIVSGSDDNTLKVWSAVTGKCLRTLVGHTGGVWSSQMRDNIIISGSTDRTLKVWNAETGECIHTLYGHTSTVRCMHLHEKRVVSGSRDATLRVWDIETGQCLHVLMGHVAAVRCVQYDGRRVVSGAYDFMVKVWDPETETCLHTLQGHTNRVYSLQFDGIHVVSGSLDTSIRVWDVETGNCIHTLTGHQSLTSGMELKDNILVSGNADSTVKIWDIKTGQCLQTLQGPNKHQSAVTCLQFNKNFVITSSDDGTVKLWDLKTGEFIRNLVTLESGGSGGVVWRIRASNTKLVCAVGSRNGTEETKLLVLDFDVDMK

SEQ ID NO: 45986 - protein, 531 aa, Homo sapiens
MLFFKCISLLLIWLIPGQSTTGLVPCSATPTTFGDLRAANGQGQQRRRITSVQPPTGLQEWLKMFQSWSGPEKLLALDELIDSCEPTQVKHMMQVIEPQFQRDFISLLPKELALYVLSFLEPKDLLQAAQTCRYWRILAEDNLLWREKCKEEGIDEPLHIKRRKVIKPGFIHSPWKSAYIRQHRIDTNWRRGELKSPKVLKGHDDHVITCLQFCGNRIVSGSDDNTLKVWSAVTGKCLRTLVGHTGGVWSSQMRDNIIISGSTDRTLKVWNAETGECIHTLYGHTSTVRCMHLHEKRVVSGSRDATLRVWDIETGQCLHVLMGHVAAVRCVQYDGRRVVSGAYDFMVKVWDPETETCLHTLQGHTNRVYSLQFDGIHVVSGSLDTSIRVWDVETGNCIHTLTGHQSLTSGMELKDNILVSGNADSTVKIWDIKTGQCLQTLQGPNKHQSAVTCLQFNKNFVITSSDDGTVKLWDLKTGEFIRNLVTLESGGSGGVVWRIRASNTKLVCAVGSRNGTEETKLLVLDFDVDMK

SEQ ID NO: 45987 - protein, 598 aa, Homo sapiens
MDDYSLDEFRRRWQEELAQAQAPKKRRRPEAAERRARRPEVGSGRGEQASGDPALAQRLLEGAGRPPAARATRAEGQDVASRSRSPLAREGAGGGEQLVDQLIRDLNEMNDVPFFDIQLPYELAINIFQYLDRKELGRCAQVSKTWKVIAEDEVLWYRLCQQEGHLPDSSISDYSCWKLIFQECRAKEHMLRTNWKNRKGAVSELEHVPDTVLCDVHSHDGVVIAGYTSGDVRVWDTRTWDYVAPFLESEDEEDEPGMQPNVSFVRINSSLAVAAYEDGFLNIWDLRTGKYPVHRFEHDARIQALALSQDDATVATASAFDVVMLSPNEEGYWQIAAEFEVPKLVQYLEIVPETRRYPVAVAAAGDLMYLLKAEDSARTLLYAHGPPVTCLDVSANQVAFGVQGLGWVYEGSKILVYSLEAGRRLLKLGNVLRDFTCVNLSDSPPNLMVSGNMDGRVRIHDLRSGNIALSLSAHQLRVSAVQMDDWKIVSGGEEGLVSVWDYRMNQKLWEVYSGHPVQHISFSSHSLITANVPYQTVMRNADLDSFTTHRRHRGLIRAYEFAVDQLAFQSPLPVCRSSCDAMATHYYDLALAFPYNHV

SEQ ID NO: 45988 - protein, 532 aa, Homo sapiens
MDDYSLDEFRRRWQEELAQAQAPKKRRRPEAAERRARRPENEMNDVPFFDIQLPYELAINIFQYLDRKELGRCAQVSKTWKVIAEDEVLWYRLCQQEGHLPDSSISDYSCWKLIFQECRAKEHMLRTNWKNRKGAVSELEHVPDTVLCDVHSHDGVVIAGYTSGDVRVWDTRTWDYVAPFLESEDEEDEPGMQPNVSFVRINSSLAVAAYEDGFLNIWDLRTGKYPVHRFEHDARIQALALSQDDATVATASAFDVVMLSPNEEGYWQIAAEFEVPKLVQYLEIVPETRRYPVAVAAAGDLMYLLKAEDSARTLLYAHGPPVTCLDVSANQVAFGVQGLGWVYEGSKILVYSLEAGRRLLKLGNVLRDFTCVNLSDSPPNLMVSGNMDGRVRIHDLRSGNIALSLSAHQLRVSAVQMDDWKIVSGGEEGLVSVWDYRMNQKLWEVYSGHPVQHISFSSHSLITANVPYQTVMRNADLDSFTTHRRHRGLIRAYEFAVDQLAFQSPLPVCRSSCDAMATHYYDLALAFPYNHV

SEQ ID NO: 45989 - protein, 532 aa, Homo sapiens; identical to SEQ ID NO: 45988

SEQ ID NO: 45990 - protein, 956 aa, Homo sapiens
MEAGGLPLELWRMILAYLHLPDLGRCSLVCRAWYELILSLDSTRWRQLCLGCTECRHPNWPNQPDVEPESWREAFKQHYLASKTWTKNALDLESSICFSLFRRRRERRTLSVGPGREFDSLGSALAMASLYDRIVLFPGVYEEQGEIILKVPVEIVGQGKLGEVALLASIDQHCSTTRLCNLVFTPAWFSPIMYKTTSGHVQFDNCNFENGHIQVHGPGTCQVKFCTFKNTHIFLHNVPLCVLENCEFVGSENNSVTVEGHPSADKNWAYKYLLGLIKSSPTFLPTEDSDFLMSLDLESRDQAWSPKTCDIVIEGSQSPTSPASSSPKPGSKAGSQEAEVGSDGERVAQTPDSSDGGLSPSGEDEDEDQLMYRLSYQVQGPRPVLGGSFLGPPLPGASIQLPSCLVLNSLQQELQKDKEAMALANSVQGCLIRKCLFRDGKGGVFVCSHGRAKMEGNIFRNLTYAVRCIHNSKIIMLRNDIYRCRASGIFLRLEGGGLIAGNNIYHNAEAGVDIRKKSNPLILCNQIHHGLRSGIVVLGNGKGIIRNNQIFSNKEAGIYILYHGNPVVSGNHIFKGRAAGIAVNENGKGLITENVIRENQWGGVDIRRGGIPVLRSNLICFGYSDGVVVGDEGKGLIEGNTIYANKGCGVWMMSSSLPHVTSNHVSYNGLYGVAVFSQKDGSSELPRGHRAQENFSEDGDAILWETELEKEDDPLRRPITIALVESNSINHNGASGLYVQSSEALHVITNVIHANGDRGITVAQSSQPTRVANNSISCNRQSGVKVEAQCKVELRGNGIYDNRGHGIITKGDSTIVIENDIIGNRGSGLQLLPRSDTKVIKNRIHSFRAYGIAVRGRAKALVQENIIFQGKTSKTIFQQISNNRECIMQNNKFLVFKKKSDTWRLVNPPARPHLENSLRRPSAAHNGQKVTAMATRITARVEGGYHSNRSVFCTIL

SEQ ID NO: 45991 - protein, 71 aa, Homo sapiens
MEAGGLPLELWRMILAYLHLPDLGRCSLVCRAWYELILSLDSTRWRQLCLGCTECRHPNWPNQPDVEPESW

SEQ ID NO: 45992 - protein, 481 aa, Homo sapiens
MLRNDIYRCRASGIFLRLEGGGLIAGNNIYHNAEAGVDIRKKSNPLILCNQIHHGLRSGIVVLGNGKGIIRNNQIFSNKEAGIYILYHGNPVVSGNHIFKGRAAGIAVNENGKGLITENVIRENQWGGVDIRRGGIPVLRSNLICFGYSDGVVVGDEGKGLIEGNTIYANKGCGVWMMSSSLPHVTSNHVSYNGLYGVAVFSQKDGSSELPRGHRAQENFSEDGDAILWETELEKEDDPLRRPITIALVESNSINHNGASGLYVQSSEALHVITNVIHANGDRGITVAQSSQPTRVANNSISCNRQSGVKVEAQCKVELRGNGIYDNRGHGIITKGDSTIVIENDIIGNRGSGLQLLPRSDTKVIKNRIHSFRAYGIAVRGRAKALVQENIIFQGKTSKTIFQQISNNRECIMQNNKFLVFKKKSDTWRLVNPPARPHLENSLRRPSAAHNGQKVTAMATRITARVEGGYHSNRSVFCTIL

SEQ ID NO: 45993 - protein, 843 aa, Homo sapiens
MVAEESGPGAQNSPYQLRRKTLLPKRTACPTKNSMEGASTSTTENFGHRAKRARVSGKSQDLSAAPAEQYLQEKLPDEVVLKIFSYLLEQDLCRAACVCKRFSELANDPILWKRLYMEVFEYTRPMMHPEPGKFYQINPEEYEHPNPWKESFQQLYKGAHVKPGFAEHFYSNPARYKGRENMLYYDTIEDALGGVQEAHFDGLIFVHSGIYTDEWIYIESPITMIGAAPGKVADKVIIENTRDSTFVFMEGSEDAYVGYMTIRFNPDDKSAQHHNAHHCLEITVNCSPIIDHCIIRSTCTVGSAVCVSGQGACPTIKHCNISDCENVGLYITDHAQGIYEDNEISNNALAGIWVKNHGNPIIRRNHIHHGRDVGVFTFDHGMGYFESCNIHRNRIAGFEVKAYANPTVVRCEIHHGQTGGIYVHEKGRGQFIENKIYANNFAGVWITSNSDPTIRGNSIFNGNQGGVYIFGDGRGLIEGNDIYGNALAGIQIRTNSCPIVRHNKIHDGQHGGIYVHEKGQGVIEENEVYSNTLAGVWVTTGSTPVLRRNRIHSGKQVGVYFYDNGHGVLEDNDIYNHMYSGVQIRTGSNPKIRRNKIWGGQNGGILVYNSGLGCIEDNEIFDNAMAGVWIKTDSNPTLRRNKIHDGRDGGICIFNGGRGLLEENDIFRNAQAGVLISTNSHPILRKNRIFDGFAAGIEITNHATATLEGNQIFNNRFGGLFLASGVNVTMKDNKIMNNQDAIEKAVSRGQCLYKISSYTSYPMHDFYRCHTCNTTDRNAICVNCIKKCHQGHDVEFIRHDRFFCDCGAGTLSNPCTLAGEPTHDTDTLYDSAPPIESNTLQHN

SEQ ID NO: 45994 - protein, 93 aa, Homo sapiens
MEGASTSTTENFGHRAKRARVSGKSQDLSAAPAEQYLQEKLPDEVVLKIFSYLLEQDLCRAACVCKRFSELANDPILWLGEVAHAYNPSTLGG

SEQ ID NO: 45995 - protein, 843 aa, Homo sapiens; identical to SEQ ID NO: 45993

SEQ ID NO: 45996 - protein, 927 aa, Homo sapiens
MNSVRAANRRPRRVSRPRPVQQQQQQPPQQPPPQPPQQQPPQQQPPPPPQQQQQQQPPPPPPPPPPLPQERNNVGERDDDVPADMVAEESGPGAQNSPYQLRRKTLLPKRTACPTKNSMEGASTSTTENFGHRAKRARVSGKSQDLSAAPAEQYLQEKLPDEVVLKIFSYLLEQDLCRAACVCKRFSELANDPILWKRLYMEVFEYTRPMMHPEPGKFYQINPEEYEHPNPWKESFQQLYKGAHVKPGFAEHFYSNPARYKGRENMLYYDTIEDALGGVQEAHFDGLIFVHSGIYTDEWIYIESPITMIGAAPGKVADKVIIENTRDSTFVFMEGSEDAYVGYMTIRFNPDDKSAQHHNAHHCLEITVNCSPIIDHCIIRSTCTVGSAVCVSGQGACPTIKHCNISDCENVGLYITDHAQGIYEDNEISNNALAGIWVKNHGNPIIRRNHIHHGRDVGVFTFDHGMGYFESCNIHRNRIAGFEVKAYANPTVVRCEIHHGQTGGIYVHEKGRGQFIENKIYANNFAGVWITSNSDPTIRGNSIFNGNQGGVYIFGDGRGLIEGNDIYGNALAGIQIRTNSCPIVRHNKIHDGQHGGIYVHEKGQGVIEENEVYSNTLAGVWVTTGSTPVLRRNRIHSGKQVGVYFYDNGHGVLEDNDIYNHMYSGVQIRTGSNPKIRRNKIWGGQNGGILVYNSGLGCIEDNEIFDNAMAGVWIKTDSNPTLRRNKIHDGRDGGICIFNGGRGLLEENDIFRNAQAGVLISTNSHPILRKNRIFDGFAAGIEITNHATATLEGNQIFNNRFGGLFLASGVNVTMKDNKIMNNQDAIEKAVSRGQCLYKISSYTSYPMHDFYRCHTCNTTDRNAICVNCIKKCHQGHDVEFIRHDRFFCDCGAGTLSNPCTLAGEPTHDTDTLYDSAPPIESNTLQHN

SEQ ID NO: 45997 - protein, 351 aa, Homo sapiens [sequence omitted]

SEQ ID NO: 45998 - protein, 434 aa, Homo sapiens
MPSEILLKIFSYLDAVSLLCTGCVSRRFYHLANDNFIWIGIYSTAFSPARSNWKFNSVEKIAMSMSFLSVQDKEAGYWKKEYITKQIASVKAALADILKPVNPYTGLPVKTKEALRIFGLGWAIILKEKGGKEYIMEHVDLSINDTSVTVIWYGKKWPCLASLSTLDLCGMTPVFTDWYKTPTKHRLRWHSLIAKYNLSHLTISTMIGCDRLIRIFCLHPGLLVGVWKKEEELAFVMANLHFHHLVERSTLGSATIPYELPPHSPFLDDSPEYGLHGYQLHVDLHSGGVFYLCGTFRNLFTKRGNIENGHVKLIVIHLKNNREHLPLIGKVGLSWKTDIFDGCIKSCSMMDVTLLDEHGKPFWCFSSPVCLRSPATPSDSSSFLGQTYNVDYVDAEGRVHVELVWIRETEEYLIVNLVLYLSIAKINHWFGTEY

SEQ ID NO: 45999 - protein, 510 aa, Homo sapiens
MATGRGRILQQHWLGLQTLRGPSRGGGAARGRARAFGCRKGPGVKLSAGSAALRCHAGGGQHWESSFSCCSGFLDGMPSEILLKIFSYLDAVSLLCTGCVSRRFYHLANDNFIWIGIYSTAFSPARSNWKFNSVEKIAMSMSFLSVQDKEAGYWKKEYITKQIASVKAALADILKPVNPYTGLPVKTKEALRIFGLGWAIILKEKGGKEYIMEHVDLSINDTSVTVIWYGKKWPCLASLSTLDLCGMTPVFTDWYKTPTKHRLRWHSLIAKYNLSHLTISTMIGCDRLIRIFCLHPGLLVGVWKKEEELAFVMANLHFHHLVERSTLGSATIPYELPPHSPFLDDSPEYGLHGYQLHVDLHSGGVFYLCGTFRNLFTKRGNIENGHVKLIVIHLKNNREHLPLIGKVGLSWKTDIFDGCIKSCSMMDVTLLDEHGKPFWCFSSPVCLRSPATPSDSSSFLGQTYNVDYVDAEGRVHVELVWIRETEEYLIVNLVLYLSIAKINHWFGTEY

SEQ ID NO: 46000 - protein, 292 aa, Homo sapiens
MMAFAPPKNTDGPKMQTKMSTWTPLNHQLLNDRVFEERRALLGKWFDKWTDSQRRRILTGLLERCSLSQQKFCCRKLQEKIPAEALDFTTKLPRVLSLYIFSFLDPRSLCRCAQVCWHWKNLAELDQLWMLKCLRFNWYINFSPTPFEQGIWKKHYIQMVKELHITKPKTPPKDGFVIADVQLVTSNSPEEKQSPLSAFRSSSSLRKKNNSGEKALPPWRSSDKHPTDIIRFNYLDNRDPMETVQQGRRKRNQMTPDFSRQSHDKKNKLQDRTRLRKAQSMMSRRNPFPLCP

SEQ ID NO: 46001 - protein, 296 aa, Homo sapiens
MDGDGDPESVGQPEEASPEEQPEEASAEEERPEDQQEEEAAAAAAYLDELPEPLLLRVLAALPAAELVQACRLVCLRWKELVDGAPLWLLKCQQEGLVPEGGVEEERDHWQQFYFLSKRRRNLLRNPCGEEDLEGWCDVEHGGDGWRVEELPGDSGVEFTHDESVKKYFASSFEWCRKAQVIDLQAEGYWEELLDTTQPAIVVKDWYSGRSDAGCLYELTVKLLSEHENVLAEFSSGQVAVPQDSDGGGWMEISHTFTDYGPGVRFVRFEHGGQDSVYWKGWFGARVTNSSVWVEP

SEQ ID NO: 46002 - protein, 197 aa, Homo sapiens
MDGDGDPESVGQPEEASPEEQPEEASAEEERPEDQQEEEAAAAAAYLDELPEPLLLRVLAALPAAELVQACRLVCLRWKELVDGAPLWLLKCQQEGLVPEGGVEEERDHWQQFYFLSKRRRNLLRNPCGEEDLEGWCDVEHGGDGWRVEELPGDSGVEFTHDESAPVLPGGVAKHRGLLGGAAGHDSAGHRGEGLVR

SEQ ID NO: 46003 - protein, 537 aa, Homo sapiens
MKHYSPTDYVNWLEEYKVRQKAGLEARKIVASFSKRFFSEHVPCNGFSDIENLEGPEIFFEDELVCILNMEGRKALTWKYYAKKILYYLRQQKILNNLKAFLQQPDDYESYLEGAVYIDQYCNPLSDISLKDIQAQIDSIVELVCKTLRGINSRHPSLAFKAGESSMIMEIELQSQVLDAMNYVLYDQLKFKGNRMDYYNALNLYMHQVLIRRTGIPISMSLLYLTIARQLGVPLEPVNFPSHFLLRWCQGAEGATLDIFDYIYIDAFGKGKQLTVKECEYLIGQHVTAALYGVVNVKKVLQRMVGNLLSLGKREGIDQSYQLLRDSLDLYLAMYPDQVQLLLLQARLYFHLGIWPEKVLDILQHIQTLDPGQHGAVGYLVQHTLEHIERKKEEVGVEVKLRSDEKHRDVCYSIGLIMKHKRYGYNCVIYGWDPTCMMGHEWIRNMNVHSLPHGHHQPFYNVLVEDGSCRYAAQENLEYNVEPQEISHPDVGRYFSEFTGTHYIPNAELEIRYPEDLEFVYETVQNIYSAKKENIDE

SEQ ID NO: 46004 - protein, 628 aa, Homo sapiens
MAAAAVDSAMEVVPALAEEAAPEVAGLSCLVNLPGEVLEYILCCGSLTAADIGRVSSTCRRLRELCQSSGKVWKEQFRVRWPSLMKHYSPTDYVNWLEEYKVRQKAGLEARKIVASFSKRFFSEHVPCNGFSDIENLEGPEIFFEDELVCILNMEGRKALTWKYYAKKILYYLRQQKILNNLKAFLQQPDDYESYLEGAVYIDQYCNPLSDISLKDIQAQIDSIVELVCKTLRGINSRHPSLAFKAGESSMIMEIELQSQVLDAMNYVLYDQLKFKGNRMDYYNALNLYMHQVLIRRTGIPISMSLLYLTIARQLGVPLEPVNFPSHFLLRWCQGAEGATLDIFDYIYIDAFGKGKQLTVKECEYLIGQHVTAALYGVVNVKKVLQRMVGNLLSLGKREGIDQSYQLLRDSLDLYLAMYPDQVQLLLLQARLYFHLGIWPEKSFCLVLKVLDILQHIQTLDPGQHGAVGYLVQHTLEHIERKKEEVGVEVKLRSDEKHRDVCYSIGLIMKHKRYGYNCVIYGWDPTCMMGHEWIRNMNVHSLPHGHHQPFYNVLVEDGSCRYAAQENLEYNVEPQEISHPDVGRYFSEFTGTHYIPNAELEIRYPEDLEFVYETVQNIYSAKKENIDE

SEQ ID NO: 46005 - protein, 621 aa, Homo sapiens
MAAAAVDSAMEVVPALAEEAAPEVAGLSCLVNLPGEVLEYILCCGSLTAADIGRVSSTCRRLRELCQSSGKVWKEQFRVRWPSLMKHYSPTDYVNWLEEYKVRQKAGLEARKIVASFSKRFFSEHVPCNGFSDIENLEGPEIFFEDELVCILNMEGRKALTWKYYAKKILYYLRQQKILNNLKAFLQQPDDYESYLEGAVYIDQYCNPLSDISLKDIQAQIDSIVELVCKTLRGINSRHPSLAFKAGESSMIMEIELQSQVLDAMNYVLYDQLKFKGNRMDYYNALNLYMHQVLIRRTGIPISMSLLYLTIARQLGVPLEPVNFPSHFLLRWCQGAEGATLDIFDYIYIDAFGKGKQLTVKECEYLIGQHVTAALYGVVNVKKVLQRMVGNLLSLGKREGIDQSYQLLRDSLDLYLAMYPDQVQLLLLQARLYFHLGIWPEKVLDILQHIQTLDPGQHGAVGYLVQHTLEHIERKKEEVGVEVKLRSDEKHRDVCYSIGLIMKHKRYGYNCVIYGWDPTCMMGHEWIRNMNVHSLPHGHHQPFYNVLVEDGSCRYAAQENLEYNVEPQEISHPDVGRYFSEFTGTHYIPNAELEIRYPEDLEFVYETVQNIYSAKKENIDE

SEQ ID NO: 46006 - protein, 477 aa, Homo sapiens
MKHYSPTDYVNWLEEYKVRQKAGLEARKIVASFSKRFFSEHVPCNGFSDIENLEGPEIFFEDELVCILNMEGRKALTWKYYAKKILYYLRQQKILNNLKAFLQQPDDYESYLEGAVYIDQYCNPLSDISLKDIQAQIDSIVELVCKTLRGINSRHPSLAFKAGESSMIMEIELQSQVLDAMNYVLYDQLKFKGNRMDYYNALNLYMHQVLIRRTGIPISMSLLYLTIARQLGVPLEPVNFPSHFLLRWCQGAEGEGIDQSYQLLRDSLDLYLAMYPDQVQLLLLQARLYFHLGIWPEKVLDILQHIQTLDPGQHGAVGYLVQHTLEHIERKKEEVGVEVKLRSDEKHRDVCYSIGLIMKHKRYGYNCVIYGWDPTCMMGHEWIRNMNVHSLPHGHHQPFYNVLVEDGSCRYAAQENLEYNVEPQEISHPDVGRYFSEFTGTHYIPNAELEIRYPEDLEFVYETVQNIYSAKKENIDE

SEQ ID NO: 46007 - protein, 403 aa, Homo sapiens
MEPVGCCGECRGSSVDPRSTFVLSNLAEVVERVLTFLPAKALLRVACVCRLWRECVRRVLRTHRSVTWISAGLAEAGHLEGHCLVRVVAEELENVRILPHTVLYMADSETFISLEECRGHKRARKRTSMETALALEKLFPKQCQVLGIVTPGIVVTPMGSGSNRPQEIEIGESGFALLFPQIEGIKIQPFHFIKDPKNLTLERHQLTEVGLLDNPELRVVLVFGYNCCKVGASNYLQQVVSTFSDMNIILAGGQVDNLSSLTSEKNPLDIDASGVVGLSFSGHRIQSATVLLNEDVSDEKTAEAAMQRLKAANIPEHNTIGFMFACVGRGFQYYRAKGNVEADAFRKFFPSVPLFGFFGNGEIGCDRIVTGNFILRKCNEVKDDDLFHSYTTIMALIHLGSSK

SEQ ID NO: 46008 - protein, 276 aa, Homo sapiens
MEPVGCCGECRGSSVDPRSTFVLSNLAEVVERVLTFLPAKALLRVACVCRLWRECVRRVLRTHRSVTWISAGLAEAGHLEGHCLVRVVAEELENVRILPHTVLYMADSETFISLEECRGHKRARKRTSMETALALEKLFPKQCQVLGIVTPGIVVTPMGSGSNRPQEIEIGESGFALLFPQIEGIKIQPFHFIKDPKNLTLERHQLTEVGLLDNPELRVVLVFGYNCCKVGASNYLQQVVSTFSDMNIILAGGQVDNLSSLTSEKYVLCASDFVCE

SEQ ID NO: 46009 - protein, 299 aa, Homo sapiens
MADSETFISLEECRGHKRARKRTSMETALALEKLFPKQCQVLGIVTPGIVVTPMGSGSNRPQEIEIGESGFALLFPQIEGIKIQPFHFIKDPKNLTLERHQLTEVGLLDNPELRVVLVFGYNCCKVGASNYLQQVVSTFSDMNIILAGGQVDNLSSLTSEKNPLDIDASGVVGLSFSGHRIQSATVLLNEDVSDEKTAEAAMQRLKAANIPEHNTIGFMFACVGRGFQYYRAKGNVEADAFRKFFPSVPLFGFFGNGEIGCDRIVTGNFILRKCNEVKDDDLFHSYTTIMALIHLGSSK

SEQ ID NO: 46010 - protein, 580 aa, Homo sapiens
MGEKAVPLLRRRRVKRSCPSCGSELGVEEKRGKGNPISIQLFPPELVEHIISFLPVRDLVALGQTCRYFHEVCDGEGVWRRICRRLSPRLQDQGSGVRPWKRAAILNYTKGLYFQAFGGRRRCLSKSVAPLLAHGYRRFLPTKDHVFILDYVGTLFFLKNALVSTLGQMQWKRACRYVVLCRGAKDFASDPRCDTVYRKYLYVLATREPQEVVGTTSSRACDCVEVYLQSSGQRVFKMTFHHSMTFKQIVLVGQETQRALLLLTEEGKIYSLVVNETQLDQPRSYTVQLALRKVSHYLPHLRVACMTSNQSSTLYVTDQGGVYFEVHTPGVYRDLFGTLQAFDPLDQQMPLALSLPAKILFCALGYNHLGLVDEFGRIFMQGNNRYGQLGTGDKMDRGEPTQVCYLQRPITLWCGLNHSLVLSQSSEFSKELLGCGCGAGGRLPGWPKGSASFVKLQVKVPLCACALCATRECLYILSSHDIEQHAPYRHLPASRVVGTPEPSLGARAPQDPGGMAQACEEYLSQIHSCQTLQDRTEKMKEIVGWMPLMAAQKDFFWEALDMLQRAEGGGGGVGPPAPET

SEQ ID NO: 46011 - protein, 318 aa, Homo sapiens
MGEKAVPLLRRRRVKRSCPSCGSELGVEEKRGKGNPISIQLFPPELVEHIISFLPVRDLVALGQTCRYFHEVCDGEGVWRRICRRLSPRLQDQDTKGLYFQAFGGRRRCLSKSVAPLLAHGYRRFLPTKDHVFILDYVGTLFFLKNALVSTLGQMQWKRACRYVVLCRGAKDFASDPRCDTVYRKYLYVLATREPQEVVGTTSSRACDCVEVYLQSSGQRVFKMTFHHSMTFKQIVLVGQETQRALLLLTEEGKIYSLVVNETQLDQPRSYTVQLALRKVSHYLPHLRVACMTSNQSSTLYVTDPILCSWLQPPWPGG

SEQ ID NO: 46012 - protein, 618 aa, Homo sapiens
MVWESQQERGGQGPRRQEGRSREGAIRMVRGSQRRKLQKFTRLCGREEGLRVKRSCPSCGSELGVEEKRGKGNPISIQLFPPELVEHIISFLPVRDLVALGQTCRYFHEVCDGEGVWRRICRRLSPRLQDQGSGVRPWKRAAILNYTKGLYFQAFGGRRRCLSKSVAPLLAHGYRRFLPTKDHVFILDYVGTLFFLKNALVSTLGQMQWKRACRYVVLCRGAKDFASDPRCDTVYRKYLYVLATREPQEVVGTTSSRACDCVEVYLQSSGQRVFKMTFHHSMTFKQIVLVGQETQRALLLLTEEGKIYSLVVNETQLDQPRSYTVQLALRKVSHYLPHLRVACMTSNQSSTLYVTDQGGVYFEVHTPGVYRDLFGTLQAFDPLDQQMPLALSLPAKILFCALGYNHLGLVDEFGRIFMQGNNRYGQLGTGDKMDRGEPTQVCYLQRPITLWCGLNHSLVLSQSSEFSKELLGCGCGAGGRLPGWPKGSASFVKLQVKVPLCACALCATRECLYILSSHDIEQHAPYRHLPASRVVGTPEPSLGARAPQDPGGMAQACEEYLSQIHSCQTLQDRTEKMKEIVGWMPLMAAQKDFFWEALDMLQRAEGGGGGVGPPAPET

SEQ ID NO: 46013 - protein, 318 aa, Homo sapiens; identical to SEQ ID NO: 46011

SEQ ID NO: 46014 - protein, 568 aa, Homo sapiens
MVKRSCPSCGSELGVEEKRGKGNPISIQLFPPELVEHIISFLPVRDLVALGQTCRYFHEVCDGEGVWRRICRRLSPRLQDQGSGVRPWKRAAILNYTKGLYFQAFGGRRRCLSKSVAPLLAHGYRRFLPTKDHVFILDYVGTLFFLKNALVSTLGQMQWKRACRYVVLCRGAKDFASDPRCDTVYRKYLYVLATREPQEVVGTTSSRACDCVEVYLQSSGQRVFKMTFHHSMTFKQIVLVGQETQRALLLLTEEGKIYSLVVNETQLDQPRSYTVQLALRKVSHYLPHLRVACMTSNQSSTLYVTDQGGVYFEVHTPGVYRDLFGTLQAFDPLDQQMPLALSLPAKILFCALGYNHLGLVDEFGRIFMQGNNRYGQLGTGDKMDRGEPTQVCYLQRPITLWCGLNHSLVLSQSSEFSKELLGCGCGAGGRLPGWPKGSASFVKLQVKVPLCACALCATRECLYILSSHDIEQHAPYRHLPASRVVGTPEPSLGARAPQDPGGMAQACEEYLSQIHSCQTLQDRTEKMKEIVGWMPLMAAQKDFFWEALDMLQRAEGGGGGVGPPAPET

SEQ ID NO: 46015 - protein, 367 aa, Homo sapiens
MPFLGQDWRSPGWSWIKTEDGWKRCESCSQKLERENNRCNISHSIILNSEDGEIFNNEEHEYASKKRKKDHFRNDTNTQSFYREKWIYVHKESTKERHGYCTLGEAFNRLDFSSAIQDIRRFNYVVKLLQLIAKSQLTSLSGVAQKNYFNILDKIVQKVLDDHHNPRLIKDLLQDLSSTLCILIRGVGKSVLVGNINIWICRLETILAWQQQLQDLQMTKQVNNGLTLSDLPLHMLNNILYRFSDGWDIITLGQVTPTLYMLSEDRQLWKKLCQYHFAEKQFCRHLILSEKGHIEWKLMYFALQKHYPAKEQYGDTLHFCRHCSILFWKDYHLALLFKDSGHPCTAADPDSCFTPVSPQHFIDLFKF

SEQ ID NO: 46016 - protein, 358 aa, Homo sapiens
MPFLGQDWRSPGWSWIKTEDGWKRCESCSQKLERENNRCNISHSIILNSEDGEIFNNEEHEYASKKRKKDHFRNDTNTQSFYREKWIYVHKESTKERHGYCTLGEAFNRLDFSSAIQDIRRFNYVVKLLQLIAKSQLTSLSGVAQKNYFNILDKIVQKVLDDHHNPRLIKDLLQDLSSTLCILIRGVGKSVLVGNINIWICRLETILAWQQQLQDLQMTKQVNNGLTLSDLPLHMLNNILYRFSDGWDIITLGQVTPTLYMLSEDRQLWKKLCQYHFAEKQFCRHLILSEKGHIEWKLMYFALQKHYPAKEQYGDTLHFCRHCSILFWKDSGHPCTAADPDSCFTPVSPQHFIDLFKF

SEQ ID NO: 46017 - protein, 291 aa, Homo sapiens
MEKYSIMKSMNMHRKKGKRTILEMTQILKRHGYCTLGEAFNRLDFSSAIQDIRRFNYVVKLLQLIAKSQLTSLSGVAQKNYFNILDKIVQKVLDDHHNPRLIKDLLQDLSSTLCILIRGVGKSVLVGNINIWICRLETILAWQQQLQDLQMTKQVNNGLTLSDLPLHMLNNILYRFSDGWDIITLGQVTPTLYMLSEDRQLWKKLCQYHFAEKQFCRHLILSEKGHIEWKLMYFALQKHYPAKEQYGDTLHFCRHCSILFWKDSGHPCTAADPDSCFTPVSPQHFIDLFKF

SEQ ID NO: 46018 - protein, 291 aa, Homo sapiens; identical to SEQ ID NO: 46017

SEQ ID NO: 46019 - protein, 330 aa, Homo sapiens
MPFLGQDWRSPGWSWIKTEDGWKRCESCSQKLERENNRCNISHSIILNSEDGEIFNNEEHEYASKKRKKDHFRNDTNTQSFYREKWIYVHKESTKERHGYCTLGEAFNRLDFSSAIQDIRRFNYVVKLLQLIAKSQLTSLSGVAQKNYFNILDKIVQKVLDDHHNPRLIKDLLQDLSSTLCILIRGVGKSVLVGNINIWICRLETILAWQQQLQDLQMTKQVNNGLTLSDLPLLSEDRQLWKKLCQYHFAEKQFCRHLILSEKGHIEWKLMYFALQKHYPAKEQYGDTLHFCRHCSILFWKDSGHPCTAADPDSCFTPVSPQHFIDLFKF

SEQ ID NO: 46020 - protein, 125 aa, Homo sapiens
MPFLGQDWRSPGWSWIKTEDGWKRCESCSQKLERENNRCNISHSIILNSEDGEIFNNEEHEYASKKRKKDHFRNDTNTQSFYREKWIYVHKESTKERHGYCTLGEAFNRLDFSSAIQDIRRFNYV

SEQ ID NO: 46021 - protein, 283 aa, Homo sapiens
MGASVSRGRAARVPAPEPEPEEALDLSQLPPELLLVVLSHVPPRTLLGRCRQVCRGWRALVDGQALWLLILARDHGATGRALLHLARSCQSPARNARPCPLGRFCARRPIGRNLIRNPCGQEGLRKWMVQHGGDGWVVEENRTTVPGAPSQTCFVTSFSWCCKKQVLDLEEEGLWPELLDSGRIEICVSDWWGARHDSGCMYRLLVQLLDANQTVLDKFSAVPDPIPQWNNNACLHVTHVFSNIKMGVRFVSFEHRGQDTQFWAGHYGARVTNSSVIVRVRLS

SEQ ID NO: 46022 - protein, 283 aa, Homo sapiens; identical to SEQ ID NO: 46021

SEQ ID NO: 46023 - protein, 368 aa, Homo sapiens
MAAAAEERMAEEGGGGQGDGGSSLASGSTQRQPPPPAPQHPQPGSQALPAPALAPDQLPQNNTLVALPIVAIENILSFMSYDEISQLRLVCKRMDLVCQRMLNQGFLKVERYHNLCQKQVKAQLPRRESERRNHSLARHADILAAVETRLSLLNMTFMKYVDSNLCCFIPGKVIDEIYRVLRYVNSTRAPQRAHEVLQELRDISSMAMEYFDEKIVPILKRKLPGSDVSGRLMGSPPVPGPSAALTTMQLFSKQNPSRQEVTKLQQQVKTNGAGVTVLRREISELRTKVQEQQKQLQDQDQKLLEQTQIIGEQNARLAELERKLREVMESAVGNSSGSGQNEESPRKRKKATEAIDSLRKSKRLRNRK

SEQ ID NO: 46024 - protein, 179 aa, Homo sapiens
MAAAAEERMAEEGGGGQGDGGSSLASGSTQRQPPPPAPQHPQPGSQALPAPALAPDQLPQNNTLVALPIVAIENILSFMSYDEISQLRLVCKRMDLVCQRMLNQGFLKVERYHNLCQKQVKAQLPRRESERRNHSLARHADILAAVETRLSLLNMTFMKYVDSNLCCFIPGKFQDRLQP

SEQ ID NO: 46025 - protein, 471 aa, Homo sapiens
MAAMETETAPLTLESLPTDPLLLILSFLDYRDLINCCYVSRRLSQLSSHDPLWRRHCKKYWLISEEEKTQKNQCWKSLFIDTYSDVGRYIDHYAAIKKAWDDLKKYLEPRCPRMVLSLKEGAREEDLDAVEAQIGCKLPDDYRCSYRIHNGQKLVVPGLLGSMALSNHYRSEDLLDVDTAAGGFQQRQGLKYCLPLTFCIHTGLSQYIAVEAAEGRNKNEVFYQCPDQMARNPAAIDMFIIGATFTDWFTSYVKNVVSGGFPIIRDQIFRYVHDPECVATTGDITVSVSTSFLPELSSVHPPHYFFTYRIRIEMSKDALPEKACQLDSRYWRITNAKGDVEEVQGPGVVGEFPIISPGRVYEYTSCTTFSTTSGYMEGYYTFHFLYFKDKIFNVAIPRFHMACPTFRVSIARLEMGPDEYEEMEEEEEEEEEEDEDDDSADMDESDEDDEEERRRRVFDVPIRRRRCSRLF

SEQ ID NO: 46026 - protein, 172 aa, Homo sapiens
METETAPLTLESLPTDPLLLILSFLDYRDLINCCYVSRRLSQLSSHDPLWRRHCKKYWLISEEEKTQKNQCWKSLFIDTYSDVGRYIDHYAAIKKAGMISRNIWSPGVLGWFVSINRGCSRGRPRCCGSADWCKLPDDYRCSYRIHNGQKLVVPGSYWEAWHCLITIVLKIC

SEQ ID NO: 46027 - protein, 415 aa, Homo sapiens
MAAMETETAPLTLESLPTDPLLLILSFLDYRDLINCCYVSRRLSQLSSHDPLWRRHCKKYWLISEEEKTQKNQCWKSLFIDTYSDVGRYIDHYAAIKKAWDDLKKYLEPRCPRMVLSLKEGAREEDLDAVEAQIGCKLPDDYRCSYRIHNGQKLVVPGLLGSMALSNHYRSEDLLDVDTAAGGFQQRQGLKYCLPLTFCIHTGLSQYIAVEAAEGRNKNEVFYQCPDQMARNPAAIDMFIIGATFTDWFTSYVKNVVSGGFPIIRDQIFRYVHDPECVATTGDITVSVSTSFLPELSSVHPPHYFFTYRIRIEMSKDALPEKACQLDSRYWRITNAKGDVEEVQGPGVVGEFPIISPGRVYEYTSCTTFSTTSGYMEGYYTFHFLYFKDKIFNVAIPRFHMACPTFRVSIARLVS

SEQ ID NO: 46028 - protein, 745 aa, Homo sapiens
MEEELQHSHCVNCVSRRCMTRPEPGISCDLIGCPLVCGAVFHSCKADEHRLLCPFERVPCLNSDFGCPFTMARNKVAEHLEMCPASVVCCTMEWNRWPVSYADRKSYENLSRDVDEVAQLDMALALQDQRMLLESLKVATMMSKATDKVSKPREQISVKSSVPEIPHANGLVSVDEESYGALYQATVETTRSLAAALDILNTATRDIGMLNTSVPNDMDEQQNARESLEDQNLKDQDHLYEEEIGAVGGIDYNDTNQNAQSEQNGSSDLLCDLNTSSYDTSALCNGFPLENICTQVIDQNQNLHGDSKQSNLTNGDCVASSDGTSKPSSSLAVAAQLREIIPSSALPNGTVQHILMPDDEGEGELCWKKVDLGDVKNVDVLSFSHAPSFNFLSNSCWSKPKEDKAVDTSDLEVAEDPMGLQGIDLITAALLFCLGDSPGGRGISDSRMADIYHIDVGTQTFSLPSAILATSTMVGEIASASACDHANPQLSNPSPFQTLGLDLVLECVARYQPKQRSMFTFVCGQLFRRKEFSSHFKNVHGDIHAGLNGWMEQRCPLAYYGCTYSQRRFCPSIQGAKIIHDRHLRSFGVQPCVSTVLVEPARNCVLGLHNDHLSSLPFEVLQHIAGFLDGFSLCQLSCVSKLMRDVCGSLLQSRGMVILQWGKRKYPEGNSSWQIKEKVWRFSTAFCSVNEWKFADILSMADHLKKCSYNVVEKREEAIPLPCMCVTRELTKEGRSLRSVLKPVL

SEQ ID NO: 46029 - protein, 539 aa, Homo sapiens
MAVCARLCGVGPSRGCRRRQQRRGPAETAAADSEPDTDPEEERIEASAGVGGGLCAGPSPPPPRCSLLELPPELLVEIFASLPGTDLPSLAQVCTKFRRILHTDTIWRRRCREEYGVCENLRKLEITGVSCRDVYAKLLHRYRHILGLWQPDIGPYGGLLNVVVDGLFIIGWMYLPPHDPHVDDPMRFKPLFRIHLMERKAATVECMYGHKGPHHGHIQIVKKDEFSTKCNQTDHHRMSGGRQEEFRTWLREEWGRTLEDIFHEHMQELILMKFIYTSQYDNCLTYRRIYLPPSRPDDLIKPGLFKGTYGSHGLEIVMLSFHGRRARGTKITGDPNIPAGQQTVEIDLRHRIQLPDLENQRNFNELSRIVLEVRERVRQEQQEGGHEAGEGRGRQGPRESQPSPAQPRAEAPSKGPDGTPGEDGGEPGDAVAAAEQPAQCGQGQPFVLPVGVSSRNEDYPRTCRMCFYGTGLIAGHGFTSPERTPGVFILFDEDRFGFVWLELKSFSLYSRVQATFRNADAPSPQAFDEMLKNIQSLTS

SEQ ID NO: 46030 - protein, 355 aa, Homo sapiens
MPFLGQDWRSPGQNWVKTADGWKRFLDEKSGSFVSDLSSYCNKEVYNKENLFNSLNYDVAAKKRKKDMLNSKTKTQYFHQEKWIYVHKGSTKERHGYCTLGEAFNRLDFSTAILDSRRFNYVVRLLELIAKSQLTSLSGIAQKNFMNILEKVVLKVLEDQQNIRLIRELLQTLYTSLCTLVQRVGKSVLVGNINMWVYRMETILHWQQQLNNIQITRPAFKGLTFTDLPLCLQLNIMQRLSDGRDLVSLGQAAPDLHVLSEDRLLWKKLCQYHFSERQIRKRLILSDKGQLDWKKMYFKLVRCYPRKEQYGDTLQLCKHCHILSWKGTDHPCTANNPESCSVSLSPQDFINLFKF

SEQ ID NO: 46031 - protein, 262 aa, Homo sapiens
MPFLGQDWRSPGQNWVKTADGWKRFLDEKSGSFVSDLSSYCNKEVYNKENLFNSLNYDVAAKKRKKDMLNSKTKTQYFHQEKWIYVHKGSTKERHGYCTLGEAFNRLDFSTAILDSRRFNYVVRPAFKGLTFTDLPLCLQLNIMQRLSDGRDLVSLGQAAPDLHVLSEDRLLWKKLCQYHFSERQIRKRLILSDKGQLDWKKMYFKLVRCYPRKEQYGDTLQLCKHCHILSWKGTDHPCTANNPESCSVSLSPQDFINLFKF

SEQ ID NO: 46032 - protein, 555 aa, Homo sapiens
MLLFLSVPQPRPPGARTRAGAARVARWRRLRLQQLRRLRGLLRVLRGRPGAGSRRRGRMALCGQAAGAASLPSELIVHIFSFLPAPDRLRASASCSHWRECLFYPALWPQLRICLRVSPAEQPRLEFLMRKCGWFVRELRVEFAAENYLSGGGPGDGGGADTGTGGEEVEALQLSARWLEVLRTYLELVLCVLVSIRNNRNLQKFSLFGDISVLQQQGSLSNTYLSKVDPDGKKIKQIQQLFEEILSNSRQLKWLSCGFMLEIVTPTSLSSLSNAVANTMEHLSLLDNNIPGNSTLITAVELERFVNLHSLALDFCDFTAEMARVLTDSNHVPLQRLSLLVHNVSVMHKSLDNMPNDEHWKALSRKSTSFRVYIMAFDIKSEDMLKILKPSIPLERIHFDSYITCVSGAIVDLISRQYDKFLTHFILMNDVIDTSGFPDLSDNRNEDPLVLLAWRCTKLSLLAIHGYTVWAHNLIAIARLRGSDLKVLEVTEESIDFDQGELADQDVDPVHNLIEQVSLGLGQPWHAVMDIESLSVFTEPNRHFYREMQSFSEDI

SEQ ID NO: 46033 - skipped

SEQ ID NO: 46034 - protein, 711 aa, Homo sapiens
MHLKPYWKLQKKEHPPEVSRETQRTPMNHQKAVNDETCKASHITSSVFPSASLGKASSRKPFGILSPNVLCSMSGKSPVESSLNVKTKKNAPSATIHQGEEEGPLDIWAVVKPGNTKEKIAFFASHQCSNRIGSMKIKSSWDIDGRATKRRKKSGDLKKAKVQVERMREVNSRCYQPEPFACGIEHCSVHYVSDSGDGVYAGRPLSVIQMVAFLEQRASALLASCSKNCTNSPAIVRFSGQSRGVPAVSESYSAPGACEEPTERGNLEVGEPQSEPVRVLDMVAKLESECLKRQGQREPGSLSRNNSFRRNVGRVLLANSTQADEGKTKKGVLEAPDTQVNPVGSVSVDCGPSRADRCSPKEDQAWDGASQDCPPLPAGVSFHIDSAELEPGSQTAVKNSNRYDVEMTDELVGLPFSSHTYSQASELPTDAVDCMSRELVSLTSRNPDQRKESLCISITVSKVDKDQPSILNSCEDPVPGMLFFLPPGQHLSDYSQLNESTTKESSEASQLEDAAGGDSASEEKSGSAEPFVLPASSVESTLPVLEASSWKKQVSHDFLETRFKIQQLLEPQQYMAFLPHHIMVKIFRLLPTKSLVALKCTCCYFKFIIEYYNIRPADSRWVRDPRYREDPCKQCKKKYVKGDVSLCRWHPKPYCQALPYGPGYWMCCHRSQKGFPGCKLGLHDNHWVPACHSFNRAIHKKAKGTEAEEEY

SEQ ID NO: 46035 - protein, 711 aa, Homo sapiens; identical to SEQ ID NO: 46034

SEQ ID NO: 46036 - protein, 188 aa, Homo sapiens
MASWLPETLFETVGQGPPPSKDYYQLLVTRSQVIFRWWKISLRSEYRSTKPGEAKETHEDFLENSHLQGQTALIFGARILDYVINLCKGKFDFLERLSDDLLLTIISYLDLEDIARLCQTSHRFAKLCMSDKLWEQIVQSTCDTITPDVRALAEDTGWRQLFFTNKLQLQRQLRKRKQKYGNLREKQP

SEQ ID NO: 46037 - protein, 943 aa, Homo sapiens
MGPRKKSVKTCIMNNEIPEEMTADETKDYMNQLSHEVLCHIFRYLPLQDIMCMECLSRKLKEAVTLYLRVVRVVDLCAGRWWEYMPSGFTDASFLTLLKKMPDVEQLYGLHPRYLERRRVRGHEAFSIPGVLEALQACPNLVGVETSHLELVESIWTYMPHVHILGKFRNRNGAFPIPPENKLKIPIGAKIQTLHLVGVNVPEIPCIPMLRHLYMKWVRLTKPQPFKDFLCISLRTFVMRNCAGPTNSLKYVPLVTGLASARNLEHLEMVRVPFLGGLIQHVVEDSWRSGGFRNLHTIVLGACKNALEVDLGYLIITAARRLHEVRIQPSLTKDGVFSALKMAELEFPQFETLHLGYVDEFLLQSRMANADLVKYGLADVVENPGIITDIGMKAVNEVFSCIKYLAIYNCPHLHNPYNWISDHSRWTRLVDINLVRCHALKLDSFGQFIELLPSLEFISLDQMFREPPKGCARVGLSAGTGIGVSSALVSNQNSNNDDNNAQNNNANIHDNNHHHPDDSDEENDFRQDLQPGEQQFAADALNEMEDIVQEDGEVVAESGNNTPAHSQAIIPVDVDEEQAGPSGLQRVVKPTSITVHDSESDDEEDSLELQEVWIPKNGTRRYSEREEKTGESVQSRELSEVAKTKPRHAMKRKRTADKSTSTSDPVIEDDHVQVLVLKSKNLVGVTMTNCGITDLVLKDCPKMMFIHATRCRVLKHLKVENAPIVNRFDYAQCKKLNMDQVLDQILRMPPERNRIIYLRPMQQVDTLTLEQKLFSGPYPYHICIIHEFSNPPNVRNKVRIRSWMDTIANINQELIKYEFFPEATRSEEDLKKYPKYPWGREIYTLEGVVDGAPYSMISDFPWLRSLRAAEPNSFARYDFEDDEESTIYAPRRKGQLSADICMETIGEEISEMRQMKKGVFQRVVAIFIHYCDVNGEPVEDDYI

SEQ ID NO: 46038 - protein, 1188 aa, Homo sapiens
MGPRKKSVKTCIMNNEIPEEMTADETKDYMNQLSHEVLCHIFRYLPLQDIMCMECLSRKLKEAVTLYLRVVRVVDLCAGRWWEYMPSGFTDASFLTLLKKMPDVEQLYGLHPRYLERRRVRGHEAFSIPGVLEALQACPNLVGVETSHLELVESIWTYMPHVHILGKFRNRNGAFPIPPENKLKIPIGAKIQTLHLVGVNVPEIPCIPMLRHLYMKWVRLTKPQPFKDFLCISLRTFVMRNCAGPTNSLKYVPLVTGLASARNLEHLEMVRVPFLGGLIQHVVEDSWRSGGFRNLHTIVLGACKNALEVDLGYLIITAARRLHEVRIQPSLTKDGVFSALKMAELEFPQFETLHLGYVDEFLLQSRMANADLVKYGLADVVENPGIITDIGMKAVNEVFSCIKYLAIYNCPHLHNPYNWISDHSRWTRLVDINLVRCHALKLDSFGQFIELLPSLEFISLDQMFREPPKGCARVGLSAGTGIGVSSALVSNQNSNNDDNNAQNNNANIHDNNHHHPDDSDEENDFRQDLQPGEQQFAADALNEMEDIVQEDGEVVAESGNNTPAHSQAIIPVDVDEEQAGPSGLQRVVKPTSITVHDSESDDEEDSLELQEVWIPKNGTRRYSEREEKTGESVQSRELSVSGKGKTPLRKRYNSHQMGQSKQFPLEESSCEKGCQVTSEQIKADMKAARDIPEKKKNKDVYPSCSSTTASTVGNSSSHNTASQSPDFVRTVNSGGSSEPSPTEVDVSRQCACSPGGSEDSEAMEEGDAESSVCPRCCCHRPQESQRRTSRCSDEERPSTSRACVVNGPDGTRSAFSFRTLPQGGSSGPAHDERTNGSGSGATGEDRRGSSQPESCDVQSNEDYPRRPLTRARSRLSHVLLVSESEVAKTKPRHAMKRKRTADKSTSTSDPVIEDDHVQVLVLKSKNLVGVTMTNCGITDLVLKDCPKMMFIHATRCRVLKHLKVENAPIVNRFDYAQCKKLNMDQVLDQILRMPPERNRIIYLRPMQQVDTLTLEQKLFSGPYPYHICIIHEFSNPPNVRNKVRIRSWMDTIANINQELIKYEFFPEATRSEEDLKKYPKYPWGREIYTLEGVVDGAPYSMISDFPWLRSLRAAEPNSFARYDFEDDEESTIYAPRRKGQLSADICMETIGEEISEMRQMKKGVFQRVVAIFIHYCDVNGEPVEDDYI

SEQ ID NO: 46039 - protein, 1113 aa, Homo sapiens
MGPRKKSVKTCIMNNEIPEEMTADETKDYMNQLSHEVLCHIFRYLPLQDIMCMECLSRKLKEAVTLYLRVVRVVDLCAGRWWEYMPSGFTDASFLTLLKKMPDVEQLYGLHPRYLERRRVRGHEAFSIPGVLEALQACPNLVGVETSHLELVESIWTYMPHVHILGKFRNRNGAFPIPPENKLKIPIGAKIQTLHLVGVNVPEIPCIPMLRHLYMKWVRLTKPQPFKDFLCISLRTFVMRNCAGPTNSLKYVPLVTGLASARNLEHLEMVRVPFLGGLIQHVVEDSWRSGGFRNLHTIVLGACKNALEVDLGYLIITAARRLHEVRIQPSLTKDGVFSALKMAELEFPQFETLHLGYVDEFLLQSRMANADLVKYGLADVVENPGIITDIGMKAVNEVFSCIKYLAIYNCPHLHNPYNWISDHSRWTRLVDINLVRCHALKLDSFGQFIELLPSLEFISLDQMFREPPKGCARVGLSAGTGIGVSSALVSNQNSNNDDNNAQNNNANIHDNNHHHPDDSDEENDFRQDLQPGEQQFAADALNEMEDIVQEDGEVVAESGNNTPAHSQAIIPVDVDEEQAGPSGLQRVVKPTSITVHDSESDDEEDSLELQEVWIPKNGTRRYSEREEKTGESVQSRELSVSGKGKTPLRKRYNSHQMGQSKQFPLEESSCEKGCQVTSEQIKADMKAARDIPEKKKNKDVYPSCSSTTASTVGNSSSHNTASQSPDFVRTVNSGGSSEPSPTEVDVSRQCACSPGGSEDSEAMEEGDAESSVCPRCCCHRPQESQRRTSRCSDEERPSTSRACVVNGPDEVAKTKPRHAMKRKRTADKSTSTSDPVIEDDHVQVLVLKSKNLVGVTMTNCGITDLVLKDCPKMMFIHATRCRVLKHLKVENAPIVNRFDYAQCKKLNMDQVLDQILRMPPERNRIIYLRPMQQVDTLTLEQKLFSGPYPYHICIIHEFSNPPNVRNKVRIRSWMDTIANINQELIKYEFFPEATRSEEDLKKYPKYPWGREIYTLEGVVDGAPYSMISDFPWLRSLRAAEPNSFARYDFEDDEESTIYAPRRKGQLSADICMETIGEEISEMRQMKKGVFQRVVAIFIHYCDVNGEPVEDDYI

SEQ ID NO: 46040 - protein, 943 aa, Homo sapiens; identical to SEQ ID NO: 46037

SEQ ID NO: 46041 - protein, 442 aa, Homo sapiens
MDEESELIQPQDQSCWAFLPDLCLCRVFWWLGDRDRSRAALVCRKWNQMMYSAELWRYRTITFSGRPSRVHASEVESAVWYVKKFGRYLEHLEVKFMNPYNAVLTKKFQVTMRGLLSCLSKSNNRLKSLSIQYLELDRLVWRNSIRSSFISSLSFFLKKMGKRLDYLNLKGARLTVEQGCQILDSLSYMRNENVISELNIEDYFSHHLAVYNSPQFKKTMSTFHNLVSLNLNYNCISDELLENLCENASTLRTINIKCHVHDPHGQVIWGMSWAKLARQATNLKVNFFFERIMKYERLARILLQEIPIRSISLRSCYFSDPDCSMRPTLIDLLPTFRHTLQKLTCEFNNNHESLDEELHLLIISCRKLFYFKIWAFLDVSFVERILKSQKERQCALRVFKARIYTNRYETNEEDKTLQEIYRKYRKLIESELSYFVIVYSVM

SEQ ID NO: 46042 - protein, 387 aa, Homo sapiens
MAGSEPRSGTNSPPPPFSDWGRLEAAILSGWKTFWQSVSKERVARTTSREEVDEAASTLTRLPIDVQLYILSFLSPHDLCQLGSTNHYWNETVRDPILWRYFLLRDLPSWSSVDWKSLPDLEILKKPISEVTDGAFFDYMAVYRMCCPYTRRASKSSRPMYGAVTSFLHSLIIQNEPRFAMFGPGLEELNTSLVLSLMSSEELCPTAGLPQRQIDGIGSGVNFQLNNQHKFNILILYSTTRKERDRAREEHTSAVNKMFSRHNEGDDQQGSRYSVIPQIQKVCEVVDGFIYVANAEAHKRHEWQDEFSHIMAMTDPAFGSSGRPLLVLSCISQGDVKRMPCFYLAHELHLNLLNHPWLVQDTEAETLTGFLNGIEWILEEVESKRAR

SEQ ID NO: 46043 - protein, 307 aa, Homo sapiens
MAGSEPRSGTNSPPPPFSDWGRLEAAILSGWKTFWQSVSKERVARTTSREEVDEAASTLTRLPIDVQLYILSFLSPHDLCQLGSTNHYWNETVRDPILWRYFLLRDLPSWSSVDWKSLPDLEILKKPISEVTDGAFFDYMAVYRMCCPYTRRASKSSRPMYGAVTSFLHSLIIQNEPRFAMFGPGLEELNTSLVLSLMSSEELCPTAGLPQRQIDGIGSGVNFQLNNQHKFNILILYSTTRKERDRAREEHTSAVNKMFSRHNEGDDQQGSRYSVIPQIQKVCEVVDGFIYVANAEAHKSKYSYVHF

SEQ ID NO: 46044 - protein, 709 aa, Homo sapiens
MGKARRSPPGHHRHCEGCFNRHCHIPVEPNTSCLVISCHLLCGATFHMCKEAEHQLLCPLEQVPCLNSEYGCPLSMSRHKLAKHLQVCPASVVCCSMEWNRWPNVDSETTLHENIMKETPSEECLDTALALQDQKVLFRSLKMVELFPETREATEEEPTMNGETSVEEMGGAVGGVDIGLVPHGLSATNGEMAELSQEEREVLAKTKEGMDLVKFGQWENIFSKEHAASALTNSSASCESKNKNDSEKEQISSGHNMVEGEGAPKKKEPQENQKQQDVRTAMETTGLAPWQDGVLERLKTAVDAKDYNMYLVHNGRMLIHFGQMPACTPKERDFVYGKLEAQEVKTVYTFKVPVSYCGKRARLGDAMLSCKPSEHKAVDTSDLGITVEDLPKSDLIKTTLQCALERELKGHVISESRSIDGLFMDFATQTYNFEPEQFSSGTVLADLTAATPGGLHVELHSECVTRRHNKSSSAFTFTCNKFFRRDEFPLHFKNVHTDIQSCLNGWFQHRCPLAYLGCTFVQNHFRPPGQKAKVIYSQELKTFAIKPEVAPELSEGRKNNHLLGHGGKSQNSLTSLPLEILKYIAGFLDSVSLAQLSQVSVLMRNICATLLQERGMVLLQWKKKRYSHGGTSWRVHREIWQFSSLFSKIKSWEFNEVTSMSEHLKSCPFNIVEHKTDPILLTSMCQPREQARESLVSTFRIRPRGRYVS

SEQ ID NO: 46045 - protein, 936 aa, Homo sapiens
MTTGLSDQQVVCDLDHRAVEALLQAVRKRMAGASPAVPHERARLTGGAAAVEPACRGGGGAMASLDLPYRCPRCGEHKRFRSLSSLRAHLEYSHTYETLYILSKTNSICDGAAAAAAAAAAASGFPLAPEPAALLAVPGARREVFESTSFQGKEQAAGPSPAAPHLLHHHHHHAPLAHFPGDLVPASLPCEELAEPGLVPAAAARYALREIEIPLGELFARKSVASSACSTPPPGPGPGPCPGPASASPASPSPADVAYEEGLARLKIRALEKLEVDRRLERLSEEVEQKIAGQVGRLQAELERKAAELETARQESARLGREKEELEERASELSRQVDVSVELLASLKQDLVHKEQELSRKQQEVVQIDQFLKETAAREASAKLRLQQFIEELLERADRAERQLQVISSSCGSTPSASLGRGGGGGGAGPNARGPGRMREHHVGPAVPNTYAVSRHGSSPSTGASSRVPAASQSSGCYDSDSLELPRPEEGAPEDSGPGGLGTRAQAANGGSERSQPPRSSGLRRQAIQNWQRRPRRHSTEGEEGDVSDVGSRTTESEAEGPLDAPRPGPAMAGPLSSCRLSARPEGGSGRGRRAERVSPSRSNEVISPEILKMRAALFCIFTYLDTRTLLHAAEVCRDWRFVARHPAVWTRVLLENARVCSKFLAMLAQWCTQAHSLTLQNLKPRQRGKKESKEEYARSTRGCLEAGLESLLKAAGGNLLILRISHCPNILTDRSLWLASCYCRALQAVTYRSATDPVGHEVIWALGAGCREIVSLQVAPLHPCQQPTRFSNRCLQMIGRCWPHLRALGVGGAGCGVQGLASLARNCMRLQVLELDHVSEITQEVAAEVCREGLKGLEMLVLTATPVTPKALLHFNSICRNLKSIVVQIGIADYFKEPSSPEAQKLFEDMVTKLQALRRRPGFSKILHIKVEGGC

SEQ ID NO: 46046 - protein, 875 aa, Homo sapiens
MASLDLPYRCPRCGEHKRFRSLSSLRAHLEYSHTYETLYILSKTNSICDGAAAAAAAAAAASGFPLAPEPAALLAVPGARREVFESTSFQGKEQAAGPSPAAPHLLHHHHHHAPLAHFPGDLVPASLPCEELAEPGLVPAAAARYALREIEIPLGELFARKSVASSACSTPPPGPGPGPCPGPASASPASPSPADVAYEEGLARLKIRALEKLEVDRRLERLSEEVEQKIAGQVGRLQAELERKAAELETARQESARLGREKEELEERASELSRQVDVSVELLASLKQDLVHKEQELSRKQQEVVQIDQFLKETAAREASAKLRLQQFIEELLERADRAERQLQVISSSCGSTPSASLGRGGGGGGAGPNARGPGRMREHHVGPAVPNTYAVSRHGSSPSTGASSRVPAASQSSGCYDSDSLELPRPEEGAPEDSGPGGLGTRAQAANGGSERSQPPRSSGLRRQAIQNWQRRPRRHSTEGEEGDVSDVGSRTTESEAEGPLDAPRPGPAMAGPLSSCRLSARPEGGSGRGRRAERVSPSRSNEVISPEILKMRAALFCIFTYLDTRTLLHAAEVCRDWRFVARHPAVWTRVLLENARVCSKFLAMLAQWCTQAHSLTLQNLKPRQRGKKESKEEYARSTRGCLEAGLESLLKAAGGNLLILRISHCPNILTDRSLWLASCYCRALQAVTYRSATDPVGHEVIWALGAGCREIVSLQVAPLHPCQQPTRFSNRCLQMIGRCWPHLRALGVGGAGCGVQGLASLARNCMRLQVLELDHVSEITQEVAAEVCREGLKGLEMLVLTATPVTPKALLHFNSICRNLKSIVVQIGIADYFKEPSSPEAQKLFEDMVTKLQALRRRPGFSKILHIKVEGGC

SEQ ID NO: 46047 - protein, 717 aa, Homo sapiens
MASSSDSEDDSFMAVDQEETVLEGTMDQDEEPHPVLEAEETRHNRSMSELPEEVLEYILSFLSPYQEHKTAALVCKQWYRLIKGVAHQCYHGFMKAVQEGNIQWESRTYPYPGTPITQRFSHSACYYDANQSMYVFGGCTQSSCNAAFNDLWRLDLNSKEWIRPLASGSYPSPKAGATLVVYKDLLVLFGGWTRPSPYPLHQPERFFDEIHTYSPSKNWWNCIVTTHGPPPMAGHSSCVIDDKMIVFGGSLGSRQMSNDVWVLDLEQWAWSKPNISGPSPHPRGGQSQIVIDDATILILGGCGGPNALFKDAWLLHMHSGPWAWQPLKVENEEHGAPELWCHPACRVGQCVVVFSQAPSGRAPLSPSLNSRPSPISATPPALVPETREYRSQSPVRSMDEAPCVNGRWGTLRPRAQRQTPSGSREGSLSPARGDGSPILNGGSLSPGTAAVGGSSLDSPVQAISPSTPSAPEGYDLKIGLSLAPRRGSLPDQKDLRLGSIDLNWDLKPASSSNPMDGMDNRTVGGSMRHPPEQTNGVHTPPHVASALAGAVSPGALRRSLEAIKAMSSKGPSASAALSPPLGSSPGSPGSQSLSSGETVPIPRPGPAQGDGHSLPPIARRLGHHPPQSLNVGKPLYQSMNCKPMQMYVLDIKDTKEKGRVKWKVFNSSSVVGPPETSLHTVVQGRGELIIFGGLMDKKQNVKYYPKTNALYFVRAKR

SEQ ID NO: 46048 - protein, 299 aa, Homo sapiens [sequence omitted]

SEQ ID NO: 46049 - protein, 299 aa, Homo sapiens [sequence omitted]

SEQ ID NO: 46050 - protein, 708 aa, Homo sapiens
MSFKDKDERISCLEAYVTLTSKSSRFTDETEILKMSQRHSGQAGTEAGNGADSPPIVNSKYSTFRDFCSTSSFQDSGYNELKSCSFDNIDKEYLGKKEKGPTLLYEHPETSGLGLTHPLESPTQKKKCILPRKEKDKTPELCETPKISGKKCLPRRRLNVSFALLKGDFESQNSSLESSISQVINLEKNIPSSASGFSRANNFSPLVTSTLKTEEVTSCSQKLRLNFSQQKTSTIDDSKDDCSLFEVECISPIQGNNFKDSITHDFSDSSLCINDENACPELLGSSVSGTTCGTDEDIFVTPISNLVANIRFNASQILSPSPEVRGSISTPEDSGFNSLSLEKSEDSLSDQEGSFQELLQKHKGTPKVGDTIRKTRHLGRSRRLSTLREQSSQSETEEEKQIVHPDSEKRAAAASAISEGQLSSDESGDLTFSLKNLSKTPALQLVHELFMKSKRKRLQENSGHEFLEQGDGEKIAVLQCILAGLIGKKMGIEKLDILTELKYRNLKHILAMVLESLTAESLCSVWKVSRNWREIVVQDKNANRRRKFYITQLKTDSEGAVLNVEDAATRLQLLNRSALRSVQAQARIPGSQREQGSTLSPWGEVLTPLASSSVTHLSSKQEEYVKVAKTLFTDEALKPCPRCQSPAKYQPYKKRGLCSRTACGFDFCVLCLCAYHGSEECSRGAAKPRNRKDALPGSAQSKRNLKRL

SEQ ID NO: 46051 - protein, 224 aa, Homo sapiens
MAVGNINELPENILLELFTHVPARQLLLNCRLVCSLWRDLIDLVTLWKRKCLREGFITEDWDQPVADWKIFYFLRSLHRNLLHNPCAEEGFEFWSLDVNGGDEWKVEDLSRDQRKEFPNDQVRSQARLRVQVPAVRSAPVVRARASGDLPARPGDHPAEERCQVEGGLPHILQLPARRPLHLVSARRRGHSLLGRLVRPEGHQQQHHHRAPAALTPPEPPSAEP

SEQ ID NO: 46052 - protein, 255 aa, Homo sapiens
MAVGNINELPENILLELFTHVPARQLLLNCRLVCSLWRDLIDLVTLWKRKCLREGFITEDWDQPVADWKIFYFLRSLHRNLLHNPCAEEGFEFWSLDVNGGDEWKVEDLSRDQRKEFPNDQVKKYFVTSYYTCLKSQVVDLKAEGYWEELMDTTRPDIEVKDWFAARPDCGSKYQLCVQLLSSAHAPLGTFQPDPATIQQKSDAKWREVSHTFSNYPPGVRYIWFQHGGVDTHYWAGWYGPRVTNSSITIGPPLP

SEQ ID NO: 46053 - protein, 224 aa, Homo sapiens; identical to SEQ ID NO: 46051

SEQ ID NO: 46054 - protein, 224 aa, Homo sapiens; identical to SEQ ID NO: 46051

SEQ ID NO: 46055 - protein, 256 aa, Homo sapiens
MAVGNINELPENILLELFTHVPARQLLLNCRLVCSLWRDLIDLVTLWKRKCLREGFITEDWDQPVADWKIFYFLRSLHRNLLHNPCAEEGFEFWSLDVNGGDEWKVEDLSRDQRKEFPNDQHLPQVPGGGPQGRRVLGGADGYHTAGHRGQGLVRSQARLRVQVPAVRSAPVVRARASGDLPARPGDHPAEERCQVEGGLPHILQLPARRPLHLVSARRRGHSLLGRLVRPEGHQQQHHHRAPAALTPPEPPSAEP

SEQ ID NO: 46056 - protein, 255 aa, Homo sapiens; identical to SEQ ID NO: 46052

SEQ ID NO: 46057 - protein, 165 aa, Homo sapiens
MAVGNINELPENILLELFTHVPARQLLLNCRLVCSLWRDLIDLVTLWKRKCLREGFITEDWDQPVADWKIFYFLRSLHRNLLHNPCAEEGFEFWSLDVNGGDEWKVEDLSRDQRKEFPNDQVRSQARLRVQVPAVRSAPVVRARASGDLPARPGDHPAEERCQVE

SEQ ID NO: 46058 - protein, 286 aa, Homo sapiens
MAAPAPGAGAASGGAGCSGGGAGAGAGSGSGAAGAGGRLPSRVLELVFSYLELSELRSCALVCKHWYRCLHGDENSEVWRSLCARSLAEEALRTDILCNLPSYKAKIRAFQHAFSTNDCSRNVYIKKNGFTLHRNPIAQSTDGARTKIGFSEGRHAWEVWWEGPLGTVAVIGIATKRAPMQCQGYVALLGSDDQSWGWNLVDNNLLHNGEVNGSFPQCNNAPKYQIGERIRVILDMEDKTLAFERGYEFLGVAFRGLPKVCLYPAVSAVYGNTEVTLVYLGKPLDG

SEQ ID NO: 46059 - protein, 603 aa, Homo sapiens
MDRGSLLPFQLWCPRPFGTYSQNQPRPPSAALKPSACPEPGGGAEPDHGPAHSENTPPALATEVPASQPAPLLSAAAAGDEGRVLLDTWYVIKPGNTKEKVAFFVAHQCGGGSRASSMKVKGHWGSDSSKAKRRRRCLDPTKAPPDPGGREGPPAAEEGPASAGEDVDLLSVAEMVALVEQRAALALQSYPRPTTPAPVVFVSAEQGGPAKGVGSERRSGGGDCSRVAEAVAHFEAQRDSPPTKGLRKEERPGPGPGEVRIAFRISNGREPRAPDSGLPSGGGGRPGCAYPGSPGPGARAKDKITCDLYQLISPSRDALPSNVEFLLARADEASEGDSPAPARPEDTPPAPPPPPARDCGASGFHVDVVVTGVVDECIFFGKDGTKNVKEETVCLTVSPEEPPPPGQLFFLQNRGPDGPPEPPPADSPATAPGPDDAEGTADTSLCRLYRHVSHDFLEIRFKIQRLLEPRQYMLLLPEHVLVKIFSFLPTRALAALKCTCHHFKGIIEAFGVRATDSRWSRDPLYRDDPCKQCRKRYEKGDVSLCRWHPKPYHHDLPYGRSYWMCCRRADRETPGCRLGLHDNNWVLPCNGPGGGRAGREEGR

SEQ ID NO: 46060 - protein, 202 aa, Homo sapiens
MTCLTDVPTGCAAVEPTARLPAAAWASTITTGCCPAMGQAGAGPAGRRGGEAGGGEGRAHHAHPSPLPREPRVRTGPPAHSPTPGSIDPSPELSWGSAGVTQESPLLDPVDFLLFRTRAVDPLRRVFFFFYQHLTFFSIQPQPPPCHAFHPKDPPAGSRRQLILVPLKGPPILAPILSLTPILSRWSCYFPRSRIAQGWHLS

SEQ ID NO: 46061 - protein, 452 aa, Homo sapiens
MASRINTNFTLIPNQKLRRSNRQTSCYSKTLGSGFQPISTFGNFKALPLEIFQIILKYLSVKDISMLSMVSKTVSQHIINYISTSSGSKRLLLQDFHNLELPDRRQDSAILEHYRSLGLLFKRCTLLLPTKERLKYIHKILTEVSCFKFNGCAAPMQCLGLTCYGMFLQTLTAGWDELECHRVYNFLCELTNLCRKIQMAVCSKPGSAQKLELRIRLFCRNVLLDHWTHRSDSAFWLTRILKPWPMVNQARLLYIIFGPISPQDGQVVWQEMIEEPTDEFSLKGLADAIKLLYDASTKEWTADDVISLVDELSVVPREWLLENNARLLMLSGNNICFSFMASKAVNGRTIELARLVVFLALVCEKELYCMDWTVKMMQKVCKVFSTPVERKNFLQNVANAFACVIMEMLQSIMSGDRDEDDRSFLNLFHLVHAQANFHKEVLYLTMNTPLST

SEQ ID NO: 46062 - protein, 447 aa, Homo sapiens
MSRRPCSCALRPPRCSCSASPSAVTAAGRPRPSDSCKEESSTLSVKMKCDFNCNHVHSGLKLVKPDDIGRLVSYTPAYLEGSCKDCIKDYERLSCIGSPIVSPRIVQLETESKRLHNKENQHVQQTLNSTNEIEALETSRLYEDSGYSSFSLQSGLSEHEEGSLLEENFGDSLQSCLLQIQSPDQYPNKNLLPVLHFEKVVCSTLKKNAKRNPKVDREMLKEIIARGNFRLQNIIGRKMGLECVDILSELFRRGLRHVLATILAQLSDMDLINVSKVSTTWKKILEDDKGAFQLYSKAIQRVTENNNKFSPHASTREYVMFRTPLASVQKSAAQTSLKKDAQTKLSNQGDQKGSTYSRHNEFSEVAKTLKKNESLKACIRCNSPAKYDCYLQRATCKREGCGFDYCTKCLCNYHTTKDCSDGKLLKASCKIGPLPGTKKSKKNLRRL

SEQ ID NO: 46063 - protein, 401 aa, Homo sapiens
MKCDFNCNHVHSGLKLVKPDDIGRLVSYTPAYLEGSCKDCIKDYERLSCIGSPIVSPRIVQLETESKRLHNKENQHVQQTLNSTNEIEALETSRLYEDSGYSSFSLQSGLSEHEEGSLLEENFGDSLQSCLLQIQSPDQYPNKNLLPVLHFEKVVCSTLKKNAKRNPKVDREMLKEIIARGNFRLQNIIGRKMGLECVDILSELFRRGLRHVLATILAQLSDMDLINVSKVSTTWKKILEDDKGAFQLYSKAIQRVTENNNKFSPHASTREYVMFRTPLASVQKSAAQTSLKKDAQTKLSNQGDQKGSTYSRHNEFSEVAKTLKKNESLKACIRCNSPAKYDCYLQRATCKREGCGFDYCTKCLCNYHTTKDCSDGKLLKASCKIGPLPGTKKSKKNLRRL

SEQ ID NO: 46064 - protein, 293 aa, Homo sapiens
MDAPHSKAALDSINELPENILLELFTHVPARQLLLNCRLVCSLWRDLIDLMTLWKRKCLREGFITKDWDQPVADWKIFYFLRSLHRNLLRNPCAEEDMFAWQIDFNGGDRWKVESLPGAHGTDFPDPKVKKYFVTSYEMCLKSQLVDLVAEGYWEELLDTFRPDIVVKDWFAARADCGCTYQLKVQLASADYFVLASFEPPPVTIQQWNNATWTEVSYTFSDYPRGVRYILFQHGGRDTQYWAGWYGPRVTNSSIVVSPKMTRNQASSEAQPGQKHGQEEAAQSPYRAVVQIF

SEQ ID NO: 46065 - protein, 249 aa, Homo sapiens
  VARIANT 1: note = MOD_RES - Any amino acid
XNELPENILLELFTHVPARQLLLNCRLVCSLWRDLIDLMTLWKRKCLREGFITKDWDQPVADWKIFYFLRSLHRNLLRNPCAEEDMFAWQIDFNGGDRWKVESLPGAHGTDFPDPKVKKYFVTSYEFAARADCGCTYQLKVQLASADYFVLASFEPPPVTIQQWNNATWTEVSYTFSDYPRGVRYILFQHGGRDTQYWAGWYGPRVTNSSIVVSPKMTRNQASSEAQPGQKHGQEEAAQSPYRAVVQIF

SEQ ID NO: 46066 - protein, 522 aa, Homo sapiens
MRLRVRLLKRTWPLEVPETEPTLGHLRSHLRQSLLCTWGYSSNTRFTITLNYKDPLTGDEETLASYGIVSGDLICLILQDDIPAPNIPSSTDSEHSSLQNNEQPSLATSSNQTSMQDEQPSDSFQGQAAQSGVWNDDSMLGPSQNFEAESIQDNAHMAEGTGFYPSEPMLCSESVEGQVPHSLETLYQSADCSDANDALIVLIHLLMLESGYIPQGTEAKALSMPEKWKLSGVYKLQYMHPLCEGSSATLTCVPLGNLIVVNATLKINNEIRSVKRLQLLPESFICKEKLGENVANIYKDLQKLSRLFKDQLVYPLLAFTRQALNLPDVFGLVVLPLELKLRIFRLLDVRSVLSLSAVCRDLFTASNDPLLWRFLYLRDFRDNTVRVQDTDWKELYRKRHIQRKESPKGRFVMLLPSSTHTIPFYPNPLHPRPFPSSRLPPGIIGGEYDQRPTLPYVGDPISSLIPGPGETPSQFPPLRPRFDPVGPLPGPNPILPGRGGPNDRFPFRPSRGRPTDGRLSFM

SEQ ID NO: 46067 - protein, 443 aa, Homo sapiens
MARPPGGSGPLLDSEHSSLQNNEQPSLATSSNQTSMQDEQPSDSFQGQAAQSGVWNDDSMLGPSQNFEAESIQDNAHMAEGTGFYPSEPMLCSESVEGQVPHSLETLYQSADCSDANDALIVLIHLLMLESGYIPQGTEAKALSMPEKWKLSGVYKLQYMHPLCEGSSATLTCVPLGNLIVVNATLKINNEIRSVKRLQLLPESFICKEKLGENVANIYKDLQKLSRLFKDQLVYPLLAFTRQALNLPDVFGLVVLPLELKLRIFRLLDVRSVLSLSAVCRDLFTASNDPLLWRFLYLRDFRDNTVRVQDTDWKELYRKRHIQRKESPKGRFVMLLPSSTHTIPFYPNPLHPRPFPSSRLPPGIIGGEYDQRPTLPYVGDPISSLIPGPGETPSQFPPLRPRFDPVGPLPGPNPILPGRGGPNDRFPFRPSRGRPTDGRLSFM

SEQ ID NO: 46068 - protein, 408 aa, Homo sapiens
MQDEQPSDSFQGQAAQSGVWNDDSMLGPSQNFEAESIQDNAHMAEGTGFYPSEPMLCSESVEGQVPHSLETLYQSADCSDANDALIVLIHLLMLESGYIPQGTEAKALSMPEKWKLSGVYKLQYMHPLCEGSSATLTCVPLGNLIVVNATLKINNEIRSVKRLQLLPESFICKEKLGENVANIYKDLQKLSRLFKDQLVYPLLAFTRQALNLPDVFGLVVLPLELKLRIFRLLDVRSVLSLSAVCRDLFTASNDPLLWRFLYLRDFRDNTVRVQDTDWKELYRKRHIQRKESPKGRFVMLLPSSTHTIPFYPNPLHPRPFPSSRLPPGIIGGEYDQRPTLPYVGDPISSLIPGPGETPSQFPPLRPRFDPVGPLPGPNPILPGRGGPNDRFPFRPSRGRPTDGRLSFM

SEQ ID NO: 46069 - protein, 232 aa, Homo sapiens
MQLTFAWLHVFGRTLRMMNFSGKGCANPWGHCSIYNKNPPLGFSFRKLYMQLDEGSLTFNANPDEGVNYFMSKGILDDSPKEIAKFIFCTRTLNWKKLRIYLDERRDVLDDLVTLHNFRNQFLPNALREFFRHIHAPEERGEYLETLITKFSHRFCACNPDLMRELGLSPDAVYVLCYSLILLSIDLTSPHVKNKMSKREFIRNTRRAAQNISEDFVGHLYDNIYLIGHVAA

SEQ ID NO: 46070 - protein, 319 aa, Homo sapiens
MGQGLWRVVRNQQLQQEGYSEQGYLTREQSRRMAASNISNTNHRKQVQGGIDIYHLLKARKSKEQEGFINLEMLPPELSFTILSYLNATDLCLASCVWQDLANDELLWQGLCKSTWGHCSIYNKNPPLGFSFRKLYMQLDEGSLTFNANPDEGVNYFMSKGILDDSPKEIAKFIFCTRTLNWKKLRIYLDERRDVLDDLVTLHNFRNQFLPNALREFFRHIHAPEERGEYLETLITKFSHRFCACNPDLMRELGLSPDAVYVLCYSLILLSIDLTSPHVKNKMSKREFIRNTRRAAQNISEDFVGHLYDNIYLIGHVAA

SEQ ID NO: 46071 - protein, 184 aa, Homo sapiens
MGQGLWRVVRNQQLQQEGYSEQGYLTREQSRRMAASNISNTNHRKQVQGGIDIYHLLKARKSKEQEGFINLEMLPPELSFTILSYLNATDLCLASCVWQDLANDELLWQGLCKSTWGHCSIYNKNPPLGFSFRKLYMQLDEGSLTFNANPDEGVNYFMSKGILDDSPKEIAKFIFCTRTLNWKK

SEQ ID NO: 46072 - protein, 447 aa, Homo sapiens
MPDIIWVFPPQAEAEEDCHSDTVRADDDEENESPAETDLQAQLQMFRAQWMFELAPGVSSSNLENRPCRAARGSLQKTSADTKGKQEQAKEEKARELFLKAVEEEQNGALYEAIKFYRRAMQLVPDIEFKITYTRSPDGDGVGNSYIEDNDDDSKMADLLSYFQQQLTFQESVLKLCQPELESSQIHISVLPMEVLMYIFRWVVSSDLDLRSLEQLSLVCRGFYICARDPEIWRLACLKVWGRSCIKLVPYTSWREMFLERPRVRFDGVYISKTTYIRQGEQSLDGFYRAWHQVEYYRYIRFFPDGHVMMLTTPEEPQSIVPRLRTRNTRTDAILLGHYRLSQDTDNQTKVFAVITKKKEEKPLDYKYRYFRRVPVQEADQSFHVGLQLCSSGHQRFNKLIWIHHSCHITYKSTGETAVSAFEIDKMYTPLFFARVRSYTAFSERPL

SEQ ID NO: 46073 - protein, 437 aa, Homo sapiens
MAEAEEDCHSDTVRADDDEENESPAETDLQAQLQMFRAQWMFELAPGVSSSNLENRPCRAARGSLQKTSADTKGKQEQAKEEKARELFLKAVEEEQNGALYEAIKFYRRAMQLVPDIEFKITYTRSPDGDGVGNSYIEDNDDDSKMADLLSYFQQQLTFQESVLKLCQPELESSQIHISVLPMEVLMYIFRWVVSSDLDLRSLEQLSLVCRGFYICARDPEIWRLACLKVWGRSCIKLVPYTSWREMFLERPRVRFDGVYISKTTYIRQGEQSLDGFYRAWHQVEYYRYIRFFPDGHVMMLTTPEEPQSIVPRLRTRNTRTDAILLGHYRLSQDTDNQTKVFAVITKKKEEKPLDYKYRYFRRVPVQEADQSFHVGLQLCSSGHQRFNKLIWIHHSCHITYKSTGETAVSAFEIDKMYTPLFFARVRSYTAFSERPL

SEQ ID NO: 46074 - protein, 403 aa, Homo sapiens
MFRAQWMFELAPGVSSSNLENRPCRAARGSLQKTSADTKGKQEQAKEEKARELFLKAVEEEQNGALYEAIKFYRRAMQLVPDIEFKITYTRSPDGDGVGNSYIEDNDDDSKMADLLSYFQQQLTFQESVLKLCQPELESSQIHISVLPMEVLMYIFRWVVSSDLDLRSLEQLSLVCRGFYICARDPEIWRLACLKVWGRSCIKLVPYTSWREMFLERPRVRFDGVYISKTTYIRQGEQSLDGFYRAWHQVEYYRYIRFFPDGHVMMLTTPEEPQSIVPRLRTRNTRTDAILLGHYRLSQDTDNQTKVFAVITKKKEEKPLDYKYRYFRRVPVQEADQSFHVGLQLCSSGHQRFNKLIWIHHSCHITYKSTGETAVSAFEIDKMYTPLFFARVRSYTAFSERPL

SEQ ID NO: 46075 - protein, 48 aa, Homo sapiens
MFRAQWMFELAPGVSSSNLENRPCRAARGSLQKTSADTKGKQEQAKEE

SEQ ID NO: 46076 - protein, 118 aa, Homo sapiens
MFRAQWMFELAPGVSSSNLENRPCRAARGSLQKTSADTKGKQEQAKEEKARELFLKAVEEEQNGALYEAIKFYRRAMQLVPDIEFKITYTRSPDGDGVGNSYIEDNDDDSKMADLLSY

SEQ ID NO: 46077 - protein, 145 aa, Homo sapiens
MFRAQWMFELAPGVSSSNLENRPCRAARGSLQKTSADTKGKQEQAKEEKARELFLKAVEEEQNGALYEAIKFYRRAMQLVPDIEFKITYTRSPDGDGVGNSYIEDNDDDSKMADLLSYFQQQLTFQESVLKLCQPELESSQIHIS

SEQ ID NO: 46078 - protein, 1043 aa, Homo sapiens
MRRFKRKHLTAIDCQHLARSHLAVTQPFGQRWTNRDPNHGLYPKPRTKRGSRGQGSQRCIPEFFLAGKQPCTNDMAKSNSVGQDSCQDSEGDMIFPAESSCALPQEGSAGPGSPGSAPPSRKRSWSSEEESNQATGTSRWDGVSKKAPRHHLSVPCTRPREARQEAEDSTSRLSAESGETDQDAGDVGPDPIPDSYYGLLGTLPCQEALSHICSLPSEVLRHVFAFLPVEDLYWNLSLVCHLWREIISDPLFIPWKKLYHRYLMNEEQAVSKVDGILSNCGIEKESDLCVLNLIRYTATTKCSPSVDPERVLWSLRDHPLLPEAEACVRQHLPDLYAAAGGVNIWALVAAVVLLSSSVNDIQRLLFCLRRPSSTVTMPDVTETLYCIAVLLYAMREKGINISNRIHYNIFYCLYLQENSCTQATKVKEEPSVWPGKKTIQLTHEQQLILNHKMEPLQVVKIMAFAGTGKTSTLVKYAEKWSQSRFLYVTFNKSIAKQAERVFPSNVICKTFHSMAYGHIGRKYQSKKKLNLFKLTPFMVNSVLAEGKGGFIRAKLVCKTLENFFASADEELTIDHVPIWCKNSQGQRVMVEQSEKLNGVLEASRLWDNMRKLGECTEEAHQMTHDGYLKLWQLSKPSLASFDAIFVDEAQDCTPAIMNIVLSQPCGKIFVGDPHQQIYTFRGAVNALFTVPHTHVFYLTQSFRFGVEIAYVGATILDVCKRVRKKTLVGGNHQSGIRGDAKGQVALLSRTNANVFDEAVRVTEGEFPSRIHLIGGIKSFGLDRIIDIWILLQPEEERRKQNLVIKDKFIRRWVHKEGFSGFKRYVTAAEDKELEAKIAVVEKYNIRIPELVQRIEKCHIEDLDFAEYILGTVHKAKGLEFDTVHVLDDFVKVPCARHNLPQLPHFRVESFSEDEWNLLYVAVTRAKKRLIMTKSLENILTLAGEYFLQAELTSNVLKTGVVRCCVGQCNNAIPVDTVLTMKKLPITYSNRKENKGGYLCHSCAEQRIGPLAFLTASPEQVRAMERTVENIVLPRHEALLFLVF

SEQ ID NO: 46079 - protein, 404 aa, Homo sapiens
MNEEQAVSKVDGILSNCGIEKESDLCVLNLIRYTATTKCSPSVDPERVLWSLRDHPLLPEAEACVRQHLPDLYAAAGGVNIWALVAAVVLLSSSVNDIQRLLFCLRRPSSTVTMPDVTETLYCIAVLLYAMREKGINISNRIHYNIFYCLYLQENSCTQATKVKEEPSVWPGKKTIQLTHEQQLILNHKMEPLQVVKIMAFAGTGKTSTLVKYAEKWSQSRFLYVTFNKSIAKQAERVFPSNVICKTFHSMAYGHIGRKYQSKKKLNLFKLTPFMVNSVLAEGKGGFIRAKLVCKTLENFFASADEELTIDHVPIWCKNSQGQRVMVEQSEKLNGVLEASRLWDNMRKLGECTEEAHQMTHDGYLKLWQLSKPSLASFDAIFVDEAQAGARHGAHCGEHRTAPA

SEQ ID NO: 46080 - protein, 1094 aa, Homo sapiens
MSYEVTSGCHWTCQVPESCDNGLHCAGPLGHLHRRCQRTSAHLLVFTEHAEMRRFKRKHLTAIDCQHLARSHLAVTQPFGQRWTNRDPNHGLYPKPRTKRGSRGQGSQRCIPEFFLAGKQPCTNDMAKSNSVGQDSCQDSEGDMIFPAESSCALPQEGSAGPGSPGSAPPSRKRSWSSEEESNQATGTSRWDGVSKKAPRHHLSVPCTRPREARQEAEDSTSRLSAESGETDQDAGDVGPDPIPDSYYGLLGTLPCQEALSHICSLPSEVLRHVFAFLPVEDLYWNLSLVCHLWREIISDPLFIPWKKLYHRYLMNEEQAVSKVDGILSNCGIEKESDLCVLNLIRYTATTKCSPSVDPERVLWSLRDHPLLPEAEACVRQHLPDLYAAAGGVNIWALVAAVVLLSSSVNDIQRLLFCLRRPSSTVTMPDVTETLYCIAVLLYAMREKGINISNRIHYNIFYCLYLQENSCTQATKVKEEPSVWPGKKTIQLTHEQQLILNHKMEPLQVVKIMAFAGTGKTSTLVKYAEKWSQSRFLYVTFNKSIAKQAERVFPSNVICKTFHSMAYGHIGRKYQSKKKLNLFKLTPFMVNSVLAEGKGGFIRAKLVCKTLENFFASADEELTIDHVPIWCKNSQGQRVMVEQSEKLNGVLEASRLWDNMRKLGECTEEAHQMTHDGYLKLWQLSKPSLASFDAIFVDEAQDCTPAIMNIVLSQPCGKIFVGDPHQQIYTFRGAVNALFTVPHTHVFYLTQSFRFGVEIAYVGATILDVCKRVRKKTLVGGNHQSGIRGDAKGQVALLSRTNANVFDEAVRVTEGEFPSRIHLIGGIKSFGLDRIIDIWILLQPEEERRKQNLVIKDKFIRRWVHKEGFSGFKRYVTAAEDKELEAKIAVVEKYNIRIPELVQRIEKCHIEDLDFAEYILGTVHKAKGLEFDTVHVLDDFVKVPCARHNLPQLPHFRVESFSEDEWNLLYVAVTRAKKRLIMTKSLENILTLAGEYFLQAELTSNVLKTGVVRCCVGQCNNAIPVDTVLTMKKLPITYSNRKENKGGYLCHSCAEQRIGPLAFLTASPEQVRAMERTVENIVLPRHEALLFLVF

SEQ ID NO: 46081 - protein, 547 aa, Homo sapiens
MAYGHIGRKYQSKKKLNLFKLTPFMVNSVLAEGKGGFIRAKLVCKTLENFFASADEELTIDHVPIWCKNSQGQRVMVEQSEKLNGVLEASRLWDNMRKLGECTEEAHQMTHDGYLKLWQLSKPSLASFDAIFVDEAQDCTPAIMNIVLSQPCGKIFVGDPHQQIYTFRGAVNALFTVPHTHVFYLTQSFRFGVEIAYVGATILDVCKRVRKKTLVGGNHQSGIRGDAKGQVALLSRTNANVFDEAVRVTEGEFPSRIHLIGGIKSFGLDRIIDIWILLQPEEERRKQNLVIKDKFIRRWVHKEGFSGFKRYVTAAEDKELEAKIAVVEKYNIRIPELVQRIEKCHIEDLDFAEMESHHVGQAGLELPTSEYILGTVHKAKGLEFDTVHVLDDFVKVPCARHNLPQLPHFRVESFSEDEWNLLYVAVTRAKKRLIMTKSLENILTLAGEYFLQAELTSNVLKTGVVRCCVGQCNNAIPVDTVLTMKKLPITYSNRKENKGGYLCHSCAEQRIGPLAFLTASPEQVRAMERTVENIVLPRHEALLFLVF

SEQ ID NO: 46082 - protein, 404 aa, Homo sapiens; identical to SEQ ID NO: 46079

SEQ ID NO: 46083 - protein, 191 aa, Homo sapiens
MDPKQTTLLCLVLCLGQRIQAQEGDFPMPFISAKSSPVIPLDGSVKIQCQAIREAYLTQLMIIKNSTYREIGRRLKFWNETDPEFVIDHMDANKAGRYQCQYRIGHYRFRYSDTLELVVTDSIHQDYTTQNLIRMAVAGLVLVALLAILVENWHSHTALNKEASADVAEPSWSQQMCQPGLTFARTPSVCK

SEQ ID NO: 46084 - protein, 178 aa, Homo sapiens
MDPKQTTLLCLGLYGKPFLSADRGLVLMPGENISLTCSSAHIPFDRFSLAKEGELSLPQHQSGEHPANFSLGPVDLNVSGIYRCYGWYNRSPYLWSFPSNALELVVTDSIHQDYTTQNLIRMAVAGLVLVALLAILVENWHSHTALNKEASADVAEPSWSQQMCQPGLTFARTPSVCK

SEQ ID NO: 46085 - protein, 287 aa, Homo sapiens
MDPKQTTLLCLVLCLGQRIQAQEGDFPMPFISAKSSPVIPLDGSVKIQCQAIREAYLTQLMIIKNSTYREIGRRLKFWNETDPEFVIDHMDANKAGRYQCQYRIGHYRFRYSDTLELVVTGLYGKPFLSADRGLVLMPGENISLTCSSAHIPFDRFSLAKEGELSLPQHQSGEHPANFSLGPVDLNVSGIYRCYGWYNRSPYLWSFPSNALELVVTDSIHQDYTTQNLIRMAVAGLVLVALLAILVENWHSHTALNKEASADVAEPSWSQQMCQPGLTFARTPSVCK

SEQ ID NO: 46086 - protein, 275 aa, Homo sapiens
MDPKQTTLLCLGDFPMPFISAKSSPVIPLDGSVKIQCQAIREAYLTQLMIIKNSTYREIGRRLKFWNETDPEFVIDHMDANKAGRYQCQYRIGHYRFRYSDTLELVVTGLYGKPFLSADRGLVLMPGENISLTCSSAHIPFDRFSLAKEGELSLPQHQSGEHPANFSLGPVDLNVSGIYRCYGWYNRSPYLWSFPSNALELVVTDSIHQDYTTQNLIRMAVAGLVLVALLAILVENWHSHTALNKEASADVAEPSWSQQMCQPGLTFARTPSVCK

SEQ ID NO: 46087 - protein, 209 aa, Homo sapiens
MDPKQTTLLCLGDFPMPFISAKSSPVIPLDGSVKIQCQAIREAYLTQLMIIKNSTYREIGRRLKFWNETDPEFVIDHMDANKAGRYQCQYRIGHYRFRYSDTLELVVTGLYGKPFLSADRGLVLMPGENISLTCSSAHIPFDRFSLAKEGELSLPQHQSGEHPANFSLGPVDLNVSGIYRLHPPRLHDAELDPHGRGRTGPRGSLGHTG

SEQ ID NO: 46088 - protein, 253 aa, Homo sapiens
MDPKQTTLLCLGDFPMPFISAKSSPVIPLDGSVKIQCQAIREAYLTQLMIIKNSTYREIGRRLKFWNETDPEFVIDHMDANKAGRYQCQYRIGHYRFRYSDTLELVVTGLYGKPFLSADRGLVLMPGENISLTCSSAHIPFDRFSLAKEGELSLPQHQSGEHPANFSLGPVDLNVSGIYRCYDSIHQDYTTQNLIRMAVAGLVLVALLAILVENWHSHTALNKEASADVAEPSWSQQMCQPGLTFARTPSVCK

SEQ ID NO: 46089 - protein, 265 aa, Homo sapiens
MDPKQTTLLCLVLCLGQRIQAQEGDFPMPFISAKSSPVIPLDGSVKIQCQAIREAYLTQLMIIKNSTYREIGRRLKFWNETDPEFVIDHMDANKAGRYQCQYRIGHYRFRYSDTLELVVTGLYGKPFLSADRGLVLMPGENISLTCSSAHIPFDRFSLAKEGELSLPQHQSGEHPANFSLGPVDLNVSGIYRCYDSIHQDYTTQNLIRMAVAGLVLVALLAILVENWHSHTALNKEASADVAEPSWSQQMCQPGLTFARTPSVCK

SEQ ID NO: 46090 - protein, 179 aa, Homo sapiens
MDPKQTTLLCLGDFPMPFISAKSSPVIPLDGSVKIQCQAIREAYLTQLMIIKNSTYREIGRRLKFWNETDPEFVIDHMDANKAGRYQCQYRIGHYRFRYSDTLELVVTDSIHQDYTTQNLIRMAVAGLVLVALLAILVENWHSHTALNKEASADVAEPSWSQQMCQPGLTFARTPSVCK

SEQ ID NO: 46091 - protein, 239 aa, Homo sapiens
MDPKQTTLLCLVLCLGQRIQAQEGDFPMPFISAKSSPVIPLDGSVKIQCQAIREAYLTQLMIIKNSTYREIGRRLKFWNETDPEFVIDHMDANKAGRYQCQYRIGHYRFRYSDTLELVVTGLYGKPFLSADRGLVLMPGENISLTCSSAHIPFDRFSLAKEGELSLPQHQSGEHPANFSLGPVDLNVSGIYRCYGWYNRSPYLWSFPSNALELVVTGRYRPVQPCVWVGCPGPCHRAGI

SEQ ID NO: 46092 - protein, 257 aa, Homo sapiens
MAPAMESPTLLCVALLFFAPDGVLAVPQKPKVSLNPPWNRIFKGENVTLTCNGNNFFEVSSTKWFHNGSLSEETNSSLNIVNAKFEDSGEYKCQHQQVNESEPVYLEVFSDWLLLQASAEVVMEGQPLFLRCHGWRNWDVYKVIYYKDGEALKYWYENHNISITNATVEDSGTYYCTGKVWQLDYESEPLNITVIKAPREKYWLQFFIPLLVVILFAVDTGLFISTQQQVTFLLKIKRTRKGFRLLNPHPKPNPKNN

SEQ ID NO: 46093 - protein, 86 aa, Homo sapiens
MIPAVVLLLLLLVEQAAALGEPQLCYILDAILFLYGIVLTLLYCRLKIQVRKAAITSYEKSDGVYTGLSTRNQETYETLKHEKPPQ

SEQ ID NO: 46094 - protein, 112 aa, Homo sapiens
MIPAVVLLLLLLVEQAAALGEPQLCYILDAILFLYGIVLTLLYCRLKIQVRKAAITSYEKSDGVYTMESPSITRLECSGMIWAHCNLCLLGSRDSRASPSRVAKTTGTTMPS

SEQ ID NO: 46095 - protein, 263 aa, Homo sapiens
  VARIANT 1: note = MOD_RES - Any amino acid
XCSFGVQLMGKWVPWVSVFQEETVTLHCEVLHLPGSSSTQWFLNGTATQTSTPSYRITSASVNDSGEYRCQRGLSGRSDPIQLEIHRGWLLLQVSSRVFMEGEPLALRCHAWKDKLVYNVLYYRNGKAFKFFHWNSNLTILKTNISHNGTYHCSGMGKHRYTSAGISQYTVKGLQLPTPVWFHVLFYLAVGIMFLVNTVLWVTIRKELKRKKKWNLEISLDSGHEKKVISSLQEDRHLEEELKCQEQKEEQLQEGVHRKEPQG

SEQ ID NO: 46096 - protein, 188 aa, Homo sapiens
MWFLTTLLLWGWLLLQVSSRVFMEGEPLALRCHAWKDKLVYNVLYYRNGKAFKFFHWNSNLTILKTNISHNGTYHCSGMGKHRYTSAGISQYTVKGLQLPTPVWFHVLFYLAVGIMFLVNTVLWVTIRKELKRKKKWNLEISLDSGHEKKVISSLQEDRHLEEELKCQEQKEEQLQEGVHRKEPQGAT

SEQ ID NO: 46097 - protein, 280 aa, Homo sapiens
MWFLTTLLLWVPVDGQVDTTKAVITLQPPWVSVFQEETVTLHCEVLHLPGSSSTQWFLNGTATQTSTPSYRITSASVNDSGEYRCQRGLSGRSDPIQLEIHRGWLLLQVSSRVFMEGEPLALRCHAWKDKLVYNVLYYRNGKAFKFFHWNSNLTILKTNISHNGTYHCSGMGKHRYTSAGISQYTVKGLQLPTPVWFHVLFYLAVGIMFLVNTVLWVTIRKELKRKKKWNLEISLDSGHEKKVISSLQEDRHLEEELKCQEQKEEQLQEGVHRKEPQGAT

SEQ ID NO: 46098 - protein, 317 aa, Homo sapiens
MTMETQMSQNVCPRNLWLLQPLTVLLLLASADSQAAAPPKAVLKLEPPWINVLQEDSVTLTCQGARSPESDSIQWFHNGNLIPTHTQPSYRFKANNNDSGEYTCQTGQTSLSDPVHLTVLSEWLVLQTPHLEFQEGETIMLRCHSWKDKPLVKVTFFQNGKSQKFSHLDPTFSIPQANHSHSGDYHCTGNIGYTLFSSKPVTITVQVPSMGSSSPMGIIVAVVIATAVAAIVAAVVALIYCRKKRISANSTDPVKAAQFEPPGRQMIAIRKRQLEETNNDYETADGGYMTLNPRAPTDDDKNIYLTLPPNDHVNSNN

SEQ ID NO: 46099 - protein, 316 aa, Homo sapiens
MTMETQMSQNVCPRNLWLLQPLTVLLLLASADSQAAPPKAVLKLEPPWINVLQEDSVTLTCQGARSPESDSIQWFHNGNLIPTHTQPSYRFKANNNDSGEYTCQTGQTSLSDPVHLTVLSEWLVLQTPHLEFQEGETIMLRCHSWKDKPLVKVTFFQNGKSQKFSHLDPTFSIPQANHSHSGDYHCTGNIGYTLFSSKPVTITVQVPSMGSSSPMGIIVAVVIATAVAAIVAAVVALIYCRKKRISANSTDPVKAAQFEPPGRQMIAIRKRQLEETNNDYETADGGYMTLNPRAPTDDDKNIYLTLPPNDHVNSNN

SEQ ID NO: 46100 - protein, 291 aa, Homo sapiens
MGILSFLPVLATESDWADCKSPQPWGHMLLWTAVLFLAPVAGTPAAPPKAVLKLEPQWINVLQEDSVTLTCRGTHSPESDSIQWFHNGNLIPTHTQPSYRFKANNNDSGEYTCQTGQTSLSDPVHLTVLSEWLVLQTPHLEFQEGETIVLRCHSWKDKPLVKVTFFQNGKSKKFSRSDPNFSIPQANHSHSGDYHCTGNIGYTLYSSKPVTITVQAPSSSPMGIIVAVVTGIAVAAIVAAVVALIYCRKKRISANPTNPDEADKVGAENTITYSLLMHPDALEEPDDQNRI

SEQ ID NO: 46101 - protein, 310 aa, Homo sapiens
MGILSFLPVLATESDWADCKSPQPWGHMLLWTAVLFLAPVAGTPAAPPKAVLKLEPQWINVLQEDSVTLTCRGTHSPESDSIQWFHNGNLIPTHTQPSYRFKANNNDSGEYTCQTGQTSLSDPVHLTVLSEWLVLQTPHLEFQEGETIVLRCHSWKDKPLVKVTFFQNGKSKKFSRSDPNFSIPQANHSHSGDYHCTGNIGYTLYSSKPVTITVQAPSSSPMGIIVAVVTGIAVAAIVAAVVALIYCRKKRISALPGYPECREMGETLPEKPANPTNPDEADKVGAENTITYSLLMHPDALEEPDDQNRI

SEQ ID NO: 46102 - protein, 303 aa, Homo sapiens
MGILSFLPVLATESDWADCKSPQPWGHMLLWTAVLFLAAPPKAVLKLEPQWINVLQEDSVTLTCRGTHSPESDSIQWFHNGNLIPTHTQPSYRFKANNNDSGEYTCQTGQTSLSDPVHLTVLSEWLVLQTPHLEFQEGETIVLRCHSWKDKPLVKVTFFQNGKSKKFSRSDPNFSIPQANHSHSGDYHCTGNIGYTLYSSKPVTITVQAPSSSPMGIIVAVVTGIAVAAIVAAVVALIYCRKKRISALPGYPECREMGETLPEKPANPTNPDEADKVGAENTITYSLLMHPDALEEPDDQNRI

SEQ ID NO: 46103 - protein, 303 aa, Homo sapiens; identical to SEQ ID NO: 46102

SEQ ID NO: 46104 - protein, 310 aa, Homo sapiens; identical to SEQ ID NO: 46101

SEQ ID NO: 46105 - protein, 291 aa, Homo sapiens; identical to SEQ ID NO: 46100

SEQ ID NO: 46106 - protein, 234 aa, Homo sapiens
MGILSFLPVLATESDWADCKSPQPWGHMLLWTAVLFLAPVAGTPAAPPKAVLKLEPQWINVLQEDSVTLTCRGTHSPESDSIQWFHNGNLIPTHTQPSYRFKANNNDSGEYTCQTGQTSLSDPVHLTVLSEWLVLQTPHLEFQEGETIVLRCHSWKDKPLVKVTFFQNGKSKKFSRSDPNFSIPQANHSHSGDYHCTGNIGYTLYSSKPVTITVQGPRLRTAAKQSSLVGAEVP

SEQ ID NO: 46107 - protein, 256 aa, Homo sapiens
MGILSFLPVLATESDWADCKSPQPWGHMLLWTAVLFLGESGPPAAPPKAVLKLEPQWINVLQEDSVTLTCRGTHSPESDSIQWFHNGNLIPTHTQPSYRFKANNNDSGEYTCQTGQTSLSDPVHLTVLSEWLVLQTPHLEFQEGETIVLRCHSWKDKPLVKVTFFQNGKSKKFSRSDPNFSIPQANHSHSGDYHCTGNIGYTLYSSKPVTITVQAPSSSPMGIIVAVVTGIAVAAIVAAVVALIYCRKKRISVSTW

SEQ ID NO: 46108 - protein, 254 aa, Homo sapiens
MWQLLLPTALLLLVSAGMRTEDLPKAVVFLEPQWYRVLEKDSVTLKCQGAYSPEDNSTQWFHNESLISSQASSYFIDAATVDDSGEYRCQTNLSTLSDPVQLEVHIGWLLLQAPRWVFKEEDPIHLRCHSWKNTALHKVTYLQNGKGRKYFHHNSDFYIPKATLKDSGSYFCRGLFGSKNVSSETVNITITQGLAVSTISSFFPPGYQVSFCLVMVLLFAVDTGLYFSVKTNIRSSTRDWKDHKFKWRKDPQDK

SEQ ID NO: 46109 - protein, 290 aa, Homo sapiens
MGGGAGERLFTSSCLVGLVPLGLRISLVTCPLQCGIMWQLLLPTALLLLVSAGMRTEDLPKAVVFLEPQWYRVLEKDSVTLKCQGAYSPEDNSTQWFHNESLISSQASSYFIDAATVDDSGEYRCQTNLSTLSDPVQLEVHIGWLLLQAPRWVFKEEDPIHLRCHSWKNTALHKVTYLQNGKGRKYFHHNSDFYIPKATLKDSGSYFCRGLFGSKNVSSETVNITITQGLAVSTISSFFPPGYQVSFCLVMVLLFAVDTGLYFSVKTNIRSSTRDWKDHKFKWRKDPQDK

SEQ ID NO: 46110 - protein, 271 aa, Homo sapiens
  VARIANT 1: note = MOD_RES - Any amino acid
XPLGLRISLVTCPLQCGIMWQLLLPTALLLLVSAGMRTDLPKAVVFLEPQWYRVLEKDSVTLKCQGAYSPEDNSTQWFHNESLISSQASSYFIDAATVDDSGEYRCQTNLSTLSDPVQLEVHIGWLLLQAPRWVFKEEDPIHLRCHSWKNTALHKVTYLQNGKGRKYFHHNSDFYIPKATLKDSGSYFCRGLFGSKNVSSETVNITITQGLAVSTISSFFPPGYQVSFCLVMVLLFAVDTGLYFSVKTNIRSSTRDWKDHKFKWRKDPQDK

SEQ ID NO: 46111 - protein, 254 aa, Homo sapiens; identical to SEQ ID NO: 46108

SEQ ID NO: 46112 - protein, 105 aa, Homo sapiens
MWQLLLPTALLLLVSAGMRTDLPKAVVFLEPQWYRVLEKDSVTLKCQGAYSPEDNSTQWFHNESLISSQASSYFIDAATVDDSGEYRCQTNLSTLSDPVQLEVHI

SEQ ID NO: 46113 - protein, 289 aa, Homo sapiens
MGGGAGERLFTSSCLVGLVPLGLRISLVTCPLQCGIMWQLLLPTALLLLVSAGMRTDLPKAVVFLEPQWYRVLEKDSVTLKCQGAYSPEDNSTQWFHNESLISSQASSYFIDAATVDDSGEYRCQTNLSTLSDPVQLEVHIGWLLLQAPRWVFKEEDPIHLRCHSWKNTALHKVTYLQNGKGRKYFHHNSDFYIPKATLKDSGSYFCRGLFGSKNVSSETVNITITQGLAVSTISSFFPPGYQVSFCLVMVLLFAVDTGLYFSVKTNIRSSTRDWKDHKFKWRKDPQDK

SEQ ID NO: 46114 - protein, 254 aa, Homo sapiens; identical to SEQ ID NO: 46108

SEQ ID NO: 46115 - protein, 233 aa, Homo sapiens
MWQLLLPTALLLLVSAGMRTEDLPKAVVFLEPQWYSVLEKDSVTLKCQGAYSPEDNSTQWFHNENLISSQASSYFIDAATVNDSGEYRCQTNLSTLSDPVQLEVHIGWLLLQAPRWVFKEEDPIHLRCHSWKNTALHKVTYLQNGKDRKYFHHNSDFHIPKATLKDSGSYFCRGLVGSKNVSSETVNITITQGLAVSTISSFSPPGYQVSFCLVMVLLFAVDTGLYFSVKTNI

SEQ ID NO: 46116 - protein, 233 aa, Homo sapiens; identical to SEQ ID NO: 46115

SEQ ID NO: 46117 - protein, 365 aa, Homo sapiens
MGVPRPQPWALGLLLFLLPGSLGAESHLSLLYHLTAVSSPAPGTPAFWVSGWLGPQQYLSYNSLRGEAEPCGAWVWENQVSWYWEKETTDLRIKEKLFLEAFKALGGKGPYTLQGLLGCELGPDNTSVPTAKFALNGEEFMNFDLKQGTWGGDWPEALAISQRWQQQDKAANKELTFLLFSCPHRLREHLERGRGNLEWKEPPSMRLKARPSSPGFSVLTCSAFSFYPPELQLRFLRNGLAAGTGQGDFGPNSDGSFHASSSLTVKSGDEHHYCCIVQHAGLAQPLRVELESPAKSSVLVVGIVIGVLLLTAAAVGGALLWRRMRSGLPAPWISLRGDDTGVLLPTPGEAQDADLKDVNVIPATA

SEQ ID NO: 46118 - protein, 152 aa, Homo sapiens
MGVPRPQPWALGLLLFLLPGSLGAESHLSLLYHLTAVSSPAPGTPAFWVSGWLGPQQYLSYNSLRGEAEPCGAWVWENQVSWYWEKETTDLRIKEKLFLEAFKALGGKGPYTLQGLLGCELGPDNTSVPTACGSTWRGAAETWSGRSPPPCA

SEQ ID NO: 46119 - protein, 365 aa, Homo sapiens; identical to SEQ ID NO: 46117

SEQ ID NO: 46120 - protein, 235 aa, Homo sapiens
MGVPRPQPWALGLLLFLLPGSLGAESHLSLLYHLTAVSSPAPGTPAFWVSGWLGPQQYLSYNSLRGEAEPCGAWVWENQVSWYWEKETTDLRIKEKLFLEAFKALGGKGPYTLQGLLGCELGPDNTSVPTAKFALNGEEFMNFDLKQGTWGGDWPEALAISQRWQQQDKAANKELTFLLFSCPHRLREHLERGRGNLEWKGCWTKIDTSWGCAQIFIPSATKEKLRLNQSPPPCA

SEQ ID NO: 46121 - protein, 577 aa, Homo sapiens
MDGEATVKPGEQKEVVRRGREVDYSRLIAGTLPQSHVTSRRAGWKMPLFLILCLLQGSSFALPQKRPHPRWLWEGSLPSRTHLRAMGTLRPSSPLCWREESSFAAPNSLKGSRLVSGEPGGAVTIQCHYAPSSVNRHQRKYWCRLGPPRWICQTIVSTNQYTHHRYRDRVALTDFPQRGLFVVRLSQLSPDDIGCYLCGIGSENNMLFLSMNLTISAGPASTLPTATPAAGELTMRSYGTASPVANRWTPGTTQTLGQGTAWDTVASTPGTSKTTASAEGRRTPGATRPAAPGTGSWAEGSVKAPAPIPESPPSKSRSMSNTTEGVWEGTRSSVTNRARASKDRREMTTTKADRPREDIEGVRIALDAAKKVLGTIGPPALVSETLAWEILPQATPVSKQQSQGSIGETTPAAGMWTLGTPAADVWILGTPAADVWTSMEAASGEGSAAGDLDAATGDRGPQATLSQTPAVGPWGPPGKESSVKRTFPEDESSSRTLAPVSTMLALFMLMALVLLQRKLWRRRTSQEAERVTLIQMTHFLEVNPQADQLPHVERKMLQDDSLPAGASLTAPERNPGP

SEQ ID NO: 46122 - protein, 535 aa, Homo sapiens
MDGEATVKPGEQKVPLWTHGWPPDDPSPSFAAGSSFALPQKRPHPRWLWEGSLPSRTHLRAMGTLRPSSPLCWREESSFAAPNSLKGSRLVSGEPGGAVTIQCHYAPSSVNRHQRKYWCRLGPPRWICQTIVSTNQYTHHRYRDRVALTDFPQRGLFVVRLSQLSPDDIGCYLCGIGSENNMLFLSMNLTISAGPASTLPTATPAAGELTMRSYGTASPVANRWTPGTTQTLGQGTAWDTVASTPGTSKTTASAEGRRTPGATRPAAPGTGSWAEGSVKAPAPIPESPPSKSRSMSNTTEGVWEGTRSSVTNRARASKDRREMTTTKADRPREDIEGVRIALDAAKKVLGTIGPPALVSETLAWEILPQATPVSKQQSQGSIGETTPAAGMWTLGTPAADVWITSMEAASGEGSAAGDLDAATGDRGPQATLSQTPAVGPWGPPGKESSVKRATCPGLSTLKEIKVSAVLTQNPHSLLCVSAAQEAERVTLIQMTHFLEVNPQADQLPHVERKMLQDDSLPAGASLTAPERNPGP

SEQ ID NO: 46123 - protein, 265 aa, Homo sapiens
MDGEATVKPGEQKEVVRRGREVDYSRLIAGTLPQSHVTSRRAGWKMPLFLILCLLQGSSFALPQKRPHPRWLWEGSLPSRTHLRAMGTLRPSSPLCWREESSFAAPNSLKGSRLVSGEPGGAVTIQCHYAPSSVNRHQRKYWCRLGPPRWICQTIVSTNQYTHHRYRDRVALTDFPQRGLFVVRLSQLSPDDIGCYLCGIGSENNMLFLSMNLTISAVLFQKMKAALGPWLLSLPCWPCLCLWLWFYCKGSSGEGGPLRRQKGSP

SEQ ID NO: 46124 - protein, 265 aa, Homo sapiens; identical to SEQ ID NO: 46123

SEQ ID NO: 46125 - protein, 366 aa, Homo sapiens
MLPRLLLLICAPLCEPAELFLIASPSHPTEGSPVTLTCKMPFLQSSDAQFQFCFFRDTRALGPGWSSSPKLQIAAMWKEDTGSYWCEAQTMASKVLRSRRSQINVHRVPVADVSLETQPPGGQVMEGDRLVLICSVAMGTGDITFLWYKGAVGLNLQSKTQRSLTAEYEIPSVRESDAEQYYCVAENGYGPSPSGLVSITVRIPVSRPILMLRAPRAQAAVEDVLELHCEALRGSPPILYWFYHEDITLGSRSAPSGGGASFNLSLTEEHSGNYSCEANNGLGAQRSEAVTLNFTGRRSARDPLRSLPSPLPQEFTYLNSPTPGQLQPIYENEPREQSVAVHGRQQHSSEQKAQKPWGHIWRTRFP

SEQ ID NO: 46126 - protein, 429 aa, Homo sapiens
MLPRLLLLICAPLCEPAELFLIASPSHPTEGSPVTLTCKMPFLQSSDAQFQFCFFRDTRALGPGWSSSPKLQIAAMWKEDTGSYWCEAQTMASKVLRSRRSQINVHRVPVADVSLETQPPGGQVMEGDRLVLICSVAMGTGDITFLWYKGAVGLNLQSKTQRSLTAEYEIPSVRESDAEQYYCVAENGYGPSPSGLVSITVRIPVSRPILMLRAPRAQAAVEDVLELHCEALRGSPPILYWFYHEDITLGSRSAPSGGGASFNLSLTEEHSGNYSCEANNGLGAQRSEAVTLNFTVPTGARSNHLTSGVIEGLLSTLGPATVALLFCYGLKRKIGRRSARDPLRSLPSPLPQEFTYLNSPTPGQLQPIYENVNVVSGDEVYSLAYYNQPEQESVAAETLGTHMEDKVSLDIYSRLRKANITDVDYEDAM

SEQ ID NO: 46127 - protein, 428 aa, Homo sapiens
MLPRLLLLICAPLCEPAELFLIASPSHPTEGSPVTLTCKMPFLQSSDAQFQFCFFRDTRALGPGWSSSPKLQIAAMWKEDTGSYWCEAQTMASKVLRSRRSQINVHRVPVADVSLETQPPGGQVMEGDRLVLICSVAMGTGDITFLWYKGAVGLNLQSKTQRSLTAEYEIPSVRESDAEQYYCVAENGYGPSPSGLVSITVRIPVSRPILMLRAPRAQAAVEDVLELHCEALRGSPPILYWFYHEDITLGSRSAPSGGGASFNLSLTEEHSGNYSCEANNGLGAQRSEAVTLNFTVPTGARSNHLTSGVIEGLLSTLGPATVALLFCYGLKRKIGRRSARDPLRSLPSPLPQEFTYLNSPTPGQLQPIYENVNVVSGDEVYSLAYYNQPEQESVAETLGTHMEDKVSLDIYSRLRKANITDVDYEDAM

SEQ ID NO: 46128 - protein, 889 aa, Homo sapiens
MSYFGEHFWGEKNHGFEVLYHSVKQGPISTKELADFIRERATIEETYSKAMAKLSKLASNGTPMGTFAPLWEVFRVSSDKLALCHLELTRKLQDLIKDVLRYGEEQLKTHKKCKEEVVSTLDAVQVLSGVSQLLPKSRENYLNRCMDQERLRRESTSQKEMDKAETKTKKAAESLRRSVEKYNSARADFEQKMLDSALRFQAMEETHLRHMKALLGSYAHSVEDTHVQIGQVHEEFKQNIENVSVEMLLRKFAESKGTGREKPGPLDFEAYSAAALQEAMKRLRGAKAFRLPGLSRREREPEPPAAVDFLEPDSGTCPEVDEEGFTVRPDVTQNSTAEPSRFSSSDSDFDDEEPRKFYVHIKPAPARAPACSPEAAAAQLRATAGSLILPPGPGGTMKRHSSRDAAGKPQRPRSAPRTSSCAERLQSEEQVSKNLFGPPLESAFDHEDFTGSSSLGFTSSPSPFSSSSPENVEDSGLDSPSHAAPGPSPDSWVPRPGTPQSPPSCRAPPPEARGIRAPPLPDSPQPLASSPGPWGLEALAGGDLMPAPADPTAREGLAAPPRRLRSRKVSCPLTRSNGDLSRSLSPSPLGSSAASTALERPSFLSQTGHGVSRGPSPVVLGSQDALPIATAFTEYVHAYFRGHSPSCLARVTGELTMTFPAGIVRVFSGTPPPPVLSFRLVHTTAIEHFQPNADLLFSDPSQSDPETKDFWLNMAALTEALQRQAEQNPTASYYNVVLLRYQFSRPGPQSVPLQLSAHWQCGATLTQVSVEYGYRPGATAVPTPLTNVQILLPVGEPVTNVRLQPAATWNLEEKRLTWRLPDVSEAGGSGRLSASWEPLSGPSTPSPVAAQFTSEGTTLSGVDLELVGSGYRMSLVKRRFATGMYLVSC

SEQ ID NO: 46129 - protein, 889 aa, Homo sapiens; identical to SEQ ID NO: 46128

SEQ ID NO: 46130 - protein, 889 aa, Homo sapiens; identical to SEQ ID NO: 46128

SEQ ID NO: 46131 - protein, 891 aa, Homo sapiens
MSYFGEHFWGEKNHGFEVLYHSVKQGPISTKELADFIRERATIEETYSKAMAKLSKLASNGTPMGTFAPLWEVFRVSSDKLALCHLELTRKLQDLIKDVLRYGEEQLKTHKKCKEEVVSTLDAVQVLSGVSQLLPKSRENYLNRCMDQERLRRESTSQKEMDKAETKTKKAAESLRRSVEKYNSARADFEQKMLDSALRFQAMEETHLRHMKALLGSYAHSVEDTHVQIGQVHEEFKQNIENVSVEMLLRKFAESKGTGREKPGPLDFEAYSAAALQEAMKRLRGAKAFRLPGLSRREREPEPPAAVDFLEPDSGTCPEVDEEGFTVRPDVTQNSTAEPSRFSSSDSDFDDEEPRKFYVHIKPAPARAPACSPEAAAAQLRATAGSLILPPGPGGTMKRHSSRDAAGKPQRPRSAPRTSSCAERLQSEEQVSKNLFGPPLESAFDHEDFTGSSSLGFTSSPSPFSSSSPENVEDSGLDSPSHAAPGPSPDSWVPRPGTPQSPPSCRAPPPEARGIRAPPLPDSPQPLASSPGPWGLEALAGGDLMPAPADPTAREGLAAPPRRLRSRKVSCPLTRSNGDLSRSLSPSPLGSSAASTALERPSFLSQTGHGVSRGPSPVVLGSQDALPIATAFTEYVHAYFRGHSPSCLARVTGELTMTFPAGIVRVFSGTPPPPVLSFRLVHTTAIEHFQPNADLLFSDPSQSDPETKDFWLNMAALTEALQRQAEQNPTASYYNVVLLRYQFSRPGPQSVPLQLSAHWQCGATLTQVSVEYGYRPGATAVPTPLTNVQILLPVGEPVTNVRLQPAATWNLEEKRLTWRLPDVSEAGGSGRLSASWEPLSGPSTPSPVAAQFTSEGTTLSGVDLELVGSGYRMSLVKRRFATAAPPQGCTW

SEQ ID NO: 46132 - protein, 839 aa, Homo sapiens
MAKLSKLASNGTPMGTFAPLWEVFRVSSDKLALCHLELTRKLQDLIKDVLRYGEEQLKTHKKCKEEVVSTLDAVQVLSGVSQLLPKSRENYLNRCMDQERLRRESTSQKEMDKAETKTKKAAESLRRSVEKYNSARADFEQKMLDSALRFQAMEETHLRHMKALLGSYAHSVEDTHVQIGQVHEEFKQNIENVSVEMLLRKFAESKGTGREKPGPLDFEAYSAAALQEAMKRLRGAKAFRLPGLSRREREPEPPAAVDFLEPDSGTCPEVDEEGFTVRPDVTQNSTAEPSRFSSSDSDFDDEEPRKFYVHIKPAPARAPACSPEAAAAQLRATAGSLILPPGPGGTMKRHSSRDAAGKPQRPRSAPRTSSCAERLQSEEQVSKNLFGPPLESAFDHEDFTGSSSLGFTSSPSPFSSSSPENVEDSGLDSPSHAAPGPSPDSWVPRPGTPQSPPSCRAPPPEARGIRAPPLPDSPQPLASSPGPWGLEALAGGDLMPAPADPTAREGLAAPPRRLRSRKVSCPLTRSNGDLSRSLSPSPLGSSAASTALERPSFLSQTGHGVSRGPSPVVLGSQDALPIATAFTEYVHAYFRGHSPSCLARVTGELTMTFPAGIVRVFSGTPPPPVLSFRLVHTTAIEHFQPNADLLFSDPSQSDPETKDFWLNMAALTEALQRQAEQNPTASYYNVVLLRYQFSRPGPQSVPLQLSAHWQCGATLTQVSVEYGYRPGATAVPTPLTNVQILLPVGEPVTNVRLQPAATWNLEEKRLTWRLPDVSEAGGSGRLSASWEPLSGPSTPSPVAAQFTSEGTTLSGVDLELVGSGYRMSLVKRRFATGMYLVSC

SEQ ID NO: 46133 - protein, 889 aa, Homo sapiens; identical to SEQ ID NO: 46128

SEQ ID NO: 46134 - protein, 889 aa, Homo sapiens; identical to SEQ ID NO: 46128

SEQ ID NO: 46135 - protein, 378 aa, Homo sapiens
MVMAYFVENFWGEKNSGFDVLYHNMKHGQISTKELADFVRERATIEEAYSRSMTKLAKSASNYSQLGTFAPVWDVFKTSTEKLANCHLDLVRKLQELIKEVQKYGEEQVKSHKKTKEEVAGTLEAVQTIQSITQALQKSKENYNAKCVEQERLKKEGATQREIEKAAVKSKKATDTYKLYVEKYALAKADFEQKMTETAQKFQDIEETHLIHIKEIIGSLSNAIKEIHLQIGQVHEEFINNMANTTVESLIQKFAESKGTGKERPGLIEFEECDTASAVEGIKPRKRKTFALPGIIKKEKDAESVWSFTVVAQVGMQWRDLGLLHSPPPRFKRFSSYLSLPSSWNYGAHHHIWLIFCIFSRDRVSPYWPGWSRTPDLR

SEQ ID NO: 46136 - protein, 810 aa, Homo sapiens
MVMAYFVENFWGEKNSGFDVLYHNMKHGQISTKELADFVRERATIEEAYSRSMTKLAKSASNYSQLGTFAPVWDVFKTSTEKLANCHLDLVRKLQELIKEVQKYGEEQVKSHKKTKEEVAGTLEAVQTIQSITQALQKSKENYNAKCVEQERLKKEGATQREIEKAAVKSKKATDTYKLYVEKYALAKADFEQKMTETAQKFQDIEETHLIHIKEIIGSLSNAIKEIHLQIGQVHEEFINNMANTTVESLIQKFAESKGTGKERPGLIEFEECDTASAVEGIKPRKRKTFALPGIIKKEKDAESVECPDADSLNIPDVDEEGYSIKPETNQNDTKENHFYSSSDSDSEDEEPKKYRIEIKPMHPNNSHHTMASLDELKVSIGNITLSPAISVSTNTRLNRNFNDEELTKSKPSAPPNEKGTSDLLAWDPLFGPSLDSSSSSSLTSSSSARPTTPLSVGTIVPPPRPASRPKLTSGKLSGINEIPRPFSPPVTSNTSPPPAAPLARAESSSSISSSASLSAANTPTVGVSRGPSPVSLGNQDTLPVAVALTESVNAYFKGADPTKCIVKITGDMTMSFPSGIIKVFTSNPTPAVLCFRVKNISRLEQILPNAQLVFSDPSQCDSNTKDFWMNMQAVTVYLKKLSEQNPAASYYNVDVLKYQVSSNGIQSTPLNLATYWKCSASTTDLRVDYKYNPEAMVAPSVLSNIQVVVPVDGGVTNMQSLPPAIWNAEQMKAFWKLSSISEKSENGGSGSLRAKFDLSEGPSKPTTLAVQFLSEGSTLSGVDFELVGTGYRLSLIKKRFATGRYLADC

SEQ ID NO: 46137 - protein, 810 aa, Homo sapiens
MVMAYFVENFWGEKNSGFDVLYHNMKHGQISTKELADFVRERATIEEAYSRSMTKLAKSASNYSQLGTFAPVWDVFKTSTEKLANCHLDLVRKLQELIKEVQKYGEEQVKSHKKTKEEVAGTLEAVQTIQSITQALQKSKENYNAKCVEQERLKKEGATQREIEKAAVKSKKATDTYKLYVEKYALAKADFEQKMTETAQKFQDIEETHLIHIKEIIGSLSNAIKEIHLQIGQVHEEFINNMANTTVESLIQKFAESKGTGKERPGLIEFEECDTASAVEGIKPRKRKTFALPGIIKKEKDAESVECPDADSLNIPDVDEEGYSIKPETNQNDTKENHFYSSSDSDSEDEEPKKYRIEIKPMHPNNSHHTMASLDELKVSIGNITLSPAISRHSPVQMNRNLSNEELTKSKPSAPPNEKGTSDLLAWDPLFGPSLDSSSSSSLTSSSSARPTTPLSVGTIVPPPRPASRPKLTSGKLSGINEIPRPFSPPVTSNTSPPPAAPLARAESSSSISSSASLSAANTPTVGVSRGPSPVSLGNQDTLPVAVALTESVNAYFKGADPTKCIVKITGDMTMSFPSGIIKVFTSNPTPAVLCFRVKNISRLEQILPNAQLVFSDPSQCDSNTKDFWMNMQAVTVYLKKLSEQNPAASYYNVDVLKYQVSSNGIQSTPLNLATYWKCSASTTDLRVDYKYNPEAMVAPSVLSNIQVVVPVDGGVTNMQSLPPAIWNAEQMKAFWKLSSISEKSENGGSGSLRAKFDLSEGPSKPTTLAVQFLSEGSTLSGVDFELVGTGYRLSLIKKRFATGRYLADC

SEQ ID NO: 46138 - protein, 777 aa, Homo sapiens
MVMAYFVENFWGEKNSGFDVLYHNMKHGQISTKELADFVRERATIEEAYSRSMTKLAKSASNYSQLGTFAPVWDVFKTSTEKLANCHLDLVRKLQELIKEVQKYGEEQVKSHKKTKEEVAGTLEAVQTIQSITQALQKSKENYNAKCVEQERLKKEGATQREIEKAAVKSKKATDTYKLYVEKYALAKADFEQKMTETAQVHEEFINNMANTTVESLIQKFAESKGTGKERPGLIEFEECDTASAVEGIKPRKRKTFALPGIIKKEKDAESVECPDADSLNIPDVDEEGYSIKPETNQNDTKENHFYSSSDSDSEDEEPKKYRIEIKPMHPNNSHHTMASLDELKVSIGNITLSPAISRHSPVQMNRNLSNEELTKSKPSAPPNEKGTSDLLAWDPLFGPSLDSSSSSSLTSSSSARPTTPLSVGTIVPPPRPASRPKLTSGKLSGINEIPRPFSPPVTSNTSPPPAAPLARAESSSSISSSASLSAANTPTVGVSRGPSPVSLGNQDTLPVAVALTESVNAYFKGADPTKCIVKITGDMTMSFPSGIIKVFTSNPTPAVLCFRVKNISRLEQILPNAQLVFSDPSQCDSNTKDFWMNMQAVTVYLKKLSEQNPAASYYNVDVLKYQVSSNGIQSTPLNLATYWKCSASTTDLRVDYKYNPEAMVAPSVLSNIQVVVPVDGGVTNMQSLPPAIWNAEQMKAFWKLSSISEKSENGGSGSLRAKFDLSEGPSKPTTLAVQFLSEGSTLSGVDFELVGTGYRLSLIKKRFATGRYLADC

SEQ ID NO: 46139 - protein, 555 aa, Homo sapiens
MARPDDEEGAAVAPGHPLAKGYLPLPRGAPVGKESVELQNGPKAGTFPVNGAPRDSLAAASGVLGGPQTPLAPEEETQARLLPAGAGAETPGAESSPLPLTALSPRRFVVLLIFSLYSLVNAFQWIQYSIISNVFEGFYGVTLLHIDWLSMVYMLAYVPLIFPATWLLDTRGLRLTALLGSGLNCLGAWIKCGSVQQHLFWVTMLGQCLCSVAQVFILGLPSRIASVWFGPKEVSTACATAVLGNQLGTAVGFLLPPVLVPNTQNDTNLLACNISTMFYGTSAVATLLFILTAIAFKEKPRYPPSQAQAALQDSPPEEYSYKKSIRNLFKNIPFVLLLITYGIMTGAFYSVSTLLNQMILTYYEGEEVNAGRIGLTLVVAGMVGSILCGLWLDYTKTYKQTTLIVYILSFIGMVIFTFTLDLRYIIIVFVTGGVLGFFMTGYLPLGFEFAVEITYPESEGTSSGLLNASAQIFGILFTLAQGKLTSDYGPKAGNIFLCVWMFIGIILTALIKSDLRRHNINIGITNVDVKAIPADSPTDQEPKTVMLSKQSESAI

SEQ ID NO: 46140 - protein, 822 aa, Homo sapiens
MGFGSDLKNSHEAVLKLQDWELRLLETVKKFMALRIKSDKEYASTLQNLCNQVDKESTVQMNYVSNVSKSWLLMIQQTEQLSRIMKTHAEDLNSGPLHRLTMMIKDKQQVKKSYIGVHQQIEAEMIKVTKTELEKLKCSYRQLIKEMNSAKEKYKEALAKGKETEKAKERYDKATMKLHMLHNQYVLALKGAQLHQNQYYDITLPLLLDSLQKMQEEMIKALKGIFDEYSQITSLVTEEIVNVHKEIQMSVEQIDPSTEYNNFIDVHRTTAAKEQEIEFDTSLLEENENLQANEIMWNNLTAESLQVMLKTLAEELMQTQQMLLNKEEAVLELEKRIEESSETCEKKSDIVLLLSQKQALEELKQSVQQLRCTEAKFSAQKELLEQKVQENDGKEPPPVVNYEEDARSVTSMERKERLSKFESIRHSIAGIIRSPKSALGSSALSDMISISEKPLAEQDWYHGAIPRIEAQELLKKQGDFLVRESHGKPGEYVLSVYSDGQRRHFIIQYVDNMYRFEGTGFSNIPQLIDHHYTTKQVITKKSGVVLLNPIPKDKKWILSHEDVILGELLGKGNFGEVYKGTLKDKTSVAVKTCKEDLPQELKIKFLQEAKILKQYDHPNIVKLIGVCTQRQPVYIIMELVSGGDFLTFLRRKKDELKLKQLVKFSLDAAAGMLYLESKNCIHRDLAARNCLVGENNVLKISDFGMSRQEDGGVYSSSGLKQIPIKWTAPEALNYGRYSSESDVWSFGILLWETFSLGVCPYPGMTNQQAREQVERGYRMSAPQHCPEDISKIMMKCWDYKPENRPKFSELQKELTIIKRKLT

SEQ ID NO: 46141 - protein, 647 aa, Homo sapiens
MKLHMLHNQYVLALKGAQLHQNQYYDITLPLLLDSLQKMQEEMIKALKGIFDEYSQITSLVTEEIVNVHKEIQMSVEQIDPSTEYNNFIDVHRTTAAKEQEIEFDTSLLEENENLQANEIMWNNLTAESLQVMLKTLAEELMQTQQMLLNKEEAVLELEKRIEESSETCEKKSDIVLLLSQKQALEELKQSVQQLRCTEAKFSAQKELLEQKVQENDGKEPPPVVNYEEDARSVTSMERKERLSKFESIRHSIAGIIRSPKSALGSSALSDMISISEKPLAEQDWYHGAIPRIEAQELLKKQGDFLVRESHGKPGEYVLSVYSDGQRRHFIIQYVDNMYRFEGTGFSNIPQLIDHHYTTKQVITKKSGVVLLNPIPKDKKWILSHEDVILGELLGKGNFGEVYKGTLKDKTSVAVKTCKEDLPQELKIKFLQEAKILKQYDHPNIVKLIGVCTQRQPVYIIMELVSGGDFLTFLRRKKDELKLKQLVKFSLDAAAGMLYLESKNCIHRDLAARNCLVGENNVLKISDFGMSRQEDGGVYSSSGLKQIPIKWTAPEALNYGRYSSESDVWSFGILLWETFSLGVCPYPGMTNQQAREQVERGYRMSAPQHCPEDISKIMMKCWDYKPENRPKFSELQKELTIIKRKLT

SEQ ID NO: 46142 - protein, 326 aa, Homo sapiens
MGFGSDLKNSHEAVLKLQDWELRLLETVKKFMALRIKSDKEYASTLQNLCNQVDKESTVQMNYVSNVSKSWLLMIQQTEQLSRIMKTHAEDLNSGPLHRLTMMIKDKQQVKKSYIGVHQQIEAEMIKVTKTELEKLKCSYRQLIKEMNSAKEKYKEALAKGKETEKAKERYDKATMKLHMLHNQYVLALKGAQLHQNQYYDITLPLLLDSLQKMQEEMIKALKGIFDEYSQITSLVTEEIVNVHKEIQMSVEQIDPSTEYNNFIDVHRTTAAKEQEIEFDTSLLEENENLQANEIMWNNLTAESLQVMKERRGYPNLNLFVIQLLE

SEQ ID NO: 46143 - protein, 1284 aa, Homo sapiens
MHVFIVGMSLSSVTLASALQVRGEALSEEEIWSLLFLAAEQLLEDLRNDSSDYVVCPWSALLSAAGSLSFQGRVSHIEAAPFKAPELLQGQSEDEQPDASQPLQLCEPLHSILLTMCEDQPHRRCTLQSVLEACRVHEKEVSVYPAPAGLHIRRLVGLVLGTISEVEKRVVEESSSVQQNRSYLLRKRLRGTSSESPAAQAPECLHPCRVSERSTETQSSPEPHWSTLTHSHCSLLVNRALPGADPQDQQAGRRLSSGSVHSAADSSWPTTPSQRGFLQRRSKFSRPEFILLAGEAPMTLHLPGSVVTKKGKSYLALRDLCVVLLNGQHLEVKCDVESTVGAVFNAVTSFANLEELTYFGLAYMKSKEFFFLDSETRLCKIAPEGWREQPQKTSMNTFTLFLRIKFFVSHYGLLQHSLTRHQFYLQLRKDILEERLYCNEEILLQLGVLALQAEFGNYPKEVESKPYFHVEDYIPASLIERMTALRVQVEVSEMHRLSSALWGEDAELKFLRVTQQLPEYGVLVHQVFSEKRRPEEEMALGICAKGVIVYEVKNNSRIAMLRFQWRETGKISTYQKKFTITSSVTGKKHTFVTDSAKTSKYLLDLCSAQHGFNAQMGSGQPSHVLFDHDKFVQMANLSPAHQARSKPLIWIQRLSCSENELFVSRLQGAAGGLLSTSMDNFNVDGSKEAGAEGIGRSPCTGREQLKSACVIQKPMTWDSLSGPPVQSMHAGSKNNRRKSFIAEPGREIVRVTLKRDPHRGFGFVINEGEYSGQADPGIFISSIIPGGPAEKAKTIKPGGQILALNHISLEGFTFNMAVRMIQNSPDNIELIISQSKGVGGNNPDEEKNSTANSGVSSTDILSFGYQGSLLSHTQDQDRNTEELDMAGVQSLVPRLRHQLSFLPLKGAGSSCPPSPPEISAGEIYFVELVKEDGTLGFSVTGGINTSVPYGGIYVKSIVPGGPAAKEGQILQGDRLLQVDGVILCGLTHKQAVQCLTGPGQVARLVLERRVPRSTQQCPSANDSMGDERTAVSLVTALPGRPSSCVSVTDGPKFEVKLKKNANGLGFSFVQMEKESCSHLKSDLVRIKRLFPGQPAEENGAIAAGDIILAVNGRSTEGLIFQEVLHLLRGAPQEVTLLLCRPPPGALPELEQEWQTPELSADKEFTRATCTDSCTSPILDQEDSWRDSASPDAGEGLGLRPESSQKAIREAQWGQNRERPWASSLTHSPESHPHLCKLHQERDESTLATSLEKDVRQNCYSVCDIMRLGRYSFSSPLTRLSTDIF

SEQ ID NO: 46144 - protein, 1309 aa, Homo sapiens
MQPLTKDAGMSLSSVTLASALQVRGEALSEEEIWSLLFLAAEQLLEDLRNDSSDYVVCPWSALLSAAGSLSFQGRVSHIEAAPFKAPELLQGQSEDEQPDASQMHVYSLGMTLYWSAGFHVPPHQPLQLCEPLHSILLTMCEDQPHRRCTLQSVLEACRVHEKEVSVYPAPAGLHIRRLVGLVLGTISEVEKRVVEESSSVQQNRSYLLRKRLRGTSSESPAAQAPECLHPCRVSERSTETQSSPEPHWSTLTHSHCSLLVNRALPGADPQDQQAGRRLSSGSVHSAADSSWPTTPSQRGFLQRRSKFSRPEFILLAGEAPMTLHLPGSVVTKKGKSYLALRDLCVVLLNGQHLEVKCDVESTVGAVFNAVTSFANLEELTYFGLAYMKSKEFFFLDSETRLCKIAPEGWREQPQKTSMNTFTLFLRIKFFVSHYGLLQHSLTRHQFYLQLRKDILEERLYCNEEILLQLGVLALQAEFGNYPKEQVESKPYFHVEDYIPASLIERMTALRVQVEVSEMHRLSSALWGEDAELKFLRVTQQLPEYGVLVHQVFSEKRRPEEEMALGICAKGVIVYEVKNNSRIAMLRFQWRETGKISTYQKKFTITSSVTGKKHTFVTDSAKTSKYLLDLCSAQHGFNAQMGSGQPSHVLFDHDKFVQMANLSPAHQARSKPLIWIQRLSCSENELFVSRLQGAAGGLLSTSMDNFNVDGSKEAGAEGIGRSPCTGREQLKSACVIQKPMTWDSLSGPPVQSMHAGSKNNRRKSFIAEPGREIVRVTLKRDPHRGFGFVINEGEYSGQADPGIFISSIIPGGPAEKAKTIKPGGQILALNHISLEGFTFNMAVRMIQNSPDNIELIISQSKGVGGNNPDEEKNSTANSGVSSTDILSFGYQGSLLSHTQDQDRNTEELDMAGVQSLVPRLRHQLSFLPLKGAGSSCPPSPPEISAGEIYFVELVKEDGTLGFSVTGGINTSVPYGGIYVKSIVPGGPAAKEGQILQGDRLLQVDGVILCGLTHKQAVQCLTGPGQVARLVLERRVPRSTQQCPSANDSMGDERTAVSLVTALPGRPSSCVSVTDGPKFEVKLKKNANGLGFSFVQMEKESCSHLKSDLVRIKRLFPGQPAEENGAIAAGDIILAVNGRSTEGLIFQEVLHLLRGAPQEVTLLLCRPPPGALPELEQEWQTPELSADKEFTRATCTDSCTSPILDQEDSWRDSASPDAGEGLGLRPESSQKAIREAQWGQNRERPWASSLTHSPESHPHLCKLHQERDESTLATSLEKDVRQNCYSVCDIMRLGRYSFSSPLTRLSTDIF

SEQ ID NO: 46145 - protein, 1277 aa, Homo sapiens
MSLSSVTLASALQVRGEALSEEEIWSLLFLAAEQLLEDLRNDSSDYVVCPWSALLSAAGSLSFQGRVSHIEAAPFKAPELLQGQSEDEQPDASQPLQLCEPLHSILLTMCEDQPHRRCTLQSVLEACRVHEKEVSVYPAPAGLHIRRLVGLVLGTISEVEKRVVEESSSVQQNRSYLLRKRLRGTSSESPAAQAPECLHPCRVSERSTETQSSPEPHWSTLTHSHCSLLVNRALPGADPQDQQAGRRLSSGSVHSAADSSWPTTPSQRGFLQRRSKFSRPEFILLAGEAPMTLHLPGSVVTKKGKSYLALRDLCVVLLNGQHLEVKCDVESTVGAVFNAVTSFANLEELTYFGLAYMKSKEFFFLDSETRLCKIAPEGWREQPQKTSMNTFTLFLRIKFFVSHYGLLQHSLTRHQFYLQLRKDILEERLYCNEEILLQLGVLALQAEFGNYPKEVESKPYFHVEDYIPASLIERMTALRVQVEVSEMHRLSSALWGEDAELKFLRVTQQLPEYGVLVHQVFSEKRRPEEEMALGICAKGVIVYEVKNNSRIAMLRFQWRETGKISTYQKKFTITSSVTGKKHTFVTDSAKTSKYLLDLCSAQHGFNAQMGSGQPSHVLFDHDKFVQMANLSPAHQARSKPLIWIQRLSCSENELFVSRLQGAAGGLLSTSMDNFNVDGSKEAGAEGIGRSPCTGREQLKSACVIQKPMTWDSLSGPPVQSMHAGSKNNRRKSFIAEPGREIVRVTLKRDPHRGFGFVINEGEYSGQADPGIFISSIIPGGPAEKAKTIKPGGQILALNHISLEGFTFNMAVRMIQNSPDNIELIISQSKGVGGNNPDEEKNSTANSGVSSTDILSFGYQGSLLSHTQDQDRNTEELDMAGVQSLVPRLRHQLSFLPLKGAGSSCPPSPPEISAGEIYFVELVKEDGTLGFSVTGGINTSVPYGGIYVKSIVPGGPAAKEGQILQGDRLLQVDGVILCGLTHKQAVQCLTGPGQVARLVLERRVPRSTQQCPSANDSMGDERTAVSLVTALPGRPSSCVSVTDGPKFEVKLKKNANGLGFSFVQMEKESCSHLKSDLVRIKRLFPGQPAEENGAIAAGDIILAVNGRSTEGLIFQEVLHLLRGAPQEVTLLLCRPPPGALPELEQEWQTPELSADKEFTRATCTDSCTSPILDQEDSWRDSASPDAGEGLGLRPESSQKAIREAQWGQNRERPWASSLTHSPESHPHLCKLHQERDESTLATSLEKDVRQNCYSVCDIMRLGRYSFSSPLTRLSTDIF

SEQ ID NO: 46146 - protein, 261 aa, Homo sapiens
MGDERTAVSLVTALPGRPSSCVSVTDGPKFEVKLKKNANGLGFSFVQMEKESCSHLKSDLVRIKRLFPGQPAEENGAIAAGDIILAVNGRSTEGLIFQEVLHLLRGAPQEVTLLLCRPPPGALPELEQEWQTPELSADKEFTRATCTDSCTSPILDQEDSWRDSASPDAGEGLGLRPESSQKAIREAQWGQNRERPWASSLTHSPESHPHLCKLHQERDESTLATSLEKDVRQNCYSVCDIMRLGRYSFSSPLTRLSTDIF

SEQ ID NO: 46147 - protein, 1311 aa, Homo sapiens [sequence omitted]

SEQ ID NO: 46148 - protein, 1322 aa, Homo sapiens
MDVFSFVKIAKLSSHRTKSSGWPPPSGTWGLSQVPPYGWEMTANRDGRDYFINHMTQAIPFDDPRLESCQIIPPAPRKVEMRRDPVLGFGFVAGSEKPVVVRSVTPGGPSEGKLIPGDQIVMINDEPVSAAPRERVIDLVRSCKESILLTVIQPYPSPKSAFISAAKKARLKSNPVKVRFSEEVIINGQVSETVKDNSLLFMPNVLKVYLENGQTKSFRFDCSTSIKDVILTLQEKLSIKGIEHFSLMLEQRTEGAGTKLLLLHEQETLTQVTQRPSSHKMRCLFRISFVPKDPIDLLRRDPVAFEYLYVQSCNDVVQERFGPELKYDIALRLAALQMYIATVTTKQTQKISLKYIEKEWGLETFLPSAVLQSMKEKNIKKALSHLVKANQNLVPPGKKLSALQAKVHYLKFLSDLRLYGGRVFKATLVQAEKRSEVTLLVGPRYGISHVINTKTNLVALLADFSHVNRIEMFSEEESLVRVELHVLDVKPITLLMESSDAMNLACLTAGYYRLLVDSRRSIFNMANKKNTATQETGPENKGKHNLLGPDWNCIPQMTTFIGEGEQEAQITYIDSKQKTVEITDSTMCPKEHRHLYIDNAYSSDGLNQQLSQPGEAPCEADYRSLAQRSLLTLSGPETLKKAQESPRGAKVSFIFGDFALDDGISPPTLGYETLLDEGPEMLEKQRNLYIGSANDMKGLDLTPEAEGIQFVENSVYANIGDVKSFQAAEGIEEPLLHDICYAENTDDAEDEDEVSCEEDLVVGEMNQPAILNLSGSSDDIIDLTSLPPPEGDDNEDDFLLRSLNMAIAAPPPGFRDSSDEEDSQSQAASFPEDKEKGSSLQNDEIPVSLIDAVPTSAEGKCEKGLDNAVVSTLGALEALSVSEEQQTSDNSGVAILRAYSPESSSDSGNETNSSEMTESSELATAQKQSENLSRMFLATHEGYHPLAEEQTEFPASKTPAGGLPPKSSHALAARPATDLPPKVVPSKQLLHSDHMEMEPETMETKSVTDYFSKLHMGSVAYSCTSKRKSKLADGEGKAPPNGNTTGKKQQGTKTAEMEEEASGKFGTVSSRDSQHLSTFNLERTAFRKDSQRWYVATEGGMAEKSGLEAATGKTFPRASGLGAREAEGKEEGAPDGETSDGSGLGQGDRFLTDVTCASSAKDLDNPEDADSSTCDHPSKLPEADESVARLCDYHLAKRMSSLQSEGHFSLQSSQGSSVDAGCGTGSSGSACATPVESPLCPSLGKHLIPDASGKGVNYIPSEERAPGLPNHGATFKELHPQTEGMCPRMTVPALHTAINTEPLFGTLRDGCHRLPKIKETTV

SEQ ID NO: 46149 - protein, 1313 aa, Homo sapiens
KSHSPHRTKSSGWPPPSGTWGLSQVPPYGWEMTANRDGRDYFINHMTQAIPFDDPRLESCQIIPPAPRKVEMRRDPVLGFGFVAGSEKPVVVRSVTPGGPSEGKLIPGDQIVMINDEPVSAAPRERVIDLVRSCKESILLTVIQPYPSPKSAFISAAKKARLKSNPVKVRFSEEVIINGQVSETVKDNSLLFMPNVLKVYLENGQTKSFRFDCSTSIKDVILTLQEKLSIKGIEHFSLMLEQRTEGAGTKLLLLHEQETLTQVTQRPSSHKMRCLFRISFVPKDPIDLLRRDPVAFEYLYVQSCNDVVQERFGPELKYDIALRLAALQMYIATVTTKQTQKISLKYIEKEWGLETFLPSAVLQSMKEKNIKKALSHLVKANQNLVPPGKKLSALQAKVHYLKFLSDLRLYGGRVFKATLVQAEKRSEVTLLVGPRYGISHVINTKTNLVALLADFSHVNRIEMFSEEESLVRVELHVLDVKPITLLMESSDAMNLACLTAGYYRLLVDSRRSIFNMANKKNTATQETGPENKGKHNLLGPDWNCIPQMTTFIGEGEQEAQITYIDSKQKTVEITDSTMCPKEHRHLYIDNAYSSDGLNQQLSQPGEAPCEADYRSLAQRSLLTLSGPETLKKAQESPRGAKVSFIFGDFALDDGISPPTLGYETLLDEGPEMLEKQRNLYIGSANDMKGLDLTPEAEGIQFVENSVYANIGDVKSFQAAEGIEEPLLHDICYAENTDDAEDEDEVSCEEDLVVGEMNQPAILNLSGSSDDIIDLTSLPPPEGDDNEDDFLLRSLNMAIAAPPPGFRDSSDEEDSQSQAASFPEDKEKGSSLQNDEIPVSLIDAVPTSAEGKCEKGLDNAVVSTLGALEALSVSEEQQTSDNSGVAILRAYSPESSSDSGNETNSSEMTESSELATAQKQSENLSRMFLATHEGYHPLAEEQTEFPASKTPAGGLPPKSSHALAARPATDLPPKVVPSKQLLHSDHMEMEPETMETKSVTDYFSKLHMGSVAYSCTSKRKSKLADGEGKAPPNGNTTGKKQQGTKTAEMEEEASGKFGTVSSRDSQHLSTFNLERTAFRKDSQRWYVATEGGMAEKSGLEAATGKTFPRASGLGAREAEGKEEGAPDGETSDGSGLGQGDRFLTDVTCASSAKDLDNPEDADSSTCDHPSKLPEADESVARLCDYHLAKRMSSLQSEGHFSLQSSQGSSVDAGCGTGSSGSACATPVESPLCPSLGKHLIPDASGKGVNYIPSEERAPGLPNHGATFKELHPQTEGMCPRMTVPALHTAINTEPLFGTLRDGCHRLPKIKETTG

SEQ ID NO: 46150 - protein, 597 aa, Homo sapiens
MFASCHCVPRGRRTMKMIHFRSSSVKSLSQEMRCTIRLLDDSEISCHIQRETKGQFLIDHICNYYSLLEKDYFGIRYVDPEKQRHWLEPNKSIFKQMKTHPPYTMCFRVKFYPHEPLKIKEELTRYLLYLQIKRDIFHGRLLCSFSDAAYLGACIVQAELGDYDPDEHPENYISEFEIFPKQSQKLERKIVEIHKNELRGQSPPVAEFNLLLKAHTLETYGVDPHPCKDSTGTTTFLGFTAAGFVVFQGNKRIHLIKWPDVCKLKFEGKTFYVIGTQKEKKAMLAFHTSTPAACKHLWKCGVENQAFYKYAKSSQIKTVSSSKIFFKGSRFRYSGKVAKEVVEASSKIQREPPEVHRANITQSRSSHSLNKQLIINMEPLQPLLPSPSEQEEELPLGEGVPLPKEENISAPLISSSPVKAAREYEDPPSEEEDKIKEEPLTISELVYNPSASLLPTPVDDDEIDMLFDCPSRLELEREDTDSFEDLEADENAFLIAEEEELKEARRALSWSYDILTGHIRVNPLVKSFSRLLVVGLGLLLFVFPLLLLLLESGIDLSFLCEIRQTPEFEQFHYEYYCPLKEWVAGKVHLILYMLGCS

SEQ ID NO: 46151 - protein, 213 aa, Homo sapiens
MQAEETKGIGITSMAKCLVKIQTRRSLQLHMVNHCNSNVFVRLLRLGSKVTARNTGVPLPKEENISAPLISSSPVKAAREYEDPPSEEEDKIKEEPLTISELVYNPSASLLPTPVDDDEIDMLFDCPSRLELEREDTDSFEDLEADENAFLIAEEEELKEARRALSWSYDILTGHIRVNPLVKSFSRLLVVGLGLLLFVFPLLLLLLESVSMQ

SEQ ID NO: 46152 - protein, 267 aa, Homo sapiens
MCFRVKFYPHEPLKIKEELTRYLLYLQIKRDIFHGRLLCSFSDAAYLGACIVQAELGDYDPDEHPENYISEFEIFPKQSQKLERKIVEIHKNELRGQSPPVAEFNLLLKAHTLETYGVDPHPCKDSTGTTTFLGFTAAGFVVFQGNKRIHLIKWPDVCKLKFEGKTFYVIGTQKEKKAMLAFHTSTPAACKHLWKCGVENQAFYKYAKSSQIKTVSSSKIFFKGSRFRYSGKVAKEVVEASSKIQREPPEVHRCVQKKICSCFGVTW

SEQ ID NO: 46153 - protein, 362 aa, Homo sapiens
MVFRRGQSPPVAEFNLLLKAHTLETYGVDPHPCKDSTGTTTFLGFTAAGFVVFQGNKRIHLIKWPDVCKLKFEGKTFYVIGTQKEKKAMLAFHTSTPAACKHLWKCGVENQAFYKYAKSSQIKTVSSSKIFFKGSRFRYSGKVAKEVVEASSKIQREPPEVHRANITQSRSSHSLNKQLIINMEPLQPLLPSPSEQEEELPLGEGVPLPKEENISAPLISSSPVKAAREYEDPPSEEEDKIKEEPLTISELVYNPSASLLPTPVDDDEIDMLFDCPSRLELEREDTDSFEDLEADENAFLIAEEEELKEARRALSWSYDILTGHIRVNPLVKSFSRLLVVGLGLLLFVFPLLLLLLESVSMQ

SEQ ID NO: 46154 - protein, 556 aa, Homo sapiens
MFASCHCVPRGRRTMKMIHFRSSSVKSLSQEMRCTIRLLDDSEISCHIQRETKGQFLIDHICNYYSLLEKDYFGIRYVDPEKQRHWLEPNKSIFKQMKTHPPYTMCFRVKFYPHEPLKIKEELTRYLLYLQIKRDIFHGRLLCSFSDAAYLGACIVQAELGDYDPDEHPENYISEFEIFPKQSQKLERKIVEIHKNELRGQSPPVAEFNLLLKAHTLETYGVDPHPCKDSTGTTTFLGFTAAGFVVFQGNKRIHLIKWPDVCKLKFEGKTFYVIGTQKEKKAMLAFHTSTPAACKHLWKCGVENQAFYKYAKSSQIKTVSSSKIFFKGSRFRYSGKVAKEVVEASSKIQREPPEVHRANITQSRSSHSLNKQLIINMEPLQPLLPSPSEQEEELPLGEGVPLPKEENISAPLISSSPVKAAREYEDPPSEEEDKIKEEPLTISELVYNPSASLLPTPVDDDEIDMLFDCPSRLELEREDTDSFEDLEADENAFLIAEEEELKEARRALSWSYDILTGHIRVNPLVKSFSRLLVVGLGLLLFVFPLLLLLLESVSMQ

SEQ ID NO: 46155 - protein, 140 aa, Homo sapiens
GTTTFLGFTAAGFVVFQGNKRIHLIKWPDVCKLKFEGKTFYVIGTQKEKKAMLAFHTSTPAACKHLWKCGVENQAFYKYAKSSQIKTVSSSKIFFKGSRFRYSGKVAKEVVEASSKIQREPPEVHRCVQKKICSCFGVTW

SEQ ID NO: 46156 - protein, 714 aa, Homo sapiens
MLHLKVQFLDDSQKIFVVDQKSSGKALFNLSCSHLNLAEKEYFGLEFCSHSGNNVWLELLKPITKQVKNPKEIVFKFMVKFFPVDPGHLREELTRYLFTLQIKKDLALGRLPCSDNCTALMVSHILQSELGDFHEETDRKHLAQTRYLPNQDCLEGKIMHFHQKHIGRSPAESDILLLDIARKLDMYGIRPHPASDGEGMQIHLAVAHMGVLVLRGNTKINTFNWAKIRKLSFKRKHFLIKLHANILVLCKDTLEFTMASRDACKAFWKTCVEYHAFFRLSEEPKSKPKTLLCSKGSSFRYSGRTQRQLLEYGRKGRLKSLPFERKHYPSQYHERQCRSSPDLLSDVSKQVEDLRLAYGGGYYQNVNGVHASEPVLESRRRNSALEVTFATELEHSKPEADPTLLHQSQSSSSFPFIYMDPVFNTEPNPNPDPRDIFSERSSLSSFQTSCKFSGNHMSIYSGLTSKVRPAKQLTYTDVPYIPCTGQQVGIMPPQVFFYVDKPPQVPRWSPIRAEERTSPHSYVEPTAMKPAERSPRNIRMKSFQQDLQVLQEAIARTSGRSNINVGLEEEDPNLEDAFVCNIQEQTPKRSQSQSDMKTIRFPFGSEFRPLGPCPALSHKADLFTDMFAEQELPAVLMDQSTAERYVASESSDSESEILKPDYYALYGKEIRSPMARIRLSSGSLQLDEEDEDAYFNTPTAEDRTSLKPCNYFLA

SEQ ID NO: 46157 - protein, 594 aa, Homo sapiens
MVSHILQSELGDFHEETDRKHLAQTRYLPNQDCLEGKIMHFHQKHIGRSPAESDILLLDIARKLDMYGIRPHPASDGEGMQIHLAVAHMGVLVLRGNTKINTFNWAKIRKLSFKRKHFLIKLHANILVLCKDTLEFTMASRDACKAFWKTCVEYHAFFRLSEEPKSKPKTLLCSKGSSFRYSGRTQRQLLEYGRKGRLKSLPFERKHYPSQYHERQCRSSPDLLSDVSKQVEDLRLAYGGGYYQNVNGVHASEPVLESRRRNSALEVTFATELEHSKPEADPTLLHQSQSSSSFPFIYMDPVFNTEPNPNPDPRDIFSERSSLSSFQTSCKFSGNHMSIYSGLTSKVRPAKQLTYTDVPYIPCTGQQVGIMPPQVFFYVDKPPQVPRWSPIRAEERTSPHSYVEPTAMKPAERSPRNIRMKSFQQDLQVLQEAIARTSGRSNINVGLEEEDPNLEDAFVCNIQEQTPKRSQSQSDMKTIRFPFGSEFRPLGPCPALSHKADLFTDMFAEQELPAVLMDQSTAERYVASESSDSESEILKPDYYALYGKEIRSPMARIRLSSGSLQLDEEDEDAYFNTPTAEDRTSLKPCNYFLA

SEQ ID NO: 46158 - protein, 680 aa, Homo sapiens
MALDGIRMPDGCYADGTWELSVHVTDLNRDVTLRVTGEVHIGGVMLKLVEKLDVKKDWSDHALWWEKKRTWLLKTHWTLDKYGIQADAKLQFTPQHKLLRLQLPNMKYVKVKVNFSDRVFKAVSDICKTFNIRHPEELSLLKKPRDPTKKKKKKLDDQSEDEALELEGPLITPGSGSIYSSPGLYSKTMTPTYDAHDGSPLSPTSAWFGDSALSEGNPGILAVSQPITSPEILAKMFKPQALLDKAKINQGWLDSSRSLMEQDVKENEALLLRFKYYSFFDLNPKYDAIRINQLYEQAKWAILLEEIECTEEEMMMFAALQYHINKLSIMTSENHLNNSDKEVDEVDAALSDLEITLEGGKTSTILGDITSIPELADYIKVFKPKKLTLKGYKQYWCTFKDTSISCYKSKEESSGTPAHQMNLRGCEVTPDVNISGQKFNIKLLIPVAEGMNEIWLRCDNEKQYAHWMAACRLASKGKTMADSSYNLEVQNILSFLKMQHLNPDPQLIPEQITTDITPECLVSPRYLKKYKNKQITARILEAHQNVAQMSLIEAKMRFIQAWQSLPEFGITHFIARFQGGKKEELIGIAYNRLIRMDASTGDAIKTWRFSNMKQWNVNWEIKMVTVEFADEVRLSFICTEVDCKVVHEFIGGYIFLSTRAKDQNESLDEEMFYKLTSGWV

SEQ ID NO: 46159 - protein, 687 aa, Homo sapiens
MALDGIRMPDGCYADGTWELSVHVTDLNRDVTLRVTGEVHIGGVMLKLVEKLDVKKDWSDHALWWEKKRTWLLKTHWTLDKYGIQADAKLQFTPQHKLLRLQLPNMKYVKVKVNFSDRVFKAVSDICKTFNIRHPEELSLLKKPRDPTKKKKKKLDDQSEDEALELEGPLITPGSGSIYSSPGLYSKTMTPTYDAHDGSPLSPTSAWFGDSALSEGNPGILAVSQPITSPEILAKMFKPQALLDKAKINQGWLDSSRSLMEQDVKENEALLLRFKYYSFFDLNPKYDAIRINQLYEQAKWAILLEEIECTEEEMMMFAALQYHINKLSIMTSENHLNNSDKEVDEVDAALSDLEITLEGGKTSTILGDITSIPELADYIKVFKPKKLTLKGYKQYWCTFKDTSISCYKSKEESSGTPAHQMNLRGCEVTPDVNISGQKFNIKLLIPVAEGMNEIWLRCDNEKQYAHWMAACRLASKGKTMADSSYNLEVQNILSFLKMQHLNPDPQLIPEQITTDITPECLVSPRYLKKYKNKQPGYIRDLITARILEAHQNVAQMSLIEAKMRFIQAWQSLPEFGITHFIARFQGGKKEELIGIAYNRLIRMDASTGDAIKTWRFSNMKQWNVNWEIKMVTVEFADEVRLSFICTEVDCKVVHEFIGGYIFLSTRAKDQNESLDEEMFYKLTSGWV

SEQ ID NO: 46160 - protein, 680 aa, Homo sapiens; identical to SEQ ID NO: 46158

SEQ ID NO: 46161 - protein, 633 aa, Homo sapiens
MALDGIRMPDGCYADGTWELSVHVTDLNRDVTLRVTGEVHIGGVMLKLVEKLDVKKDWSDHALWWEKKRTWLLKTHWTLDKYGIQADAKLQFTPQHKLLRLQLPNMKYVKVKVNFSDRVFKAVSDICKTFNIRHPEELSLLKKPRDPTKKKKKKLDDQSEDEALELEGPLITPGSGSIYSSPGLYSKTMTPTYDAHDGSPLSPTSAWFGDSALSEGNPGILAVSQPITSPEILAKMFKPQALLDKAKINQGWLDSSRSLMEQDVKENEALLLRFKYYSFFDLNPKYDAIRINQLYEQAKWAILLEEIECTEEEMMMFAALQYHINKLSIMTSENHLNNSDKEVDEVDAALSDLEITLEGGKTSTILGDITSIPELADYIKVFKPKKLTLKGYKQYWCTFKDTSISCYKSKEESSGTPAHQMNLRGCEVTPDVNISGQKFNIKLLIPVAEGMNEIWLRCDNEKQYAHWMAACRLASKGKTMADSSYNLEVQNILSFLKMQHLNPDPQLIPEQITTDITPECLVSPRYLKKYKNKQPGYIRDLITARILEAHQNVAQMSLIEAKMRFIQAWQSLPEFGITHFIARFQGGKKEELIGIAYNRLIRMDASTGDAIKTWRFSNMKQWNVNWEIKMVNS

SEQ ID NO: 46162 - protein, 687 aa, Homo sapiens; identical to SEQ ID NO: 46159

SEQ ID NO: 46163 - protein, 153 aa, Homo sapiens
MALDGIRMPDGCYADGTWELSVHVTDLNRDVTLRVTGEVHIGGVMLKLVEKLDVKKDWSDHALWWEKKRTWLLKTHWTLDKYGIQADAKLQFTPQHKLLRLQLPNMKYVKVKVNFSDRVFKAVSDICKTFNIRHPEELSLLKKPRDPTKKKKK

SEQ ID NO: 46164 - protein, 667 aa, Homo sapiens
MAGMKTASGDYIDSSWELRVFVGEEDPEAESVTLRVTGESHIGGVLLKIVEQINRKQDWSDHAIWWEQKRQWLLQTHWTLDKYGILADARLFFGPQHRPVILRLPNRRALRLRASFSQPLFQAVAAICRLLSIRHPEELSLLRAPEKKEKKKKEKEPEEELYDLSKVVLAGGVAPALFRGMPAHFSDSAQTEACYHMLSRPQPPPDPLLLQRLPRPSSLSDKTQLHSRWLDSSRCLMQQGIKAGDALWLRFKYYSFFDLDPKTDPVRLTQLYEQARWDLLLEEIDCTEEEMMVFAALQYHINKLSQSGEVGEPAGTDPGLDDLDVALSNLEVKLEGSAPTDVLDSLTTIPELKDHLRIFRIPRRPRKLTLKGYRQHWVVFKETTLSYYKSQDEAPGDPIQQLNLKGCEVVPDVNVSGQKFCIKLLVPSPEGMSEIYLRCQDEQQYARWMAGCRLASKGRTMADSSYTSEVQAILAFLSLQRTGSGGPGNHPHGPDASAEGLNPYGLVAPRFQRKFKAKQLTPRILEAHQNVAQLSLAEAQLRFIQAWQSLPDFGISYVMVRFKGSRKDEILGIANNRLIRIDLAVGDVVKTWRFSNMRQWNVNWDIRQVAIEFDEHINVAFSCVSASCRIVHEYIGGYIFLSTRERARGEELDEDLFLQLTGGHEAF

SEQ ID NO: 46165 - protein, 663 aa, Homo sapiens
MAGMKTASGDYIDSSWELRVFVGEEDPEAESVTLRVTGESHIGGVLLKIVEQINRKQDWSDHAIWWEQKRQWLLQTHWTLDKYGILADARLFFGPQHRPVILRLPNRRALRLRASFSQPLFQAVAAICRLLSIRHPEELSLLRAPEKKEKKKKEKEPEEELYDLSKVVLAGGVAPALFRGMPAHFSDSAQTEACYHMLSRPQPPPDPLLLQRLPRPSSLSDKTQLHSRWLDSSRCLMQQGIKAGDALWLRFKYYSFFDLDPKTDPVRLTQLYEQARWDLLLEEIDCTEEEMMVFAALQYHINKLSQSGEVGEPAGTDPGLDDLDVALSNLEVKLEGSAPTDVLDSLTTIPELKDHLRIFRPRKLTLKGYRQHWVVFKETTLSYYKSQDEAPGDPIQQLNLKGCEVVPDVNVSGQKFCIKLLVPSPEGMSEIYLRCQDEQQYARWMAGCRLASKGRTMADSSYTSEVQAILAFLSLQRTGSGGPGNHPHGPDASAEGLNPYGLVAPRFQRKFKAKQLTPRILEAHQNVAQLSLAEAQLRFIQAWQSLPDFGISYVMVRFKGSRKDEILGIANNRLIRIDLAVGDVVKTWRFSNMRQWNVNWDIRQVAIEFDEHINVAFSCVSASCRIVHEYIGGYIFLSTRERARGEELDEDLFLQLTGGHEAF

SEQ ID NO: 46166 - protein, 286 aa, Homo sapiens
MAGMKTASGDYIDSSWELRVFVGEEDPEAESVTLRVTGESHIGGVLLKIVEQINRKQDWSDHAIWWEQKRQWLLQTHWTLDKYGILADARLFFGPQHRPVILRLPNRRALRLRASFSQPLFQAVAAICRLLSIRHPEELSLLRAPEKKEKKKKEKEPEEELYDLSKVVLAGGVAPALFRGMPAHFSDSAQTEACYHMLSRPQPPPDPLLLQRLPRPSSLSDKTQLHSRWLDSSRCLMQQGIKAGDALWLRFKYYSFFDLDPKTDPVRLTQLYEQARWDLLLEEIDC

SEQ ID NO: 46167 - protein, 184 aa, Homo sapiens
MAAAGGARLLRAASAVLGGPAGRWLHHAGSRAGSSGLLRNRGPGGSAEASRSLSVSARARSSSEDKITVHFINRDGETLTTKGKVGDSLLDVVVENNLDIDGFGACEGTLACSTCHLIFEDHIYEKLDAITDEENDMLDLAYGLTDRSRLGCQICLTKSMDNMTVRVPETVADARQSIDVGKTS

SEQ ID NO: 46168 - protein, 497 aa, Homo sapiens
MASRCWRWWGWSAWPRTRLPPAGSTPSFCHHFSTQEKTPQICVVGSGPAGFYTAQHLLKHPQAHVDIYEKQPVPFGLVRFGVAPDHPEVKNVINTFTQTAHSGRCAFWGNVEVGRDVTVPELREAYHAVVLSYGAEDHRALEIPGEELPGVCSARAFVGWYNGLPENQELEPDLSCDTAVILGQGNVALDVARILLTPPEHLEALLLCQRTDITKAALGVLRQSRVKTVWLVGRRGPLQVAFTIKELREMIQLPGARPILDPVDFLGLQDKIKEVPRPRKRLTELLLRTATEKPGPAEAARQASASRAWGLRFFRSPQQVLPSPDGRRAAGVRLAVTRLEGVDEATRAVPTGDMEDLPCGLVLSSIGYKSRPVDPSVPFDSKLGVIPNVEGRVMDVPGLYCSGWVKRGPTGVIATTMTDSFLTGQMLLQDLKAGLLPSGPRPGYAAIQALLSSRGVRPVSFSDWEKLDAEEVARGQGTGKPREKLVDPQEMLRLLGH

SEQ ID NO: 46169 - protein, 522 aa, Homo sapiens
MASRCWRWWGWSAWPRTRLPPAGSTPTFGGSDEVRDPANAKALRNKRRRMQVRVKLGKFQLLLDIQEKTPQICVVGSGPAGFYTAQHLLKHPQAHVDIYEKQPVPFGLVRFGVAPDHPEVKNVINTFTQTAHSGRCAFWGNVEVGRDVTVPELREAYHAVVLSYGAEDHRALEIPGEELPGVCSARAFVGWYNGLPENQELEPDLSCDTAVILGQGNVALDVARILLTPPEHLERTDITKAALGVLRQSRVKTVWLVGRRGPLQVAFTIKELREMIQLPGARPILDPVDFLGLQDKIKEVPRPRKRLTELLLRTATEKPGPAEAARQASASRAWGLRFFRSPQQVLPSPDGRRAAGVRLAVTRLEGVDEATRAVPTGDMEDLPCGLVLSSIGYKSRPVDPSVPFDSKLGVIPNVEGRVMDVPGLYCSGWVKRGPTGVIATTMTDSFLTGQMLLQDLKAGLLPSGPRPGYAAIQALLSSRGVRPVSFSDWEKLDAEEVARGQGTGKPREKLVDPQEMLRLLGH

SEQ ID NO: 46170 - protein, 451 aa, Homo sapiens
MASRCWRWWGWSAWPRTRLPPAGSTPSFCHHFSTQEKTPQICVVGSGPAGFYTAQHLLKQHPQAHVDIYEKQPVPFGLVRFGVAPDHPEVKSYGAEDHRALEIPGEELPGVCSARAFVGWYNGLPENQELEPDLSCDTAVILGQGNVALDVARILLTPPEHLERTDITKAALGVLRQSRVKTVWLVGRRGPLQVAFTIKELREMIQLPGARPILDPVDFLGLQDKIKEVPRPRKRLTELLLRTATEKPGPAEAARQASASRAWGLRFFRSPQQVLPSPDGRRAAGVRLAVTRLEGVDEATRAVPTGDMEDLPCGLVLSSIGYKSRPVDPSVPFDSKLGVIPNVEGRVMDVPGLYCSGWVKRGPTGVIATTMTDSFLTGQMLLQDLKAGLLPSGPRPGYAAIQALLSSRGVRPVSFSDWEKLDAEEVARGQGTGKPREKLVDPQEMLRLLGH

SEQ ID NO: 46171 - protein, 534 aa, Homo sapiens
MASRCWRWWGWSAWPRTRLPPAGSTPSFCHHFSTQEKTPQICVVGSGPAGFYTAQHLLKRVEALCSQPRVLNSPALSGEGEDLGASQPLSLDPTSCHPVPQQHPQAHVDIYEKQPVPFGLVRFGVAPDHPEVKNVINTFTQTAHSGRCAFWGNVEVGRDVTVPELREAYHAVVLSYGAEDHRALEIPGEELPGVCSARAFVGWYNGLPENQELEPDLSCDTAVILGQGNVALDVARILLTPPEHLERTDITKAALGVLRQSRVKTVWLVGRRGPLQVAFTIKELREMIQLPGARPILDPVDFLGLQDKIKEVPRPRKRLTELLLRTATEKPGPAEAARQASASRAWGLRFFRSPQQVLPSPDGRRAAGVRLAVTRLEGVDEATRAVPTGDMEDLPCGLVLSSIGYKSRPVDPSVPFDSKLGVIPNVEGRVMDVPGLYCSGWVKRGPTGVIATTMTDSFLTGQMLLQDLKAGLLPSGPRPGYAAIQALLSSRGVRPVSFSDWEKLDAEEVARGQGTGKPREKLVDPQEMLRLLGH

SEQ ID NO: 46172 - protein, 381 aa, Homo sapiens [sequence omitted]

SEQ ID NO: 46173 - protein, 439 aa, Homo sapiens
MEDKDREHPQAHVDIYEKQPVPFGLVRFGVAPDHPEVKNVINTFTQTAHSGRCAFWGNVEVGRDVTVPELREAYHAVVLSYGAEDHRALEIPGEELPGVCSARAFVGWYNGLPENQELEPDLSCDTAVILGQGNVALDVARILLTPPEHLERTDITKAALGVLRQSRVKTVWLVGRRGPLQVAFTIKELREMIQLPGARPILDPVDFLGLQDKIKEVPRPRKRLTELLLRTATEKPGPAEAARQASASRAWGLRFFRSPQQVLPSPDGRRAAGVRLAVTRLEGVDEATRAVPTGDMEDLPCGLVLSSIGYKSRPVDPSVPFDSKLGVIPNVEGRVMDVPGLYCSGWVKRGPTGVIATTMTDSFLTGQMLLQDLKAGLLPSGPRPGYAAIQALLSSRGVRPVSFSDWEKLDAEEVARGQGTGKPREKLVDPQEMLRLLGH

SEQ ID NO: 46174 - protein, 497 aa, Homo sapiens; identical to SEQ ID NO: 46168

SEQ ID NO: 46175 - protein, 483 aa, Homo sapiens
MASRCWRWWGWSAWPRTRLPPAGSTPSFCHHFSTQEKTPQICVVGSGPAGFYTAQHLLKHPQAHVDIYEKQPVPFGLVRFGVAPDHPEVKTAHSGRCAFWGNVEVGRDVTVPELREAYHAVVLSYGAEDHRALEIPGEELPGVCSARAFVGWYNGLPENQELEPDLSCDTAVILGQGNVALDVARILLTPPEHLERTDITKAALGVLRQSRVKTVWLVGRRGPLQVAFTIKELREMIQLPGARPILDPVDFLGLQDKIKEVPRPRKRLTELLLRTATEKPGPAEAARQASASRAWGLRFFRSPQQVLPSPDGRRAAGVRLAVTRLEGVDEATRAVPTGDMEDLPCGLVLSSIGYKSRPVDPSVPFDSKLGVIPNVEGRVMDVPGLYCSGWVKRGPTGVIATTMTDSFLTGQMLLQDLKAGLLPSGPRPGYAAIQALLSSRGVRPVSFSDWEKLDAEEVARGQGTGKPREKLVDPQEMLRLLGH

SEQ ID NO: 46176 - protein, 626 aa, Homo sapiens
MAVSGFTLGTCILLLHISYVANYPNGKVTQSCHGMIPEHGHSPQSVPVHDIYVSQMTFRPGDQIEVTLSGHPFKGFLLEARNAEDLNGPPIGSFTLIDSEVSQLLTCEDIQGSAVSHRSASKKTEIKVYWNAPSSAPNHTQFLVTVVEKYKIYWVKIPGPIISQPNAFPFTTPKATVVPLPTLPPVSHLTKPFSASDCGNKKFCIRSPLNCDPEKEASCVFLSFTRDDQSVMVEMSGPSKGYLSFALSHDQWMGDDDAYLCIHEDQTVYIQPSHLTGRSHPVMDSRDTLEDMAWRLADGVMQCSFRRNITLPGVKNRFDLNTSYYIFLADGAANDGRIYKHSQQPLITYEKYDVTDSPKNIGGSHSVLLLKVHGALMFVAWMTTVSIGVLVARFFKPVWSKAFLLGEAAWFQVHRMLMFTTTVLTCIAFVMPFIYRGGWSRHAGYHPYLGCIVMTLAVLQPLLAVFRPPLHDPRRQMFNWTHWSMGTAARIIAVAAMFLGMDLPGLNLPDSWKTYAMTGFVAWHVGTEVVLELKYWMMTEFRSFSHLLQWKQRVMLLKRQCWQFMSVGMLLFSSYFYLQSTIYEQAKTLAFAGQVIIIIKPKKLEACPDCLEHICEFSLGRLGSCL

SEQ ID NO: 46177 - protein, 592 aa, Homo sapiens
MAVSGFTLGTCILLLHISYVANYPNGKVTQSCHGMIPEHGHSPQSVPVHDIYVSQMTFRPGDQIEVTLSGHPFKGFLLEARNAEDLNGPPIGSFTLIDSEVSQLLTCEDIQGSAVSHRSASKKTEIKVYWNAPSSAPNHTQFLVTVVEKYKIYWVKIPGPIISQPNAFPFTTPKATVVPLPTLPPVSHLTKPFSASDCGNKKFCIRSPLNCDPEKEASCVFLSFTRDDQSVMVEMSGPSKGYLSFALSHDQWMGDDDAYLCIHEDQTVYIQPSHLTGRSHPVMDSRDTLEDMAWRLADGVMQCSFRRNITLPGVKNRFDLNTSYYIFLADGAANDGRIYKHSQQPLITYEKYDVTDSPKNIGGSHSVLLLKVHGALMFVAWMTTVSIGVLVARFFKPVWSKAFLLGEAAWFQVHRMLMFTTTVLTCIAFVMPFIYRGGWSRHAGYHPYLGCIVMTLAVLQPLLAVFRPPLHDPRRQMFNWTHWSMGTAARIIAVAAMFLGMDLPGLNLPDSWKTYAMTGFVAWHVGTEVVLEVHAYRLSRKVEILDDDRIQILQSFTAVETEGHAFKKAVLAIYVCGNVTFLIIFLSAINHL

SEQ ID NO: 46178 - protein, 242 aa, Homo sapiens [sequence omitted]

SEQ ID NO: 46179 - protein, 183 aa, Homo sapiens
MTTASTSQVRQNYHQDSEAAINRQINLELYASYVYLSMSYYFDRDDVALKNFAKYFLHQSHEEREHAEKLMKLQNQRGGRIFLQDIKKPDCDDWESGLNAMECALHLEKNVNQSLLELHKLATDKNDPHLCDFIETHYLNEQVKAIKELGDHVTNLRKMGAPESGLAEYLFDKHTLGDSDNES

SEQ ID NO: 46180 - protein, 232 aa, Homo sapiens
SGFPASTVLGRNPALVPHPGRPPIASPPSPLHRTLGLPQGPRRLSLVAAMTTASTSQVRQNYHQDSEAAINRQINLELYASYVYLSMSYYFDRDDVALKNFAKYFLHQSHEEREHAEKLMKLQNQRGGRIFLQDIKKPDCDDWESGLNAMECALHLEKNVNQSLLELHKLATDKNDPHLCDFIETHYLNEQVKAIKELGDHVTNLRKMGAPESGLAEYLFDKHTLGDSDNES

SEQ ID NO: 46181 - protein, 153 aa, Homo sapiens
MTTASTSQSYYFDRDDVALKNFAKYFLHQSHEEREHAEKLMKLQNQRGGRIFLQDIKKPDCDDWESGLNAMECALHLEKNVNQSLLELHKLATDKNDPHLCDFIETHYLNEQVKAIKELGDHVTNLRKMGAPESGLAEYLFDKHTLGDSDNES

SEQ ID NO: 46182 - protein, 183 aa, Homo sapiens
MATAQPSQVRQKYDTNCDAAINSHITLELYTSYLYLSMAFYFNRDDVALENFFRYFLRLSDDKMEHAQKLMRLQNLRGGHICLHDIRKPECQGWESGLVAMESAFHLEKNVNQSLLDLYQLAVEKGDPQLCHFLESHYLHEQVKTIKELGGYVSNLRKICSPEAGLAEYLFDKLTLGGRVKET

SEQ ID NO: 46183 - protein, 175 aa, Homo sapiens
MSSQIRQNYSTDVEAAVNSLVNLYLQASYTYLSLGFYFDRDDVALEGVSHFFRELAEEKREGYERLLKMQNQRGGRALFQDIKKPAEDEWGKTPDAMKAAMALEKKLNQALLDLHALGSARTDPHLCDFLETHFLDEEVKLIKKMGDHLTNLHRLGGPEAGLGEYLFERLTLKHD

SEQ ID NO: 46184 - protein, 190 aa, Homo sapiens
MSSQIRQNYSTDVEAAVNSLVNLYLQASYTYLSLGFYFDRDDVALEGVSHFFRELAEEKREGYERLLKMQNQRGGRALFQDIKKPAEDEWGKTPDAMKAAMALEKKLNQALLDLHALGSARTDPHLCDFLETHFLDEEVKLIKKMGDHLTNLHRLGGPEAGLGEYLSKGSLSSTTKSLLSPATSEGPLAK

SEQ ID NO: 46185 - protein, 423 aa, Homo sapiens
MRSLGANMAAALRAAGVLLRDPLASSSWRVCQPWRWKSGAAAAAVTTETAQHAQGAKPQVQPQKRKPKTGILMLNMGGPETLGDVHDFLLRLFLDRDLMTLPIQNKLAPFIAKRRTPKIQEQYRRIGGGSPIKIWTSKQGEGMVKLLDELSPNTAPHKYYIGFRYVHPLTEEAIEEMERDGLERAIAFTQYPQYSCSTTGSSLNAIYRYYNQVGRKPTMKWSTIDRWPTHHLLIQCFADHILKELDHFPLEKRSEVVILFSAHSLPMSVVNRGDPYPQEVSATVQKVMERLEYCNPYRLVWQSKVGPMPWLGPQTDESIKGLCERGRKNILLVPIAFTSDHIETLYELDIEYSQVLAKECGVENIRRAESLNGNPLFSKALADLVHSHIQSNELCSKQLTLSCPLCVNPVCRETKSFFTSQQL

SEQ ID NO: 46186 - protein, 429 aa, Homo sapiens
MRSLGANMAAALRAAGVLLRDPLASSSWRVCQPWRWKSGAAAAAVTTETAQHAQGAKPQVQPQKRYESNIRKPKTGILMLNMGGPETLGDVHDFLLRLFLDRDLMTLPIQNKLAPFIAKRRTPKIQEQYRRIGGGSPIKIWTSKQGEGMVKLLDELSPNTAPHKYYIGFRYVHPLTEEAIEEMERDGLERAIAFTQYPQYSCSTTGSSLNAIYRYYNQVGRKPTMKWSTIDRWPTHHLLIQCFADHILKELDHFPLEKRSEVVILFSAHSLPMSVVNRGDPYPQEVSATVQKVMERLEYCNPYRLVWQSKVGPMPWLGPQTDESIKGLCERGRKNILLVPIAFTSDHIETLYELDIEYSQVLAKECGVENIRRAESLNGNPLFSKALADLVHSHIQSNELCSKQLTLSCPLCVNPVCRETKSFFTSQQL

SEQ ID NO: 46187 - protein, 382 aa, Homo sapiens
MGLLLPLALCILVLCCGAMSPPQLALNPSALLSRGCNDSDVLAVAGFALRDINKDRKDGYVLRLNRVNDAQEYRRGGLGSLFYLTLDVLETDCHVLRKKAWQDCGMRIFFESVYGQCKAIFYMNNPSRVLYLAAYNCTLRPVSKKKIYMTCPDCPSSIPTDSSNHQVLEAATESLAKYNNENTSKQYSLFKVTRASSQWVVGPSYFVEYLIKESPCTKSQASSCSLQSSDSVPVGLCKGSLTRTHWEKFVSVTCDFFESQAPATGSENSAVNQKPTNLPKVEESQQKNTPPTDSPSKAGPRGSVQYLPDLDDKNSQEKGPQEAFPVHLDLTTNPQGETLDISFLFLEPMEEKLVVLPFPKEKARTAECPGPAQNASPLVLPP

SEQ ID NO: 46188 - protein, 382 aa, Homo sapiens; identical to SEQ ID NO: 46187

SEQ ID NO: 46189 - protein, 234 aa, Homo sapiens
MTCPDCPSSIPTDSSNHQVLEAATESLAKYNNENTSKQYSLFKVTRASSQWVVGPSYFVEYLIKESPCTKSQASSCSLQSSDSVPVGLCKGSLTRTHWEKFVSVTCDFFESQAPATGSENSAVNQKPTNLPKVEESQQKNTPPTDSPSKAGPRGSVQYLPDLDDKNSQEKGPQEAFPVHLDLTTNPQGETLDISFLFLEPMEEKLVVLPFPKEKARTAECPGPAQNASPLVLPP

SEQ ID NO: 46190 - protein, 238 aa, Homo sapiens
MRQSGASQPLLINMYLPDPVGDGLFKDGKNPSWGPLSPAVQKGSGQIQLWQFLLELLADRANAGCIAWEGGHGEFKLTDPDEVARRWGERKSKPNMNYDKLSRALRYYYDKNIMSKVHGKRYAYRFDFQGLAQACQPPPAHAHAAAAAAAAAAAAQDGALYKLPAGLAPLPFPGLSKLNLMAASAGVAPAGFSYWPGPGPAATAAAATAALYPSPSLQPPPGPFGAVAAASHLGGHYH

SEQ ID NO: 46191 - protein, 471 aa, Homo sapiens
MDSSCHNATTKMLATAPARGNMMSTSKPLAFSIERIMARTPEPKALPVPHFLQGALPKGEPKHSLHLNSSIPCMIPFVPVAYDTSPKAGVTGSEPRKASLEAPAAPAAVPSAPAFSCSDLLNCALSLKGDLARDALPLQQYKLVRPRVVNHSSFHAMGALCYLNRGDGPCHPAAGVNIHPVASYFLSSPLHPQPKTYLAERNKLVVPAVEKYPSGVAFKDLSQAQLQHYMKESAQLLSEKIAFKTSDFSRGSPNAKPKVFTCEVFNAHYNLTRHMPVHTGARPFVCKVCGKGFRQASTLCRHKIIHTQEKPHKCNQCGKAFNRSSTLNTHTRIHAGYKPFVCEFCGKGFHQKGNYKNHKLTHSGEKQFKCNICNKAFHQVYNLTFHMHTHNDKKPFTCPTCGKGFCRNFDLKKHVRKLHDSSLGLARTPAGEPGTEPPPPLPQQPPMTLPPLQPPLPTPGPLQPGLHQGHQ

SEQ ID NO: 46192 - protein, 35 aa, Homo sapiens
MDSSCHNATTKMLATAPARGNMMSTSKPLAFSIER

SEQ ID NO: 46193 - protein, 425 aa, Homo sapiens
MDSSCHNATTKMLATAPARGNMMSTSKPLAFSIERIMARTPEPKALPVPHFLQGALPKGEPKHSLHLNSSIPCMIPFVPVAYDTSPKAGVTGSEPRKASLEAPAAPAAVPSAPAFSCSDLLNCALSLKGDLARDALPLQQYKLPKTYLAERNKLVVPAVEKYPSGVAFKDLSQAQLQHYMKESAQLLSEKIAFKTSDFSRGSPNAKPKVFTCEVCGKVFNAHYNLTRHMPVHTGARPFVCKVCGKGFRQASTLCRHKIIHTQEKPHKCNQCGKAFNRSSTLNTHTRIHAGYKPFVCEFCGKGFHQKGNYKNHKLTHSGEKQFKCNICNKAFHQVYNLTFHMHTHNDKKPFTCPTCGKGFCRNFDLKKHVRKLHDSSLGLARTPAGEPGTEPPPPLPQQPPMTLPPLQPPLPTPGPLQPGLHQGHQ

SEQ ID NO: 46194 - protein, 475 aa, Homo sapiens
MDSSCHNATTKMLATAPARGNMMSTSKPLAFSIERIMARTPEPKALPVPHFLQGALPKGEPKHSLHLNSSIPCMIPFVPVAYDTSPKAGVTGSEPRKASLEAPAAPAAVPSAPAFSCSDLLNCALSLKGDLARDALPLQQYKLVRPRVVNHSSFHAMGALCYLNRGDGPCHPAAGVNIHPVASYFLSSPLHPQPKTYLAERNKLVVPAVEKYPSGVAFKDLSQAQLQHYMKESAQLLSEKIAFKTSDFSRGSPNAKPKVFTCEVCGKVFNAHYNLTRHMPVHTGARPFVCKVCGKGFRQASTLCRHKIIHTQEKPHKCNQCGKAFNRSSTLNTHTRIHAGYKPFVCEFCGKGFHQKGNYKNHKLTHSGEKQFKCNICNKAFHQVYNLTFHMHTHNDKKPFTCPTCGKGFCRNFDLKKHVRKLHDSSLGLARTPAGEPGTEPPPPLPQQPPMTLPPLQPPLPTPGPLQPGLHQGHQ

SEQ ID NO: 46195 - protein, 459 aa, Homo sapiens
MASSASLETMVPPACPRAGASPATSKTLAFSIERIMAKTSEPRAPFEPRPGALEADGSQGKKLLNLCSPLPCMIPLQPLGYEVPSKTLLSYSELWKSSLRAGGGGGGGGGGGGGGGGAPVCGASGLCKTNCGVCCKAELGLAPSALPAGRVIKPQVINQAVGLPASGSLYYFNYLDSTAYPPSELLSGHLFPSGLLNAQAPAALAAHPKLFLLENAKLAGLAADKFPHPAPYPHKERLPAPLEQVLKENSALTAERGGVKGHSKLPGGSADGKPKNFTCEVCGKVFNAHYNLTRHMPVHTGARPFVCKVCGKGFRQASTLCRHKIIHTQEKPHKCNQCGKAFNRSSTLNTHIRIHAGYKPFVCEFCGKGFHQKGNYKNHKLTHSGEKQYKCTICNKAFHQVYNLTFHMHTHNDKKPFTCATCGKGFCRNFDLKKHVRKLHDSVGPAAPSAKDLTRTVQS

SEQ ID NO: 46196 - protein, 459 aa, Homo sapiens; identical to SEQ ID NO: 46195

SEQ ID NO: 46197 - protein, 459 aa, Homo sapiens; identical to SEQ ID NO: 46195

SEQ ID NO: 46198 - protein, 379 aa, Homo sapiens
MAATAAAVVAEEDTELRDLLVQTLENSGVLNRIKAELRAAVFLALEEQEKVENKTPLVNESLKKFLNTKDGRLVASLVAEFLQFFNLDFTLAVFQPETSTLQGLEGRENLARDLGIIEAEGTVGGPLLLEVIRRCQQKEKGPTTGEGALDLSDVHSPPKSPEGKTSAQTTPSKKANDEANQSDTSVSLSEPKSKSSLHLLSHETKIGSFLSNRTLDGKDKAGLCPDEDDMEGDSFFDDPIPKPEKTYGLRKEPRKQAGSLASLSDAPPLKSGLSSLAGAPSLKDSESKRGNTVLKDLKLISDKIGSLGLGTGEDDDYVDDFNSTSHRSEKSEISIGEEIEEDLSVEIDDINTSDKLDDLTQDLTVSQLSDVADYLEDVA

SEQ ID NO: 46199 - protein, 399 aa, Homo sapiens
MAATAAAVVAEEDTELRDLLVQTLENSGVLNRIKAELRAAVFLALEEQEKVENKTPLVNESLKKFLNTKDGRLVASLVAEFLQFFNLDFTLAVFQPETSTLQGLEGRENLARDLGIIEAEGTVGGPLLLEVIRRCQQKEKGPTTGEGALDLSDVHSPPKSPEGKTSAQTTPSKIPRYKGQGKKKTSGQKAGDKKANDEANQSDTSVSLSEPKSKSSLHLLSHETKIGSFLSNRTLDGKDKAGLCPDEDDMEGDSFFDDPIPKPEKTYGLRKEPRKQAGSLASLSDAPPLKSGLSSLAGAPSLKDSESKRGNTVLKDLKLISDKIGSLGLGTGEDDDYVDDFNSTSHRSEKSEISIGEEIEEDLSVEIDDINTSDKLDDLTQDLTVSQLSDVADYLEDVA

SEQ ID NO: 46200 - protein, 364 aa, Homo sapiens
MAATAAAVVAEEDTELRDLLVQTLENSGVLNRIKAELRAAVFLALEEQEKVENKTPLVNESLKKFLNTKDGRLVASLVAEFLQFFNLDFTLAVFQPETSTLQGLEGRENLARDLGIIEAEGTVGGPLLLEVIRRCQQKEKGPTTGEKANDEANQSDTSVSLSEPKSKSSLHLLSHETKIGSFLSNRTLDGKDKAGLCPDEDDMEGDSFFDDPIPKPEKTYGLRKEPRKQAGSLASLSDAPPLKSGLSSLAGAPSLKDSESKRGNTVLKDLKLISDKIGSLGLGTGEDDDYVDDFNSTSHRSEKSEISIGEEIEEDLSVEIDDINTSDKTITQLECLLSIGALHFKNTADIFKVIFILLNKILPI

SEQ ID NO: 46201 - protein, 321 aa, Homo sapiens
MKPGFSPRGGGFGGRGGFGDRGGRGGRGGFGGGRGRGGGFRGRGRGGGGGGGGGGGGGRGGGGFHSGGNRGRGRGGKRGNQSGKNVMVEPHRHEGVFICRGKEDALVTKNLVPGESVYGEKRVSISEGDDKIEYRAWNPFRSKLAAAILGGVDQIHIKPGAKVLYLGAASGTTVSHVSDIVGPDGLVYAVEFSHRSGRDLINLAKKRTNIIPVIEDARHPHKYRMLIAMVDVIFADVAQPDQTRIVALNAHTFLRNGGHFVISIKANCIDSTASAEAVFASEVKKMQQENMKPQEQLTLEPYERDHAVVVGVYRPPPKVKN

SEQ ID NO: 46202 - protein, 2871 aa, Homo sapiens
MRRGRLLEIALGFTVLLASYTSHGADANLEAGNVKETRASRAKRRGGGGHDALKGPNVCGSRYNAYCCPGWKTLPGGNQCIVPICRHSCGDGFCSRPNMCTCPSGQIAPSCGSRSIQHCNIRCMNGGSCSDDHCLCQKGYIGTHCGQPVCESGCLNGGRCVAPNRCACTYGFTGPQCERDYRTGPCFTVISNQMCQGQLSGIVCTKTLCCATVGRAWGHPCEMCPAQPHPCRRGFIPNIRTGACQDVDECQAIPGLCQGGNCINTVGSFECKCPAGHKLNEVSQKCEDIDECSTIPGICEGGECTNTVSSYFCKCPPGFYTSPDGTRCIDVRPGYCYTALTNGRCSNQLPQSITKMQCCCDAGRCWSPGVTVAPEMCPIRATEDFNKLCSVPMVIPGRPEYPPPPLGPIPPVLPVPPGFPPGPQIPVPRPPVEYLYPSREPPRVLPVNVTDYCQLVRYLCQNGRCIPTPGSCRCECNKGFQLDLRGECIDVDECEKNPCAGGECINNQGSYTCQCRAGYQSTLTRTECRDIDECLQNGRICNNGRCINTDGSFHCVCNAGFHVTRDGKNCEDMDECSIRNMCLNGMCINEDGSFKCICKPGFQLASDGRYCKDINECETPGICMNGRCVNTDGSYRCECFPGLAVGLDGRVCVDTHMRSTCYGGYKRGQCIKPLFGAVTKSECCCASTEYAFGEPCQPCPAQNSAEYQALCSSGPGMTSAGSDINECALDPDICPNGICENLRGTYKCICNSGYEVDSTGKNCVDINECVLNSLLCDNGQCRNTPGSFVCTCPKGFIYKPDLKTCEDIDECESSPCINGVCKNSPGSFICECSSESTLDPTKTICIETIKGTCWQTVIDGRCEININGATLKSQCCSSLGAAWGSPCTLCQVDPICGKGYSRIKGTQCEDIDECEVFPGVCKNGLCVNTRGSFKCQCPSGMTLDATGRICLDIRLETCFLRYEDEECTLPIAGRHRMDACCCSVGAAWGTEECEECPMRNTPEYEELCPRGPGFATKEITNGKPFFKDINECKMIPSLCTHGKCRNTIGSFKCRCDSGFALDSEERNCTDIDECRISPDLCGRGQCVNTPGDFECKCDEGYESGFMMMKNCMDIDECQRDPLLCRGGVCHNTEGSYRCECPPGHQLSPNISACIDINECELSAHLCPNGRCVNLIGKYQCACNPGYHSTPDRLFCVDIDECSIMNGGCETFCTNSEGSYECSCQPGFALMPDQRSCTDIDECEDNPNICDGGQCTNIPGEYRCLCYDGFMASEDMKTCVDVNECDLNPNICLSGTCENTKGSFICHCDMGYSGKKGKTGCTDINECEIGAHNCGKHAVCTNTAGSFKCSCSPGWIGDGIKCTDLDECSNGTHMCSQHADCKNTMGSYRCLCKEGYTGDGFTCTDLDECSENLNLCGNGQCLNAPGGYRCECDMGFVPSADGKACEDIDECSLPNICVFGTCHNLPGLFRCECEIGYELDRSGGNCTDVNECLDPTTCISGNCVNTPGSYICDCPPDFELNPTRVGCVDTRSGNCYLDIRPRGDNGDTACSNEIGVGVSKASCCCSLGKAWGTPCEMCPAVNTSEYKILCPGGEGFRPNPITVILEDIDECQELPGLCQGGKCINTFGSFQCRCPTGYYLNEDTRVCDDVNECETPGICGPGTCYNTVGNYTCICPPDYMQVNGGNNCMDMRRSLCYRNYYADNQTCDGELLFNMTKKMCCCSYNIGRAWNKPCEQCPIPSTDEFATLCGSQRPGFVIDIYTGLPVDIDECREIPGVCENGVCINMVGSFRCECPVGFFYNDKLLVCEDIDECQNGPVCQRNAECINTAGSYRCDCKPGYRFTSTGQCNDRNECQEIPNICSHGQCIDTVGSFYCLCHTGFKTNDDQTMCLDINECERDACGNGTCRNTIGSFNCRCNHGFILSHNNDCIDVDECASGNGNLCRNGQCINTVGSFQCQCNEGYEVAPDGRTCVDINECLLEPRKCAPGTCQNLDGSYRCICPPGYSLQNEKCEDIDECVEEPEICALGTCSNTEGSFKCLCPEGFSLSSSGRRCQDLRMSYCYAKFEGGKCSSPKSRNHSKQECCCALKGEGWGDPCELCPTEPDEAFRQICPYGSGIIVGPDDSAVDMDECKEPDVCKHGQCINTDGSYRCECPFGYILAGNECVDTDECSVGNPCGNGTCKNVIGGFECTCEEGFEPGPMMTCEDINECAQNPLLCAFRCVNTYGSYECKCPVGYVLREDRRMCKDEDECEEGKHDCTEKQMECKNLIGTYMCICGPGYQRRPDGEGCVDENECQTKPGICENGRCLNTRGSYTCECNDGFTASPNQDECLDNREGYCFTEVLQNMCQIGSSNRNPVTKSECCCDGGRGWGPHCEICPFQGTVAFKKLCPHGRGFMTNGADIDECKVIHDVCRNGECVNDRGSYHCICKTGYTPDITGTSCVDLNECNQAPKPCNFICKNTEGSYQCSCPKGYILQEDGRSCKDLDECATKQHNCQFLCVNTIGGFTCKCPPGFTQHHTSCIDNNECTSDINLCGSKGICQNTPGSFTCECQRGFSLDQTGSSCEDVDECEGNHRCQHGCQNIIGGYRCSCPQGYLQHYQWNQCVDENECLSAHICGGASCHNTLGSYKCMCPAGFQYEQFSGGCQDINECGSAQAPCSYGCSNTEGGYLCGCPPGYFRIGQGHCVSGMGMGRGNPEPPVSGEMDDNSLSPEACYECKINGYPKRGRKRRSTNETDASNIEDQSETEANVSLASWDVEKTAIFAFNISHVSNKVRILELLPALTTLTNHNRYLIESGNEDGFFKINQKEGISYLHFTKKKPVAGTYSLQISSTPLYKKKELNQLEDKYDKDYLSGELGDNLKMKIQVLLH

SEQ ID NO: 46203 - protein, 985 aa, Homo sapiens
MGFVPSADGKACEDIDECSLPNICVFGTCHNLPGLFRCECEIGYELDRSGGNCTDVNECLDPTTCISGNCVNTPGSYICDCPPDFELNPTRVGCVDTRSGNCYLDIRPRGDNGDTACSNEIGVGVSKASCCCSLGKAWGTPCEMCPAVNTSEYKILCPGGEGFRPNPITVILEDIDECQELPGLCQGGKCINTFGSFQCRCPTGYYLNEDTRVCDDVNECETPGICGPGTCYNTVGNYTCICPPDYMQVNGGNNCMDMRRSLCYRNYYADNQTCDGELLFNMTKKMCCCSYNIGRAWNKPCEQCPIPSTDEFATLCGSQRPGFVIDIYTGLPVDIDECREIPGVCENGVCINMVGSFRCECPVGFFYNDKLLVCEDIDECQNGPVCQRNAECINTAGSYRCDCKPGYRFTSTGQCNDRNECQEIPNICSHGQCIDTVGSFYCLCHTGFKTNDDQTMCLDINECERDACGNGTCRNTIGSFNCRCNHGFILSHNNDCIDVDECASGNGNLCRNGQCINTVGSFQCQCNEGYEVAPDGRTCVDINECLLEPRKCAPGTCQNLDGSYRCICPPGYSLQNEKCEDIDECVEEPEICALGTCSNTEGSFKCLCPEGFSLSSSGRRCQDLRMSYCYAKFEGGKCSSPKSRNHSKQECCCALKGEGWGDPCELCPTEPDEAFRQICPYGSGIIVGPDDSAVDMDECKEPDVCKHGQCINTDGSYRCECPFGYILAGNECVDTDECSVGNPCGNGTCKNVIGGFECTCEEGFEPGPMMTCEDINECAQNPLLCAFRCVNTYGSYECKCPVGYVLREDRRMCKDEDECEEGKHDCTEKQMECKNLIGTYMCICGPGYQRRPDGEGCVDENECQTKPGICENGRCLNTRGSYTCECNDGFTASPNQDECLDVILSLLLLSPAFPSCFFSPRTIGKGTASQRCYKTCVRSAPATGTPSPNRNAAVTEGEAGVPTVRSALSRGLWLSRNSVPMAEDS

SEQ ID NO: 46204 - protein, 1149 aa, Homo sapiens
MRRGRLLEIALGFTVLLASYTSHGADANLEAGNVKETRASRAKRRGGGGHDALKGPNVCGSRYNAYCCPGWKTLPGGNQCIVPICRHSCGDGFCSRPNMCTCPSGQIAPSCGSRSIQHCNIRCMNGGSCSDDHCLCQKGYIGTHCGQPVCESGCLNGGRCVAPNRCACTYGFTGPQCERDYRTGPCFTVISNQMCQGQLSGIVCTKTLCCTYINECEIGAHNCGKHAVCTNTAGSFKCSCSPGWIGDGIKCTDLDECSNGTHMCSQHADCKNTMGSYRCLCKEGYTGDGFTCTDLDECSENLNLCGNGQCLNAPGGYRCECDMGFVPSADGKACEDIDECSLPNICVFGTCHNLPGLFRCECEIGYELDRSGGNCTDVNECLDPTTCISGNCVNTPGSYICDCPPDFELNPTRVGCVDTRSGNCYLDIRPRGDNGDTACSNEIGVGVSKASCCCSLGKAWGTPCEMCPAVNTSEYKILCPGGEGFRPNPITVILEDIDECQELPGLCQGGKCINTFGSFQCRCPTGYYLNEDTRVCDDVNECETPGICGPGTCYNTVGNYTCICPPDYMQVNGGNNCMDMRRSLCYRNYYADNQTCDGELLFNMTKKMCCCSYNIGRAWNKPCEQCPIPSTDEFATLCGSQRPGFVIDIYTGLPVDIDECREIPGVCENGVCINMVGSFRCECPVGFFYNDKLLVCEDIDECQNGPVCQRNAECINTAGSYRCDCKPGYRFTSTGQCNDRNECQEIPNICSHGQCIDTVGSFYCLCHTGFKTNDDQTMCLDINECERDACGNGTCRNTIGSFNCRCNHGFILSHNNDCIDVDECASGNGNLCRNGQCINTVGSFQCQCNEGYEVAPDGRTCVDINECLLEPRKCAPGTCQNLDGSYRCICPPGYSLQNEKCEDIDECVEEPEICALGTCSNTEGSFKCLCPEGFSLSSSGRRCQDLRMSYCYAKFEGGKCSSPKSRNHSKQECCCALKGEGWGDPCELCPTEPDEAFRQICPYGSGIIVGPDDSAVDMDECKEPDVCKHGQCINTDGSYRCECPFGYILAGNECVDTDECSVGNPCGNGTCKNVIGGFECTCEEGFEPGPMMTCEDINECAQNPLLCAFRCVNTYGSYECKCPVGYVLREDRRMCKDEDECEEGKHDCT

SEQ ID NO: 46205 - protein, 2912 aa, Homo sapiens
MGRRRRLCLQLYFLWLGCVVLWAQGTAGQPQPPPPKPPRPQPPPQQVRSATAGSEGGFLAPEYREEGAAVASRVRRRGQQDVLRGPNVCGSRFHSYCCPGWKTLPGGNQCIVPICRNSCGDGFCSRPNMCTCSSGQISSTCGSKSIQQCSVRCMNGGTCADDHCQCQKGYIGTYCGQPVCENGCQNGGRCIGPNRCACVYGFTGPQCERDYRTGPCFTQVNNQMCQGQLTGIVCTKTLCCATIGRAWGHPCEMCPAQPQPCRRGFIPNIRTGACQDVDECQAIPGICQGGNCINTVGSFECRCPAGHKQSETTQKCEDIDECSIIPGICETGECSNTVGSYFCVCPRGYVTSTDGSRCIDQRTGMCFSGLVNGRCAQELPGRMTKMQCCCEPGRCWGIGTIPEACPVRGSEEYRRLCMDGLPMGGIPGSAGSRPGGTGGNGFAPSGNGNGYGPGGTGFIPIPGGNGFSPGVGGAGVGAGGQGPIITGLTILNQTIDICKHHANLCLNGRCIPTVSSYRCECNMGYKQDANGDCIDVDECTSNPCTNGDCVNTPGSYYCKCHAGFQRTPTKQACIDIDECIQNGVLCKNGRCVNTDGSFQCICNAGFELTTDGKNCVDHDECTTTNMCLNGMCINEDGSFKCICKPGFVLAPNGRYCTDVDECQTPGICMNGHCINSEGSFRCDCPPGLAVGMDGRVCVDTHMRSTCYGGIKKGVCVRPFPGAVTKSECCCANPDYGFGEPCQPCPAKNSAEFHGLCSSGVGITVDGRDINECALDPDICANGICENLRGSYRCNCNSGYEPDASGRNCIDIDECLVNRLLCDNGLCRNTPGSYSCTCPPGYVFRTETETCEDINECESNPCVNGACRNNLGSFNCECSPGSKLSSTGLICIDSLKGTCWLNIQDSRCEVNINGATLKSECCATLGAAWGSPCERCELDTACPRGLARIKGVTCEDVNECEVFPGVCPNGRCVNSKGSFHCECPEGLTLDGTGRVCLDIRMEQCYLKWDEDECIHPVPGKFRMDACCCAVGAAWGTECEECPKPGTKEYETLCPRGAGFANRGDVLTGRPFYKDINECKAFPGMCTYGKCRNTIGSFKCRCNSGFALDMEERNCTDIDECRISPDLCGSGICVNTPGSFECECFEGYESGFMMMKNCMDIDECERNPLLCRGGTCVNTEGSFQCDCPLGHELSPSREDCVDINECSLSDNLCRNGKCVNMIGTYQCSCNPGYQATPDRQGCTDIDECMIMNGGCDTQCTNSEGSYECSCSEGYALMPDGRSCADIDECENNPDICDGGQCTNIPGEYRCLCYDGFMASMDMKTCIDVNECDLNSNICMFGECENTKGSFICHCQLGYSVKKGTTGCTDVDECEIGAHNCDMHASCLNIPGSFKCSCREGWIGNGIKCIDLDECSNGTHQCSINAQCVNTPGSYRCACSEGFTGDGFTCSDVDECAENINLCENGQCLNVPGAYRCECEMGFTPASDSRSCQDIDECSFQNICVFGTCNNLPGMFHCICDDGYELDRTGGNCTDIDECADPINCVNGLCVNTPGRYECNCPPDFQLNPTGVGCVDNRVGNCYLKFGPRGDGSLSCNTEIGVGVSRSSCCCSLGKAWGNPCETCPPVNSTEYYTLCPGGEGFRPNPITIILEDIDECQELPGLCQGGNCINTFGSFQCECPQGYYLSEDTRICEDIDECFAHPGVCGPGTCYNTLGNYTCICPPEYMQVNGGHNCMDMRKSFCYRSYNGTTCENELPFNVTKRMCCCTYNVGKAWNKPCEPCPTPGTADFKTICGNIPGFTFDIHTGKAVDIDECKEIPGICANGVCINQIGSFRCECPTGFSYNDLLLVCEDIDECSNGDNLCQRNADCINSPGSYRCECAAGFKLSPNGACVDRNECLEIPNVCSHGLCVDLQGSYQCICHNGFKASQDQTMCMDVDECERHPCGNGTCKNTVGSYNCLCYPGFELTHNNDCLDIDECSSFFGQVCRNGRCFNEIGSFKCLCNEGYELTPDGKNCIDTNECVALPGSCSPGTCQNLEGSFRCICPPGYEVKSENCIDINECDEDPNICLFGSCTNTPGGFQCLCPPGFVLSDNGRRCFDTRQSFCFTNFENGKCSVPKAFNTTKAKCCCSKMPGEGWGDPCELCPKDDEVAFQDLCPYGHGTVPSLHDTREDVNECLESPGICSNGQCINTDGSFRCECPMGYNLDYTGVRCVDTDECSIGNPCGNGTCTNVIGSFECNCNEGFEPGPMMNCEDINECAQNPLLCAFRCMNTFGSYECTCPIGYALREDQKMCKDLDECAEGLHDCESRGMMCKNLIGTFMCICPPGMARRPDGEGCVDENECRTKPGICENGRCVNIIGSYRCECNEGFQSSSSGTECLDNRQGLCFAEVLQTICQMASSSRNLVTKSECCCDGGRGWGHQCELCPLPGTAQYKKICPHGPGYTTDGRDIDECKVMPNLCTNGQCINTMGSFRCFCKVGYTTDISGTSCIDLDECSQSPKPCNYICKNTEGSYQCSCPRGYVLQEDGKTCKDLDECQTKQHNCQFLCVNTLGGFTCKCPPGFTQHHTACIDNNECGSQPSLCGAKGICQNTPGSFSCECQRGFSLDATGLNCEDVDECDGNHRCQHGCQNILGGYRCGCPQGYIQHYQWNQCVDENECSNPNACGSASCYNTLGSYKCACPSGFSFDQFSSACHDVNECSSSKNPCNYGCSNTEGGYLCGCPPGYYRVGQGHCVSGMGFNKGQYLSLDTEVDEENALSPEACYECKINGYSKKDSRQKRSIHEPDPTAVEQISLESVDMDSPVNMKFNLSHLGSKEHILELRPAIQPLNNHIRYVISQGNDDSVFRIHQRNGLSYLHTAKKKLMPGTYTLEITSIPLYKKKELKKLEESNEDDYLLGELGEALRMRLQIQLY

SEQ ID NO: 46206 - protein, 2912 aa, Homo sapiens; identical to SEQ ID NO: 46205

SEQ ID NO: 46207 - protein, 198 aa, Homo sapiens
MGLRKGHGTLGQGLSALQSEQGRLIQLLSESQGHMAHLVNSVSDILDALQRDRGLGRPRNKADLQRAPARGTRPRGCATGSRPRDCLDVLLSGQQDDGVYSVFPTHYPAGFQVYCDMRTDGGGWTVFQRREDGSVNFFRGWDAYRDGFGRLTGEHWLGPLDWCTLSLALLVPVAPSPTPPHSFVNVLHPPVPGGPTLQ

SEQ ID NO: 46208 - protein, 303 aa, Homo sapiens
MGLRKGHGTLGQGLSALQSEQGRLIQLLSESQGHMAHLVNSVSDILDALQRDRGLGRPRNKADLQRAPARGTRPRGCATGSRPRDCLDVLLSGQQDDGVYSVFPTHYPAGFQVYCDMRTDGGGWTVFQRREDGSVNFFRGWDAYRDGFGRLTGEHWLGLKRIHALTTQAAYELHVDLEDFENGTAYARYGSFGVGLFSVDPEEDGYPLTVADYSGTAGDSLLKHSGMRFTTKDRDSDHSENNCAAFYRGAWWYRNCHTSNLNGQYLRGAHASYADGVEWSSWTGWQYSLKFSEMKIRPVREDR

SEQ ID NO: 46209 - protein, 461 aa, Homo sapiens
MVNDRWKTMGGAAQLEDRPRDKPQRPSCGYVLCTVLLALAVLLAVAVTGAVLFLNHAHAPGTAPPPVVSTGAASANSALVTVERADSSHLSILIDPRCPDLTDSFARLESAQASVLQALTEHQAQPRLVGDQEQELLDTLADQLPRLLARASELQTECMGLRKGHGTLGQGLSALQSEQGRLIQLLSESQGHMAHLVNSVSDILDALQRDRGLGRPRNKADLQRAPARGTRPRGCATGSRPRDCLDVLLSGQQDDGVYSVFPTHYPAGFQVYCDMRTDGGGWTVFQRREDGSVNFFRGWDAYRDGFGRLTGEHWLGLKRIHALTTQAAYELHVDLEDFENGTAYARYGSFGVGLFSVDPEEDGYPLTVADYSGTAGDSLLKHSGMRFTTKDRDSDHSENNCAAFYRGAWWYRNCHTSNLNGQYLRGAHASYADGVEWSSWTGWQYSLKFSEMKIRPVREDR

SEQ ID NO: 46210 - protein, 310 aa, Homo sapiens
  VARIANT 1: note = MOD_RES - Any amino acid
XTGAVLFLNHAHAPGTAPPPVVSTGAASANSALVTVERADSSHLSILIDPRCPDLTDSFARLESAQASVLQALTEHQAQPRLVGDQEQELLDTLADQLPRLLARASELQTECMGLRKGHGTLGQGLSALQSEQGRLIQLLSESQGHMAHLVNSVSDILDALQRDRGLGRPRNKADLQRAPARGTRPRGCATGSRPRDCLDVLLSGQQDDGVYSVFPTHYPAGFQVYCDMRTDGGGWTVFQRREDGSVNFFRGWDAYRDGFGRLTGEHWLGPLDWCTLSLALLVPVAPSPTPPHSFVNVLHPPVPGGPTLQ

SEQ ID NO: 46211 - protein, 461 aa, Homo sapiens; identical to SEQ ID NO: 46209

SEQ ID NO: 46212 - protein, 289 aa, Homo sapiens
MVNDRWKTMGGAAQLEDRPRDKPQRPSCGYVLCTVLLALAVLLAVAVTGAVLFLNHAHAPGTAPPPVVSTGAASANSALVTVERADSSHLSILIDPRCPDLTDSFARLESAQASVLQALTEHQAQPRLVGDQEQELLDTLADQLPRLLARASELQTECMGLRKGHGTLGQGLSALQSEQGRLIQLLSESQGHMAHLVNSVSDILDALQRDRGLGRPRNKADLQRAPARGTRPRGCATGSRPRDCLDVLLSGQQDDGVYSVFPTHYPAGFQVYCDMRTDGGGWTVFQRRE

SEQ ID NO: 46213 - protein, 179 aa, Homo sapiens
MVNDRWKTMGGAAQLEDRPRDKPQARKLRLRERPSCGYVLCTVLLALAVLLAVAVTGAVLFLNHAHAPGTAPPPVVSTGAASANSALVTVERADSSHLSILIDPRCPDLTDSFARLESAQASVLQALTEHQAQPRLVGDQEQELLDTLADQLPRLLARASELQTECMGLRKGHGTLGQG

SEQ ID NO: 46214 - protein, 312 aa, Homo sapiens
MAKVFSFILVTTALTMGREISALEDCAQEQMRLRAQVRLLETRVKQQQVKIKQLLQENEVQFLDKGDENTVIDLGSKRQYADCSEIFNDGYKLSGFYKIKPLQSPAEFSVYCDMSDGGGWTVIQRRSDGSENFNRGWKDYENGFGNFVQKHGEYWLGNKNLHFLTTQEDYTLKIDLADFEKNSRYAQYKNFKVGDEKNFYELNIGEYSGTAGDSLAGNFHPEVQWWASHQRMKFSTWDRDHDNYEGNCAEEDQSGWWFNRCHSANLNGVYYSGPYTAKTDNGIVWYTWHGWWYSLKSVVMKIRPNDFIPNVI

SEQ ID NO: 46215 - protein, 312 aa, Homo sapiens; identical to SEQ ID NO: 46214

SEQ ID NO: 46216 - protein, 312 aa, Homo sapiens; identical to SEQ ID NO: 46214

SEQ ID NO: 46217 - protein, 312 aa, Homo sapiens; identical to SEQ ID NO: 46214

SEQ ID NO: 46218 - protein, 312 aa, Homo sapiens; identical to SEQ ID NO: 46214

SEQ ID NO: 46219 - protein, 312 aa, Homo sapiens; identical to SEQ ID NO: 46214

SEQ ID NO: 46220 - protein, 312 aa, Homo sapiens; identical to SEQ ID NO: 46214

SEQ ID NO: 46221 - protein, 282 aa, Homo sapiens
MRLRAQVRLLETRVKQQQVKIKQLLQENEVQFLDKGDENTVIDLGSKRQYADCSEIFNDGYKLSGFYKIKPLQSPAEFSVYCDMSDGGGWTVIQRRSDGSENFNRGWKDYENGFGNFVQKHGEYWLGNKNLHFLTTQEDYTLKIDLADFEKNSRYAQYKNFKVGDEKNFYELNIGEYSGTAGDSLAGNFHPEVQWWASHQRMKFSTWDRDHDNYEGNCAEEDQSGWWFNRCHSANLNGVYYSGPYTAKTDNGIVWYTWHGWWYSLKSVVMKIRPNDFIPNVI

SEQ ID NO: 46222 - protein, 312 aa, Homo sapiens; identical to SEQ ID NO: 46214

SEQ ID NO: 46223 - protein, 439 aa, Homo sapiens
MKLANWYWLSSAVLATYGFLVVANNETEEIKDERAKDVCPVRLESRGKCEEAGECPYQVSLPPLTIQLPKQFSRIEEVFKEVQNLKEIVNSLKKSCQDCKLQADDNGDPGRNGLLLPSTGAPGEVGDNRVRELESEVNKLSSELKNAKEEINVLHGRLEKLNLVNMNNIENYVDSKVANLTFVVNSLDGKCSKCPSQEQIQSRPVQHLIYKDCSDYYAIGKRSSETYRVTPDPKNSSFEVYCDMETMGGGWTVLQARLDGSTNFTRTWQDYKAGFGNLRREFWLGNDKIHLLTKSKEMILRIDLEDFNGVELYALYDQFYVANEFLKYRLHVGNYNGTAGDALRFNKHYNHDLKFFTTPDKDNDRYPSGNCGLYYSSGWWFDACLSANLNGKYYHQKYRGVRNGIFWGTWPGVSEAHPGGYKSSFKEAKMMIRPKHFKP

SEQ ID NO: 46224 - protein, 364 aa, Homo sapiens
MTSELDIFVGNTTLIDEDVYRLWLDGYSVTDAVALRVRSGILEQTGATAAVLQSDTMDHYRTFHMLERLLHAPPKLLHQLIFQIPPSRQALLIERYYAFDEAFVREVLGKKLSKGTKKDLDDISTKTGITLKSCRRQFDNFKRVFKVVEEMRGSLVDNIQQHFLLSDRLARDYAAIVFFANNRFETGKKKLQYLSFGDFAFCAELMIQNWTLGAVGEAPTDPDSQMDDMDMDLDKEFLQDLKELKVLVADKDLLDLHKSLVCTALRGKLGVFSEMEANFKNLSRGLVNVAAKLTHNKDVRDLFVDLVEKFVEPCRSDHWPLSDVRFFLNQYSASVHSLDGFRHQALWDRYMGTLRGCLLRLYHD

SEQ ID NO: 46225 - protein, 357 aa, Homo sapiens
MTSELDIFVGNTTLIDEDVYRLWLDGYSVTDAVALRVRSGILEQTGATAAVLQSDTMDHYRTFHMLERLLHAPPKLLHQLIFQIPPSRQALLIERYYAFDEAFVREVLGKKLSKGTKKDLDDISTKTGITLKSCRRQFDNFKRVFKVVEEMRGSLVDNIQQHFLLSDRLARDYAAIVFFANNRFETGKKKLQYLSFGDFAFCAELMIQNWTLGAVDSQMDDMDMDLDKEFLQDLKELKVLVADKDLLDLHKSLVCTALRGKLGVFSEMEANFKNLSRGLVNVAAKLTHNKDVRDLFVDLVEKFVEPCRSDHWPLSDVRFFLNQYSASVHSLDGFRHQALWDRYMGTLRGCLLRLYHD

SEQ ID NO: 46226 - protein, 662 aa, Homo sapiens
MWSWKCLLFWAVLVTATLCTARPSPTLPEQAQPWGAPVEVESFLVHPGDLLQLRCRLRDDVQSINWLRDGVQLAESNRTRITGEEVEVQDSVPADSGLYACVTSSPSGSDTTYFSVNVSDALPSSEDDDDDDDSSSEEKETDNTKPNRMPVAPYWTSPEKMEKKLHAVPAAKTVKFKCPSSGTPNPTLRWLKNGKEFKPDHRIGGYKVRYATWSIIMDSVVPSDKGNYTCIVENEYGSINHTYQLDVVERSPHRPILQAGLPANKTVALGSNVEFMCKVYSDPQPHIQWLKHIEVNGSKIGPDNLPYVQILKTAGVNTTDKEMEVLHLRNVSFEDAGEYTCLAGNSIGLSHHSAWLTVLEALEERPAVMTSPLYLEIIIYCTGAFLISCMVGSVIVYKMKSGTKKSDFHSQMAVHKLAKSIPLRRQVTVSADSSASMNSGVLLVRPSRLSSSGTPMLAGVSEYELPEDPRWELPRDRLVLGKPLGEGCFGQVVLAEAIGLDKDKPNRVTKVAVKMLKSDATEKDLSDLISEMEMMKMIGKHKNIINLLGACTQDGPLYVIVEYASKGNLREYLQARRPPGLEYCYNPSHNPEEQLSSKDLVSCAYQVARGMEYLASKKVWNLKAPLVHTPRPGSQECPGDRGQCDEDSRLWPRTGHSPHRLL

SEQ ID NO: 46227 - protein, 367 aa, Homo sapiens
MWSWKCLLFWAVLVTATLCTARPSPTLPEQAQPWGAPVEVESFLVHPGDLLQLRCRLRDDVQSINWLRDGVQLAESNRTRITGEEVEVQDSVPADSGLYACVTSSPSGSDTTYFSVNVSVPIDALPSSEDDDDDDDSSSEEKETDNTKPNPVAPYWTSPEKMEKKLHAVPAAKTVKFKCPSSGTPNPTLRWLKNGKEFKPDHRIGGYKVRYATWSIIMDSVVPSDKGNYTCIVENEYGSINHTYQLDVVERSPHRPILQAGLPANKTVALGSNVEFMCKVYSDPQPHIQWLKHIEVNGSKIGPDNLPYVQILKHSGINSSDAEVLTLFNVTEAQSGEYVCKVSNYIGEANQSAWLTVTRPVAKDCWS

SEQ ID NO: 46228 - protein, 731 aa, Homo sapiens
MWSWKCLLFWAVLVTATLCTARPSPTLPEQDALPSSEDDDDDDDSSSEEKETDNTKPNPVAPYWTSPEKMEKKLHAVPAAKTVKFKCPSSGTPNPTLRWLKNGKEFKPDHRIGGYKVRYATWSIIMDSVVPSDKGNYTCIVENEYGSINHTYQLDVVERSPHRPILQAGLPANKTVALGSNVEFMCKVYSDPQPHIQWLKHIEVNGSKIGPDNLPYVQILKTAGVNTTDKEMEVLHLRNVSFEDAGEYTCLAGNSIGLSHHSAWLTVLEALEERPAVMTSPLYLEIIIYCTGAFLISCMVGSVIVYKMKSGTKKSDFHSQMAVHKLAKSIPLRRQVTVSADSSASMNSGVLLVRPSRLSSSGTPMLAGVSEYELPEDPRWELPRDRLVLGKPLGEGCFGQVVLAEAIGLDKDKPNRVTKVAVKMLKSDATEKDLSDLISEMEMMKMIGKHKNIINLLGACTQDGPLYVIVEYASKGNLREYLQARRPPGLEYCYNPSHNPEEQLSSKDLVSCAYQVARGMEYLASKKCIHRDLAARNVLVTEDNVMKIADFGLARDIHHIDYYKKTTNGRLPVKWMAPEALFDRIYTHQSDVWSFGVLLWEIFTLGGSPYPGVPVEELFKLLKEGHRMDKPSNCTNELYMMMRDCWHAVPSQRPTFKQLVEDLDRIVALTSNQEYLDLSMPLDQYSPSFPDTRSSTCSSGEDSVFSHEPLPEEPCLPRHPAQLANGGLKRR

SEQ ID NO: 46229 - protein, 812 aa, Homo sapiens
MAAVTRDFGEMLLHSGRVLPAEAQPWGAPVEVESFLVHPGDLLQLRCRLRDDVQSINWLRDGVQLAESNRTRITGEEVEVQDSVPADSGLYACVTSSPSGSDTTYFSVNVSDALPSSEDDDDDDDSSSEEKETDNTKPNRMPVAPYWTSPEKMEKKLHAVPAAKTVKFKCPSSGTPNPTLRWLKNGKEFKPDHRIGGYKVRYATWSIIMDSVVPSDKGNYTCIVENEYGSINHTYQLDVVERSPHRPILQAGLPANKTVALGSNVEFMCKVYSDPQPHIQWLKHIEVNGSKIGPDNLPYVQILKTAGVNTTDKEMEVLHLRNVSFEDAGEYTCLAGNSIGLSHHSAWLTVLEALEERPAVMTSPLYLEIIIYCTGAFLISCMVGSVIVYKMKSGTKKSDFHSQMAVHKLAKSIPLRRQVSADSSASMNSGVLLVRPSRLSSSGTPMLAGVSEYELPEDPRWELPRDRLVLGKPLGEGCFGQVVLAEAIGLDKDKPNRVTKVAVKMLKSDATEKDLSDLISEMEMMKMIGKHKNIINLLGACTQDGPLYVIVEYASKGNLREYLQARRPPGLEYCYNPSHNPEEQLSSKDLVSCAYQVARGMEYLASKKCIHRDLAARNVLVTEDNVMKIADFGLARDIHHIDYYKKTTNGRLPVKWMAPEALFDRIYTHQSDVWSFGVLLWEIFTLGGSPYPGVPVEELFKLLKEGHRMDKPSNCTNELYMMMRDCWHAVPSQRPTFKQLVEDLDRIVALTSNQEYLDLSMPLDQYSPSFPDTRSSTCSSGEDSVFSHEPLPEEPCLPRHPAQLANGGLKRR

SEQ ID NO: 46230 - protein, 822 aa, Homo sapiens
MWSWKCLLFWAVLVTATLCTARPSPTLPEQAQPWGAPVEVESFLVHPGDLLQLRCRLRDDVQSINWLRDGVQLAESNRTRITGEEVEVQDSVPADSGLYACVTSSPSGSDTTYFSVNVSVPIDALPSSEDDDDDDDSSSEEKETDNTKPNPVAPYWTSPEKMEKKLHAVPAAKTVKFKCPSSGTPNPTLRWLKNGKEFKPDHRIGGYKVRYATWSIIMDSVVPSDKGNYTCIVENEYGSINHTYQLDVVERSPHRPILQAGLPANKTVALGSNVEFMCKVYSDPQPHIQWLKHIEVNGSKIGPDNLPYVQILKHSGINSSDAEVLTLFNVTEAQSGEYVCKVSNYIGEANQSAWLTVTRPVLEERPAVMTSPLYLEIIIYCTGAFLISCMVGSVIVYKMKSGTKKSDFHSQMAVHKLAKSIPLRRQVTVSADSSASMNSGVLLVRPSRLSSSGTPMLAGVSEYELPEDPRWELPRDRLVLGKPLGEGCFGQVVLAEAIGLDKDKPNRVTKVAVKMLKSDATEKDLSDLISEMEMMKMIGKHKNIINLLGACTQDGPLYVIVEYASKGNLREYLQARRPPGLEYCYNPSHNPEEQLSSKDLVSCAYQVARGMEYLASKKCIHRDLAARNVLVTEDNVMKIADFGLARDIHHIDYYKKTTNGRLPVKWMAPEALFDRIYTHQSDVWSFGVLLWEIFTLGGSPYPGVPVEELFKLLKEGHRMDKPSNCTNELYMMMRDCWHAVPSQRPTFKQLVEDLDRIVALTSNQEYLDLSMPLDQYSPSFPDTRSSTCSSGEDSVFSHEPLPEEPCLPRHPAQLANGGLKRR

SEQ ID NO: 46231 - protein, 733 aa, Homo sapiens
MWSWKCLLFWAVLVTATLCTARPSPTLPEQDALPSSEDDDDDDDSSSEEKETDNTKPNRMPVAPYWTSPEKMEKKLHAVPAAKTVKFKCPSSGTPNPTLRWLKNGKEFKPDHRIGGYKVRYATWSIIMDSVVPSDKGNYTCIVENEYGSINHTYQLDVVERSPHRPILQAGLPANKTVALGSNVEFMCKVYSDPQPHIQWLKHIEVNGSKIGPDNLPYVQILKTAGVNTTDKEMEVLHLRNVSFEDAGEYTCLAGNSIGLSHHSAWLTVLEALEERPAVMTSPLYLEIIIYCTGAFLISCMVGSVIVYKMKSGTKKSDFHSQMAVHKLAKSIPLRRQVTVSADSSASMNSGVLLVRPSRLSSSGTPMLAGVSEYELPEDPRWELPRDRLVLGKPLGEGCFGQVVLAEAIGLDKDKPNRVTKVAVKMLKSDATEKDLSDLISEMEMMKMIGKHKNIINLLGACTQDGPLYVIVEYASKGNLREYLQARRPPGLEYCYNPSHNPEEQLSSKDLVSCAYQVARGMEYLASKKCIHRDLAARNVLVTEDNVMKIADFGLARDIHHIDYYKKTTNGRLPVKWMAPEALFDRIYTHQSDVWSFGVLLWEIFTLGGSPYPGVPVEELFKLLKEGHRMDKPSNCTNELYMMMRDCWHAVPSQRPTFKQLVEDLDRIVALTSNQEYLDLSMPLDQYSPSFPDTRSSTCSSGEDSVFSHEPLPEEPCLPRHPAQLANGGLKRR

SEQ ID NO: 46232 - protein, 820 aa, Homo sapiens
MWSWKCLLFWAVLVTATLCTARPSPTLPEQAQPWGAPVEVESFLVHPGDLLQLRCRLRDDVQSINWLRDGVQLAESNRTRITGEEVEVQDSVPADSGLYACVTSSPSGSDTTYFSVNVSDALPSSEDDDDDDDSSSEEKETDNTKPNPVAPYWTSPEKMEKKLHAVPAAKTVKFKCPSSGTPNPTLRWLKNGKEFKPDHRIGGYKVRYATWSIIMDSVVPSDKGNYTCIVENEYGSINHTYQLDVVERSPHRPILQAGLPANKTVALGSNVEFMCKVYSDPQPHIQWLKHIEVNGSKIGPDNLPYVQILKTAGVNTTDKEMEVLHLRNVSFEDAGEYTCLAGNSIGLSHHSAWLTVLEALEERPAVMTSPLYLEIIIYCTGAFLISCMVGSVIVYKMKSGTKKSDFHSQMAVHKLAKSIPLRRQVTVSADSSASMNSGVLLVRPSRLSSSGTPMLAGVSEYELPEDPRWELPRDRLVLGKPLGEGCFGQVVLAEAIGLDKDKPNRVTKVAVKMLKSDATEKDLSDLISEMEMMKMIGKHKNIINLLGACTQDGPLYVIVEYASKGNLREYLQARRPPGLEYCYNPSHNPEEQLSSKDLVSCAYQVARGMEYLASKKCIHRDLAARNVLVTEDNVMKIADFGLARDIHHIDYYKKTTNGRLPVKWMAPEALFDRIYTHQSDVWSFGVLLWEIFTLGGSPYPGVPVEELFKLLKEGHRMDKPSNCTNELYMMMRDCWHAVPSQRPTFKQLVEDLDRIVALTSNQEYLDLSMPLDQYSPSFPDTRSSTCSSGEDSVFSHEPLPEEPCLPRHPAQLANGGLKRR

SEQ ID NO: 46233 - protein, 733 aa, Homo sapiens
MWSWKCLLFWAVLVTATLCTARPSPTLPEQDALPSSEDDDDDDDSSSEEKETDNTKPNPVAPYWTSPEKMEKKLHAVPAAKTVKFKCPSSGTPNPTLRWLKNGKEFKPDHRIGGYKVRYATWSIIMDSVVPSDKGNYTCIVENEYGSINHTYQLDVVERSPHRPILQAGLPANKTVALGSNVEFMCKVYSDPQPHIQWLKHIEVNGSKIGPDNLPYVQILKHSGINSSDAEVLTLFNVTEAQSGEYVCKVSNYIGEANQSAWLTVTRPVAKALEERPAVMTSPLYLEIIIYCTGAFLISCMVGSVIVYKMKSGTKKSDFHSQMAVHKLAKSIPLRRQVTVSADSSASMNSGVLLVRPSRLSSSGTPMLAGVSEYELPEDPRWELPRDRLVLGKPLGEGCFGQVVLAEAIGLDKDKPNRVTKVAVKMLKSDATEKDLSDLISEMEMMKMIGKHKNIINLLGACTQDGPLYVIVEYASKGNLREYLQARRPPGLEYCYNPSHNPEEQLSSKDLVSCAYQVARGMEYLASKKCIHRDLAARNVLVTEDNVMKIADFGLARDIHHIDYYKKTTNGRLPVKWMAPEALFDRIYTHQSDVWSFGVLLWEIFTLGGSPYPGVPVEELFKLLKEGHRMDKPSNCTNELYMMMRDCWHAVPSQRPTFKQLVEDLDRIVALTSNQEYLDLSMPLDQYSPSFPDTRSSTCSSGEDSVFSHEPLPEEPCLPRHPAQLANGGLKRR

SEQ ID NO: 46234 - protein, 820 aa, Homo sapiens; identical to SEQ ID NO: 46232

SEQ ID NO: 46235 - protein, 820 aa, Homo sapiens; identical to SEQ ID NO: 46232

SEQ ID NO: 46236 - protein, 107 aa, Homo sapiens
MWSWKCLLFWAVLVTATLCTARPSPTLPEQAQPWGAPVEVESFLVHPGDLLQLRCRLRDDVQSINWLRDGVQLAESNRTRITGEEVEVQDSVPADSGLYACVTSSPS

SEQ ID NO: 46237 - protein, 853 aa, Homo sapiens
MEARVSLKRRIELTVEYPWRCGALSPTSNCRTGMWSWKCLLFWAVLVTATLCTARPSPTLPEQAQPWGAPVEVESFLVHPGDLLQLRCRLRDDVQSINWLRDGVQLAESNRTRITGEEVEVQDSVPADSGLYACVTSSPSGSDTTYFSVNVSDALPSSEDDDDDDDSSSEEKETDNTKPNPVAPYWTSPEKMEKKLHAVPAAKTVKFKCPSSGTPNPTLRWLKNGKEFKPDHRIGGYKVRYATWSIIMDSVVPSDKGNYTCIVENEYGSINHTYQLDVVERSPHRPILQAGLPANKTVALGSNVEFMCKVYSDPQPHIQWLKHIEVNGSKIGPDNLPYVQILKTAGVNTTDKEMEVLHLRNVSFEDAGEYTCLAGNSIGLSHHSAWLTVLEALEERPAVMTSPLYLEIIIYCTGAFLISCMVGSVIVYKMKSGTKKSDFHSQMAVHKLAKSIPLRRQVTVSADSSASMNSGVLLVRPSRLSSSGTPMLAGVSEYELPEDPRWELPRDRLVLGKPLGEGCFGQVVLAEAIGLDKDKPNRVTKVAVKMLKSDATEKDLSDLISEMEMMKMIGKHKNIINLLGACTQDGPLYVIVEYASKGNLREYLQARRPPGLEYCYNPSHNPEEQLSSKDLVSCAYQVARGMEYLASKKCIHRDLAARNVLVTEDNVMKIADFGLARDIHHIDYYKKTTNGRLPVKWMAPEALFDRIYTHQSDVWSFGVLLWEIFTLGGSPYPGVPVEELFKLLKEGHRMDKPSNCTNELYMMMRDCWHAVPSQRPTFKQLVEDLDRIVALTSNQEYLDLSMPLDQYSPSFPDTRSSTCSSGEDSVFSHEPLPEEPCLPRHPAQLANGGLKRR

SEQ ID NO: 46238 - protein, 55 aa, Homo sapiens
MWSWKCLLFWAVLVTATLCTARPSPTLPEQDALPSSEDDDDDDDSSSEEKETDNT

SEQ ID NO: 46239 - skipped

SEQ ID NO: 46240 - protein, 822 aa, Homo sapiens [sequence omitted]

SEQ ID NO: 46241 - protein, 298 aa, Homo sapiens
MWSWKCLLFWAVLVTATLCTARPSPTLPEQAQPWGAPVEVESFLVHPGDLLQLRCRLRDDVQSINWLRDGVQLAESNRTRITGEEVEVQDSVPADSGLYACVTSSPSGSDTTYFSVNVSDALPSSEDDDDDDDSSSEEKETDNTKPNRMPVAPYWTSPEKMEKKLHAVPAAKTVKFKCPSSGTPNPTLRWLKNGKEFKPDHRIGGYKVRYATWSIIMDSVVPSDKGNYTCIVENEYGSINHTYQLDVVERSPHRPILQAGLPANKTVALGSNVEFMCKVYSDPQPHIQWLKHIEVNGS

SEQ ID NO: 46242 - protein, 145 aa, Homo sapiens
MWSWKCLLFWAVLVTATLCTARPSPTLPEQDALPSSEDDDDDDDSSSEEKETDNTKPNPVAPYWTSPEKMEKKLHAVPAAKTVKFKCPSSGTPNPTLRWLKNGKEFKPDHRIGGYKVRYATWSIIMDSVVPSDKGNYTCIVENEY

SEQ ID NO: 46243 - protein, 142 aa, Homo sapiens
MWSWKCLLFWAVLVTATLCTARPSPTLPEQDALPSSEDDDDDDDSSSEEKETDNTKPNRMPVAPYWTSPEKMEKKLHAVPAAKTVKFKCPSSGTPNPTLRWLKNGKEFKPDHRIGGYKVRYATWSIIMDSVVPSDKGNYTCI

SEQ ID NO: 46244 - protein, 85 aa, Homo sapiens
MWSWKCLLFWAVLVTATLCTARPSPTLPEQDALPSSEDDDDDDDSSSEEKETDNTKPNPVAPYWTSPEKMEKKLHAVPAAKTVKF

SEQ ID NO: 46245 - protein, 820 aa, Homo sapiens
MWSWKCLLFWAVLVTATLCTARPSPTLPEQAQPWGAPVEVESFLVHPGDLLQLRCRLRDDVQSINWLRDGVQLAESNRTRITGEEVEVQDSVPADSGLYACVTSSPSGSDTTYFSVNVSDALPSSEDDDDDDDSSSEEKETDNTKPNRMPVAPYWTSPEKMEKKLHAVPAAKTVKFKCPSSGTPNPTLRWLKNGKEFKPDHRIGGYKVRYATWSIIMDSVVPSDKGNYTCIVENEYGSINHTYQLDVVERSPHRPILQAGLPANKTVALGSNVEFMCKVYSDPQPHIQWLKHIEVNGSKIGPDNLPYVQILKTAGVNTTDKEMEVLHLRNVSFEDAGEYTCLAGNSIGLSHHSAWLTVLEALEERPAVMTSPLYLEIIIYCTGAFLISCMVGSVIVYKMKSGTKKSDFHSQMAVHKLAKSIPLRRQVSADSSASMNSGVLLVRPSRLSSSGTPMLAGVSEYELPEDPRWELPRDRLVLGKPLGEGCFGQVVLAEAIGLDKDKPNRVTKVAVKMLKSDATEKDLSDLISEMEMMKMIGKHKNIINLLGACTQDGPLYVIVEYASKGNLREYLQARRPPGLEYCYNPSHNPEEQLSSKDLVSCAYQVARGMEYLASKKCIHRDLAARNVLVTEDNVMKIADFGLARDIHHIDYYKKTTNGRLPVKWMAPEALFDRIYTHQSDVWSFGVLLWEIFTLGGSPYPGVPVEELFKLLKEGHRMDKPSNCTNELYMMMRDCWHAVPSQRPTFKQLVEDLDRIVALTSNQEYLDLSMPLDQYSPSFPDTRSSTCSSGEDSVFSHEPLPEEPCLPRHPAQLANGGLKRR

SEQ ID NO: 46246 - protein, 669 aa, Homo sapiens
MVSWGRFICLVVVTMATLSLARPSFSLVEDTTLEPEDAISSGDDEDDTDGAEDFVSENSNNKRAPYWTNTEKMEKRLHAVPAANTVKFRCPAGGNPMPTMRWLKNGKEFKQEHRIGGYKVRNQHWSLIMESVVPSDKGNYTCVVENEYGSINHTYHLDVVERSPHRPILQAGLPANASTVVGGDVEFVCKVYSDAQPHIQWIKHVEKNGSKYGPDGLPYLKVLKAAGVNTTDKEIEVLYIRNVTFEDAGEYTCLAGNSIGISFHSAWLTVLPAPGREKEITASPDYLEIAIYCIGVFLIACMVVTVILCRMKNTTKKPDFSSQPAVHKLTKRIPLRRQVSAESSSSMNSNTPLVRITTRLSSTADTPMLAGVSEYELPEDPKWEFPRDKLTLGKPLGEGCFGQVVMAEAVGIDKDKPKEAVTVAVKMLKDDATEKDLSDLVSEMEMMKMIGKHKNIINLLGACTQDGPLYVIVEYASKGNLREYLRARRPPGMEYSYDINRVPEEQMTFKDLVSCTYQLARGMEYLASQKCIHRDLAARNVLVTENNVMKIADFGLARDINNIDYYKKTTNGRLPVKWMAPEALFDRVYTHQSDVWSFGVLMWEIFTLGGSPYPGIPVEELFKLLKEGHRMDKPANCTNELYMMMRDCWHAVPSQRPTFKQLVEDLDRI

SEQ ID NO: 46247 - protein, 819 aa, Homo sapiens
MVSWGRFICLVVVTMATLSLARPSFSLVEDTTLEPEEPPTKYQISQPEVYVAAPGESLEVRCLLKDAAVISWTKDGVHLGPNNRTVLIGEYLQIKGATPRDSGLYACTASRTVDSETWYFMVNVTDAISSGDDEDDTDGAEDFVSENSNNKRAPYWTNTEKMEKRLHAVPAANTVKFRCPAGGNPMPTMRWLKNGKEFKQEHRIGGYKVRNQHWSLIMESVVPSDKGNYTCVVENEYGSINHTYHLDVVERSPHRPILQAGLPANASTVVGGDVEFVCKVYSDAQPHIQWIKHVEKNGSKYGPDGLPYLKVLKAAGVNTTDKEIEVLYIRNVTFEDAGEYTCLAGNSIGISFHSAWLTVLPAPGREKEITASPDYLEIAIYCIGVFLIACMVVTVILCRMKNTTKKPDFSSQPAVHKLTKRIPLRRQVSAESSSSMNSNTPLVRITTRLSSTADTPMLAGVSEYELPEDPKWEFPRDKLTLGKPLGEGCFGQVVMAEAVGIDKDKPKEAVTVAVKMLKDDATEKDLSDLVSEMEMMKMIGKHKNIINLLGACTQDGPLYVIVEYASKGNLREYLRARRPPGMEYSYDINRVPEEQMTFKDLVSCTYQLARGMEYLASQKCIHRDLAARNVLVTENNVMKIADFGLARDINNIDYYKKTTNGRLPVKWMAPEALFDRVYTHQSDVWSFGVLMWEIFTLGGSPYPGIPVEELFKLLKEGHRMDKPANCTNELYMMMRDCWHAVPSQRPTFKQLVEDLDRILTLTTNEEYLDLSQPLEQYSPSYPDTRSSCSSGDDSVFSPDPMPYEPCLPQYPHINGSVKT

SEQ ID NO: 46248 - protein, 785 aa, Homo sapiens
MVSWGRFICLVVVTMATLSLARPSFSLVEDTTLEPEEPPTKYQISQPEVYVAAPGESLEVRCLLKDAAVISWTKDGVHLGPNNRTVLIGEYLQIKGATPRDSGLYACTASRTVDSETWYFMVNVTDAISSGDDEDDTDGAEDFVSENSNNKRAPYWTNTEKMEKRLHAVPAANTVKFRCPAGGNPMPTMRWLKNGKEFKQEHRIGGYKVRNQHWSLIMESVVPSDKGNYTCVVENEYGSINHTYHLDVVERSPHRPILQAGLPANASTVVGGDVEFVCKVYSDAQPHIQWIKHVEKNGSKYGPDGLPYLKVLKAAGVNTTDKEIEVLYIRNVTFEDAGEYTCLAGNSIGISFHSAWLTVLPAPGREKEITASPDYLEIAIYCIGVFLIACMVVTVILCRMKNTTKKPDFSSQPAVHKLTKRIPLRRQVSAESSSSMNSNTPLVRITTRLSSTADTPMLAGVSEYELPEDPKWEFPRDKLTLGKPLGEGCFGQVVMAEAVGIDKDKPKEAVTVAVKMLKDDATEKDLSDLVSEMEMMKMIGKHKNIINLLGACTQDGPLYVIVEYASKGNLREYLRARRPPGMEYSYDINRVPEEQMTFKDLVSCTYQLARGMEYLASQKCIHRDLAARNVLVTENNVMKIADFGLARDINNIDYYKKTTNGRLPVKWMAPEALFDRVYTHQSDVWSFGVLMWEIFTLGGSPYPGIPVEELFKLLKEGHRMDKPANCTNELYMMMRDCWHAVPSQRPTFKQLVEDLDRILTLTTNEEYLDLSQPLEPYSPCYPDPR

SEQ ID NO: 46249 - protein, 704 aa, Homo sapiens
MVSWGRFICLVVVTMATLSLARPSFSLVEDTTLEPEGAPYWTNTEKMEKRLHAVPAANTVKFRCPAGGNPMPTMRWLKNGKEFKQEHRIGGYKVRNQHWSLIMESVVPSDKGNYTCVVENEYGSINHTYHLDVVERSPHRPILQAGLPANASTVVGGDVEFVCKVYSDAQPHIQWIKHVEKNGSKYGPDGLPYLKVLKAAGVNTTDKEIEVLYIRNVTFEDAGEYTCLAGNSIGISFHSAWLTVLPAPGREKEITASPDYLEIAIYCIGVFLIACMVVTVILCRMKNTTKKPDFSSQPAVHKLTKRIPLRRQVSAESSSSMNSNTPLVRITTRLSSTADTPMLAGVSEYELPEDPKWEFPRDKLTLGKPLGEGCFGQVVMAEAVGIDKDKPKEAVTVAVKMLKDDATEKDLSDLVSEMEMMKMIGKHKNIINLLGACTQDGPLYVIVEYASKGNLREYLRARRPPGMEYSYDINRVPEEQMTFKDLVSCTYQLARGMEYLASQKCIHRDLAARNVLVTENNVMKIADFGLARDINNIDYYKKTTNGRLPVKWMAPEALFDRVYTHQSDVWSFGVLMWEIFTLGGSPYPGIPVEELFKLLKEGHRMDKPANCTNELYMMMRDCWHAVPSQRPTFKQLVEDLDRILTLTTNEEYLDLSQPLEQYSPSYPDTRSSCSSGDDSVFSPDPMPYEPCLPQYPHINGSVKT

SEQ ID NO: 46250 - protein, 707 aa, Homo sapiens
MVSWGRFICLVVVTMATLSLARPSFSLVEDTTLEPEDAISSGDDEDDTDGAEDFVSENSNNKRAPYWTNTEKMEKRLHAVPAANTVKFRCPAGGNPMPTMRWLKNGKEFKQEHRIGGYKVRNQHWSLIMESVVPSDKGNYTCVVENEYGSINHTYHLDVVERSPHRPILQAGLPANASTVVGGDVEFVCKVYSDAQPHIQWIKHVEKNGSKYGPDGLPYLKVLKAAGVNTTDKEIEVLYIRNVTFEDAGEYTCLAGNSIGISFHSAWLTVLPAPGREKEITASPDYLEIAIYCIGVFLIACMVVTVILCRMKNTTKKPDFSSQPAVHKLTKRIPLRRQVTVSAESSSSMNSNTPLVRITTRLSSTADTPMLAGVSEYELPEDPKWEFPRDKLTLGKPLGEGCFGQVVMAEAVGIDKDKPKEAVTVAVKMLKDDATEKDLSDLVSEMEMMKMIGKHKNIINLLGACTQDGPLYVIVEYASKGNLREYLRARRPPGMEYSYDINRVPEEQMTFKDLVSCTYQLARGMEYLASQKCIHRDLAARNVLVTENNVMKIADFGLARDINNIDYYKKTTNGRLPVKWMAPEALFDRVYTHQSDVWSFGVLMWEIFTLGGSPYPGIPVEELFKLLKEGHRMDKPANCTNELYMMMRDCWHAVPSQRPTFKQLVEDLDRILTLTTNEEEKKVSGAVDCHKPPCNPSHLPCVLAVDQ

SEQ ID NO: 46251 - protein, 821 aa, Homo sapiens
MVSWGRFICLVVVTMATLSLARPSFSLVEDTTLEPEEPPTKYQISQPEVYVAAPGESLEVRCLLKDAAVISWTKDGVHLGPNNRTVLIGEYLQIKGATPRDSGLYACTASRTVDSETWYFMVNVTDAISSGDDEDDTDGAEDFVSENSNNKRAPYWTNTEKMEKRLHAVPAANTVKFRCPAGGNPMPTMRWLKNGKEFKQEHRIGGYKVRNQHWSLIMESVVPSDKGNYTCVVENEYGSINHTYHLDVVERSPHRPILQAGLPANASTVVGGDVEFVCKVYSDAQPHIQWIKHVEKNGSKYGPDGLPYLKVLKAAGVNTTDKEIEVLYIRNVTFEDAGEYTCLAGNSIGISFHSAWLTVLPAPGREKEITASPDYLEIAIYCIGVFLIACMVVTVILCRMKNTTKKPDFSSQPAVHKLTKRIPLRRQVTVSAESSSSMNSNTPLVRITTRLSSTADTPMLAGVSEYELPEDPKWEFPRDKLTLGKPLGEGCFGQVVMAEAVGIDKDKPKEAVTVAVKMLKDDATEKDLSDLVSEMEMMKMIGKHKNIINLLGACTQDGPLYVIVEYASKGNLREYLRARRPPGMEYSYDINRVPEEQMTFKDLVSCTYQLARGMEYLASQKCIHRDLAARNVLVTENNVMKIADFGLARDINNIDYYKKTTNGRLPVKWMAPEALFDRVYTHQSDVWSFGVLMWEIFTLGGSPYPGIPVEELFKLLKEGHRMDKPANCTNELYMMMRDCWHAVPSQRPTFKQLVEDLDRILTLTTNEEYLDLSQPLEQYSPSYPDTRSSCSSGDDSVFSPDPMPYEPCLPQYPHINGSVKT

SEQ ID NO: 46252 - protein, 254 aa, Homo sapiens
MVSWGRFICLVVVTMATLSLARPSFSLVEDTTLEPEEPPTKYQISQPEVYVAAPGESLEVRCLLKDAAVISWTKDGVHLGPNNRTVLIGEYLQIKGATPRDSGLYACTASRTVDSETWYFMVNVTDAISSGDDEDDTDGAEDFVSENSNNKRAPYWTNTEKMEKRLHAVPAANTVKFRCPAGGNPMPTMRWLKNGKEFKQEHRIGGYKVRNQHWSLIMESVVPSDKGNYTCVVENEYGSINHTYHLDVVGSQGL

SEQ ID NO: 46253 - protein, 680 aa, Homo sapiens
MVSWGRFICLVVVTMATLSLARPSFSLVEDTTLEPEDAISSGDDEDDTDGAEDFVSENSNNKRAPYWTNTEKMEKRLHAVPAANTVKFRCPAGGNPMPTMRWLKNGKEFKQEHRIGGYKVRNQHWSLIMESVVPSDKGNYTCVVENEYGSINHTYHLDVVERSPHRPILQAGLPANASTVVGGDVEFVCKVYSDAQPHIQWIKHVEKNGSKYGPDGLPYLKVLKHSGINSSNAEVLALFNVTEADAGEYICKVSNYIGQANQSAWLTVLPKQQAPGREKEITASPDYLEIAIYCIGVFLIACMVVTVILCRMKNTTKKPDFSSQPAVHKLTKRIPLRRQVTVSAESSSSMNSNTPLVRITTRLSSTADTPMLAGVSEYELPEDPKWEFPRDKLTLGKPLGEGCFGQVVMAEAVGIDKDKPKEAVTVAVKMLKDDATEKDLSDLVSEMEMMKMIGKHKNIINLLGACTQDGPLYVIVEYASKGNLREYLRARRPPGMEYSYDINRVPEEQMTFKDLVSCTYQLARGMEYLASQKCIHRDLAARNVLVTENNVMKIADFGLARDINNIDYYKKTTNGRLPVKWMAPEALFDRVYTHQSDVWSFGVLMWEIFTLGGSPYPGIPVEELFKLLKEGHRMDKPANCTNELYMMMRDCWHAVPSQRPTFKQLVEDLDRILTLTTNEI

SEQ ID NO: 46254 - protein, 769 aa, Homo sapiens
MVSWGRFICLVVVTMATLSLARPSFSLVEDTTLEPEEPPTKYQISQPEVYVAAPGESLEVRCLLKDAAVISWTKDGVHLGPNNRTVLIGEYLQIKGATPRDSGLYACTASRTVDSETWYFMVNVTDAISSGDDEDDTDGAEDFVSENSNNKRAPYWTNTEKMEKRLHAVPAANTVKFRCPAGGNPMPTMRWLKNGKEFKQEHRIGGYKVRNQHWSLIMESVVPSDKGNYTCVVENEYGSINHTYHLDVVERSPHRPILQAGLPANASTVVGGDVEFVCKVYSDAQPHIQWIKHVEKNGSKYGPDGLPYLKVLKHSGINSSNAEVLALFNVTEADAGEYICKVSNYIGQANQSAWLTVLPKQQAPGREKEITASPDYLEIAIYCIGVFLIACMVVTVILCRMKNTTKKPDFSSQPAVHKLTKRIPLRRQVTVSAESSSSMNSNTPLVRITTRLSSTADTPMLAGVSEYELPEDPKWEFPRDKLTLGKPLGEGCFGQVVMAEAVGIDKDKPKEAVTVAVKMLKDDATEKDLSDLVSEMEMMKMIGKHKNIINLLGACTQDGPLYVIVEYASKGNLREYLRARRPPGMEYSYDINRVPEEQMTFKDLVSCTYQLARGMEYLASQKCIHRDLAARNVLVTENNVMKIADFGLARDINNIDYYKKTTNGRLPVKWMAPEALFDRVYTHQSDVWSFGVLMWEIFTLGGSPYPGIPVEELFKLLKEGHRMDKPANCTNELYMMMRDCWHAVPSQRPTFKQLVEDLDRILTLTTNEI

SEQ ID NO: 46255 - protein, 768 aa, Homo sapiens
MVSWGRFICLVVVTMATLSLARPSFSLVEDTTLEPEEPPTKYQISQPEVYVAAPGESLEVRCLLKDAAVISWTKDGVHLGPNNRTVLIGEYLQIKGATPRDSGLYACTASRTVDSETWYFMVNVTDAISSGDDEDDTDGAEDFVSENSNNKRAPYWTNTEKMEKRLHAVPAANTVKFRCPAGGNPMPTMRWLKNGKEFKQEHRIGGYKVRNQHWSLIMESVVPSDKGNYTCVVENEYGSINHTYHLDVVERSPHRPILQAGLPANASTVVGGDVEFVCKVYSDAQPHIQWIKHVEKNGSKYGPDGLPYLKVLKHSGINSSNAEVLALFNVTEADAGEYICKVSNYIGQANQSAWLTVLPKQQAPGREKEITASPDYLEIAIYCIGVFLIACMVVTVILCRMKNTTKKPDFSSQPAVHKLTKRIPLRRQVTVSAESSSSMNSNTPLVRITTRLSSTADTPMLAGVSEYELPEDPKWEFPRDKLTLGKPLGEGCFGQVVMAEAVGIDKDKPKEAVTVAVKMLKDDATEKDLSDLVSEMEMMKMIGKHKNIINLLGACTQDGPLYVIVEYASKGNLREYLRARRPPGMEYSYDINRVPEEQMTFKDLVSCTYQLARGMEYLASQKCIHRDLAARNVLVTENNVMKIADFGLARDINNIDYYKKTTNGRLPVKWMAPEALFDRVYTHQSDVWSFGVLMWEIFTLGGSPYPGIPVEELFKLLKEGHRMDKPANCTNELYMMMRDCWHAVPSQRPTFKQLVEDLDRILTLTTNE

SEQ ID NO: 46256 - protein, 707 aa, Homo sapiens
MVSWGRFICLVVVTMATLSLARPSFSLVEDTTLEPEGAPYWTNTEKMEKRLHAVPAANTVKFRCPAGGNPMPTMRWLKNGKEFKQEHRIGGYKVRNQHWSLIMESVVPSDKGNYTCVVENEYGSINHTYHLDVVERSPHRPILQAGLPANASTVVGGDVEFVCKVYSDAQPHIQWIKHVEKNGSKYGPDGLPYLKVLKHSGINSSNAEVLALFNVTEADAGEYICKVSNYIGQANQSAWLTVLPKQQAPGREKEITASPDYLEIAIYCIGVFLIACMVVTVILCRMKNTTKKPDFSSQPAVHKLTKRIPLRRQVTVSAESSSSMNSNTPLVRITTRLSSTADTPMLAGVSEYELPEDPKWEFPRDKLTLGKPLGEGCFGQVVMAEAVGIDKDKPKEAVTVAVKMLKDDATEKDLSDLVSEMEMMKMIGKHKNIINLLGACTQDGPLYVIVEYASKGNLREYLRARRPPGMEYSYDINRVPEEQMTFKDLVSCTYQLARGMEYLASQKCIHRDLAARNVLVTENNVMKIADFGLARDINNIDYYKKTTNGRLPVKWMAPEALFDRVYTHQSDVWSFGVLMWEIFTLGGSPYPGIPVEELFKLLKEGHRMDKPANCTNELYMMMRDCWHAVPSQRPTFKQLVEDLDRILTLTTNEEYLDLSQPLEQYSPSYPDTRSSCSSGDDSVFSPDPMPYEPCLPQYPHINGSVKT

SEQ ID NO: 46257 - protein, 705 aa, Homo sapiens
MVSWGRFICLVVVTMATLSLARPSFSLVEDTTLEPEEPPTKYQISQPEVYVAAPGESLEVRCLLKDAAVISWTKDGVHLGPNNRTVLIGEYLQIKGATPRDSGLYACTASRTVDSETWYFMVNVTDAISSGDDEDDTDGAEDFVSENSNNKRAPYWTNTEKMEKRLHAVPAANTVKFRCPAGGNPMPTMRWLKNGKEFKQEHRIGGYKVRNQHWSLIMESVVPSDKGNYTCVVENEYGSINHTYHLDVVERSPHRPILQAGLPANASTVVGGDVEFVCKVYSDAQPHIQWIKHVEKNGSKYGPDGLPYLKVLKVSAESSSSMNSNTPLVRITTRLSSTADTPMLAGVSEYELPEDPKWEFPRDKLTLGKPLGEGCFGQVVMAEAVGIDKDKPKEAVTVAVKMLKDDATEKDLSDLVSEMEMMKMIGKHKNIINLLGACTQDGPLYVIVEYASKGNLREYLRARRPPGMEYSYDINRVPEEQMTFKDLVSCTYQLARGMEYLASQKCIHRDLAARNVLVTENNVMKIADFGLARDINNIDYYKKTTNGRLPVKWMAPEALFDRVYTHQSDVWSFGVLMWEIFTLGGSPYPGIPVEELFKLLKEGHRMDKPANCTNELYMMMRDCWHAVPSQRPTFKQLVEDLDRILTLTTNEEYLDLSQPLEQYSPSYPDTRSSCSSGDDSVFSPDPMPYEPCLPQYPHINGSVKT

SEQ ID NO: 46258 - protein, 709 aa, Homo sapiens
MVSWGRFICLVVVTMATLSLARPSFSLVEDTTLEPEEPPTKYQISQPEVYVAAPGESLEVRCLLKDAAVISWTKDGVHLGPNNRTVLIGEYLQIKGATPRDSGLYACTASRTVDSETWYFMVNVTDAISSGDDEDDTDGAEDFVSENSNNKRAPYWTNTEKMEKRLHAVPAANTVKFRCPAGGNPMPTMRWLKNGKEFKQEHRIGGYKVRNQHWSLIMESVVPSDKGNYTCVVENEYGSINHTYHLDVVAPGREKEITASPDYLEIAIYCIGVFLIACMVVTVILCRMKNTTKKPDFSSQPAVHKLTKRIPLRRQVTVSAESSSSMNSNTPLVRITTRLSSTADTPMLAGVSEYELPEDPKWEFPRDKLTLGKPLGEGCFGQVVMAEAVGIDKDKPKEAVTVAVKMLKDDATEKDLSDLVSEMEMMKMIGKHKNIINLLGACTQDGPLYVIVEYASKGNLREYLRARRPPGMEYSYDINRVPEEQMTFKDLVSCTYQLARGMEYLASQKCIHRDLAARNVLVTENNVMKIADFGLARDINNIDYYKKTTNGRLPVKWMAPEALFDRVYTHQSDVWSFGVLMWEIFTLGGSPYPGIPVEELFKLLKEGHRMDKPANCTNELYMMMRDCWHAVPSQRPTFKQLVEDLDRILTLTTNEEYLDLSQPLEQYSPSYPDTRSSCSSGDDSVFSPDPMPYEPCLPQYPHINGSVKT

SEQ ID NO: 46259 - protein, 822 aa, Homo sapiens
MVSWGRFICLVVVTMATLSLARPSFSLVEDTTLEPEEPPTKYQISQPEVYVAAPGESLEVRCLLKDAAVISWTKDGVHLGPNNRTVLIGEYLQIKGATPRDSGLYACTASRTVDSETWYFMVNVTDAISSGDDEDDTDGAEDFVSENSNNKRAPYWTNTEKMEKRLHAVPAANTVKFRCPAGGNPMPTMRWLKNGKEFKQEHRIGGYKVRNQHWSLIMESVVPSDKGNYTCVVENEYGSINHTYHLDVVERSPHRPILQAGLPANASTVVGGDVEFVCKVYSDAQPHIQWIKHVEKNGSKYGPDGLPYLKVLKVTKAAGVNTTDKEIEVLYIRNVTFEDAGEYTCLAGNSIGISFHSAWLTVLPAPGREKEITASPDYLEIAIYCIGVFLIACMVVTVILCRMKNTTKKPDFSSQPAVHKLTKRIPLRRQVSAESSSSMNSNTPLVRITTRLSSTADTPMLAGVSEYELPEDPKWEFPRDKLTLGKPLGEGCFGQVVMAEAVGIDKDKPKEAVTVAVKMLKDDATEKDLSDLVSEMEMMKMIGKHKNIINLLGACTQDGPLYVIVEYASKGNLREYLRARRPPGMEYSYDINRVPEEQMTFKDLVSCTYQLARGMEYLASQKCIHRDLAARNVLVTENNVMKIADFGLARDINNIDYYKKTTNGRLPVKWMAPEALFDRVYTHQSDVWSFGVLMWEIFTLGGSPYPGIPVEELFKLLKEGHRMDKPANCTNELYMMMRDCWHAVPSQRPTFKQLVEDLDRILTLTTNEEYLDLSQPLEQYSPSYPDTRSSCSSGDDSVFSPDPMPYEPCLPQYPHINGSVKT

SEQ ID NO: 46260 - protein, 822 aa, Homo sapiens
MVSWGRFICLVVVTMATLSLARPSFSLVEDTTLEPEEPPTKYQISQPEVYVAAPGESLEVRCLLKDAAVISWTKDGVHLGPNNRTVLIGEYLQIKGATPRDSGLYACTASRTVDSETWYFMVNVTDAISSGDDEDDTDGAEDFVSENSNNKRAPYWTNTEKMEKRLHAVPAANTVKFRCPAGGNPMPTMRWLKNGKEFKQEHRIGGYKVRNQHWSLIMESVVPSDKGNYTCVVENEYGSINHTYHLDVVERSPHRPILQAGLPANASTVVGGDVEFVCKVYSDAQPHIQWIKHVEKNGSKYGPDGLPYLKVLKHSGINSSNAEVLALFNVTEADAGEYICKVSNYIGQANQSAWLTVLPKQQAPGREKEITASPDYLEIAIYCIGVFLIACMVVTVILCRMKNTTKKPDFSSQPAVHKLTKRIPLRRQVTVSAESSSSMNSNTPLVRITTRLSSTADTPMLAGVSEYELPEDPKWEFPRDKLTLGKPLGEGCFGQVVMAEAVGIDKDKPKEAVTVAVKMLKDDATEKDLSDLVSEMEMMKMIGKHKNIINLLGACTQDGPLYVIVEYASKGNLREYLRARRPPGMEYSYDINRVPEEQMTFKDLVSCTYQLARGMEYLASQKCIHRDLAARNVLVTENNVMKIADFGLARDINNIDYYKKTTNGRLPVKWMAPEALFDRVYTHQSDVWSFGVLMWEIFTLGGSPYPGIPVEELFKLLKEGHRMDKPANCTNELYMMMRDCWHAVPSQRPTFKQLVEDLDRILTLTTNEEYLDLSQPLEQYSPSYPDTRSSCSSGDDSVFSPDPMPYEPCLPQYPHINGSVKT

SEQ ID NO: 46261 - protein, 504 aa, Homo sapiens
MTPSPLLLLLLPPLLLGAFPPAAAARGPPKMADKVVPRQVARLGRTVRLQCPVEGDPPPLTMWTKDGRTIHSGWSRFRVLPQGLKVKQVEREDAGVYVCKATNGFGSLSVNYTLVVLDDISPGKESLGPDSSSGGQEDPASQQWARPRFTQPSKMRRRVIARPVGSSVRLKCVASGHPRPDITWMKDDQALTRPEAAEPRKKKWTLSLKNLRPEDSGKYTCRVSNRAGAINATYKVDVIQRTRSKPVLTGTHPVNTTVDFGGTTSFQCKVRSDVKPVIQWLKRVEYGAEGRHNSTIDVGGQKFVVLPTGDVWSRPDGSYLNKLLITRARQDDAGMYICLGANTMGYSFRSAFLTVLPDPKPPGPPVASSSSATSLPWPVVIGIPAGAVFILGTLLLWLCQAQKKPCTPAPAPPLPGHRPPGTARDRSGDKDLPSLAALSAGPGVGLCEEHGSPAAPQHLLGPGPVAGPKLYPKLYTDIHTHTHTHSHTHSHVEGKVHQHIHYQC

SEQ ID NO: 46262 - protein, 504 aa, Homo sapiens; identical to SEQ ID NO: 46261

SEQ ID NO: 46263 - protein, 504 aa, Homo sapiens; identical to SEQ ID NO: 46261

SEQ ID NO: 46264 - protein, 152 aa, Homo sapiens
MTPSPLLLLLLPPLLLGAFPPAAAARGPPKMADKVVPRQVARLGRTVRLQCPVEGDPPPLTMWTKDGRTIHSGWSRFRVLPQGLKVKQVEREDAGVYVCKATNGFGSLSVNYTLVVLDDISPGKESLGPDSSSGGQEDPASQQWARPRFTQP

SEQ ID NO: 46265 - protein, 504 aa, Homo sapiens; identical to SEQ ID NO: 46261

SEQ ID NO: 46266 - protein, 80 aa, Homo sapiens
MTPSPLLLLLLPPLLLGAFPPAAAARGPPKMADKVVPRQVARLGRTVRLQCPVEGDPPPLTMWTKDGRTIHSGWSRFRVL

SEQ ID NO: 46267 - protein, 441 aa, Homo sapiens
MADKVVPRQVARLGRTVRLQCPVEGDPPPLTMWTKDGRTIHSGWSRFRVLPQGLKVKQVEREDAGVYVCKATNGFGSLSVNYTLVVLDDISPGKESLGPDSSSGGQEDPASQQWARPRFTQPSKMRRRVIARPVGSSVRLKCVASGHPRPDITWMKDDQALTRPEAAEPRKKKWTLSLKNLRPEDSGKYTCRVSNRAGAINATYKVDVIQRTRSKPVLTGTHPVNTTVDFGGTTSFQCKVRSDVKPVIQWLKRVEYGAEGRHNSTIDVGGQKFVVLPTGDVWSRPDGSYLNKLLITRARQDDAGMYICLGANTMGYSFRSAFLTVLPDPKPPGPPVASSSSATSLPWPVVIGIPAGAVFILGTLLLWLCQAQKKPCTPAPAPPLPGHRPPGTARDRSGDKDLPSLAALSAGPGVGLCEEHGSPAAPQHPTVVVAPDLCNFM

SEQ ID NO: 46268 - protein, 376 aa, Homo sapiens
MQWTSLLLLAGLFSLSQAQYEDDPHWWFHYLRSQQSTYYDPYDPYPYETYEPYPYGVDEGPAYTYGSPSPPDPRDCPQECDCPPNFPTAMYCDNRNLKYLPFVPSRMKYVYFQNNQITSIQEGVFDNATGLLWIALHGNQITSDKVGRKVFSKLRHLERLYLDHNNLTRMPGPLPRSLRELHLDHNQISRVPNNALEGLENLTALYLQHNEIQEVGSSMRGLRSLILLDLSYNHLRKVPDGLPSALEQLYMEHNNVYTVPDSYFRGAPKLLYVRLSHNSLTNNGLASNTFNSSSLLELDLSYNQLQKIPPVNTNLENLYLQGNRINEFSISSFCTVVDVVNFSKLQVLRLDGNEIKRSAMPADAPLCLRLASLIEI

SEQ ID NO: 46269 - protein, 363 aa, Homo sapiens
MQWTSLLLLAGLFSLSQAQYEDDPHWWFHYLRSQQSTYYDPYDPYPYETYEPYPYGVDEGPAYTYGSPSPPDPRDCPQECDCPPNFPPFVPSRMKYVYFQNNQITSIQEGVFDNATGLLWIALHGNQITSDKVGRKVFSKLRHLERLYLDHNNLTRMPGPLPRSLRELHLDHNQISRVPNNALEGLENLTALYLQHNEIQEVGSSMRGLRSLILLDLSYNHLRKVPDGLPSALEQLYMEHNNVYTVPDSYFRGAPKLLYVRLSHNSLTNNGLASNTFNSSSLLELDLSYNQLQKIPPVNTNLENLYLQGNRINEFSISSFCTVVDVVNFSKLQVLRLDGNEIKRSAMPADAPLCLRLASLIEI

SEQ ID NO: 46270 - protein, 197 aa, Homo sapiens
MKMTLIGGSTTSAASSPPTTIPMTLTRMRPTSLTPMGWMKGQPTPTALHPLQIPATAPRSATAHPTSTAMYCDNRNLKYLPFVPSRMKYVYFQNNQITSIQEGVFDNATGLLWIALHGNQITSDKVGRKVFSKLRHLERLYLDHNNLTRMPGPLPRSLRELHLDHNQISRVPNNALEGRTSRPCTSNTMRSRKWAVP

SEQ ID NO: 46271 - protein, 674 aa, Homo sapiens
MVVAHPTATATTTPTATVTATVVMTTATMDLRDWLFLCYGLIAFLTEVIDSTTCPSVCRCDNGFIYCNDRGLTSIPADIPDDATTLYLQNNQINNAGIPQDLKTKVNVQVIYLYENDLDEFPINLPRSLRELHLQDNNVRTIARDSLARIPLLEKLHLDDNSVSTVSIEEDAFADSKQLKLLFLSRNHLSSIPSGLPHTLEELRLDDNRISTIPLHAFKGLNSLRRLVLDGNLLANQRIADDTFSRLQNLTELSLVRNSLAAPPLNLPSAHLQKLYLQDNAISHIPYNTLAKMRELERLDLSNNNLTTLPRGLFDDLGNLAQLLLRNNPWFCGCNLMWLRDWVKARAAVVNVRGLMCQGPEKVRGMAIKDITSEMDECFETGPQGGVANAAAKTTASNHASATTPQGSLFTLKAKRPGLRLPDSNIDYPMATGDGAKTLAIHVKALTADSIRITWKATLPASSFRLSWLRLGHSPAVGSITETLVQGDKTEYLLTALEPKSTYIICMVTMETSNAYVADETPVCAKAETADSYGPTTTLNQEQNAGPMASLPLAGIIGGAVALVFLFLVLGAICWYVHQAGELLTRERAYNRGSRKKDDYMESGTKKDNSILEIRGPGLQMLPINPYRAKEEYVVHTIFPSNGSSLCKATHTIGYGTTRGYRDGGIPDIDYSYT

SEQ ID NO: 46272 - protein, 660 aa, Homo sapiens
MGLQTTKWPSHGAFFLKSWLIISLGLYSQVSKLLACPSVCRCDRNFVYCNERSLTSVPLGIPEGVTVLYLHNNQINNAGFPAELHNVQSVHTVYLYGNQLDEFPMNLPKNVRVLHLQENNIQTISRAALAQLLKLEELHLDDNSISTVGVEDGAFREAISLKLLFLSKNHLSSVPVGLPVDLQELRVDENRIAVISDMAFQNLTSLERLIVDGNLLTNKGIAEGTFSHLTKLKEFSIVRNSLSHPPPDLPGTHLIRLYLQDNQINHIPLTAFSNLRKLERLDISNNQLRMLTQGVFDNLSNLKQLTARNNPWFCDCSIKWVTEWLKYIPSSLNVRGFMCQGPEQVRGMAVRELNMNLLSCPTTTPGLPLFTPAPSTASPTTQPPTLSIPNPSRSYTPPTPTTSKLPTIPDWDGRERVTPPISERIQLSIHFVNDTSIQVSWLSLFTVMAYKLTWVKMGHSLVGGIVQERIVSGEKQHLSLVNLEPRSTYRICLVPLDAFNYRAVEDTICSEATTHASYLNNGSNTASSHEQTTSHSMGSPFLLAGLIGGAVIFVLVVLLSVFCWHMHKKGRYTSQKWKYNRGRRKDDYCEAGTKKDNSILEMTETSFQIVSLNNDQLLKGDFRLQPIYTPNGGINYTDCHIPNNMRYCNSSVPDLEHCHT

SEQ ID NO: 46273 - protein, 313 aa, Homo sapiens
MAVRELNMNLLSCPTTTPGLPLFTPAPSTASPTTQPPTLSIPNPSRSYTPPTPTTSKLPTIPDWDGRERVTPPISERIQLSIHFVNDTSIQVSWLSLFTVMAYKLTWVKMGHSLVGGIVQERIVSGEKQHLSLVNLEPRSTYRICLVPLDAFNYRAVEDTICSEATTHASYLNNGSNTASSHEQTTSHSMGSPFLLAGLIGGAVIFVLVVLLSVFCWHMHKKGRYTSQKWKYNRGRRKDDYCEAGTKKDNSILEMTETSFQIVSLNNDQLLKGDFRLQPIYTPNGGINYTDCHIPNNMRYCNSSVPDLEHCHT

SEQ ID NO: 46274 - protein, 660 aa, Homo sapiens; identical to SEQ ID NO: 46272

SEQ ID NO: 46275 - protein, 649 aa, Homo sapiens
MISAAWSIFLIGTKIGLFLQVAPLSVMAKSCPSVCRCDAGFIYCNDRFLTSIPTGIPEDATTLYLQNNQINNAGIPSDLKNLLKVERIYLYHNSLDEFPTNLPKYVKELHLQENNIRTITYDSLSKIPYLEELHLDDNSVSAVSIEEGAFRDSNYLRLLFLSRNHLSTIPWGLPRTIEELRLDDNRISTISSPSLQGLTSLKRLVLDGNLLNNHGLGDKVFFNLVNLTELSLVRNSLTAAPVNLPGTNLRKLYLQDNHINRVPPNAFSYLRQLYRLDMSNNNLSNLPQGIFDDLDNITQLILRNNPWYCGCKMKWVRDWLQSLPVKVNVRGLMCQAPEKVRGMAIKDLNAELFDCKDSGIVSTIQITTAIPNTVYPAQGQWPAPVTKQPDIKNPKLTKDHQTTGSPSRKTITITVKSVTSDTIHISWKLALPMTALRLSWLKLGHSPAFGSITETIVTGERSEYLVTALEPDSPYKVCMVPMETSNLYLFDETPVCIETETAPLRMYNPTTTLNREQEKEPYKNPNLPLAAIIGGAVALVTIALLALVCWYVHRNGSLFSRNCAYSKGRRRKDDYAEAGTKKDNSILEIRETSFQMLPISNEPISKEEFVIHTIFPPNGMNLYKNNHSESSSNRSYRDSGIPDSDHSHS

SEQ ID NO: 46276 - protein, 649 aa, Homo sapiens; identical to SEQ ID NO: 46275

SEQ ID NO: 46277 - protein, 627 aa, Homo sapiens [sequence omitted]

SEQ ID NO: 46278 - protein, 133 aa, Homo sapiens
MPPSKPHPPVVGKVTHHSIELYWDLEKKAKRQGPQEQWFRFSIEEEDPKMHTYGIIYTGYATKHVVEGLEPRTLYRFRLKVTSPSGECEYSPLVSVSTTSSIWLGGEPISSEHLHRAVSVNDEDLLVRILQGG

SEQ ID NO: 46279 - protein, 282 aa, Homo sapiens
MPPSKPHPPVVGKVTHHSIELYWDLEKKAKRQGPQEQWFRFSIEEEDPKMHTYGIIYTGYATKHVVEGLEPRTLYRFRLKVTSPSGECEYSPLVSVSTTSSIWLGGEPISSEHLHRAVSVNDEDLLVRILQGGRVKVDVPNKFGFTALMVAAQKGYTSLMLACYAGHLDVVKYLRRHGASWQARDLGGCTALHWAADGGHCSVIEWMIKDGCEVDVVDTGSGWTPLMRVSAVSGNQRVASLLIDAGANVNVKDRNGKTPLMSVVSLLEERKKKQRPKKSCVC

SEQ ID NO: 46280 - protein, 371 aa, Homo sapiens
LQKQKIMPPSKPHPPVVGKVTHHSIELYWDLEKKAKRQGPQEQWFRFSIEEEDPKMHTYGIIYTGYATKHVVEGLEPRTLYRFRLKVTSPSGECEYSPLVSVSTTRPSLSKSLVKIRMVTSVLHGPPTENTGEPISSEHLHRAVSVNDEDLLVRILQGGRVKVDVPNKFGFTALMVAAQKGYTRLVKILVSNGTDVNLKNGSGKDSLMLACYAGHLDVVKYLRRHGASWQARDLGGCTALHWAADGGHCSVIEWMIKDGCEVDVVDTGSGWTPLMRVSAVSGNQRVASLLIDAGANVNVKDRNGKTPLMVAVLNNHEELVQLLLDKGADASVKNEFGKGVLEMARVFDRQSVVSLLEERKKKQRPKKSCVC

SEQ ID NO: 46281 - protein, 345 aa, Homo sapiens
MEPQKIMPPSKPHPPVVGKVTHHSIELYWDLEKKAKRQGPQEQWFRFSIEEEDPKMHTYGIIYTGYATKHVVEGLEPRTLYRFRLKVTSPSGECEYSPLVSVSTTREPISSEHLHRAVSVNDEDLLVRILQGGRVKVDVPNKFGFTALMVAAQKGYTRLVKILVSNGTDVNLKNGSGKDSLMLACYAGHLDVVKYLRRHGASWQARDLGGCTALHWAADGGHCSVIEWMIKDGCEVDVVDTGSGWTPLMRVSAVSGNQRVASLLIDAGANVNVKDRNGKTPLMVAVLNNHEELVQLLLDKGADASVKNEFGKGVLEMARVFDRQSVVSLLEERKKKQRPKKSCVC

SEQ ID NO: 46282 - protein, 339 aa, Homo sapiens
MPPSKPHPPVVGKVTHHSIELYWDLEKKAKRQGPQEQWFRFSIEEEDPKMHTYGIIYTGYATKHVVEGLEPRTLYRFRLKVTSPSGECEYSPLVSVSTTREPISSEHLHRAVSVNDEDLLVRILQGGRVKVDVPNKFGFTALMVAAQKGYTRLVKILVSNGTDVNLKNGSGKDSLMLACYAGHLDVVKYLRRHGASWQARDLGGCTALHWAADGGHCSVIEWMIKDGCEVDVVDTGSGWTPLMRVSAVSGNQRVASLLIDAGANVNVKDRNGKTPLMVAVLNNHEELVQLLLDKGADASVKNEFGKGVLEMARVFDRQSVVSLLEERKKKQRPKKSCVC

SEQ ID NO: 46283 - protein, 124 aa, Homo sapiens
MPPSKPHPPVVGKVTHHSIELYWDLEKKAKRQGPQEQWFRFSIEEEDPKMHTYGIIYTGYATKHVVEGLEPRTLYRFRLKVTSPSGECEYSPLVSVSTTREPISSEHLHRAVSVNDEDLLVRIL

SEQ ID NO: 46284 - protein, 133 aa, Homo sapiens; identical to SEQ ID NO: 46278

SEQ ID NO: 46285 - protein, 146 aa, Homo sapiens
MPPSKPHPPVVGKVTHHSIELYWDLEKKAKRQGPQEQWFRFSIEEEDPKMHTYGIIYTGYATKHVVEGLEPRTLYRFRLKVTSPSGECEYSPLVSVSTTSEYSDRPHSPLSRSMEMTSNLEKIFCLSFGLTRSRNDTIFKHCNNIC

SEQ ID NO: 46286 - protein, 199 aa, Homo sapiens
  VARIANT 1: note = MOD_RES - Any amino acid
XEPISSEHLHRAVSVNDEDLLVRILQGGRVKVDVPNKFGFTALMVAAQKGYTRLVKILVSNGTDVNLKNGSGKDSLMLACYAGHLDVVKYLRRHGASWQARDLGGCTALHWAADGGHCSVIEWMIKDGCEVDVVDTGSGWTPLMRVSAVSGNQRVASLLIDAGANVNVKDRNGKTPLMSVVSLLEERKKKQRPKKSCVC

SEQ ID NO: 46287 - protein, 496 aa, Homo sapiens
MEEQREALRKIIKTLAVKNEEIQSFIYSLKQMLLNVEANSAKVQEDLEAEFQSLFSLLEELKEGMLMKIKQDRASRTYELQNQLAACTRALESSEELLETANQTLQAMDSEDFPQAAKQIKDGVTMAPAFRLSLKAKVSDNMSHLMVDFAQERQMLQALKFLPVPSAPVIDLAESLVADNCVTLVWRMPDEDSKIDHYVLEYRRTNFEGPPRLKEDQPWMVIEGIRQTEYTLTGLKFDMKYMNFRVKACNKAVAGEFSEPVTLETPAFMFRLDASTSHQNLRVDDLSVEWDAMGGKVQDIKAREKDGKGRTASPINSPARGTPSPKRMPSGRGGRDRFTAESYTVLGDTLIDGGEHYWEVRYEPDSKAFGVGVAYRSLGRFEQLGKTAASWCLHVNNWLQVSFTAKHANKVKVLDAPVPDCLGVHCDFHQGLLSFYNARTKQVLHTFKTRFTQPLLPAFTVWCGSFQVTTGLQVPSAVRCLQKRGSATSSSNTSLT

SEQ ID NO: 46288 - protein, 498 aa, Homo sapiens
MDSQKEALQRIISTLANKNDEIQNFIDTLHHTLKGVQENSSNILSELDEEFDSLYSILDEVKESMINCIKQEQARKSQELQSQISQCNNALENSEELLEFATRSLDIKEPEEFSKAARQIKDRVTMASAFRLSLKPKVSDNMTHLMVDFSQERQMLQTLKFLPVPKAPEIDPVECLVADNSVTVAWRMPEEDNKIDHFILEHRKTNFDGLPRVKDERCWEIIDNIKGTEYTLSGLKFDSKYMNFRVRACNKAVAGEYSDPVTLETKALNFNLDNSSSHLNLKVEDTCVEWDPTGGKGQESKIKGKENKGRSGTPSPKRTSVGSRPPAVRGSRDRFTGESYTVLGDTAIESGQHYWEVKAQKDCKSYSVGVAYKTLGKFDQLGKTNTSWCIHVNNWLQNTFAAKHNNKVKALDVTVPEKIGVFCDFDGGQLSFYDANSKQLLYSFKTKFTQPVLPGFMVWCGGLSLSTGMQVPSAVRTLQKSENGMTGSASSLNNVVTQ

SEQ ID NO: 46289 - protein, 145 aa, Homo sapiens
MDSQKEALQRIISTLANKNDEIQNFIDTLHHTLKGVQENSSNILSELDEEFDSLYSILDEVKESMINCIKQEQARKSQELQSQISQCNNALENSEELLEFATRSLDIKEPEEFSKVHKNCINTLNKGSCIFKKAFLFFFSFGFLY

SEQ ID NO: 46290 - protein, 530 aa, Homo sapiens
MDSQKYCFKENENVTVDKACFLISNITIGPESINLQQEALQRIISTLANKNDEIQNFIDTLHHTLKGVQENSSNILSELDEEFDSLYSILDEVKESMINCIKQEQARKSQELQSQISQCNNALENSEELLEFATRSLDIKEPEEFSKAARQIKDRVTMASAFRLSLKPKVSDNMTHLMVDFSQERQMLQTLKFLPVPKAPEIDPVECLVADNSVTVAWRMPEEDNKIDHFILEHRKTNFDGLPRVKDERCWEIIDNIKGTEYTLSGLKFDSKYMNFRVRACNKAVAGEYSDPVTLETKALNFNLDNSSSHLNLKVEDTCVEWDPTGGKGQESKIKGKENKGRSGTPSPKRTSVGSRPPAVRGSRDRFTGESYTVLGDTAIESGQHYWEVKAQKDCKSYSVGVAYKTLGKFDQLGKTNTSWCIHVNNWLQNTFAAKHNNKVKALDVTVPEKIGVFCDFDGGQLSFYDANSKQLLYSFKTKFTQPVLPGFMVWCGGLSLSTGMQVPSAVRTLQKSENGMTGSASSLNNVVTQ

SEQ ID NO: 46291 - protein, 383 aa, Homo sapiens
MASAFRLSLKPKVSDNMTHLMVDFSQERQMLQTLKFLPVPKAPEIDPVECLVADNSVTVAWRMPEEDNKIDHFILEHRKTNFDGLPRVKDERCWEIIDNIKGTEYTLSGLKFDSKYMNFRVRACNKAVAGEYSDPVTLETKALNFNLDNSSSHLNLKVEDTCVEWDPTGGKGQESKIKGKENKGSVHVTSLKKHTSGTPSPKRTSVGSRPPAVRGSRDRFTGESYTVLGDTAIESGQHYWEVKAQKDCKSYSVGVAYKTLGKFDQLGKTNTSWCIHVNNWLQNTFAAKHNNKVKALDVTVPEKIGVFCDFDGGQLSFYDANSKQLLYSFKTKFTQPVLPGFMVWCGGLSLSTGMQVPSAVRTLQKSENGMTGSASSLNNVVTQ

SEQ ID NO: 46292 - protein, 1894 aa, Homo sapiens
MAPEAGATLRAPRRLSWAALLLLAALLPVASSAAASVDHPLKPRHVKLLSTKMGLKVTWDPPKDATSRPVEHYNIAYGKSLKSLKYIKVNAETYSFLIEDVEPGVVYFVLLTAENHSGVSRPVYRAESPPGGEWIEIDGFPIKGPGPFNETVTEKEVPNKPLRVRVRSSDDRLSVAWKAPRLSGAKSPRRSRGFLLGYGESGRKMNYVPLTRDERTHEIKKLASESVYVVSLQSMNSQGRSQPVYRAALTKRKISEEDELDVPDDISVRVMSSQSVLVSWVDPVLEKQKKVVASRQYTVRYREKGELARWDYKQIANRRVLIENLIPDTVYEFAVRISQGERDGKWSTSVFQRTPESAPTTAPENLNVWPVNGKPTVVAASWDALPETEGKVKEYILSYAPALKPFGAKSLTYPGDTTSALVDGLQPGERYLFKIRATNRRGLGPHSKAFIVAMPTTSKADVEQNTEDNGKPEKPEPSSPSPRAPASSQHPSVPASPQGRNAKDLLLDLKNKILANGGAPRKPQLRAKKAEELDLQSTEITGEEELGSREDSPMSPSDTQDQKRTLRPPSRHGHSVVAPGRTAVRARMPALPRREGVDKPGFSLATQPRPGAPPSASASPAHHASTQGTSHRPSLPASLNDNDLVDSDEDERAVGSLHPKGAFAQPRPALSPSRQSPSSVLRDRSSVHPGAKPASPARRTPHSGAAEEDSSASAPPSRLSPPHGGSSRLLPTQPHLSSPLSKGGKDGEDAPATNSNAPSRSTMSSSVSSHLSSRTQVSEGAEASDGESHGDGDREDGGRQAEATAQTLRARPASGHFHLLRHKPFAANGRSPSRFSIGRGPRLQPSSSPQSTVPSRAHPRVPSHSDSHPKLSSGIHGDEEDEKPLPATVVNDHVPSSSRQPISRGWEDLRRSPQRGASLHRKEPIPENPKSTGADTHPQGKYSSLASKAQDVQQSTDADTEGHSPKAQPGSTDRHASPARPPAARSQQHPSVPRRMTPGRAPQQQPPPPVATSQHHPGPQSRDAGRSPSQPRLSLTQAGRPRPTSQGRSHSSSDPYTASSRGMLPTALQNQDEDAQGSYDDDSTEVEAQDVRAPAHAARAKEAAASLPKHQQVESPTGAGAGGDHRSQRGHAASPARPSRPGGPQSRARVPSRAAPGKSEPPSKRPLSSKSQQSVSAEDDEEEDAGFFKGGKEDLLSSSVPKWPSSSTPRGGKDADGSLAKEEREPAIALAPRGGSLAPVKRPLPPPPGSSPRASHVPSRLPPRSAATVSPVAGTHPWPQYTTRAPPGHFSTTPMLSLRQRMMHARFRNPLSRQPARPSYRQGYNGRPNVEGKVLPGSNGKPNGQRIINGPQGTKWVVDLDRGLVLNAEGRYLQDSHGNPLRIKLGGDGRTIVDLEGTPVVSPDGLPLFGQGRHGTPLANAQDKPILSLGGKPLVGLEVIKKTTHPPTTTMQPTTTTTPLPTTTTPRPTTATTRRTTTTRRTTTRRPTTTVRTTTRTTTTTTPTPTTPIPTCPPGTLERHDDDGNLIMSSNGIPECYAEEDEFSGLETDTAVPTEEAYVIYDEDYEFETSRPPTTTEPSTTATTPRVIPEEGAISSFPEEEFDLAGRKRFVAPYVTYLNKDPSAPCSLTDALDHFQVDSLDEIIPNDLKKSDLPPQHAPRNITVVAVEGCHSFVIVDWDKATPGDVVTGYLVYSASYEDFIRNKWSTQASSVTHLPIENLKPNTRYYFKVQAQNPHGYGPISPSVSFVTESDNPLLVVRPPGGEPIWIPFAFKHDPSYTDCHGRQYVKRTWYRKFVGVVLCNSLRYKIYLSDNLKDTFYSIGDSWGRGEDHCQFVDSHLDGRTGPQSYVEALPTIQGYYRQYRQEPVRFGNIGFGTPYYYVGWYECGVSIPGKW

SEQ ID NO: 46293 - protein, 1831 aa, Homo sapiens
MAPEAGATLRAPRRLSWAALLLLAALLPVASSAAASVDHPLKPRHVKLLSTKMGLKVTWDPPKDATSRPVEHYNIAYGKSLKSLKYIKVNAETYSFLIEDVEPGVVYFVLLTAENHSGVSRPVYRAESPPGGEWIEIDGFPIKGPGPFNETVTEKEVPNKPLRVRVRSSDDRLSVAWKAPRLSGAKSPRRSRGFLLGYGESGRKMNYVPLTRDERTHEIKKLASESVYVVSLQSMNSQGRSQPVYRAALTKRKISEEDELDVPDDISVRVMSSQSVLVSWVDPVLEKQKKVVASRQYTVRYREKGELARWDYKQIANRRVLIENLIPDTVYEFAVRISQGERDGKWSTSVFQRTPESAPTTAPENLNVWPVNGKPTVVAASWDALPETEGKVKASKADVEQNTEDNGKPEKPEPSSPSPRAPASSQHPSVPASPQGRNAKDLLLDLKNKILANGGAPRKPQLRAKKAEELDLQSTEITGEEELGSREDSPMSPSDTQDQKRTLRPPSRHGHSVVAPGRTAVRARMPALPRREGVDKPGFSLATQPRPGAPPSASASPAHHASTQGTSHRPSLPASLNDNDLVDSDEDERAVGSLHPKGAFAQPRPALSPSRQSPSSVLRDRSSVHPGAKPASPARRTPHSGAAEEDSSASAPPSRLSPPHGGSSRLLPTQPHLSSPLSKGGKDGEDAPATNSNAPSRSTMSSSVSSHLSSRTQVSEGAEASDGESHGDGDREDGGRQAEATAQTLRARPASGHFHLLRHKPFAANGRSPSRFSIGRGPRLQPSSSPQSTVPSRAHPRVPSHSDSHPKLSSGIHGDEEDEKPLPATVVNDHVPSSSRQPISRGWEDLRRSPQRGASLHRKEPIPENPKSTGADTHPQGKYSSLASKAQDVQQSTDADTEGHSPKAQPGSTDRHASPARPPAARSQQHPSVPRRMTPGRAPQQQPPPPVATSQHHPGPQSRDAGRSPSQPRLSLTQAGRPRPTSQGRSHSSSDPYTASSRGMLPTALQNQDEDAQGSYDDDSTEVEAQDVRAPAHAARAKEAAASLPKHQQVESPTGAGAGGDHRSQRGHAASPARPSRPGGPQSRARVPSRAAPGKSEPPSKRPLSSKSQQSVSAEDDEEEDAGFFKGGKEDLLSSSVPKWPSSSTPRGGKDADGSLAKEEREPAIALAPRGGSLAPVKRPLPPPPGSSPRASHVPSRLPPRSAATVSPVAGTHPWPQYTTRAPPGHFSTTPMLSLRQRMMHARFRNPLSRQPARPSYRQGYNGRPNVEGKVLPGSNGKPNGQRIINGPQGTKWVVDLDRGLVLNAEGRYLQDSHGNPLRIKLGGDGRTIVDLEGTPVVSPDGLPLFGQGRHGTPLANAQDKPILSLGGKPLVGLEVIKKTTHPPTTTMQPTTTTTPLPTTTTPRPTTATTRRTTTTRRTTTRRPTTTVRTTTRTTTTTTPTPTTPIPTCPPGTLERHDDDGNLIMSSNGIPECYAEEDEFSGLETDTAVPTEEAYVIYDEDYEFETSRPPTTTEPSTTATTPRVIPEEGAISSFPEEEFDLAGRKRFVAPYVTYLNKDPSAPCSLTDALDHFQVDSLDEIIPNDLKKSDLPPQHAPRNITVVAVEGCHSFVIVDWDKATPGDVVTGYLVYSASYEDFIRNKWSTQASSVTHLPIENLKPNTRYYFKVQAQNPHGYGPISPSVSFVTESDNPLLVVRPPGGEPIWIPFAFKHDPSYTDCHGRQYVKRTWYRKFVGVVLCNSLRYKIYLSDNLKDTFYSIGDSWGRGEDHCQFVDSHLDGRTGPQSYVEALPTIQGYYRQYRQEPVRFGNIGFGTPYYYVGWYECGVSIPGKW

SEQ ID NO: 46294 - protein, 1204 aa, Homo sapiens
MYVTMMMTDQIPLELPPLLNGEVAMMPHLVNGDAAQQVILVQVNPGETFTIRAEDGTLQCIQGPAEVPMMSPNGSIPPIHVPPGYISQVIEDSTGVRRVVVTPQSPECYPPSYPSAMSPTHHLPPYLTHHPHFIHNSHTAYYPPVTGPGDMPPQFFPQHHLPHTIYGEQEIIPFYGMSTYITREDQYSKPPHKKLKDRQIDRQNRLNSPPSSIYKSSCTTVYNGYGKGHSGGSGGGGSGSGPGIKKTERRARSSPKSNDSDLQEYELEVKRVQDILSGIEKPQVSNIQARAVVLSWAPPVGLSCGPHSGLSFPYSYEVALSDKGRDGKYKIIYSGEELECNLKDLRPATDYHVRVYAMYNSVKGSCSEPVSFTTHSCAPECPFPPKLAHRSKSSLTLQWKAPIDNGSKITNYLLEWDEGKRNSGFRQCFFGSQKHCKLTKLCPAMGYTFRLAARNDIGTSGYSQEVVCYTLGNIPQMPSAPRLVRAGITWVTLQWSKPEGCSPEEVITYTLEIQEDENDNLFHPKYTGEDLTCTVKNLKRSTQYKFRLTASNTEGKSCPSEVLVCTTSPDRPGPPTRPLVKGPVTSHGFSVKWDPPKDNGGSEILKYLLEITDGNSEANQWEVAYSGSATEYTFTHLKPGTLYKLRACCISTGGHSQCSESLPVRTLSIAPGQCRPPRVLGRPKHKEVHLEWDVPASESGCEVSEYSVEMTEPEDVASEVYHGPELECTVGNLLPGTVYRFRVRALNDGGYGPYSDVSEITTAAGPPGQCKAPCISCTPDGCVLVGWESPDSSGADISEYRLEWGEDEESLELIYHGTDTRFEIRDLLPAAQYCCRLQAFNQAGAGPYSELVLCQTPASAPDPVSTLCVLEEEPLDAYPDSPSACLVLNWEEPCNNGSEILAYTIDLGDTSITVGNTTMHVMKDLLPETTYRIRIQAINEIGAGPFSQFIKAKTRPLPPLPPRLECAAAGPQSLKLKWGDSNSKTHAAEDIVYTLQLEDRNKRFISIYRGPSHTYKVQRLTEFTCYSFRIQAASEAGEGPFSETYTFSTTKSVPPTIKAPRVTQLEGNSCEILWETVPSMKGDPVNYILQVLVGRESEYKQVYKGEEATFQISGLQTNTDYRFRVCACRRCLDTSQELSGAFSPSAAFVLQRSEVMLTGDMGSLDDPKMKSMMPTDEQFAAIIVLGFATLSILFAFILQYFLMK

SEQ ID NO: 46295 - protein, 71 aa, Homo sapiens
MYVTMMMTDQIPLELPPLLNGEVAMMPHLVNGDAAQQVILVQVNPGETFTIRAEDGTLQCIQEVNVKRHCL

SEQ ID NO: 46296 - protein, 1204 aa, Homo sapiens; identical to SEQ ID NO: 46294

SEQ ID NO: 46297 - protein, 1204 aa, Homo sapiens; identical to SEQ ID NO: 46294

SEQ ID NO: 46298 - protein, 208 aa, Homo sapiens
MFTKEKIWSEVILVQVNPGETFTIRAEDGTLQCIQGPAEVPMMSPNGSIPPIHVPPGYISQVIEDSTGVRRVVVTPQSPECYPPSYPSAMSPTHHLPPYLTHHPHFIHNSHTAYYPPVTGPGDMPPQFFPQHHLPHTIYGEQEIIPFYGMSTYITREDQYSKPPHKKLKDRQIDRQNRLNSPPSSIYKSSCTTVYNGYGKGHSGGSGG

SEQ ID NO: 46299 - protein, 234 aa, Homo sapiens
MPSGCHSSPPSGLRGDMASLVPLSPYLSPTVLLLVSCDLGFVRADRPPSPVNVTVTHLRANSATVSWDVPEGNIVIGYSISQQRQNGPGQRVIREVNTTTRACALWGLAEDSDYTVQVRSIGLRGESPPGPRVHFRTLKGSDRLPSNSSSPGDITVEGLDGERPLQTGEVVIIVVVLLMWAAVIGLFCRQYDIIKDNDSNNNPKEKGKGPEQSPQGRPVGTRQKKSPSINTIDV

SEQ ID NO: 46300 - protein, 825 aa, Homo sapiens
MVGKSQQTDVIEKKKHMAIPKSSSPKATHRIGNTSGSKGSYSAKAYESIRVSSELQQTWTKRKHGQEMTSKSLQTDTIVEEKKEVKLVEETVVPEEKSADVREAAIELPESVQDVEIPPNIPSVQLKMDRSQQTSRTGYWTMMNIPPVEKVDKEQQTYFSESEIVVISRPDSSSTKSKEDALKHKSSGKIFASEHPEFQPATNSNEEIGQKNISRTSFTQETKKGPPVLLEDELREEVTVPVVQEGSAVKKVASAEIEPPSTEKFPAKIQPPLVEEATAKAEPRPAEETHVQVQPSTEETPDAEAATAVAENSVKVQPPPAEEAPLVEFPAEIQPPSAEESPSVELLAEILPPSAEESPSEEPPAEILPPPAEKSPSVELLGEIRSPSAQKAPIEVQPLPAEGALEEAPAKVEPPTVEETLADVQPLLPEEAPREEARELQLSTAMETPAEEAPTEFQSPLPKETTAEEASAEIQLLAATEPPADETPAEARSPLSEETSAEEAHAEVQSPLAEETTAEEASAEIQLLAAIEAPADETPAEAQSPLSEETSAEEAPAEVQSPSAKGVSIEEAPLELQPPSGEETTAEEASAAIQLLAATEASAEEAPAEVQPPPAEEAPAEVQPPPAEEAPAEVQPPPAEEAPAEVQPPPAEEAPAEVQPPPAEEAPAEVQPPPAEEAPAEVQSLPAEETPIEETLAAVHSPPADDVPAEEASVDKHSPPADLLLTEEFPIGEASAEVSPPPSEQTPEDEALVENVSTEFQSPQVAGIPAVKLGSVVLEGEAKFEEVSKINSVLKDLSNTNDGQAPTLEIESVFHIELKQRPPEL

SEQ ID NO: 46301 - protein, 718 aa, Homo sapiens
MVGKSQQTDVIEKKKHMAIPKSSSPKATHRIGNTSGSKGSYSAKAYESIRVSSELQQTWTKRKHGQEMTSKSLQTDTIVEEKKEVKLVEETVVPEEKSADVREAAIELPESVQDVEIPPNIPSVQLKMDRSQQTSRTGYWTMMNIPPVEKVDKEQQTYFSESEIVVISRPDSSSTKSKEDALKHKSSGKIFASEHPEFQPATNSNEEIGQKNISRTSFTQETKKGPPVLLEDELREEVTVPVVQEGSAVKKVASAEIEPPSTEKFPAKIQPPLVEEATAKAEPRPAEETHVQVQPSTEETPDAEAATAVAENSVKVQPPPAEEAPLVEFPAEIQPPSAEESPSVELLAEILPPSAEESPSEEPPAEILPPPAEKSPSVELLGEIRSPSAQKAPIEVQPLPAEGALEEAPAKVEPPTVEETLADVQPLLPEEAPREEARELQLSTAMETPAEEAPTEFQSPLPKETTAEEASAEIQLLAATETSAEEAPAEVQSPSAEEAPAEVQPPPAEEAPAEVQPPPAEEAPAEVQPPPAEEAPAEVQPPPAEEAPAEVQPPPAEEAPAEVQPPPAEEAPAEVQSLPAEETPIEETLAAVHSPPADDVPAEEASVDKHSPPADLLLTEEFPIGEASAEVSPPPSEQTPEDEALVENVSTEFQSPQVAGIPAVKLGSVVLEGEAKFEEVSKINSVLKDLSNTNDGQAPTLEIESVFHIELKQRPPEL

SEQ ID NO: 46302 - protein, 683 aa, Homo sapiens
MERAAPSRRVPLPLLLLGGLALLAAGVDADVLLEACCADGHRMATHQKDCSLPYATESKECRMVQEQCCHSQLEELHCATGISLANEQDRCATPHGDNASLEATFVKRCCHCCLLGRAAQAQGQSCEYSLMVGYQCGQVFQACCVKSQETGDLDVGGLQETDKIIEVEEEQEDPYLNDRCRGGGPCKQQCRDTGDEVVCSCFVGYQLLSDGVSCEDVNECITGSHSCRLGESCINTVGSFRCQRDSSCGTGYELTEDNSCKDIDECESGIHNCLPDFICQNTLGSFRCRPKLQCKSGFIQDALGNCIDINECLSISAPCPIGHTCINTEGSYTCQKNVPNCGRGYHLNEEGTRCVDVDECAPPAEPCGKGHRCVNSPGSFRCECKTGYYFDGISRMCVDVNECQRYPGRLCGHKCENTLGSYLCSCSVGFRLSVDGRSCEDINECSSSPCSQECANVYGSYQCYCRRGYQLSDVDGVTCEDIDECALPTGGHICSYRCINIPGSFQCSCPSSGYRLAPNGRNCQDIDECVTGIHNCSINETCFNIQGGFRCLAFECPENYRRSAATRCERLPCHENRECSKLPLRITYYHLSFPTNIQAPAVVFRMGPSSAVPGDSMQLAITGGNEEGFFTTRKVSPHSGVVALTKPVPEPRDLLLTVKMDLSRHGTVSSFVAKLFIFVSAEL

SEQ ID NO: 46303 - protein, 703 aa, Homo sapiens
MERAAPSRRVPLPLLLLGGLALLAAGVDADVLLEACCADGHRMATHQKDCSLPYATESKECRMVQEQCCHSQLEELHCATGISLANEQDRCATPHGDNASLEATFVKRCCHCCLLGRAAQAQGQSCEYSLMVGYQCGQVFQACCVKSQETGDLDVGGLQETDKIIEVEEEQEDPYLNDRCRGGGPCKQQCRDTGDEVVCSCFVGYQLLSDGVSCEDVNECITGSHSCRLGESCINTVGSFRCQRDSSCGTGYELTEDNSCKDIDECESGIHNCLPDFICQNTLGSFRCRPKLQCKSGFIQDALGNCIDINECLSISAPCPIGHTCINTEGSYTCQKNVPNCGRGYHLNEEGTRCVDVDECAPPAEPCGKGHRCVNSPGSFRCECKTGYYFDGISRMCVDVNECQRYPGRLCGHKCENTLGSYLCSCSVGFRLSVDGRSCEDINECSSSPCSQECANVYGSYQCYCRRGYQLSDVDGVTCEDIDECALPTGGHICSYRCINIPGSFQCSCPSSGYRLAPNGRNCQDIDECVTGIHNCSINETCFNIQGGFRCLAFECPENYRRSAATLQQEKTDTVRCIKSCRPNDVTCVFDPVHTISHTVISLPTFREFTRPEEIIFLRAITPPHPASQANIIFDITEGNLRDSFDIIKRYMDGMTVGVVRQVRPIVGPFHAVLKLEMNYVVGGVVSHRNVVNVHIFVSEYWF

SEQ ID NO: 46304 - protein, 566 aa, Homo sapiens
MERAAPSRRVPLPLLLLGGLALLAAGVDADVLLEACCADGHRMATHQKDCSLPYATESKECRMVQEQCCHSQLEELHCATGISLANEQDRCATPHGDNASLEATFVKRCCHCCLLGRAAQAQGQSCEYSLMVGYQCGQVFQACCVKSQETGDLDVGGLQETDKIIEVEEEQEDPYLNDRCRGGGPCKQQCRDTGDEVVCSCFVGYQLLSDGVSCEDVNECITGSHSCRLGESCINTVGSFRCQRDSSCGTGYELTEDNSCKDIDECESGIHNCLPDFICQNTLGSFRCRPKLQCKSGFIQDALGNCIDINECLSISAPCPIGHTCINTEGSYTCQKNVPNCGRGYHLNEEGTRCVDVDECAPPAEPCGKGHRCVNSPGSFRCECKTGYYFDGISRMCVDVNECQRYPGRLCGHKCENTLGSYLCSCSVGFRLSVDGRSCEDINECSSSPCSQECANVYGSYQCYCRRGYQLSDVDGVTCEDIDECALPTGGHICSYRCINIPGSFQCSCPSSGYRLAPNGRNCQDIDECVTGIHNCSINETCFNIQGGFRCLAFECPENYRRSAAT

SEQ ID NO: 46305 - protein, 703 aa, Homo sapiens
MERAAPSRRVPLPLLLLGGLALLAAGVDADVLLEACCADGHRMATHQKDCSLPYATESKECRMVQEQCCHSQLEELHCATGISLANEQDRCATPHGDNASLEATFVKRCCHCCLLGRAAQAQGQSCEYSLMVGYQCGQVFQACCVKSQETGDLDVGGLQETDKIIEVEEEQEDPYLNDRCRGGGPCKQQCRDTGDEVVCSCFVGYQLLSDGVSCEDVNECITGSHSCRLGESCINTVGSFRCQRDSSCGTGYELTEDNSCKDIDECESGIHNCLPDFICQNTLGSFRCRPKLQCKSGFIQDALGNCIDINECLSISAPCPIGHTCINTEGSYTCQKNVPNCGRGYHLNEEGTRCVDVDECAPPAEPCGKGHRCVNSPGSFRCECKTGYYFDGISRMCVDVNECQRYPGRLCGHKCENTLGSYLCSCSVGFRLSVDGRSCEDINECSSSPCSQECANVYGSYQCYCRRGYQLSDVDGVTCEDIDECALPTGGHICSYRCINIPGSFQCSCPSSGYRLAPNGRNCQDIDECVTGIHNCSINETCFNIQGGFRCLAFECPENYRRSAATQKSKKGRQNTPAGSSKEDCRVLPWKQGLEDTHLDAYLPCCRRFTRPEEIIFLRAITPPHPASQANIIFDITEGNLRDSFDIIKRYMDGMTVGVVRQVRPIVGPFHAVLKLEMNYVVGGVVSHRNVVNVHIFVSEYWF

SEQ ID NO: 46306 - protein, 721 aa, Homo sapiens
MERAAPSRRVPLPLLLLGGLALLAAGVDADVLLEACCADGHRMATHQKDCSLPYATESKECRAVGLASLCQDLNGAWAVWKVGRASQAEGTASARAQRRGMVQEQCCHSQLEELHCATGISLANEQDRCATPHGDNASLEATFVKRCCHCCLLGRAAQAQGQSCEYSLMVGYQCGQVFQACCVKSQETGDLDVGGLQETDKIIEVEEEQEDPYLNDRCRGGGPCKQQCRDTGDEVVCSCFVGYQLLSDGVSCEDVNECITGSHSCRLGESCINTVGSFRCQRDSSCGTGYELTEDNSCKDIDECESGIHNCLPDFICQNTLGSFRCRPKLQCKSGFIQDALGNCIDINECLSISAPCPIGHTCINTEGSYTCQKNVPNCGRGYHLNEEGTRCVDVDECAPPAEPCGKGHRCVNSPGSFRCECKTGYYFDGISRMCVDVNECQRYPGRLCGHKCENTLGSYLCSCSVGFRLSVDGRSCEDINECSSSPCSQECANVYGSYQCYCRRGYQLSDVDGVTCEDIDECALPTGGHICSYRCINIPGSFQCSCPSSGYRLAPNGRNCQDIDECVTGIHNCSINETCFNIQGGFRCLAFECPENYRRSAATRCERLPCHENRECSKLPLRITYYHLSFPTNIQAPAVVFRMGPSSAVPGDSMQLAITGGNEEGFFTTRKVSPHSGVVALTKPVPEPRDLLLTVKMDLSRHGTVSSFVAKLFIFVSAEL

SEQ ID NO: 46307 - protein, 189 aa, Homo sapiens
MNSYTRGSRRPSAKAASPAASVTSRVSPSGPGVPVDADVLLEACCADGHRMATHQKDCSLPYATESKECRMVQEQCCHSQLEELHCATGISLANEQDRCATPHGDNASLEATFVKRCCHCCLLGRAAQAQGQSCEYSLMVGYQCGQVFQACCVKSQETGDLDVGGLQETDKIIEVEEEQEDPYLNDRCR

SEQ ID NO: 46308 - protein, 26 aa, Homo sapiens
MATHQKDCSLPYATESKECRMVQEQC

SEQ ID NO: 46309 - protein, 601 aa, Homo sapiens
MERAAPSRRVPLPLLLLGGLALLAAGVDADVLLEACCADGHRMATHQKDCSLPYATESKECRMVQEQCCHSQLEELHCATGISLANEQDRCATPHGDNASLEATFVKRCCHCCLLGRAAQAQGQSCEYSLMVGYQCGQVFQACCVKSQETGDLDVGGLQETDKIIEVEEEQEDPYLNDRCRGGGPCKQQCRDTGDEVVCSCFVGYQLLSDGVSCEDVNECITGSHSCRLGESCINTVGSFRCQRDSSCGTGYELTEDNSCKDIDECESGIHNCLPDFICQNTLGSFRCRPKLQCKSGFIQDALGNCIDINECLSISAPCPIGHTCINTEGSYTCQKNVPNCGRGYHLNEEGTRCVDVDECAPPAEPCGKGHRCVNSPGSFRCECKTGYYFDGISRMCVDVNECQRYPGRLCGHKCENTLGSYLCSCSVGFRLSVDGRSCEDINECSSSPCSQECANVYGSYQCYCRRGYQLSDVDGVTCEDIDECALPTGGHICSYRCINIPGSFQCSCPSSGYRLAPNGRNCQDIDECVTGIHNCSINETCFNIQGGFRCLAFECPENYRRSAATQKSKKGRQNTPAGSSKEDCRVLPWKQGLEDTHLDA

SEQ ID NO: 46310 - protein, 65 aa, Homo sapiens
MATHQKDCSLPYATESKECRMVQEQCCHSQLEELHCATGISLANEQDRCATPHGDNASLEATFVK

SEQ ID NO: 46311 - protein, 181 aa, Homo sapiens
CRMVQEQCCHSQLEELHCATGISLANEQDRCATPHGDNASLEATFVKRCCHCCLLGRAAQAQGQSCEYSLMVGYQCGQVFQACCVKSQETGDLDVGGLQETGGGPCKQQCRDTGDEVVCSCFVGYQLLSDGVSCEDVNECITGSHSCRLGESCINTVGSFRCQRDSSCGTGYELTEDNSCK

SEQ ID NO: 46312 - protein, 139 aa, Homo sapiens
MATHQKDCSLPYATESKECRMVQEQCCHSQLEELHCATGISLANEQDRCATPHGDNASLEATFVKRCCHCCLLGRAAQAQGQSCEYSLMVGYQCGQVFQACCVKSQETGDLDVGGLQETDKIIEVEEEQEDPYLNDRCR

SEQ ID NO: 46313 - protein, 172 aa, Homo sapiens
MERAAPSRRVPLPLLLLGGLALLAAGVDADVLLEACCADGHRMATHQKDCSLPYATESKECRMVQEQCCHSQLEELHCATGISLANEQDRCATPHGDNASLEATFVKRCCHCCLLGRAAQAQGQSCEYSLMVGYQCGQVFQACCVKSQETGDLDVGGLQETGGGPCKQQCRD

SEQ ID NO: 46314 - protein, 1184 aa, Homo sapiens
MVLLWEPAGAWLALGLALALGPSVAAAAPRQDCTGVECPPLENCIEEALEPGACCATCVQQGCACEGYQYYDCLQGGFVRGRVPAGQSYFVDFGSTECSCPPGGGKISCQFMLCPELPPNCIEAVVVADSCPQCGQVGCVHAGHKYAAGHTVHLPPCRACHCPDAGGELICYQLPGCHGNFSDAEEGDPERHYEDPYSYDQEVAEVEAATALGGEVQAGAVQAGAGGPPAALGGGSQPLSTIQAPPWPAVLPRPTAAAALGPPAPVQAKARRVTEDSEEEEEEEEEREEMAVTEQLAAGGHRGLDGLPTTAPAGPSLPIQEERAEAGARAEAGARPEENLILDAQATSRSTGPEGVTHAPSLGKAALVPTQAVPGSPRDPVKPSPHNILSTSLPDAAWIPPTREVPRKPQVLPHSHVEEDTDPNSVHSIPRSSPEGSTKDLIETCCAAGQQWAIDNDECLEIPESGTEDNVCRTAQRHCCVSYLQEKSCMAGVLGAKEGETCGAEDNDSCGISLYKQCCDCCGLGLRVRAEGQSCESNPNLGYPCNHVMLSCCEGEEPLIVPEVRRPPEPAAAPRRVSEAEMAGREALSLGTEAELPNSLPGDDQDECLLLPGELCQHLCINTVGSYHCACFPGFSLQDDGRTCRPEGHPPQPEAPQEPALKSEFSQVASNTIPLPLPQPNTCKDNGPCKQVCSTVGGSAICSCFPGYAIMADGVSCEDINECVTDLHTCSRGEHCVNTLGSFHCYKALTCEPGYALKDGECEDVDECAMGTHTCQPGFLCQNTKGSFYCQARQRCMDGFLQDPEGNCVDINECTSLSEPCRPGFSCINTVGSYTCQRNPLICARGYHASDDGTKCVDVNECETGVHRCGEGQVCHNLPGSYRCDCKAGFQRDAFGRGCIDVNECWASPGRLCQHTCENTLGSYRCSCASGFLLAADGKRCEDVNECEAQRCSQECANIYGSYQCYCRQGYQLAEDGHTCTDIDECAQGAGILCTFRCLNVPGSYQCACPEQGYTMTANGRSCKDVDECALGTHNCSEAETCHNIQGSFRCLRFECPPNYVQVSKTKCERTTCHDFLECQNSPARITHYQLNFQTGLLVPAHIFRIGPAPAFTGDTIALNIIKGNEEGYFGTRRLNAYTGVVYLQRAVLEPRDFALDVEMKLWRQGSVTTFLAKMHIFFTTFAL

SEQ ID NO: 46315 - protein, 1231 aa, Homo sapiens
MVLLWEPAGAWLALGLALALGPSVAAAAPRQDCTGVECPPLENCIEEALEPGACCATCVQQGCACEGYQYYDCLQGGFVRGRVPAGQSYFVDFGSTECSCPPGGGKISCQFMLCPELPPNCIEAVVVADSCPQCGQVGCVHAGHKYAAGHTVHLPPCRACHCPDAGGELICYQLPGCHGNFSDAEEGDPERHYEDPYSYDQEVAEVEAATALGGEVQAGAVQAGAGGPPAALGGGSQPLSTIQAPPWPAVLPRPTAAAALGPPAPVQAKARRVTEDSEEEEEEEEEREEMAVTEQLAAGGHRGLDGLPTTAPAGPSLPIQEERAEAGARAEAGARPEENLILDAQATSRSTGPEGVTHAPSLGKAALVPTQAVPGSPRDPVKPSPHNILSTSLPDAAWIPPTREVPRKPQVLPHSHVEEDTDPNSVHSIPRSSPEGSTKDLIETCCAAGQQWAIDNDECLEIPESGTEDNVCRTAQRHCCVSYLQEKSCMAGVLGAKEGETCGAEDNDSCGISLYKQCCDCCGLGLRVRAEGQSCESNPNLGYPCNHVMLSCCEGEEPLIVPEVRRPPEPAAAPRRVSEAEMAGREALSLGTEAELPNSLPGDDQDECLLLPGELCQHLCINTVGSYHCACFPGFSLQDDGRTCRPEGHPPQPEAPQEPALKSEFSQVASNTIPLPLPQPNTCKDNGPCKQVCSTVGGSAICSCFPGYAIMADGVSCEDQDECLMGAHDCSRRQFCVNTLGSFYCVNHTVLCADGYILNAHRKCVDINECVTDLHTCSRGEHCVNTLGSFHCYKALTCEPGYALKDGECEDVDECAMGTHTCQPGFLCQNTKGSFYCQARQRCMDGFLQDPEGNCVDINECTSLSEPCRPGFSCINTVGSYTCQRNPLICARGYHASDDGTKCVDVNECETGVHRCGEGQVCHNLPGSYRCDCKAGFQRDAFGRGCIDVNECWASPGRLCQHTCENTLGSYRCSCASGFLLAADGKRCEDVNECEAQRCSQECANIYGSYQCYCRQGYQLAEDGHTCTDIDECAQGAGILCTFRCLNVPGSYQCACPEQGYTMTANGRSCKDVDECALGTHNCSEAETCHNIQGSFRCLRFECPPNYVQVSKTKCERTTCHDFLECQNSPARITHYQLNFQTGLLVPAHIFRIGPAPAFTGDTIALNIIKGNEEGYFGTRRLNAYTGVVYLQRAVLEPRDFALDVEMKLWRQGSVTTFLAKMHIFFTTFAL

SEQ ID NO: 46316 - protein, 159 aa, Homo sapiens
MVLLWEPAGAWLALGLALALGPSVAAAAPRQDCTGVECPPLENCIEEALEPGACCATCVQQGCACEGYQYYDCLQGGFVRGRVPAGQSYFVDFGSTECSCPPGGGKISCQFMLCPELPPNCIEAVVVADSCPQCGQVGCVHAGHKYAAGHTVHLPPCRA

SEQ ID NO: 46317 - protein, 1231 aa, Homo sapiens; identical to SEQ ID NO: 46315

SEQ ID NO: 46318 - protein, 1210 aa, Homo sapiens
METSLSLESGHHGSYRRGDRPGLAWTMVLLWEPAGAWLALGLALALGPSVAAAAPRQDCTGVECPPLENCIEEALEPGACCATCVQQGCACEGYQYYDCLQGGFVRGRVPAGQSYFVDFGSTECSCPPGGGKISCQFMLCPELPPNCIEAVVVADSCPQCGQVGCVHAGHKYAAGHTVHLPPCRACHCPDAGGELICYQLPGCHGNFSDAEEGDPERHYEDPYSYDQEVAEVEAATALGGEVQAGAVQAGAGGPPAALGGGSQPLSTIQAPPWPAVLPRPTAAAALGPPAPVQAKARRVTEDSEEEEEEEEEREEMAVTEQLAAGGHRGLDGLPTTAPAGPSLPIQEERAEAGARAEAGARPEENLILDAQATSRSTGPEGVTHAPSLGKAALVPTQAVPGSPRDPVKPSPHNILSTSLPDAAWIPPTREVPRKPQVLPHSHVEEDTDPNSVHSIPRSSPEGSTKDLIETCCAAGQQWAIDNDECLEIPESGTEDNVCRTAQRHCCVSYLQEKSCMAGVLGAKEGETCGAEDNDSCGISLYKQCCDCCGLGLRVRAEGQSCESNPNLGYPCNHVMLSCCEGEEPLIVPEVRRPPEPAAAPRRVSEAEMAGREALSLGTEAELPNSLPGDDQDECLLLPGELCQHLCINTVGSYHCACFPGFSLQDDGRTCRPEGHPPQPEAPQEPALKSEFSQVASNTIPLPLPQPNTCKDNGPCKQVCSTVGGSAICSCFPGYAIMADGVSCEDINECVTDLHTCSRGEHCVNTLGSFHCYKALTCEPGYALKDGECEDVDECAMGTHTCQPGFLCQNTKGSFYCQARQRCMDGFLQDPEGNCVDINECTSLSEPCRPGFSCINTVGSYTCQRNPLICARGYHASDDGTKCVDVNECETGVHRCGEGQVCHNLPGSYRCDCKAGFQRDAFGRGCIDVNECWASPGRLCQHTCENTLGSYRCSCASGFLLAADGKRCEDVNECEAQRCSQECANIYGSYQCYCRQGYQLAEDGHTCTDIDECAQGAGILCTFRCLNVPGSYQCACPEQGYTMTANGRSCKDVDECALGTHNCSEAETCHNIQGSFRCLRFECPPNYVQVSKTKCERTTCHDFLECQNSPARITHYQLNFQTGLLVPAHIFRIGPAPAFTGDTIALNIIKGNEEGYFGTRRLNAYTGVVYLQRAVLEPRDFALDVEMKLWRQGSVTTFLAKMHIFFTTFAL

SEQ ID NO: 46319 - protein, 448 aa, Homo sapiens
MPGIKRILTVTILALCLPSPGNAQAQCTNGFDLDRQSGQCLDIDECRTIPEACRGDMMCVNQNGGYLCIPRTNPVYRGPYSNPYSTPYSGPYPAAAPPLSAPNYPTISRPLICRFGYQMDESNQCVDVDECATDSHQCNPTQICINTEGGYTCSCTDGYWLLEGQCLDIDECRYGYCQQLCANVPGSYSCTCNPGFTLNEDGRSCQDVNECATENPCVQTCVNTYGSFICRCDPGYELEEDGVHCSDMDECSFSEFLCQHECVNQPGTYFCSCPPGYILLDDNRSCQDINECEHRNHTCNLQQTCYNLQGGFKCIDPIRCEEPYLRISDNRCMCPAENPGCRDQPFTILYRDMDVVSGRSVPADIFQMQATTRYPGAYYIFQIKSGNEGREFYMRQTGPISATLVMTRPIKGPREIQLDLEMITVNTVINFRGSSVIRLRIYVSQYPF

SEQ ID NO: 46320 - protein, 91 aa, Homo sapiens
MPGIKRILTVTILALCLPSPGNAQAQCTNGFDLDRQSGQCLDIDECRTIPEACRGDMMCVNQNGGYLCIPRTNPVYRGPYSNPYSTPYSGP

SEQ ID NO: 46321 - protein, 439 aa, Homo sapiens
MVPSSPRALFLLLLILACPEPRASQNCLSKQQLLSAIRQLQQLLKGQETRFAEGIRHMKSRLAALQNSVGRVGPDALPVSCPALNTPADGRKFGSKYLVDHEVHFTCNPGFRLVGPSSVVCLPNGTWTGEQPHCRGISECSSQPCQNGGTCVEGVNQYRCICPPGRTGNRCQHQAQTAAPEGSVAGDSAFSRAPRCAQVERAQHCSCEAGFHLSGAAGDSVCQDVNECELYGQEGRPRLCMHACVNTPGSYRCTCPGGYRTLADGKSCEDVDECVGLQPVCPQGTTCINTGGSFQCVSPECPEGSGNVSYVKTSPFQCERNPCPMDSRPCRHLPKTISFHYLSLPSNLKTPITLFRMATASAPGRAGPNSLRFGIVGGNSRGHFVMQRSDRQTGDLILVQNLEGPQTLEVDVDMSEYLDRSFQANHVSKVTIFVSPYDF

SEQ ID NO: 46322 - protein, 393 aa, Homo sapiens
MVPSSPRALFLLLLILACPEPRASQNCLSKQQLLSAIRQLQQLLKGQETRFAEGIRHMKSRLAALQNSVGRVGPDALPVSCPALNTPADGRKFGSKYLVDHEVHFTCNPGFRLVGPSSVVCLPNGTWTGEQPHCRGISECSSQPCQNGGTCVEGVNQYRCICPPGRTGNRCQHQAQTDVNECELYGQEGRPRLCMHACVNTPGSYRCTCPGGYRTLADGKSCEDVDECVGLQPVCPQGTTCINTGGSFQCVSPECPEGSGNVSYVKTSPFQCERNPCPMDSRPCRHLPKTISFHYLSLPSNLKTPITLFRMATASAPGRAGPNSLRFGIVGGNSRGHFVMQRSDRQTGDLILVQNLEGPQTLEVDVDMSEYLDRSFQANHVSKVTIFVSPYDF

SEQ ID NO: 46323 - protein, 313 aa, Homo sapiens
MELDRAVGVLGAATLLLSFLGMAWALQAADTCPEVKMVGLEGSDKLTILRGCPGLPGAPGPKGEAGTNGKRGERGPPGPPGKAGPPGPNGAPGEPQPCLTGPRTCKDLLDRGHFLSGWHTIYLPDCRPLTVLCDMDTDGGGWTVFQRRVDGSVDFYRDWATYKQGFGSRLGEFWLGNDNIHALTAQGTSELRVDLVDFEDNYQFAKYRSFKVADEAEKYNLVLGAFVEGSAGDSLTFHNNQSFSTKDQDNDLNTGNCAVMFQGAWWYKNCHVSNLNGRYLRGTHGSFANGINWKSGKGYNYSYKVSEMKVRPA

SEQ ID NO: 46324 - protein, 275 aa, Homo sapiens
MELDRAVGVLGAATLLLSFLGMAWALQAADTCPGERGPPGPPGKAGPPGPNGAPGEPQPCLTGPRTCKDLLDRGHFLSGWHTIYLPDCRPLTVLCDMDTDGGGWTVFQRRVDGSVDFYRDWATYKQGFGSRLGEFWLGNDNIHALTAQGTSELRVDLVDFEDNYQFAKYRSFKVADEAEKYNLVLGAFVEGSAGDSLTFHNNQSFSTKDQDNDLNTGNCAVMFQGAWWYKNCHVSNLNGRYLRGTHGSFANGINWKSGKGYNYSYKVSEMKVRPA

SEQ ID NO: 46325 - protein, 187 aa, Homo sapiens
MELSGATMARGLAVLLVLFLHIKNLPAQAADTCPEVKVVGLEGSDKLTILRGCPGLPGAPGPKGEAGVIGERGERGLPGAPGKAGPVGPKGDAGQSQSCATGPRNCKDLLDRGYFLSGWHTIYLPDCRPLTVLCDMDTDGGGWTVFQRRMDGSVDFYRDWAAYKQGFGSQLGEFWLGNDNIHALTAQ

SEQ ID NO: 46326 - protein, 326 aa, Homo sapiens
MELSGATMARGLAVLLVLFLHIKNLPAQAADTCPEVKVVGLEGSDKLTILRGCPGLPGAPGPKGEAGVIGERGERGLPGAPGKAGPVGPKGDRGEKGMRGEKGDAGQSQSCATGPRNCKDLLDRGYFLSGWHTIYLPDCRPLTVLCDMDTDGGGWTVFQRRMDGSVDFYRDWAAYKQGFGSQLGEFWLGNDNIHALTAQGSSELRVDLVDFEGNHQFAKYKSFKVADEAEKYKLVLGAFVGGSAGNSLTGHNNNFFSTKDQDNDVSSSNCAEKFQGAWWYADCHASNLNGLYLMGPHESYANGINWSAAKGYKYSYKVSEMKVRPA

SEQ ID NO: 46327 - protein, 360 aa, Homo sapiens
MELSGATMARGLAVLLVLFLHIKNLPAQAADTCPEVKVVGLEGSDKLTILRGCPGLPGAPGPKGEAGVIGERGERGLPGAPGKAGPVGPKGDRGEKGMRGEKGDAGQSQSCATGPRNCKDLLDRGYFLSGWHTIYLPDCRPLTVLCDMDTDGGGWTVFQRRMDGSVDFYRDWAAYKQGFGSQTHSHDAHSCPFAPSSVKPPHAHNLTRGRIMFLNMFTLGQKSFTSFNVCFLNTSGFDHFPVSVARQVFPWNLVSREESGPLFSRWHYRCSGRLSDFCEDFPPPVIDTGRSSPPPPSLPHPPMPHSQHFTLLEKGHFGVQKTLTKKGESLVGTFLLPTTAEFMLWAGWLLGRDKHLALTK

SEQ ID NO: 46328 - protein, 299 aa, Homo sapiens
MDLLWILPSLWLLLLGGPACLKTQEHPSCPGPRELEASKVVLLPSCPGAPGSPGEKGAPGPQGPPGPPGKMGPKGEPGDPVNLLRCQEGPRNCRELLSQGATLSGWYHLCLPEGRALPVFCDMDTEGGGWLVFQRRQDGSVDFFRSWSSYRAGFGNQESEFWLGNENLHQLTLQGNWELRVELEDFNGNRTFAHYATFRLLGEVDHYQLALGKFSEGTAGDSLSLHSGRPFTTYDADHDSSNSNCAVIVHGAWWYASCYRSNLNGRYAVSEAAAHKYGIDWASGRGVGHPYRRVRMMLR

SEQ ID NO: 46329 - protein, 288 aa, Homo sapiens
MDLLWILPSLWLLLLGGPACLKTQEHPSCPGPRELEASKVVLLPSCPGAPGSPGEKGAPGPQGPPGPPGKMGPKGEPGPRNCRELLSQGATLSGWYHLCLPEGRALPVFCDMDTEGGGWLVFQRRQDGSVDFFRSWSSYRAGFGNQESEFWLGNENLHQLTLQGNWELRVELEDFNGNRTFAHYATFRLLGEVDHYQLALGKFSEGTAGDSLSLHSGRPFTTYDADHDSSNSNCAVIVHGAWWYASCYRSNLNGRYAVSEAAAHKYGIDWASGRGVGHPYRRVRMMLR

SEQ ID NO: 46330 - protein, 99 aa, Homo sapiens
MDTEGGGWLVFQRRQDGSVDFFRSWSSYRAGFGNQESEFWLGNENLHQLTLQGNWELRVELEDFNGNRTFAHYATFRLLGEVDHYQLALGKFSEGTAGE

SEQ ID NO: 46331 - protein, 907 aa, Homo sapiens
MPTAAAPIISSVQKLVLYETRARYFLVGSNNAETKYRVLKIDRTEPKDLVIIDDRHVYTQQEVRELLGRLDLGNRTKMGQKGSSGLFRAVSAFGVVGFVRFLEGYYIVLITKRRKMADIGGHAIYKVEDTNMIYIPNDSVRVTHPDEARYLRIFQNVDLSSNFYFSYSYDLSHSLQYNLTVLRMPLEMLKSEMTQNRQESFDIFEDEGLITQGGSGVFGICSEPYMKYVWNGELLDIIKSTVHRDWLLYIIHGFCGQSKLLIYGRPVYVTLIARRSSKFAGTRFLKRGANCEGDVANEVETEQILCDASVMSFTAGSYSSYVQVRGSVPLYWSQDISTMMPKPPITLDQADPFAHVAALHFDQMFQRFGSPIIILNLVKEREKRKHERILSEELVAAVTYLNQFLPPEHTIVYIPWDMAKYTKSKLCNVLDRLNVIAESVVKKTGFFVNRPDSYCSILRPDEKWNELGGCVIPTGRLQTGILRTNCVDCLDRTNTAQFMVGKCALAYQLYSLGLIDKPNLQFDTDAVRLFEELYEDHGDTLSLQYGGSQLVHRVKTYRKIAPWTQHSKDIMQTLSRYYSNAFSDADRQDSINLFLGVFHPTEGKPHLWELPTDFYLHHKNTMRLLPTRRSYTYWWTPEVIKHLPLPYDEVICAVNLKKLIVKKFHKYEEEIDIHNEFFRPYELSSFDDTFCLAMTSSARDFMPKTVGIDPSPFTVRKPDETGKSVLGNKSNREEAVLQRKTAASAPPPPSEEAVSSSSEDDSGTDREEEGSVSQRSTPVKMTDAGDSAKVTENVVQPMKELYGINLSDGLSEEDFSIYSRFVQLGQSQHKQDKNSQQPCSRCSDGVIKLTPISAFSQDNIYEVQPPRVDRKSTEIFQAHIQASQGIMQPLGKEDSSMYREYIRNRYL

SEQ ID NO: 46332 - protein, 139 aa, Homo sapiens
MGQKGSSGLFRAVSAFGVVGFVRFLEGYYIVLITKRRKMADIGGHAIYKVEDTNMIYIPNDSVRVTHPDEARYLRIFQNVDLSSNFYFSYSYDLSHSLQYNLTVLRMPLEMLKSEMTQNRQESFDIFEDEGLITQGGSG

SEQ ID NO: 46333 - protein, 136 aa, Homo sapiens
  VARIANT 1: note = MOD_RES - Any amino acid
XLFEELYEDHGDTLSLQYGGSQLVHRVKTYRKIAPWTQHSKDIMQTLSRYYSNAFSDADRQDSINLFLGVFHPTEGKPHLWELPTDFYLHHKNTMRLLPTRRSYTYWWTPEVIKHLPLPYDEGFLARSPANLECSN

SEQ ID NO: 46334 - protein, 99 aa, Homo sapiens
MTSSARDFMPKTVGIDPSPFTVRKPDETGKSVLGNKSNREEAVLQRKTAASAPPPPSEEAVSSSSEDDSGTDREEEGSVSQRSTPVKMTDAGDSAKVTE

SEQ ID NO: 46335 - protein, 601 aa, Homo sapiens
MTGYLRIFQNVDLSSNFYFSYSYDLSHSLQYNLTVLRMPLEMLKSEMTQNRQESFDIFEDEGLITQGGSVDQADPFAHVAALHFDQMFQRFGSPIIILNLVKEREKRKHERILSEELVAAVTYLNQFLPPEHTIVYIPWDMAKYTKSKLCNVLDRLNVIAESVVKKTGFFVNRPDSYCSILRPDEKWNELGGCVIPTGRLQTGILRTNCVDCLDRTNTAQFMVGKCALAYQLYSLGLIDKPNLQFDTDAVRLFEELYEDHGDTLSLQYGGSQLVHRVKTYRKIAPWTQHSKDIMQTLSRYYSNAFSDADRQDSINLFLGVFHPTEGKPHLWELPTDFYLHHKNTMRLLPTRRSYTYWWTPEVIKHLPLPYDEVICAVNLKKLIVKKFHKYEEEIDIHNEFFRPYELSSFDDTFCLAMTSSARDFMPKTVGIDPSPFTVRKPDETGKSVLGNKSNREEAVLQRKTAASAPPPPSEEAVSSSSEDDSGTDREEEGSVSQRSTPVKMTDAGDSAKVTENVVQPMKELYGINLSDGLSEEDFSIYSRTPISAFSQDNIYEVQPPRVDRKSTEIFQAHIQASQGIMQPLGKEDSSMYREYIRNRYL

SEQ ID NO: 46336 - protein, 237 aa, Homo sapiens
MRYFLVGSNNAETKYRVLKIDRTEPKDLVIIDDRHVYTQQEVRELLGRLDLGNRTKMGQKGSSGLFRAVSAFGVVGFVRFLEGYYIVLITKRRKMADIGGHAIYKVEDTNMIYIPNDSVRVTHPDEARYLRIFQNVDLSSNFYFSYSYDLSHSLQYNLTVLRMPLEMLKSEMTQNRQESFDIFEDEGLITQGGSGVFGICSEPYMKYVWNGELLDIIKSTVHRDWLLYIIHGFCGQS

SEQ ID NO: 46337 - protein, 322 aa, Homo sapiens
LYQVSTHEQSESAHGRTGPSTGGRQRSRHEQARDSSRHSASQEGQDTIRGHPGSSRGGRQGSHYEQSVDSSGHSGSHHSHTTSQERSDVSRGQSGSRSVSRQTRNEKQSGDGSRHSGSRHHEASSRADSSRHSQVGQGQSSGPRTSRNQGSSVSQDSDSQGHSEDSERRSGSASRNHHGSAQEQSRDGSRHPRSHHEDRAGHGHSAESSRQSGTHHAENSSGGQAASSHEQARSSAGERHGSHHQQSADSSRHSGIGHGQASSAVRDSGHRGSSGSQASDSEGHSEDSDTQSVSAHGQAGPHQQSHQESTRGRSAGRSGRSG

SEQ ID NO: 46338 - protein, 322 aa, Homo sapiens
LYQVSTHEQSESSHGWTGPSTRGRQGSRHEQAQDSSRHSASQDGQDTIRGHPGSSRGGRQGYHHEHSVDSSGHSGSHHSHTTSQGRSDASRGQSGSRSASRTTRNEEQSGDGSRHSGSRHHEASTHADISRHSQAVQGQSEGSRRSRRQGSSVSQDSDSEGHSEDSERWSGSASRNHRGSVQEQSRHGSRHPRSHHEDRAGHGHSADRSRQSGTRHAETSSGGQAASSHEQARSSPGERHGSRHQQSADSSRHSGIPRGQASSAVRDSRHWGSSGSQASDSEGHSEESDTQSVSGHGQAGPHQQSHQESARDRSGGRSGRSG

SEQ ID NO: 46339 - protein, 4061 aa, Homo sapiens
MSTLLENIFAIINLFKQYSKKDKNTDTLSKKELKELLEKEFRQILKNPDDPDMVDVFMDHLDIDHNKKIDFTEFLLMVFKLAQAYYESTRKENLPISGHKHRKHSHHDKHEDNKQEENKENRKRPSSLERRNNRKGNKGRSKSPRETGGKRHESSSEKKERKGYSPTHREEEYGKNHHNSSKKEKNKTENTRLGDNRKRLSERLEEKEDNEEGVYDYENTGRMTQKWIQSGHIATYYTIQDEAYDTTDSLLEENKIYERSRSSDGKSSSQVNRSRHENTSQVPLQESRTRKRRGSRVSQDRDSEGHSEDSERHSGSASRNHHGSAWEQSRDGSRHPRSHDEDRASHGHSADSSRQSGTRHAETSSRGQTASSHEQARSSPGERHGSGHQQSADSSRHSATGRGQASSAVSDRGHRGSSGSQASDSEGHSENSDTQSVSGHGKAGLRQQSHQESTRGRSGERSGRSGSSLYQVSTHEQPDSAHGRTGTSTGGRQGSHHEQARDSSRHSASQEGQDTIRGHPGSSRGGRQGSHHEQSVNRSGHSGSHHSHTTSQGRSDASHGQSGSRSASRQTRNEEQSGDGTRHSGSRHHEASSQADSSRHSQVGQGQSSGPRTSRNQGSSVSQDSDSQGHSEDSERWSGSASRNHHGSAQEQSRDGSRHPRSHHEDRAGHGHSADSSRKSGTRHTQNSSSGQAASSHEQARSSAGERHGSRHQLQSADSSRHSGTGHGQASSAVRDSGHRGSSGSQATDSEGHSEDSDTQSVSGHGQAGHHQQSHQESARDRSGERSRRSGSFLYQVSTHKQSESSHGWTGPSTGVRQGSHHEQARDNSRHSASQDGQDTIRGHPGSSRRGRQGSHHEQSVDRSGHSGSHHSHTTSQGRSDASRGQSGSRSASRTTRNEEQSRDGSRHSGSRHHEASSHADISRHSQAGQGQSEGSRTSRRQGSSVSQDSDSEGHSEDSERWSGSASRNHRGSAQEQSRHGSRHPRSHHEDRAGHGHSADSSRQSGTPHAETSSGGQAASSHEQARSSPGERHGSRHQQSADSSRHSGIPRRQASSAVRDSGHWGSSGSQASDSEGHSEESDTQSVSGHGQDGPHQQSHQESARDWSGGRSGRSGSFIYQVSTHEQSESAHGRTRTSTGRRQGSHHEQARDSSRHSASQEGQDTIRAHPGSRRGGRQGSHHEQSVDRSGHSGSHHSHTTSQGRSDASHGQSGSRSASRQTRKDKQSGDGSRHSGSRHHEAASWADSSRHSQVGQEQSSGSRTSRHQGSSVSQDSDSERHSDDSERLSGSASRNHHGSSREQSRDGSRHPGFHQEDRASHGHSADSSRQSGTHHTESSSHGQAVSSHEQARSSPGERHGSRHQQSADSSRHSGIGHRQASSAVRDSGHRGSSGSQVTNSEGHSEDSDTQSVSAHGQAGPHQQSHKESARGQSGESSGRSRSFLYQVSSHEQSESTHGQTAPSTGGRQGSRHEQARNSSRHSASQDGQDTIRGHPGSSRGGRQGSYHEQSVDRSGHSGYHHSHTTPQGRSDASHGQSGPRSASRQTRNEEQSGDGSRHSGSRHHEPSTRAGSSRHSQVGQGESAGSKTSRRQGSSVSQDRDSEGHSEDSERRSESASRNHYGSAREQSRHGSRNPRSHQEDRASHGHSAESSRQSGTRHAETSSGGQAASSQEQARSSPGERHGSRHQQSADSSTDSGTGRRQDSSVVGDSGNRGSSGSQASDSEGHSEESDTQSVSAHGQAGPHQQSHQESTRGQSGERSGRSGSFLYQVSTHEQSESAHGRTGPSTGGRQRSRHEQARDSSRHSASQEGQDTIRGHPGSSRGGRQGSHYEQSVDSSGHSGSHHSHTTSQERSDVSRGQSGSRSVSRQTRNEKQSGDGSRHSGSRHHEASSRADSSRHSQVGQGQSSGPRTSRNQGSSVSQDSDSQGHSEDSERWSGSASRNHLGSAWEQSRDGSRHPGSHHEDRAGHGHSADSSRQSGTRHTESSSRGQAASSHEQARSSAGERHGSHHQLQSADSSRHSGIGHGQASSAVRDSGHRGYSGSQASDSEGHSEDSDTQSVSAQGKAGPHQQSHKESARGQSGESSGRSGSFLYQVSTHEQSESTHGQSAPSTGGRQGSHYDQAQDSSRHSASQEGQDTIRGHPGPSRGGRQGSHQEQSVDRSGHSGSHHSHTTSQGRSDASRGQSGSRSASRKTYDKEQSGDGSRHSGSHHHEASSWADSSRHSLVGQGQSSGPRTSRPRGSSVSQDSDSEGHSEDSERRSGSASRNHHGSAQEQSRDGSRHPRSHHEDRAGHGHSAESSRQSGTHHAENSSGGQAASSHEQARSSAGERHGSHHQQSADSSRHSGIGHGQASSAVRDSGHRGSSGSQASDSEGHSEDSDTQSVSAHGQAGPHQQSHQESTRGRSAGRSGRSGSFLYQVSTHEQSESAHGRTGTSTGGRQGSHHKQARDSSRHSTSQEGQDTIHGHPGSSSGGRQGSHYEQLVDRSGHSGSHHSHTTSQGRSDASHGHSGSRSASRQTRNDEQSGDGSRHSGSRHHEASSRADSSGHSQVGQGQSEGPRTSRNWGSSFSQDSDSQGHSEDSERWSGSASRNHHGSAQEQLRDGSRHPRSHQEDRAGHGHSADSSRQSGTRHTQTSSGGQAASSHEQARSSAGERHGSHHQQSADSSRHSGIGHGQASSAVRDSGHRGYSGSQASDNEGHSEDSDTQSVSAHGQAGSHQQSHQESARGRSGETSGHSGSFLYQVSTHEQSESSHGWTGPSTRGRQGSRHEQAQDSSRHSASQDGQDTIRGHPGSSRGGRQGYHHEHSVDSSGHSGSHHSHTTSQGRSDASRGQSGSRSASRTTRNEEQSGDGSRHSGSRHHEASTHADISRHSQAVQGQSEGSRRSRRQGSSVSQDSDSEGHSEDSERWSGSASRNHHGSAQEQLRDGSRHPRSHQEDRAGHGHSADSSRQSGTRHTQTSSGGQAASSHEQARSSAGERHGSHHQQSADSSRHSGIGHGQASSAVRDSGHRGYSGSQASDNEGHSEDSDTQSVSAHGQAGSHQQSHQESARGRSGETSGHSGSFLYQVSTHEQSESSHGWTGPSTRGRQGSRHEQAQDSSRHSASQYGQDTIRGHPGSSRGGRQGYHHEHSVDSSGHSGSHHSHTTSQGRSDASRGQSGSRSASRTTRNEEQSGDSSRHSVSRHHEASTHADISRHSQAVQGQSEGSRRSRRQGSSVSQDSDSEGHSEDSERWSGSASRNHRGSVQEQSRHGSRHPRSHHEDRAGHGHSADRSRQSGTRHAETSSGGQAASSHEQARSSPGERHGSRHQQSADSSRHSGIPRGQASSAVRDSRHWGSSGSQASDSEGHSEESDTQSVSGHGQAGPHQQSHQESARDRSGGRSGRSGSFLYQVSTHEQSESAHGRTRTSTGRRQGSHHEQARDSSRHSASQEGQDTIRGHPGSSRRGRQGSHYEQSVDRSGHSGSHHSHTTSQGRSDASRGQSGSRSASRQTRNDEQSGDGSRHSWSHHHEASTQADSSRHSQSGQGQSAGPRTSRNQGSSVSQDSDSQGHSEDSERWSGSASRNHRGSAQEQSRDGSRHPTSHHEDRAGHGHSAESSRQSGTHHAENSSGGQAASSHEQARSSAGERHGSHHQQSADSSRHSGIGHGQASSAVRDSGHRGSSGSQASDSEGHSEDSDTQSVSAHGQAGPHQQSHQESTRGRSAGRSGRSGSFLYQVSTHEQSESAHGRAGPSTGGRQGSRHEQARDSSRHSASQEGQDTIRGHPGSRRGGRQGSYHEQSVDRSGHSGSHHSHTTSQGRSDASHGQSGSRSASRETRNEEQSGDGSRHSGSRHHEASTQADSSRHSQSGQGESAGSRRSRRQGSSVSQDSDSEAYPEDSERRSESASRNHHGSSREQSRDGSRHPGSSHRDTASHVQSSPVQSDSSTAKEHGHFSSLSQDSAYHSGIQSRGSPHSSSSYHYQSEGTERQKGQSGLVWRHGSYGSADYDYGESGFRHSQHGSVSYNSNPVVFKERSDICKASAFGKDHPRYYATYINKDPGLCGHSSDISKQLGFSQSQRYYYYE

SEQ ID NO: 46340 - protein, 322 aa, Homo sapiens
LYQVSTHEQPDSAHGRTGTSTGGRQGSHHEQARDSSRHSASQEGQDTIRGHPGSSRGGRQGSHHEQSVNRSGHSGSHHSHTTSQGRSDASHGQSGSRSASRQTRNEEQSGDGTRHSGSRHHEASSQADSSRHSQAGQGQSEGSRTSRRQGSSVSQDSDSEGHSEDSERWSGSASRNHRGSAQEQSRHGSRHPRSHHEDRAGHGHSADSSRQSGTPHAETSSGGQAASSHEQARSSPGERHGSRHQQSADSSRHSGIPRRQASSAVRDSGHWGSSGSQASDSEGHSEESDTQSVSGHGQDGPHQQSHQESARDWSGGRSGRSG

SEQ ID NO: 46341 - protein, 1133 aa, Homo sapiens
MRSRGSDTEGSAQKKFPRHTKGHSFQGPKNMKHRQQDKDSPSESDVILPCPKAEKPHSGNGHQAEDLSRDDLLFLLSILEGELQARDEVIGILKAEKMDLALLEAQYGFVTPKKVLEALQRDAFQAKSTPWQEDIYEKPMNELDKVVEKHKESYRRILGQLLVAEKSRRQTILELEEEKRKHKEYMEKSDEFICLLEQECERLKKLIDQEIKSQEEKEQEKEKRVTTLKEELTKLKSFALMVVDEQQRLTAQLTLQRQKIQELTTNAKETHTKLALAEARVQEEEQKATRLEKELQTQTTKFHQDQDTIMAKLTNEDSQNRQLQQKLAALSRQIDELEETNRSLRKAEEELQDIKEKISKGEYGNAGIMAEVEELRKRVLDMEGKDEELIKMEEQCRDLNKRLERETLQSKDFKLEVEKLSKRIMALEKLEDAFNKSKQECYSLKCNLEKERMTTKQLSQELESLKVRIKELEAIESRLEKTEFTLKEDLTKLKTLTVMFVDERKTMSEKLKKTEDKLQAASSQLQVEQNKVTTVTEKLIEETKRALKSKTDVEEKMYSVTKERDDLKNKLKAEEEKGNDLLSRVNMLKNRLQSLEAIEKDFLKNKLNQDSGKSTTALHQENNKIKELSQEVERLKLKLKDMKAIEDDLMKTEDEYETLERRYANERDKAQFLSKELEHVKMELAKYKLAEKTETSHEQWLFKRLQEEEAKSGHLSREVDALKEKIHEYMATEDLICHLQGDHSVLQKKLNQQENRNRDLGREIENLTKELERYRHFSKSLRPSLNGRRISDPQVFSKEVQTEAVDNEPPDYKSLIPLERAVINGQLYEESENQDEDPNDEGSVLSFKCSQSTPCPVNRKLWIPWMKSKEGHLQNGKMQTKPNANFVQPGDLVLSHTPGQPLHIKVTPDHVQNTATLEITSPTTESPHSYTSTAVIPNCGTPKQRITILQNASITPVKSKTSTEDLMNLEQGMSPITMATFARAQTPESCGSLTPERTMSPIQVLAVTGSASSPEQGRSPEPTEISAKHAIFRVSPDRQSSWQFQRSNSNSSSVITTEDNKIHIHLGSPYMQAVASPVRPASPSAPLQDNRTQGLINGALNKTTNKVTSSITITPTATPLPRQSQITVSNIYN

SEQ ID NO: 46342 - protein, 1135 aa, Homo sapiens
MRSRGSDTEGSAQKKFPRHTKGHSFQGPKNMKHRQQDKDSPSESDVILPCPKAEKPHSGNGHQAEDLSRDDLLFLLSILEGELQARDEVIGILKAEKMDLALLEAQYGFVTPKKVLEALQRDAFQAKSTPWQEDIYEKPMNELDKVVEKHKESYRRILGQLLVAEKSRRQTILELEEEKRKHKEYMEKSDEFICLLEQECERLKKLIDQEIKSQEEKEQEKEKRVTTLKEELTKLKSFALMVVDEQQRLTAQLTLQRQKIQELTTNAKETHTKLALAEARVQEEEQKATRLEKELQTQTTKFHQDQDTIMAKLTNEDSQNRQLQQKLAALSRQIDELEETNRSLRKAEEELQDIKEKISKGEYGNAGIMAEVEELRKRVLDMEGKDEELIKMEEQCRDLNKRLERETLQSKDFKLEVEKLSKRIMALEKLEDAFNKSKQECYSLKCNLEKERMTTKQLSQELESLKVRIKELEAIESRLEKTEFTLKEDLTKLKTLTVMFVDERKTMSEKLKKTEDKLQAASSQLQVEQNKVTTVTEKLIEETKRALKSKTDVEEKMYSVTKERDDLKNKLKAEEEKGNDLLSRVNMLKNRLQSLEAIEKDFLKNKLNQDSGKSTTALHQENNKIKELSQEVERLKLKLKDMKAIEDDLMKTEDEYETLERRYANERDKAQFLSKELEHVKMELAKYKLAEKTETSHEQWLFKRLQEEEAKSGHLSREVDALKEKIHEYMATEDLICHLQGDHSVLQKKLNQQENRNRDLGREIENLTKELERYRHFSKSLRPSLNGRRISDPQVFSKEVQTEAVDNEPPDYKSLIPLERAVINGQLYEESENQDEDPNDEGSVLSFKCSQSTPCPVNRKLWIPWMKSKEGHLQNGKMQTKPNANFVQPGDLVLSHTPGQPLHIKVTPDHVQNTATLEITSPTTESPHSYTSTAVIPNCGTPKQRITILQNASITPVKSKTSTEDLMNLEQGMSPITMATFARAQTPESCGSLTPERTMSPIQVLAVTGSASSPEQGRSPEPTEISAKHAIFRVSPDRQSSWQFQRSNSNSSSVITTEDNKIHIHLGSPYMQAVASPVRPASPSAPLQDNRTQGLINGALNKTTNKVTSSITITPTATPLPRQSQITVEPLLLPH

SEQ ID NO: 46343 - protein, 893 aa, Homo sapiens
MVVDEQQRLTAQLTLQRQKIQELTTNAKETHTKLALAEARVQEEEQKATRLEKELQTQTTKFHQDQDTIMAKLTNEDSQNRQLQQKLAALSRQIDELEETNRSLRKAEEELQDIKEKISKGEYGNAGIMAEVEELRKRVLDMEGKDEELIKMEEQCRDLNKRLERETLQSKDFKLEVEKLSKRIMALEKLEDAFNKSKQECYSLKCNLEKERMTTKQLSQELESLKVRIKELEAIESRLEKTEFTLKEDLTKLKTLTVMFVDERKTMSEKLKKTEDKLQAASSQLQVEQNKVTTVTEKLIEETKRALKSKTDVEEKMYSVTKERDDLKNKLKAEEEKGNDLLSRVNMLKNRLQSLEAIEKDFLKNKLNQDSGKSTTALHQENNKIKELSQEVERLKLKLKDMKAIEDDLMKTEDEYETLERRYANERDKAQFLSKELEHVKMELAKYKLAEKTETSHEQWLFKRLQEEEAKSGHLSREVDALKEKIHEYMATEDLICHLQGDHSVLQKKLNQQENRNRDLGREIENLTKELERYRHFSKSLRPSLNGRRISDPQVFSKEVQTEAVDNEPPDYKSLIPLERAVINGQLYEESENQDEDPNDEGSVLSFKCSQSTPCPVNRKLWIPWMKSKEGHLQNGKMQTKPNANFVQPGDLVLSHTPGQPLHIKVTPDHVQNTATLEITSPTTESPHSYTSTAVIPNCGTPKQRITILQNASITPVKSKTSTEDLMNLEQGMSPITMATFARAQTPESCGSLTPERTMSPIQVLAVTGSASSPEQGRSPEPTEISAKHAIFRVSPDRQSSWQFQRSNSNSSSVITTEDNKIHIHLGSPYMQAVASPVRPASPSAPLQDNRTQGLINGALNKTTNKVTSSITITPTATPLPRQSQITVSNIYN

SEQ ID NO: 46344 - protein, 255 aa, Homo sapiens
MRSRGSDTEGSAQKKFPRHTKGHSFQGPKNMKHRQQDKDSPSESDVILPCPKAEKPHSGNGHQAEDLSRDDLLFLLSILEGELQARDEVIGILKAEKMDLALLEAQYGFVTPKKVLEALQRDAFQAKSTPWQEDIYEKPMNELDKVVEKHKESYRRILGQLLVAEKSRRQTILELEEEKRKHKEYMEKSDEFICLLEQECERWSLALLPRLECNGMILAHCNLCLLGSSDSPASAFQVAGITGTRHHAQLVFVFL

SEQ ID NO: 46345 - protein, 879 aa, Homo sapiens
MVVDEQQRLTAQLTLQRQKIQELTTNAKETHTKLALAEARVQEEEQKATRLEKELQTQTTKFHQDQDTIMAKLTNEDSQNRQLQQKLAALSRQIDELEETNRSLRKAEEELQDIKEKISKGEYGNAGIMAEVEELIKMEEQCRDLNKRLERETLQSKDFKLEVEKLSKRIMALEKLEDAFNKSKQECYSLKCNLEKERMTTKQLSQELESLKVRIKELEAIESRLEKTEFTLKEDLTKLKTLTVMFVDERKTMSEKLKKTEDKLQAASSQLQVEQNKVTTVTEKLIEETKRALKSKTDVEEKMYSVTKERDDLKNKLKAEEEKGNDLLSRVNMLKNRLQSLEAIEKDFLKNKLNQDSGKSTTALHQENNKIKELSQEVERLKLKLKDMKAIEDDLMKTEDEYETLERRYANERDKAQFLSKELEHVKMELAKYKLAEKTETSHEQWLFKRLQEEEAKSGHLSREVDALKEKIHEYMATEDLICHLQGDHSVLQKKLNQQENRNRDLGREIENLTKELERYRHFSKSLRPSLNGRRISDPQVFSKEVQTEAVDNEPPDYKSLIPLERAVINGQLYEESENQDEDPNDEGSVLSFKCSQSTPCPVNRKLWIPWMKSKEGHLQNGKMQTKPNANFVQPGDLVLSHTPGQPLHIKVTPDHVQNTATLEITSPTTESPHSYTSTAVIPNCGTPKQRITILQNASITPVKSKTSTEDLMNLEQGMSPITMATFARAQTPESCGSLTPERTMSPIQVLAVTGSASSPEQGRSPEPTEISAKHAIFRVSPDRQSSWQFQRSNSNSSSVITTEDNKIHIHLGSPYMQAVASPVRPASPSAPLQDNRTQGLINGALNKTTNKVTSSITITPTATPLPRQSQITVSNIYN

SEQ ID NO: 46346 - protein, 895 aa, Homo sapiens
MVVDEQQRLTAQLTLQRQKIQELTTNAKETHTKLALAEARVQEEEQKATRLEKELQTQTTKFHQDQDTIMAKLTNEDSQNRQLQQKLAALSRQIDELEETNRSLRKAEEELQDIKEKISKGEYGNAGIMAEVEELRKRVLDMEGKDEELIKMEEQCRDLNKRLERETLQSKDFKLEVEKLSKRIMALEKLEDAFNKSKQECYSLKCNLEKERMTTKQLSQELESLKVRIKELEAIESRLEKTEFTLKEDLTKLKTLTVMFVDERKTMSEKLKKTEDKLQAASSQLQVEQNKVTTVTEKLIEETKRALKSKTDVEEKMYSVTKERDDLKNKLKAEEEKGNDLLSRVNMLKNRLQSLEAIEKDFLKNKLNQDSGKSTTALHQENNKIKELSQEVERLKLKLKDMKAIEDDLMKTEDEYETLERRYANERDKAQFLSKELEHVKMELAKYKLAEKTETSHEQWLFKRLQEEEAKSGHLSREVDALKEKIHEYMATEDLICHLQGDHSVLQKKLNQQENRNRDLGREIENLTKELERYRHFSKSLRPSLNGRRISDPQVFSKEVQTEAVDNEPPDYKSLIPLERAVINGQLYEESENQDEDPNDEGSVLSFKCSQSTPCPVNRKLWIPWMKSKEGHLQNGKMQTKPNANFVQPGDLVLSHTPGQPLHIKVTPDHVQNTATLEITSPTTESPHSYTSTAVIPNCGTPKQRITILQNASITPVKSKTSTEDLMNLEQGMSPITMATFARAQTPESCGSLTPERTMSPIQVLAVTGSASSPEQGRSPEPTEISAKHAIFRVSPDRQSSWQFQRSNSNSSSVITTEDNKIHIHLGSPYMQAVASPVRPASPSAPLQDNRTQGLINGALNKTTNKVTSSITITPTATPLPRQSQITVEPLLLPH

SEQ ID NO: 46347 - protein, 711 aa, Homo sapiens
MALEKLEDAFNKSKQECYSLKCNLEKERMTTKQLSQELESLKVRIKELEAIESRLEKTEFTLKEDLTKLKTLTVMFVDERKTMSEKLKKTEDKLQAASSQLQVEQNKVTTVTEKLIEETKRALKSKTDVEEKMYSVTKERDDLKNKLKAEEEKGNDLLSRVNMLKNRLQSLEAIEKDFLKNKLNQDSGKSTTALHQENNKIKELSQEVERLKLKLKDMKAIEDDLMKTEDEYETLERRYANERDKAQFLSKELEHVKMELAKYKLAEKTETSHEQWLFKRLQEEEAKSGHLSREVDALKEKIHEYMATEDLICHLQGDHSVLQKKLNQQENRNRDLGREIENLTKELERYRHFSKSLRPSLNGRRISDPQVFSKEVQTEAVDNEPPDYKSLIPLERAVINGQLYEESENQDEDPNDEGSVLSFKCSQSTPCPVNRKLWIPWMKSKEGHLQNGKMQTKPNANFVQPGDLVLSHTPGQPLHIKVTPDHVQNTATLEITSPTTESPHSYTSTAVIPNCGTPKQRITILQNASITPVKSKTSTEDLMNLEQGMSPITMATFARAQTPESCGSLTPERTMSPIQVLAVTGSASSPEQGRSPEPTEISAKHAIFRVSPDRQSSWQFQRSNSNSSSVITTEDNKIHIHLGSPYMQAVASPVRPASPSAPLQDNRTQGLINGALNKTTNKVTSSITITPTATPLPRQSQITVEPLLLPH

SEQ ID NO: 46348 - protein, 837 aa, Homo sapiens
MVVDEQQRLTAQLTLQRQKIQELTTNAKETHTKLALAEARVQEEEQKATRLEKELQTQTTKFHQDQDTIMAKLTNEDSQNRQLQQKLAALSRQIDELEETNRSLRKAEEELQDIKEKISKGEYGNAGIMAEVEELRKRVLDMEGKDEELIKMEEQCRDLNKRLERETLQSKDFKLEVEKLSKRIMALEKLEDAFNKSKQECYSLKCNLEKERMTTKQLSQELESLKVRIKELEAIESRLEKTEFTLKEDLTKLKTLTVMFVDERKTMSEKLKKTEDKLQAASSQLQVEQNKVTTVTEKLIEETKRALKSKTDVEEKMYSVTKERDDLKNKLKAEEEKGNDLLSRVNMLKNRLQSLEAIEKDFLKNKLNQDSGKSTTALHQENNKIKELSQEVERLKLKLKDMKAIEDDLMKTEDEYETLERRYANERDKAQFLSKELEHVKMELAKYKLAEKTETSHEQWLFKRLQEEEAKSGHLSREVDALKEKIHEYMATEDLICHLQGDHSVLQKKLNQQENRNRDLGREIENLTKELERYRHFSKSLRPSLNGRRISDPQVFSKEVQTEAVDNEPPDYKSLIPLERAVINGQLYEESENQDEDPNDEGSVLSFKCSQSTPCPVNRKLWIPWMKSKEGHLQNGKMQTKPNANFVQPGDLVLSHTPGQPLHIKVTPDHVQNTATLEITSPTTESPHSYTSTAVIPNCGTPKQRITILQNASITPVKSKTSTEDLMNLEQGMSPITMATFARAQTPESCGSLTPERTMSPIQVLAVTGSASSPEQGRSPEPTEISAKHAIFRVSPDRQSSWQFQRSNSNSSSVITTEDNKIHIHLGSPYMQAVASP

SEQ ID NO: 46349 - protein, 2647 aa, Homo sapiens
MSSSHSRAGQSAAGAAPGGGVDTRDAEMPATEKDLAEDAPWKKIQQNTFTRWCNEHLKCVSKRIANLQTDLSDGLRLIALLEVLSQKKMHRKHNQRPTFRQMQLENVSVALEFLDRESIKLVSIDSKAIVDGNLKLILGLIWTLILHYSISMPMWDEEEDEEAKKQTPKQRLLGWIQNKLPQLPITNFSRDWQSGRALGALVDSCAPGLCPDWDSWDASKPVTNAREAMQQADDWLGIPQVITPEEIVDPNVDEHSVMTYLSQFPKAKLKPGAPLRPKLNPKKARAYGPGIEPTGNMVKKRAEFTVETRSAGQGEVLVYVEDPAGHQEEAKVTANNDKNRTFSVWYVPEVTGTHKVTVLFAGQHIAKSPFEVYVDKSQGDASKVTAQGPGLEPSGNIANKTTYFEIFTAGAGTGEVEVVIQDPMGQKGTVEPQLEARGDSTYRCSYQPTMEGVHTVHVTFAGVPIPRSPYTVTVGQACNPSACRAVGRGLQPKGVRVKETADFKVYTKGAGSGELKVTVKGPKGEERVKQKDLGDGVYGFEYYPMVPGTYIVTITWGGQNIGRSPFEVKVGTECGNQKVRAWGPGLEGGVVGKSADFVVEAIGDDVGTLGFSVEGPSQAKIECDDKGDGSCDVRYWPQEAGEYAVHVLCNSEDIRLSPFMADIRDAPQDFHPDRVKARGPGLEKTGVAVNKPAEFTVDAKHGGKAPLRVQVQDNEGCPVEALVKDNGNGTYSCSYVPRKPVKHTAMVSWGGVSIPNSPFRVNVGAGSHPNKVKVYGPGVAKTGLKAHEPTYFTVDCAEAGQGDVSIGIKCAPGVVGPAEADIDFDIIRNDNDTFTVKYTPRGAGSYTIMVLFADQATPTSPIRVKVEPSHDASKVKAEGPGLSRTGVELGKPTHFTVNAKAAGKGKLDVQFSGLTKGDAVRDVDIIDHHDNTYTVKYTPVQQGPVGVNVTYGGDPIPKSPFSVAVSPSLDLSKIKVSGLGEKVDVGKDQEFTVKSKGAGGQGKVASKIVGPSGAAVPCKVEPGLGADNSVVRFLPREEGPYEVEVTYDGVPVPGSPFPLEAVAPTKPSKVKAFGPGLQGGSAGSPARFTIDTKGAGTGGLGLTVEGPCEAQLECLDNGDGTCSVSYVPTEPGDYNINILFADTHIPGSPFKAHVVPCFDASKVKCSGPGLERATAGEVGQFQVDCSSAGSAELTIEICSEAGLPAEVYIQDHGDGTHTITYIPLCPGAYTVTIKYGGQPVPNFPSKLQVEPAVDTSGVQCYGPGIEGQGVFREATTEFSVDARALTQTGGPHVKARVANPSGNLTETYVQDRGDGMYKVEYTPYEEGLHSVDVTYDGSPVPSSPFQVPVTEGCDPSRVRVHGPGIQSGTTNKPNKFTVETRGAGTGGLGLAVEGPSEAKMSCMDNKDGSCSVEYIPYEAGTYSLNVTYGGHQVPGSPFKVPVHDVTDASKVKCSGPGLSPGMVRANLPQSFQVDTSKAGVAPLQVKVQGPKGLVEPVDVVDNADGTQTVNYVPSREGPYSISVLYGDEEVPRSPFKVKVLPTHDASKVKASGPGLNTTGVPASLPVEFTIDAKDAGEGLLAVQITDPEGKPKKTHIQDNHDGTYTVAYVPDVTGRYTILIKYGGDEIPFSPYRVRAVPTGDASKCTVTVSIGGHGLGAGIGPTIQIGEETVITVDTKAAGKGKVTCTVCTPDGSEVDVDVVENEDGTFDIFYTAPQPGKYVICVRFGGEHVPNSPFQVTALAGDQPSVQPPLRSQQLAPQYTYAQGGQQTWAPERPLVGVNGLDVTSLRPFDLVIPFTIKKGEITGEVRMPSGKVAQPTITDNKDGTVTVRYAPSEAGLHEMDIRYDNMHIPGSPLQFYVDYVNCGHVTAYGPGLTHGVVNKPATFTVNTKDAGEGGLSLAIEGPSKAEISCTDNQDGTCSVSYLPVLPGDYSILVKYNEQHVPGSPFTARVTGDDSMRMSHLKVGSAADIPINISETDLSLLTATVVPPSGREEPCLLKRLRNGHVGISFVPKETGEHLVHVKKNGQHVASSPIPVVISQSEIGDASRVRVSGQGLHEGHTFEPAEFIIDTRDAGYGGLSLSIEGPSKVDINTEDLEDGTCRVTYCPTEPGNYIINIKFADQHVPGSPFSVKVTGEGRVKESITRRRRAPSVANVGSHCDLSLKIPEISIQDMTAQVTSPSGKTHEAEIVEGENHTYCIRFVPAEMGTHTVSVKYKGQHVPGSPFQFTVGPLGEGGAHKVRAGGPGLERAEAGVPAEFSIWTREAGAGGLAIAVEGPSKAEISFEDRKDGSCGVAYVVQEPGDYEVSVKFNEEHIPDSPFVVPVASPSGDARRLTVSSLQESGLKVNQPASFAVSLNGAKGAIDAKVHSPSGALEECYVTEIDQDKYAVRFIPRENGVYLIDVKFNGTHIPGSPFKIRVGEPGHGGDPGLVSAYGAGLEGGVTGNPAEFVVNTSNAGAGALSVTIDGPSKVKMDCQECPEGYRVTYTPMAPGSYLISIKYGGPYHIGGSPFKAKVTGPRLVSNHSLHETSSVFVDSLTKATCAPQHGAPGPGPADASKVVAKGLGLSKAYVGQKSSFTVDCSKAGNNMLLVGVHGPRTPCEEILVKHVGSRLYSVSYLLKDKGEYTLVVKWGDEHIPGSPYRVVVP

SEQ ID NO: 46350 - protein, 2315 aa, Homo sapiens
MPATEKDLAEDAPWKKIQQNTFTRWCNEHLKCVSKRIANLQTDLSDGLRLIALLEVLSQKKMHRKHNQRPTFRQMQLENVSVALEFLDRESIKLVSIDSKAIVDGNLKLILGLIWTLILHYSISMPMWDEEEDEEAKKQTPKQRLLGWIQNKLPQLPITNFSRDWQSGRALGALVDSCAPGLCPDWDSWDASKPVTNAREAMQQADDWLGIPQVITPEEIVDPNVDEHSVMTYLSQFPKAKLKPGAPLRPKLNPKKARAYGPGIEPTGNMVKKRAEFTVETRSAGQGEVLVYVEDPAGHQEEAKVTANNDKNRTFSVWYVPEVTGTHKVTVLFAGQHIAKSPFEVYVDKSQGDASKVTAQGPGLEPSGNIANKTTYFEIFTAGAGTGEVEVVIQDPMGQKGTVEPQLEARGDSTYRCSYQPTMEGVHTVHVTFAGVPIPRSPYTVTVGQACNPSACRAVGRGLQPKGVRVKETADFKVYTKGAGSGELKVTVKGPKGEERVKQKDLGDGVYGFEYYPMVPGTYIVTITWGGQNIGRSPFEVKVGTECGNQKVRAWGPGLEGGVVGKSADFVVEAIGDDVGTLGFSVEGPSQAKIECDDKGDGSCDVRYWPQEAGEYAVHVLCNSEDIRLSPFMADIRDAPQDFHPDRVKARGPGLEKTGVAVNKPAEFTVDAKHGGKAPLRVQVQDNEGCPVEALVKDNGNGTYSCSYVPRKPVKHTAMVSWGGVSIPNSPFRVNVGAGSHPNKVKVYGPGVAKTGLKAHEPTYFTVDCAEAGQGDVSIGIKCAPGVVGPAEADIDFDIIRNDNDTFTVKYTPRGAGSYTIMVLFADQATPTSPIRVKVEPSHDASKVKAEGPGLSRTGVELGKPTHFTVNAKAAGKGKLDVQFSGLTKGDAVRDVDIIDHHDNTYTVKYTPVQQGPVGVNVTYGGDPIPKSPFSVAVSPSLDLSKIKVSGLGEKVDVGKDQEFTVKSKGAGGQGKVASKIVGPSGAAVPCKVEPGLGADNSVVRFLPREEGPYEVEVTYDGVPVPGSPFPLEAVAPTKPSKVKAFGPGLQGGSAGSPARFTIDTKGAGTGGLGLTVEGPCEAQLECLDNGDGTCSVSYVPTEPGDYNINILFADTHIPGSPFKAHVVPCFDASKVKCSGPGLERATAGEVGQFQVDCSSAGSAELTIEICSEAGLPAEVYIQDHGDGTHTITYIPLCPGAYTVTIKYGGQPVPNFPSKLQVEPAVDTSGVQCYGPGIEGQGVFREATTEFSVDARALTQTGGPHVKARVANPSGNLTETYVQDRGDGMYKVEYTPYEEGLHSVDVTYDGSPVPSSPFQVPVTEGCDPSRVRVHGPGIQSGTTNKPNKFTVETRGAGTGGLGLAVEGPSEAKMSCMDNKDGSCSVEYIPYEAGTYSLNVTYGGHQVPGSPFKVPVHDVTDASKVKCSGPGLSPGMVRANLPQSFQVDTSKAGVAPLQVKVQGPKGLVEPVDVVDNADGTQTVNYVPSREGPYSISVLYGDEEVPRSPFKVKVLPTHDASKVKASGPGLNTTGVPASLPVEFTIDAKDAGEGLLAVQITDPEGKPKKTHIQDNHDGTYTVAYVPDVTGRYTILIKYGGDEIPFSPYRVRAVPTGDASKCTVTVSIGGHGLGAGIGPTIQIGEETVITVDTKAAGKGKVTCTVCTPDGSEVDVDVVENEDGTFDIFYTAPQPGKYVICVRFGGEHVPNSPFQVTALAGDQPSVQPPLRSQQLAPQYTYAQGGQQTWAPERPLVGVNGLDVTSLRPFDLVIPFTIKKGEITGEVRMPSGKVAQPTITDNKDGTVTVRYAPSEAGLHEMDIRYDNMHIPGSPLQFYVDYVNCGHVTAYGPGLTHGVVNKPATFTVNTKDAGEGGLSLAIEGPSKAEISCTDNQDGTCSVSYLPVLPGDYSILVKYNEQHVPGSPFTARVTGDDSMRMSHLKVGSAADIPINISEISFEDRKDGSCGVAYVVQEPGDYEVSVKFNEEHIPDSPFVVPVASPSGDARRLTVSSLQESGLKVNQPASFAVSLNGAKGAIDAKVHSPSGALEECYVTEIDQDKYAVRFIPRENGVYLIDVKFNGTHIPGSPFKIRVGEPGHGGDPGLVSAYGAGLEGGVTGNPAEFVVNTSNAGAGALSVTIDGPSKVKMDCQECPEGYRVTYTPMAPGSYLISIKYGGPYHIGGSPFKAKVTGPRLVSNHSLHETSSVFVDSLTKATCAPQHGAPGPGPADASKVVAKGLGLSKAYVGQKSSFTVDCSKAGNNMLLVGVHGPRTPCEEILVKHVGSRLYSVSYLLKDKGEYTLVVKWGDEHIPGSPYRVVVP

SEQ ID NO: 46351 - protein, 780 aa, Homo sapiens
MPSGKVAQPTITDNKDGTVTVRYAPSEAGLHEMDIRYDNMHIPGSPLQFYVDYVNCGHVTAYGPGLTHGVVNKPATFTVNTKDAGEGDDSMRMSHLKVGSAADIPINISETDLSLLTATVVPPSGREEPCLLKRLRNGHVGISFVPKETGEHLVHVKKNGQHVASSPIPVVISQSEIGDASRVRVSGQGLHEGHTFEPAEFIIDTRDAGYGGLSLSIEGPSKVDINTEDLEDGTCRVTYCPTEPGNYIINIKFADQHVPGSPFSVKVTGEGRVKESITRRRRAPSVANVGSHCDLSLKIPEISIQDMTAQVTSPSGKTHEAEIVEGENHTYCIRFVPAEMGTHTVSVKYKGQHVPGSPFQFTVGPLGEGGAHKVRAGGPGLERAEAGVPAEFSIWTREAGAGGLAIAVEGPSKAEISFEDRKDGSCGVAYVVQEPGDYEVSVKFNEEHIPDSPFVVPVASPSGDARRLTVSSLQESGLKVNQPASFAVSLNGAKGAIDAKVHSPSGALEECYVTEIDQDKYAVRFIPRENGVYLIDVKFNGTHIPGSPFKIRVGEPGHGGDPGLVSAYGAGLEGGVTGNPAEFVVNTSNAGAGALSVTIDGPSKVKMDCQECPEGYRVTYTPMAPGSYLISIKYGGPYHIGGSPFKAKVTGPRLVSNHSLHETSSVFVDSLTKATCAPQHGAPGPGPADASKVVAKGLGLSKAYVGQKSSFTVDCSKAGNNMLLVGVHGPRTPCEEILVKHVGSRLYSVSYLLKDKGEYTLVVKWGDEHIPGSPYRVVVP

SEQ ID NO: 46352 - protein, 2639 aa, Homo sapiens
MSSSHSRAGQSAAGAAPGGGVDTRDAEMPATEKDLAEDAPWKKIQQNTFTRWCNEHLKCVSKRIANLQTDLSDGLRLIALLEVLSQKKMHRKHNQRPTFRQMQLENVSVALEFLDRESIKLVSIDSKAIVDGNLKLILGLIWTLILHYSISMPMWDEEEDEEAKKQTPKQRLLGWIQNKLPQLPITNFSRDWQSGRALGALVDSCAPGLCPDWDSWDASKPVTNAREAMQQADDWLGIPQVITPEEIVDPNVDEHSVMTYLSQFPKAKLKPGAPLRPKLNPKKARAYGPGIEPTGNMVKKRAEFTVETRSAGQGEVLVYVEDPAGHQEEAKVTANNDKNRTFSVWYVPEVTGTHKVTVLFAGQHIAKSPFEVYVDKSQGDASKVTAQGPGLEPSGNIANKTTYFEIFTAGAGTGEVEVVIQDPMGQKGTVEPQLEARGDSTYRCSYQPTMEGVHTVHVTFAGVPIPRSPYTVTVGQACNPSACRAVGRGLQPKGVRVKETADFKVYTKGAGSGELKVTVKGPKGEERVKQKDLGDGVYGFEYYPMVPGTYIVTITWGGQNIGRSPFEVKVGTECGNQKVRAWGPGLEGGVVGKSADFVVEAIGDDVGTLGFSVEGPSQAKIECDDKGDGSCDVRYWPQEAGEYAVHVLCNSEDIRLSPFMADIRDAPQDFHPDRVKARGPGLEKTGVAVNKPAEFTVDAKHGGKAPLRVQVQDNEGCPVEALVKDNGNGTYSCSYVPRKPVKHTAMVSWGGVSIPNSPFRVNVGAGSHPNKVKVYGPGVAKTGLKAHEPTYFTVDCAEAGQGDVSIGIKCAPGVVGPAEADIDFDIIRNDNDTFTVKYTPRGAGSYTIMVLFADQATPTSPIRVKVEPSHDASKVKAEGPGLSRTGVELGKPTHFTVNAKAAGKGKLDVQFSGLTKGDAVRDVDIIDHHDNTYTVKYTPVQQGPVGVNVTYGGDPIPKSPFSVAVSPSLDLSKIKVSGLGEKVDVGKDQEFTVKSKGAGGQGKVASKIVGPSGAAVPCKVEPGLGADNSVVRFLPREEGPYEVEVTYDGVPVPGSPFPLEAVAPTKPSKVKAFGPGLQGGSAGSPARFTIDTKGAGTGGLGLTVEGPCEAQLECLDNGDGTCSVSYVPTEPGDYNINILFADTHIPGSPFKAHVVPCFDASKVKCSGPGLERATAGEVGQFQVDCSSAGSAELTIEICSEAGLPAEVYIQDHGDGTHTITYIPLCPGAYTVTIKYGGQPVPNFPSKLQVEPAVDTSGVQCYGPGIEGQGVFREATTEFSVDARALTQTGGPHVKARVANPSGNLTETYVQDRGDGMYKVEYTPYEEGLHSVDVTYDGSPVPSSPFQVPVTEGCDPSRVRVHGPGIQSGTTNKPNKFTVETRGAGTGGLGLAVEGPSEAKMSCMDNKDGSCSVEYIPYEAGTYSLNVTYGGHQVPGSPFKVPVHDVTDASKVKCSGPGLSPGMVRANLPQSFQVDTSKAGVAPLQVKVQGPKGLVEPVDVVDNADGTQTVNYVPSREGPYSISVLYGDEEVPRSPFKVKVLPTHDASKVKASGPGLNTTGVPASLPVEFTIDAKDAGEGLLAVQITDPEGKPKKTHIQDNHDGTYTVAYVPDVTGRYTILIKYGGDEIPFSPYRVRAVPTGDASKCTVTGAGIGPTIQIGEETVITVDTKAAGKGKVTCTVCTPDGSEVDVDVVENEDGTFDIFYTAPQPGKYVICVRFGGEHVPNSPFQVTALAGDQPSVQPPLRSQQLAPQYTYAQGGQQTWAPERPLVGVNGLDVTSLRPFDLVIPFTIKKGEITGEVRMPSGKVAQPTITDNKDGTVTVRYAPSEAGLHEMDIRYDNMHIPGSPLQFYVDYVNCGHVTAYGPGLTHGVVNKPATFTVNTKDAGEGGLSLAIEGPSKAEISCTDNQDGTCSVSYLPVLPGDYSILVKYNEQHVPGSPFTARVTGDDSMRMSHLKVGSAADIPINISETDLSLLTATVVPPSGREEPCLLKRLRNGHVGISFVPKETGEHLVHVKKNGQHVASSPIPVVISQSEIGDASRVRVSGQGLHEGHTFEPAEFIIDTRDAGYGGLSLSIEGPSKVDINTEDLEDGTCRVTYCPTEPGNYIINIKFADQHVPGSPFSVKVTGEGRVKESITRRRRAPSVANVGSHCDLSLKIPEISIQDMTAQVTSPSGKTHEAEIVEGENHTYCIRFVPAEMGTHTVSVKYKGQHVPGSPFQFTVGPLGEGGAHKVRAGGPGLERAEAGVPAEFSIWTREAGAGGLAIAVEGPSKAEISFEDRKDGSCGVAYVVQEPGDYEVSVKFNEEHIPDSPFVVPVASPSGDARRLTVSSLQESGLKVNQPASFAVSLNGAKGAIDAKVHSPSGALEECYVTEIDQDKYAVRFIPRENGVYLIDVKFNGTHIPGSPFKIRVGEPGHGGDPGLVSAYGAGLEGGVTGNPAEFVVNTSNAGAGALSVTIDGPSKVKMDCQECPEGYRVTYTPMAPGSYLISIKYGGPYHIGGSPFKAKVTGPRLVSNHSLHETSSVFVDSLTKATCAPQHGAPGPGPADASKVVAKGLGLSKAYVGQKSSFTVDCSKAGNNMLLVGVHGPRTPCEEILVKHVGSRLYSVSYLLKDKGEYTLVVKWGDEHIPGSPYRVVVP

SEQ ID NO: 46353 - protein, 2602 aa, Homo sapiens
MPVTEKDLAEDAPWKKIQQNTFTRWCNEHLKCVNKRIGNLQTDLSDGLRLIALLEVLSQKRMYRKYHQRPTFRQMQLENVSVALEFLDRESIKLVSIDSKAIVDGNLKLILGLVWTLILHYSISMPVWEDEGDDDAKKQTPKQRLLGWIQNKIPYLPITNFNQNWQDGKALGALVDSCAPGLCPDWESWDPQKPVDNAREAMQQADDWLGVPQVITPEEIIHPDVDEHSVMTYLSQFPKAKLKPGAPLKPKLNPKKARAYGRGIEPTGNMVKQPAKFTVDTISAGQGDVMVFVEDPEGNKEEAQVTPDSDKNKTYSVEYLPKVTGLHKVTVLFAGQHISKSPFEVSVDKAQGDASKVTAKGPGLEAVGNIANKPTYFDIYTAGAGVGDIGVEVEDPQGKNTVELLVEDKGNQVYRCVYKPMQPGPHVVKIFFAGDTIPKSPFVVQVGEACNPNACRASGRGLQPKGVRIRETTDFKVDTKAAGSGELGVTMKGPKGLEELVKQKDFLDGVYAFEYYPSTPGRYSIAITWGGHHIPKSPFEVQVGPEAGMQKVRAWGPGLHGGIVGRSADFVVESIGSEVGSLGFAIEGPSQAKIEYNDQNDGSCDVKYWPKEPGEYAVHIMCDDEDIKDSPYMAFIHPATGGYNPDLVRAYGPGLEKSGCIVNNLAEFTVDPKDAGKAPLKIFAQDGEGQRIDIQMKNRMDGTYACSYTPVKAIKHTIAVVWGGVNIPHSPYRVNIGQGSHPQKVKVFGPGVERSGLKANEPTHFTVDCTEAGEGDVSVGIKCDARVLSEDEEDVDFDIIHNANDTFTVKYVPPAAGRYTIKVLFASQEIPASPFRVKVDPSHDASKVKAEGPGLSKAGVENGKPTHFTVYTKGAGKAPLNVQFNSPLPGDAVKDLDIIDNYDYSHTVKYTPTQQGNMQVLVTYGGDPIPKSPFTVGVAAPLDLSKIKLNGLENRVEVGKDQEFTVDTRGAGGQGKLDVTILSPSRKVVPCLVTPVTGRENSTAKFIPREEGLYAVDVTYDGHPVPGSPYTVEASLPPDPSKVKAHGPGLEGGLVGKPAEFTIDTKGAGTGGLGLTVEGPCEAKIECSDNGDGTCSVSYLPTKPGEYFVNILFEEVHIPGSPFKADIEMPFDPSKVVASGPGLEHGKVGEAGLLSVDCSEAGPGALGLEAVSDSGTKAEVSIQNNKDGTYAVTYVPLTAGMYTLTMKYGGELVPHFPARVKVEPAVDTSRIKVFGPGIEGKDVFREATTDFTVDSRPLTQVGGDHIKAHIANPSGASTECFVTDNADGTYQVEYTPFEKGLHVVEVTYDDVPIPNSPFKVAVTEGCQPSRVQAQGPGLKEAFTNKPNVFTVVTRGAGIGGLGITVEGPSESKINCRDNKDGSCSAEYIPFAPGDYDVNITYGGAHIPGSPFRVPVKDVVDPSKVKIAGPGLGSGVRARVLQSFTVDSSKAGLAPLEVRVLGPRGLVEPVNVVDNGDGTHTVTYTPSQEGPYMVSVKYADEEIPRSPFKVKVLPTYDASKVTASGPGLSSYGVPASLPVDFAIDARDAGEGLLAVQITDQEGKPKRAIVHDNKDGTYAVTYIPDKTGRYMIGVTYGGDDIPLSPYRIRATQTGDASKCLATGPGIASTVKTGEEVGFVVDAKTAGKGKVTCTVLTPDGTEAEADVIENEDGTYDIFYTAAKPGTYVIYVRFGGVDIPNSPFTVMATDGEVTAVEEAPVNACPPGFRPWVTEEAYVPVSDMNGLGFKPFDLVIPFAVRKGEITGEVHMPSGKTATPEIVDNKDGTVTVRYAPTEVGLHEMHIKYMGSHIPESPLQFYVNYPNSGSVSAYGPGLVYGVANKTATFTIVTEDAGEGGLDLAIEGPSKAEISCIDNKDGTCTVTYLPTLPGDYSILVKYNDKHIPGSPFTAKITDDSRRCSQVKLGSAADFLLDISETDLSSLTASIKAPSGRDEPCLLKRLPNNHIGISFIPREVGEHLVSIKKNGNHVANSPVSIMVVQSEIGDARRAKVYGRGLSEGRTFEMSDFIVDTRDAGYGGISLAVEGPSKVDIQTEDLEDGTCKVSYFPTVPGVYIVSTKFADEHVPGSPFTVKISGEGRVKESITRTSRAPSVATVGSICDLNLKIPEINSSDMSAHVTSPSGRVTEAEIVPMGKNSHCVRFVPQEMGVHTVSVKYRGQHVTGSPFQFTVGPLGEGGAHKVRAGGPGLERGEAGVPAEFSIWTREAGAGGLSIAVEGPSKAEITFDDHKNGSCGVSYIAQEPGNYEVSIKFNDEHIPESPYLVPVIAPSDDARRLTVMSLQESGLKVNQPASFAIRLNGAKGKIDAKVHSPSGAVEECHVSELEPDKYAVRFIPHENGVHTIDVKFNGSHVVGSPFKVRVGEPGQAGNPALVSAYGTGLEGGTTGIQSEFFINTTRAGPGTLSVTIEGPSKVKMDCQETPEGYKVMYTPMAPGNYLISVKYGGPNHIVGSPFKAKVTGQRLVSPGSANETSSILVESVTRSSTETCYSAIPKASSDASKVTSKGAGLSKAFVGQKSSFLVDCSKAGSNMLLIGVHGPTTPCEEVSMKHVGNQQYNVTYVVKERGDYVLAVKWGEEHIPGSPFHVTVP

SEQ ID NO: 46354 - protein, 2561 aa, Homo sapiens
MPVTEKDLAEDAPWKKIQQNTFTRWCNEHLKCVNKRIGNLQTDLSDGLRLIALLEVLSQKRMYRKYHQRPTFRQMQLENVSVALEFLDRESIKLVSIDSKAIVDGNLKLILGLVWTLILHYSISMPVWEDEGDDDAKKQTPKQRLLGWIQNKIPYLPITNFNQNWQDGKALGALVDSCAPGLCPDWESWDPQKPVDNAREAMQQADDWLGVPQVITPEEIIHPDVDEHSVMTYLSQFPKAKLKPGAPLKPKLNPKKARAYGRGIEPTGNMVKQPAKFTVDTISAGQGDVMVFVEDPEGNKEEAQVTPDSDKNKTYSVEYLPKVTGLHKVTVLFAGQHISKSPFEVSVDKAQGDASKVTAKGPGLEAVGNIANKPTYFDIYTAGAGVGDIGVEVEDPQGKNTVELLVEDKGNQVYRCVYKPMQPGPHVVKIFFAGDTIPKSPFVVQVGEACNPNACRASGRGLQPKGVRIRETTDFKVDTKAAGSGELGVTMKGPKGLEELVKQKDFLDGVYAFEYYPSTPGRYSIAITWGGHHIPKSPFEVQVGPEAGMQKVRAWGPGLHGGIVGRSADFVVESIGSEVGSLGFAIEGPSQAKIEYNDQNDGSCDVKYWPKEPGEYAVHIMCDDEDIKDSPYMAFIHPATGGYNPDLVRAYGPGLEKSGCIVNNLAEFTVDPKDAGKAPLKIFAQDGEGQRIDIQMKNRMDGTYACSYTPVKAIKHTIAVVWGGVNIPHSPYRVNIGQGSHPQKVKVFGPGVERSGLKANEPTHFTVDCTEAGEGDVSVGIKCDARVLSEDEEDVDFDIIHNANDTFTVKYVPPAAGRYTIKVLFASQEIPASPFRVKVDPSHDASKVKAEGPGLSKAGVENGKPTHFTVYTKGAGKAPLNVQFNSPLPGDAVKDLDIIDNYDYSHTVKYTPTQQGNMQVLVTYGGDPIPKSPFTVGVAAPLDLSKIKLNGLENRVEVGKDQEFTVDTRGAGGQGKLDVTILSPSRKVVPCLVTPVTGRENSTAKFIPREEGLYAVDVTYDGHPVPGSPYTVEASLPPDPSKVKAHGPGLEGGLVGKPAEFTIDTKGAGTGGLGLTVEGPCEAKIECSDNGDGTCSVSYLPTKPGEYFVNILFEEVHIPGSPFKADIEMPFDPSKVVASGPGLEHGKVGEAGLLSVDCSEAGPGALGLEAVSDSGTKAEVSIQNNKDGTYAVTYVPLTAGMYTLTMKYGGELVPHFPARVKVEPAVDTSRIKVFGPGIEGKDVFREATTDFTVDSRPLTQVGGDHIKAHIANPSGASTECFVTDNADGTYQVEYTPFEKGLHVVEVTYDDVPIPNSPFKVAVTEGCQPSRVQAQGPGLKEAFTNKPNVFTVVTRGAGIGGLGITVEGPSESKINCRDNKDGSCSAEYIPFAPGDYDVNITYGGAHIPGSPFRVPVKDVVDPSKVKIAGPGLGSGVRARVLQSFTVDSSKAGLAPLEVRVLGPRGLVEPVNVVDNGDGTHTVTYTPSQEGPYMVSVKYADEEIPRSPFKVKVLPTYDASKVTASGPGLSSYGVPASLPVDFAIDARDAGEGLLAVQITDQEGKPKRAIVHDNKDGTYAVTYIPDKTGRYMIGVTYGGDDIPLSPYRIRATQTGDASKCLATGPGIASTVKTGEEVGFVVDAKTAGKGKVTCTVLTPDGTEAEADVIENEDGTYDIFYTAAKPGTYVIYVRFGGVDIPNSPFTVMATDGEVTAVEEAPVNACPPGFRPWVTEEAYVPVSDMNGLGFKPFDLVIPFAVRKGEITGEVHMPSGKTATPEIVDNKDGTVTVRYAPTEVGLHEMHIKYMGSHIPESPLQFYVNYPNSGSVSAYGPGLVYGVANKTATFTIVTEDAGEGGLDLAIEGPSKAEISCIDNKDGTCTVTYLPTLPGDYSILVKYNDKHIPGSPFTAKITDDSRRCSQVKLGSAADFLLDISETDLSSLTASIKAPSGRDEPCLLKRLPNNHIGISFIPREVGEHLVSIKKNGNHVANSPVSIMVVQSEIGDARRAKVYGRGLSEGRTFEMSDFIVDTRDAGYGGISLAVEGPSKVDIQTEDLEDGTCKVSYFPTVPGVYIVSTKFADEHVPEINSSDMSAHVTSPSGRVTEAEIVPMGKNSHCVRFVPQEMGVHTVSVKYRGQHVTGSPFQFTVGPLGEGGAHKVRAGGPGLERGEAGVPAEFSIWTREAGAGGLSIAVEGPSKAEITFDDHKNGSCGVSYIAQEPGNYEVSIKFNDEHIPESPYLVPVIAPSDDARRLTVMSLQESGLKVNQPASFAIRLNGAKGKIDAKVHSPSGAVEECHVSELEPDKYAVRFIPHENGVHTIDVKFNGSHVVGSPFKVRVGEPGQAGNPALVSAYGTGLEGGTTGIQSEFFINTTRAGPGTLSVTIEGPSKVKMDCQETPEGYKVMYTPMAPGNYLISVKYGGPNHIVGSPFKAKVTGQRLVSPGSANETSSILVESVTRSSTETCYSAIPKASSDASKVTSKGAGLSKAFVGQKSSFLVDCSKAGSNMLLIGVHGPTTPCEEVSMKHVGNQQYNVTYVVKERGDYVLAVKWGEEHIPGSPFHVTVP

SEQ ID NO: 46355 - protein, 2150 aa, Homo sapiens
MPVTEKDLAEDAPWKKIQQNTFTRWCNEHLKCVNKRIGNLQTDLSDGLRLIALLEVLSQKRMYRKYHQRPTFRQMQLENVSVALEFLDRESIKLVSIDSKAIVDGNLKLILGLVWTLILHYSISMPVWEDEGDDDAKKQTPKQRLLGWIQNKIPYLPITNFNQNWQDGKALGALVDSCAPGLCPDWESWDPQKPVDNAREAMQQADDWLGVPQVITPEEIIHPDVDEHSVMTYLSQFPKAKLKPGAPLKPKLNPKKARAYGRGIEPTGNMVKQPAKFTVDTISAGQGDVMVFVEDPEGNKEEAQVTPDSDKNKTYSVEYLPKVTGLHKVTVLFAGQHISKSPFEVSVDKAQGDASKVTAKGPGLEAVGNIANKPTYFDIYTAGAGVGDIGVEVEDPQGKNTVELLVEDKGNQVYRCVYKPMQPGPHVVKIFFAGDTIPKSPFVVQVGEACNPNACRASGRGLQPKGVRIRETTDFKVDTKAAGSGELGVTMKGPKGLEELVKQKDFLDGVYAFEYYPSTPGRYSIAITWGGHHIPKSPFEVQVGPEAGMQKVRAWGPGLHGGIVGRSADFVVESIGSEVGSLGFAIEGPSQAKIEYNDQNDGSCDVKYWPKEPGEYAVHIMCDDEDIKDSPYMAFIHPATGGYNPDLVRAYGPGLEKSGCIVNNLAEFTVDPKDAGKAPLKIFAQDGEGQRIDIQMKNRMDGTYACSYTPVKAIKHTIAVVWGGVNIPHSPYRVNIGQGSHPQKVKVFGPGVERSGLKANEPTHFTVDCTEAGEGDVSVGIKCDARVLSEDEEDVDFDIIHNANDTFTVKYVPPAAGRYTIKVLFASQEIPASPFRVKVDPSHDASKVKAEGPGLSKAGVENGKPTHFTVYTKGAGKAPLNVQFNSPLPGDAVKDLDIIDNYDYSHTVKYTPTQQGNMQVLVTYGGDPIPKSPFTVGVAAPLDLSKIKLNGLENRVEVGKDQEFTVDTRGAGGQGKLDVTILSPSRKVVPCLVTPVTGRENSTAKFIPREEGLYAVDVTYDGHPVPGSPYTVEASLPPDPSKVKAHGPGLEGGLVGKPAEFTIDTKGAGTGGLGLTVEGPCEAKIECSDNGDGTCSVSYLPTKPGEYFVNILFEEVHIPGSPFKADIEMPFDPSKVVASGPGLEHGKVGEAGLLSVDCSEAGPGALGLEAVSDSGTKAEVSIQNNKDGTYAVTYVPLTAGMYTLTMKYGGELVPHFPARVKVEPAVDTSRIKVFGPGIEGKDVFREATTDFTVDSRPLTQVGGDHIKAHIANPSGASTECFVTDNADGTYQVEYTPFEKGLHVVEVTYDDVPIPNSPFKVAVTEGCQPSRVQAQGPGLKEAFTNKPNVFTVVTRGAGIGGLGITVEGPSESKINCRDNKDGSCSAEYIPFAPGDYDVNITYGGAHIPGSPFRVPVKDVVDPSKVKIAGPGLGSGVRARVLQSFTVDSSKAGLAPLEVRVLGPRGLVEPVNVVDNGDGTHTVTYTPSQEGPYMVSVKYADEEIPRSPFKVKVLPTYDASKVTASGPGLSSYGVPASLPVDFAIDARDAGEGLLAVQITDQEGKPKRAIVHDNKDGTYAVTYIPDKTGRYMIGVTYGGDDIPLSPYRIRATQTGDASKCLATGPGIASTVKTGEEVGFVVDAKTAGKGKVTCTVLTPDGTEAEADVIENEDGTYDIFYTAAKPGTYVIYVRFGGVDIPNSPFTVMATDGEVTAVEEAPVNACPPGFRPWVTEEAYVPVSDMNGLGFKPFDLVIPFAVRKGEITGEVHMPSGKTATPEIVDNKDGTVTVRYAPTEVGLHEMHIKYMGSHIPESPLQFYVNYPNSGSVSAYGPGLVYGVANKTATFTIVTEDAGEGGLDLAIEGPSKAEISCIDNKDGTCTVTYLPTLPGDYSILVKYNDKHIPGSPFTAKITDDSRRCSQVKLGSAADFLLDISETDLSSLTASIKAPSGRDEPCLLKRLPNNHIGISFIPREVGEHLVSIKKNGNHVANSPVSIMVVQSEIGDARRAKVYGRGLSEGRTFEMSDFIVDTRDAGYGGISLAVEGPSKVDIQTEDLEDGTCKVSYFPTVPGVYIVSTKFADEHVPGSPFTVKISGEGRVKESITRTSRAPSVATVGSICDLNLKIPGVRVMNCSAQILWGWRVQFHTGSRNQQQ

SEQ ID NO: 46356 - protein, 2578 aa, Homo sapiens
MPVTEKDLAEDAPWKKIQQNTFTRWCNEHLKCVNKRIGNLQTDLSDGLRLIALLEVLSQKRMYRKYHQRPTFRQMQLENVSVALEFLDRESIKLVSIDSKAIVDGNLKLILGLVWTLILHYSISMPVWEDEGDDDAKKQTPKQRLLGWIQNKIPYLPITNFNQNWQDGKALGALVDSCAPGLCPDWESWDPQKPVDNAREAMQQADDWLGVPQVITPEEIIHPDVDEHSVMTYLSQFPKAKLKPGAPLKPKLNPKKARAYGRGIEPTGNMVKQPAKFTVDTISAGQGDVMVFVEDPEGNKEEAQVTPDSDKNKTYSVEYLPKVTGLHKVTVLFAGQHISKSPFEVSVDKAQGDASKVTAKGPGLEAVGNIANKPTYFDIYTAGAGVGDIGVEVEDPQGKNTVELLVEDKGNQVYRCVYKPMQPGPHVVKIFFAGDTIPKSPFVVQVGEACNPNACRASGRGLQPKGVRIRETTDFKVDTKAAGSGELGVTMKGPKGLEELVKQKDFLDGVYAFEYYPSTPGRYSIAITWGGHHIPKSPFEVQVGPEAGMQKVRAWGPGLHGGIVGRSADFVVESIGSEVGSLGFAIEGPSQAKIEYNDQNDGSCDVKYWPKEPGEYAVHIMCDDEDIKDSPYMAFIHPATGGYNPDLVRAYGPGLEKSGCIVNNLAEFTVDPKDAGKAPLKIFAQDGEGQRIDIQMKNRMDGTYACSYTPVKAIKHTIAVVWGGVNIPHSPYRVNIGQGSHPQKVKVFGPGVERSGLKANEPTHFTVDCTEAGEGDVSVGIKCDARVLSEDEEDVDFDIIHNANDTFTVKYVPPAAGRYTIKVLFASQEIPASPFRVKVDPSHDASKVKAEGPGLSKAGVENGKPTHFTVYTKGAGKAPLNVQFNSPLPGDAVKDLDIIDNYDYSHTVKYTPTQQGNMQVLVTYGGDPIPKSPFTVGVAAPLDLSKIKLNGLENRVEVGKDQEFTVDTRGAGGQGKLDVTILSPSRKVVPCLVTPVTGRENSTAKFIPREEGLYAVDVTYDGHPVPGSPYTVEASLPPDPSKVKAHGPGLEGGLVGKPAEFTIDTKGAGTGGLGLTVEGPCEAKIECSDNGDGTCSVSYLPTKPGEYFVNILFEEVHIPGSPFKADIEMPFDPSKVVASGPGLEHGKVGEAGLLSVDCSEAGPGALGLEAVSDSGTKAEVSIQNNKDGTYAVTYVPLTAGMYTLTMKYGGELVPHFPARVKVEPAVDTSRIKVFGPGIEGKDVFREATTDFTVDSRPLTQVGGDHIKAHIANPSGASTECFVTDNADGTYQVEYTPFEKGLHVVEVTYDDVPIPNSPFKVAVTEGCQPSRVQAQGPGLKEAFTNKPNVFTVVTRGAGIGGLGITVEGPSESKINCRDNKDGSCSAEYIPFAPGDYDVNITYGGAHIPGSPFRVPVKDVVDPSKVKIAGPGLGSGVRARVLQSFTVDSSKAGLAPLEVRVLGPRGLVEPVNVVDNGDGTHTVTYTPSQEGPYMVSVKYADEEIPRSPFKVKVLPTYDASKVTASGPGLSSYGVPASLPVDFAIDARDAGEGLLAVQITDQEGKPKRAIVHDNKDGTYAVTYIPDKTGRYMIGVTYGGDDIPLSPYRIRATQTGDASKCLATGPGIASTVKTGEEVGFVVDAKTAGKGKVTCTVLTPDGTEAEADVIENEDGTYDIFYTAAKPGTYVIYVRFGGVDIPNSPFTVMVTEEAYVPVSDMNGLGFKPFDLVIPFAVRKGEITGEVHMPSGKTATPEIVDNKDGTVTVRYAPTEVGLHEMHIKYMGSHIPESPLQFYVNYPNSGSVSAYGPGLVYGVANKTATFTIVTEDAGEGGLDLAIEGPSKAEISCIDNKDGTCTVTYLPTLPGDYSILVKYNDKHIPGSPFTAKITDDSRRCSQVKLGSAADFLLDISETDLSSLTASIKAPSGRDEPCLLKRLPNNHIGISFIPREVGEHLVSIKKNGNHVANSPVSIMVVQSEIGDARRAKVYGRGLSEGRTFEMSDFIVDTRDAGYGGISLAVEGPSKVDIQTEDLEDGTCKVSYFPTVPGVYIVSTKFADEHVPGSPFTVKISGEGRVKESITRTSRAPSVATVGSICDLNLKIPEINSSDMSAHVTSPSGRVTEAEIVPMGKNSHCVRFVPQEMGVHTVSVKYRGQHVTGSPFQFTVGPLGEGGAHKVRAGGPGLERGEAGVPAEFSIWTREAGAGGLSIAVEGPSKAEITFDDHKNGSCGVSYIAQEPGNYEVSIKFNDEHIPESPYLVPVIAPSDDARRLTVMSLQESGLKVNQPASFAIRLNGAKGKIDAKVHSPSGAVEECHVSELEPDKYAVRFIPHENGVHTIDVKFNGSHVVGSPFKVRVGEPGQAGNPALVSAYGTGLEGGTTGIQSEFFINTTRAGPGTLSVTIEGPSKVKMDCQETPEGYKVMYTPMAPGNYLISVKYGGPNHIVGSPFKAKVTGQRLVSPGSANETSSILVESVTRSSTETCYSAIPKASSDASKVTSKGAGLSKAFVGQKSSFLVDCSKAGSNMLLIGVHGPTTPCEEVSMKHVGNQQYNVTYVVKERGDYVLAVKWGEEHIPGSPFHVTVP

SEQ ID NO: 46357 - protein, 2422 aa, Homo sapiens
MQEHSTRRRSLSLCPDWESWDPQKPVDNAREAMQQADDWLGVPQVITPEEIIHPDVDEHSVMTYLSQFPKAKLKPGAPLKPKLNPKKARAYGRGIEPTGNMVKQPAKFTVDTISAGQGDVMVFVEDPEGNKEEAQVTPDSDKNKTYSVEYLPKVTGLHKVTVLFAGQHISKSPFEVSVDKAQGDASKVTAKGPGLEAVGNIANKPTYFDIYTAGAGVGDIGVEVEDPQGKNTVELLVEDKGNQVYRCVYKPMQPGPHVVKIFFAGDTIPKSPFVVQVGEACNPNACRASGRGLQPKGVRIRETTDFKVDTKAAGSGELGVTMKGPKGLEELVKQKDFLDGVYAFEYYPSTPGRYSIAITWGGHHIPKSPFEVQVGPEAGMQKVRAWGPGLHGGIVGRSADFVVESIGSEVGSLGFAIEGPSQAKIEYNDQNDGSCDVKYWPKEPGEYAVHIMCDDEDIKDSPYMAFIHPATGGYNPDLVRAYGPGLEKSGCIVNNLAEFTVDPKDAGKAPLKIFAQDGEGQRIDIQMKNRMDGTYACSYTPVKAIKHTIAVVWGGVNIPHSPYRVNIGQGSHPQKVKVFGPGVERSGLKANEPTHFTVDCTEAGEGDVSVGIKCDARVLSEDEEDVDFDIIHNANDTFTVKYVPPAAGRYTIKVLFASQEIPASPFRVKVDPSHDASKVKAEGPGLSKAGVENGKPTHFTVYTKGAGKAPLNVQFNSPLPGDAVKDLDIIDNYDYSHTVKYTPTQQGNMQVLVTYGGDPIPKSPFTVGVAAPLDLSKIKLNGLENRVEVGKDQEFTVDTRGAGGQGKLDVTILSPSRKVVPCLVTPVTGRENSTAKFIPREEGLYAVDVTYDGHPVPGSPYTVEASLPPDPSKVKAHGPGLEGGLVGKPAEFTIDTKGAGTGGLGLTVEGPCEAKIECSDNGDGTCSVSYLPTKPGEYFVNILFEEVHIPGSPFKADIEMPFDPSKVVASGPGLEHGKVGEAGLLSVDCSEAGPGALGLEAVSDSGTKAEVSIQNNKDGTYAVTYVPLTAGMYTLTMKYGGELVPHFPARVKVEPAVDTSRIKVFGPGIEGKDVFREATTDFTVDSRPLTQVGGDHIKAHIANPSGASTECFVTDNADGTYQVEYTPFEKGLHVVEVTYDDVPIPNSPFKVAVTEGCQPSRVQAQGPGLKEAFTNKPNVFTVVTRGAGIGGLGITVEGPSESKINCRDNKDGSCSAEYIPFAPGDYDVNITYGGAHIPGSPFRVPVKDVVDPSKVKIAGPGLGSGVRARVLQSFTVDSSKAGLAPLEVRVLGPRGLVEPVNVVDNGDGTHTVTYTPSQEGPYMVSVKYADEEIPRSPFKVKVLPTYDASKVTASGPGLSSYGVPASLPVDFAIDARDAGEGLLAVQITDQEGKPKRAIVHDNKDGTYAVTYIPDKTGRYMIGVTYGGDDIPLSPYRIRATQTGDASKCLATGPGIASTVKTGEEVGFVVDAKTAGKGKVTCTVLTPDGTEAEADVIENEDGTYDIFYTAAKPGTYVIYVRFGGVDIPNSPFTVMATDGEVTAVEEAPVTEEAYVPVSDMNGLGFKPFDLVIPFAVRKGEITGEVHMPSGKTATPEIVDNKDGTVTVRYAPTEVGLHEMHIKYMGSHIPESPLQFYVNYPNSGSVSAYGPGLVYGVANKTATFTIVTEDAGEGGLDLAIEGPSKAEISCIDNKDGTCTVTYLPTLPGDYSILVKYNDKHIPGSPFTAKITDDSRRCSQVKLGSAADFLLDISETDLSSLTASIKAPSGRDEPCLLKRLPNNHIGISFIPREVGEHLVSIKKNGNHVANSPVSIMVVQSEIGDARRAKVYGRGLSEGRTFEMSDFIVDTRDAGYGGISLAVEGPSKVDIQTEDLEDGTCKVSYFPTVPGVYIVSTKFADEHVPGSPFTVKISGEGRVKESITRTSRAPSVATVGSICDLNLKIPEINSSDMSAHVTSPSGRVTEAEIVPMGKNSHCVRFVPQEMGVHTVSVKYRGQHVTGSPFQFTVGPLGEGGAHKVRAGGPGLERGEAGVPAEFSIWTREAGAGGLSIAVEGPSKAEITFDDHKNGSCGVSYIAQEPGNYEVSIKFNDEHIPESPYLVPVIAPSDDARRLTVMSLQESGLKVNQPASFAIRLNGAKGKIDAKVHSPSGAVEECHVSELEPDKYAVRFIPHENGVHTIDVKFNGSHVVGSPFKVRVGEPGQAGNPALVSAYGTGLEGGTTGIQSEFFINTTRAGPGTLSVTIEGPSKVKMDCQETPEGYKVMYTPMAPGNYLISVKYGGPNHIVGSPFKAKVTGQRLVSPGSANETSSILVESVTRSSTETCYSAIPKASSDASKVTSKGAGLSKAFVGQKSSFLVDCSKAGSNMLLIGVHGPTTPCEEVSMKHVGNQQYNVTYVVKERGDYVLAVKWGEEHIPGSPFHVTVP

SEQ ID NO: 46358 - protein, 2591 aa, Homo sapiens
MPVTEKDLAEDAPWKKIQQNTFTRWCNEHLKCVNKRIGNLQTDLSDGLRLIALLEVLSQKRMYRKYHQRPTFRQMQLENVSVALEFLDRESIKLVSIDSKAIVDGNLKLILGLVWTLILHYSISMPVWEDEGDDDAKKQTPKQRLLGWIQNKIPYLPITNFNQNWQDGKALGALVDSCAPGLCPDWESWDPQKPVDNAREAMQQADDWLGVPQVITPEEIIHPDVDEHSVMTYLSQFPKAKLKPGAPLKPKLNPKKARAYGRGIEPTGNMVKQPAKFTVDTISAGQGDVMVFVEDPEGNKEEAQVTPDSDKNKTYSVEYLPKVTGLHKVTVLFAGQHISKSPFEVSVDKAQGDASKVTAKGPGLEAVGNIANKPTYFDIYTAGAGVGDIGVEVEDPQGKNTVELLVEDKGNQVYRCVYKPMQPGPHVVKIFFAGDTIPKSPFVVQVGEACNPNACRASGRGLQPKGVRIRETTDFKVDTKAAGSGELGVTMKGPKGLEELVKQKDFLDGVYAFEYYPSTPGRYSIAITWGGHHIPKSPFEVQVGPEAGMQKVRAWGPGLHGGIVGRSADFVVESIGSEVGSLGFAIEGPSQAKIEYNDQNDGSCDVKYWPKEPGEYAVHIMCDDEDIKDSPYMAFIHPATGGYNPDLVRAYGPGLEKSGCIVNNLAEFTVDPKDAGKAPLKIFAQDGEGQRIDIQMKNRMDGTYACSYTPVKAIKHTIAVVWGGVNIPHSPYRVNIGQGSHPQKVKVFGPGVERSGLKANEPTHFTVDCTEAGEGDVSVGIKCDARVLSEDEEDVDFDIIHNANDTFTVKYVPPAAGRYTIKVLFASQEIPASPFRVKVDPSHDASKVKAEGPGLSKAGVENGKPTHFTVYTKGAGKAPLNVQFNSPLPGDAVKDLDIIDNYDYSHTVKYTPTQQGNMQVLVTYGGDPIPKSPFTVGVAAPLDLSKIKLNGLENRVEVGKDQEFTVDTRGAGGQGKLDVTILSPSRKVVPCLVTPVTGRENSTAKFIPREEGLYAVDVTYDGHPVPGSPYTVEASLPPDPSKVKAHGPGLEGGLVGKPAEFTIDTKGAGTGGLGLTVEGPCEAKIECSDNGDGTCSVSYLPTKPGEYFVNILFEEVHIPGSPFKADIEMPFDPSKVVASGPGLEHGKVGEAGLLSVDCSEAGPGALGLEAVSDSGTKAEVSIQNNKDGTYAVTYVPLTAGMYTLTMKYGGELVPHFPARVKVEPAVDTSRIKVFGPGIEGKDVFREATTDFTVDSRPLTQVGGDHIKAHIANPSGASTECFVTDNADGTYQVEYTPFEKGLHVVEVTYDDVPIPNSPFKVAVTEGCQPSRVQAQGPGLKEAFTNKPNVFTVVTRGAGIGGLGITVEGPSESKINCRDNKDGSCSAEYIPFAPGDYDVNITYGGAHIPGSPFRVPVKDVVDPSKVKIAGPGLGSGVRARVLQSFTVDSSKAGLAPLEVRVLGPRGLVEPVNVVDNGDGTHTVTYTPSQEGPYMVSVKYADEEIPRSPFKVKVLPTYDASKVTASGPGLSSYGVPASLPVDFAIDARDAGEGLLAVQITDQEGKPKRAIVHDNKDGTYAVTYIPDKTGRYMIGVTYGGDDIPLSPYRIRATQTGDASKCLATGPGIASTVKTGEEVGFVVDAKTAGKGKVTCTVLTPDGTEAEADVIENEDGTYDIFYTAAKPGTYVIYVRFGGVDIPNSPFTVMATDGEVTAVEEAPVTEEAYVPVSDMNGLGFKPFDLVIPFAVRKGEITGEVHMPSGKTATPEIVDNKDGTVTVRYAPTEVGLHEMHIKYMGSHIPESPLQFYVNYPNSGSVSAYGPGLVYGVANKTATFTIVTEDAGEGGLDLAIEGPSKAEISCIDNKDGTCTVTYLPTLPGDYSILVKYNDKHIPGSPFTAKITDDSRRCSQVKLGSAADFLLDISETDLSSLTASIKAPSGRDEPCLLKRLPNNHIGISFIPREVGEHLVSIKKNGNHVANSPVSIMVVQSEIGDARRAKVYGRGLSEGRTFEMSDFIVDTRDAGYGGISLAVEGPSKVDIQTEDLEDGTCKVSYFPTVPGVYIVSTKFADEHVPGSPFTVKISGEGRVKESITRTSRAPSVATVGSICDLNLKIPEINSSDMSAHVTSPSGRVTEAEIVPMGKNSHCVRFVPQEMGVHTVSVKYRGQHVTGSPFQFTVGPLGEGGAHKVRAGGPGLERGEAGVPAEFSIWTREAGAGGLSIAVEGPSKAEITFDDHKNGSCGVSYIAQEPGNYEVSIKFNDEHIPESPYLVPVIAPSDDARRLTVMSLQESGLKVNQPASFAIRLNGAKGKIDAKVHSPSGAVEECHVSELEPDKYAVRFIPHENGVHTIDVKFNGSHVVGSPFKVRVGEPGQAGNPALVSAYGTGLEGGTTGIQSEFFINTTRAGPGTLSVTIEGPSKVKMDCQETPEGYKVMYTPMAPGNYLISVKYGGPNHIVGSPFKAKVTGQRLVSPGSANETSSILVESVTRSSTETCYSAIPKASSDASKVTSKGAGLSKAFVGQKSSFLVDCSKAGSNMLLIGVHGPTTPCEEVSMKHVGNQQYNVTYVVKERGDYVLAVKWGEEHIPGSPFHVTVP

SEQ ID NO: 46359 - protein, 135 aa, Homo sapiens
  VARIANT 1: note = MOD_RES - Any amino acid
XLAVEGPSKVDIQTEDLEDGTCKVSYFPTVPGVYIVSTKFADEHVPEINSSDMSAHVTSPSGRVTEAEIVPMGKNSHCVRFVPQEMGVHTVSVKYRGQHVTGSPFQFTVGPLGEGGAHKVRAGGPGLERGEAGVP

SEQ ID NO: 46360 - protein, 2633 aa, Homo sapiens
MPVTEKDLAEDAPWKKIQQNTFTRWCNEHLKCVNKRIGNLQTDLSDGLRLIALLEVLSQKRMYRKYHQRPTFRQMQLENVSVALEFLDRESIKLVSIDSKAIVDGNLKLILGLVWTLILHYSISMPVWEDEGDDDAKKQTPKQRLLGWIQNKIPYLPITNFNQNWQDGKALGALVDSCAPGLCPDWESWDPQKPVDNAREAMQQADDWLGVPQVITPEEIIHPDVDEHSVMTYLSQFPKAKLKPGAPLKPKLNPKKARAYGRGIEPTGNMVKQPAKFTVDTISAGQGDVMVFVEDPEGNKEEAQVTPDSDKNKTYSVEYLPKVTGLHKVTVLFAGQHISKSPFEVSVDKAQGDASKVTAKGPGLEAVGNIANKPTYFDIYTAGAGVGDIGVEVEDPQGKNTVELLVEDKGNQVYRCVYKPMQPGPHVVKIFFAGDTIPKSPFVVQVGEACNPNACRASGRGLQPKGVRIRETTDFKVDTKAAGSGELGVTMKGPKGLEELVKQKDFLDGVYAFEYYPSTPGRYSIAITWGGHHIPKSPFEVQVGPEAGMQKVRAWGPGLHGGIVGRSADFVVESIGSEVGSLGFAIEGPSQAKIEYNDQNDGSCDVKYWPKEPGEYAVHIMCDDEDIKDSPYMAFIHPATGGYNPDLVRAYGPGLEKSGCIVNNLAEFTVDPKDAGKAPLKIFAQDGEGQRIDIQMKNRMDGTYACSYTPVKAIKHTIAVVWGGVNIPHSPYRVNIGQGSHPQKVKVFGPGVERSGLKANEPTHFTVDCTEAGEGDVSVGIKCDARVLSEDEEDVDFDIIHNANDTFTVKYVPPAAGRYTIKVLFASQEIPASPFRVKVDPSHDASKVKAEGPGLSKAGVENGKPTHFTVYTKGAGKAPLNVQFNSPLPGDAVKDLDIIDNYDYSHTVKYTPTQQGNMQVLVTYGGDPIPKSPFTVGVAAPLDLSKIKLNGLENRVEVGKDQEFTVDTRGAGGQGKLDVTILSPSRKVVPCLVTPVTGRENSTAKFIPREEGLYAVDVTYDGHPVPGSPYTVEASLPPDPSKVKAHGPGLEGGLVGKPAEFTIDTKGAGTGGLGLTVEGPCEAKIECSDNGDGTCSVSYLPTKPGEYFVNILFEEVHIPGSPFKADIEMPFDPSKVVASGPGLEHGKVGEAGLLSVDCSEAGPGALGLEAVSDSGTKAEVSIQNNKDGTYAVTYVPLTAGMYTLTMKYGGELVPHFPARVKVEPAVDTSRIKVFGPGIEGKDVFREATTDFTVDSRPLTQVGGDHIKAHIANPSGASTECFVTDNADGTYQVEYTPFEKGLHVVEVTYDDVPIPNSPFKVAVTEGCQPSRVQAQGPGLKEAFTNKPNVFTVVTRGAGIGGLGITVEGPSESKINCRDNKDGSCSAEYIPFAPGDYDVNITYGGAHIPGSPFRVPVKDVVDPSKVKIAGPGLGSGVRARVLQSFTVDSSKAGLAPLEVRVLGPRADDTDSQSWRSPLKALSEFFKGDPKGDFNKTGLVEPVNVVDNGDGTHTVTYTPSQEGPYMVSVKYADEEIPRSPFKVKVLPTYDASKVTASGPGLSSYGVPASLPVDFAIDARDAGEGLLAVQITDQEGKPKRAIVHDNKDGTYAVTYIPDKTGRYMIGVTYGGDDIPLSPYRIRATQTGDASKCLATGPGIASTVKTGEEVGFVVDAKTAGKGKVTCTVLTPDGTEAEADVIENEDGTYDIFYTAAKPGTYVIYVRFGGVDIPNSPFTVMATDGEVTAVEEAPVNACPPGFRPWVTEEAYVPVSDMNGLGFKPFDLVIPFAVRKGEITGEVHMPSGKTATPEIVDNKDGTVTVRYAPTEVGLHEMHIKYMGSHIPESPLQFYVNYPNSGSVSAYGPGLVYGVANKTATFTIVTEDAGEGGLDLAIEGPSKAEISCIDNKDGTCTVTYLPTLPGDYSILVKYNDKHIPGSPFTAKITDDSRRCSQVKLGSAADFLLDISETDLSSLTASIKAPSGRDEPCLLKRLPNNHIGISFIPREVGEHLVSIKKNGNHVANSPVSIMVVQSEIGDARRAKVYGRGLSEGRTFEMSDFIVDTRDAGYGGISLAVEGPSKVDIQTEDLEDGTCKVSYFPTVPGVYIVSTKFADEHVPGSPFTVKISGEGRVKESITRTSRAPSVATVGSICDLNLKIPEINSSDMSAHVTSPSGRVTEAEIVPMGKNSHCVRFVPQEMGVHTVSVKYRGQHVTGSPFQFTVGPLGEGGAHKVRAGGPGLERGEAGVPAEFSIWTREAGAGGLSIAVEGPSKAEITFDDHKNGSCGVSYIAQEPGNYEVSIKFNDEHIPESPYLVPVIAPSDDARRLTVMSLQESGLKVNQPASFAIRLNGAKGKIDAKVHSPSGAVEECHVSELEPDKYAVRFIPHENGVHTIDVKFNGSHVVGSPFKVRVGEPGQAGNPALVSAYGTGLEGGTTGIQSEFFINTTRAGPGTLSVTIEGPSKVKMDCQETPEGYKVMYTPMAPGNYLISVKYGGPNHIVGSPFKAKVTGQRLVSPGSANETSSILVESVTRSSTETCYSAIPKASSDASKVTSKGAGLSKAFVGQKSSFLVDCSKAGSNMLLIGVHGPTTPCEEVSMKHVGNQQYNVTYVVKERGDYVLAVKWGEEHIPGSPFHVTVP

SEQ ID NO: 46361 - protein, 2725 aa, Homo sapiens
MMNNSGYSDAGLGLGDETDEMPSTEKDLAEDAPWKKIQQNTFTRWCNEHLKCVGKRLTDLQRDLSDGLRLIALLEVLSQKRMYRKFHPRPNFRQMKLENVSVALEFLEREHIKLVSIDSKAIVDGNLKLILGLIWTLILHYSISMPMWEDEDDEDARKQTPKQRLLGWIQNKVPQLPITNFNRDWQDGKALGALVDNCAPGLCPDWEAWDPNQPVENAREAMQQADDWLGVPQVIAPEEIVDPNVDEHSVMTYLSQFPKAKLKPGAPVRSKQLNPKKAIAYGPGIEPQGNTVLQPAHFTVQTVDAGVGEVLVYIEDPEGHTEEAKVVPNNDKDRTYAVSYVPKVAGLHKVTVLFAGQNIERSPFEVNVGMALGDANKVSARGPGLEPVGNVANKPTYFDIYTAGAGTGDVAVVIVDPQGRRDTVEVALEDKGDSTFRCTYRPAMEGPHTVHVAFAGAPITRSPFPVHVSEACNPNACRASGRGLQPKGVRVKEVADFKVFTKGAGSGELKVTVKGPKGTEEPVKVREAGDGVFECEYYPVVPGKYVVTITWGGYAIPRSPFEVQVSPEAGVQKVRAWGPGLETGQVGKSADFVVEAIGTEVGTLGFSIEGPSQAKIECDDKGDGSCDVRYWPTEPGEYAVHVICDDEDIRDSPFIAHILPAPPDCFPDKVKAFGPGLEPTGCIVDKPAEFTIDARAAGKGDLKLYAQDADGCPIDIKVIPNGDGTFRCSYVPTKPIKHTIIISWGGVNVPKSPFRVNVGEGSHPERVKVYGPGVEKTGLKANEPTYFTVDCSEAGQGDVSIGIKCAPGVVGPAEADIDFDIIKNDNDTFTVKYTPPGAGRYTIMVLFANQEIPASPFHIKVDPSHDASKVKAEGPGLNRTGVEVGKPTHFTVLTKGAGKAKLDVQFAGTAKGEVVRDFEIIDNHDYSYTVKYTAVQQGNMAVTVTYGGDPVPKSPFVVNVAPPLDLSKIKVQGLNSKVAVGQEQAFSVNTRGAGGQGQLDVRMTSPSRRPIPCKLEPGGGAEAQAVRYMPPEEGPYKVDITYDGHPVPGSPFAVEGVLPPDPSKVCAYGPGLKGGLVGTPAPFSIDTKGAGTGGLGLTVEGPCEAKIECQDNGDGSCAVSYLPTEPGEYTINILFAEAHIPGSPFKATIRPVFDPSKVRASGPGLERGKVGEAATFTVDCSEAGEAELTIEILSDAGVKAEVLIHNNADGTYHITYSPAFPGTYTITIKYGGHPVPKFPTRVHVQPAVDTSGVKVSGPGVEPHGVLREVTTEFTVDARSLTATGGNHVTARVLNPSGAKTDTYVTDNGDGTYRVQYTAYEEGVHLVEVLYDEVAVPKSPFRVGVTEGCDPTRVRAFGPGLEGGLVNKANRFTVETRGAGTGGLGLAIEGPSEAKMSCKDNKDGSCTVEYIPFTPGDYDVNITFGGRPIPGSPFRVPVKDVVDPGKVKCSGPGLGAGVRARVPQTFTVDCSQAGRAPLQVAVLGPTGVAEPVEVRDNGDGTHTVHYTPATDGPYTVAVKYADQEVPRSPFKIKVLPAHDASKVRASGPGLNASGIPASLPVEFTIDARDAGEGLLTVQILDPEGKPKKANIRDNGDGTYTVSYLPDMSGRYTITIKYGGDEIPYSPFRIHALPTGDASKCLVTVSIGGHGLGACLGPRIQIGQETVITVDAKAAGEGKVTCTVSTPDGAELDVDVVENHDGTFDIYYTAPEPGKYVITIRFGGEHIPNSPFHVLACDPLPHEEEPSEVPQLRQPYAPPRPGARPTHWATEEPVVPVEPMESMLRPFNLVIPFAVQKGELTGEVRMPSGKTARPNITDNKDGTITVRYAPTEKGLHQMGIKYDGNHIPGSPLQFYVDAINSRHVSAYGPGLSHGMVNKPATFTIVTKDAGEGGLSLAVEGPSKAEITCKDNKDGTCTVSYLPTAPGDYSIIVRFDDKHIPGSPFTAKITGDDSMRTSQLNVGTSTDVSLKITESDLSQLTASIRAPSGNEEPCLLKRLPNRHIGISFTPKEVGEHVVSVRKSGKHVTNSPFKILVGPSEIGDASKVRVWGKGLSEGHTFQVAEFIVDTRNAGYGGLGLSIEGPSKVDINCEDMEDGTCKVTYCPTEPGTYIINIKFADKHVPGSPFTVKVTGEGRMKESITRRRQAPSIATIGSTCDLNLKIPGNWFQMVSAQERLTRTFTRSSHTYTRTERTEISKTRGGETKREVRVEESTQVGGDPFPAVFGDFLGRERLGSFGSITRQQEGEASSQDMTAQVTSPSGKVEAAEIVEGEDSAYSVRFVPQEMGPHTVAVKYRGQHVPGSPFQFTVGPLGEGGAHKVRAGGTGLERGVAGVPAEFSIWTREAGAGGLSIAVEGPSKAEIAFEDRKDGSCGVSYVVQEPGDYEVSIKFNDEHIPDSPFVVPVASLSDDARRLTVTSLQETGLKVNQPASFAVQLNGARGVIDARVHTPSGAVEECYVSELDSDKHTIRFIPHENGVHSIDVKFNGAHIPGSPFKIRVGEQSQAGDPGLVSAYGPGLEGGTTGVSSEFIVNTLNAGSGALSVTIDGPSKVQLDCRECPEGHVVTYTPMAPGNYLIAIKYGGPQHIVGSPFKAKVTGPRLSGGHSLHETSTVLVETVTKSSSSRGSSYSSIPKFSSDASKVVTRGPGLSQAFVGQKNSFTVDCSKAGTNMMMVGVHGPKTPCEEVYVKHMGNRVYNVTYTVKEKGDYILIVKWGDESVPGSPFKVKVP

SEQ ID NO: 46362 - protein, 2692 aa, Homo sapiens
MMNNSGYSDAGLGLGDETDEMPSTEKDLAEDAPWKKIQQNTFTRWCNEHLKCVGKRLTDLQRDLSDGLRLIALLEVLSQKRMYRKFHPRPNFRQMKLENVSVALEFLEREHIKLVSIDSKAIVDGNLKLILGLIWTLILHYSISMPMWEDEDDEDARKQTPKQRLLGWIQNKVPQLPITNFNRDWQDGKALGALVDNCAPGLCPDWEAWDPNQPVENAREAMQQADDWLGVPQVIAPEEIVDPNVDEHSVMTYLSQFPKAKLKPGAPVRSKQLNPKKAIAYGPGIEPQGNTVLQPAHFTVQTVDAGVGEVLVYIEDPEGHTEEAKVVPNNDKDRTYAVSYVPKVAGLHKVTVLFAGQNIERSPFEVNVGMALGDANKVSARGPGLEPVGNVANKPTYFDIYTAGAGTGDVAVVIVDPQGRRDTVEVALEDKGDSTFRCTYRPAMEGPHTVHVAFAGAPITRSPFPVHVSEACNPNACRASGRGLQPKGVRVKEVADFKVFTKGAGSGELKVTVKGPKGTEEPVKVREAGDGVFECEYYPVVPGKYVVTITWGGYAIPRSPFEVQVSPEAGVQKVRAWGPGLETGQVGKSADFVVEAIGTEVGTLGFSIEGPSQAKIECDDKGDGSCDVRYWPTEPGEYAVHVICDDEDIRDSPFIAHILPAPPDCFPDKVKAFGPGLEPTGCIVDKPAEFTIDARAAGKGDLKLYAQDADGCPIDIKVIPNGDGTFRCSYVPTKPIKHTIIISWGGVNVPKSPFRVNVGEGSHPERVKVYGPGVEKTGLKANEPTYFTVDCSEAGQGDVSIGIKCAPGVVGPAEADIDFDIIKNDNDTFTVKYTPPGAGRYTIMVLFANQEIPASPFHIKVDPSHDASKVKAEGPGLNRTGVEVGKPTHFTVLTKGAGKAKLDVQFAGTAKGEVVRDFEIIDNHDYSYTVKYTAVQQGNMAVTVTYGGDPVPKSPFVVNVAPPLDLSKIKVQGLNSKVAVGQEQAFSVNTRGAGGQGQLDVRMTSPSRRPIPCKLEPGGGAEAQAVRYMPPEEGPYKVDITYDGHPVPGSPFAVEGVLPPDPSKVCAYGPGLKGGLVGTPAPFSIDTKGAGTGGLGLTVEGPCEAKIECQDNGDGSCAVSYLPTEPGEYTINILFAEAHIPGSPFKATIRPVFDPSKVRASGPGLERGKVGEAATFTVDCSEAGEAELTIEILSDAGVKAEVLIHNNADGTYHITYSPAFPGTYTITIKYGGHPVPKFPTRVHVQPAVDTSGVKVSGPGVEPHGVLREVTTEFTVDARSLTATGGNHVTARVLNPSGAKTDTYVTDNGDGTYRVQYTAYEEGVHLVEVLYDEVAVPKSPFRVGVTEGCDPTRVRAFGPGLEGGLVNKANRFTVETRGAGTGGLGLAIEGPSEAKMSCKDNKDGSCTVEYIPFTPGDYDVNITFGGRPIPGSPFRVPVKDVVDPGKVKCSGPGLGAGVRARVPQTFTVDCSQAGRAPLQVAVLGPTGVAEPVEVRDNGDGTHTVHYTPATDGPYTVAVKYADQEVPRSPFKIKVLPAHDASKVRASGPGLNASGIPASLPVEFTIDARDAGEGLLTVQILDPEGKPKKANIRDNGDGTYTVSYLPDMSGRYTITIKYGGDEIPYSPFRIHALPTGDASKCLVTVSIGGHGLGACLGPRIQIGQETVITVDAKAAGEGKVTCTVSTPDGAELDVDVVENHDGTFDIYYTAPEPGKYVITIRFGGEHIPNSPFHVLATEEPVVPVEPMESMLRPFNLVIPFAVQKGELTGEVRMPSGKTARPNITDNKDGTITVRYAPTEKGLHQMGIKYDGNHIPGSPLQFYVDAINSRHVSAYGPGLSHGMVNKPATFTIVTKDAGEGGLSLAVEGPSKAEITCKDNKDGTCTVSYLPTAPGDYSIIVRFDDKHIPGSPFTAKITGDDSMRTSQLNVGTSTDVSLKITESDLSQLTASIRAPSGNEEPCLLKRLPNRHIGISFTPKEVGEHVVSVRKSGKHVTNSPFKILVGPSEIGDASKVRVWGKGLSEGHTFQVAEFIVDTRNAGYGGLGLSIEGPSKVDINCEDMEDGTCKVTYCPTEPGTYIINIKFADKHVPGSPFTVKVTGEGRMKESITRRRQAPSIATIGSTCDLNLKIPGNWFQMVSAQERLTRTFTRSSHTYTRTERTEISKTRGGETKREVRVEESTQVGGDPFPAVFGDFLGRERLGSFGSITRQQEGEASSQDMTAQVTSPSGKVEAAEIVEGEDSAYSVRFVPQEMGPHTVAVKYRGQHVPGSPFQFTVGPLGEGGAHKVRAGGTGLERGVAGVPAEFSIWTREAGAGGLSIAVEGPSKAEIAFEDRKDGSCGVSYVVQEPGDYEVSIKFNDEHIPDSPFVVPVASLSDDARRLTVTSLQETGLKVNQPASFAVQLNGARGVIDARVHTPSGAVEECYVSELDSDKHTIRFIPHENGVHSIDVKFNGAHIPGSPFKIRVGEQSQAGDPGLVSAYGPGLEGGTTGVSSEFIVNTLNAGSGALSVTIDGPSKVQLDCRECPEGHVVTYTPMAPGNYLIAIKYGGPQHIVGSPFKAKVTGPRLSGGHSLHETSTVLVETVTKSSSSRGSSYSSIPKFSSDASKVVTRGPGLSQAFVGQKNSFTVDCSKAGTNMMMVGVHGPKTPCEEVYVKHMGNRVYNVTYTVKEKGDYILIVKWGDESVPGSPFKVKVP

SEQ ID NO: 46363 - protein, 87 aa, Homo sapiens
MQLFVRAQELHTFEVTGQETVAQIKAHVASLEGIAPEDQVVLLAGAPLEDEATLGQCGVEALTTLEVAGRMLGGGQTGEEEEEDRSG

SEQ ID NO: 46364 - protein, 75 aa, Homo sapiens
MQLFVRAQELHTFEVTGQETVAQIKAHVASLEGIAPEDQVVLLAGAPLEDEATLGQCGVEALTTLEVAGRMLGGE

SEQ ID NO: 46365 - protein, 98 aa, Homo sapiens
MQLFVRAQELHTFEVTGQETVAQIKALTTLEVAGRMLGGKVHGSLARAGKVRGQTPKVAKQEKKKKKTGRAKRRMQYNRRFVNVVPTFGKKKGPNANS

SEQ ID NO: 46366 - protein, 109 aa, Homo sapiens
MQLFVRAQELHTFEVTGQETVAQIKAHVASLEGIAPEDQVVLLAGAPLEDEATLGQCGVEALTTLEVAGRMLGGKVHGSLARAGKVRGQTPKVAKQEKKKKKTGRAKRR

SEQ ID NO: 46367 - protein, 133 aa, Homo sapiens
MQLFVRAQELHTFEVTGQETVAQIKAHVASLEGIAPEDQVVLLAGAPLEDEATLGQCGVEALTTLEVAGRMLGGKVHGSLARAGKVRGQTPKVAKQEKKKKKTGRAKRRMQYNRRFVNVVPTFGKKKGPNANS

SEQ ID NO: 46368 - protein, 75 aa, Homo sapiens; identical to SEQ ID NO: 46364

SEQ ID NO: 46369 - protein, 133 aa, Homo sapiens; identical to SEQ ID NO: 46367

SEQ ID NO: 46370 - protein, 133 aa, Homo sapiens; identical to SEQ ID NO: 46367

SEQ ID NO: 46371 - protein, 520 aa, Homo sapiens
MSAGEVERLVSELSGGTGGDEEEEWLYGDENEVERPEEENASANPPSGIEDETAENGVPKPKVTETEDDSDSDSDDDEDDVHVTIGDIKTGAPQYGSYGTAPVNLNIKTGGRVYGTTGTKVKGVDLDAPGSINGVPLLEVDLDSFEDKPWRKPGADLSDYFNYGFNEDTWKAYCEKQKRIRMGLEVIPVTSTTNKITVQQGRTGNSEKETALPSTKAEFTSPPSLFKTGLPPSRRLPGAIDVIGQTITISRVEGRRRANENSNIQVLSERSATEVDNNFSKPPPFFPPGAPPTHLPPPPFLPPPPTVSTAPPLIPPPGFPPPPGAPPPSLIPTIESGHSSGYDSRSARAFPYGNVAFPHLPGSAPSWPSLVDTSKQWDYYARREKDRDRERDRDRERDRDRDRERERTRERERERDHSPTPSVFNSDEERYRYREYAERGYERHRASREKEERHRERRHREKEETRHKSSRSNSRRRHESEEGDSHRRHKHKKSKRSKEGKEAGSEPAPEQESTEATPAE

SEQ ID NO: 46372 - protein, 594 aa, Homo sapiens
MSAGEVERLVSELSGGTGGDEEEEWLYGGPWDVHVHSDLAKDLDENEVERPEEENASANPPSGIEDETAENGVPKPKVTETEDDSDSDSDDDEDDVHVTIGDIKTGAPQYGSYGTAPVNLNIKTGGRVYGTTGTKVKGVDLDAPGSINGVPLLEVDLDSFEDKPWRKPGADLSDYFNYGFNEDTWKAYCEKQKRIRMGLEVIPVTSTTNKITAEDCTMEVTPGAEIQDGRFNLFKVQQGRTGNSEKETALPSTKAEFTSPPSLFKTGLPPSRNSTSSQSQTSTASRKANSSVGKWQDRYGRAESPDLRRLPGAIDVIGQTITISRVEGRRRANENSNIQVLSERSATEVDNNFSKPPPFFPPGAPPTHLPPPPFLPPPPTVSTAPPLIPPPGFPPPPGAPPPSLIPTIESGHSSGYDSRSARAFPYGNVAFPHLPGSAPSWPSLVDTSKQWDYYARREKDRDRERDRDRERDRDRDRERERTRERERERDHSPTPSVFNSDEERYRYREYAERGYERHRASREKEERHRERRHREKEETRHKSSRSNSRRRHESEEGDSHRRHKHKKSKRSKEGKEAGSEPAPEQESTEATPAE

SEQ ID NO: 46373 - protein, 588 aa, Homo sapiens
MSAGEVERLVSELSGGTGGDEEEEWLYGDENEVERPEEENASANPPSGIEDETAENGVPKPKVTETEDDSDSDSDDDEDDVHVTIGDIKTGAPQYGSYGTAPVNLNIKTGGRVYGTTGTKVKGVDLDAPGSINGVPLLEVDLDSFEDKPWRKPGADLSDYFNYGFNEDTWKAYCEKQKRIRMGLEVIPVTSTTNKITAEDCTMEVTPGAEIQDGRFNLFKVQQGRTGNSEKETALPSTKAEFTSPPSLFKTGLPPSRNSTSSQSQTSTASRKANSSVGKWQDRYGRAESPDLRRLPGAIDVIGQTITISRVEGRRRANENSNIQVLSERSATEVDNNFSKPPPFFPPGAPPTHLPPPPFLPPPPTVSTAPPLIPPPGIPITVPPPGFPPPPGAPPPSLIPTIESGHSSGYDSRSARAFPYGNVAFPHLPGSAPSWPSLVDTSKQWDYYARREKDRDRERDRDRERDRDRDRERERTRERERERDHSPTPSVFNSDEERYRYREYAERGYERHRASREKEERHRERRHREKEETRHKSSRSNSRRRHESEEGDSHRRHKHKKSKRSKEGKEAGSEPAPEQESTEATPAE

SEQ ID NO: 46374 - protein, 152 aa, Homo sapiens
MEAVLNELVSVEDLLKFEKKFQSEKAAGSVSKSTQFEYAWCLVRSKYNDDIRKGIVLLEELLPKGSKEEQRDYVFYLAVGNYRLKEYEKALKYVRGLLQTEPQNNQAKELERLIDKAMKKDGLVGMAIVGGMALGVAGLAGLIGLAVSKSKS

SEQ ID NO: 46375 - protein, 470 aa, Homo sapiens
MFPAGPPSHSLLRLPLLQLLLLVVQAVGRGLGRASPAGGPLEDVVIERYHIPRACPREVQMGDFVRYHYNGTFEDGKKFDSSYDRNTLVAIVVGVGRLITGMDRGLMGMCVNERRRLIVPPHLGYGSIGLAGLIPPDATLYFDVVLLDVWNKEDTVQVSTLLRPPHCPRMVQDGDFVRYHYNGTLLDGTSFDTSYSRNHTYNTYIGQGYIIPGMDQGLQGACMGERRRITIPPHLAYGENGTGDKIPGSAVLIFNVHVIDFHNPADVVEIRTLSRPSETCNETTKLGDFVRYHYNCSLLDGTQLFTSHDYGAPQEATLGANKVIEGLDTGLQGMCVGERRQLIVPPHLAHGESGARGVPGSAVLLFEVELVSREDGLPTGYLFVWHKDPPANLFEDMDLNKDGEVPPEEFSTFIKAQVSEGKGRLMPGQDPEKTIGDMFQNQDRNQDGKITVDELKLKSDEDEERVHEEL

SEQ ID NO: 46376 - protein, 582 aa, Homo sapiens
MFPAGPPSHSLLRLPLLQLLLLVVQAVGRGLGRASPAGGPLEDVVIERYHIPRACPREVQMGDFVRYHYNGTFEDGKKFDSSYDRNTLVAIVVGVGRLITGMDRGLMGMCVNERRRLIVPPHLGYGSIGLAGLIPPDATLYFDVVLLDVWNKEDTVQVSTLLRPPHCPRMVQDGDFVRYHYNGTLLDGTSFDTSYSKGGTYDTYVGSGWLIKGMDQGLLGMCPGERRKIIIPPFLAYGEKGYGTVIPPQASLVFHVLLIDVHNPKDAVQLETLELPPGCVRRAGAGDFMRYHYNGSLMDGTLFDSSYSRNHTYNTYIGQGYIIPGMDQGLQGACMGERRRITIPPHLAYGENGTGDKIPGSAVLIFNVHVIDFHNPADVVEIRTLSRPSETCNETTKLGDFVRYHYNCSLLDGTQLFTSHDYGAPQEATLGANKVIEGLDTGLQGMCVGERRQLIVPPHLAHGESGARGVPGSAVLLFEVELVSREDGLPTGYLFVWHKDPPANLFEDMDLNKDGEVPPEEFSTFIKAQVSEGKGRLMPGQDPEKTIGDMFQNQDRNQDGKITVDELKLKSDEDEERVHEEL

SEQ ID NO: 46377 - protein, 542 aa, Homo sapiens
MFPAGPPSHSLLRLPLLQLLLLVVQAVGRGLGRASPAGGPLEDVVIERYHIPRACPREVQMGDFVRYHYNGTFEDGKKFDSSYDRNTLVAIVVGVGRLITGMDRGLMGMCVNERRRLIVPPHLGYGSIGLAGLIPPDATLYFDVVLLDVWNKEDTVQVSTLLRPPHCPRMVQDGDFVRYHYNGTLLDGTSFDTSYSKGGTYDTYVGSGWLIKGMDQGLLGMCPGERRKIIIPPFLAYGEKGYGTVIPPQASLVFHVLLIDVHNPKDAVQLETLELPPGCVRRAGAGDFMRYHYNGSLMDGTLFDSSYSRNHTYNTYIGQGYIIPGMDQGLQGACMGERRRITIPPHLAYGENGTGDKIPGSAVLIFNVHVIDFHNPADVVEIRTLSRPSETCNETTKLGDFVRYHYNCSLLDGTQLFTSHDYGAPQEATLGANKVIEGLDTGLQGMCVGERRQLIVPPHLAHGESGARGVPGSAVLLFEVELVSREDGLPTGYLFVWHKDPPANLFEDMDLNKDGEVPPEEFSTFIKAQVSEGKGPHAWAGP

SEQ ID NO: 46378 - protein, 81 aa, Homo sapiens
MGDFVRYHYNGTFEDGKKFDSSYDRNTLVAIVVGVGRLITGMDRGLMGMCVNERRRLIVPPHLGYGSIGLAGLIPPDATLY

SEQ ID NO: 46379 - protein, 386 aa, Homo sapiens
  VARIANT 1: note = MOD_RES - Any amino acid
XIDVHNPKDAVQLETLELPPGCVRRAGAGDFMRYHYNGSLMDGTLFDSSYSRNHTYNTYIGQGYIIPGMDQGLQGACMGERRRITIPPHLAYGENGTDSIGFLQGSAPLRPFRSGEGQPSLGREGGYGKTEPAYPQDPAVLGASVSSPVKWASHADPQGDKIPGSAVLIFNVHVIDFHNPADVVEIRTLSRPSETCNETTKLGDFVRYHYNCSLLDGTQLFTSHDYGAPQEATLGANKVIEGLDTGLQGMCVGERRQLIVPPHLAHGESGARGVPGSAVLLFEVELVSREDGLPTGYLFVWHKDPPANLFEDMDLNKDGEVPPEEFSTFIKAQVSEGKGRLMPGQDPEKTIGDMFQNQDRNQDGKITVDELKLKSDEDEERVHEEL

SEQ ID NO: 46380 - protein, 355 aa, Homo sapiens
MRYHYNGSLMDGTLFDSSYSRNHTYNTYIGQGYIIPGMDQGLQGACMGERRRITIPPHLAYGENGTDSIGFLQGSAPLRPFRSGEGQPSLGREGGYGKTEPAYPQDPAVLGASVSSPVKWASHADPQGDKIPGSAVLIFNVHVIDFHNPADVVEIRTLSRPSETCNETTKLGDFVRYHYNCSLLDGTQLFTSHDYGAPQEATLGANKVIEGLDTGLQGMCVGERRQLIVPPHLAHGESGARGVPGSAVLLFEVELVSREDGLPTGYLFVWHKDPPANLFEDMDLNKDGEVPPEEFSTFIKAQVSEGKGRLMPGQDPEKTIGDMFQNQDRNQDGKITVDELKLKSDEDEERVHEEL

SEQ ID NO: 46381 - protein, 108 aa, Homo sapiens
MGVEIETISPGDGRTFPKKGQTCVVHYTGMLQNGKKFDSSRDRNKPFKFRIGKQEVIKGFEEGAAQMSLGQRAKLTCTPDVAYGATGHPGVIPPNATLIFDVELLNLE

SEQ ID NO: 46382 - protein, 80 aa, Homo sapiens
MGVEIETISPGDGRTFPKKGQTCVVHYTGMLQNGKKFDSSRDRNKPFKFRIGKQEVIKGFEEGAAQLGPLSPLPICPHPC

SEQ ID NO: 46383 - protein, 142 aa, Homo sapiens
MRLSWFRVLTVLSICLSAVATATGAEGKRKLQIGVKKRVDHCPIKSRKGDVLHMHYTGKLEDGTEFDSSLPQNQPFVFSLGTGQVIKGWDQGLLGMCEGEKRKLVIPSELGYGERGAPPKIPGGATLVFEVELLKIERRTEL

SEQ ID NO: 46384 - protein, 142 aa, Homo sapiens; identical to SEQ ID NO: 46383

SEQ ID NO: 46385 - protein, 142 aa, Homo sapiens; identical to SEQ ID NO: 46383
